United States Patent Application Publication US 2005/0255487 A1 - sequence listing, part 32

SEQ ID NO: 868171 - RNA, 19 nt, Homo sapiens
  misc_RNA (1)...(19): siRNA sense strand
ugaccgaucucgucucauu

SEQ ID NO: 868172 - RNA, 19 nt, Homo sapiens
  misc_RNA (1)...(19): siRNA sense strand
gaacgcaccaaauaugaaa

SEQ ID NO: 868173 - RNA, 19 nt, Homo sapiens
  misc_RNA (1)...(19): siRNA sense strand
aaucagaacacgcuacuua

SEQ ID NO: 868174 - RNA, 19 nt, Homo sapiens
  misc_RNA (1)...(19): siRNA sense strand
guggguauccguaaacuua

SEQ ID NO: 868175 - RNA, 19 nt, Homo sapiens
  misc_RNA (1)...(19): siRNA sense strand
guaugaggcugaacuggaa

SEQ ID NO: 868176 - RNA, 19 nt, Homo sapiens
  misc_RNA (1)...(19): siRNA sense strand
gugagaagauuggacuaua

SEQ ID NO: 868177 - RNA, 19 nt, Homo sapiens
  misc_RNA (1)...(19): siRNA sense strand
gcaucagccucuggauuua

SEQ ID NO: 868178 - RNA, 19 nt, Homo sapiens
  misc_RNA (1)...(19): siRNA sense strand
aaacaauggcucauacaua

SEQ ID NO: 868179 - RNA, 19 nt, Homo sapiens
  misc_RNA (1)...(19): siRNA sense strand
ccacugaagucuuuaugug

SEQ ID NO: 868180 - RNA, 19 nt, Homo sapiens
  misc_RNA (1)...(19): siRNA sense strand
aggcugaacuggaacauuu

SEQ ID NO: 868181 - RNA, 19 nt, Homo sapiens
  misc_RNA (1)...(19): siRNA sense strand
ggaccucuguucaaagaug

SEQ ID NO: 868182 - RNA, 19 nt, Homo sapiens
  misc_RNA (1)...(19): siRNA sense strand
ucaaguaagccaagaaauu

SEQ ID NO: 868183 - RNA, 19 nt, Homo sapiens
  misc_RNA (1)...(19): siRNA sense strand
cagagcaaguuaauacuga

SEQ ID NO: 868184 - RNA, 19 nt, Homo sapiens
  misc_RNA (1)...(19): siRNA sense strand
gggacacgcugugcaagua

SEQ ID NO: 868185 - RNA, 19 nt, Homo sapiens
  misc_RNA (1)...(19): siRNA sense strand
cccgauaucauguuuauua

SEQ ID NO: 868186 - RNA, 19 nt, Homo sapiens
  misc_RNA (1)...(19): siRNA sense strand
cagaauaacagacaucuau

SEQ ID NO: 868187 - RNA, 19 nt, Homo sapiens
  misc_RNA (1)...(19): siRNA sense strand
cgagagaaguacuuaguuc

SEQ ID NO: 868188 - RNA, 19 nt, Homo sapiens
  misc_RNA (1)...(19): siRNA sense strand
ccacaucuauaaccuuaau

SEQ ID NO: 868189 - RNA, 19 nt, Homo sapiens
  misc_RNA (1)...(19): siRNA sense strand
gaaggaaucgguauauugg

SEQ ID NO: 868190 - RNA, 19 nt, Homo sapiens
  misc_RNA (1)...(19): siRNA sense strand
gcaaauauggaacaacuuc

SEQ ID NO: 868191 - RNA, 19 nt, Homo sapiens
  misc_RNA (1)...(19): siRNA sense strand
gaagccaaguauuacaaga

SEQ ID NO: 868192 - RNA, 19 nt, Homo sapiens
  misc_RNA (1)...(19): siRNA sense strand
ggacagucuucuuugcuau

SEQ ID NO: 868193 - RNA, 19 nt, Homo sapiens
  misc_RNA (1)...(19): siRNA sense strand
gggacagucuucuuugcua

SEQ ID NO: 868194 - RNA, 19 nt, Homo sapiens
  misc_RNA (1)...(19): siRNA sense strand
gcaggaugcaaacuuauuu

SEQ ID NO: 868195 - RNA, 19 nt, Homo sapiens
  misc_RNA (1)...(19): siRNA sense strand
ugacaugaauuacauagca

SEQ ID NO: 868196 - RNA, 19 nt, Homo sapiens
  misc_RNA (1)...(19): siRNA sense strand
gaaccuucauggacugaug

SEQ ID NO: 868197 - RNA, 19 nt, Homo sapiens
  misc_RNA (1)...(19): siRNA sense strand
aaaucaggcuggaugcaua

SEQ ID NO: 868198 - RNA, 19 nt, Homo sapiens
  misc_RNA (1)...(19): siRNA sense strand
gcaagagugagauaacaaa

SEQ ID NO: 868199 - RNA, 19 nt, Homo sapiens
  misc_RNA (1)...(19): siRNA sense strand
gcaaaucaaugggcaggau

SEQ ID NO: 868200 - RNA, 19 nt, Homo sapiens
  misc_RNA (1)...(19): siRNA sense strand
agauuggccuucauuauug

SEQ ID NO: 868201 - RNA, 19 nt, Homo sapiens
  misc_RNA (1)...(19): siRNA sense strand
ccuaguggcuguuugauag

SEQ ID NO: 868202 - RNA, 19 nt, Homo sapiens
  misc_RNA (1)...(19): siRNA sense strand
gcugcugucuguaucaauu

SEQ ID NO: 868203 - RNA, 19 nt, Homo sapiens
  misc_RNA (1)...(19): siRNA sense strand
ggaacaguuugcaucauuc

SEQ ID NO: 868204 - RNA, 19 nt, Homo sapiens
  misc_RNA (1)...(19): siRNA sense strand
guacuuuggugagaagauu

SEQ ID NO: 868205 - RNA, 19 nt, Homo sapiens
  misc_RNA (1)...(19): siRNA sense strand
ggguauccguaaacuuaua

SEQ ID NO: 868206 - RNA, 19 nt, Homo sapiens
  misc_RNA (1)...(19): siRNA sense strand
ucccacaucuauaaccuua

SEQ ID NO: 868207 - RNA, 19 nt, Homo sapiens
  misc_RNA (1)...(19): siRNA sense strand
uagauuggccuucauuauu

SEQ ID NO: 868208 - RNA, 19 nt, Homo sapiens
  misc_RNA (1)...(19): siRNA sense strand
cgaaggaaucgguauauug

SEQ ID NO: 868209 - RNA, 19 nt, Homo sapiens
  misc_RNA (1)...(19): siRNA sense strand
ccucaccaauuuagaauau

SEQ ID NO: 868210 - RNA, 19 nt, Homo sapiens
  misc_RNA (1)...(19): siRNA sense strand
aacaauggcucauacauag

SEQ ID NO: 868211 - RNA, 19 nt, Homo sapiens
  misc_RNA (1)...(19): siRNA sense strand
gcaaaaggagaauugauua

SEQ ID NO: 868212 - RNA, 19 nt, Homo sapiens
  misc_RNA (1)...(19): siRNA sense strand
ugacaaagcagagcaaguu

SEQ ID NO: 868213 - RNA, 19 nt, Homo sapiens
  misc_RNA (1)...(19): siRNA sense strand
acaguuccaucuucuauau

SEQ ID NO: 868214 - RNA, 19 nt, Homo sapiens
  misc_RNA (1)...(19): siRNA sense strand
gaauacgacgagagaagua

SEQ ID NO: 868215 - RNA, 19 nt, Homo sapiens
  misc_RNA (1)...(19): siRNA sense strand
uuacacggaugaaucagaa

SEQ ID NO: 868216 - RNA, 19 nt, Homo sapiens
  misc_RNA (1)...(19): siRNA sense strand
cagaacacgcuacuuauga

SEQ ID NO: 868217 - RNA, 19 nt, Homo sapiens
  misc_RNA (1)...(19): siRNA sense strand
gagcagaaggcuugauguu

SEQ ID NO: 868218 - RNA, 19 nt, Homo sapiens
  misc_RNA (1)...(19): siRNA sense strand
gaacaacuucauggaacua

SEQ ID NO: 868219 - RNA, 19 nt, Homo sapiens
  misc_RNA (1)...(19): siRNA sense strand
uggaacaguuugcaucauu

SEQ ID NO: 868220 - RNA, 19 nt, Homo sapiens
  misc_RNA (1)...(19): siRNA sense strand
caacgacagcuguaucuau

SEQ ID NO: 868221 - RNA, 19 nt, Homo sapiens
  misc_RNA (1)...(19): siRNA sense strand
guggaccucuguucaaaga

SEQ ID NO: 868222 - RNA, 19 nt, Homo sapiens
  misc_RNA (1)...(19): siRNA sense strand
gaaguacuuaguucaagaa

SEQ ID NO: 868223 - RNA, 19 nt, Homo sapiens
  misc_RNA (1)...(19): siRNA sense strand
gagaaguacuuaguucaag

SEQ ID NO: 868224 - RNA, 19 nt, Homo sapiens
  misc_RNA (1)...(19): siRNA sense strand
gcuggaugcauacaaauuu

SEQ ID NO: 868225 - RNA, 19 nt, Homo sapiens
  misc_RNA (1)...(19): siRNA sense strand
acugauggaugaguacuua

SEQ ID NO: 868226 - RNA, 19 nt, Homo sapiens
  misc_RNA (1)...(19): siRNA sense strand
gguggagacuggaggaaug

SEQ ID NO: 868227 - RNA, 19 nt, Homo sapiens
  misc_RNA (1)...(19): siRNA sense strand
guugauuccugcagcaauu

SEQ ID NO: 868228 - RNA, 19 nt, Homo sapiens
  misc_RNA (1)...(19): siRNA sense strand
uaaccuuaaucuccacuga

SEQ ID NO: 868229 - RNA, 19 nt, Homo sapiens
  misc_RNA (1)...(19): siRNA sense strand
uuaagucauucaucgcaua

SEQ ID NO: 868230 - RNA, 19 nt, Homo sapiens
  misc_RNA (1)...(19): siRNA sense strand
auagguaucuggcuuggaa

SEQ ID NO: 868231 - RNA, 19 nt, Homo sapiens
  misc_RNA (1)...(19): siRNA sense strand
gaugaguacuuagaaaugg

SEQ ID NO: 868232 - RNA, 19 nt, Homo sapiens
  misc_RNA (1)...(19): siRNA sense strand
agaauauccucgaacagaa

SEQ ID NO: 868233 - RNA, 19 nt, Homo sapiens
  misc_RNA (1)...(19): siRNA sense strand
gaauaauagucaaguaagc

SEQ ID NO: 868234 - RNA, 19 nt, Homo sapiens
  misc_RNA (1)...(19): siRNA sense strand
aaaaguagccagcccauua

SEQ ID NO: 868235 - RNA, 19 nt, Homo sapiens
  misc_RNA (1)...(19): siRNA sense strand
ggagaaggagccagcuauu

SEQ ID NO: 868236 - RNA, 19 nt, Homo sapiens
  misc_RNA (1)...(19): siRNA sense strand
aaacgacucugugcugaga

SEQ ID NO: 868237 - RNA, 19 nt, Homo sapiens
  misc_RNA (1)...(19): siRNA sense strand
gacaaagcagagcaaguua

SEQ ID NO: 868238 - RNA, 19 nt, Homo sapiens
  misc_RNA (1)...(19): siRNA sense strand
augccaaggugacauauuu

SEQ ID NO: 868239 - RNA, 19 nt, Homo sapiens
  misc_RNA (1)...(19): siRNA sense strand
ccuaugaguuuacuuuaca

SEQ ID NO: 868240 - RNA, 19 nt, Homo sapiens
  misc_RNA (1)...(19): siRNA sense strand
caaagcagagcaaguuaau

SEQ ID NO: 868241 - RNA, 19 nt, Homo sapiens
  misc_RNA (1)...(19): siRNA sense strand
uauccuugcugcuagauug

SEQ ID NO: 868242 - RNA, 19 nt, Homo sapiens
  misc_RNA (1)...(19): siRNA sense strand
cugauuacaucccacguuu

SEQ ID NO: 868243 - RNA, 19 nt, Homo sapiens
  misc_RNA (1)...(19): siRNA sense strand
caagauggagauuguaaau

SEQ ID NO: 868244 - RNA, 19 nt, Homo sapiens
  misc_RNA (1)...(19): siRNA sense strand
ggaagaagaggaggaaaca

SEQ ID NO: 868245 - RNA, 19 nt, Homo sapiens
  misc_RNA (1)...(19): siRNA sense strand
gagaaggagccagcuauug

SEQ ID NO: 868246 - RNA, 19 nt, Homo sapiens
  misc_RNA (1)...(19): siRNA sense strand
gcauauccuugcugcuaga

SEQ ID NO: 868247 - RNA, 19 nt, Homo sapiens
  misc_RNA (1)...(19): siRNA sense strand
ggaugaguacuuagaaaug

SEQ ID NO: 868248 - RNA, 19 nt, Homo sapiens
  misc_RNA (1)...(19): siRNA sense strand
ggaacaacuucauggaacu

SEQ ID NO: 868249 - RNA, 19 nt, Homo sapiens
  misc_RNA (1)...(19): siRNA sense strand
ucacucgucuucuuguuuc

SEQ ID NO: 868250 - RNA, 19 nt, Homo sapiens
  misc_RNA (1)...(19): siRNA sense strand
uauaaacaauggcucauac

SEQ ID NO: 868251 - RNA, 19 nt, Homo sapiens
  misc_RNA (1)...(19): siRNA sense strand
ggaacgcaccaaauaugaa

SEQ ID NO: 868252 - RNA, 19 nt, Homo sapiens
  misc_RNA (1)...(19): siRNA sense strand
gauucaccacuucauaaua

SEQ ID NO: 868253 - RNA, 19 nt, Homo sapiens
  misc_RNA (1)...(19): siRNA sense strand
ugggcaggaugcaaacuua

SEQ ID NO: 868254 - RNA, 19 nt, Homo sapiens
  misc_RNA (1)...(19): siRNA sense strand
cugcagcaauuguugguuu

SEQ ID NO: 868255 - RNA, 19 nt, Homo sapiens
  misc_RNA (1)...(19): siRNA sense strand
caccaaugcauuuguaauu

SEQ ID NO: 868256 - RNA, 19 nt, Homo sapiens
  misc_RNA (1)...(19): siRNA sense strand
caaggugacauauuuguuc

SEQ ID NO: 868257 - RNA, 19 nt, Homo sapiens
  misc_RNA (1)...(19): siRNA sense strand
gagcaaagcuugugcauaa

SEQ ID NO: 868258 - RNA, 19 nt, Homo sapiens
  misc_RNA (1)...(19): siRNA sense strand
gggagaagcuucacuguau

SEQ ID NO: 868259 - RNA, 19 nt, Homo sapiens
  misc_RNA (1)...(19): siRNA sense strand
caacaaggaugaacugguu

SEQ ID NO: 868260 - RNA, 19 nt, Homo sapiens
  misc_RNA (1)...(19): siRNA sense strand
gaagcaccuuucccucuua

SEQ ID NO: 868261 - RNA, 19 nt, Homo sapiens
  misc_RNA (1)...(19): siRNA sense strand
caacaaggguaucaucaga

SEQ ID NO: 868262 - RNA, 19 nt, Homo sapiens
  misc_RNA (1)...(19): siRNA sense strand
gaaaugagauggaaaagga

SEQ ID NO: 868263 - RNA, 19 nt, Homo sapiens
  misc_RNA (1)...(19): siRNA sense strand
ccauuaagcuggagaacaa

SEQ ID NO: 868264 - RNA, 19 nt, Homo sapiens
  misc_RNA (1)...(19): siRNA sense strand
caagcaggcugagaauaua

SEQ ID NO: 868265 - RNA, 19 nt, Homo sapiens
  misc_RNA (1)...(19): siRNA sense strand
gcaagcaggcugagaauau

SEQ ID NO: 868266 - RNA, 19 nt, Homo sapiens
  misc_RNA (1)...(19): siRNA sense strand
gaucgggaauucagaguug

SEQ ID NO: 868267 - RNA, 19 nt, Homo sapiens
  misc_RNA (1)...(19): siRNA sense strand
cagcaacgcucuuuaccuu

SEQ ID NO: 868268 - RNA, 19 nt, Homo sapiens
  misc_RNA (1)...(19): siRNA sense strand
gcaacgcucuuuaccuuca

SEQ ID NO: 868269 - RNA, 19 nt, Homo sapiens
  misc_RNA (1)...(19): siRNA sense strand
gaauaugaccuuccugaug

SEQ ID NO: 868270 - RNA, 19 nt, Homo sapiens
  misc_RNA (1)...(19): siRNA sense strand
ucaacuaccuggauacuca

SEQ ID NO: 868271 - RNA, 19 nt, Homo sapiens
  misc_RNA (1)...(19): siRNA sense strand
ugaagaagguacuggaaug

SEQ ID NO: 868272 - RNA, 19 nt, Homo sapiens
  misc_RNA (1)...(19): siRNA sense strand
gaagagagccagaagaacu

SEQ ID NO: 868273 - RNA, 19 nt, Homo sapiens
  misc_RNA (1)...(19): siRNA sense strand
cagaagaacuaaagaaacu

SEQ ID NO: 868274 - RNA, 19 nt, Homo sapiens
  misc_RNA (1)...(19): siRNA sense strand
aaacuuguauagcugcaua

SEQ ID NO: 868275 - RNA, 19 nt, Homo sapiens
  misc_RNA (1)...(19): siRNA sense strand
ggaagcugaugcaagagaa

SEQ ID NO: 868276 - RNA, 19 nt, Homo sapiens
  misc_RNA (1)...(19): siRNA sense strand
gacauugaguggcaacuga

SEQ ID NO: 868277 - RNA, 19 nt, Homo sapiens
  misc_RNA (1)...(19): siRNA sense strand
ggagaucgccaaggaauau

SEQ ID NO: 868278 - RNA, 19 nt, Homo sapiens
  misc_RNA (1)...(19): siRNA sense strand
gagaugagcccgagaaggu

SEQ ID NO: 868279 - RNA, 19 nt, Homo sapiens
  misc_RNA (1)...(19): siRNA sense strand
gagagucaagagaaauuua

SEQ ID NO: 868280 - RNA, 19 nt, Homo sapiens
  misc_RNA (1)...(19): siRNA sense strand
agaagagagucaagagaaa

SEQ ID NO: 868281 - RNA, 19 nt, Homo sapiens
  misc_RNA (1)...(19): siRNA sense strand
acuagaagcuggcagaaga

SEQ ID NO: 868282 - RNA, 19 nt, Homo sapiens
  misc_RNA (1)...(19): siRNA sense strand
ggcaucaacuaccuggaua

SEQ ID NO: 868283 - RNA, 19 nt, Homo sapiens
  misc_RNA (1)...(19): siRNA sense strand
ggagaagcuucacuguaug

SEQ ID NO: 868284 - RNA, 19 nt, Homo sapiens
  misc_RNA (1)...(19): siRNA sense strand
agucagccgugaacaauuu

SEQ ID NO: 868285 - RNA, 19 nt, Homo sapiens
  misc_RNA (1)...(19): siRNA sense strand
gaaauuccagcaagccauu

SEQ ID NO: 868286 - RNA, 19 nt, Homo sapiens
  misc_RNA (1)...(19): siRNA sense strand
caugggagacuuugaguuu

SEQ ID NO: 868287 - RNA, 19 nt, Homo sapiens
  misc_RNA (1)...(19): siRNA sense strand
gcaccuuucccucuuauau

SEQ ID NO: 868288 - RNA, 19 nt, Homo sapiens
  misc_RNA (1)...(19): siRNA sense strand
ggaaaaggaauaugaauga

SEQ ID NO: 868289 - RNA, 19 nt, Homo sapiens
  misc_RNA (1)...(19): siRNA sense strand
cagaagagagccagaagaa

SEQ ID NO: 868290 - RNA, 19 nt, Homo sapiens
  misc_RNA (1)...(19): siRNA sense strand
cgagagcccuugacaacau

SEQ ID NO: 868291 - RNA, 19 nt, Homo sapiens
  misc_RNA (1)...(19): siRNA sense strand
agaaagugcugaagaaggu

SEQ ID NO: 868292 - RNA, 19 nt, Homo sapiens
  misc_RNA (1)...(19): siRNA sense strand
agaaauaggagaaacgaaa

SEQ ID NO: 868293 - RNA, 19 nt, Homo sapiens
  misc_RNA (1)...(19): siRNA sense strand
cauagggaaugcccagauu

SEQ ID NO: 868294 - RNA, 19 nt, Homo sapiens
  misc_RNA (1)...(19): siRNA sense strand
ugacaacauuggcagaguu

SEQ ID NO: 868295 - RNA, 19 nt, Homo sapiens
  misc_RNA (1)...(19): siRNA sense strand
aggaugaacugguuggaaa

SEQ ID NO: 868296 - RNA, 19 nt, Homo sapiens
  misc_RNA (1)...(19): siRNA sense strand
cagaagagagucaagagaa

SEQ ID NO: 868297 - RNA, 19 nt, Homo sapiens
  misc_RNA (1)...(19): siRNA sense strand
ccaacuacguggagaaucu

SEQ ID NO: 868298 - RNA, 19 nt, Homo sapiens
  misc_RNA (1)...(19): siRNA sense strand
cgaagcaccuuucccucuu

SEQ ID NO: 868299 - RNA, 19 nt, Homo sapiens
  misc_RNA (1)...(19): siRNA sense strand
ggaugaagaccugaucaaa

SEQ ID NO: 868300 - RNA, 19 nt, Homo sapiens
  misc_RNA (1)...(19): siRNA sense strand
ugaacugguuggaaacuug

SEQ ID NO: 868301 - RNA, 19 nt, Homo sapiens
  misc_RNA (1)...(19): siRNA sense strand
gaucaaaggcaccaugaag

SEQ ID NO: 868302 - RNA, 19 nt, Homo sapiens
  misc_RNA (1)...(19): siRNA sense strand
gagagcccuugacaacauu

SEQ ID NO: 868303 - RNA, 19 nt, Homo sapiens
  misc_RNA (1)...(19): siRNA sense strand
gaagagagucaagagaaau

SEQ ID NO: 868304 - RNA, 19 nt, Homo sapiens
  misc_RNA (1)...(19): siRNA sense strand
gagaagcuucacuguauga

SEQ ID NO: 868305 - RNA, 19 nt, Homo sapiens
  misc_RNA (1)...(19): siRNA sense strand
aggcuucgcuccagaguga

SEQ ID NO: 868306 - RNA, 19 nt, Homo sapiens
  misc_RNA (1)...(19): siRNA sense strand
acaaggguaucaucagaga

SEQ ID NO: 868307 - RNA, 19 nt, Homo sapiens
  misc_RNA (1)...(19): siRNA sense strand
ggcgagaccuugcgaagca

SEQ ID NO: 868308 - RNA, 19 nt, Homo sapiens
  misc_RNA (1)...(19): siRNA sense strand
cugagaaagugcugaagaa

SEQ ID NO: 868309 - RNA, 19 nt, Homo sapiens
  misc_RNA (1)...(19): siRNA sense strand
ccucacagacagcccauua

SEQ ID NO: 868310 - RNA, 19 nt, Homo sapiens
  misc_RNA (1)...(19): siRNA sense strand
gcccaugaaacaccucuua

SEQ ID NO: 868311 - RNA, 19 nt, Homo sapiens
  misc_RNA (1)...(19): siRNA sense strand
ggaauucagaguuggcauu

SEQ ID NO: 868312 - RNA, 19 nt, Homo sapiens
  misc_RNA (1)...(19): siRNA sense strand
agaagguacuggaauggaa

SEQ ID NO: 868313 - RNA, 19 nt, Homo sapiens
  misc_RNA (1)...(19): siRNA sense strand
gaugaagaccugaucaaag

SEQ ID NO: 868314 - RNA, 19 nt, Homo sapiens
  misc_RNA (1)...(19): siRNA sense strand
uggaaggccucgcucaaga

SEQ ID NO: 868315 - RNA, 19 nt, Homo sapiens
  misc_RNA (1)...(19): siRNA sense strand
gaaccagaagaacuaaaga

SEQ ID NO: 868316 - RNA, 19 nt, Homo sapiens
  misc_RNA (1)...(19): siRNA sense strand
ggcacaagaucaggagaaa

SEQ ID NO: 868317 - RNA, 19 nt, Homo sapiens
  misc_RNA (1)...(19): siRNA sense strand
gcaaagcuugugcauaaca

SEQ ID NO: 868318 - RNA, 19 nt, Homo sapiens
  misc_RNA (1)...(19): siRNA sense strand
gcagaagagagucaagaga

SEQ ID NO: 868319 - RNA, 19 nt, Homo sapiens
  misc_RNA (1)...(19): siRNA sense strand
gugaagcagugggaccaua

SEQ ID NO: 868320 - RNA, 19 nt, Homo sapiens
  misc_RNA (1)...(19): siRNA sense strand
ggagaagaccuggcuguuc

SEQ ID NO: 868321 - RNA, 19 nt, Homo sapiens
  misc_RNA (1)...(19): siRNA sense strand
ccgagaagguggugaagca

SEQ ID NO: 868322 - RNA, 19 nt, Homo sapiens
  misc_RNA (1)...(19): siRNA sense strand
ugacccagcuuucuguaag

SEQ ID NO: 868323 - RNA, 19 nt, Homo sapiens
  misc_RNA (1)...(19): siRNA sense strand
guuggaaacuuguauagcu

SEQ ID NO: 868324 - RNA, 19 nt, Homo sapiens
  misc_RNA (1)...(19): siRNA sense strand
aggaagagguacccaacaa

SEQ ID NO: 868325 - RNA, 19 nt, Homo sapiens
  misc_RNA (1)...(19): siRNA sense strand
uaagcaagcaggcugagaa

SEQ ID NO: 868326 - RNA, 19 nt, Homo sapiens
  misc_RNA (1)...(19): siRNA sense strand
agacagaugaggacgauga

SEQ ID NO: 868327 - RNA, 19 nt, Homo sapiens
  misc_RNA (1)...(19): siRNA sense strand
gcagaagagagccagaaga

SEQ ID NO: 868328 - RNA, 19 nt, Homo sapiens
  misc_RNA (1)...(19): siRNA sense strand
ggaaccagaagaacuaaag

SEQ ID NO: 868329 - RNA, 19 nt, Homo sapiens
  misc_RNA (1)...(19): siRNA sense strand
acaggaaccagaagaacua

SEQ ID NO: 868330 - RNA, 19 nt, Homo sapiens
  misc_RNA (1)...(19): siRNA sense strand
ucaagagccuggaggacau

SEQ ID NO: 868331 - RNA, 19 nt, Homo sapiens
  misc_RNA (1)...(19): siRNA sense strand
gcagacaggaaccagaaga

SEQ ID NO: 868332 - RNA, 19 nt, Homo sapiens
  misc_RNA (1)...(19): siRNA sense strand
gaagcuggcagaagagagu

SEQ ID NO: 868333 - RNA, 19 nt, Homo sapiens
  misc_RNA (1)...(19): siRNA sense strand
ggacaugaggagagugaga

SEQ ID NO: 868334 - RNA, 19 nt, Homo sapiens
  misc_RNA (1)...(19): siRNA sense strand
gacaacauuggcagaguuu

SEQ ID NO: 868335 - RNA, 19 nt, Homo sapiens
  misc_RNA (1)...(19): siRNA sense strand
ggagagagcaaagcuugug

SEQ ID NO: 868336 - RNA, 19 nt, Homo sapiens
  misc_RNA (1)...(19): siRNA sense strand
gcucaaagugcuuccugaa

SEQ ID NO: 868337 - RNA, 19 nt, Homo sapiens
  misc_RNA (1)...(19): siRNA sense strand
cacaagaucaggagaaaca

SEQ ID NO: 868338 - RNA, 19 nt, Homo sapiens
  misc_RNA (1)...(19): siRNA sense strand
agaauuaggcacaagauca

SEQ ID NO: 868339 - RNA, 19 nt, Homo sapiens
  misc_RNA (1)...(19): siRNA sense strand
caagagagaaggacaugag

SEQ ID NO: 868340 - RNA, 19 nt, Homo sapiens
  misc_RNA (1)...(19): siRNA sense strand
gaugggagacuuggagaga

SEQ ID NO: 868341 - RNA, 19 nt, Homo sapiens
  misc_RNA (1)...(19): siRNA sense strand
gaaauaggagaaacgaaaa

SEQ ID NO: 868342 - RNA, 19 nt, Homo sapiens
  misc_RNA (1)...(19): siRNA sense strand
ggagaaauaggagaaacga

SEQ ID NO: 868343 - RNA, 19 nt, Homo sapiens
  misc_RNA (1)...(19): siRNA sense strand
gaugagaaagagacagaug

SEQ ID NO: 868344 - RNA, 19 nt, Homo sapiens
  misc_RNA (1)...(19): siRNA sense strand
gcugagaaagugcugaaga

SEQ ID NO: 868345 - RNA, 19 nt, Homo sapiens
  misc_RNA (1)...(19): siRNA sense strand
acagacagcccauuacauc

SEQ ID NO: 868346 - RNA, 19 nt, Homo sapiens
  misc_RNA (1)...(19): siRNA sense strand
aggccucgcucaagaguga

SEQ ID NO: 868347 - RNA, 19 nt, Homo sapiens
  misc_RNA (1)...(19): siRNA sense strand
augaagaccugaucaaagg

SEQ ID NO: 868348 - RNA, 19 nt, Homo sapiens
  misc_RNA (1)...(19): siRNA sense strand
gaacugguuggaaacuugu

SEQ ID NO: 868349 - RNA, 19 nt, Homo sapiens
  misc_RNA (1)...(19): siRNA sense strand
accggaagcugaugcaaga

SEQ ID NO: 868350 - RNA, 19 nt, Homo sapiens
  misc_RNA (1)...(19): siRNA sense strand
cagcagacaggaaccagaa

SEQ ID NO: 868351 - RNA, 19 nt, Homo sapiens
  misc_RNA (1)...(19): siRNA sense strand
guacaccaugggagacuuu

SEQ ID NO: 868352 - RNA, 19 nt, Homo sapiens
  misc_RNA (1)...(19): siRNA sense strand
ugaggagagugagagauga

SEQ ID NO: 868353 - RNA, 19 nt, Homo sapiens
  misc_RNA (1)...(19): siRNA sense strand
gaagcugaugcaagagaaa

SEQ ID NO: 868354 - RNA, 19 nt, Homo sapiens
  misc_RNA (1)...(19): siRNA sense strand
gaagaagguacuggaaugg

SEQ ID NO: 868355 - RNA, 19 nt, Homo sapiens
  misc_RNA (1)...(19): siRNA sense strand
ccagaauuauggcgagaag

SEQ ID NO: 868356 - RNA, 19 nt, Homo sapiens
  misc_RNA (1)...(19): siRNA sense strand
gaaagugcugaagaaggua

SEQ ID NO: 868357 - RNA, 19 nt, Homo sapiens
  misc_RNA (1)...(19): siRNA sense strand
gaaaggcaauuaucaagaa

SEQ ID NO: 868358 - RNA, 19 nt, Homo sapiens
  misc_RNA (1)...(19): siRNA sense strand
ggaagaagaugccaauuac

SEQ ID NO: 868359 - RNA, 19 nt, Homo sapiens
  misc_RNA (1)...(19): siRNA sense strand
ucaaagaguuuauccacua

SEQ ID NO: 868360 - RNA, 19 nt, Homo sapiens
  misc_RNA (1)...(19): siRNA sense strand
caagaaauaucgaccaaau

SEQ ID NO: 868361 - RNA, 19 nt, Homo sapiens
  misc_RNA (1)...(19): siRNA sense strand
cuacuaggcucuuaacaaa

SEQ ID NO: 868362 - RNA, 19 nt, Homo sapiens
  misc_RNA (1)...(19): siRNA sense strand
cuagauagcuuugaccuaa

SEQ ID NO: 868363 - RNA, 19 nt, Homo sapiens
  misc_RNA (1)...(19): siRNA sense strand
caucaucagucacaucuuu

SEQ ID NO: 868364 - RNA, 19 nt, Homo sapiens
  misc_RNA (1)...(19): siRNA sense strand
gcugaaauuucccaacuuu

SEQ ID NO: 868365 - RNA, 19 nt, Homo sapiens
  misc_RNA (1)...(19): siRNA sense strand
caaaggagcugaaauuucc

SEQ ID NO: 868366 - RNA, 19 nt, Homo sapiens
  misc_RNA (1)...(19): siRNA sense strand
acagagaaguugauugaaa

SEQ ID NO: 868367 - RNA, 19 nt, Homo sapiens
  misc_RNA (1)...(19): siRNA sense strand
uaaaggaucugacuagaac

SEQ ID NO: 868368 - RNA, 19 nt, Homo sapiens
  misc_RNA (1)...(19): siRNA sense strand
gaucaagcuuuaaguaagu

SEQ ID NO: 868369 - RNA, 19 nt, Homo sapiens
  misc_RNA (1)...(19): siRNA sense strand
gaacugagagacaauuaau

SEQ ID NO: 868370 - RNA, 19 nt, Homo sapiens
  misc_RNA (1)...(19): siRNA sense strand
gaaaagaauucugauggua

SEQ ID NO: 868371 - RNA, 19 nt, Homo sapiens
  misc_RNA (1)...(19): siRNA sense strand
gagagacaauuaaucuaug

SEQ ID NO: 868372 - RNA, 19 nt, Homo sapiens
  misc_RNA (1)...(19): siRNA sense strand
ggaucaagcuuuaaguaag

SEQ ID NO: 868373 - RNA, 19 nt, Homo sapiens
  misc_RNA (1)...(19): siRNA sense strand
gagaagagaagagaacaaa

SEQ ID NO: 868374 - RNA, 19 nt, Homo sapiens
  misc_RNA (1)...(19): siRNA sense strand
ccacaaugcuguccacuac

SEQ ID NO: 868375 - RNA, 19 nt, Homo sapiens
  misc_RNA (1)...(19): siRNA sense strand
ggaaaggcaauuaucaaga

SEQ ID NO: 868376 - RNA, 19 nt, Homo sapiens
  misc_RNA (1)...(19): siRNA sense strand
gaauucugaugguacuaaa

SEQ ID NO: 868377 - RNA, 19 nt, Homo sapiens
  misc_RNA (1)...(19): siRNA sense strand
gaugaucggugcuccaaag

SEQ ID NO: 868378 - RNA, 19 nt, Homo sapiens
  misc_RNA (1)...(19): siRNA sense strand
uggaagaagaugccaauua

SEQ ID NO: 868379 - RNA, 19 nt, Homo sapiens
  misc_RNA (1)...(19): siRNA sense strand
gaucuggagucaaguucaa

SEQ ID NO: 868380 - RNA, 19 nt, Homo sapiens
  misc_RNA (1)...(19): siRNA sense strand
ggagucaaguucaaagagu

SEQ ID NO: 868381 - RNA, 19 nt, Homo sapiens
  misc_RNA (1)...(19): siRNA sense strand
gagcugaaauuucccaacu

SEQ ID NO: 868382 - RNA, 19 nt, Homo sapiens
  misc_RNA (1)...(19): siRNA sense strand
gggaucaagcuuuaaguaa

SEQ ID NO: 868383 - RNA, 19 nt, Homo sapiens
  misc_RNA (1)...(19): siRNA sense strand
uagggaaauuugagacuuu

SEQ ID NO: 868384 - RNA, 19 nt, Homo sapiens
  misc_RNA (1)...(19): siRNA sense strand
gagaucuacuaggcucuua

SEQ ID NO: 868385 - RNA, 19 nt, Homo sapiens
  misc_RNA (1)...(19): siRNA sense strand
uaauggaucuggagucaag

SEQ ID NO: 868386 - RNA, 19 nt, Homo sapiens
  misc_RNA (1)...(19): siRNA sense strand
gauauauacccgcuuaaau

SEQ ID NO: 868387 - RNA, 19 nt, Homo sapiens
  misc_RNA (1)...(19): siRNA sense strand
ucaaggagcuaagacuguu

SEQ ID NO: 868388 - RNA, 19 nt, Homo sapiens
  misc_RNA (1)...(19): siRNA sense strand
cuacuccucuucauguauu

SEQ ID NO: 868389 - RNA, 19 nt, Homo sapiens
  misc_RNA (1)...(19): siRNA sense strand
ccaaaugccugugaagaag

SEQ ID NO: 868390 - RNA, 19 nt, Homo sapiens
  misc_RNA (1)...(19): siRNA sense strand
uacaacaucucccacaaug

SEQ ID NO: 868391 - RNA, 19 nt, Homo sapiens
  misc_RNA (1)...(19): siRNA sense strand
ggauauauacccgcuuaaa

SEQ ID NO: 868392 - RNA, 19 nt, Homo sapiens
  misc_RNA (1)...(19): siRNA sense strand
gagacaguauuuaaaggau

SEQ ID NO: 868393 - RNA, 19 nt, Homo sapiens
  misc_RNA (1)...(19): siRNA sense strand
gagucaaguucaaagaguu

SEQ ID NO: 868394 - RNA, 19 nt, Homo sapiens
  misc_RNA (1)...(19): siRNA sense strand
gaaauuugagacuuuggaa

SEQ ID NO: 868395 - RNA, 19 nt, Homo sapiens
  misc_RNA (1)...(19): siRNA sense strand
gacauucacccuuuaaaca

SEQ ID NO: 868396 - RNA, 19 nt, Homo sapiens
  misc_RNA (1)...(19): siRNA sense strand
gaaauuucccaacuuuaag

SEQ ID NO: 868397 - RNA, 19 nt, Homo sapiens
  misc_RNA (1)...(19): siRNA sense strand
ccaaaggagcugaaauuuc

SEQ ID NO: 868398 - RNA, 19 nt, Homo sapiens
  misc_RNA (1)...(19): siRNA sense strand
guagggaaauuugagacuu

SEQ ID NO: 868399 - RNA, 19 nt, Homo sapiens
  misc_RNA (1)...(19): siRNA sense strand
cguguuugaucaacuauga

SEQ ID NO: 868400 - RNA, 19 nt, Homo sapiens
  misc_RNA (1)...(19): siRNA sense strand
uauacccgcuuaaauacuu

SEQ ID NO: 868401 - RNA, 19 nt, Homo sapiens
  misc_RNA (1)...(19): siRNA sense strand
ggaagcauuugaagaagcu

SEQ ID NO: 868402 - RNA, 19 nt, Homo sapiens
  misc_RNA (1)...(19): siRNA sense strand
agggauauauacccgcuua

SEQ ID NO: 868403 - RNA, 19 nt, Homo sapiens
  misc_RNA (1)...(19): siRNA sense strand
guacccagaaucaugagua

SEQ ID NO: 868404 - RNA, 19 nt, Homo sapiens
  misc_RNA (1)...(19): siRNA sense strand
gacuagaacugagagacaa

SEQ ID NO: 868405 - RNA, 19 nt, Homo sapiens
  misc_RNA (1)...(19): siRNA sense strand
cauucacccuuuaaacaaa

SEQ ID NO: 868406 - RNA, 19 nt, Homo sapiens
  misc_RNA (1)...(19): siRNA sense strand
caguggacauucacccuuu

SEQ ID NO: 868407 - RNA, 19 nt, Homo sapiens
  misc_RNA (1)...(19): siRNA sense strand
agaagaugccaauuacuuu

SEQ ID NO: 868408 - RNA, 19 nt, Homo sapiens
  misc_RNA (1)...(19): siRNA sense strand
gcaagucuggauugaagaa

SEQ ID NO: 868409 - RNA, 19 nt, Homo sapiens
  misc_RNA (1)...(19): siRNA sense strand
aaacugaggagacccaaga

SEQ ID NO: 868410 - RNA, 19 nt, Homo sapiens
  misc_RNA (1)...(19): siRNA sense strand
guuauuaccauccaguauu

SEQ ID NO: 868411 - RNA, 19 nt, Homo sapiens
  misc_RNA (1)...(19): siRNA sense strand
cauacaacaucucccacaa

SEQ ID NO: 868412 - RNA, 19 nt, Homo sapiens
  misc_RNA (1)...(19): siRNA sense strand
cagagaaguugauugaaaa

SEQ ID NO: 868413 - RNA, 19 nt, Homo sapiens
  misc_RNA (1)...(19): siRNA sense strand
ugaaagaaccaaugcucaa

SEQ ID NO: 868414 - RNA, 19 nt, Homo sapiens
  misc_RNA (1)...(19): siRNA sense strand
aaggcuggcuguuccaauu

SEQ ID NO: 868415 - RNA, 19 nt, Homo sapiens
  misc_RNA (1)...(19): siRNA sense strand
gaaagaaccaaugcucaag

SEQ ID NO: 868416 - RNA, 19 nt, Homo sapiens
  misc_RNA (1)...(19): siRNA sense strand
uuucccaacuuuaaggaua

SEQ ID NO: 868417 - RNA, 19 nt, Homo sapiens
  misc_RNA (1)...(19): siRNA sense strand
caaagaguuuauccacuac

SEQ ID NO: 868418 - RNA, 19 nt, Homo sapiens
  misc_RNA (1)...(19): siRNA sense strand
gugaucccauggaaagauu

SEQ ID NO: 868419 - RNA, 19 nt, Homo sapiens
  misc_RNA (1)...(19): siRNA sense strand
ggacauucacccuuuaaac

SEQ ID NO: 868420 - RNA, 19 nt, Homo sapiens
  misc_RNA (1)...(19): siRNA sense strand
aagaagaugccaauuacuu

SEQ ID NO: 868421 - RNA, 19 nt, Homo sapiens
  misc_RNA (1)...(19): siRNA sense strand
ggugagucaucaucaguca

SEQ ID NO: 868422 - RNA, 19 nt, Homo sapiens
  misc_RNA (1)...(19): siRNA sense strand
ugaggagacccaagagaaa

SEQ ID NO: 868423 - RNA, 19 nt, Homo sapiens
  misc_RNA (1)...(19): siRNA sense strand
uagauagcuuugaccuaaa

SEQ ID NO: 868424 - RNA, 19 nt, Homo sapiens
  misc_RNA (1)...(19): siRNA sense strand
gacaguauuuaaaggaucu

SEQ ID NO: 868425 - RNA, 19 nt, Homo sapiens
  misc_RNA (1)...(19): siRNA sense strand
gggcuacuccucuucaugu

SEQ ID NO: 868426 - RNA, 19 nt, Homo sapiens
  misc_RNA (1)...(19): siRNA sense strand
ggaaauuugagacuuugga

SEQ ID NO: 868427 - RNA, 19 nt, Homo sapiens
  misc_RNA (1)...(19): siRNA sense strand
gcugauauuuggaguagcu

SEQ ID NO: 868428 - RNA, 19 nt, Homo sapiens
  misc_RNA (1)...(19): siRNA sense strand
gugcugauauuuggaguag

SEQ ID NO: 868429 - RNA, 19 nt, Homo sapiens
  misc_RNA (1)...(19): siRNA sense strand
gaucugacuagaacugaga

SEQ ID NO: 868430 - RNA, 19 nt, Homo sapiens
  misc_RNA (1)...(19): siRNA sense strand
caacaucucccacaaugcu

SEQ ID NO: 868431 - RNA, 19 nt, Homo sapiens
  misc_RNA (1)...(19): siRNA sense strand
ggaaaagaauucugauggu

SEQ ID NO: 868432 - RNA, 19 nt, Homo sapiens
  misc_RNA (1)...(19): siRNA sense strand
gcuuaaauacuuacaccaa

SEQ ID NO: 868433 - RNA, 19 nt, Homo sapiens
  misc_RNA (1)...(19): siRNA sense strand
gaagaugccaauuacuuuu

SEQ ID NO: 868434 - RNA, 19 nt, Homo sapiens
  misc_RNA (1)...(19): siRNA sense strand
gaccaaaugccugugaaga

SEQ ID NO: 868435 - RNA, 19 nt, Homo sapiens
  misc_RNA (1)...(19): siRNA sense strand
agauuaguaucagccuuua

SEQ ID NO: 868436 - RNA, 19 nt, Homo sapiens
  misc_RNA (1)...(19): siRNA sense strand
ggagaagagaagagaacaa

SEQ ID NO: 868437 - RNA, 19 nt, Homo sapiens
  misc_RNA (1)...(19): siRNA sense strand
uagaacugagagacaauua

SEQ ID NO: 868438 - RNA, 19 nt, Homo sapiens
  misc_RNA (1)...(19): siRNA sense strand
uuauuaccauccaguauuc

SEQ ID NO: 868439 - RNA, 19 nt, Homo sapiens
  misc_RNA (1)...(19): siRNA sense strand
aaacucugcuauccguguu

SEQ ID NO: 868440 - RNA, 19 nt, Homo sapiens
  misc_RNA (1)...(19): siRNA sense strand
ccagaaucaugaguacaga

SEQ ID NO: 868441 - RNA, 19 nt, Homo sapiens
  misc_RNA (1)...(19): siRNA sense strand
uuaaaggaucugacuagaa

SEQ ID NO: 868442 - RNA, 19 nt, Homo sapiens
  misc_RNA (1)...(19): siRNA sense strand
cauggaaagauuaguauca

SEQ ID NO: 868443 - RNA, 19 nt, Homo sapiens
  misc_RNA (1)...(19): siRNA sense strand
gauugaagaacaacauaca

SEQ ID NO: 868444 - RNA, 19 nt, Homo sapiens
  misc_RNA (1)...(19): siRNA sense strand
ggaaaaucuucuacucaau

SEQ ID NO: 868445 - RNA, 19 nt, Homo sapiens
  misc_RNA (1)...(19): siRNA sense strand
gucgugagacaguauuuaa

SEQ ID NO: 868446 - RNA, 19 nt, Homo sapiens
  misc_RNA (1)...(19): siRNA sense strand
aaagaauucugaugguacu

SEQ ID NO: 868447 - RNA, 19 nt, Homo sapiens
  misc_RNA (1)...(19): siRNA sense strand
uacaguauccagaaucuau

SEQ ID NO: 868448 - RNA, 19 nt, Homo sapiens
  misc_RNA (1)...(19): siRNA sense strand
uaacaaguucagcaacaug

SEQ ID NO: 868449 - RNA, 19 nt, Homo sapiens
  misc_RNA (1)...(19): siRNA sense strand
gccugaggauguacgagaa

SEQ ID NO: 868450 - RNA, 19 nt, Homo sapiens
  misc_RNA (1)...(19): siRNA sense strand
ucucugugcugauauuugg

SEQ ID NO: 868451 - RNA, 19 nt, Homo sapiens
  misc_RNA (1)...(19): siRNA sense strand
uaggcacucuuccgaugaa

SEQ ID NO: 868452 - RNA, 19 nt, Homo sapiens
  misc_RNA (1)...(19): siRNA sense strand
uugcaagucuggauugaag

SEQ ID NO: 868453 - RNA, 19 nt, Homo sapiens
  misc_RNA (1)...(19): siRNA sense strand
ggcuacuccucuucaugua

SEQ ID NO: 868454 - RNA, 19 nt, Homo sapiens
  misc_RNA (1)...(19): siRNA sense strand
cuuccucucugugcugaua

SEQ ID NO: 868455 - RNA, 19 nt, Homo sapiens
  misc_RNA (1)...(19): siRNA sense strand
agaaucaugaguacagaaa

SEQ ID NO: 868456 - RNA, 19 nt, Homo sapiens
  misc_RNA (1)...(19): siRNA sense strand
ugagacaguauuuaaagga

SEQ ID NO: 868457 - RNA, 19 nt, Homo sapiens
  misc_RNA (1)...(19): siRNA sense strand
gcccacgucuggaaagcua

SEQ ID NO: 868458 - RNA, 19 nt, Homo sapiens
  misc_RNA (1)...(19): siRNA sense strand
gguggacgcugaacauacc

SEQ ID NO: 868459 - RNA, 19 nt, Homo sapiens
  misc_RNA (1)...(19): siRNA sense strand
uaaagaggaugauggagaa

SEQ ID NO: 868460 - RNA, 19 nt, Homo sapiens
  misc_RNA (1)...(19): siRNA sense strand
agaaguacauggaguuuga

SEQ ID NO: 868461 - RNA, 19 nt, Homo sapiens
  misc_RNA (1)...(19): siRNA sense strand
gaacaaugaaggcgagauu

SEQ ID NO: 868462 - RNA, 19 nt, Homo sapiens
  misc_RNA (1)...(19): siRNA sense strand
agauugaccugaugucuuu

SEQ ID NO: 868463 - RNA, 19 nt, Homo sapiens
  misc_RNA (1)...(19): siRNA sense strand
gaaguacagugaugaagag

SEQ ID NO: 868464 - RNA, 19 nt, Homo sapiens
  misc_RNA (1)...(19): siRNA sense strand
gaccagaaguacagugaug

SEQ ID NO: 868465 - RNA, 19 nt, Homo sapiens
  misc_RNA (1)...(19): siRNA sense strand
ggucggcuguccucaaguu

SEQ ID NO: 868466 - RNA, 19 nt, Homo sapiens
  misc_RNA (1)...(19): siRNA sense strand
ucacagccuucaaagagaa

SEQ ID NO: 868467 - RNA, 19 nt, Homo sapiens
  misc_RNA (1)...(19): siRNA sense strand
guacagugaugaagagaac

SEQ ID NO: 868468 - RNA, 19 nt, Homo sapiens
  misc_RNA (1)...(19): siRNA sense strand
gcucacagccuucaaagag

SEQ ID NO: 868469 - RNA, 19 nt, Homo sapiens
  misc_RNA (1)...(19): siRNA sense strand
ucaaagagaaguacaugga

SEQ ID NO: 868470 - RNA, 19 nt, Homo sapiens
  misc_RNA (1)...(19): siRNA sense strand
aguuugaccugaacaauga

SEQ ID NO: 868471 - RNA, 19 nt, Homo sapiens
  misc_RNA (1)...(19): siRNA sense strand
ucaaguuagucaugauguu

SEQ ID NO: 868472 - RNA, 19 nt, Homo sapiens
  misc_RNA (1)...(19): siRNA sense strand
caaguuagucaugauguuu

SEQ ID NO: 868473 - RNA, 19 nt, Homo sapiens
  misc_RNA (1)...(19): siRNA sense strand
gagauugaccugaugucuu

SEQ ID NO: 868474 - RNA, 19 nt, Homo sapiens
  misc_RNA (1)...(19): siRNA sense strand
ccagagagagacauugcua

SEQ ID NO: 868475 - RNA, 19 nt, Homo sapiens
  misc_RNA (1)...(19): siRNA sense strand
agacccaccuggagaugaa

SEQ ID NO: 868476 - RNA, 19 nt, Homo sapiens
  misc_RNA (1)...(19): siRNA sense strand
gaguuugaccugaacaaug

SEQ ID NO: 868477 - RNA, 19 nt, Homo sapiens
  misc_RNA (1)...(19): siRNA sense strand
aagagaaccuuccagaaaa

SEQ ID NO: 868478 - RNA, 19 nt, Homo sapiens
  misc_RNA (1)...(19): siRNA sense strand
agaggaggcuggccgagau

SEQ ID NO: 868479 - RNA, 19 nt, Homo sapiens
  misc_RNA (1)...(19): siRNA sense strand
gucaugauguuugaaggaa

SEQ ID NO: 868480 - RNA, 19 nt, Homo sapiens
  misc_RNA (1)...(19): siRNA sense strand
gagacuuugugaacaugau

SEQ ID NO: 868481 - RNA, 19 nt, Homo sapiens
  misc_RNA (1)...(19): siRNA sense strand
agaaguacagugaugaaga

SEQ ID NO: 868482 - RNA, 19 nt, Homo sapiens
  misc_RNA (1)...(19): siRNA sense strand
cgagaucaaccgggaguuu

SEQ ID NO: 868483 - RNA, 19 nt, Homo sapiens
  misc_RNA (1)...(19): siRNA sense strand
acauggaguuugaccugaa

SEQ ID NO: 868484 - RNA, 19 nt, Homo sapiens
  misc_RNA (1)...(19): siRNA sense strand
ccagaaguacagugaugaa

SEQ ID NO: 868485 - RNA, 19 nt, Homo sapiens
  misc_RNA (1)...(19): siRNA sense strand
caaccgggaguuucugugu

SEQ ID NO: 868486 - RNA, 19 nt, Homo sapiens
  misc_RNA (1)...(19): siRNA sense strand
gcguucggcuugcucaaag

SEQ ID NO: 868487 - RNA, 19 nt, Homo sapiens
  misc_RNA (1)...(19): siRNA sense strand
ucaugauguuugaaggaaa

SEQ ID NO: 868488 - RNA, 19 nt, Homo sapiens
  misc_RNA (1)...(19): siRNA sense strand
guccucaaguuagucauga

SEQ ID NO: 868489 - RNA, 19 nt, Homo sapiens
  misc_RNA (1)...(19): siRNA sense strand
uauauccuaccgagacuuu

SEQ ID NO: 868490 - RNA, 19 nt, Homo sapiens
  misc_RNA (1)...(19): siRNA sense strand
gagaucaaccgggaguuuc

SEQ ID NO: 868491 - RNA, 19 nt, Homo sapiens
  misc_RNA (1)...(19): siRNA sense strand
gagaaguacauggaguuug

SEQ ID NO: 868492 - RNA, 19 nt, Homo sapiens
  misc_RNA (1)...(19): siRNA sense strand
aaagcucacagccuucaaa

SEQ ID NO: 868493 - RNA, 19 nt, Homo sapiens
  misc_RNA (1)...(19): siRNA sense strand
ggaguuugaccugaacaau

SEQ ID NO: 868494 - RNA, 19 nt, Homo sapiens
  misc_RNA (1)...(19): siRNA sense strand
cagcaacagguuccaagga

SEQ ID NO: 868495 - RNA, 19 nt, Homo sapiens
  misc_RNA (1)...(19): siRNA sense strand
ccaagacccaccuggagau

SEQ ID NO: 868496 - RNA, 19 nt, Homo sapiens
  misc_RNA (1)...(19): siRNA sense strand
caugauguuugaaggaaaa

SEQ ID NO: 868497 - RNA, 19 nt, Homo sapiens
  misc_RNA (1)...(19): siRNA sense strand
cggcuguccucaaguuagu

SEQ ID NO: 868498 - RNA, 19 nt, Homo sapiens
  misc_RNA (1)...(19): siRNA sense strand
gaugaucucagaggugaca

SEQ ID NO: 868499 - RNA, 19 nt, Homo sapiens
  misc_RNA (1)...(19): siRNA sense strand
accgggaguuucuguguga

SEQ ID NO: 868500 - RNA, 19 nt, Homo sapiens
  misc_RNA (1)...(19): siRNA sense strand
ggaaggcguucggcuugcu

SEQ ID NO: 868501 - RNA, 19 nt, Homo sapiens
  misc_RNA (1)...(19): siRNA sense strand
aagagaaguacauggaguu

SEQ ID NO: 868502 - RNA, 19 nt, Homo sapiens
  misc_RNA (1)...(19): siRNA sense strand
uaccgagacuuugugaaca

SEQ ID NO: 868503 - RNA, 19 nt, Homo sapiens
  misc_RNA (1)...(19): siRNA sense strand
gugaccagaaguacaguga

SEQ ID NO: 868504 - RNA, 19 nt, Homo sapiens
  misc_RNA (1)...(19): siRNA sense strand
gagaauaacuggauugaag

SEQ ID NO: 868505 - RNA, 19 nt, Homo sapiens
  misc_RNA (1)...(19): siRNA sense strand
ggaagaaacaacauaaaga

SEQ ID NO: 868506 - RNA, 19 nt, Homo sapiens
  misc_RNA (1)...(19): siRNA sense strand
ugaaagggauccacauaau

SEQ ID NO: 868507 - RNA, 19 nt, Homo sapiens
  misc_RNA (1)...(19): siRNA sense strand
gagaagcuuucacugucua

SEQ ID NO: 868508 - RNA, 19 nt, Homo sapiens
  misc_RNA (1)...(19): siRNA sense strand
gaaagggauccacauaaug

SEQ ID NO: 868509 - RNA, 19 nt, Homo sapiens
  misc_RNA (1)...(19): siRNA sense strand
ucuacaaacugcauugaaa

SEQ ID NO: 868510 - RNA, 19 nt, Homo sapiens
  misc_RNA (1)...(19): siRNA sense strand
ucgaagaccugguguuugu

SEQ ID NO: 868511 - RNA, 19 nt, Homo sapiens
  misc_RNA (1)...(19): siRNA sense strand
aaagggauccacauaauga

SEQ ID NO: 868512 - RNA, 19 nt, Homo sapiens
  misc_RNA (1)...(19): siRNA sense strand
gcaaucccuuggaagagaa

SEQ ID NO: 868513 - RNA, 19 nt, Homo sapiens
  misc_RNA (1)...(19): siRNA sense strand
cuaauaaccugguaaaaga

SEQ ID NO: 868514 - RNA, 19 nt, Homo sapiens
  misc_RNA (1)...(19): siRNA sense strand
ugaggaagaagacaacuaa

SEQ ID NO: 868515 - RNA, 19 nt, Homo sapiens
  misc_RNA (1)...(19): siRNA sense strand
gagagugcccaaacugaaa

SEQ ID NO: 868516 - RNA, 19 nt, Homo sapiens
  misc_RNA (1)...(19): siRNA sense strand
gaauaacuggauugaagaa

SEQ ID NO: 868517 - RNA, 19 nt, Homo sapiens
  misc_RNA (1)...(19): siRNA sense strand
ggauccacauaaugaagaa

SEQ ID NO: 868518 - RNA, 19 nt, Homo sapiens
  misc_RNA (1)...(19): siRNA sense strand
uaacuggauugaagaagca

SEQ ID NO: 868519 - RNA, 19 nt, Homo sapiens
  misc_RNA (1)...(19): siRNA sense strand
ggcaaucccuuggaagaga

SEQ ID NO: 868520 - RNA, 19 nt, Homo sapiens
  misc_RNA (1)...(19): siRNA sense strand
uguccaugcuugcuaauug

SEQ ID NO: 868521 - RNA, 19 nt, Homo sapiens
  misc_RNA (1)...(19): siRNA sense strand
ugaagaagcaaccaagaga

SEQ ID NO: 868522 - RNA, 19 nt, Homo sapiens
  misc_RNA (1)...(19): siRNA sense strand
guugaaagggauccacaua

SEQ ID NO: 868523 - RNA, 19 nt, Homo sapiens
  misc_RNA (1)...(19): siRNA sense strand
caaccugaauggcuuaaaa

SEQ ID NO: 868524 - RNA, 19 nt, Homo sapiens
  misc_RNA (1)...(19): siRNA sense strand
gcuaauugcgagaagcuuu

SEQ ID NO: 868525 - RNA, 19 nt, Homo sapiens
  misc_RNA (1)...(19): siRNA sense strand
gaaauugaagauucucuac

SEQ ID NO: 868526 - RNA, 19 nt, Homo sapiens
  misc_RNA (1)...(19): siRNA sense strand
gggcugaguuugugaagcu

SEQ ID NO: 868527 - RNA, 19 nt, Homo sapiens
  misc_RNA (1)...(19): siRNA sense strand
ugaagauucucuacauguc

SEQ ID NO: 868528 - RNA, 19 nt, Homo sapiens
  misc_RNA (1)...(19): siRNA sense strand
ccaagagagugcccaaacu

SEQ ID NO: 868529 - RNA, 19 nt, Homo sapiens
  misc_RNA (1)...(19): siRNA sense strand
aagauucucuacaugucua

SEQ ID NO: 868530 - RNA, 19 nt, Homo sapiens
  misc_RNA (1)...(19): siRNA sense strand
cuguggaucuccuacaauu

SEQ ID NO: 868531 - RNA, 19 nt, Homo sapiens
  misc_RNA (1)...(19): siRNA sense strand
gaagaccugguguuuguag

SEQ ID NO: 868532 - RNA, 19 nt, Homo sapiens
  misc_RNA (1)...(19): siRNA sense strand
agacugggcugaguuugug

SEQ ID NO: 868533 - RNA, 19 nt, Homo sapiens
  misc_RNA (1)...(19): siRNA sense strand
ggacacauuagaagaacug

SEQ ID NO: 868534 - RNA, 19 nt, Homo sapiens
  misc_RNA (1)...(19): siRNA sense strand
caagagagugcccaaacug

SEQ ID NO: 868535 - RNA, 19 nt, Homo sapiens
  misc_RNA (1)...(19): siRNA sense strand
uagaagaacuguggaucuc

SEQ ID NO: 868536 - RNA, 19 nt, Homo sapiens
  misc_RNA (1)...(19): siRNA sense strand
ccacauaaugaagaaauug

SEQ ID NO: 868537 - RNA, 19 nt, Homo sapiens
  misc_RNA (1)...(19): siRNA sense strand
cgagaagcuuucacugucu

SEQ ID NO: 868538 - RNA, 19 nt, Homo sapiens
  misc_RNA (1)...(19): siRNA sense strand
ccucgaagaccugguguuu

SEQ ID NO: 868539 - RNA, 19 nt, Homo sapiens
  misc_RNA (1)...(19): siRNA sense strand
gaacuguggaucuccuaca

SEQ ID NO: 868540 - RNA, 19 nt, Homo sapiens
  misc_RNA (1)...(19): siRNA sense strand
gaagauucucuacaugucu

SEQ ID NO: 868541 - RNA, 19 nt, Homo sapiens
  misc_RNA (1)...(19): siRNA sense strand
uguaggcaaucccuuggaa

SEQ ID NO: 868542 - RNA, 19 nt, Homo sapiens
  misc_RNA (1)...(19): siRNA sense strand
uaaaggggaugaggaagaa

SEQ ID NO: 868543 - RNA, 19 nt, Homo sapiens
  misc_RNA (1)...(19): siRNA sense strand
gggauccacauaaugaaga

SEQ ID NO: 868544 - RNA, 19 nt, Homo sapiens
  misc_RNA (1)...(19): siRNA sense strand
uugaaagggauccacauaa

SEQ ID NO: 868545 - RNA, 19 nt, Homo sapiens
  misc_RNA (1)...(19): siRNA sense strand
ccuuguccaugcuugcuaa

SEQ ID NO: 868546 - RNA, 19 nt, Homo sapiens
  misc_RNA (1)...(19): siRNA sense strand
gggaugaggaagaagacaa

SEQ ID NO: 868547 - RNA, 19 nt, Homo sapiens
  misc_RNA (1)...(19): siRNA sense strand
agaauaacuggauugaaga

SEQ ID NO: 868548 - RNA, 19 nt, Homo sapiens
  misc_RNA (1)...(19): siRNA sense strand
gcugagaauaacuggauug

SEQ ID NO: 868549 - RNA, 19 nt, Homo sapiens
  misc_RNA (1)...(19): siRNA sense strand
agagagugcccaaacugaa

SEQ ID NO: 868550 - RNA, 19 nt, Homo sapiens
  misc_RNA (1)...(19): siRNA sense strand
ggcaguaggggacacauua

SEQ ID NO: 868551 - RNA, 19 nt, Homo sapiens
  misc_RNA (1)...(19): siRNA sense strand
guaaaagacugggcugagu

SEQ ID NO: 868552 - RNA, 19 nt, Homo sapiens
  misc_RNA (1)...(19): siRNA sense strand
uaggcaaucccuuggaaga

SEQ ID NO: 868553 - RNA, 19 nt, Homo sapiens
  misc_RNA (1)...(19): siRNA sense strand
caugucuaauaaccuggua

SEQ ID NO: 868554 - RNA, 19 nt, Homo sapiens
  misc_RNA (1)...(19): siRNA sense strand
guggaucuccuacaauuuu

SEQ ID NO: 868555 - RNA, 19 nt, Homo sapiens
  misc_RNA (1)...(19): siRNA sense strand
aagagagugcccaaacuga

SEQ ID NO: 868556 - RNA, 19 nt, Homo sapiens
  misc_RNA (1)...(19): siRNA sense strand
ggauugaagaagcaaccaa

SEQ ID NO: 868557 - RNA, 19 nt, Homo sapiens
  misc_RNA (1)...(19): siRNA sense strand
ugucuaauaaccugguaaa

SEQ ID NO: 868558 - RNA, 19 nt, Homo sapiens
  misc_RNA (1)...(19): siRNA sense strand
agcuuucacugucuacaaa

SEQ ID NO: 868559 - RNA, 19 nt, Homo sapiens
  misc_RNA (1)...(19): siRNA sense strand
caacugaccuuggcaugga

SEQ ID NO: 868560 - RNA, 19 nt, Homo sapiens
  misc_RNA (1)...(19): siRNA sense strand
ggacgaagcccuagaaacg

SEQ ID NO: 868561 - RNA, 19 nt, Homo sapiens
  misc_RNA (1)...(19): siRNA sense strand
ccuuggagcucuuaucuca

SEQ ID NO: 868562 - RNA, 19 nt, Homo sapiens
  misc_RNA (1)...(19): siRNA sense strand
ccucagagauggacacaac

SEQ ID NO: 868563 - RNA, 19 nt, Homo sapiens
  misc_RNA (1)...(19): siRNA sense strand
gagauggacacaacagaga

SEQ ID NO: 868564 - RNA, 19 nt, Homo sapiens
  misc_RNA (1)...(19): siRNA sense strand
uaucucagguggacaugga

SEQ ID NO: 868565 - RNA, 19 nt, Homo sapiens
  misc_RNA (1)...(19): siRNA sense strand
gcauggauccugcuagaag

SEQ ID NO: 868566 - RNA, 19 nt, Homo sapiens
  misc_RNA (1)...(19): siRNA sense strand
caacugcgaagaugauauc

SEQ ID NO: 868567 - RNA, 19 nt, Homo sapiens
  misc_RNA (1)...(19): siRNA sense strand
gcccgucacugcuucaaca

SEQ ID NO: 868568 - RNA, 19 nt, Homo sapiens
  misc_RNA (1)...(19): siRNA sense strand
ccagcugccuuaccuaugg

SEQ ID NO: 868569 - RNA, 19 nt, Homo sapiens
  misc_RNA (1)...(19): siRNA sense strand
uggcauggauccugcuaga

SEQ ID NO: 868570 - RNA, 19 nt, Homo sapiens
  misc_RNA (1)...(19): siRNA sense strand
cagcugaucugggcaaagg

SEQ ID NO: 868571 - RNA, 19 nt, Homo sapiens
  misc_RNA (1)...(19): siRNA sense strand
gagcccagcugccuuaccu

SEQ ID NO: 868572 - RNA, 19 nt, Homo sapiens
  misc_RNA (1)...(19): siRNA sense strand
ugacgugggugcugcaacu

SEQ ID NO: 868573 - RNA, 19 nt, Homo sapiens
  misc_RNA (1)...(19): siRNA sense strand
cgucacugcuucaacaucu

SEQ ID NO: 868574 - RNA, 19 nt, Homo sapiens
  misc_RNA (1)...(19): siRNA sense strand
cuagaaacgcagcugaaga

SEQ ID NO: 868575 - RNA, 19 nt, Homo sapiens
  misc_RNA (1)...(19): siRNA sense strand
ugugagcccagcugccuua

SEQ ID NO: 868576 - RNA, 19 nt, Homo sapiens
  misc_RNA (1)...(19): siRNA sense strand
gcagacgggacggaccuuu

SEQ ID NO: 868577 - RNA, 19 nt, Homo sapiens
  misc_RNA (1)...(19): siRNA sense strand
gcccagcugccuuaccuau

SEQ ID NO: 868578 - RNA, 19 nt, Homo sapiens
  misc_RNA (1)...(19): siRNA sense strand
cagaaucccuccccaccuu

SEQ ID NO: 868579 - RNA, 19 nt, Homo sapiens
  misc_RNA (1)...(19): siRNA sense strand
ggagugccgagcccugaau

SEQ ID NO: 868580 - RNA, 19 nt, Homo sapiens
  misc_RNA (1)...(19): siRNA sense strand
uagaaacgcagcugaagac

SEQ ID NO: 868581 - RNA, 19 nt, Homo sapiens
  misc_RNA (1)...(19): siRNA sense strand
ggacgcuucucggcuacag

SEQ ID NO: 868582 - RNA, 19 nt, Homo sapiens
  misc_RNA (1)...(19): siRNA sense strand
gcacugagcugcaggaucu

SEQ ID NO: 868583 - RNA, 19 nt, Homo sapiens
  misc_RNA (1)...(19): siRNA sense strand
gaucaaggccaagauguua

SEQ ID NO: 868584 - RNA, 19 nt, Homo sapiens
  misc_RNA (1)...(19): siRNA sense strand
ggagcggaaugaacucaaa

SEQ ID NO: 868585 - RNA, 19 nt, Homo sapiens
  misc_RNA (1)...(19): siRNA sense strand
ggaagcagcggaagaagau

SEQ ID NO: 868586 - RNA, 19 nt, Homo sapiens
  misc_RNA (1)...(19): siRNA sense strand
gaacucaaagccaaagugu

SEQ ID NO: 868587 - RNA, 19 nt, Homo sapiens
  misc_RNA (1)...(19): siRNA sense strand
gaagaucaaggccaagaug

SEQ ID NO: 868588 - RNA, 19 nt, Homo sapiens
  misc_RNA (1)...(19): siRNA sense strand
gggaggaguuugagcagau

SEQ ID NO: 868589 - RNA, 19 nt, Homo sapiens
  misc_RNA (1)...(19): siRNA sense strand
gagcuuguguaccaucuag

SEQ ID NO: 868590 - RNA, 19 nt, Homo sapiens
  misc_RNA (1)...(19): siRNA sense strand
ccgcggagcuuguguacca

SEQ ID NO: 868591 - RNA, 19 nt, Homo sapiens
  misc_RNA (1)...(19): siRNA sense strand
ggauccugcucuccgauga

SEQ ID NO: 868592 - RNA, 19 nt, Homo sapiens
  misc_RNA (1)...(19): siRNA sense strand
aggaggaacuggccuacuu

SEQ ID NO: 868593 - RNA, 19 nt, Homo sapiens
  misc_RNA (1)...(19): siRNA sense strand
guaaagcugaauccucuga

SEQ ID NO: 868594 - RNA, 19 nt, Homo sapiens
  misc_RNA (1)...(19): siRNA sense strand
gaaugaacucaaagccaaa

SEQ ID NO: 868595 - RNA, 19 nt, Homo sapiens
  misc_RNA (1)...(19): siRNA sense strand
cgacuccgcaggcuaaaga

SEQ ID NO: 868596 - RNA, 19 nt, Homo sapiens
  misc_RNA (1)...(19): siRNA sense strand
ccaaaguguuccugcucaa

SEQ ID NO: 868597 - RNA, 19 nt, Homo sapiens
  misc_RNA (1)...(19): siRNA sense strand
acucaaagccaaaguguuc

SEQ ID NO: 868598 - RNA, 19 nt, Homo sapiens
  misc_RNA (1)...(19): siRNA sense strand
ggaggaacuggccuacuuc

SEQ ID NO: 868599 - RNA, 19 nt, Homo sapiens
  misc_RNA (1)...(19): siRNA sense strand
gaguuucuuuggccuaugg

SEQ ID NO: 868600 - RNA, 19 nt, Homo sapiens
  misc_RNA (1)...(19): siRNA sense strand
cagaguuucuuuggccuau

SEQ ID NO: 868601 - RNA, 19 nt, Homo sapiens
  misc_RNA (1)...(19): siRNA sense strand
ggaggaguuugagcagauc

SEQ ID NO: 868602 - RNA, 19 nt, Homo sapiens
  misc_RNA (1)...(19): siRNA sense strand
cgcuggagcucuuggaaca

SEQ ID NO: 868603 - RNA, 19 nt, Homo sapiens
  misc_RNA (1)...(19): siRNA sense strand
acgcugagcugcggcacaa

SEQ ID NO: 868604 - RNA, 19 nt, Homo sapiens
  misc_RNA (1)...(19): siRNA sense strand
cagagagcagugaggauga

SEQ ID NO: 868605 - RNA, 19 nt, Homo sapiens
  misc_RNA (1)...(19): siRNA sense strand
gaggaggcccaaccacagu

SEQ ID NO: 868606 - RNA, 19 nt, Homo sapiens
  misc_RNA (1)...(19): siRNA sense strand
guuagggacaccagaggaa

SEQ ID NO: 868607 - RNA, 19 nt, Homo sapiens
  misc_RNA (1)...(19): siRNA sense strand
cggaagcagcggaagaaga

SEQ ID NO: 868608 - RNA, 19 nt, Homo sapiens
  misc_RNA (1)...(19): siRNA sense strand
aaauacagaguuucuuugg

SEQ ID NO: 868609 - RNA, 19 nt, Homo sapiens
  misc_RNA (1)...(19): siRNA sense strand
ugaaaggacaguacaauuu

SEQ ID NO: 868610 - RNA, 19 nt, Homo sapiens
  misc_RNA (1)...(19): siRNA sense strand
ggagggaccuggagcagau

SEQ ID NO: 868611 - RNA, 19 nt, Homo sapiens
  misc_RNA (1)...(19): siRNA sense strand
gugagaagaucauggaguu

SEQ ID NO: 868612 - RNA, 19 nt, Homo sapiens
  misc_RNA (1)...(19): siRNA sense strand
ggaagucgaccguguguga

SEQ ID NO: 868613 - RNA, 19 nt, Homo sapiens
  misc_RNA (1)...(19): siRNA sense strand
ccagaugccuuugauaaug

SEQ ID NO: 868614 - RNA, 19 nt, Homo sapiens
  misc_RNA (1)...(19): siRNA sense strand
cagaugccuuugauaauga

SEQ ID NO: 868615 - RNA, 19 nt, Homo sapiens
  misc_RNA (1)...(19): siRNA sense strand
gcacaggacucugaagaac

SEQ ID NO: 868616 - RNA, 19 nt, Homo sapiens
  misc_RNA (1)...(19): siRNA sense strand
gaaaggacaguacaauuuu

SEQ ID NO: 868617 - RNA, 19 nt, Homo sapiens
  misc_RNA (1)...(19): siRNA sense strand
gaaguaugccgaugugauc

SEQ ID NO: 868618 - RNA, 19 nt, Homo sapiens
  misc_RNA (1)...(19): siRNA sense strand
aaagaaguaugccgaugug

SEQ ID NO: 868619 - RNA, 19 nt, Homo sapiens
  misc_RNA (1)...(19): siRNA sense strand
caaagaaguaugccgaugu

SEQ ID NO: 868620 - RNA, 19 nt, Homo sapiens
  misc_RNA (1)...(19): siRNA sense strand
cacgaggaguggacaauau

SEQ ID NO: 868621 - RNA, 19 nt, Homo sapiens
  misc_RNA (1)...(19): siRNA sense strand
gaacaucguggagggcaaa

SEQ ID NO: 868622 - RNA, 19 nt, Homo sapiens
  misc_RNA (1)...(19): siRNA sense strand
acaggacucugaagaacau

SEQ ID NO: 868623 - RNA, 19 nt, Homo sapiens
  misc_RNA (1)...(19): siRNA sense strand
ggagauccgggacauguuc

SEQ ID NO: 868624 - RNA, 19 nt, Homo sapiens
  misc_RNA (1)...(19): siRNA sense strand
ggacgugguucuguuugag

SEQ ID NO: 868625 - RNA, 19 nt, Homo sapiens
  misc_RNA (1)...(19): siRNA sense strand
caggcugucucgaagaguu

SEQ ID NO: 868626 - RNA, 19 nt, Homo sapiens
  misc_RNA (1)...(19): siRNA sense strand
gcacauccaggacauucug

SEQ ID NO: 868627 - RNA, 19 nt, Homo sapiens
  misc_RNA (1)...(19): siRNA sense strand
gaauggugacaucugcaaa

SEQ ID NO: 868628 - RNA, 19 nt, Homo sapiens
  misc_RNA (1)...(19): siRNA sense strand
gaugcugaccucuggcaaa

SEQ ID NO: 868629 - RNA, 19 nt, Homo sapiens
  misc_RNA (1)...(19): siRNA sense strand
cggacgugguucuguuuga

SEQ ID NO: 868630 - RNA, 19 nt, Homo sapiens
  misc_RNA (1)...(19): siRNA sense strand
ccaaugggcggagcuacaa

SEQ ID NO: 868631 - RNA, 19 nt, Homo sapiens
  misc_RNA (1)...(19): siRNA sense strand
cacucaagguuaccagaga

SEQ ID NO: 868632 - RNA, 19 nt, Homo sapiens
  misc_RNA (1)...(19): siRNA sense strand
gacgucaggcugucucgaa

SEQ ID NO: 868633 - RNA, 19 nt, Homo sapiens
  misc_RNA (1)...(19): siRNA sense strand
gagggcaucuugguguucu

SEQ ID NO: 868634 - RNA, 19 nt, Homo sapiens
  misc_RNA (1)...(19): siRNA sense strand
gaccgugugugagaagauc

SEQ ID NO: 868635 - RNA, 19 nt, Homo sapiens
  misc_RNA (1)...(19): siRNA sense strand
gugacacacucaagguuac

SEQ ID NO: 868636 - RNA, 19 nt, Homo sapiens
  misc_RNA (1)...(19): siRNA sense strand
caggagauccgggacaugu

SEQ ID NO: 868637 - RNA, 19 nt, Homo sapiens
  misc_RNA (1)...(19): siRNA sense strand
cugcggacgugguucuguu

SEQ ID NO: 868638 - RNA, 19 nt, Homo sapiens
  misc_RNA (1)...(19): siRNA sense strand
gagcuacaagcggaccuuu

SEQ ID NO: 868639 - RNA, 19 nt, Homo sapiens
  misc_RNA (1)...(19): siRNA sense strand
uugaaaggacaguacaauu

SEQ ID NO: 868640 - RNA, 19 nt, Homo sapiens
  misc_RNA (1)...(19): siRNA sense strand
uggaguugcugggacagaa

SEQ ID NO: 868641 - RNA, 19 nt, Homo sapiens
  misc_RNA (1)...(19): siRNA sense strand
gccaggacagguucuacaa

SEQ ID NO: 868642 - RNA, 19 nt, Homo sapiens
  misc_RNA (1)...(19): siRNA sense strand
gcaucuugguguucuacag

SEQ ID NO: 868643 - RNA, 19 nt, Homo sapiens
  misc_RNA (1)...(19): siRNA sense strand
ugccuuugauaaugauuug

SEQ ID NO: 868644 - RNA, 19 nt, Homo sapiens
  misc_RNA (1)...(19): siRNA sense strand
auccagaugccuuugauaa

SEQ ID NO: 868645 - RNA, 19 nt, Homo sapiens
  misc_RNA (1)...(19): siRNA sense strand
gccaggagauccgggacau

SEQ ID NO: 868646 - RNA, 19 nt, Homo sapiens
  misc_RNA (1)...(19): siRNA sense strand
gacagaacgagguggaaca

SEQ ID NO: 868647 - RNA, 19 nt, Homo sapiens
  misc_RNA (1)...(19): siRNA sense strand
agaaguaugccgaugugau

SEQ ID NO: 868648 - RNA, 19 nt, Homo sapiens
  misc_RNA (1)...(19): siRNA sense strand
gaucgaagcccucagcaua

SEQ ID NO: 868649 - RNA, 19 nt, Homo sapiens
  misc_RNA (1)...(19): siRNA sense strand
ugacaagccugcccugcua

SEQ ID NO: 868650 - RNA, 19 nt, Homo sapiens
  misc_RNA (1)...(19): siRNA sense strand
caauacagcucaagaucga

SEQ ID NO: 868651 - RNA, 19 nt, Homo sapiens
  misc_RNA (1)...(19): siRNA sense strand
gcaacagaaucgagcaaga

SEQ ID NO: 868652 - RNA, 19 nt, Homo sapiens
  misc_RNA (1)...(19): siRNA sense strand
gcagugaugagaccaauug

SEQ ID NO: 868653 - RNA, 19 nt, Homo sapiens
  misc_RNA (1)...(19): siRNA sense strand
ggccacagaccaugcaaua

SEQ ID NO: 868654 - RNA, 19 nt, Homo sapiens
  misc_RNA (1)...(19): siRNA sense strand
ccaccuaccuggccuucaa

SEQ ID NO: 868655 - RNA, 19 nt, Homo sapiens
  misc_RNA (1)...(19): siRNA sense strand
agaggcagcugaccuggaa

SEQ ID NO: 868656 - RNA, 19 nt, Homo sapiens
  misc_RNA (1)...(19): siRNA sense strand
ccacagaccaugcaauaca

SEQ ID NO: 868657 - RNA, 19 nt, Homo sapiens
  misc_RNA (1)...(19): siRNA sense strand
ggacacagcauagaacuac

SEQ ID NO: 868658 - RNA, 19 nt, Homo sapiens
  misc_RNA (1)...(19): siRNA sense strand
guaagggugugcaguggau

SEQ ID NO: 868659 - RNA, 19 nt, Homo sapiens
  misc_RNA (1)...(19): siRNA sense strand
ugagcuggcugugcuguuu

SEQ ID NO: 868660 - RNA, 19 nt, Homo sapiens
  misc_RNA (1)...(19): siRNA sense strand
caauugcagugccaaguuc

SEQ ID NO: 868661 - RNA, 19 nt, Homo sapiens
  misc_RNA (1)...(19): siRNA sense strand
cuaacuacccagacccuua

SEQ ID NO: 868662 - RNA, 19 nt, Homo sapiens
  misc_RNA (1)...(19): siRNA sense strand
ugacagcaguguggaagga

SEQ ID NO: 868663 - RNA, 19 nt, Homo sapiens
  misc_RNA (1)...(19): siRNA sense strand
ccacagccuucccuaacau

SEQ ID NO: 868664 - RNA, 19 nt, Homo sapiens
  misc_RNA (1)...(19): siRNA sense strand
gagcuggcugugcuguuua

SEQ ID NO: 868665 - RNA, 19 nt, Homo sapiens
  misc_RNA (1)...(19): siRNA sense strand
gagaugugccucggucuga

SEQ ID NO: 868666 - RNA, 19 nt, Homo sapiens
  misc_RNA (1)...(19): siRNA sense strand
ggagcugugcccaugauga

SEQ ID NO: 868667 - RNA, 19 nt, Homo sapiens
  misc_RNA (1)...(19): siRNA sense strand
ucaggacgagugcaaguuu

SEQ ID NO: 868668 - RNA, 19 nt, Homo sapiens
  misc_RNA (1)...(19): siRNA sense strand
ccaauugcagugccaaguu

SEQ ID NO: 868669 - RNA, 19 nt, Homo sapiens
  misc_RNA (1)...(19): siRNA sense strand
gcaagaccgaguucugcaa

SEQ ID NO: 868670 - RNA, 19 nt, Homo sapiens
  misc_RNA (1)...(19): siRNA sense strand
ucgaagcccucagcauaga

SEQ ID NO: 868671 - RNA, 19 nt, Homo sapiens
  misc_RNA (1)...(19): siRNA sense strand
gcauggaggcaacagaauc

SEQ ID NO: 868672 - RNA, 19 nt, Homo sapiens
  misc_RNA (1)...(19): siRNA sense strand
caggacgagugcaaguuug

SEQ ID NO: 868673 - RNA, 19 nt, Homo sapiens
  misc_RNA (1)...(19): siRNA sense strand
gaagcccucagcauagaga

SEQ ID NO: 868674 - RNA, 19 nt, Homo sapiens
  misc_RNA (1)...(19): siRNA sense strand
aguguggccucuugccuuu

SEQ ID NO: 868675 - RNA, 19 nt, Homo sapiens
  misc_RNA (1)...(19): siRNA sense strand
ggacagaucauggcaucag

SEQ ID NO: 868676 - RNA, 19 nt, Homo sapiens
  misc_RNA (1)...(19): siRNA sense strand
ccagggcacuuucucuacu

SEQ ID NO: 868677 - RNA, 19 nt, Homo sapiens
  misc_RNA (1)...(19): siRNA sense strand
gcaccgauggcagcgauga

SEQ ID NO: 868678 - RNA, 19 nt, Homo sapiens
  misc_RNA (1)...(19): siRNA sense strand
cagcaguguggaaggauuu

SEQ ID NO: 868679 - RNA, 19 nt, Homo sapiens
  misc_RNA (1)...(19): siRNA sense strand
gagcugugcccaugaugag

SEQ ID NO: 868680 - RNA, 19 nt, Homo sapiens
  misc_RNA (1)...(19): siRNA sense strand
caagaccgaguucugcaau

SEQ ID NO: 868681 - RNA, 19 nt, Homo sapiens
  misc_RNA (1)...(19): siRNA sense strand
acagcaguguggaaggauu

SEQ ID NO: 868682 - RNA, 19 nt, Homo sapiens
  misc_RNA (1)...(19): siRNA sense strand
gcugugcccaugaugaguu

SEQ ID NO: 868683 - RNA, 19 nt, Homo sapiens
  misc_RNA (1)...(19): siRNA sense strand
uugacuacguggaggugua

SEQ ID NO: 868684 - RNA, 19 nt, Homo sapiens
  misc_RNA (1)...(19): siRNA sense strand
uaacuacccagacccuuac

SEQ ID NO: 868685 - RNA, 19 nt, Homo sapiens
  misc_RNA (1)...(19): siRNA sense strand
guccucagcgguuacaaga

SEQ ID NO: 868686 - RNA, 19 nt, Homo sapiens
  misc_RNA (1)...(19): siRNA sense strand
caacagaaucgagcaagac

SEQ ID NO: 868687 - RNA, 19 nt, Homo sapiens
  misc_RNA (1)...(19): siRNA sense strand
gcagcaguacccucaccaa

SEQ ID NO: 868688 - RNA, 19 nt, Homo sapiens
  misc_RNA (1)...(19): siRNA sense strand
ugugugacauguggagaga

SEQ ID NO: 868689 - RNA, 19 nt, Homo sapiens
  misc_RNA (1)...(19): siRNA sense strand
gaacacagcuaugccuuua

SEQ ID NO: 868690 - RNA, 19 nt, Homo sapiens
  misc_RNA (1)...(19): siRNA sense strand
ggacaaacucgacgacuua

SEQ ID NO: 868691 - RNA, 19 nt, Homo sapiens
  misc_RNA (1)...(19): siRNA sense strand
gaacaagaucaacaagaua

SEQ ID NO: 868692 - RNA, 19 nt, Homo sapiens
  misc_RNA (1)...(19): siRNA sense strand
gaaauagcaagcuuaagaa

SEQ ID NO: 868693 - RNA, 19 nt, Homo sapiens
  misc_RNA (1)...(19): siRNA sense strand
ccaagaguaccuucauuua

SEQ ID NO: 868694 - RNA, 19 nt, Homo sapiens
  misc_RNA (1)...(19): siRNA sense strand
caagaguaccuucauuuaa

SEQ ID NO: 868695 - RNA, 19 nt, Homo sapiens
  misc_RNA (1)...(19): siRNA sense strand
gcuggaccaucuaauuuaa

SEQ ID NO: 868696 - RNA, 19 nt, Homo sapiens
  misc_RNA (1)...(19): siRNA sense strand
ugaacaagaucaacaagau

SEQ ID NO: 868697 - RNA, 19 nt, Homo sapiens
  misc_RNA (1)...(19): siRNA sense strand
ggaauccuauggaggcaaa

SEQ ID NO: 868698 - RNA, 19 nt, Homo sapiens
  misc_RNA (1)...(19): siRNA sense strand
auagcaagcuuaagaagaa

SEQ ID NO: 868699 - RNA, 19 nt, Homo sapiens
  misc_RNA (1)...(19): siRNA sense strand
agaaauagcaagcuuaaga

SEQ ID NO: 868700 - RNA, 19 nt, Homo sapiens
  misc_RNA (1)...(19): siRNA sense strand
gaacgcagagcaacucgaa

SEQ ID NO: 868701 - RNA, 19 nt, Homo sapiens
  misc_RNA (1)...(19): siRNA sense strand
gaccaagaguaccuucauu

SEQ ID NO: 868702 - RNA, 19 nt, Homo sapiens
  misc_RNA (1)...(19): siRNA sense strand
ccacguguuugguaaagaa

SEQ ID NO: 868703 - RNA, 19 nt, Homo sapiens
  misc_RNA (1)...(19): siRNA sense strand
guacccauauaaagucuau

SEQ ID NO: 868704 - RNA, 19 nt, Homo sapiens
  misc_RNA (1)...(19): siRNA sense strand
aaacucaagucaaggaauc

SEQ ID NO: 868705 - RNA, 19 nt, Homo sapiens
  misc_RNA (1)...(19): siRNA sense strand
cagcuggaccaucuaauuu

SEQ ID NO: 868706 - RNA, 19 nt, Homo sapiens
  misc_RNA (1)...(19): siRNA sense strand
gaggaucauuaaacuggaa

SEQ ID NO: 868707 - RNA, 19 nt, Homo sapiens
  misc_RNA (1)...(19): siRNA sense strand
gaauggguucgccugguua

SEQ ID NO: 868708 - RNA, 19 nt, Homo sapiens
  misc_RNA (1)...(19): siRNA sense strand
ggaucaaagccacguguuu

SEQ ID NO: 868709 - RNA, 19 nt, Homo sapiens
  misc_RNA (1)...(19): siRNA sense strand
ccacagguuuccuuuggau

SEQ ID NO: 868710 - RNA, 19 nt, Homo sapiens
  misc_RNA (1)...(19): siRNA sense strand
cguguuugguaaagaauuu

SEQ ID NO: 868711 - RNA, 19 nt, Homo sapiens
  misc_RNA (1)...(19): siRNA sense strand
cuaugaaacucaagucaag

SEQ ID NO: 868712 - RNA, 19 nt, Homo sapiens
  misc_RNA (1)...(19): siRNA sense strand
uaagcagucuucccuugga

SEQ ID NO: 868713 - RNA, 19 nt, Homo sapiens
  misc_RNA (1)...(19): siRNA sense strand
aaagccacguguuugguaa

SEQ ID NO: 868714 - RNA, 19 nt, Homo sapiens
  misc_RNA (1)...(19): siRNA sense strand
caacaagcacauuaacauc

SEQ ID NO: 868715 - RNA, 19 nt, Homo sapiens
  misc_RNA (1)...(19): siRNA sense strand
aaacacugcuaagucuaaa

SEQ ID NO: 868716 - RNA, 19 nt, Homo sapiens
  misc_RNA (1)...(19): siRNA sense strand
cauguuaccaacugccuua

SEQ ID NO: 868717 - RNA, 19 nt, Homo sapiens
  misc_RNA (1)...(19): siRNA sense strand
gcaacucgaagauggauca

SEQ ID NO: 868718 - RNA, 19 nt, Homo sapiens
  misc_RNA (1)...(19): siRNA sense strand
cugcuaagucuaaaucuaa

SEQ ID NO: 868719 - RNA, 19 nt, Homo sapiens
  misc_RNA (1)...(19): siRNA sense strand
agaauggguucgccugguu

SEQ ID NO: 868720 - RNA, 19 nt, Homo sapiens
  misc_RNA (1)...(19): siRNA sense strand
aaacauuaguagucagcaa

SEQ ID NO: 868721 - RNA, 19 nt, Homo sapiens
  misc_RNA (1)...(19): siRNA sense strand
ccagcuggaccaucuaauu

SEQ ID NO: 868722 - RNA, 19 nt, Homo sapiens
  misc_RNA (1)...(19): siRNA sense strand
gaaacucaagucaaggaau

SEQ ID NO: 868723 - RNA, 19 nt, Homo sapiens
  misc_RNA (1)...(19): siRNA sense strand
acucgaagauggaucaaag

SEQ ID NO: 868724 - RNA, 19 nt, Homo sapiens
  misc_RNA (1)...(19): siRNA sense strand
aaagguacaucagaacaca

SEQ ID NO: 868725 - RNA, 19 nt, Homo sapiens
  misc_RNA (1)...(19): siRNA sense strand
gcagagcaacucgaagaug

SEQ ID NO: 868726 - RNA, 19 nt, Homo sapiens
  misc_RNA (1)...(19): siRNA sense strand
acacagcuaugccuuuagg

SEQ ID NO: 868727 - RNA, 19 nt, Homo sapiens
  misc_RNA (1)...(19): siRNA sense strand
caaacucgacgacuuaaaa

SEQ ID NO: 868728 - RNA, 19 nt, Homo sapiens
  misc_RNA (1)...(19): siRNA sense strand
caagauaaaacacugcuaa

SEQ ID NO: 868729 - RNA, 19 nt, Homo sapiens
  misc_RNA (1)...(19): siRNA sense strand
caucagcuuccacagguuu

SEQ ID NO: 868730 - RNA, 19 nt, Homo sapiens
  misc_RNA (1)...(19): siRNA sense strand
aaugaaaacuugccuacaa

SEQ ID NO: 868731 - RNA, 19 nt, Homo sapiens
  misc_RNA (1)...(19): siRNA sense strand
cauuaguagucagcaagua

SEQ ID NO: 868732 - RNA, 19 nt, Homo sapiens
  misc_RNA (1)...(19): siRNA sense strand
acaacaagcacauuaacau

SEQ ID NO: 868733 - RNA, 19 nt, Homo sapiens
  misc_RNA (1)...(19): siRNA sense strand
ggaugcuguuccaaccauu

SEQ ID NO: 868734 - RNA, 19 nt, Homo sapiens
  misc_RNA (1)...(19): siRNA sense strand
gaugcuguuccaaccauuu

SEQ ID NO: 868735 - RNA, 19 nt, Homo sapiens
  misc_RNA (1)...(19): siRNA sense strand
ugaacacagcuaugccuuu

SEQ ID NO: 868736 - RNA, 19 nt, Homo sapiens
  misc_RNA (1)...(19): siRNA sense strand
uagcaagcuuaagaagaaa

SEQ ID NO: 868737 - RNA, 19 nt, Homo sapiens
  misc_RNA (1)...(19): siRNA sense strand
aggacaaacucgacgacuu

SEQ ID NO: 868738 - RNA, 19 nt, Homo sapiens
  misc_RNA (1)...(19): siRNA sense strand
acugcuaagucuaaaucua

SEQ ID NO: 868739 - RNA, 19 nt, Homo sapiens
  misc_RNA (1)...(19): siRNA sense strand
gauaaaacacugcuaaguc

SEQ ID NO: 868740 - RNA, 19 nt, Homo sapiens
  misc_RNA (1)...(19): siRNA sense strand
aaacuugccuacaaaagga

SEQ ID NO: 868741 - RNA, 19 nt, Homo sapiens
  misc_RNA (1)...(19): siRNA sense strand
ccuacaacaagcacauuaa

SEQ ID NO: 868742 - RNA, 19 nt, Homo sapiens
  misc_RNA (1)...(19): siRNA sense strand
gacaaacucgacgacuuaa

SEQ ID NO: 868743 - RNA, 19 nt, Homo sapiens
  misc_RNA (1)...(19): siRNA sense strand
cagcuaugccuuuaggaau

SEQ ID NO: 868744 - RNA, 19 nt, Homo sapiens
  misc_RNA (1)...(19): siRNA sense strand
gguuuccuuuggauccuaa

SEQ ID NO: 868745 - RNA, 19 nt, Homo sapiens
  misc_RNA (1)...(19): siRNA sense strand
guuaccaacugccuuaagc

SEQ ID NO: 868746 - RNA, 19 nt, Homo sapiens
  misc_RNA (1)...(19): siRNA sense strand
acaagcacauuaacaucag

SEQ ID NO: 868747 - RNA, 19 nt, Homo sapiens
  misc_RNA (1)...(19): siRNA sense strand
aauagcaagcuuaagaaga

SEQ ID NO: 868748 - RNA, 19 nt, Homo sapiens
  misc_RNA (1)...(19): siRNA sense strand
accaagaguaccuucauuu

SEQ ID NO: 868749 - RNA, 19 nt, Homo sapiens
  misc_RNA (1)...(19): siRNA sense strand
acgcagagcaacucgaaga

SEQ ID NO: 868750 - RNA, 19 nt, Homo sapiens
  misc_RNA (1)...(19): siRNA sense strand
gcugugccacuaccuacaa

SEQ ID NO: 868751 - RNA, 19 nt, Homo sapiens
  misc_RNA (1)...(19): siRNA sense strand
aacaagcacauuaacauca

SEQ ID NO: 868752 - RNA, 19 nt, Homo sapiens
  misc_RNA (1)...(19): siRNA sense strand
ugaccuaacaggacaaacu

SEQ ID NO: 868753 - RNA, 19 nt, Homo sapiens
  misc_RNA (1)...(19): siRNA sense strand
cuaaagguacaucagaaca

SEQ ID NO: 868754 - RNA, 19 nt, Homo sapiens
  misc_RNA (1)...(19): siRNA sense strand
uaaaacagaccaagaguac

SEQ ID NO: 868755 - RNA, 19 nt, Homo sapiens
  misc_RNA (1)...(19): siRNA sense strand
acagcuaugccuuuaggaa

SEQ ID NO: 868756 - RNA, 19 nt, Homo sapiens
  misc_RNA (1)...(19): siRNA sense strand
acacugcuaagucuaaauc

SEQ ID NO: 868757 - RNA, 19 nt, Homo sapiens
  misc_RNA (1)...(19): siRNA sense strand
gaccuaacaggacaaacuc

SEQ ID NO: 868758 - RNA, 19 nt, Homo sapiens
  misc_RNA (1)...(19): siRNA sense strand
agaagaaucugaucaguuu

SEQ ID NO: 868759 - RNA, 19 nt, Homo sapiens
  misc_RNA (1)...(19): siRNA sense strand
gaaacagcaugcagaaaga

SEQ ID NO: 868760 - RNA, 19 nt, Homo sapiens
  misc_RNA (1)...(19): siRNA sense strand
ccuugaagcugaacuauuu

SEQ ID NO: 868761 - RNA, 19 nt, Homo sapiens
  misc_RNA (1)...(19): siRNA sense strand
gauaacauccucagccuaa

SEQ ID NO: 868762 - RNA, 19 nt, Homo sapiens
  misc_RNA (1)...(19): siRNA sense strand
gcagugaacuuuccuucug

SEQ ID NO: 868763 - RNA, 19 nt, Homo sapiens
  misc_RNA (1)...(19): siRNA sense strand
caagucacauuaaagagaa

SEQ ID NO: 868764 - RNA, 19 nt, Homo sapiens
  misc_RNA (1)...(19): siRNA sense strand
ucaagaggauugcaaagga

SEQ ID NO: 868765 - RNA, 19 nt, Homo sapiens
  misc_RNA (1)...(19): siRNA sense strand
ggaaacagcaugcagaaag

SEQ ID NO: 868766 - RNA, 19 nt, Homo sapiens
  misc_RNA (1)...(19): siRNA sense strand
gacgagagcaacaugguua

SEQ ID NO: 868767 - RNA, 19 nt, Homo sapiens
  misc_RNA (1)...(19): siRNA sense strand
gcagggauccguugcaaga

SEQ ID NO: 868768 - RNA, 19 nt, Homo sapiens
  misc_RNA (1)...(19): siRNA sense strand
caaggaaggcgcuguaaga

SEQ ID NO: 868769 - RNA, 19 nt, Homo sapiens
  misc_RNA (1)...(19): siRNA sense strand
gaauuaacacagcacgaua

SEQ ID NO: 868770 - RNA, 19 nt, Homo sapiens
  misc_RNA (1)...(19): siRNA sense strand
gggaggaucuguucauugc

SEQ ID NO: 868771 - RNA, 19 nt, Homo sapiens
  misc_RNA (1)...(19): siRNA sense strand
uaacacagcacgauaugga

SEQ ID NO: 868772 - RNA, 19 nt, Homo sapiens
  misc_RNA (1)...(19): siRNA sense strand
ugucaaacuucaaccauga

SEQ ID NO: 868773 - RNA, 19 nt, Homo sapiens
  misc_RNA (1)...(19): siRNA sense strand
gagcagggauccguugcaa

SEQ ID NO: 868774 - RNA, 19 nt, Homo sapiens
  misc_RNA (1)...(19): siRNA sense strand
gaucaaggaaggcgcugua

SEQ ID NO: 868775 - RNA, 19 nt, Homo sapiens
  misc_RNA (1)...(19): siRNA sense strand
caagucuccugcucagauu

SEQ ID NO: 868776 - RNA, 19 nt, Homo sapiens
  misc_RNA (1)...(19): siRNA sense strand
acccauaucuuacucagaa

SEQ ID NO: 868777 - RNA, 19 nt, Homo sapiens
  misc_RNA (1)...(19): siRNA sense strand
ggguugaccugauagacaa

SEQ ID NO: 868778 - RNA, 19 nt, Homo sapiens
  misc_RNA (1)...(19): siRNA sense strand
gagaauauccagguguuug

SEQ ID NO: 868779 - RNA, 19 nt, Homo sapiens
  misc_RNA (1)...(19): siRNA sense strand
gcaagucuccugcucagau

SEQ ID NO: 868780 - RNA, 19 nt, Homo sapiens
  misc_RNA (1)...(19): siRNA sense strand
gagugccacccauaucuua

SEQ ID NO: 868781 - RNA, 19 nt, Homo sapiens
  misc_RNA (1)...(19): siRNA sense strand
gaacagcuugagaggcuuu

SEQ ID NO: 868782 - RNA, 19 nt, Homo sapiens
  misc_RNA (1)...(19): siRNA sense strand
ccacuaaccaaccagauug

SEQ ID NO: 868783 - RNA, 19 nt, Homo sapiens
  misc_RNA (1)...(19): siRNA sense strand
ccaagucacauuaaagaga

SEQ ID NO: 868784 - RNA, 19 nt, Homo sapiens
  misc_RNA (1)...(19): siRNA sense strand
gaucaugagcugcagugaa

SEQ ID NO: 868785 - RNA, 19 nt, Homo sapiens
  misc_RNA (1)...(19): siRNA sense strand
cuucgacugugcuuacuuu

SEQ ID NO: 868786 - RNA, 19 nt, Homo sapiens
  misc_RNA (1)...(19): siRNA sense strand
ugaacuauuuggaccucua

SEQ ID NO: 868787 - RNA, 19 nt, Homo sapiens
  misc_RNA (1)...(19): siRNA sense strand
ccagaggaaugugauagug

SEQ ID NO: 868788 - RNA, 19 nt, Homo sapiens
  misc_RNA (1)...(19): siRNA sense strand
aagagaauauccagguguu

SEQ ID NO: 868789 - RNA, 19 nt, Homo sapiens
  misc_RNA (1)...(19): siRNA sense strand
uaagaaguccuugguggaa

SEQ ID NO: 868790 - RNA, 19 nt, Homo sapiens
  misc_RNA (1)...(19): siRNA sense strand
acacagcacgauauggaua

SEQ ID NO: 868791 - RNA, 19 nt, Homo sapiens
  misc_RNA (1)...(19): siRNA sense strand
caaaggagcacggcaaguc

SEQ ID NO: 868792 - RNA, 19 nt, Homo sapiens
  misc_RNA (1)...(19): siRNA sense strand
uugagaggcuuuugaauaa

SEQ ID NO: 868793 - RNA, 19 nt, Homo sapiens
  misc_RNA (1)...(19): siRNA sense strand
gagagcaacaugguuauuc

SEQ ID NO: 868794 - RNA, 19 nt, Homo sapiens
  misc_RNA (1)...(19): siRNA sense strand
ggacgagagcaacaugguu

SEQ ID NO: 868795 - RNA, 19 nt, Homo sapiens
  misc_RNA (1)...(19): siRNA sense strand
agacaacccugugaucaag

SEQ ID NO: 868796 - RNA, 19 nt, Homo sapiens
  misc_RNA (1)...(19): siRNA sense strand
caaauccagaggaauguga

SEQ ID NO: 868797 - RNA, 19 nt, Homo sapiens
  misc_RNA (1)...(19): siRNA sense strand
gauagacaacccugugauc

SEQ ID NO: 868798 - RNA, 19 nt, Homo sapiens
  misc_RNA (1)...(19): siRNA sense strand
auauccagguguuugauuu

SEQ ID NO: 868799 - RNA, 19 nt, Homo sapiens
  misc_RNA (1)...(19): siRNA sense strand
gcaccugccauaagaaguc

SEQ ID NO: 868800 - RNA, 19 nt, Homo sapiens
  misc_RNA (1)...(19): siRNA sense strand
agaggaaugugauagugau

SEQ ID NO: 868801 - RNA, 19 nt, Homo sapiens
  misc_RNA (1)...(19): siRNA sense strand
caagccuccucauccagaa

SEQ ID NO: 868802 - RNA, 19 nt, Homo sapiens
  misc_RNA (1)...(19): siRNA sense strand
ugaccgaggcagugaaaga

SEQ ID NO: 868803 - RNA, 19 nt, Homo sapiens
  misc_RNA (1)...(19): siRNA sense strand
gagcugcagugaacuuucc

SEQ ID NO: 868804 - RNA, 19 nt, Homo sapiens
  misc_RNA (1)...(19): siRNA sense strand
gccacuaaccaaccagauu

SEQ ID NO: 868805 - RNA, 19 nt, Homo sapiens
  misc_RNA (1)...(19): siRNA sense strand
cagaggaaugugauaguga

SEQ ID NO: 868806 - RNA, 19 nt, Homo sapiens
  misc_RNA (1)...(19): siRNA sense strand
aagaaguccuugguggaaa

SEQ ID NO: 868807 - RNA, 19 nt, Homo sapiens
  misc_RNA (1)...(19): siRNA sense strand
ugaauaagccuggguugag

SEQ ID NO: 868808 - RNA, 19 nt, Homo sapiens
  misc_RNA (1)...(19): siRNA sense strand
uggugcaccugccauaaga

SEQ ID NO: 868809 - RNA, 19 nt, Homo sapiens
  misc_RNA (1)...(19): siRNA sense strand
gauugagugccacccauau

SEQ ID NO: 868810 - RNA, 19 nt, Homo sapiens
  misc_RNA (1)...(19): siRNA sense strand
agaauauccagguguuuga

SEQ ID NO: 868811 - RNA, 19 nt, Homo sapiens
  misc_RNA (1)...(19): siRNA sense strand
uagacaacccugugaucaa

SEQ ID NO: 868812 - RNA, 19 nt, Homo sapiens
  misc_RNA (1)...(19): siRNA sense strand
guggaaacagcaugcagaa

SEQ ID NO: 868813 - RNA, 19 nt, Homo sapiens
  misc_RNA (1)...(19): siRNA sense strand
gcagugaaagaggccauug

SEQ ID NO: 868814 - RNA, 19 nt, Homo sapiens
  misc_RNA (1)...(19): siRNA sense strand
uuucaaauccagaggaaug

SEQ ID NO: 868815 - RNA, 19 nt, Homo sapiens
  misc_RNA (1)...(19): siRNA sense strand
cgacugugcuuacuuuuac

SEQ ID NO: 868816 - RNA, 19 nt, Homo sapiens
  misc_RNA (1)...(19): siRNA sense strand
ucaagccacuaaccaacca

SEQ ID NO: 868817 - RNA, 19 nt, Homo sapiens
  misc_RNA (1)...(19): siRNA sense strand
cacagcacgauauggauaa

SEQ ID NO: 868818 - RNA, 19 nt, Homo sapiens
  misc_RNA (1)...(19): siRNA sense strand
gaucuguucauugccacua

SEQ ID NO: 868819 - RNA, 19 nt, Homo sapiens
  misc_RNA (1)...(19): siRNA sense strand
gaucaagaggauugcaaag

SEQ ID NO: 868820 - RNA, 19 nt, Homo sapiens
  misc_RNA (1)...(19): siRNA sense strand
gaacuauuuggaccucuac

SEQ ID NO: 868821 - RNA, 19 nt, Homo sapiens
  misc_RNA (1)...(19): siRNA sense strand
ugaauuaacacagcacgau

SEQ ID NO: 868822 - RNA, 19 nt, Homo sapiens
  misc_RNA (1)...(19): siRNA sense strand
acaugguuauucccaguga

SEQ ID NO: 868823 - RNA, 19 nt, Homo sapiens
  misc_RNA (1)...(19): siRNA sense strand
uacacuggcccauggguuu

SEQ ID NO: 868824 - RNA, 19 nt, Homo sapiens
  misc_RNA (1)...(19): siRNA sense strand
gcaugcagaaagagucuca

SEQ ID NO: 868825 - RNA, 19 nt, Homo sapiens
  misc_RNA (1)...(19): siRNA sense strand
gaauauccagguguuugau

SEQ ID NO: 868826 - RNA, 19 nt, Homo sapiens
  misc_RNA (1)...(19): siRNA sense strand
guaccggcacuucgacugu

SEQ ID NO: 868827 - RNA, 19 nt, Homo sapiens
  misc_RNA (1)...(19): siRNA sense strand
cgagagcaacaugguuauu

SEQ ID NO: 868828 - RNA, 19 nt, Homo sapiens
  misc_RNA (1)...(19): siRNA sense strand
uaagacgggaggaucuguu

SEQ ID NO: 868829 - RNA, 19 nt, Homo sapiens
  misc_RNA (1)...(19): siRNA sense strand
aagccuggguugagguuca

SEQ ID NO: 868830 - RNA, 19 nt, Homo sapiens
  misc_RNA (1)...(19): siRNA sense strand
cuugagaggcuuuugaaua

SEQ ID NO: 868831 - RNA, 19 nt, Homo sapiens
  misc_RNA (1)...(19): siRNA sense strand
gcaaaggagcacggcaagu

SEQ ID NO: 868832 - RNA, 19 nt, Homo sapiens
  misc_RNA (1)...(19): siRNA sense strand
ugaucaagaggauugcaaa

SEQ ID NO: 868833 - RNA, 19 nt, Homo sapiens
  misc_RNA (1)...(19): siRNA sense strand
ccugugaucaagaggauug

SEQ ID NO: 868834 - RNA, 19 nt, Homo sapiens
  misc_RNA (1)...(19): siRNA sense strand
gcaugaaacugagugaaga

SEQ ID NO: 868835 - RNA, 19 nt, Homo sapiens
  misc_RNA (1)...(19): siRNA sense strand
cuacacggguuucaucaaa

SEQ ID NO: 868836 - RNA, 19 nt, Homo sapiens
  misc_RNA (1)...(19): siRNA sense strand
ccuggugcauucagauuua

SEQ ID NO: 868837 - RNA, 19 nt, Homo sapiens
  misc_RNA (1)...(19): siRNA sense strand
ucaagaaguucaugguugu

SEQ ID NO: 868838 - RNA, 19 nt, Homo sapiens
  misc_RNA (1)...(19): siRNA sense strand
caucaaagugcaucugaaa

SEQ ID NO: 868839 - RNA, 19 nt, Homo sapiens
  misc_RNA (1)...(19): siRNA sense strand
gaagaucgacagcuacaac

SEQ ID NO: 868840 - RNA, 19 nt, Homo sapiens
  misc_RNA (1)...(19): siRNA sense strand
ucaagcagcugcacaucag

SEQ ID NO: 868841 - RNA, 19 nt, Homo sapiens
  misc_RNA (1)...(19): siRNA sense strand
ugcaggagaucaagcagaa

SEQ ID NO: 868842 - RNA, 19 nt, Homo sapiens
  misc_RNA (1)...(19): siRNA sense strand
gcaccaccaccgucaguga

SEQ ID NO: 868843 - RNA, 19 nt, Homo sapiens
  misc_RNA (1)...(19): siRNA sense strand
caaagugcaucugaaacuc

SEQ ID NO: 868844 - RNA, 19 nt, Homo sapiens
  misc_RNA (1)...(19): siRNA sense strand
agcagaagaucgacagcua

SEQ ID NO: 868845 - RNA, 19 nt, Homo sapiens
  misc_RNA (1)...(19): siRNA sense strand
acacaaggacggacaagug

SEQ ID NO: 868846 - RNA, 19 nt, Homo sapiens
  misc_RNA (1)...(19): siRNA sense strand
gcucaagaaguucaugguu

SEQ ID NO: 868847 - RNA, 19 nt, Homo sapiens
  misc_RNA (1)...(19): siRNA sense strand
ggugcauucagauuuauuu

SEQ ID NO: 868848 - RNA, 19 nt, Homo sapiens
  misc_RNA (1)...(19): siRNA sense strand
acacggguuucaucaaagu

SEQ ID NO: 868849 - RNA, 19 nt, Homo sapiens
  misc_RNA (1)...(19): siRNA sense strand
ucaucaaagugcaucugaa

SEQ ID NO: 868850 - RNA, 19 nt, Homo sapiens
  misc_RNA (1)...(19): siRNA sense strand
uuaagcggauacacaagga

SEQ ID NO: 868851 - RNA, 19 nt, Homo sapiens
  misc_RNA (1)...(19): siRNA sense strand
ucaaagugcaucugaaacu

SEQ ID NO: 868852 - RNA, 19 nt, Homo sapiens
  misc_RNA (1)...(19): siRNA sense strand
caggagaucaagcagaaga

SEQ ID NO: 868853 - RNA, 19 nt, Homo sapiens
  misc_RNA (1)...(19): siRNA sense strand
ggacaauccccagaaguuu

SEQ ID NO: 868854 - RNA, 19 nt, Homo sapiens
  misc_RNA (1)...(19): siRNA sense strand
ggcaugaaacugagugaag

SEQ ID NO: 868855 - RNA, 19 nt, Homo sapiens
  misc_RNA (1)...(19): siRNA sense strand
cuacaacacgcgagagaag

SEQ ID NO: 868856 - RNA, 19 nt, Homo sapiens
  misc_RNA (1)...(19): siRNA sense strand
ccacacugcaggagaucaa

SEQ ID NO: 868857 - RNA, 19 nt, Homo sapiens
  misc_RNA (1)...(19): siRNA sense strand
acaacacgcgagagaagaa

SEQ ID NO: 868858 - RNA, 19 nt, Homo sapiens
  misc_RNA (1)...(19): siRNA sense strand
cagaagaucgacagcuaca

SEQ ID NO: 868859 - RNA, 19 nt, Homo sapiens
  misc_RNA (1)...(19): siRNA sense strand
gcaugaaacugagugaaga

SEQ ID NO: 868860 - RNA, 19 nt, Homo sapiens
  misc_RNA (1)...(19): siRNA sense strand
cuacacggguuucaucaaa

SEQ ID NO: 868861 - RNA, 19 nt, Homo sapiens
  misc_RNA (1)...(19): siRNA sense strand
ucaagaaguucaugguugu

SEQ ID NO: 868862 - RNA, 19 nt, Homo sapiens
  misc_RNA (1)...(19): siRNA sense strand
caucaaagugcaucugaaa

SEQ ID NO: 868863 - RNA, 19 nt, Homo sapiens
  misc_RNA (1)...(19): siRNA sense strand
gaagaucgacagcuacaac

SEQ ID NO: 868864 - RNA, 19 nt, Homo sapiens
  misc_RNA (1)...(19): siRNA sense strand
ucaagcagcugcacaucag

SEQ ID NO: 868865 - RNA, 19 nt, Homo sapiens
  misc_RNA (1)...(19): siRNA sense strand
ugcaggagaucaagcagaa

SEQ ID NO: 868866 - RNA, 19 nt, Homo sapiens
  misc_RNA (1)...(19): siRNA sense strand
gcaccaccaccgucaguga

SEQ ID NO: 868867 - RNA, 19 nt, Homo sapiens
  misc_RNA (1)...(19): siRNA sense strand
caaagugcaucugaaacuc

SEQ ID NO: 868868 - RNA, 19 nt, Homo sapiens
  misc_RNA (1)...(19): siRNA sense strand
agcagaagaucgacagcua

SEQ ID NO: 868869 - RNA, 19 nt, Homo sapiens
  misc_RNA (1)...(19): siRNA sense strand
acacaaggacggacaagug

SEQ ID NO: 868870 - RNA, 19 nt, Homo sapiens
  misc_RNA (1)...(19): siRNA sense strand
gcucaagaaguucaugguu

SEQ ID NO: 868871 - RNA, 19 nt, Homo sapiens
  misc_RNA (1)...(19): siRNA sense strand
acacggguuucaucaaagu

SEQ ID NO: 868872 - RNA, 19 nt, Homo sapiens
  misc_RNA (1)...(19): siRNA sense strand
ucaucaaagugcaucugaa

SEQ ID NO: 868873 - RNA, 19 nt, Homo sapiens
  misc_RNA (1)...(19): siRNA sense strand
uuaagcggauacacaagga

SEQ ID NO: 868874 - RNA, 19 nt, Homo sapiens
  misc_RNA (1)...(19): siRNA sense strand
ucaaagugcaucugaaacu

SEQ ID NO: 868875 - RNA, 19 nt, Homo sapiens
  misc_RNA (1)...(19): siRNA sense strand
caggagaucaagcagaaga

SEQ ID NO: 868876 - RNA, 19 nt, Homo sapiens
  misc_RNA (1)...(19): siRNA sense strand
ggacaauccccagaaguuu

SEQ ID NO: 868877 - RNA, 19 nt, Homo sapiens
  misc_RNA (1)...(19): siRNA sense strand
cuacaacacgcgagagaag

SEQ ID NO: 868878 - RNA, 19 nt, Homo sapiens
  misc_RNA (1)...(19): siRNA sense strand
ccacacugcaggagaucaa

SEQ ID NO: 868879 - RNA, 19 nt, Homo sapiens
  misc_RNA (1)...(19): siRNA sense strand
ggcaugaaacugagugaag

SEQ ID NO: 868880 - RNA, 19 nt, Homo sapiens
  misc_RNA (1)...(19): siRNA sense strand
acaacacgcgagagaagaa

SEQ ID NO: 868881 - RNA, 19 nt, Homo sapiens
  misc_RNA (1)...(19): siRNA sense strand
cagaagaucgacagcuaca

SEQ ID NO: 868882 - RNA, 19 nt, Homo sapiens
  misc_RNA (1)...(19): siRNA sense strand
gcaugaaacugagugaaga

SEQ ID NO: 868883 - RNA, 19 nt, Homo sapiens
  misc_RNA (1)...(19): siRNA sense strand
cuacacggguuucaucaaa

SEQ ID NO: 868884 - RNA, 19 nt, Homo sapiens
  misc_RNA (1)...(19): siRNA sense strand
ucaagaaguucaugguugu

SEQ ID NO: 868885 - RNA, 19 nt, Homo sapiens
  misc_RNA (1)...(19): siRNA sense strand
caucaaagugcaucugaaa

SEQ ID NO: 868886 - RNA, 19 nt, Homo sapiens
  misc_RNA (1)...(19): siRNA sense strand
gaagaucgacagcuacaac

SEQ ID NO: 868887 - RNA, 19 nt, Homo sapiens
  misc_RNA (1)...(19): siRNA sense strand
ucaagcagcugcacaucag

SEQ ID NO: 868888 - RNA, 19 nt, Homo sapiens
  misc_RNA (1)...(19): siRNA sense strand
ugcaggagaucaagcagaa

SEQ ID NO: 868889 - RNA, 19 nt, Homo sapiens
  misc_RNA (1)...(19): siRNA sense strand
gcaccaccaccgucaguga

SEQ ID NO: 868890 - RNA, 19 nt, Homo sapiens
  misc_RNA (1)...(19): siRNA sense strand
caaagugcaucugaaacuc

SEQ ID NO: 868891 - RNA, 19 nt, Homo sapiens
  misc_RNA (1)...(19): siRNA sense strand
agcagaagaucgacagcua

SEQ ID NO: 868892 - RNA, 19 nt, Homo sapiens
  misc_RNA (1)...(19): siRNA sense strand
acacaaggacggacaagug

SEQ ID NO: 868893 - RNA, 19 nt, Homo sapiens
  misc_RNA (1)...(19): siRNA sense strand
gcucaagaaguucaugguu

SEQ ID NO: 868894 - RNA, 19 nt, Homo sapiens
  misc_RNA (1)...(19): siRNA sense strand
acacggguuucaucaaagu

SEQ ID NO: 868895 - RNA, 19 nt, Homo sapiens
  misc_RNA (1)...(19): siRNA sense strand
ucaucaaagugcaucugaa

SEQ ID NO: 868896 - RNA, 19 nt, Homo sapiens
  misc_RNA (1)...(19): siRNA sense strand
uuaagcggauacacaagga

SEQ ID NO: 868897 - RNA, 19 nt, Homo sapiens
  misc_RNA (1)...(19): siRNA sense strand
ucaaagugcaucugaaacu

SEQ ID NO: 868898 - RNA, 19 nt, Homo sapiens
  misc_RNA (1)...(19): siRNA sense strand
caggagaucaagcagaaga

SEQ ID NO: 868899 - RNA, 19 nt, Homo sapiens
  misc_RNA (1)...(19): siRNA sense strand
ggacaauccccagaaguuu

SEQ ID NO: 868900 - RNA, 19 nt, Homo sapiens
  misc_RNA (1)...(19): siRNA sense strand
cuacaacacgcgagagaag

SEQ ID NO: 868901 - RNA, 19 nt, Homo sapiens
  misc_RNA (1)...(19): siRNA sense strand
ccacacugcaggagaucaa

SEQ ID NO: 868902 - RNA, 19 nt, Homo sapiens
  misc_RNA (1)...(19): siRNA sense strand
ggcaugaaacugagugaag

SEQ ID NO: 868903 - RNA, 19 nt, Homo sapiens
  misc_RNA (1)...(19): siRNA sense strand
acaacacgcgagagaagaa

SEQ ID NO: 868904 - RNA, 19 nt, Homo sapiens
  misc_RNA (1)...(19): siRNA sense strand
cagaagaucgacagcuaca

SEQ ID NO: 868905 - RNA, 19 nt, Homo sapiens
  misc_RNA (1)...(19): siRNA sense strand
gcaugaaacugagugaaga

SEQ ID NO: 868906 - RNA, 19 nt, Homo sapiens
  misc_RNA (1)...(19): siRNA sense strand
cuacacggguuucaucaaa

SEQ ID NO: 868907 - RNA, 19 nt, Homo sapiens
  misc_RNA (1)...(19): siRNA sense strand
ucaagaaguucaugguugu

SEQ ID NO: 868908 - RNA, 19 nt, Homo sapiens
  misc_RNA (1)...(19): siRNA sense strand
caucaaagugcaucugaaa

SEQ ID NO: 868909 - RNA, 19 nt, Homo sapiens
  misc_RNA (1)...(19): siRNA sense strand
gaagaucgacagcuacaac

SEQ ID NO: 868910 - RNA, 19 nt, Homo sapiens
  misc_RNA (1)...(19): siRNA sense strand
ucaagcagcugcacaucag

SEQ ID NO: 868911 - RNA, 19 nt, Homo sapiens
  misc_RNA (1)...(19): siRNA sense strand
ugcaggagaucaagcagaa

SEQ ID NO: 868912 - RNA, 19 nt, Homo sapiens
  misc_RNA (1)...(19): siRNA sense strand
gcaccaccaccgucaguga

SEQ ID NO: 868913 - RNA, 19 nt, Homo sapiens
  misc_RNA (1)...(19): siRNA sense strand
caaagugcaucugaaacuc

SEQ ID NO: 868914 - RNA, 19 nt, Homo sapiens
  misc_RNA (1)...(19): siRNA sense strand
agcagaagaucgacagcua

SEQ ID NO: 868915 - RNA, 19 nt, Homo sapiens
  misc_RNA (1)...(19): siRNA sense strand
acacaaggacggacaagug

SEQ ID NO: 868916 - RNA, 19 nt, Homo sapiens
  misc_RNA (1)...(19): siRNA sense strand
gcucaagaaguucaugguu

SEQ ID NO: 868917 - RNA, 19 nt, Homo sapiens
  misc_RNA (1)...(19): siRNA sense strand
acacggguuucaucaaagu

SEQ ID NO: 868918 - RNA, 19 nt, Homo sapiens
  misc_RNA (1)...(19): siRNA sense strand
ucaucaaagugcaucugaa

SEQ ID NO: 868919 - RNA, 19 nt, Homo sapiens
  misc_RNA (1)...(19): siRNA sense strand
uuaagcggauacacaagga

SEQ ID NO: 868920 - RNA, 19 nt, Homo sapiens
  misc_RNA (1)...(19): siRNA sense strand
ucaaagugcaucugaaacu

SEQ ID NO: 868921 - RNA, 19 nt, Homo sapiens
  misc_RNA (1)...(19): siRNA sense strand
caggagaucaagcagaaga

SEQ ID NO: 868922 - RNA, 19 nt, Homo sapiens
  misc_RNA (1)...(19): siRNA sense strand
ggacaauccccagaaguuu

SEQ ID NO: 868923 - RNA, 19 nt, Homo sapiens
  misc_RNA (1)...(19): siRNA sense strand
cuacaacacgcgagagaag

SEQ ID NO: 868924 - RNA, 19 nt, Homo sapiens
  misc_RNA (1)...(19): siRNA sense strand
ccacacugcaggagaucaa

SEQ ID NO: 868925 - RNA, 19 nt, Homo sapiens
  misc_RNA (1)...(19): siRNA sense strand
ggcaugaaacugagugaag

SEQ ID NO: 868926 - RNA, 19 nt, Homo sapiens
  misc_RNA (1)...(19): siRNA sense strand
acaacacgcgagagaagaa

SEQ ID NO: 868927 - RNA, 19 nt, Homo sapiens
  misc_RNA (1)...(19): siRNA sense strand
cagaagaucgacagcuaca

SEQ ID NO: 868928 - RNA, 19 nt, Homo sapiens
  misc_RNA (1)...(19): siRNA sense strand
gcaaauguuucaggaguua

SEQ ID NO: 868929 - RNA, 19 nt, Homo sapiens
  misc_RNA (1)...(19): siRNA sense strand
gaaaugcuauagaggaaga

SEQ ID NO: 868930 - RNA, 19 nt, Homo sapiens
  misc_RNA (1)...(19): siRNA sense strand
uguaggaacuuaagcauuu

SEQ ID NO: 868931 - RNA, 19 nt, Homo sapiens
  misc_RNA (1)...(19): siRNA sense strand
ccacaucuguaggaacuua

SEQ ID NO: 868932 - RNA, 19 nt, Homo sapiens
  misc_RNA (1)...(19): siRNA sense strand
agaggaagauuucaguuga

SEQ ID NO: 868933 - RNA, 19 nt, Homo sapiens
  misc_RNA (1)...(19): siRNA sense strand
gaagauuucaguugauaga

SEQ ID NO: 868934 - RNA, 19 nt, Homo sapiens
  misc_RNA (1)...(19): siRNA sense strand
gaacuggagugaggagaag

SEQ ID NO: 868935 - RNA, 19 nt, Homo sapiens
  misc_RNA (1)...(19): siRNA sense strand
aagaaaugcuauagaggaa

SEQ ID NO: 868936 - RNA, 19 nt, Homo sapiens
  misc_RNA (1)...(19): siRNA sense strand
acagaaguguggaagcaaa

SEQ ID NO: 868937 - RNA, 19 nt, Homo sapiens
  misc_RNA (1)...(19): siRNA sense strand
gaggaagauuucaguugau

SEQ ID NO: 868938 - RNA, 19 nt, Homo sapiens
  misc_RNA (1)...(19): siRNA sense strand
aggaagauuucaguugaua

SEQ ID NO: 868939 - RNA, 19 nt, Homo sapiens
  misc_RNA (1)...(19): siRNA sense strand
acacaauagugacaacugu

SEQ ID NO: 868940 - RNA, 19 nt, Homo sapiens
  misc_RNA (1)...(19): siRNA sense strand
cugaagaaaugcuauagag

SEQ ID NO: 868941 - RNA, 19 nt, Homo sapiens
  misc_RNA (1)...(19): siRNA sense strand
ugacaacugugaggcaugu

SEQ ID NO: 868942 - RNA, 19 nt, Homo sapiens
  misc_RNA (1)...(19): siRNA sense strand
gcugggcccauacagguua

SEQ ID NO: 868943 - RNA, 19 nt, Homo sapiens
  misc_RNA (1)...(19): siRNA sense strand
gaagggccacacaauagug

SEQ ID NO: 868944 - RNA, 19 nt, Homo sapiens
  misc_RNA (1)...(19): siRNA sense strand
gugaagaugaggguguuua

SEQ ID NO: 868945 - RNA, 19 nt, Homo sapiens
  misc_RNA (1)...(19): siRNA sense strand
gaucaaggacaucucucuu

SEQ ID NO: 868946 - RNA, 19 nt, Homo sapiens
  misc_RNA (1)...(19): siRNA sense strand
aaggacaucucucuugaag

SEQ ID NO: 868947 - RNA, 19 nt, Homo sapiens
  misc_RNA (1)...(19): siRNA sense strand
gaaguguggaagcaaaugu

SEQ ID NO: 868948 - RNA, 19 nt, Homo sapiens
  misc_RNA (1)...(19): siRNA sense strand
acccagagauguaagaagu

SEQ ID NO: 868949 - RNA, 19 nt, Homo sapiens
  misc_RNA (1)...(19): siRNA sense strand
uagaggaagauuucaguug

SEQ ID NO: 868950 - RNA, 19 nt, Homo sapiens
  misc_RNA (1)...(19): siRNA sense strand
cuugaagggccacacaaua

SEQ ID NO: 868951 - RNA, 19 nt, Homo sapiens
  misc_RNA (1)...(19): siRNA sense strand
uuucugcuguugugucauu

SEQ ID NO: 868952 - RNA, 19 nt, Homo sapiens
  misc_RNA (1)...(19): siRNA sense strand
guguuuacccagagaugua

SEQ ID NO: 868953 - RNA, 19 nt, Homo sapiens
  misc_RNA (1)...(19): siRNA sense strand
acaauagugacaacuguga

SEQ ID NO: 868954 - RNA, 19 nt, Homo sapiens
  misc_RNA (1)...(19): siRNA sense strand
aaccugguguuccgaauuc

SEQ ID NO: 868955 - RNA, 19 nt, Homo sapiens
  misc_RNA (1)...(19): siRNA sense strand
gacccugaguucacacaag

SEQ ID NO: 868956 - RNA, 19 nt, Homo sapiens
  misc_RNA (1)...(19): siRNA sense strand
ugugucauucucauuguua

SEQ ID NO: 868957 - RNA, 19 nt, Homo sapiens
  misc_RNA (1)...(19): siRNA sense strand
ggagguuccuaugaucaag

SEQ ID NO: 868958 - RNA, 19 nt, Homo sapiens
  misc_RNA (1)...(19): siRNA sense strand
ugaggacccugaguucaca

SEQ ID NO: 868959 - RNA, 19 nt, Homo sapiens
  misc_RNA (1)...(19): siRNA sense strand
caagguggaggagguaguu

SEQ ID NO: 868960 - RNA, 19 nt, Homo sapiens
  misc_RNA (1)...(19): siRNA sense strand
acccugaguucacacaaga

SEQ ID NO: 868961 - RNA, 19 nt, Homo sapiens
  misc_RNA (1)...(19): siRNA sense strand
aaccacaucuguaggaacu

SEQ ID NO: 868962 - RNA, 19 nt, Homo sapiens
  misc_RNA (1)...(19): siRNA sense strand
cuucugugcugggcccaua

SEQ ID NO: 868963 - RNA, 19 nt, Homo sapiens
  misc_RNA (1)...(19): siRNA sense strand
ggaagauuucaguugauag

SEQ ID NO: 868964 - RNA, 19 nt, Homo sapiens
  misc_RNA (1)...(19): siRNA sense strand
guugugucauucucauugu

SEQ ID NO: 868965 - RNA, 19 nt, Homo sapiens
  misc_RNA (1)...(19): siRNA sense strand
gcuguugugucauucucau

SEQ ID NO: 868966 - RNA, 19 nt, Homo sapiens
  misc_RNA (1)...(19): siRNA sense strand
aaaccugguguuccgaauu

SEQ ID NO: 868967 - RNA, 19 nt, Homo sapiens
  misc_RNA (1)...(19): siRNA sense strand
ugaacuggagugaggagaa

SEQ ID NO: 868968 - RNA, 19 nt, Homo sapiens
  misc_RNA (1)...(19): siRNA sense strand
uugaagggccacacaauag

SEQ ID NO: 868969 - RNA, 19 nt, Homo sapiens
  misc_RNA (1)...(19): siRNA sense strand
ugaagggccacacaauagu

SEQ ID NO: 868970 - RNA, 19 nt, Homo sapiens
  misc_RNA (1)...(19): siRNA sense strand
guaggaacuuaagcauuuu

SEQ ID NO: 868971 - RNA, 19 nt, Homo sapiens
  misc_RNA (1)...(19): siRNA sense strand
ggaauugucucgccauuua

SEQ ID NO: 868972 - RNA, 19 nt, Homo sapiens
  misc_RNA (1)...(19): siRNA sense strand
agaaggagguaaaguauuu

SEQ ID NO: 868973 - RNA, 19 nt, Homo sapiens
  misc_RNA (1)...(19): siRNA sense strand
gcaccaagcugucaucaca

SEQ ID NO: 868974 - RNA, 19 nt, Homo sapiens
  misc_RNA (1)...(19): siRNA sense strand
caucaucacugacagcuuu

SEQ ID NO: 868975 - RNA, 19 nt, Homo sapiens
  misc_RNA (1)...(19): siRNA sense strand
gcacagcgaugacucuucu

SEQ ID NO: 868976 - RNA, 19 nt, Homo sapiens
  misc_RNA (1)...(19): siRNA sense strand
gcaagaagccuggaauugu

SEQ ID NO: 868977 - RNA, 19 nt, Homo sapiens
  misc_RNA (1)...(19): siRNA sense strand
ggacagagcgauauuugau

SEQ ID NO: 868978 - RNA, 19 nt, Homo sapiens
  misc_RNA (1)...(19): siRNA sense strand
caagaagccuggaauuguc

SEQ ID NO: 868979 - RNA, 19 nt, Homo sapiens
  misc_RNA (1)...(19): siRNA sense strand
uaacguccauaccaggaua

SEQ ID NO: 868980 - RNA, 19 nt, Homo sapiens
  misc_RNA (1)...(19): siRNA sense strand
uaagaaagcccaugagaag

SEQ ID NO: 868981 - RNA, 19 nt, Homo sapiens
  misc_RNA (1)...(19): siRNA sense strand
gcgacuauauugagaagga

SEQ ID NO: 868982 - RNA, 19 nt, Homo sapiens
  misc_RNA (1)...(19): siRNA sense strand
gauaagaaagcccaugaga

SEQ ID NO: 868983 - RNA, 19 nt, Homo sapiens
  misc_RNA (1)...(19): siRNA sense strand
cuacaaaaguggacauuaa

SEQ ID NO: 868984 - RNA, 19 nt, Homo sapiens
  misc_RNA (1)...(19): siRNA sense strand
gagauaagaaagcccauga

SEQ ID NO: 868985 - RNA, 19 nt, Homo sapiens
  misc_RNA (1)...(19): siRNA sense strand
ggaccaggacucagcauga

SEQ ID NO: 868986 - RNA, 19 nt, Homo sapiens
  misc_RNA (1)...(19): siRNA sense strand
ggacaucagcagcgacauu

SEQ ID NO: 868987 - RNA, 19 nt, Homo sapiens
  misc_RNA (1)...(19): siRNA sense strand
cauagacaaugcaaagaga

SEQ ID NO: 868988 - RNA, 19 nt, Homo sapiens
  misc_RNA (1)...(19): siRNA sense strand
aaagagagcccaccagcuu

SEQ ID NO: 868989 - RNA, 19 nt, Homo sapiens
  misc_RNA (1)...(19): siRNA sense strand
cacaggagauccagcaguu

SEQ ID NO: 868990 - RNA, 19 nt, Homo sapiens
  misc_RNA (1)...(19): siRNA sense strand
gagaaggagguaaaguauu

SEQ ID NO: 868991 - RNA, 19 nt, Homo sapiens
  misc_RNA (1)...(19): siRNA sense strand
gcgaugacucuucuacaaa

SEQ ID NO: 868992 - RNA, 19 nt, Homo sapiens
  misc_RNA (1)...(19): siRNA sense strand
gagcgacuauauugagaag

SEQ ID NO: 868993 - RNA, 19 nt, Homo sapiens
  misc_RNA (1)...(19): siRNA sense strand
cugaaucccuccaguagga

SEQ ID NO: 868994 - RNA, 19 nt, Homo sapiens
  misc_RNA (1)...(19): siRNA sense strand
gaaaagaguagagauaaga

SEQ ID NO: 868995 - RNA, 19 nt, Homo sapiens
  misc_RNA (1)...(19): siRNA sense strand
ugagaaggagguaaaguau

SEQ ID NO: 868996 - RNA, 19 nt, Homo sapiens
  misc_RNA (1)...(19): siRNA sense strand
gaauugucucgccauuuaa

SEQ ID NO: 868997 - RNA, 19 nt, Homo sapiens
  misc_RNA (1)...(19): siRNA sense strand
ggcaagaagccuggaauug

SEQ ID NO: 868998 - RNA, 19 nt, Homo sapiens
  misc_RNA (1)...(19): siRNA sense strand
gggcaagaagccuggaauu

SEQ ID NO: 868999 - RNA, 19 nt, Homo sapiens
  misc_RNA (1)...(19): siRNA sense strand
ggaagaggagggcaagaag

SEQ ID NO: 869000 - RNA, 19 nt, Homo sapiens
  misc_RNA (1)...(19): siRNA sense strand
gggccucuauccacgaguu

SEQ ID NO: 869001 - RNA, 19 nt, Homo sapiens
  misc_RNA (1)...(19): siRNA sense strand
cggaggagcuuugcugucu

SEQ ID NO: 869002 - RNA, 19 nt, Homo sapiens
  misc_RNA (1)...(19): siRNA sense strand
ggagaccauuggcgugaag

SEQ ID NO: 869003 - RNA, 19 nt, Homo sapiens
  misc_RNA (1)...(19): siRNA sense strand
caggagauccagcaguuug

SEQ ID NO: 869004 - RNA, 19 nt, Homo sapiens
  misc_RNA (1)...(19): siRNA sense strand
uugagaaggagguaaagua

SEQ ID NO: 869005 - RNA, 19 nt, Homo sapiens
  misc_RNA (1)...(19): siRNA sense strand
guauuuaggucaguuaacg

SEQ ID NO: 869006 - RNA, 19 nt, Homo sapiens
  misc_RNA (1)...(19): siRNA sense strand
cugcugagcgacuauauug

SEQ ID NO: 869007 - RNA, 19 nt, Homo sapiens
  misc_RNA (1)...(19): siRNA sense strand
gacaucagcagcgacauug

SEQ ID NO: 869008 - RNA, 19 nt, Homo sapiens
  misc_RNA (1)...(19): siRNA sense strand
acagcaagaccaucaguga

SEQ ID NO: 869009 - RNA, 19 nt, Homo sapiens
  misc_RNA (1)...(19): siRNA sense strand
gguggaagccagcacuuuc

SEQ ID NO: 869010 - RNA, 19 nt, Homo sapiens
  misc_RNA (1)...(19): siRNA sense strand
ucagggugcccauccauga

SEQ ID NO: 869011 - RNA, 19 nt, Homo sapiens
  misc_RNA (1)...(19): siRNA sense strand
cgaugacucuucuacaaaa

SEQ ID NO: 869012 - RNA, 19 nt, Homo sapiens
  misc_RNA (1)...(19): siRNA sense strand
ccuaaaaggugaaaagagu

SEQ ID NO: 869013 - RNA, 19 nt, Homo sapiens
  misc_RNA (1)...(19): siRNA sense strand
auaagaaagcccaugagaa

SEQ ID NO: 869014 - RNA, 19 nt, Homo sapiens
  misc_RNA (1)...(19): siRNA sense strand
gccagcacuucgagaacuu

SEQ ID NO: 869015 - RNA, 19 nt, Homo sapiens
  misc_RNA (1)...(19): siRNA sense strand
caugagaaggugacagaga

SEQ ID NO: 869016 - RNA, 19 nt, Homo sapiens
  misc_RNA (1)...(19): siRNA sense strand
agcgaugacucuucuacaa

SEQ ID NO: 869017 - RNA, 19 nt, Homo sapiens
  misc_RNA (1)...(19): siRNA sense strand
gaacuuccuggagaccauu

SEQ ID NO: 869018 - RNA, 19 nt, Homo sapiens
  misc_RNA (1)...(19): siRNA sense strand
acagacugcugagcgacua

SEQ ID NO: 869019 - RNA, 19 nt, Homo sapiens
  misc_RNA (1)...(19): siRNA sense strand
ccacgggcagcucugauga

SEQ ID NO: 869020 - RNA, 19 nt, Homo sapiens
  misc_RNA (1)...(19): siRNA sense strand
ggugaaaagaguagagaua

SEQ ID NO: 869021 - RNA, 19 nt, Homo sapiens
  misc_RNA (1)...(19): siRNA sense strand
gcugagcgacuauauugag

SEQ ID NO: 869022 - RNA, 19 nt, Homo sapiens
  misc_RNA (1)...(19): siRNA sense strand
aaacgaguauuccuaaaag

SEQ ID NO: 869023 - RNA, 19 nt, Homo sapiens
  misc_RNA (1)...(19): siRNA sense strand
gacagagcgauauuugaug

SEQ ID NO: 869024 - RNA, 19 nt, Homo sapiens
  misc_RNA (1)...(19): siRNA sense strand
ucuccuauguucgggauga

SEQ ID NO: 869025 - RNA, 19 nt, Homo sapiens
  misc_RNA (1)...(19): siRNA sense strand
agaaagcccaugagaaggu

SEQ ID NO: 869026 - RNA, 19 nt, Homo sapiens
  misc_RNA (1)...(19): siRNA sense strand
ucaguuaacguccauacca

SEQ ID NO: 869027 - RNA, 19 nt, Homo sapiens
  misc_RNA (1)...(19): siRNA sense strand
cagcauggaccaggacuca

SEQ ID NO: 869028 - RNA, 19 nt, Homo sapiens
  misc_RNA (1)...(19): siRNA sense strand
ggagcuuugcugucugcua

SEQ ID NO: 869029 - RNA, 19 nt, Homo sapiens
  misc_RNA (1)...(19): siRNA sense strand
cugagcgacuauauugaga

SEQ ID NO: 869030 - RNA, 19 nt, Homo sapiens
  misc_RNA (1)...(19): siRNA sense strand
uaccugaaucccuccagua

SEQ ID NO: 869031 - RNA, 19 nt, Homo sapiens
  misc_RNA (1)...(19): siRNA sense strand
gugaaaagaguagagauaa

SEQ ID NO: 869032 - RNA, 19 nt, Homo sapiens
  misc_RNA (1)...(19): siRNA sense strand
ccaguuccaccaccaaugg

SEQ ID NO: 869033 - RNA, 19 nt, Homo sapiens
  misc_RNA (1)...(19): siRNA sense strand
gaagcggucuagaagugua

SEQ ID NO: 869034 - RNA, 19 nt, Homo sapiens
  misc_RNA (1)...(19): siRNA sense strand
aggaagcggucuagaagug

SEQ ID NO: 869035 - RNA, 19 nt, Homo sapiens
  misc_RNA (1)...(19): siRNA sense strand
ucaggaagcggucuagaag

SEQ ID NO: 869036 - RNA, 19 nt, Homo sapiens
  misc_RNA (1)...(19): siRNA sense strand
ggucacggucgccucauga

SEQ ID NO: 869037 - RNA, 19 nt, Homo sapiens
  misc_RNA (1)...(19): siRNA sense strand
gucaggaagcggucuagaa

SEQ ID NO: 869038 - RNA, 19 nt, Homo sapiens
  misc_RNA (1)...(19): siRNA sense strand
ggaagcggucuagaagugu

SEQ ID NO: 869039 - RNA, 19 nt, Homo sapiens
  misc_RNA (1)...(19): siRNA sense strand
ucacggucgccucaugaaa

SEQ ID NO: 869040 - RNA, 19 nt, Homo sapiens
  misc_RNA (1)...(19): siRNA sense strand
ggucgccucaugaaagugu

SEQ ID NO: 869041 - RNA, 19 nt, Homo sapiens
  misc_RNA (1)...(19): siRNA sense strand
gggcuugucuuaccacacu

SEQ ID NO: 869042 - RNA, 19 nt, Homo sapiens
  misc_RNA (1)...(19): siRNA sense strand
gggccgagauccaguauga

SEQ ID NO: 869043 - RNA, 19 nt, Homo sapiens
  misc_RNA (1)...(19): siRNA sense strand
gauccaguaugaugacuag

SEQ ID NO: 869044 - RNA, 19 nt, Homo sapiens
  misc_RNA (1)...(19): siRNA sense strand
ugaacuacgucaccaagga

SEQ ID NO: 869045 - RNA, 19 nt, Homo sapiens
  misc_RNA (1)...(19): siRNA sense strand
uggccaugcuggugaacua

SEQ ID NO: 869046 - RNA, 19 nt, Homo sapiens
  misc_RNA (1)...(19): siRNA sense strand
gccgagauccaguaugaug

SEQ ID NO: 869047 - RNA, 19 nt, Homo sapiens
  misc_RNA (1)...(19): siRNA sense strand
uuaagccgguuccucagau

SEQ ID NO: 869048 - RNA, 19 nt, Homo sapiens
  misc_RNA (1)...(19): siRNA sense strand
cgaagccgcagccaucauc

SEQ ID NO: 869049 - RNA, 19 nt, Homo sapiens
  misc_RNA (1)...(19): siRNA sense strand
gaagaaaucugacuuggaa

SEQ ID NO: 869050 - RNA, 19 nt, Homo sapiens
  misc_RNA (1)...(19): siRNA sense strand
agaaggagcuccagagaaa

SEQ ID NO: 869051 - RNA, 19 nt, Homo sapiens
  misc_RNA (1)...(19): siRNA sense strand
ggagagugcuuccuucaau

SEQ ID NO: 869052 - RNA, 19 nt, Homo sapiens
  misc_RNA (1)...(19): siRNA sense strand
gaagaagaauuucgagaag

SEQ ID NO: 869053 - RNA, 19 nt, Homo sapiens
  misc_RNA (1)...(19): siRNA sense strand
cauaaggacucauaucuca

SEQ ID NO: 869054 - RNA, 19 nt, Homo sapiens
  misc_RNA (1)...(19): siRNA sense strand
ggaagaagaauuucgagaa

SEQ ID NO: 869055 - RNA, 19 nt, Homo sapiens
  misc_RNA (1)...(19): siRNA sense strand
ggacucauaucucauuaca

SEQ ID NO: 869056 - RNA, 19 nt, Homo sapiens
  misc_RNA (1)...(19): siRNA sense strand
ugacaauccugaacucauu

SEQ ID NO: 869057 - RNA, 19 nt, Homo sapiens
  misc_RNA (1)...(19): siRNA sense strand
gaaaucugacuuggaaaua

SEQ ID NO: 869058 - RNA, 19 nt, Homo sapiens
  misc_RNA (1)...(19): siRNA sense strand
gaagaagaaaucugacuug

SEQ ID NO: 869059 - RNA, 19 nt, Homo sapiens
  misc_RNA (1)...(19): siRNA sense strand
agaagaauuucgagaagaa

SEQ ID NO: 869060 - RNA, 19 nt, Homo sapiens
  misc_RNA (1)...(19): siRNA sense strand
ggagacgccugaagaugug

SEQ ID NO: 869061 - RNA, 19 nt, Homo sapiens
  misc_RNA (1)...(19): siRNA sense strand
uaauaaagcagaaggaaga

SEQ ID NO: 869062 - RNA, 19 nt, Homo sapiens
  misc_RNA (1)...(19): siRNA sense strand
cugaggauauugaccauaa

SEQ ID NO: 869063 - RNA, 19 nt, Homo sapiens
  misc_RNA (1)...(19): siRNA sense strand
aaacugaucaauccuguaa

SEQ ID NO: 869064 - RNA, 19 nt, Homo sapiens
  misc_RNA (1)...(19): siRNA sense strand
gaagaagaagcacagaaga

SEQ ID NO: 869065 - RNA, 19 nt, Homo sapiens
  misc_RNA (1)...(19): siRNA sense strand
gaaagcaagacucaccaaa

SEQ ID NO: 869066 - RNA, 19 nt, Homo sapiens
  misc_RNA (1)...(19): siRNA sense strand
gagcacccaugcagagaga

SEQ ID NO: 869067 - RNA, 19 nt, Homo sapiens
  misc_RNA (1)...(19): siRNA sense strand
gaagaagcacagaagaaga

SEQ ID NO: 869068 - RNA, 19 nt, Homo sapiens
  misc_RNA (1)...(19): siRNA sense strand
gcccaaggaagaagaauuu

SEQ ID NO: 869069 - RNA, 19 nt, Homo sapiens
  misc_RNA (1)...(19): siRNA sense strand
acucauaucucauuacaag

SEQ ID NO: 869070 - RNA, 19 nt, Homo sapiens
  misc_RNA (1)...(19): siRNA sense strand
ggaagaagaagcacagaag

SEQ ID NO: 869071 - RNA, 19 nt, Homo sapiens
  misc_RNA (1)...(19): siRNA sense strand
uggagcagcuugaacuuga

SEQ ID NO: 869072 - RNA, 19 nt, Homo sapiens
  misc_RNA (1)...(19): siRNA sense strand
cagcucugcucgccuguuu

SEQ ID NO: 869073 - RNA, 19 nt, Homo sapiens
  misc_RNA (1)...(19): siRNA sense strand
ccaucaagaucuucacaga

SEQ ID NO: 869074 - RNA, 19 nt, Homo sapiens
  misc_RNA (1)...(19): siRNA sense strand
cagacuacauagaagauga

SEQ ID NO: 869075 - RNA, 19 nt, Homo sapiens
  misc_RNA (1)...(19): siRNA sense strand
cuacauagaagaugacaau

SEQ ID NO: 869076 - RNA, 19 nt, Homo sapiens
  misc_RNA (1)...(19): siRNA sense strand
gagaacaggccaagaaguc

SEQ ID NO: 869077 - RNA, 19 nt, Homo sapiens
  misc_RNA (1)...(19): siRNA sense strand
gcagaaggagcuccagaga

SEQ ID NO: 869078 - RNA, 19 nt, Homo sapiens
  misc_RNA (1)...(19): siRNA sense strand
cuagaagcaugcauccauu

SEQ ID NO: 869079 - RNA, 19 nt, Homo sapiens
  misc_RNA (1)...(19): siRNA sense strand
aaacgagaccaaguaauaa

SEQ ID NO: 869080 - RNA, 19 nt, Homo sapiens
  misc_RNA (1)...(19): siRNA sense strand
uaaggacucauaucucauu

SEQ ID NO: 869081 - RNA, 19 nt, Homo sapiens
  misc_RNA (1)...(19): siRNA sense strand
aagcagaaauugcaagaag

SEQ ID NO: 869082 - RNA, 19 nt, Homo sapiens
  misc_RNA (1)...(19): siRNA sense strand
gagagugcuuccuucaauc

SEQ ID NO: 869083 - RNA, 19 nt, Homo sapiens
  misc_RNA (1)...(19): siRNA sense strand
uaaagcagaaggaagaaga

SEQ ID NO: 869084 - RNA, 19 nt, Homo sapiens
  misc_RNA (1)...(19): siRNA sense strand
gcagaaggaagaagaagca

SEQ ID NO: 869085 - RNA, 19 nt, Homo sapiens
  misc_RNA (1)...(19): siRNA sense strand
gacaauccugaacucauua

SEQ ID NO: 869086 - RNA, 19 nt, Homo sapiens
  misc_RNA (1)...(19): siRNA sense strand
caggagaacaggccaagaa

SEQ ID NO: 869087 - RNA, 19 nt, Homo sapiens
  misc_RNA (1)...(19): siRNA sense strand
gaacuugagaagcagaaau

SEQ ID NO: 869088 - RNA, 19 nt, Homo sapiens
  misc_RNA (1)...(19): siRNA sense strand
aaucugacuuggaaauaga

SEQ ID NO: 869089 - RNA, 19 nt, Homo sapiens
  misc_RNA (1)...(19): siRNA sense strand
aaaacgagaccaaguaaua

SEQ ID NO: 869090 - RNA, 19 nt, Homo sapiens
  misc_RNA (1)...(19): siRNA sense strand
gaacucauuaggccucaga

SEQ ID NO: 869091 - RNA, 19 nt, Homo sapiens
  misc_RNA (1)...(19): siRNA sense strand
gagccagacuacauagaag

SEQ ID NO: 869092 - RNA, 19 nt, Homo sapiens
  misc_RNA (1)...(19): siRNA sense strand
gaaacugaucaauccugua

SEQ ID NO: 869093 - RNA, 19 nt, Homo sapiens
  misc_RNA (1)...(19): siRNA sense strand
gcaagaagagcaagaaaau

SEQ ID NO: 869094 - RNA, 19 nt, Homo sapiens
  misc_RNA (1)...(19): siRNA sense strand
caaggaagaagaauuucga

SEQ ID NO: 869095 - RNA, 19 nt, Homo sapiens
  misc_RNA (1)...(19): siRNA sense strand
ucagaacaaaccagaauug

SEQ ID NO: 869096 - RNA, 19 nt, Homo sapiens
  misc_RNA (1)...(19): siRNA sense strand
aucaagaucuucacagaga

SEQ ID NO: 869097 - RNA, 19 nt, Homo sapiens
  misc_RNA (1)...(19): siRNA sense strand
gagaccaaguaauaaagca

SEQ ID NO: 869098 - RNA, 19 nt, Homo sapiens
  misc_RNA (1)...(19): siRNA sense strand
gaaguuggagcagcuugaa

SEQ ID NO: 869099 - RNA, 19 nt, Homo sapiens
  misc_RNA (1)...(19): siRNA sense strand
aagaagaauuucgagaaga

SEQ ID NO: 869100 - RNA, 19 nt, Homo sapiens
  misc_RNA (1)...(19): siRNA sense strand
gcagaaauugcaagaagag

SEQ ID NO: 869101 - RNA, 19 nt, Homo sapiens
  misc_RNA (1)...(19): siRNA sense strand
gaagaugacaauccugaac

SEQ ID NO: 869102 - RNA, 19 nt, Homo sapiens
  misc_RNA (1)...(19): siRNA sense strand
cauagaagaugacaauccu

SEQ ID NO: 869103 - RNA, 19 nt, Homo sapiens
  misc_RNA (1)...(19): siRNA sense strand
gaaauggcagugcgaaucg

SEQ ID NO: 869104 - RNA, 19 nt, Homo sapiens
  misc_RNA (1)...(19): siRNA sense strand
aagaagcacagaagaagaa

SEQ ID NO: 869105 - RNA, 19 nt, Homo sapiens
  misc_RNA (1)...(19): siRNA sense strand
ggccgagccagacuacaua

SEQ ID NO: 869106 - RNA, 19 nt, Homo sapiens
  misc_RNA (1)...(19): siRNA sense strand
gccucgagcuggagcagaa

SEQ ID NO: 869107 - RNA, 19 nt, Homo sapiens
  misc_RNA (1)...(19): siRNA sense strand
gcacccaugcagagagaaa

SEQ ID NO: 869108 - RNA, 19 nt, Homo sapiens
  misc_RNA (1)...(19): siRNA sense strand
ggaaagcaagacucaccaa

SEQ ID NO: 869109 - RNA, 19 nt, Homo sapiens
  misc_RNA (1)...(19): siRNA sense strand
cagcccaccugaggauauu

SEQ ID NO: 869110 - RNA, 19 nt, Homo sapiens
  misc_RNA (1)...(19): siRNA sense strand
aagaagaagcacagaagaa

SEQ ID NO: 869111 - RNA, 19 nt, Homo sapiens
  misc_RNA (1)...(19): siRNA sense strand
ucaagaucuucacagagaa

SEQ ID NO: 869112 - RNA, 19 nt, Homo sapiens
  misc_RNA (1)...(19): siRNA sense strand
cgagccagacuacauagaa

SEQ ID NO: 869113 - RNA, 19 nt, Homo sapiens
  misc_RNA (1)...(19): siRNA sense strand
aaggacucauaucucauua

SEQ ID NO: 869114 - RNA, 19 nt, Homo sapiens
  misc_RNA (1)...(19): siRNA sense strand
cagaaggagcuccagagaa

SEQ ID NO: 869115 - RNA, 19 nt, Homo sapiens
  misc_RNA (1)...(19): siRNA sense strand
gaucuucacagagaacuuc

SEQ ID NO: 869116 - RNA, 19 nt, Homo sapiens
  misc_RNA (1)...(19): siRNA sense strand
aaaucugacuuggaaauag

SEQ ID NO: 869117 - RNA, 19 nt, Homo sapiens
  misc_RNA (1)...(19): siRNA sense strand
gaagcagaaauugcaagaa

SEQ ID NO: 869118 - RNA, 19 nt, Homo sapiens
  misc_RNA (1)...(19): siRNA sense strand
ugaagucucccucuagaag

SEQ ID NO: 869119 - RNA, 19 nt, Homo sapiens
  misc_RNA (1)...(19): siRNA sense strand
ggagaacaggccaagaagu

SEQ ID NO: 869120 - RNA, 19 nt, Homo sapiens
  misc_RNA (1)...(19): siRNA sense strand
cggagacgccugaagaugu

SEQ ID NO: 869121 - RNA, 19 nt, Homo sapiens
  misc_RNA (1)...(19): siRNA sense strand
ugacuuggaaauagagcua

SEQ ID NO: 869122 - RNA, 19 nt, Homo sapiens
  misc_RNA (1)...(19): siRNA sense strand
uagaagcaugcauccauuu

SEQ ID NO: 869123 - RNA, 19 nt, Homo sapiens
  misc_RNA (1)...(19): siRNA sense strand
ccggaaccaucaagaucuu

SEQ ID NO: 869124 - RNA, 19 nt, Homo sapiens
  misc_RNA (1)...(19): siRNA sense strand
acugaagucucccucuaga

SEQ ID NO: 869125 - RNA, 19 nt, Homo sapiens
  misc_RNA (1)...(19): siRNA sense strand
gaauuucgagaagaaccua

SEQ ID NO: 869126 - RNA, 19 nt, Homo sapiens
  misc_RNA (1)...(19): siRNA sense strand
ggaaccaucaagaucuuca

SEQ ID NO: 869127 - RNA, 19 nt, Homo sapiens
  misc_RNA (1)...(19): siRNA sense strand
cggcguggcugauacucau

SEQ ID NO: 869128 - RNA, 19 nt, Homo sapiens
  misc_RNA (1)...(19): siRNA sense strand
agaaaucugacuuggaaau

SEQ ID NO: 869129 - RNA, 19 nt, Homo sapiens
  misc_RNA (1)...(19): siRNA sense strand
ccucagaacaaaccagaau

SEQ ID NO: 869130 - RNA, 19 nt, Homo sapiens
  misc_RNA (1)...(19): siRNA sense strand
gagaaauggcagugcgaau

SEQ ID NO: 869131 - RNA, 19 nt, Homo sapiens
  misc_RNA (1)...(19): siRNA sense strand
aagcacagaagaagaaauc

SEQ ID NO: 869132 - RNA, 19 nt, Homo sapiens
  misc_RNA (1)...(19): siRNA sense strand
cgagggagagugcuuccuu

SEQ ID NO: 869133 - RNA, 19 nt, Homo sapiens
  misc_RNA (1)...(19): siRNA sense strand
gaccauaaggacucauauc

SEQ ID NO: 869134 - RNA, 19 nt, Homo sapiens
  misc_RNA (1)...(19): siRNA sense strand
cauuaggccucagaaacug

SEQ ID NO: 869135 - RNA, 19 nt, Homo sapiens
  misc_RNA (1)...(19): siRNA sense strand
uaaaacggcagcagaaguu

SEQ ID NO: 869136 - RNA, 19 nt, Homo sapiens
  misc_RNA (1)...(19): siRNA sense strand
agaagaagaaaucugacuu

SEQ ID NO: 869137 - RNA, 19 nt, Homo sapiens
  misc_RNA (1)...(19): siRNA sense strand
aaccagaauugcagaaggu

SEQ ID NO: 869138 - RNA, 19 nt, Homo sapiens
  misc_RNA (1)...(19): siRNA sense strand
agaagaaaucugacuugga

SEQ ID NO: 869139 - RNA, 19 nt, Homo sapiens
  misc_RNA (1)...(19): siRNA sense strand
gaagcacagaagaagaaau

SEQ ID NO: 869140 - RNA, 19 nt, Homo sapiens
  misc_RNA (1)...(19): siRNA sense strand
gggagagugcuuccuucaa

SEQ ID NO: 869141 - RNA, 19 nt, Homo sapiens
  misc_RNA (1)...(19): siRNA sense strand
gagcagcuugaacuugaga

SEQ ID NO: 869142 - RNA, 19 nt, Homo sapiens
  misc_RNA (1)...(19): siRNA sense strand
ggagcagcuugaacuugag

SEQ ID NO: 869143 - RNA, 19 nt, Homo sapiens
  misc_RNA (1)...(19): siRNA sense strand
agaagaagcacagaagaag

SEQ ID NO: 869144 - RNA, 19 nt, Homo sapiens
  misc_RNA (1)...(19): siRNA sense strand
cauaucucauuacaagaag

SEQ ID NO: 869145 - RNA, 19 nt, Homo sapiens
  misc_RNA (1)...(19): siRNA sense strand
agcagaaauugcaagaaga

SEQ ID NO: 869146 - RNA, 19 nt, Homo sapiens
  misc_RNA (1)...(19): siRNA sense strand
ucauuaggccucagaaacu

SEQ ID NO: 869147 - RNA, 19 nt, Homo sapiens
  misc_RNA (1)...(19): siRNA sense strand
gaaggugaaaggcaaucuc

SEQ ID NO: 869148 - RNA, 19 nt, Homo sapiens
  misc_RNA (1)...(19): siRNA sense strand
agaaauggcagugcgaauc

SEQ ID NO: 869149 - RNA, 19 nt, Homo sapiens
  misc_RNA (1)...(19): siRNA sense strand
ggaacuacaucgcgcagaa

SEQ ID NO: 869150 - RNA, 19 nt, Homo sapiens
  misc_RNA (1)...(19): siRNA sense strand
cgaaguacgugcugaggaa

SEQ ID NO: 869151 - RNA, 19 nt, Homo sapiens
  misc_RNA (1)...(19): siRNA sense strand
gagugcagcugcucgacua

SEQ ID NO: 869152 - RNA, 19 nt, Homo sapiens
  misc_RNA (1)...(19): siRNA sense strand
gcguguagcuuccacuuuc

SEQ ID NO: 869153 - RNA, 19 nt, Homo sapiens
  misc_RNA (1)...(19): siRNA sense strand
ucacaaacaccuucuacuu

SEQ ID NO: 869154 - RNA, 19 nt, Homo sapiens
  misc_RNA (1)...(19): siRNA sense strand
gcucaacaccgacaacaug

SEQ ID NO: 869155 - RNA, 19 nt, Homo sapiens
  misc_RNA (1)...(19): siRNA sense strand
gaacugugcgugacaugau

SEQ ID NO: 869156 - RNA, 19 nt, Homo sapiens
  misc_RNA (1)...(19): siRNA sense strand
ggcacuaccugcagaagau

SEQ ID NO: 869157 - RNA, 19 nt, Homo sapiens
  misc_RNA (1)...(19): siRNA sense strand
cacaaacaccuucuacuug

SEQ ID NO: 869158 - RNA, 19 nt, Homo sapiens
  misc_RNA (1)...(19): siRNA sense strand
gcgacagcgugcagagaaa

SEQ ID NO: 869159 - RNA, 19 nt, Homo sapiens
  misc_RNA (1)...(19): siRNA sense strand
ggucaagcauccgggaguu

SEQ ID NO: 869160 - RNA, 19 nt, Homo sapiens
  misc_RNA (1)...(19): siRNA sense strand
ccgcagcuguucgcgcuua

SEQ ID NO: 869161 - RNA, 19 nt, Homo sapiens
  misc_RNA (1)...(19): siRNA sense strand
gaugguaaucccaaauaug

SEQ ID NO: 869162 - RNA, 19 nt, Homo sapiens
  misc_RNA (1)...(19): siRNA sense strand
guuuggauccuuugagauu

SEQ ID NO: 869163 - RNA, 19 nt, Homo sapiens
  misc_RNA (1)...(19): siRNA sense strand
ugaugguaaucccaaauau

SEQ ID NO: 869164 - RNA, 19 nt, Homo sapiens
  misc_RNA (1)...(19): siRNA sense strand
gcagaacugugcgugacau

SEQ ID NO: 869165 - RNA, 19 nt, Homo sapiens
  misc_RNA (1)...(19): siRNA sense strand
ucccaaauaugaacaaugc

SEQ ID NO: 869166 - RNA, 19 nt, Homo sapiens
  misc_RNA (1)...(19): siRNA sense strand
ggaguuugacgccgaguuc

SEQ ID NO: 869167 - RNA, 19 nt, Homo sapiens
  misc_RNA (1)...(19): siRNA sense strand
cuacugcggccaccaauuc

SEQ ID NO: 869168 - RNA, 19 nt, Homo sapiens
  misc_RNA (1)...(19): siRNA sense strand
guagcuuccacuuucauaa

SEQ ID NO: 869169 - RNA, 19 nt, Homo sapiens
  misc_RNA (1)...(19): siRNA sense strand
gaacuacaucgcgcagaau

SEQ ID NO: 869170 - RNA, 19 nt, Homo sapiens
  misc_RNA (1)...(19): siRNA sense strand
gacguguucuaugauggua

SEQ ID NO: 869171 - RNA, 19 nt, Homo sapiens
  misc_RNA (1)...(19): siRNA sense strand
agguggagcuggaggaaga

SEQ ID NO: 869172 - RNA, 19 nt, Homo sapiens
  misc_RNA (1)...(19): siRNA sense strand
augguaaucccaaauauga

SEQ ID NO: 869173 - RNA, 19 nt, Homo sapiens
  misc_RNA (1)...(19): siRNA sense strand
ggugccgacuucacaaaca

SEQ ID NO: 869174 - RNA, 19 nt, Homo sapiens
  misc_RNA (1)...(19): siRNA sense strand
gcaagguccuacggucaag

SEQ ID NO: 869175 - RNA, 19 nt, Homo sapiens
  misc_RNA (1)...(19): siRNA sense strand
cagcgcuccuacagcagua

SEQ ID NO: 869176 - RNA, 19 nt, Homo sapiens
  misc_RNA (1)...(19): siRNA sense strand
ccaacaacccgaaguacgu

SEQ ID NO: 869177 - RNA, 19 nt, Homo sapiens
  misc_RNA (1)...(19): siRNA sense strand
cguguucuaugaugguaau

SEQ ID NO: 869178 - RNA, 19 nt, Homo sapiens
  misc_RNA (1)...(19): siRNA sense strand
agucaaacccgcagcuguu

SEQ ID NO: 869179 - RNA, 19 nt, Homo sapiens
  misc_RNA (1)...(19): siRNA sense strand
cuggagaccaugcaucuga

SEQ ID NO: 869180 - RNA, 19 nt, Homo sapiens
  misc_RNA (1)...(19): siRNA sense strand
gguggaaccugcggaagcu

SEQ ID NO: 869181 - RNA, 19 nt, Homo sapiens
  misc_RNA (1)...(19): siRNA sense strand
ugcgcgacguguucuauga

SEQ ID NO: 869182 - RNA, 19 nt, Homo sapiens
  misc_RNA (1)...(19): siRNA sense strand
ugcagaagaugcgcaggaa

SEQ ID NO: 869183 - RNA, 19 nt, Homo sapiens
  misc_RNA (1)...(19): siRNA sense strand
gguaaucccaaauaugaac

SEQ ID NO: 869184 - RNA, 19 nt, Homo sapiens
  misc_RNA (1)...(19): siRNA sense strand
gaccggugccgacuucaca

SEQ ID NO: 869185 - RNA, 19 nt, Homo sapiens
  misc_RNA (1)...(19): siRNA sense strand
gcagguggagcuggaggaa

SEQ ID NO: 869186 - RNA, 19 nt, Homo sapiens
  misc_RNA (1)...(19): siRNA sense strand
caaacaccuucuacuugcu

SEQ ID NO: 869187 - RNA, 19 nt, Homo sapiens
  misc_RNA (1)...(19): siRNA sense strand
ccaccaauucggccaguuc

SEQ ID NO: 869188 - RNA, 19 nt, Homo sapiens
  misc_RNA (1)...(19): siRNA sense strand
ucugaccggugccgacuuc

SEQ ID NO: 869189 - RNA, 19 nt, Homo sapiens
  misc_RNA (1)...(19): siRNA sense strand
cuaugaugguaaucccaaa

SEQ ID NO: 869190 - RNA, 19 nt, Homo sapiens
  misc_RNA (1)...(19): siRNA sense strand
agguuuggauccuuugaga

SEQ ID NO: 869191 - RNA, 19 nt, Homo sapiens
  misc_RNA (1)...(19): siRNA sense strand
ccacgcccuucuccagaca

SEQ ID NO: 869192 - RNA, 19 nt, Homo sapiens
  misc_RNA (1)...(19): siRNA sense strand
gaaauucucucuaagugua

SEQ ID NO: 869193 - RNA, 19 nt, Homo sapiens
  misc_RNA (1)...(19): siRNA sense strand
ugaaaugccuguucuuuga

SEQ ID NO: 869194 - RNA, 19 nt, Homo sapiens
  misc_RNA (1)...(19): siRNA sense strand
ggaagugccugaagacguu

SEQ ID NO: 869195 - RNA, 19 nt, Homo sapiens
  misc_RNA (1)...(19): siRNA sense strand
gcaaauaccuagacuucau

SEQ ID NO: 869196 - RNA, 19 nt, Homo sapiens
  misc_RNA (1)...(19): siRNA sense strand
ccaaguacauucuaaguau

SEQ ID NO: 869197 - RNA, 19 nt, Homo sapiens
  misc_RNA (1)...(19): siRNA sense strand
gaacagaagaugaaagaga

SEQ ID NO: 869198 - RNA, 19 nt, Homo sapiens
  misc_RNA (1)...(19): siRNA sense strand
gaacgaagaaugaguacaa

SEQ ID NO: 869199 - RNA, 19 nt, Homo sapiens
  misc_RNA (1)...(19): siRNA sense strand
cagaggagguuucuaguug

SEQ ID NO: 869200 - RNA, 19 nt, Homo sapiens
  misc_RNA (1)...(19): siRNA sense strand
gcucguaucuggaggaaga

SEQ ID NO: 869201 - RNA, 19 nt, Homo sapiens
  misc_RNA (1)...(19): siRNA sense strand
ggaauucacuccgguguau

SEQ ID NO: 869202 - RNA, 19 nt, Homo sapiens
  misc_RNA (1)...(19): siRNA sense strand
ggaagagauugccagguaa

SEQ ID NO: 869203 - RNA, 19 nt, Homo sapiens
  misc_RNA (1)...(19): siRNA sense strand
gaauuugccuaucccugua

SEQ ID NO: 869204 - RNA, 19 nt, Homo sapiens
  misc_RNA (1)...(19): siRNA sense strand
gcacacaucccuuccuuug

SEQ ID NO: 869205 - RNA, 19 nt, Homo sapiens
  misc_RNA (1)...(19): siRNA sense strand
gagagucuguauccaguaa

SEQ ID NO: 869206 - RNA, 19 nt, Homo sapiens
  misc_RNA (1)...(19): siRNA sense strand
ccagacaccucccaucuug

SEQ ID NO: 869207 - RNA, 19 nt, Homo sapiens
  misc_RNA (1)...(19): siRNA sense strand
gaggaaccauggaggaauu

SEQ ID NO: 869208 - RNA, 19 nt, Homo sapiens
  misc_RNA (1)...(19): siRNA sense strand
gagcaauccuccuauagau

SEQ ID NO: 869209 - RNA, 19 nt, Homo sapiens
  misc_RNA (1)...(19): siRNA sense strand
gcgcacggcuucauucaga

SEQ ID NO: 869210 - RNA, 19 nt, Homo sapiens
  misc_RNA (1)...(19): siRNA sense strand
gggaagagcaugcguguga

SEQ ID NO: 869211 - RNA, 19 nt, Homo sapiens
  misc_RNA (1)...(19): siRNA sense strand
aagccaagaugaaggaaua

SEQ ID NO: 869212 - RNA, 19 nt, Homo sapiens
  misc_RNA (1)...(19): siRNA sense strand
caagugaccaguucaauug

SEQ ID NO: 869213 - RNA, 19 nt, Homo sapiens
  misc_RNA (1)...(19): siRNA sense strand
ucauggaaauucucucuaa

SEQ ID NO: 869214 - RNA, 19 nt, Homo sapiens
  misc_RNA (1)...(19): siRNA sense strand
cagguucucuggcagcuua

SEQ ID NO: 869215 - RNA, 19 nt, Homo sapiens
  misc_RNA (1)...(19): siRNA sense strand
aggaagagauugccaggua

SEQ ID NO: 869216 - RNA, 19 nt, Homo sapiens
  misc_RNA (1)...(19): siRNA sense strand
gaagacguuuagacacaaa

SEQ ID NO: 869217 - RNA, 19 nt, Homo sapiens
  misc_RNA (1)...(19): siRNA sense strand
gaauuauacucucuuacug

SEQ ID NO: 869218 - RNA, 19 nt, Homo sapiens
  misc_RNA (1)...(19): siRNA sense strand
caaguucucuucagaugau

SEQ ID NO: 869219 - RNA, 19 nt, Homo sapiens
  misc_RNA (1)...(19): siRNA sense strand
guugaucgguugagauuga

SEQ ID NO: 869220 - RNA, 19 nt, Homo sapiens
  misc_RNA (1)...(19): siRNA sense strand
auacagcccuugauccuuu

SEQ ID NO: 869221 - RNA, 19 nt, Homo sapiens
  misc_RNA (1)...(19): siRNA sense strand
ucucagggcucaaucaaga

SEQ ID NO: 869222 - RNA, 19 nt, Homo sapiens
  misc_RNA (1)...(19): siRNA sense strand
gagcaauguucucauguuc

SEQ ID NO: 869223 - RNA, 19 nt, Homo sapiens
  misc_RNA (1)...(19): siRNA sense strand
gaaccagauuaccuucuug

SEQ ID NO: 869224 - RNA, 19 nt, Homo sapiens
  misc_RNA (1)...(19): siRNA sense strand
cgaaaugaauaggcuguuu

SEQ ID NO: 869225 - RNA, 19 nt, Homo sapiens
  misc_RNA (1)...(19): siRNA sense strand
ugauagcugugucaucuaa

SEQ ID NO: 869226 - RNA, 19 nt, Homo sapiens
  misc_RNA (1)...(19): siRNA sense strand
gaaaauagucucauggaaa

SEQ ID NO: 869227 - RNA, 19 nt, Homo sapiens
  misc_RNA (1)...(19): siRNA sense strand
gaacggccucgcaucuaua

SEQ ID NO: 869228 - RNA, 19 nt, Homo sapiens
  misc_RNA (1)...(19): siRNA sense strand
gaugugaaacgaaccagua

SEQ ID NO: 869229 - RNA, 19 nt, Homo sapiens
  misc_RNA (1)...(19): siRNA sense strand
ggaucaaccucagcaagaa

SEQ ID NO: 869230 - RNA, 19 nt, Homo sapiens
  misc_RNA (1)...(19): siRNA sense strand
uaaacaaacugugauccaa

SEQ ID NO: 869231 - RNA, 19 nt, Homo sapiens
  misc_RNA (1)...(19): siRNA sense strand
caggaucaaugacauauca

SEQ ID NO: 869232 - RNA, 19 nt, Homo sapiens
  misc_RNA (1)...(19): siRNA sense strand
ggaacuguaugaagguguu

SEQ ID NO: 869233 - RNA, 19 nt, Homo sapiens
  misc_RNA (1)...(19): siRNA sense strand
ugaaagcgauacccguuga

SEQ ID NO: 869234 - RNA, 19 nt, Homo sapiens
  misc_RNA (1)...(19): siRNA sense strand
ggaccaaggcgaauuauac

SEQ ID NO: 869235 - RNA, 19 nt, Homo sapiens
  misc_RNA (1)...(19): siRNA sense strand
gaagagauugccagguaaa

SEQ ID NO: 869236 - RNA, 19 nt, Homo sapiens
  misc_RNA (1)...(19): siRNA sense strand
uauaacaggucccggauca

SEQ ID NO: 869237 - RNA, 19 nt, Homo sapiens
  misc_RNA (1)...(19): siRNA sense strand
caugcuagcuccacaagug

SEQ ID NO: 869238 - RNA, 19 nt, Homo sapiens
  misc_RNA (1)...(19): siRNA sense strand
caauuccuccugacuguua

SEQ ID NO: 869239 - RNA, 19 nt, Homo sapiens
  misc_RNA (1)...(19): siRNA sense strand
ggacaucauacaagugaaa

SEQ ID NO: 869240 - RNA, 19 nt, Homo sapiens
  misc_RNA (1)...(19): siRNA sense strand
ugagagaggagaacaauau

SEQ ID NO: 869241 - RNA, 19 nt, Homo sapiens
  misc_RNA (1)...(19): siRNA sense strand
aaucaaggcucaagaaugc

SEQ ID NO: 869242 - RNA, 19 nt, Homo sapiens
  misc_RNA (1)...(19): siRNA sense strand
gcacauaaaguggcaguau

SEQ ID NO: 869243 - RNA, 19 nt, Homo sapiens
  misc_RNA (1)...(19): siRNA sense strand
gcaacaggaugguggucaa

SEQ ID NO: 869244 - RNA, 19 nt, Homo sapiens
  misc_RNA (1)...(19): siRNA sense strand
gaaucaaggcucaagaaug

SEQ ID NO: 869245 - RNA, 19 nt, Homo sapiens
  misc_RNA (1)...(19): siRNA sense strand
gauccuaauuaugccaaua

SEQ ID NO: 869246 - RNA, 19 nt, Homo sapiens
  misc_RNA (1)...(19): siRNA sense strand
ccauccaccucuccaagua

SEQ ID NO: 869247 - RNA, 19 nt, Homo sapiens
  misc_RNA (1)...(19): siRNA sense strand
gcaauccuccuauagaugu

SEQ ID NO: 869248 - RNA, 19 nt, Homo sapiens
  misc_RNA (1)...(19): siRNA sense strand
ugaaacauccgaaguggaa

SEQ ID NO: 869249 - RNA, 19 nt, Homo sapiens
  misc_RNA (1)...(19): siRNA sense strand
ggcgaauuauacucucuua

SEQ ID NO: 869250 - RNA, 19 nt, Homo sapiens
  misc_RNA (1)...(19): siRNA sense strand
cagccacccugucucuuaa

SEQ ID NO: 869251 - RNA, 19 nt, Homo sapiens
  misc_RNA (1)...(19): siRNA sense strand
gaaagggcugugugcagua

SEQ ID NO: 869252 - RNA, 19 nt, Homo sapiens
  misc_RNA (1)...(19): siRNA sense strand
gcaauguucucauguucca

SEQ ID NO: 869253 - RNA, 19 nt, Homo sapiens
  misc_RNA (1)...(19): siRNA sense strand
gaagagcaugcgugugaaa

SEQ ID NO: 869254 - RNA, 19 nt, Homo sapiens
  misc_RNA (1)...(19): siRNA sense strand
gccaaguucucuucagaug

SEQ ID NO: 869255 - RNA, 19 nt, Homo sapiens
  misc_RNA (1)...(19): siRNA sense strand
gugcuguccuucuuuauuc

SEQ ID NO: 869256 - RNA, 19 nt, Homo sapiens
  misc_RNA (1)...(19): siRNA sense strand
gcauggacuuguguaagaa

SEQ ID NO: 869257 - RNA, 19 nt, Homo sapiens
  misc_RNA (1)...(19): siRNA sense strand
ccacacagggaaaggauuu

SEQ ID NO: 869258 - RNA, 19 nt, Homo sapiens
  misc_RNA (1)...(19): siRNA sense strand
aaacaaggacaauuggaaa

SEQ ID NO: 869259 - RNA, 19 nt, Homo sapiens
  misc_RNA (1)...(19): siRNA sense strand
gacacacccugaacaagug

SEQ ID NO: 869260 - RNA, 19 nt, Homo sapiens
  misc_RNA (1)...(19): siRNA sense strand
caaguacauucuaaguaug

SEQ ID NO: 869261 - RNA, 19 nt, Homo sapiens
  misc_RNA (1)...(19): siRNA sense strand
acacaucccuuccuuuguc

SEQ ID NO: 869262 - RNA, 19 nt, Homo sapiens
  misc_RNA (1)...(19): siRNA sense strand
ggagaaggagcaccaggaa

SEQ ID NO: 869263 - RNA, 19 nt, Homo sapiens
  misc_RNA (1)...(19): siRNA sense strand
gagaccaagugaccaguuc

SEQ ID NO: 869264 - RNA, 19 nt, Homo sapiens
  misc_RNA (1)...(19): siRNA sense strand
ggaugguggucaacacaga

SEQ ID NO: 869265 - RNA, 19 nt, Homo sapiens
  misc_RNA (1)...(19): siRNA sense strand
ggaagagcaugcgugugaa

SEQ ID NO: 869266 - RNA, 19 nt, Homo sapiens
  misc_RNA (1)...(19): siRNA sense strand
cagcaaauaccuagacuuc

SEQ ID NO: 869267 - RNA, 19 nt, Homo sapiens
  misc_RNA (1)...(19): siRNA sense strand
ugagaacgaagaaugagua

SEQ ID NO: 869268 - RNA, 19 nt, Homo sapiens
  misc_RNA (1)...(19): siRNA sense strand
cacccugucucuuaagaaa

SEQ ID NO: 869269 - RNA, 19 nt, Homo sapiens
  misc_RNA (1)...(19): siRNA sense strand
ccaagugaccaguucaauu

SEQ ID NO: 869270 - RNA, 19 nt, Homo sapiens
  misc_RNA (1)...(19): siRNA sense strand
ccugugcuguccuucuuua

SEQ ID NO: 869271 - RNA, 19 nt, Homo sapiens
  misc_RNA (1)...(19): siRNA sense strand
ggcaagauccgaauuuaca

SEQ ID NO: 869272 - RNA, 19 nt, Homo sapiens
  misc_RNA (1)...(19): siRNA sense strand
gauggcaagauccgaauuu

SEQ ID NO: 869273 - RNA, 19 nt, Homo sapiens
  misc_RNA (1)...(19): siRNA sense strand
gcucacugcugccaaugug

SEQ ID NO: 869274 - RNA, 19 nt, Homo sapiens
  misc_RNA (1)...(19): siRNA sense strand
acacugaguucgugcuguu

SEQ ID NO: 869275 - RNA, 19 nt, Homo sapiens
  misc_RNA (1)...(19): siRNA sense strand
gaaacugcagcccaacuug

SEQ ID NO: 869276 - RNA, 19 nt, Homo sapiens
  misc_RNA (1)...(19): siRNA sense strand
caggaaugcuggauagaca

SEQ ID NO: 869277 - RNA, 19 nt, Homo sapiens
  misc_RNA (1)...(19): siRNA sense strand
uacgaucccugcaaucuau

SEQ ID NO: 869278 - RNA, 19 nt, Homo sapiens
  misc_RNA (1)...(19): siRNA sense strand
guugugaaguccuccuuga

SEQ ID NO: 869279 - RNA, 19 nt, Homo sapiens
  misc_RNA (1)...(19): siRNA sense strand
ucacagaggagguuucuag

SEQ ID NO: 869280 - RNA, 19 nt, Homo sapiens
  misc_RNA (1)...(19): siRNA sense strand
guucucauguuccaguuug

SEQ ID NO: 869281 - RNA, 19 nt, Homo sapiens
  misc_RNA (1)...(19): siRNA sense strand
uagaacagaagaugaaaga

SEQ ID NO: 869282 - RNA, 19 nt, Homo sapiens
  misc_RNA (1)...(19): siRNA sense strand
agaacggccucgcaucuau

SEQ ID NO: 869283 - RNA, 19 nt, Homo sapiens
  misc_RNA (1)...(19): siRNA sense strand
ccaguaugcaggucauuaa

SEQ ID NO: 869284 - RNA, 19 nt, Homo sapiens
  misc_RNA (1)...(19): siRNA sense strand
uggaaauucucucuaagug

SEQ ID NO: 869285 - RNA, 19 nt, Homo sapiens
  misc_RNA (1)...(19): siRNA sense strand
gagcaugcgugugaaacau

SEQ ID NO: 869286 - RNA, 19 nt, Homo sapiens
  misc_RNA (1)...(19): siRNA sense strand
uaagguuucuaucccaguu

SEQ ID NO: 869287 - RNA, 19 nt, Homo sapiens
  misc_RNA (1)...(19): siRNA sense strand
cagcacacaucccuuccuu

SEQ ID NO: 869288 - RNA, 19 nt, Homo sapiens
  misc_RNA (1)...(19): siRNA sense strand
guacgaucccugcaaucua

SEQ ID NO: 869289 - RNA, 19 nt, Homo sapiens
  misc_RNA (1)...(19): siRNA sense strand
ggaaucaaggcucaagaau

SEQ ID NO: 869290 - RNA, 19 nt, Homo sapiens
  misc_RNA (1)...(19): siRNA sense strand
gugaaaugccuguucuuug

SEQ ID NO: 869291 - RNA, 19 nt, Homo sapiens
  misc_RNA (1)...(19): siRNA sense strand
ggaaauucucucuaagugu

SEQ ID NO: 869292 - RNA, 19 nt, Homo sapiens
  misc_RNA (1)...(19): siRNA sense strand
caacagauuuggagauaua

SEQ ID NO: 869293 - RNA, 19 nt, Homo sapiens
  misc_RNA (1)...(19): siRNA sense strand
ggacauccguuaaauauug

SEQ ID NO: 869294 - RNA, 19 nt, Homo sapiens
  misc_RNA (1)...(19): siRNA sense strand
ggacagaguuagagauuga

SEQ ID NO: 869295 - RNA, 19 nt, Homo sapiens
  misc_RNA (1)...(19): siRNA sense strand
ggauuuaacuuguucugua

SEQ ID NO: 869296 - RNA, 19 nt, Homo sapiens
  misc_RNA (1)...(19): siRNA sense strand
gcaaaucucugcaaguguu

SEQ ID NO: 869297 - RNA, 19 nt, Homo sapiens
  misc_RNA (1)...(19): siRNA sense strand
ggaagccaaugaugaguaa

SEQ ID NO: 869298 - RNA, 19 nt, Homo sapiens
  misc_RNA (1)...(19): siRNA sense strand
gguaaaagcugguggauuu

SEQ ID NO: 869299 - RNA, 19 nt, Homo sapiens
  misc_RNA (1)...(19): siRNA sense strand
ggaaacagcagcagagauu

SEQ ID NO: 869300 - RNA, 19 nt, Homo sapiens
  misc_RNA (1)...(19): siRNA sense strand
gaaauuaucagcccaggaa

SEQ ID NO: 869301 - RNA, 19 nt, Homo sapiens
  misc_RNA (1)...(19): siRNA sense strand
gguccaagaugcugaguuu

SEQ ID NO: 869302 - RNA, 19 nt, Homo sapiens
  misc_RNA (1)...(19): siRNA sense strand
gcauauacuucaccaagaa

SEQ ID NO: 869303 - RNA, 19 nt, Homo sapiens
  misc_RNA (1)...(19): siRNA sense strand
ggacaugcacccaggaaua

SEQ ID NO: 869304 - RNA, 19 nt, Homo sapiens
  misc_RNA (1)...(19): siRNA sense strand
ccugaaaccuuuguuauuu

SEQ ID NO: 869305 - RNA, 19 nt, Homo sapiens
  misc_RNA (1)...(19): siRNA sense strand
gcucagaucuuuccucagu

SEQ ID NO: 869306 - RNA, 19 nt, Homo sapiens
  misc_RNA (1)...(19): siRNA sense strand
aaacagggauguacuggaa

SEQ ID NO: 869307 - RNA, 19 nt, Homo sapiens
  misc_RNA (1)...(19): siRNA sense strand
gugaaguccuccagaauaa

SEQ ID NO: 869308 - RNA, 19 nt, Homo sapiens
  misc_RNA (1)...(19): siRNA sense strand
ccacaaaggcuaaacaguu

SEQ ID NO: 869309 - RNA, 19 nt, Homo sapiens
  misc_RNA (1)...(19): siRNA sense strand
gcagacggcagauguaauu

SEQ ID NO: 869310 - RNA, 19 nt, Homo sapiens
  misc_RNA (1)...(19): siRNA sense strand
caaagucaauucuacaaca

SEQ ID NO: 869311 - RNA, 19 nt, Homo sapiens
  misc_RNA (1)...(19): siRNA sense strand
gagcagcagcuuacaauga

SEQ ID NO: 869312 - RNA, 19 nt, Homo sapiens
  misc_RNA (1)...(19): siRNA sense strand
uaaccacaaugacuucaaa

SEQ ID NO: 869313 - RNA, 19 nt, Homo sapiens
  misc_RNA (1)...(19): siRNA sense strand
uggcagcccuguugauuaa

SEQ ID NO: 869314 - RNA, 19 nt, Homo sapiens
  misc_RNA (1)...(19): siRNA sense strand
gaaaggaacaugacauuuu

SEQ ID NO: 869315 - RNA, 19 nt, Homo sapiens
  misc_RNA (1)...(19): siRNA sense strand
gagaaaggaacaugacauu

SEQ ID NO: 869316 - RNA, 19 nt, Homo sapiens
  misc_RNA (1)...(19): siRNA sense strand
cagcaaaucucugcaagug

SEQ ID NO: 869317 - RNA, 19 nt, Homo sapiens
  misc_RNA (1)...(19): siRNA sense strand
gcaaguggcagcccuguug

SEQ ID NO: 869318 - RNA, 19 nt, Homo sapiens
  misc_RNA (1)...(19): siRNA sense strand
cagaauaaguuuggcugua

SEQ ID NO: 869319 - RNA, 19 nt, Homo sapiens
  misc_RNA (1)...(19): siRNA sense strand
ccaggaauauguacaguca

SEQ ID NO: 869320 - RNA, 19 nt, Homo sapiens
  misc_RNA (1)...(19): siRNA sense strand
uggagaagauagacaauga

SEQ ID NO: 869321 - RNA, 19 nt, Homo sapiens
  misc_RNA (1)...(19): siRNA sense strand
cggcagauguaauuguuaa

SEQ ID NO: 869322 - RNA, 19 nt, Homo sapiens
  misc_RNA (1)...(19): siRNA sense strand
ggaaacauggaaauaaaga

SEQ ID NO: 869323 - RNA, 19 nt, Homo sapiens
  misc_RNA (1)...(19): siRNA sense strand
auacggagcuggcauauac

SEQ ID NO: 869324 - RNA, 19 nt, Homo sapiens
  misc_RNA (1)...(19): siRNA sense strand
gaacauugaagauaugcuu

SEQ ID NO: 869325 - RNA, 19 nt, Homo sapiens
  misc_RNA (1)...(19): siRNA sense strand
uccuaaaccucagauauua

SEQ ID NO: 869326 - RNA, 19 nt, Homo sapiens
  misc_RNA (1)...(19): siRNA sense strand
cucaagagcuucuagauca

SEQ ID NO: 869327 - RNA, 19 nt, Homo sapiens
  misc_RNA (1)...(19): siRNA sense strand
gcaaugaggacccuacugu

SEQ ID NO: 869328 - RNA, 19 nt, Homo sapiens
  misc_RNA (1)...(19): siRNA sense strand
ggagauauauaaggcuuuc

SEQ ID NO: 869329 - RNA, 19 nt, Homo sapiens
  misc_RNA (1)...(19): siRNA sense strand
cagcagagauuuuguuuga

SEQ ID NO: 869330 - RNA, 19 nt, Homo sapiens
  misc_RNA (1)...(19): siRNA sense strand
gcagagggccauuguaagu

SEQ ID NO: 869331 - RNA, 19 nt, Homo sapiens
  misc_RNA (1)...(19): siRNA sense strand
cggaauuucuugccacaaa

SEQ ID NO: 869332 - RNA, 19 nt, Homo sapiens
  misc_RNA (1)...(19): siRNA sense strand
caagggaagccaaugauga

SEQ ID NO: 869333 - RNA, 19 nt, Homo sapiens
  misc_RNA (1)...(19): siRNA sense strand
agugucagcuggugagaua

SEQ ID NO: 869334 - RNA, 19 nt, Homo sapiens
  misc_RNA (1)...(19): siRNA sense strand
guaaacccacaugauauua

SEQ ID NO: 869335 - RNA, 19 nt, Homo sapiens
  misc_RNA (1)...(19): siRNA sense strand
gacggcagauguaauuguu

SEQ ID NO: 869336 - RNA, 19 nt, Homo sapiens
  misc_RNA (1)...(19): siRNA sense strand
ccaaugaugaguaauuuga

SEQ ID NO: 869337 - RNA, 19 nt, Homo sapiens
  misc_RNA (1)...(19): siRNA sense strand
guuggcaaauucccauuaa

SEQ ID NO: 869338 - RNA, 19 nt, Homo sapiens
  misc_RNA (1)...(19): siRNA sense strand
ccaagaugcugaguuugaa

SEQ ID NO: 869339 - RNA, 19 nt, Homo sapiens
  misc_RNA (1)...(19): siRNA sense strand
gaauaaguuuggcuguauc

SEQ ID NO: 869340 - RNA, 19 nt, Homo sapiens
  misc_RNA (1)...(19): siRNA sense strand
cuggaaacauggaaauaaa

SEQ ID NO: 869341 - RNA, 19 nt, Homo sapiens
  misc_RNA (1)...(19): siRNA sense strand
agaauaaguuuggcuguau

SEQ ID NO: 869342 - RNA, 19 nt, Homo sapiens
  misc_RNA (1)...(19): siRNA sense strand
gcaagucccauaccaguuc

SEQ ID NO: 869343 - RNA, 19 nt, Homo sapiens
  misc_RNA (1)...(19): siRNA sense strand
guagagacuauccggguua

SEQ ID NO: 869344 - RNA, 19 nt, Homo sapiens
  misc_RNA (1)...(19): siRNA sense strand
gccuugagcucugggauuu

SEQ ID NO: 869345 - RNA, 19 nt, Homo sapiens
  misc_RNA (1)...(19): siRNA sense strand
gaaugcagccaaugaagau

SEQ ID NO: 869346 - RNA, 19 nt, Homo sapiens
  misc_RNA (1)...(19): siRNA sense strand
agagugagcugggacaaga

SEQ ID NO: 869347 - RNA, 19 nt, Homo sapiens
  misc_RNA (1)...(19): siRNA sense strand
caaccugacccuccagauu

SEQ ID NO: 869348 - RNA, 19 nt, Homo sapiens
  misc_RNA (1)...(19): siRNA sense strand
ucuguaaacccacaugaua

SEQ ID NO: 869349 - RNA, 19 nt, Homo sapiens
  misc_RNA (1)...(19): siRNA sense strand
uauauaaggcuuucaguuc

SEQ ID NO: 869350 - RNA, 19 nt, Homo sapiens
  misc_RNA (1)...(19): siRNA sense strand
gcagagauuuuguuugaug

SEQ ID NO: 869351 - RNA, 19 nt, Homo sapiens
  misc_RNA (1)...(19): siRNA sense strand
aagcaggaguugaaaugaa

SEQ ID NO: 869352 - RNA, 19 nt, Homo sapiens
  misc_RNA (1)...(19): siRNA sense strand
aagaugaccucaccacaca

SEQ ID NO: 869353 - RNA, 19 nt, Homo sapiens
  misc_RNA (1)...(19): siRNA sense strand
gucacaagauuacucauca

SEQ ID NO: 869354 - RNA, 19 nt, Homo sapiens
  misc_RNA (1)...(19): siRNA sense strand
uauguacagucacaagauu

SEQ ID NO: 869355 - RNA, 19 nt, Homo sapiens
  misc_RNA (1)...(19): siRNA sense strand
ccagggacauccguuaaau

SEQ ID NO: 869356 - RNA, 19 nt, Homo sapiens
  misc_RNA (1)...(19): siRNA sense strand
ggcauauacuucaccaaga

SEQ ID NO: 869357 - RNA, 19 nt, Homo sapiens
  misc_RNA (1)...(19): siRNA sense strand
ucaaugcaauggucgugaa

SEQ ID NO: 869358 - RNA, 19 nt, Homo sapiens
  misc_RNA (1)...(19): siRNA sense strand
ggaaauaaagaaggaaaca

SEQ ID NO: 869359 - RNA, 19 nt, Homo sapiens
  misc_RNA (1)...(19): siRNA sense strand
ggaaggacagaguuagaga

SEQ ID NO: 869360 - RNA, 19 nt, Homo sapiens
  misc_RNA (1)...(19): siRNA sense strand
ccacaucauugagaauaau

SEQ ID NO: 869361 - RNA, 19 nt, Homo sapiens
  misc_RNA (1)...(19): siRNA sense strand
guucugaaauggcaaagag

SEQ ID NO: 869362 - RNA, 19 nt, Homo sapiens
  misc_RNA (1)...(19): siRNA sense strand
gcagcagcuuacaaugaaa

SEQ ID NO: 869363 - RNA, 19 nt, Homo sapiens
  misc_RNA (1)...(19): siRNA sense strand
gauaagcugaucuaugugu

SEQ ID NO: 869364 - RNA, 19 nt, Homo sapiens
  misc_RNA (1)...(19): siRNA sense strand
gaaacagcagcagagauuu

SEQ ID NO: 869365 - RNA, 19 nt, Homo sapiens
  misc_RNA (1)...(19): siRNA sense strand
gggaagccaaugaugagua

SEQ ID NO: 869366 - RNA, 19 nt, Homo sapiens
  misc_RNA (1)...(19): siRNA sense strand
ugugaaguccuccagaaua

SEQ ID NO: 869367 - RNA, 19 nt, Homo sapiens
  misc_RNA (1)...(19): siRNA sense strand
gauagacaaugagguccuu

SEQ ID NO: 869368 - RNA, 19 nt, Homo sapiens
  misc_RNA (1)...(19): siRNA sense strand
ccagaaccaccacaucauu

SEQ ID NO: 869369 - RNA, 19 nt, Homo sapiens
  misc_RNA (1)...(19): siRNA sense strand
ggaauuucuugccacaaag

SEQ ID NO: 869370 - RNA, 19 nt, Homo sapiens
  misc_RNA (1)...(19): siRNA sense strand
gaauucauccuagggaaga

SEQ ID NO: 869371 - RNA, 19 nt, Homo sapiens
  misc_RNA (1)...(19): siRNA sense strand
gaaguccuccagaauaagu

SEQ ID NO: 869372 - RNA, 19 nt, Homo sapiens
  misc_RNA (1)...(19): siRNA sense strand
caagacgaaaugaaagaaa

SEQ ID NO: 869373 - RNA, 19 nt, Homo sapiens
  misc_RNA (1)...(19): siRNA sense strand
ggacuggaaacauggaaau

SEQ ID NO: 869374 - RNA, 19 nt, Homo sapiens
  misc_RNA (1)...(19): siRNA sense strand
ugccagauaugguaaagug

SEQ ID NO: 869375 - RNA, 19 nt, Homo sapiens
  misc_RNA (1)...(19): siRNA sense strand
caacagcaaaucucugcaa

SEQ ID NO: 869376 - RNA, 19 nt, Homo sapiens
  misc_RNA (1)...(19): siRNA sense strand
ccuuauggcugccuuucaa

SEQ ID NO: 869377 - RNA, 19 nt, Homo sapiens
  misc_RNA (1)...(19): siRNA sense strand
guaaaguacaggaggaaau

SEQ ID NO: 869378 - RNA, 19 nt, Homo sapiens
  misc_RNA (1)...(19): siRNA sense strand
acgcauggauccaaagaau

SEQ ID NO: 869379 - RNA, 19 nt, Homo sapiens
  misc_RNA (1)...(19): siRNA sense strand
aaacccacaugauauuaca

SEQ ID NO: 869380 - RNA, 19 nt, Homo sapiens
  misc_RNA (1)...(19): siRNA sense strand
gcaagggaagccaaugaug

SEQ ID NO: 869381 - RNA, 19 nt, Homo sapiens
  misc_RNA (1)...(19): siRNA sense strand
agagggccauuguaaguau

SEQ ID NO: 869382 - RNA, 19 nt, Homo sapiens
  misc_RNA (1)...(19): siRNA sense strand
aaugcugacuccuaggaua

SEQ ID NO: 869383 - RNA, 19 nt, Homo sapiens
  misc_RNA (1)...(19): siRNA sense strand
ggaccaaugagacccuuug

SEQ ID NO: 869384 - RNA, 19 nt, Homo sapiens
  misc_RNA (1)...(19): siRNA sense strand
cuccagcccugaaaccuuu

SEQ ID NO: 869385 - RNA, 19 nt, Homo sapiens
  misc_RNA (1)...(19): siRNA sense strand
ccacaugauauuacaguug

SEQ ID NO: 869386 - RNA, 19 nt, Homo sapiens
  misc_RNA (1)...(19): siRNA sense strand
gacuggugcucuuggagaa

SEQ ID NO: 869387 - RNA, 19 nt, Homo sapiens
  misc_RNA (1)...(19): siRNA sense strand
ucaagagcuucuagaucaa

SEQ ID NO: 869388 - RNA, 19 nt, Homo sapiens
  misc_RNA (1)...(19): siRNA sense strand
uuaggacaguggacuauuc

SEQ ID NO: 869389 - RNA, 19 nt, Homo sapiens
  misc_RNA (1)...(19): siRNA sense strand
augcugaguuugaacaauu

SEQ ID NO: 869390 - RNA, 19 nt, Homo sapiens
  misc_RNA (1)...(19): siRNA sense strand
aagaagagagcaaacaguu

SEQ ID NO: 869391 - RNA, 19 nt, Homo sapiens
  misc_RNA (1)...(19): siRNA sense strand
gacaugcacccaggaauau

SEQ ID NO: 869392 - RNA, 19 nt, Homo sapiens
  misc_RNA (1)...(19): siRNA sense strand
gaaagaaacuuccucagua

SEQ ID NO: 869393 - RNA, 19 nt, Homo sapiens
  misc_RNA (1)...(19): siRNA sense strand
ggacuuggcugaugcuuug

SEQ ID NO: 869394 - RNA, 19 nt, Homo sapiens
  misc_RNA (1)...(19): siRNA sense strand
gcaaauacuuuaggaaaug

SEQ ID NO: 869395 - RNA, 19 nt, Homo sapiens
  misc_RNA (1)...(19): siRNA sense strand
aaagaaacuuccucaguaa

SEQ ID NO: 869396 - RNA, 19 nt, Homo sapiens
  misc_RNA (1)...(19): siRNA sense strand
caccagagcuccagcaaau

SEQ ID NO: 869397 - RNA, 19 nt, Homo sapiens
  misc_RNA (1)...(19): siRNA sense strand
cagcaaauacuuuaggaaa

SEQ ID NO: 869398 - RNA, 19 nt, Homo sapiens
  misc_RNA (1)...(19): siRNA sense strand
ggauuggacuuggcugaug

SEQ ID NO: 869399 - RNA, 19 nt, Homo sapiens
  misc_RNA (1)...(19): siRNA sense strand
ggcagagccuggcaccauu

SEQ ID NO: 869400 - RNA, 19 nt, Homo sapiens
  misc_RNA (1)...(19): siRNA sense strand
gaggaugcagugaaagaaa

SEQ ID NO: 869401 - RNA, 19 nt, Homo sapiens
  misc_RNA (1)...(19): siRNA sense strand
ugaaagaaacuuccucagu

SEQ ID NO: 869402 - RNA, 19 nt, Homo sapiens
  misc_RNA (1)...(19): siRNA sense strand
ccuggaggaugcagugaaa

SEQ ID NO: 869403 - RNA, 19 nt, Homo sapiens
  misc_RNA (1)...(19): siRNA sense strand
ugacaaggguaaaggugau

SEQ ID NO: 869404 - RNA, 19 nt, Homo sapiens
  misc_RNA (1)...(19): siRNA sense strand
gagaauacaaaccugacaa

SEQ ID NO: 869405 - RNA, 19 nt, Homo sapiens
  misc_RNA (1)...(19): siRNA sense strand
gaaacuuccucaguaaagc

SEQ ID NO: 869406 - RNA, 19 nt, Homo sapiens
  misc_RNA (1)...(19): siRNA sense strand
gaugauggccgcaggaaac

SEQ ID NO: 869407 - RNA, 19 nt, Homo sapiens
  misc_RNA (1)...(19): siRNA sense strand
gaugauggccgcaggaaac

SEQ ID NO: 869408 - RNA, 19 nt, Homo sapiens
  misc_RNA (1)...(19): siRNA sense strand
caggaaaccggguauagga

SEQ ID NO: 869409 - RNA, 19 nt, Homo sapiens
  misc_RNA (1)...(19): siRNA sense strand
gagcuccagcaaauacuuu

SEQ ID NO: 869410 - RNA, 19 nt, Homo sapiens
  misc_RNA (1)...(19): siRNA sense strand
gcgaggaucuggggacuuu

SEQ ID NO: 869411 - RNA, 19 nt, Homo sapiens
  misc_RNA (1)...(19): siRNA sense strand
ggaggaugcagugaaagaa

SEQ ID NO: 869412 - RNA, 19 nt, Homo sapiens
  misc_RNA (1)...(19): siRNA sense strand
ggaggaagagagagaugga

SEQ ID NO: 869413 - RNA, 19 nt, Homo sapiens
  misc_RNA (1)...(19): siRNA sense strand
gguauaggaggaagagaga

SEQ ID NO: 869414 - RNA, 19 nt, Homo sapiens
  misc_RNA (1)...(19): siRNA sense strand
gcagagccuggcaccauug

SEQ ID NO: 869415 - RNA, 19 nt, Homo sapiens
  misc_RNA (1)...(19): siRNA sense strand
gaagagagagauggaacca

SEQ ID NO: 869416 - RNA, 19 nt, Homo sapiens
  misc_RNA (1)...(19): siRNA sense strand
caccagagcuccggcaaaa

SEQ ID NO: 869417 - RNA, 19 nt, Homo sapiens
  misc_RNA (1)...(19): siRNA sense strand
ccagagcuccagcaaauac

SEQ ID NO: 869418 - RNA, 19 nt, Homo sapiens
  misc_RNA (1)...(19): siRNA sense strand
guaaccaccacgaccaaga

SEQ ID NO: 869419 - RNA, 19 nt, Homo sapiens
  misc_RNA (1)...(19): siRNA sense strand
uggcugaugcuuuggauga

SEQ ID NO: 869420 - RNA, 19 nt, Homo sapiens
  misc_RNA (1)...(19): siRNA sense strand
ccagcuacaucuccuacca

SEQ ID NO: 869421 - RNA, 19 nt, Homo sapiens
  misc_RNA (1)...(19): siRNA sense strand
ggacuuugaugauuuuaac

SEQ ID NO: 869422 - RNA, 19 nt, Homo sapiens
  misc_RNA (1)...(19): siRNA sense strand
gcaggaaaccggguauagg

SEQ ID NO: 869423 - RNA, 19 nt, Homo sapiens
  misc_RNA (1)...(19): siRNA sense strand
ggagaauacaaaccugaca

SEQ ID NO: 869424 - RNA, 19 nt, Homo sapiens
  misc_RNA (1)...(19): siRNA sense strand
ccuaccagcagaagaaguu

SEQ ID NO: 869425 - RNA, 19 nt, Homo sapiens
  misc_RNA (1)...(19): siRNA sense strand
cgaaaugaucgagaugaug

SEQ ID NO: 869426 - RNA, 19 nt, Homo sapiens
  misc_RNA (1)...(19): siRNA sense strand
gagaugauggccgcaggaa

SEQ ID NO: 869427 - RNA, 19 nt, Homo sapiens
  misc_RNA (1)...(19): siRNA sense strand
uauaggaggaagagagaga

SEQ ID NO: 869428 - RNA, 19 nt, Homo sapiens
  misc_RNA (1)...(19): siRNA sense strand
acaaaccugacaaggguaa

SEQ ID NO: 869429 - RNA, 19 nt, Homo sapiens
  misc_RNA (1)...(19): siRNA sense strand
uggcugaugcccuggauga

SEQ ID NO: 869430 - RNA, 19 nt, Homo sapiens
  misc_RNA (1)...(19): siRNA sense strand
agaaacuuccucaguaaag

SEQ ID NO: 869431 - RNA, 19 nt, Homo sapiens
  misc_RNA (1)...(19): siRNA sense strand
gauggccgcaggaaaccaa

SEQ ID NO: 869432 - RNA, 19 nt, Homo sapiens
  misc_RNA (1)...(19): siRNA sense strand
gcugaugcuuuggaugauc

SEQ ID NO: 869433 - RNA, 19 nt, Homo sapiens
  misc_RNA (1)...(19): siRNA sense strand
ccaccagagcuccagcaaa

SEQ ID NO: 869434 - RNA, 19 nt, Homo sapiens
  misc_RNA (1)...(19): siRNA sense strand
aagaaacuuccucaguaaa

SEQ ID NO: 869435 - RNA, 19 nt, Homo sapiens
  misc_RNA (1)...(19): siRNA sense strand
ggccgcaggaaaccaauug

SEQ ID NO: 869436 - RNA, 19 nt, Homo sapiens
  misc_RNA (1)...(19): siRNA sense strand
ucuccuaccagcagaagaa

SEQ ID NO: 869437 - RNA, 19 nt, Homo sapiens
  misc_RNA (1)...(19): siRNA sense strand
caaugacgacccuggaucu

SEQ ID NO: 869438 - RNA, 19 nt, Homo sapiens
  misc_RNA (1)...(19): siRNA sense strand
gaggaagagagagauggaa

SEQ ID NO: 869439 - RNA, 19 nt, Homo sapiens
  misc_RNA (1)...(19): siRNA sense strand
gaucuggggacuuugauga

SEQ ID NO: 869440 - RNA, 19 nt, Homo sapiens
  misc_RNA (1)...(19): siRNA sense strand
ugacgaagcugcucaggua

SEQ ID NO: 869441 - RNA, 19 nt, Homo sapiens
  misc_RNA (1)...(19): siRNA sense strand
gagggaggcugaaggugaa

SEQ ID NO: 869442 - RNA, 19 nt, Homo sapiens
  misc_RNA (1)...(19): siRNA sense strand
cagaggagaucuucaacug

SEQ ID NO: 869443 - RNA, 19 nt, Homo sapiens
  misc_RNA (1)...(19): siRNA sense strand
gggagugccugacaugaca

SEQ ID NO: 869444 - RNA, 19 nt, Homo sapiens
  misc_RNA (1)...(19): siRNA sense strand
gagaggagcaggugaagca

SEQ ID NO: 869445 - RNA, 19 nt, Homo sapiens
  misc_RNA (1)...(19): siRNA sense strand
gagccacccuucaggaauc

SEQ ID NO: 869446 - RNA, 19 nt, Homo sapiens
  misc_RNA (1)...(19): siRNA sense strand
gggcucagcucuggcucua

SEQ ID NO: 869447 - RNA, 19 nt, Homo sapiens
  misc_RNA (1)...(19): siRNA sense strand
acauccggcucacauauuu

SEQ ID NO: 869448 - RNA, 19 nt, Homo sapiens
  misc_RNA (1)...(19): siRNA sense strand
gaugaaggcucagcucaac

SEQ ID NO: 869449 - RNA, 19 nt, Homo sapiens
  misc_RNA (1)...(19): siRNA sense strand
gagcgaggacuccaucuuc

SEQ ID NO: 869450 - RNA, 19 nt, Homo sapiens
  misc_RNA (1)...(19): siRNA sense strand
gcugugaagcugaaaauua

SEQ ID NO: 869451 - RNA, 19 nt, Homo sapiens
  misc_RNA (1)...(19): siRNA sense strand
gggcagaggagaucuucaa

SEQ ID NO: 869452 - RNA, 19 nt, Homo sapiens
  misc_RNA (1)...(19): siRNA sense strand
ggacuucuccgaaccuucu

SEQ ID NO: 869453 - RNA, 19 nt, Homo sapiens
  misc_RNA (1)...(19): siRNA sense strand
agaagguggugucagcaaa

SEQ ID NO: 869454 - RNA, 19 nt, Homo sapiens
  misc_RNA (1)...(19): siRNA sense strand
gggaggccguggacaaucu

SEQ ID NO: 869455 - RNA, 19 nt, Homo sapiens
  misc_RNA (1)...(19): siRNA sense strand
cggccucucugcugacuga

SEQ ID NO: 869456 - RNA, 19 nt, Homo sapiens
  misc_RNA (1)...(19): siRNA sense strand
ggaugaaggcucagcucaa

SEQ ID NO: 869457 - RNA, 19 nt, Homo sapiens
  misc_RNA (1)...(19): siRNA sense strand
ggaccuuuguggugaagag

SEQ ID NO: 869458 - RNA, 19 nt, Homo sapiens
  misc_RNA (1)...(19): siRNA sense strand
gucccaagcucacguguac

SEQ ID NO: 869459 - RNA, 19 nt, Homo sapiens
  misc_RNA (1)...(19): siRNA sense strand
caggcgcacucccgacauu

SEQ ID NO: 869460 - RNA, 19 nt, Homo sapiens
  misc_RNA (1)...(19): siRNA sense strand
cgaagcugcucagguacuu

SEQ ID NO: 869461 - RNA, 19 nt, Homo sapiens
  misc_RNA (1)...(19): siRNA sense strand
gggagcggcugaccaucau

SEQ ID NO: 869462 - RNA, 19 nt, Homo sapiens
  misc_RNA (1)...(19): siRNA sense strand
gagggaccuuuguggugaa

SEQ ID NO: 869463 - RNA, 19 nt, Homo sapiens
  misc_RNA (1)...(19): siRNA sense strand
cugcucagguacuuuguga

SEQ ID NO: 869464 - RNA, 19 nt, Homo sapiens
  misc_RNA (1)...(19): siRNA sense strand
gugaggcugugaagcugaa

SEQ ID NO: 869465 - RNA, 19 nt, Homo sapiens
  misc_RNA (1)...(19): siRNA sense strand
gagaagguggugucagcaa

SEQ ID NO: 869466 - RNA, 19 nt, Homo sapiens
  misc_RNA (1)...(19): siRNA sense strand
ucacauccggcucacauau

SEQ ID NO: 869467 - RNA, 19 nt, Homo sapiens
  misc_RNA (1)...(19): siRNA sense strand
uaggagggcuggccagaac

SEQ ID NO: 869468 - RNA, 19 nt, Homo sapiens
  misc_RNA (1)...(19): siRNA sense strand
acucaagucccaucccuuu

SEQ ID NO: 869469 - RNA, 19 nt, Homo sapiens
  misc_RNA (1)...(19): siRNA sense strand
ugagagaggagcaggugaa

SEQ ID NO: 869470 - RNA, 19 nt, Homo sapiens
  misc_RNA (1)...(19): siRNA sense strand
ggucacauccggcucacau

SEQ ID NO: 869471 - RNA, 19 nt, Homo sapiens
  misc_RNA (1)...(19): siRNA sense strand
uugggucucuacuguauga

SEQ ID NO: 869472 - RNA, 19 nt, Homo sapiens
  misc_RNA (1)...(19): siRNA sense strand
caccugcaccuucaagcua

SEQ ID NO: 869473 - RNA, 19 nt, Homo sapiens
  misc_RNA (1)...(19): siRNA sense strand
gggcuggccagaacucaga

SEQ ID NO: 869474 - RNA, 19 nt, Homo sapiens
  misc_RNA (1)...(19): siRNA sense strand
gaacugcugacgggaaugg

SEQ ID NO: 869475 - RNA, 19 nt, Homo sapiens
  misc_RNA (1)...(19): siRNA sense strand
gacaaaacgugacuaucug

SEQ ID NO: 869476 - RNA, 19 nt, Homo sapiens
  misc_RNA (1)...(19): siRNA sense strand
cuuugggucucuacuguau

SEQ ID NO: 869477 - RNA, 19 nt, Homo sapiens
  misc_RNA (1)...(19): siRNA sense strand
ggucucuacuguaugaacu

SEQ ID NO: 869478 - RNA, 19 nt, Homo sapiens
  misc_RNA (1)...(19): siRNA sense strand
gcccuggagcgcgauguua

SEQ ID NO: 869479 - RNA, 19 nt, Homo sapiens
  misc_RNA (1)...(19): siRNA sense strand
gcagaggagaucuucaacu

SEQ ID NO: 869480 - RNA, 19 nt, Homo sapiens
  misc_RNA (1)...(19): siRNA sense strand
gguggugucagcaaacuca

SEQ ID NO: 869481 - RNA, 19 nt, Homo sapiens
  misc_RNA (1)...(19): siRNA sense strand
gaagguggugucagcaaac

SEQ ID NO: 869482 - RNA, 19 nt, Homo sapiens
  misc_RNA (1)...(19): siRNA sense strand
gcaaccggagggaccuuug

SEQ ID NO: 869483 - RNA, 19 nt, Homo sapiens
  misc_RNA (1)...(19): siRNA sense strand
ccaccuggagugugagaga

SEQ ID NO: 869484 - RNA, 19 nt, Homo sapiens
  misc_RNA (1)...(19): siRNA sense strand
cagagccacccuucaggaa

SEQ ID NO: 869485 - RNA, 19 nt, Homo sapiens
  misc_RNA (1)...(19): siRNA sense strand
gaagcugcucagguacuuu

SEQ ID NO: 869486 - RNA, 19 nt, Homo sapiens
  misc_RNA (1)...(19): siRNA sense strand
ggucccaagcucacgugua

SEQ ID NO: 869487 - RNA, 19 nt, Homo sapiens
  misc_RNA (1)...(19): siRNA sense strand
ccagaggugggugggauuu

SEQ ID NO: 869488 - RNA, 19 nt, Homo sapiens
  misc_RNA (1)...(19): siRNA sense strand
cacauccggcucacauauu

SEQ ID NO: 869489 - RNA, 19 nt, Homo sapiens
  misc_RNA (1)...(19): siRNA sense strand
agacucaucucaggacacu

SEQ ID NO: 869490 - RNA, 19 nt, Homo sapiens
  misc_RNA (1)...(19): siRNA sense strand
ugacaaaacgugacuaucu

SEQ ID NO: 869491 - RNA, 19 nt, Homo sapiens
  misc_RNA (1)...(19): siRNA sense strand
gagcuuugggucucuacug

SEQ ID NO: 869492 - RNA, 19 nt, Homo sapiens
  misc_RNA (1)...(19): siRNA sense strand
gcuuugggucucuacugua

SEQ ID NO: 869493 - RNA, 19 nt, Homo sapiens
  misc_RNA (1)...(19): siRNA sense strand
gagcuuaccuuauguguuc

SEQ ID NO: 869494 - RNA, 19 nt, Homo sapiens
  misc_RNA (1)...(19): siRNA sense strand
ggacaaguauggaauaaag

SEQ ID NO: 869495 - RNA, 19 nt, Homo sapiens
  misc_RNA (1)...(19): siRNA sense strand
cuucagagcuuaccuuaug

SEQ ID NO: 869496 - RNA, 19 nt, Homo sapiens
  misc_RNA (1)...(19): siRNA sense strand
gaggacaaguauggaauaa

SEQ ID NO: 869497 - RNA, 19 nt, Homo sapiens
  misc_RNA (1)...(19): siRNA sense strand
gcgagacacucaagucgaa

SEQ ID NO: 869498 - RNA, 19 nt, Homo sapiens
  misc_RNA (1)...(19): siRNA sense strand
gaccuguucugguuaaaga

SEQ ID NO: 869499 - RNA, 19 nt, Homo sapiens
  misc_RNA (1)...(19): siRNA sense strand
caucaucugugaaggaaga

SEQ ID NO: 869500 - RNA, 19 nt, Homo sapiens
  misc_RNA (1)...(19): siRNA sense strand
cuucuaagcugcacucuuc

SEQ ID NO: 869501 - RNA, 19 nt, Homo sapiens
  misc_RNA (1)...(19): siRNA sense strand
gcaggcacuucagagcuua

SEQ ID NO: 869502 - RNA, 19 nt, Homo sapiens
  misc_RNA (1)...(19): siRNA sense strand
gagggaagcugagcagaag

SEQ ID NO: 869503 - RNA, 19 nt, Homo sapiens
  misc_RNA (1)...(19): siRNA sense strand
gagcagaagccaauuccuu

SEQ ID NO: 869504 - RNA, 19 nt, Homo sapiens
  misc_RNA (1)...(19): siRNA sense strand
ggaauaaaggucacaugga

SEQ ID NO: 869505 - RNA, 19 nt, Homo sapiens
  misc_RNA (1)...(19): siRNA sense strand
gaagccaauuccuugugaa

SEQ ID NO: 869506 - RNA, 19 nt, Homo sapiens
  misc_RNA (1)...(19): siRNA sense strand
ccaaagcugugggaacaug

SEQ ID NO: 869507 - RNA, 19 nt, Homo sapiens
  misc_RNA (1)...(19): siRNA sense strand
agaagccaauuccuuguga

SEQ ID NO: 869508 - RNA, 19 nt, Homo sapiens
  misc_RNA (1)...(19): siRNA sense strand
gaaaacagccuucuaagcu

SEQ ID NO: 869509 - RNA, 19 nt, Homo sapiens
  misc_RNA (1)...(19): siRNA sense strand
gaccacagcaccaucacuu

SEQ ID NO: 869510 - RNA, 19 nt, Homo sapiens
  misc_RNA (1)...(19): siRNA sense strand
cgaggacaaguauggaaua

SEQ ID NO: 869511 - RNA, 19 nt, Homo sapiens
  misc_RNA (1)...(19): siRNA sense strand
cacacuggcacuccuaaua

SEQ ID NO: 869512 - RNA, 19 nt, Homo sapiens
  misc_RNA (1)...(19): siRNA sense strand
gccuggaccuguucugguu

SEQ ID NO: 869513 - RNA, 19 nt, Homo sapiens
  misc_RNA (1)...(19): siRNA sense strand
cuacacagcuucccaucac

SEQ ID NO: 869514 - RNA, 19 nt, Homo sapiens
  misc_RNA (1)...(19): siRNA sense strand
aaaggauguuuccagaaga

SEQ ID NO: 869515 - RNA, 19 nt, Homo sapiens
  misc_RNA (1)...(19): siRNA sense strand
guucccagccuaccagaaa

SEQ ID NO: 869516 - RNA, 19 nt, Homo sapiens
  misc_RNA (1)...(19): siRNA sense strand
ccgccagccuucccagaaa

SEQ ID NO: 869517 - RNA, 19 nt, Homo sapiens
  misc_RNA (1)...(19): siRNA sense strand
gcacuucagagcuuaccuu

SEQ ID NO: 869518 - RNA, 19 nt, Homo sapiens
  misc_RNA (1)...(19): siRNA sense strand
cagaagacccuuaguucca

SEQ ID NO: 869519 - RNA, 19 nt, Homo sapiens
  misc_RNA (1)...(19): siRNA sense strand
gcagaagccaauuccuugu

SEQ ID NO: 869520 - RNA, 19 nt, Homo sapiens
  misc_RNA (1)...(19): siRNA sense strand
gucaucaucugugaaggaa

SEQ ID NO: 869521 - RNA, 19 nt, Homo sapiens
  misc_RNA (1)...(19): siRNA sense strand
ccuaccaccuccaaguuuc

SEQ ID NO: 869522 - RNA, 19 nt, Homo sapiens
  misc_RNA (1)...(19): siRNA sense strand
aaaaggauguuuccagaag

SEQ ID NO: 869523 - RNA, 19 nt, Homo sapiens
  misc_RNA (1)...(19): siRNA sense strand
acacuggcacuccuaauag

SEQ ID NO: 869524 - RNA, 19 nt, Homo sapiens
  misc_RNA (1)...(19): siRNA sense strand
ccuccaaguuuccacaucu

SEQ ID NO: 869525 - RNA, 19 nt, Homo sapiens
  misc_RNA (1)...(19): siRNA sense strand
aagcugcacucuucacacu

SEQ ID NO: 869526 - RNA, 19 nt, Homo sapiens
  misc_RNA (1)...(19): siRNA sense strand
aagcugagcagaagccaau

SEQ ID NO: 869527 - RNA, 19 nt, Homo sapiens
  misc_RNA (1)...(19): siRNA sense strand
aaaccuaccaccuccaagu

SEQ ID NO: 869528 - RNA, 19 nt, Homo sapiens
  misc_RNA (1)...(19): siRNA sense strand
agagggaagcugagcagaa

SEQ ID NO: 869529 - RNA, 19 nt, Homo sapiens
  misc_RNA (1)...(19): siRNA sense strand
cuggaccuguucugguuaa

SEQ ID NO: 869530 - RNA, 19 nt, Homo sapiens
  misc_RNA (1)...(19): siRNA sense strand
ugugaaggaagaacucauu

SEQ ID NO: 869531 - RNA, 19 nt, Homo sapiens
  misc_RNA (1)...(19): siRNA sense strand
gaaaaccuaccaccuccaa

SEQ ID NO: 869532 - RNA, 19 nt, Homo sapiens
  misc_RNA (1)...(19): siRNA sense strand
ugcaggcacuucagagcuu

SEQ ID NO: 869533 - RNA, 19 nt, Homo sapiens
  misc_RNA (1)...(19): siRNA sense strand
cuccaaguuuccacaucua

SEQ ID NO: 869534 - RNA, 19 nt, Homo sapiens
  misc_RNA (1)...(19): siRNA sense strand
uccagaagacccuuaguuc

SEQ ID NO: 869535 - RNA, 19 nt, Homo sapiens
  misc_RNA (1)...(19): siRNA sense strand
cacuucagagcuuaccuua

SEQ ID NO: 869536 - RNA, 19 nt, Homo sapiens
  misc_RNA (1)...(19): siRNA sense strand
ggaaagggcuaccaugaga

SEQ ID NO: 869537 - RNA, 19 nt, Homo sapiens
  misc_RNA (1)...(19): siRNA sense strand
gcaggaaggucccguggua

SEQ ID NO: 869538 - RNA, 19 nt, Homo sapiens
  misc_RNA (1)...(19): siRNA sense strand
ccaaaugucugccaucuca

SEQ ID NO: 869539 - RNA, 19 nt, Homo sapiens
  misc_RNA (1)...(19): siRNA sense strand
gcaaagggcucagcgacuu

SEQ ID NO: 869540 - RNA, 19 nt, Homo sapiens
  misc_RNA (1)...(19): siRNA sense strand
gaacuugacccauaccuau

SEQ ID NO: 869541 - RNA, 19 nt, Homo sapiens
  misc_RNA (1)...(19): siRNA sense strand
gaaaggcuucugacaauga

SEQ ID NO: 869542 - RNA, 19 nt, Homo sapiens
  misc_RNA (1)...(19): siRNA sense strand
gccaaaggcuccagaaauc

SEQ ID NO: 869543 - RNA, 19 nt, Homo sapiens
  misc_RNA (1)...(19): siRNA sense strand
gcagguggguacuguuuga

SEQ ID NO: 869544 - RNA, 19 nt, Homo sapiens
  misc_RNA (1)...(19): siRNA sense strand
gcauucaguucacuaauag

SEQ ID NO: 869545 - RNA, 19 nt, Homo sapiens
  misc_RNA (1)...(19): siRNA sense strand
caacauuucugugaauuag

SEQ ID NO: 869546 - RNA, 19 nt, Homo sapiens
  misc_RNA (1)...(19): siRNA sense strand
gagagaagcaucccugaga

SEQ ID NO: 869547 - RNA, 19 nt, Homo sapiens
  misc_RNA (1)...(19): siRNA sense strand
gcuguggccuugaugcuuu

SEQ ID NO: 869548 - RNA, 19 nt, Homo sapiens
  misc_RNA (1)...(19): siRNA sense strand
ucacuaaugccaucacuuu

SEQ ID NO: 869549 - RNA, 19 nt, Homo sapiens
  misc_RNA (1)...(19): siRNA sense strand
uauggcaucuuccuguaua

SEQ ID NO: 869550 - RNA, 19 nt, Homo sapiens
  misc_RNA (1)...(19): siRNA sense strand
gaagugacagugaagauuc

SEQ ID NO: 869551 - RNA, 19 nt, Homo sapiens
  misc_RNA (1)...(19): siRNA sense strand
ugacaggccuggugguguu

SEQ ID NO: 869552 - RNA, 19 nt, Homo sapiens
  misc_RNA (1)...(19): siRNA sense strand
gggugaagcuguuguugau

SEQ ID NO: 869553 - RNA, 19 nt, Homo sapiens
  misc_RNA (1)...(19): siRNA sense strand
cagagacgacauugacuua

SEQ ID NO: 869554 - RNA, 19 nt, Homo sapiens
  misc_RNA (1)...(19): siRNA sense strand
cggccguacucuacauuua

SEQ ID NO: 869555 - RNA, 19 nt, Homo sapiens
  misc_RNA (1)...(19): siRNA sense strand
cuaauagggugaagcuguu

SEQ ID NO: 869556 - RNA, 19 nt, Homo sapiens
  misc_RNA (1)...(19): siRNA sense strand
caacagaucacagcaguca

SEQ ID NO: 869557 - RNA, 19 nt, Homo sapiens
  misc_RNA (1)...(19): siRNA sense strand
augcugaacuugacccaua

SEQ ID NO: 869558 - RNA, 19 nt, Homo sapiens
  misc_RNA (1)...(19): siRNA sense strand
ggaagugacagugaagauu

SEQ ID NO: 869559 - RNA, 19 nt, Homo sapiens
  misc_RNA (1)...(19): siRNA sense strand
gggcugcuuuggauaauca

SEQ ID NO: 869560 - RNA, 19 nt, Homo sapiens
  misc_RNA (1)...(19): siRNA sense strand
gagauuacagccuggacua

SEQ ID NO: 869561 - RNA, 19 nt, Homo sapiens
  misc_RNA (1)...(19): siRNA sense strand
cagcuguccuccucaguga

SEQ ID NO: 869562 - RNA, 19 nt, Homo sapiens
  misc_RNA (1)...(19): siRNA sense strand
agcauucaguucacuaaua

SEQ ID NO: 869563 - RNA, 19 nt, Homo sapiens
  misc_RNA (1)...(19): siRNA sense strand
ggacugccuugguaugucu

SEQ ID NO: 869564 - RNA, 19 nt, Homo sapiens
  misc_RNA (1)...(19): siRNA sense strand
gcucuacucauccaagaaa

SEQ ID NO: 869565 - RNA, 19 nt, Homo sapiens
  misc_RNA (1)...(19): siRNA sense strand
agggagugcuggaaaguuu

SEQ ID NO: 869566 - RNA, 19 nt, Homo sapiens
  misc_RNA (1)...(19): siRNA sense strand
gcgcuggaguggagagaga

SEQ ID NO: 869567 - RNA, 19 nt, Homo sapiens
  misc_RNA (1)...(19): siRNA sense strand
uggcagcccuggaugcauu

SEQ ID NO: 869568 - RNA, 19 nt, Homo sapiens
  misc_RNA (1)...(19): siRNA sense strand
agagaagcaucccugagaa

SEQ ID NO: 869569 - RNA, 19 nt, Homo sapiens
  misc_RNA (1)...(19): siRNA sense strand
ucacagcagucauccucaa

SEQ ID NO: 869570 - RNA, 19 nt, Homo sapiens
  misc_RNA (1)...(19): siRNA sense strand
gagacgacauugacuuagg

SEQ ID NO: 869571 - RNA, 19 nt, Homo sapiens
  misc_RNA (1)...(19): siRNA sense strand
gagcaaggaacugggagua

SEQ ID NO: 869572 - RNA, 19 nt, Homo sapiens
  misc_RNA (1)...(19): siRNA sense strand
acauuuaccuggccacugu

SEQ ID NO: 869573 - RNA, 19 nt, Homo sapiens
  misc_RNA (1)...(19): siRNA sense strand
caaaggcuccagaaaucaa

SEQ ID NO: 869574 - RNA, 19 nt, Homo sapiens
  misc_RNA (1)...(19): siRNA sense strand
gcugggagaugccacugau

SEQ ID NO: 869575 - RNA, 19 nt, Homo sapiens
  misc_RNA (1)...(19): siRNA sense strand
gcagcauucaguucacuaa

SEQ ID NO: 869576 - RNA, 19 nt, Homo sapiens
  misc_RNA (1)...(19): siRNA sense strand
gggcucuacucauccaaga

SEQ ID NO: 869577 - RNA, 19 nt, Homo sapiens
  misc_RNA (1)...(19): siRNA sense strand
gcaucuggguggcuaccuu

SEQ ID NO: 869578 - RNA, 19 nt, Homo sapiens
  misc_RNA (1)...(19): siRNA sense strand
gugcucaaguucauuccaa

SEQ ID NO: 869579 - RNA, 19 nt, Homo sapiens
  misc_RNA (1)...(19): siRNA sense strand
guaaagaccagccgcuucu

SEQ ID NO: 869580 - RNA, 19 nt, Homo sapiens
  misc_RNA (1)...(19): siRNA sense strand
ccuuacuucuuucuucuuu

SEQ ID NO: 869581 - RNA, 19 nt, Homo sapiens
  misc_RNA (1)...(19): siRNA sense strand
cagcaaccuucaugaccuu

SEQ ID NO: 869582 - RNA, 19 nt, Homo sapiens
  misc_RNA (1)...(19): siRNA sense strand
ucuauggcaucuuccugua

SEQ ID NO: 869583 - RNA, 19 nt, Homo sapiens
  misc_RNA (1)...(19): siRNA sense strand
ccagugcuccuagaaauau

SEQ ID NO: 869584 - RNA, 19 nt, Homo sapiens
  misc_RNA (1)...(19): siRNA sense strand
cuacgaugcugugggcaaa

SEQ ID NO: 869585 - RNA, 19 nt, Homo sapiens
  misc_RNA (1)...(19): siRNA sense strand
cuggugguguucauccuua

SEQ ID NO: 869586 - RNA, 19 nt, Homo sapiens
  misc_RNA (1)...(19): siRNA sense strand
gagucucaauggauaagga

SEQ ID NO: 869587 - RNA, 19 nt, Homo sapiens
  misc_RNA (1)...(19): siRNA sense strand
gaagcugccaggccaggaa

SEQ ID NO: 869588 - RNA, 19 nt, Homo sapiens
  misc_RNA (1)...(19): siRNA sense strand
gcccucaaguguguaaaga

SEQ ID NO: 869589 - RNA, 19 nt, Homo sapiens
  misc_RNA (1)...(19): siRNA sense strand
gcaaaaugcugaacuugac

SEQ ID NO: 869590 - RNA, 19 nt, Homo sapiens
  misc_RNA (1)...(19): siRNA sense strand
caauuccaguggucaguuc

SEQ ID NO: 869591 - RNA, 19 nt, Homo sapiens
  misc_RNA (1)...(19): siRNA sense strand
ggacccaacagcccggauu

SEQ ID NO: 869592 - RNA, 19 nt, Homo sapiens
  misc_RNA (1)...(19): siRNA sense strand
gcggaacccugugguacug

SEQ ID NO: 869593 - RNA, 19 nt, Homo sapiens
  misc_RNA (1)...(19): siRNA sense strand
ggucuucucaccacaggaa

SEQ ID NO: 869594 - RNA, 19 nt, Homo sapiens
  misc_RNA (1)...(19): siRNA sense strand
gacuuaggccugaucaaug

SEQ ID NO: 869595 - RNA, 19 nt, Homo sapiens
  misc_RNA (1)...(19): siRNA sense strand
ugacuuaggccugaucaau

SEQ ID NO: 869596 - RNA, 19 nt, Homo sapiens
  misc_RNA (1)...(19): siRNA sense strand
cgccugcucuucucuuuca

SEQ ID NO: 869597 - RNA, 19 nt, Homo sapiens
  misc_RNA (1)...(19): siRNA sense strand
gcucggcuguggccuugau

SEQ ID NO: 869598 - RNA, 19 nt, Homo sapiens
  misc_RNA (1)...(19): siRNA sense strand
ccacugggagccuuuguuc

SEQ ID NO: 869599 - RNA, 19 nt, Homo sapiens
  misc_RNA (1)...(19): siRNA sense strand
caguggaagugacagugaa

SEQ ID NO: 869600 - RNA, 19 nt, Homo sapiens
  misc_RNA (1)...(19): siRNA sense strand
cuauggcccucaagugugu

SEQ ID NO: 869601 - RNA, 19 nt, Homo sapiens
  misc_RNA (1)...(19): siRNA sense strand
gcccaaaugucugccaucu

SEQ ID NO: 869602 - RNA, 19 nt, Homo sapiens
  misc_RNA (1)...(19): siRNA sense strand
gaaagggcuaccaugagau

SEQ ID NO: 869603 - RNA, 19 nt, Homo sapiens
  misc_RNA (1)...(19): siRNA sense strand
uaccugcccuuccgccuau

SEQ ID NO: 869604 - RNA, 19 nt, Homo sapiens
  misc_RNA (1)...(19): siRNA sense strand
ggagccagaacacucauuc

SEQ ID NO: 869605 - RNA, 19 nt, Homo sapiens
  misc_RNA (1)...(19): siRNA sense strand
ucccuucuccucuuccuua

SEQ ID NO: 869606 - RNA, 19 nt, Homo sapiens
  misc_RNA (1)...(19): siRNA sense strand
ucccagacauugccuucuu

SEQ ID NO: 869607 - RNA, 19 nt, Homo sapiens
  misc_RNA (1)...(19): siRNA sense strand
auaccuauccuauccagaa

SEQ ID NO: 869608 - RNA, 19 nt, Homo sapiens
  misc_RNA (1)...(19): siRNA sense strand
gcaauuccaguggucaguu

SEQ ID NO: 869609 - RNA, 19 nt, Homo sapiens
  misc_RNA (1)...(19): siRNA sense strand
ccauccagcuugccugucu

SEQ ID NO: 869610 - RNA, 19 nt, Homo sapiens
  misc_RNA (1)...(19): siRNA sense strand
caaugccugugcucuaugg

SEQ ID NO: 869611 - RNA, 19 nt, Homo sapiens
  misc_RNA (1)...(19): siRNA sense strand
cuucuccucuuccuuacuu

SEQ ID NO: 869612 - RNA, 19 nt, Homo sapiens
  misc_RNA (1)...(19): siRNA sense strand
ucauacagucccagacauu

SEQ ID NO: 869613 - RNA, 19 nt, Homo sapiens
  misc_RNA (1)...(19): siRNA sense strand
cuccagugcuccuagaaau

SEQ ID NO: 869614 - RNA, 19 nt, Homo sapiens
  misc_RNA (1)...(19): siRNA sense strand
gcucagcagcauucaguuc

SEQ ID NO: 869615 - RNA, 19 nt, Homo sapiens
  misc_RNA (1)...(19): siRNA sense strand
gcgcucagcagcauucagu

SEQ ID NO: 869616 - RNA, 19 nt, Homo sapiens
  misc_RNA (1)...(19): siRNA sense strand
uccaaugccugugcucuau

SEQ ID NO: 869617 - RNA, 19 nt, Homo sapiens
  misc_RNA (1)...(19): siRNA sense strand
ugggaaagggcuaccauga

SEQ ID NO: 869618 - RNA, 19 nt, Homo sapiens
  misc_RNA (1)...(19): siRNA sense strand
gagaagcaucccugagaag

SEQ ID NO: 869619 - RNA, 19 nt, Homo sapiens
  misc_RNA (1)...(19): siRNA sense strand
ggauaaggacaaggccaaa

SEQ ID NO: 869620 - RNA, 19 nt, Homo sapiens
  misc_RNA (1)...(19): siRNA sense strand
caaccuucaugaccuucug

SEQ ID NO: 869621 - RNA, 19 nt, Homo sapiens
  misc_RNA (1)...(19): siRNA sense strand
gggaaagggcuaccaugag

SEQ ID NO: 869622 - RNA, 19 nt, Homo sapiens
  misc_RNA (1)...(19): siRNA sense strand
agacagagacgacauugac

SEQ ID NO: 869623 - RNA, 19 nt, Homo sapiens
  misc_RNA (1)...(19): siRNA sense strand
ccaaaggcuccagaaauca

SEQ ID NO: 869624 - RNA, 19 nt, Homo sapiens
  misc_RNA (1)...(19): siRNA sense strand
agccagaccugcuacucuu

SEQ ID NO: 869625 - RNA, 19 nt, Homo sapiens
  misc_RNA (1)...(19): siRNA sense strand
gcagcgcucagcagcauuc

SEQ ID NO: 869626 - RNA, 19 nt, Homo sapiens
  misc_RNA (1)...(19): siRNA sense strand
ccaccuggaccucuucugu

SEQ ID NO: 869627 - RNA, 19 nt, Homo sapiens
  misc_RNA (1)...(19): siRNA sense strand
caugguacccagagaguuc

SEQ ID NO: 869628 - RNA, 19 nt, Homo sapiens
  misc_RNA (1)...(19): siRNA sense strand
guacuggggucccuuacug

SEQ ID NO: 869629 - RNA, 19 nt, Homo sapiens
  misc_RNA (1)...(19): siRNA sense strand
caccugugcucaaguucau

SEQ ID NO: 869630 - RNA, 19 nt, Homo sapiens
  misc_RNA (1)...(19): siRNA sense strand
cgcuuggacugccuuggua

SEQ ID NO: 869631 - RNA, 19 nt, Homo sapiens
  misc_RNA (1)...(19): siRNA sense strand
gcugcugucuauccucauc

SEQ ID NO: 869632 - RNA, 19 nt, Homo sapiens
  misc_RNA (1)...(19): siRNA sense strand
acgggugccucugccaaua

SEQ ID NO: 869633 - RNA, 19 nt, Homo sapiens
  misc_RNA (1)...(19): siRNA sense strand
gagcugaggcagggacugu

SEQ ID NO: 869634 - RNA, 19 nt, Homo sapiens
  misc_RNA (1)...(19): siRNA sense strand
gggccuagccacaccaaag

SEQ ID NO: 869635 - RNA, 19 nt, Homo sapiens
  misc_RNA (1)...(19): siRNA sense strand
gccagaacacucauucagu

SEQ ID NO: 869636 - RNA, 19 nt, Homo sapiens
  misc_RNA (1)...(19): siRNA sense strand
gaagagagccugaaugaga

SEQ ID NO: 869637 - RNA, 19 nt, Homo sapiens
  misc_RNA (1)...(19): siRNA sense strand
gcgaacagcuggcuaauau

SEQ ID NO: 869638 - RNA, 19 nt, Homo sapiens
  misc_RNA (1)...(19): siRNA sense strand
gcuauggccuucaucauca

SEQ ID NO: 869639 - RNA, 19 nt, Homo sapiens
  misc_RNA (1)...(19): siRNA sense strand
ugaagcacauucucuauca

SEQ ID NO: 869640 - RNA, 19 nt, Homo sapiens
  misc_RNA (1)...(19): siRNA sense strand
gaacagcuggcuaauaucu

SEQ ID NO: 869641 - RNA, 19 nt, Homo sapiens
  misc_RNA (1)...(19): siRNA sense strand
uggaggagcucgaugaaau

SEQ ID NO: 869642 - RNA, 19 nt, Homo sapiens
  misc_RNA (1)...(19): siRNA sense strand
gaacacgauagacagcaua

SEQ ID NO: 869643 - RNA, 19 nt, Homo sapiens
  misc_RNA (1)...(19): siRNA sense strand
ugaaggacauugagaacau

SEQ ID NO: 869644 - RNA, 19 nt, Homo sapiens
  misc_RNA (1)...(19): siRNA sense strand
ccaaacuggugucuucaga

SEQ ID NO: 869645 - RNA, 19 nt, Homo sapiens
  misc_RNA (1)...(19): siRNA sense strand
gagaccaccuaacgaugaa

SEQ ID NO: 869646 - RNA, 19 nt, Homo sapiens
  misc_RNA (1)...(19): siRNA sense strand
ggacauugagaacaucauu

SEQ ID NO: 869647 - RNA, 19 nt, Homo sapiens
  misc_RNA (1)...(19): siRNA sense strand
gauugcagccaaccagaua

SEQ ID NO: 869648 - RNA, 19 nt, Homo sapiens
  misc_RNA (1)...(19): siRNA sense strand
gacauugagaacaucauua

SEQ ID NO: 869649 - RNA, 19 nt, Homo sapiens
  misc_RNA (1)...(19): siRNA sense strand
gaaggacauugagaacauc

SEQ ID NO: 869650 - RNA, 19 nt, Homo sapiens
  misc_RNA (1)...(19): siRNA sense strand
ggaacggcuucaucuccaa

SEQ ID NO: 869651 - RNA, 19 nt, Homo sapiens
  misc_RNA (1)...(19): siRNA sense strand
cgagaccaccuaacgauga

SEQ ID NO: 869652 - RNA, 19 nt, Homo sapiens
  misc_RNA (1)...(19): siRNA sense strand
ggaacacgauagacagcau

SEQ ID NO: 869653 - RNA, 19 nt, Homo sapiens
  misc_RNA (1)...(19): siRNA sense strand
gggauggccagguggauuu

SEQ ID NO: 869654 - RNA, 19 nt, Homo sapiens
  misc_RNA (1)...(19): siRNA sense strand
cagaaggucgcgaugguuu

SEQ ID NO: 869655 - RNA, 19 nt, Homo sapiens
  misc_RNA (1)...(19): siRNA sense strand
gaagcacauucucuaucau

SEQ ID NO: 869656 - RNA, 19 nt, Homo sapiens
  misc_RNA (1)...(19): siRNA sense strand
uaacgaugaaggacauuga

SEQ ID NO: 869657 - RNA, 19 nt, Homo sapiens
  misc_RNA (1)...(19): siRNA sense strand
aggaagagagccugaauga

SEQ ID NO: 869658 - RNA, 19 nt, Homo sapiens
  misc_RNA (1)...(19): siRNA sense strand
ggagcuggccaucaucaug

SEQ ID NO: 869659 - RNA, 19 nt, Homo sapiens
  misc_RNA (1)...(19): siRNA sense strand
cagcauauucuggcaguuu

SEQ ID NO: 869660 - RNA, 19 nt, Homo sapiens
  misc_RNA (1)...(19): siRNA sense strand
gcaaaggauaacucuggaa

SEQ ID NO: 869661 - RNA, 19 nt, Homo sapiens
  misc_RNA (1)...(19): siRNA sense strand
cacgauagacagcauauuc

SEQ ID NO: 869662 - RNA, 19 nt, Homo sapiens
  misc_RNA (1)...(19): siRNA sense strand
uggaagaguugaagcacau

SEQ ID NO: 869663 - RNA, 19 nt, Homo sapiens
  misc_RNA (1)...(19): siRNA sense strand
cgaugaaggacauugagaa

SEQ ID NO: 869664 - RNA, 19 nt, Homo sapiens
  misc_RNA (1)...(19): siRNA sense strand
gaagaguugaagcacauuc

SEQ ID NO: 869665 - RNA, 19 nt, Homo sapiens
  misc_RNA (1)...(19): siRNA sense strand
caaacuggugucuucagaa

SEQ ID NO: 869666 - RNA, 19 nt, Homo sapiens
  misc_RNA (1)...(19): siRNA sense strand
ggaggagcucgaugaaauc

SEQ ID NO: 869667 - RNA, 19 nt, Homo sapiens
  misc_RNA (1)...(19): siRNA sense strand
ccagguggauuuugaugaa

SEQ ID NO: 869668 - RNA, 19 nt, Homo sapiens
  misc_RNA (1)...(19): siRNA sense strand
gaggaagagagccugaaug

SEQ ID NO: 869669 - RNA, 19 nt, Homo sapiens
  misc_RNA (1)...(19): siRNA sense strand
gaugaaggacauugagaac

SEQ ID NO: 869670 - RNA, 19 nt, Homo sapiens
  misc_RNA (1)...(19): siRNA sense strand
gcauauucuggcaguuuga

SEQ ID NO: 869671 - RNA, 19 nt, Homo sapiens
  misc_RNA (1)...(19): siRNA sense strand
guugaagcacauucucuau

SEQ ID NO: 869672 - RNA, 19 nt, Homo sapiens
  misc_RNA (1)...(19): siRNA sense strand
ugaaauccgagaggccuuu

SEQ ID NO: 869673 - RNA, 19 nt, Homo sapiens
  misc_RNA (1)...(19): siRNA sense strand
ggaagaguugaagcacauu

SEQ ID NO: 869674 - RNA, 19 nt, Homo sapiens
  misc_RNA (1)...(19): siRNA sense strand
ucauaugcgccuuugcuau

SEQ ID NO: 869675 - RNA, 19 nt, Homo sapiens
  misc_RNA (1)...(19): siRNA sense strand
gaacagaggcaauggaugu

SEQ ID NO: 869676 - RNA, 19 nt, Homo sapiens
  misc_RNA (1)...(19): siRNA sense strand
ccaacaagauagaguuuga

SEQ ID NO: 869677 - RNA, 19 nt, Homo sapiens
  misc_RNA (1)...(19): siRNA sense strand
ggagguggauaucacaaug

SEQ ID NO: 869678 - RNA, 19 nt, Homo sapiens
  misc_RNA (1)...(19): siRNA sense strand
gcagcaagaugugguuaga

SEQ ID NO: 869679 - RNA, 19 nt, Homo sapiens
  misc_RNA (1)...(19): siRNA sense strand
uaaagaagaagcagcaaga

SEQ ID NO: 869680 - RNA, 19 nt, Homo sapiens
  misc_RNA (1)...(19): siRNA sense strand
gcaagaugugguuagauuu

SEQ ID NO: 869681 - RNA, 19 nt, Homo sapiens
  misc_RNA (1)...(19): siRNA sense strand
agaagaagcagcaagaugu

SEQ ID NO: 869682 - RNA, 19 nt, Homo sapiens
  misc_RNA (1)...(19): siRNA sense strand
caacacagucuuuucauuu

SEQ ID NO: 869683 - RNA, 19 nt, Homo sapiens
  misc_RNA (1)...(19): siRNA sense strand
gaagaacagaggcaaugga

SEQ ID NO: 869684 - RNA, 19 nt, Homo sapiens
  misc_RNA (1)...(19): siRNA sense strand
agcaagaugugguuagauu

SEQ ID NO: 869685 - RNA, 19 nt, Homo sapiens
  misc_RNA (1)...(19): siRNA sense strand
gaagaagcagcaagaugug

SEQ ID NO: 869686 - RNA, 19 nt, Homo sapiens
  misc_RNA (1)...(19): siRNA sense strand
ucuggaagccaacaagaua

SEQ ID NO: 869687 - RNA, 19 nt, Homo sapiens
  misc_RNA (1)...(19): siRNA sense strand
ccgauacuguggagauuau

SEQ ID NO: 869688 - RNA, 19 nt, Homo sapiens
  misc_RNA (1)...(19): siRNA sense strand
gcaacacagucuuuucauu

SEQ ID NO: 869689 - RNA, 19 nt, Homo sapiens
  misc_RNA (1)...(19): siRNA sense strand
caagaugugguuagauuuc

SEQ ID NO: 869690 - RNA, 19 nt, Homo sapiens
  misc_RNA (1)...(19): siRNA sense strand
gaccgauacuguggagauu

SEQ ID NO: 869691 - RNA, 19 nt, Homo sapiens
  misc_RNA (1)...(19): siRNA sense strand
caccucagauauuuaaugg

SEQ ID NO: 869692 - RNA, 19 nt, Homo sapiens
  misc_RNA (1)...(19): siRNA sense strand
ccugccaccucagauauuu

SEQ ID NO: 869693 - RNA, 19 nt, Homo sapiens
  misc_RNA (1)...(19): siRNA sense strand
gauacuguggagauuauga

SEQ ID NO: 869694 - RNA, 19 nt, Homo sapiens
  misc_RNA (1)...(19): siRNA sense strand
guggagauuaugacaguuu

SEQ ID NO: 869695 - RNA, 19 nt, Homo sapiens
  misc_RNA (1)...(19): siRNA sense strand
gaagcagcaagaugugguu

SEQ ID NO: 869696 - RNA, 19 nt, Homo sapiens
  misc_RNA (1)...(19): siRNA sense strand
cagaagaacagaggcaaug

SEQ ID NO: 869697 - RNA, 19 nt, Homo sapiens
  misc_RNA (1)...(19): siRNA sense strand
cagaggcaauggauguaca

SEQ ID NO: 869698 - RNA, 19 nt, Homo sapiens
  misc_RNA (1)...(19): siRNA sense strand
ccaccucagauauuuaaug

SEQ ID NO: 869699 - RNA, 19 nt, Homo sapiens
  misc_RNA (1)...(19): siRNA sense strand
gauaucacaaugucagaag

SEQ ID NO: 869700 - RNA, 19 nt, Homo sapiens
  misc_RNA (1)...(19): siRNA sense strand
ccaaggaaagcaacacagu

SEQ ID NO: 869701 - RNA, 19 nt, Homo sapiens
  misc_RNA (1)...(19): siRNA sense strand
gaagccaacaagauagagu

SEQ ID NO: 869702 - RNA, 19 nt, Homo sapiens
  misc_RNA (1)...(19): siRNA sense strand
uaucacaaugucagaagaa

SEQ ID NO: 869703 - RNA, 19 nt, Homo sapiens
  misc_RNA (1)...(19): siRNA sense strand
ggauaucacaaugucagaa

SEQ ID NO: 869704 - RNA, 19 nt, Homo sapiens
  misc_RNA (1)...(19): siRNA sense strand
uaauggcgaccgauacugu

SEQ ID NO: 869705 - RNA, 19 nt, Homo sapiens
  misc_RNA (1)...(19): siRNA sense strand
aagaagaagcagcaagaug

SEQ ID NO: 869706 - RNA, 19 nt, Homo sapiens
  misc_RNA (1)...(19): siRNA sense strand
cgaccgauacuguggagau

SEQ ID NO: 869707 - RNA, 19 nt, Homo sapiens
  misc_RNA (1)...(19): siRNA sense strand
gagguggauaucacaaugu

SEQ ID NO: 869708 - RNA, 19 nt, Homo sapiens
  misc_RNA (1)...(19): siRNA sense strand
ucguggcgauaaagaagaa

SEQ ID NO: 869709 - RNA, 19 nt, Homo sapiens
  misc_RNA (1)...(19): siRNA sense strand
ugccaccucagauauuuaa

SEQ ID NO: 869710 - RNA, 19 nt, Homo sapiens
  misc_RNA (1)...(19): siRNA sense strand
uauuuaauggcgaccgaua

SEQ ID NO: 869711 - RNA, 19 nt, Homo sapiens
  misc_RNA (1)...(19): siRNA sense strand
ggaggaggauccaacaaua

SEQ ID NO: 869712 - RNA, 19 nt, Homo sapiens
  misc_RNA (1)...(19): siRNA sense strand
aagcacagcuccagagaaa

SEQ ID NO: 869713 - RNA, 19 nt, Homo sapiens
  misc_RNA (1)...(19): siRNA sense strand
gcggucccauugugaaaua

SEQ ID NO: 869714 - RNA, 19 nt, Homo sapiens
  misc_RNA (1)...(19): siRNA sense strand
gaggaggauccaacaauaa

SEQ ID NO: 869715 - RNA, 19 nt, Homo sapiens
  misc_RNA (1)...(19): siRNA sense strand
gcuaguccaugguacauuc

SEQ ID NO: 869716 - RNA, 19 nt, Homo sapiens
  misc_RNA (1)...(19): siRNA sense strand
gcacuggccauccauccua

SEQ ID NO: 869717 - RNA, 19 nt, Homo sapiens
  misc_RNA (1)...(19): siRNA sense strand
gcacagcuccagagaaagg

SEQ ID NO: 869718 - RNA, 19 nt, Homo sapiens
  misc_RNA (1)...(19): siRNA sense strand
caaggaggcccugcagcua

SEQ ID NO: 869719 - RNA, 19 nt, Homo sapiens
  misc_RNA (1)...(19): siRNA sense strand
ggcaugcggucccauugug

SEQ ID NO: 869720 - RNA, 19 nt, Homo sapiens
  misc_RNA (1)...(19): siRNA sense strand
ggccauccauccuacucaa

SEQ ID NO: 869721 - RNA, 19 nt, Homo sapiens
  misc_RNA (1)...(19): siRNA sense strand
aaauagcuguguucaucga

SEQ ID NO: 869722 - RNA, 19 nt, Homo sapiens
  misc_RNA (1)...(19): siRNA sense strand
gcagauggaauacccuucu

SEQ ID NO: 869723 - RNA, 19 nt, Homo sapiens
  misc_RNA (1)...(19): siRNA sense strand
cagauggaauacccuucuu

SEQ ID NO: 869724 - RNA, 19 nt, Homo sapiens
  misc_RNA (1)...(19): siRNA sense strand
uuccuuggcuggugaugaa

SEQ ID NO: 869725 - RNA, 19 nt, Homo sapiens
  misc_RNA (1)...(19): siRNA sense strand
gcuuccuccuucccaagua

SEQ ID NO: 869726 - RNA, 19 nt, Homo sapiens
  misc_RNA (1)...(19): siRNA sense strand
gcaugcggucccauuguga

SEQ ID NO: 869727 - RNA, 19 nt, Homo sapiens
  misc_RNA (1)...(19): siRNA sense strand
uaccuaaguuggagcugau

SEQ ID NO: 869728 - RNA, 19 nt, Homo sapiens
  misc_RNA (1)...(19): siRNA sense strand
caagcacagcuccagagaa

SEQ ID NO: 869729 - RNA, 19 nt, Homo sapiens
  misc_RNA (1)...(19): siRNA sense strand
gcuacgcccuacccgaaag

SEQ ID NO: 869730 - RNA, 19 nt, Homo sapiens
  misc_RNA (1)...(19): siRNA sense strand
ccaagcacagcuccagaga

SEQ ID NO: 869731 - RNA, 19 nt, Homo sapiens
  misc_RNA (1)...(19): siRNA sense strand
cagggaaggacgcacauuc

SEQ ID NO: 869732 - RNA, 19 nt, Homo sapiens
  misc_RNA (1)...(19): siRNA sense strand
ugacuccagggaauacuga

SEQ ID NO: 869733 - RNA, 19 nt, Homo sapiens
  misc_RNA (1)...(19): siRNA sense strand
guacaaaccuucaggaaau

SEQ ID NO: 869734 - RNA, 19 nt, Homo sapiens
  misc_RNA (1)...(19): siRNA sense strand
caacaggcaucuaucauuu

SEQ ID NO: 869735 - RNA, 19 nt, Homo sapiens
  misc_RNA (1)...(19): siRNA sense strand
gaaauuaaccaguugauug

SEQ ID NO: 869736 - RNA, 19 nt, Homo sapiens
  misc_RNA (1)...(19): siRNA sense strand
caaagcaacuuguggauau

SEQ ID NO: 869737 - RNA, 19 nt, Homo sapiens
  misc_RNA (1)...(19): siRNA sense strand
uaagagaguugaacauuug

SEQ ID NO: 869738 - RNA, 19 nt, Homo sapiens
  misc_RNA (1)...(19): siRNA sense strand
ccacagauaugaguacuuu

SEQ ID NO: 869739 - RNA, 19 nt, Homo sapiens
  misc_RNA (1)...(19): siRNA sense strand
ggaaguaaaccuguaauuu

SEQ ID NO: 869740 - RNA, 19 nt, Homo sapiens
  misc_RNA (1)...(19): siRNA sense strand
ggcaaacucucacuguaua

SEQ ID NO: 869741 - RNA, 19 nt, Homo sapiens
  misc_RNA (1)...(19): siRNA sense strand
gcagaaauaagaaaggaua

SEQ ID NO: 869742 - RNA, 19 nt, Homo sapiens
  misc_RNA (1)...(19): siRNA sense strand
gaaaggauaucagugcaau

SEQ ID NO: 869743 - RNA, 19 nt, Homo sapiens
  misc_RNA (1)...(19): siRNA sense strand
acacagaaauuaaccaguu

SEQ ID NO: 869744 - RNA, 19 nt, Homo sapiens
  misc_RNA (1)...(19): siRNA sense strand
ggaaaugccacagauauga

SEQ ID NO: 869745 - RNA, 19 nt, Homo sapiens
  misc_RNA (1)...(19): siRNA sense strand
ggauaucagugcaauggaa

SEQ ID NO: 869746 - RNA, 19 nt, Homo sapiens
  misc_RNA (1)...(19): siRNA sense strand
gaaaucagacccgugaauu

SEQ ID NO: 869747 - RNA, 19 nt, Homo sapiens
  misc_RNA (1)...(19): siRNA sense strand
ugcaaagccugaaaguuua

SEQ ID NO: 869748 - RNA, 19 nt, Homo sapiens
  misc_RNA (1)...(19): siRNA sense strand
gcaacaggcaucuaucauu

SEQ ID NO: 869749 - RNA, 19 nt, Homo sapiens
  misc_RNA (1)...(19): siRNA sense strand
gagagaagcaucaguaaag

SEQ ID NO: 869750 - RNA, 19 nt, Homo sapiens
  misc_RNA (1)...(19): siRNA sense strand
gcagacagccaaacgaaug

SEQ ID NO: 869751 - RNA, 19 nt, Homo sapiens
  misc_RNA (1)...(19): siRNA sense strand
gaaguuagccagccuagag

SEQ ID NO: 869752 - RNA, 19 nt, Homo sapiens
  misc_RNA (1)...(19): siRNA sense strand
ccaauaaacaguaugaaga

SEQ ID NO: 869753 - RNA, 19 nt, Homo sapiens
  misc_RNA (1)...(19): siRNA sense strand
ccugaaaguuuaaugaaga

SEQ ID NO: 869754 - RNA, 19 nt, Homo sapiens
  misc_RNA (1)...(19): siRNA sense strand
ggacuaaugaacugaagaa

SEQ ID NO: 869755 - RNA, 19 nt, Homo sapiens
  misc_RNA (1)...(19): siRNA sense strand
gauuggaaguaaaccugua

SEQ ID NO: 869756 - RNA, 19 nt, Homo sapiens
  misc_RNA (1)...(19): siRNA sense strand
gugaguuucuucaggauga

SEQ ID NO: 869757 - RNA, 19 nt, Homo sapiens
  misc_RNA (1)...(19): siRNA sense strand
gcaaagccugaaaguuuaa

SEQ ID NO: 869758 - RNA, 19 nt, Homo sapiens
  misc_RNA (1)...(19): siRNA sense strand
augcaaagccugaaaguuu

SEQ ID NO: 869759 - RNA, 19 nt, Homo sapiens
  misc_RNA (1)...(19): siRNA sense strand
caacagaaacaggaacaaa

SEQ ID NO: 869760 - RNA, 19 nt, Homo sapiens
  misc_RNA (1)...(19): siRNA sense strand
gaguugaacauuugaagaa

SEQ ID NO: 869761 - RNA, 19 nt, Homo sapiens
  misc_RNA (1)...(19): siRNA sense strand
uggcugagauugacccaaa

SEQ ID NO: 869762 - RNA, 19 nt, Homo sapiens
  misc_RNA (1)...(19): siRNA sense strand
gagagagaagcaucaguaa

SEQ ID NO: 869763 - RNA, 19 nt, Homo sapiens
  misc_RNA (1)...(19): siRNA sense strand
caagauaucuggauuuucu

SEQ ID NO: 869764 - RNA, 19 nt, Homo sapiens
  misc_RNA (1)...(19): siRNA sense strand
gagcagacagccaaacgaa

SEQ ID NO: 869765 - RNA, 19 nt, Homo sapiens
  misc_RNA (1)...(19): siRNA sense strand
ggagccaaugcaacuauua

SEQ ID NO: 869766 - RNA, 19 nt, Homo sapiens
  misc_RNA (1)...(19): siRNA sense strand
gaaaagagcauauuuagcu

SEQ ID NO: 869767 - RNA, 19 nt, Homo sapiens
  misc_RNA (1)...(19): siRNA sense strand
ugaauuugaugguacugaa

SEQ ID NO: 869768 - RNA, 19 nt, Homo sapiens
  misc_RNA (1)...(19): siRNA sense strand
gaaggcaaacucucacugu

SEQ ID NO: 869769 - RNA, 19 nt, Homo sapiens
  misc_RNA (1)...(19): siRNA sense strand
gaaaaggaucagcucauua

SEQ ID NO: 869770 - RNA, 19 nt, Homo sapiens
  misc_RNA (1)...(19): siRNA sense strand
ugacaccaauaaacaguau

SEQ ID NO: 869771 - RNA, 19 nt, Homo sapiens
  misc_RNA (1)...(19): siRNA sense strand
caucuaucauuucccguaa

SEQ ID NO: 869772 - RNA, 19 nt, Homo sapiens
  misc_RNA (1)...(19): siRNA sense strand
agagagagaagcaucagua

SEQ ID NO: 869773 - RNA, 19 nt, Homo sapiens
  misc_RNA (1)...(19): siRNA sense strand
cagcagaaauaagaaagga

SEQ ID NO: 869774 - RNA, 19 nt, Homo sapiens
  misc_RNA (1)...(19): siRNA sense strand
aagcaucaguaaagagaaa

SEQ ID NO: 869775 - RNA, 19 nt, Homo sapiens
  misc_RNA (1)...(19): siRNA sense strand
caaugcaacuauuacaagu

SEQ ID NO: 869776 - RNA, 19 nt, Homo sapiens
  misc_RNA (1)...(19): siRNA sense strand
uauuacaaguucucaguga

SEQ ID NO: 869777 - RNA, 19 nt, Homo sapiens
  misc_RNA (1)...(19): siRNA sense strand
ucagaggacuaaugaacug

SEQ ID NO: 869778 - RNA, 19 nt, Homo sapiens
  misc_RNA (1)...(19): siRNA sense strand
ccaaagcaacuuguggaua

SEQ ID NO: 869779 - RNA, 19 nt, Homo sapiens
  misc_RNA (1)...(19): siRNA sense strand
ucagugcaauggaagaaga

SEQ ID NO: 869780 - RNA, 19 nt, Homo sapiens
  misc_RNA (1)...(19): siRNA sense strand
guaugaagaguuaauggaa

SEQ ID NO: 869781 - RNA, 19 nt, Homo sapiens
  misc_RNA (1)...(19): siRNA sense strand
caggaaaugccacagauau

SEQ ID NO: 869782 - RNA, 19 nt, Homo sapiens
  misc_RNA (1)...(19): siRNA sense strand
aaggcaaacucucacugua

SEQ ID NO: 869783 - RNA, 19 nt, Homo sapiens
  misc_RNA (1)...(19): siRNA sense strand
guacaaaaccagcugaaaa

SEQ ID NO: 869784 - RNA, 19 nt, Homo sapiens
  misc_RNA (1)...(19): siRNA sense strand
gcucaagauaucuggauuu

SEQ ID NO: 869785 - RNA, 19 nt, Homo sapiens
  misc_RNA (1)...(19): siRNA sense strand
agagaagcaucaguaaaga

SEQ ID NO: 869786 - RNA, 19 nt, Homo sapiens
  misc_RNA (1)...(19): siRNA sense strand
cuaaugaacugaagaaaag

SEQ ID NO: 869787 - RNA, 19 nt, Homo sapiens
  misc_RNA (1)...(19): siRNA sense strand
ugagguaccaagugaguuu

SEQ ID NO: 869788 - RNA, 19 nt, Homo sapiens
  misc_RNA (1)...(19): siRNA sense strand
cacagaaauuaaccaguug

SEQ ID NO: 869789 - RNA, 19 nt, Homo sapiens
  misc_RNA (1)...(19): siRNA sense strand
gcagaugcaaagccugaaa

SEQ ID NO: 869790 - RNA, 19 nt, Homo sapiens
  misc_RNA (1)...(19): siRNA sense strand
gaauaucuugcacaacaga

SEQ ID NO: 869791 - RNA, 19 nt, Homo sapiens
  misc_RNA (1)...(19): siRNA sense strand
aggaucagcucauuaagag

SEQ ID NO: 869792 - RNA, 19 nt, Homo sapiens
  misc_RNA (1)...(19): siRNA sense strand
aaucagacccgugaauuug

SEQ ID NO: 869793 - RNA, 19 nt, Homo sapiens
  misc_RNA (1)...(19): siRNA sense strand
agccaaagcugaggaacuu

SEQ ID NO: 869794 - RNA, 19 nt, Homo sapiens
  misc_RNA (1)...(19): siRNA sense strand
gugcuccacuggcuucuuc

SEQ ID NO: 869795 - RNA, 19 nt, Homo sapiens
  misc_RNA (1)...(19): siRNA sense strand
gaaaugccacagauaugag

SEQ ID NO: 869796 - RNA, 19 nt, Homo sapiens
  misc_RNA (1)...(19): siRNA sense strand
uggacagucucaauaagga

SEQ ID NO: 869797 - RNA, 19 nt, Homo sapiens
  misc_RNA (1)...(19): siRNA sense strand
agacagcucagaaucauca

SEQ ID NO: 869798 - RNA, 19 nt, Homo sapiens
  misc_RNA (1)...(19): siRNA sense strand
aaaaggaucagcucauuaa

SEQ ID NO: 869799 - RNA, 19 nt, Homo sapiens
  misc_RNA (1)...(19): siRNA sense strand
caauaaacaguaugaagag

SEQ ID NO: 869800 - RNA, 19 nt, Homo sapiens
  misc_RNA (1)...(19): siRNA sense strand
cgucaggguuuggugauug

SEQ ID NO: 869801 - RNA, 19 nt, Homo sapiens
  misc_RNA (1)...(19): siRNA sense strand
guugagccuucuugguauu

SEQ ID NO: 869802 - RNA, 19 nt, Homo sapiens
  misc_RNA (1)...(19): siRNA sense strand
gaggcuagaggaggagaua

SEQ ID NO: 869803 - RNA, 19 nt, Homo sapiens
  misc_RNA (1)...(19): siRNA sense strand
gaacaaaagaaucagcuau

SEQ ID NO: 869804 - RNA, 19 nt, Homo sapiens
  misc_RNA (1)...(19): siRNA sense strand
ucaggaaaugccacagaua

SEQ ID NO: 869805 - RNA, 19 nt, Homo sapiens
  misc_RNA (1)...(19): siRNA sense strand
gggccauucugaucuucuu

SEQ ID NO: 869806 - RNA, 19 nt, Homo sapiens
  misc_RNA (1)...(19): siRNA sense strand
ccaaugcaacuauuacaag

SEQ ID NO: 869807 - RNA, 19 nt, Homo sapiens
  misc_RNA (1)...(19): siRNA sense strand
ucaguaaagagaaaucaga

SEQ ID NO: 869808 - RNA, 19 nt, Homo sapiens
  misc_RNA (1)...(19): siRNA sense strand
agaagcaucaguaaagaga

SEQ ID NO: 869809 - RNA, 19 nt, Homo sapiens
  misc_RNA (1)...(19): siRNA sense strand
ggaggccaaggagaaguua

SEQ ID NO: 869810 - RNA, 19 nt, Homo sapiens
  misc_RNA (1)...(19): siRNA sense strand
gaggacuaaugaacugaag

SEQ ID NO: 869811 - RNA, 19 nt, Homo sapiens
  misc_RNA (1)...(19): siRNA sense strand
ugaugguacugaaguuuua

SEQ ID NO: 869812 - RNA, 19 nt, Homo sapiens
  misc_RNA (1)...(19): siRNA sense strand
cuacagcagaaauaagaaa

SEQ ID NO: 869813 - RNA, 19 nt, Homo sapiens
  misc_RNA (1)...(19): siRNA sense strand
gugauguucuggcugagau

SEQ ID NO: 869814 - RNA, 19 nt, Homo sapiens
  misc_RNA (1)...(19): siRNA sense strand
ucagacccgugaauuugau

SEQ ID NO: 869815 - RNA, 19 nt, Homo sapiens
  misc_RNA (1)...(19): siRNA sense strand
ccauucugaucuucuugaa

SEQ ID NO: 869816 - RNA, 19 nt, Homo sapiens
  misc_RNA (1)...(19): siRNA sense strand
gccugaaaguuuaaugaag

SEQ ID NO: 869817 - RNA, 19 nt, Homo sapiens
  misc_RNA (1)...(19): siRNA sense strand
aagaaucagcuauuucaug

SEQ ID NO: 869818 - RNA, 19 nt, Homo sapiens
  misc_RNA (1)...(19): siRNA sense strand
cagcucagaaucaucaaug

SEQ ID NO: 869819 - RNA, 19 nt, Homo sapiens
  misc_RNA (1)...(19): siRNA sense strand
agagagaagcaucaguaaa

SEQ ID NO: 869820 - RNA, 19 nt, Homo sapiens
  misc_RNA (1)...(19): siRNA sense strand
ggcuagaggaggagauaaa

SEQ ID NO: 869821 - RNA, 19 nt, Homo sapiens
  misc_RNA (1)...(19): siRNA sense strand
ccuuuaggaagaacuauaa

SEQ ID NO: 869822 - RNA, 19 nt, Homo sapiens
  misc_RNA (1)...(19): siRNA sense strand
gcucagaaucaucaaugga

SEQ ID NO: 869823 - RNA, 19 nt, Homo sapiens
  misc_RNA (1)...(19): siRNA sense strand
gaugcaaagccugaaaguu

SEQ ID NO: 869824 - RNA, 19 nt, Homo sapiens
  misc_RNA (1)...(19): siRNA sense strand
gaagcaucaguaaagagaa

SEQ ID NO: 869825 - RNA, 19 nt, Homo sapiens
  misc_RNA (1)...(19): siRNA sense strand
gccaaugcaacuauuacaa

SEQ ID NO: 869826 - RNA, 19 nt, Homo sapiens
  misc_RNA (1)...(19): siRNA sense strand
acaccaauaaacaguauga

SEQ ID NO: 869827 - RNA, 19 nt, Homo sapiens
  misc_RNA (1)...(19): siRNA sense strand
uagccagccuagagagaga

SEQ ID NO: 869828 - RNA, 19 nt, Homo sapiens
  misc_RNA (1)...(19): siRNA sense strand
ccaaagcugaggaacuuca

SEQ ID NO: 869829 - RNA, 19 nt, Homo sapiens
  misc_RNA (1)...(19): siRNA sense strand
agaaaaggaucagcucauu

SEQ ID NO: 869830 - RNA, 19 nt, Homo sapiens
  misc_RNA (1)...(19): siRNA sense strand
caaguucucagugauguuc

SEQ ID NO: 869831 - RNA, 19 nt, Homo sapiens
  misc_RNA (1)...(19): siRNA sense strand
aaggaucagcucauuaaga

SEQ ID NO: 869832 - RNA, 19 nt, Homo sapiens
  misc_RNA (1)...(19): siRNA sense strand
gaagaaaaggguugagaca

SEQ ID NO: 869833 - RNA, 19 nt, Homo sapiens
  misc_RNA (1)...(19): siRNA sense strand
guacaaaccuucaggaaau

SEQ ID NO: 869834 - RNA, 19 nt, Homo sapiens
  misc_RNA (1)...(19): siRNA sense strand
caacaggcaucuaucauuu

SEQ ID NO: 869835 - RNA, 19 nt, Homo sapiens
  misc_RNA (1)...(19): siRNA sense strand
gaaauuaaccaguugauug

SEQ ID NO: 869836 - RNA, 19 nt, Homo sapiens
  misc_RNA (1)...(19): siRNA sense strand
caaagcaacuuguggauau

SEQ ID NO: 869837 - RNA, 19 nt, Homo sapiens
  misc_RNA (1)...(19): siRNA sense strand
uaagagaguugaacauuug

SEQ ID NO: 869838 - RNA, 19 nt, Homo sapiens
  misc_RNA (1)...(19): siRNA sense strand
ccacagauaugaguacuuu

SEQ ID NO: 869839 - RNA, 19 nt, Homo sapiens
  misc_RNA (1)...(19): siRNA sense strand
ggaaguaaaccuguaauuu

SEQ ID NO: 869840 - RNA, 19 nt, Homo sapiens
  misc_RNA (1)...(19): siRNA sense strand
ggcaaacucucacuguaua

SEQ ID NO: 869841 - RNA, 19 nt, Homo sapiens
  misc_RNA (1)...(19): siRNA sense strand
gcagaaauaagaaaggaua

SEQ ID NO: 869842 - RNA, 19 nt, Homo sapiens
  misc_RNA (1)...(19): siRNA sense strand
gaaaggauaucagugcaau

SEQ ID NO: 869843 - RNA, 19 nt, Homo sapiens
  misc_RNA (1)...(19): siRNA sense strand
acacagaaauuaaccaguu

SEQ ID NO: 869844 - RNA, 19 nt, Homo sapiens
  misc_RNA (1)...(19): siRNA sense strand
ggaaaugccacagauauga

SEQ ID NO: 869845 - RNA, 19 nt, Homo sapiens
  misc_RNA (1)...(19): siRNA sense strand
ggauaucagugcaauggaa

SEQ ID NO: 869846 - RNA, 19 nt, Homo sapiens
  misc_RNA (1)...(19): siRNA sense strand
gaaaucagacccgugaauu

SEQ ID NO: 869847 - RNA, 19 nt, Homo sapiens
  misc_RNA (1)...(19): siRNA sense strand
ugcaaagccugaaaguuua

SEQ ID NO: 869848 - RNA, 19 nt, Homo sapiens
  misc_RNA (1)...(19): siRNA sense strand
gcaacaggcaucuaucauu

SEQ ID NO: 869849 - RNA, 19 nt, Homo sapiens
  misc_RNA (1)...(19): siRNA sense strand
gagagaagcaucaguaaag

SEQ ID NO: 869850 - RNA, 19 nt, Homo sapiens
  misc_RNA (1)...(19): siRNA sense strand
gcagacagccaaacgaaug

SEQ ID NO: 869851 - RNA, 19 nt, Homo sapiens
  misc_RNA (1)...(19): siRNA sense strand
gaaguuagccagccuagag

SEQ ID NO: 869852 - RNA, 19 nt, Homo sapiens
  misc_RNA (1)...(19): siRNA sense strand
ccaauaaacaguaugaaga

SEQ ID NO: 869853 - RNA, 19 nt, Homo sapiens
  misc_RNA (1)...(19): siRNA sense strand
ccugaaaguuuaaugaaga

SEQ ID NO: 869854 - RNA, 19 nt, Homo sapiens
  misc_RNA (1)...(19): siRNA sense strand
ggacuaaugaacugaagaa

SEQ ID NO: 869855 - RNA, 19 nt, Homo sapiens
  misc_RNA (1)...(19): siRNA sense strand
gauuggaaguaaaccugua

SEQ ID NO: 869856 - RNA, 19 nt, Homo sapiens
  misc_RNA (1)...(19): siRNA sense strand
gugaguuucuucaggauga

SEQ ID NO: 869857 - RNA, 19 nt, Homo sapiens
  misc_RNA (1)...(19): siRNA sense strand
gcaaagccugaaaguuuaa

SEQ ID NO: 869858 - RNA, 19 nt, Homo sapiens
  misc_RNA (1)...(19): siRNA sense strand
augcaaagccugaaaguuu

SEQ ID NO: 869859 - RNA, 19 nt, Homo sapiens
  misc_RNA (1)...(19): siRNA sense strand
caacagaaacaggaacaaa

SEQ ID NO: 869860 - RNA, 19 nt, Homo sapiens
  misc_RNA (1)...(19): siRNA sense strand
gaguugaacauuugaagaa

SEQ ID NO: 869861 - RNA, 19 nt, Homo sapiens
  misc_RNA (1)...(19): siRNA sense strand
uggcugagauugacccaaa

SEQ ID NO: 869862 - RNA, 19 nt, Homo sapiens
  misc_RNA (1)...(19): siRNA sense strand
gagagagaagcaucaguaa

SEQ ID NO: 869863 - RNA, 19 nt, Homo sapiens
  misc_RNA (1)...(19): siRNA sense strand
caagauaucuggauuuucu

SEQ ID NO: 869864 - RNA, 19 nt, Homo sapiens
  misc_RNA (1)...(19): siRNA sense strand
gagcagacagccaaacgaa

SEQ ID NO: 869865 - RNA, 19 nt, Homo sapiens
  misc_RNA (1)...(19): siRNA sense strand
ggagccaaugcaacuauua

SEQ ID NO: 869866 - RNA, 19 nt, Homo sapiens
  misc_RNA (1)...(19): siRNA sense strand
gaaaagagcauauuuagcu

SEQ ID NO: 869867 - RNA, 19 nt, Homo sapiens
  misc_RNA (1)...(19): siRNA sense strand
ugaauuugaugguacugaa

SEQ ID NO: 869868 - RNA, 19 nt, Homo sapiens
  misc_RNA (1)...(19): siRNA sense strand
gaaggcaaacucucacugu

SEQ ID NO: 869869 - RNA, 19 nt, Homo sapiens
  misc_RNA (1)...(19): siRNA sense strand
gaaaaggaucagcucauua

SEQ ID NO: 869870 - RNA, 19 nt, Homo sapiens
  misc_RNA (1)...(19): siRNA sense strand
ugacaccaauaaacaguau

SEQ ID NO: 869871 - RNA, 19 nt, Homo sapiens
  misc_RNA (1)...(19): siRNA sense strand
caucuaucauuucccguaa

SEQ ID NO: 869872 - RNA, 19 nt, Homo sapiens
  misc_RNA (1)...(19): siRNA sense strand
agagagagaagcaucagua

SEQ ID NO: 869873 - RNA, 19 nt, Homo sapiens
  misc_RNA (1)...(19): siRNA sense strand
cagcagaaauaagaaagga

SEQ ID NO: 869874 - RNA, 19 nt, Homo sapiens
  misc_RNA (1)...(19): siRNA sense strand
aagcaucaguaaagagaaa

SEQ ID NO: 869875 - RNA, 19 nt, Homo sapiens
  misc_RNA (1)...(19): siRNA sense strand
caaugcaacuauuacaagu

SEQ ID NO: 869876 - RNA, 19 nt, Homo sapiens
  misc_RNA (1)...(19): siRNA sense strand
uauuacaaguucucaguga

SEQ ID NO: 869877 - RNA, 19 nt, Homo sapiens
  misc_RNA (1)...(19): siRNA sense strand
ucagaggacuaaugaacug

SEQ ID NO: 869878 - RNA, 19 nt, Homo sapiens
  misc_RNA (1)...(19): siRNA sense strand
ccaaagcaacuuguggaua

SEQ ID NO: 869879 - RNA, 19 nt, Homo sapiens
  misc_RNA (1)...(19): siRNA sense strand
ucagugcaauggaagaaga

SEQ ID NO: 869880 - RNA, 19 nt, Homo sapiens
  misc_RNA (1)...(19): siRNA sense strand
guaugaagaguuaauggaa

SEQ ID NO: 869881 - RNA, 19 nt, Homo sapiens
  misc_RNA (1)...(19): siRNA sense strand
caggaaaugccacagauau

SEQ ID NO: 869882 - RNA, 19 nt, Homo sapiens
  misc_RNA (1)...(19): siRNA sense strand
aaggcaaacucucacugua

SEQ ID NO: 869883 - RNA, 19 nt, Homo sapiens
  misc_RNA (1)...(19): siRNA sense strand
guacaaaaccagcugaaaa

SEQ ID NO: 869884 - RNA, 19 nt, Homo sapiens
  misc_RNA (1)...(19): siRNA sense strand
gcucaagauaucuggauuu

SEQ ID NO: 869885 - RNA, 19 nt, Homo sapiens
  misc_RNA (1)...(19): siRNA sense strand
agagaagcaucaguaaaga

SEQ ID NO: 869886 - RNA, 19 nt, Homo sapiens
  misc_RNA (1)...(19): siRNA sense strand
cuaaugaacugaagaaaag

SEQ ID NO: 869887 - RNA, 19 nt, Homo sapiens
  misc_RNA (1)...(19): siRNA sense strand
ugagguaccaagugaguuu

SEQ ID NO: 869888 - RNA, 19 nt, Homo sapiens
  misc_RNA (1)...(19): siRNA sense strand
cacagaaauuaaccaguug

SEQ ID NO: 869889 - RNA, 19 nt, Homo sapiens
  misc_RNA (1)...(19): siRNA sense strand
gcagaugcaaagccugaaa

SEQ ID NO: 869890 - RNA, 19 nt, Homo sapiens
  misc_RNA (1)...(19): siRNA sense strand
gaauaucuugcacaacaga

SEQ ID NO: 869891 - RNA, 19 nt, Homo sapiens
  misc_RNA (1)...(19): siRNA sense strand
aggaucagcucauuaagag

SEQ ID NO: 869892 - RNA, 19 nt, Homo sapiens
  misc_RNA (1)...(19): siRNA sense strand
aaucagacccgugaauuug

SEQ ID NO: 869893 - RNA, 19 nt, Homo sapiens
  misc_RNA (1)...(19): siRNA sense strand
agccaaagcugaggaacuu

SEQ ID NO: 869894 - RNA, 19 nt, Homo sapiens
  misc_RNA (1)...(19): siRNA sense strand
gugcuccacuggcuucuuc

SEQ ID NO: 869895 - RNA, 19 nt, Homo sapiens
  misc_RNA (1)...(19): siRNA sense strand
gaaaugccacagauaugag

SEQ ID NO: 869896 - RNA, 19 nt, Homo sapiens
  misc_RNA (1)...(19): siRNA sense strand
uggacagucucaauaagga

SEQ ID NO: 869897 - RNA, 19 nt, Homo sapiens
  misc_RNA (1)...(19): siRNA sense strand
agacagcucagaaucauca

SEQ ID NO: 869898 - RNA, 19 nt, Homo sapiens
  misc_RNA (1)...(19): siRNA sense strand
aaaaggaucagcucauuaa

SEQ ID NO: 869899 - RNA, 19 nt, Homo sapiens
  misc_RNA (1)...(19): siRNA sense strand
caauaaacaguaugaagag

SEQ ID NO: 869900 - RNA, 19 nt, Homo sapiens
  misc_RNA (1)...(19): siRNA sense strand
cgucaggguuuggugauug

SEQ ID NO: 869901 - RNA, 19 nt, Homo sapiens
  misc_RNA (1)...(19): siRNA sense strand
guugagccuucuugguauu

SEQ ID NO: 869902 - RNA, 19 nt, Homo sapiens
  misc_RNA (1)...(19): siRNA sense strand
gaggcuagaggaggagaua

SEQ ID NO: 869903 - RNA, 19 nt, Homo sapiens
  misc_RNA (1)...(19): siRNA sense strand
gaacaaaagaaucagcuau

SEQ ID NO: 869904 - RNA, 19 nt, Homo sapiens
  misc_RNA (1)...(19): siRNA sense strand
ucaggaaaugccacagaua

SEQ ID NO: 869905 - RNA, 19 nt, Homo sapiens
  misc_RNA (1)...(19): siRNA sense strand
gggccauucugaucuucuu

SEQ ID NO: 869906 - RNA, 19 nt, Homo sapiens
  misc_RNA (1)...(19): siRNA sense strand
ccaaugcaacuauuacaag

SEQ ID NO: 869907 - RNA, 19 nt, Homo sapiens
  misc_RNA (1)...(19): siRNA sense strand
ucaguaaagagaaaucaga

SEQ ID NO: 869908 - RNA, 19 nt, Homo sapiens
  misc_RNA (1)...(19): siRNA sense strand
agaagcaucaguaaagaga

SEQ ID NO: 869909 - RNA, 19 nt, Homo sapiens
  misc_RNA (1)...(19): siRNA sense strand
ggaggccaaggagaaguua

SEQ ID NO: 869910 - RNA, 19 nt, Homo sapiens
  misc_RNA (1)...(19): siRNA sense strand
gaggacuaaugaacugaag

SEQ ID NO: 869911 - RNA, 19 nt, Homo sapiens
  misc_RNA (1)...(19): siRNA sense strand
ugaugguacugaaguuuua

SEQ ID NO: 869912 - RNA, 19 nt, Homo sapiens
  misc_RNA (1)...(19): siRNA sense strand
cuacagcagaaauaagaaa

SEQ ID NO: 869913 - RNA, 19 nt, Homo sapiens
  misc_RNA (1)...(19): siRNA sense strand
gugauguucuggcugagau

SEQ ID NO: 869914 - RNA, 19 nt, Homo sapiens
  misc_RNA (1)...(19): siRNA sense strand
ucagacccgugaauuugau

SEQ ID NO: 869915 - RNA, 19 nt, Homo sapiens
  misc_RNA (1)...(19): siRNA sense strand
ccauucugaucuucuugaa

SEQ ID NO: 869916 - RNA, 19 nt, Homo sapiens
  misc_RNA (1)...(19): siRNA sense strand
gccugaaaguuuaaugaag

SEQ ID NO: 869917 - RNA, 19 nt, Homo sapiens
  misc_RNA (1)...(19): siRNA sense strand
aagaaucagcuauuucaug

SEQ ID NO: 869918 - RNA, 19 nt, Homo sapiens
  misc_RNA (1)...(19): siRNA sense strand
cagcucagaaucaucaaug

SEQ ID NO: 869919 - RNA, 19 nt, Homo sapiens
  misc_RNA (1)...(19): siRNA sense strand
agagagaagcaucaguaaa

SEQ ID NO: 869920 - RNA, 19 nt, Homo sapiens
  misc_RNA (1)...(19): siRNA sense strand
ggcuagaggaggagauaaa

SEQ ID NO: 869921 - RNA, 19 nt, Homo sapiens
  misc_RNA (1)...(19): siRNA sense strand
ccuuuaggaagaacuauaa

SEQ ID NO: 869922 - RNA, 19 nt, Homo sapiens
  misc_RNA (1)...(19): siRNA sense strand
gcucagaaucaucaaugga

SEQ ID NO: 869923 - RNA, 19 nt, Homo sapiens
  misc_RNA (1)...(19): siRNA sense strand
gaugcaaagccugaaaguu

SEQ ID NO: 869924 - RNA, 19 nt, Homo sapiens
  misc_RNA (1)...(19): siRNA sense strand
gaagcaucaguaaagagaa

SEQ ID NO: 869925 - RNA, 19 nt, Homo sapiens
  misc_RNA (1)...(19): siRNA sense strand
gccaaugcaacuauuacaa

SEQ ID NO: 869926 - RNA, 19 nt, Homo sapiens
  misc_RNA (1)...(19): siRNA sense strand
acaccaauaaacaguauga

SEQ ID NO: 869927 - RNA, 19 nt, Homo sapiens
  misc_RNA (1)...(19): siRNA sense strand
uagccagccuagagagaga

SEQ ID NO: 869928 - RNA, 19 nt, Homo sapiens
  misc_RNA (1)...(19): siRNA sense strand
ccaaagcugaggaacuuca

SEQ ID NO: 869929 - RNA, 19 nt, Homo sapiens
  misc_RNA (1)...(19): siRNA sense strand
agaaaaggaucagcucauu

SEQ ID NO: 869930 - RNA, 19 nt, Homo sapiens
  misc_RNA (1)...(19): siRNA sense strand
caaguucucagugauguuc

SEQ ID NO: 869931 - RNA, 19 nt, Homo sapiens
  misc_RNA (1)...(19): siRNA sense strand
aaggaucagcucauuaaga

SEQ ID NO: 869932 - RNA, 19 nt, Homo sapiens
  misc_RNA (1)...(19): siRNA sense strand
gaagaaaaggguugagaca

SEQ ID NO: 869933 - RNA, 19 nt, Homo sapiens
  misc_RNA (1)...(19): siRNA sense strand
ccaagagccuggccaguga

SEQ ID NO: 869934 - RNA, 19 nt, Homo sapiens
  misc_RNA (1)...(19): siRNA sense strand
caacccagguggagcaguu

SEQ ID NO: 869935 - RNA, 19 nt, Homo sapiens
  misc_RNA (1)...(19): siRNA sense strand
ggacagagacaggcaggaa

SEQ ID NO: 869936 - RNA, 19 nt, Homo sapiens
  misc_RNA (1)...(19): siRNA sense strand
caggagagaugagggagaa

SEQ ID NO: 869937 - RNA, 19 nt, Homo sapiens
  misc_RNA (1)...(19): siRNA sense strand
ucaaacaggccacccaguu

SEQ ID NO: 869938 - RNA, 19 nt, Homo sapiens
  misc_RNA (1)...(19): siRNA sense strand
caggagagcaggaggaaga

SEQ ID NO: 869939 - RNA, 19 nt, Homo sapiens
  misc_RNA (1)...(19): siRNA sense strand
caaacaggccacccaguuc

SEQ ID NO: 869940 - RNA, 19 nt, Homo sapiens
  misc_RNA (1)...(19): siRNA sense strand
ggugguggaugcugagagu

SEQ ID NO: 869941 - RNA, 19 nt, Homo sapiens
  misc_RNA (1)...(19): siRNA sense strand
ucggaucucugcuggaugu

SEQ ID NO: 869942 - RNA, 19 nt, Homo sapiens
  misc_RNA (1)...(19): siRNA sense strand
ccacccaguuccugcacaa

SEQ ID NO: 869943 - RNA, 19 nt, Homo sapiens
  misc_RNA (1)...(19): siRNA sense strand
ccaauacaaucggaucucu

SEQ ID NO: 869944 - RNA, 19 nt, Homo sapiens
  misc_RNA (1)...(19): siRNA sense strand
acacaggcacccaauacaa

SEQ ID NO: 869945 - RNA, 19 nt, Homo sapiens
  misc_RNA (1)...(19): siRNA sense strand
agacucugcuuucucucaa

SEQ ID NO: 869946 - RNA, 19 nt, Homo sapiens
  misc_RNA (1)...(19): siRNA sense strand
gagacccuccuguuggaaa

SEQ ID NO: 869947 - RNA, 19 nt, Homo sapiens
  misc_RNA (1)...(19): siRNA sense strand
ugacacaggcacccaauac

SEQ ID NO: 869948 - RNA, 19 nt, Homo sapiens
  misc_RNA (1)...(19): siRNA sense strand
gagaaaaggguccuaaaag

SEQ ID NO: 869949 - RNA, 19 nt, Homo sapiens
  misc_RNA (1)...(19): siRNA sense strand
aaucggaucucugcuggau

SEQ ID NO: 869950 - RNA, 19 nt, Homo sapiens
  misc_RNA (1)...(19): siRNA sense strand
uagaguggccguugacaca

SEQ ID NO: 869951 - RNA, 19 nt, Homo sapiens
  misc_RNA (1)...(19): siRNA sense strand
uacccuuccugccuuugua

SEQ ID NO: 869952 - RNA, 19 nt, Homo sapiens
  misc_RNA (1)...(19): siRNA sense strand
ggaagaccagcaggacaga

SEQ ID NO: 869953 - RNA, 19 nt, Homo sapiens
  misc_RNA (1)...(19): siRNA sense strand
ggagugcugcggcugaaag

SEQ ID NO: 869954 - RNA, 19 nt, Homo sapiens
  misc_RNA (1)...(19): siRNA sense strand
cagcucuucuggucaacug

SEQ ID NO: 869955 - RNA, 19 nt, Homo sapiens
  misc_RNA (1)...(19): siRNA sense strand
gaccagcaggacagagauu

SEQ ID NO: 869956 - RNA, 19 nt, Homo sapiens
  misc_RNA (1)...(19): siRNA sense strand
acagagacaggcaggaaga

SEQ ID NO: 869957 - RNA, 19 nt, Homo sapiens
  misc_RNA (1)...(19): siRNA sense strand
cacaggcacccaauacaau

SEQ ID NO: 869958 - RNA, 19 nt, Homo sapiens
  misc_RNA (1)...(19): siRNA sense strand
ggagggaaacccgaauugg

SEQ ID NO: 869959 - RNA, 19 nt, Homo sapiens
  misc_RNA (1)...(19): siRNA sense strand
ugccaggaccagcugcuua

SEQ ID NO: 869960 - RNA, 19 nt, Homo sapiens
  misc_RNA (1)...(19): siRNA sense strand
ucucagagcuacccuuccu

SEQ ID NO: 869961 - RNA, 19 nt, Homo sapiens
  misc_RNA (1)...(19): siRNA sense strand
aggaccagcugcuuagagu

SEQ ID NO: 869962 - RNA, 19 nt, Homo sapiens
  misc_RNA (1)...(19): siRNA sense strand
gcaggaggccaggagagau

SEQ ID NO: 869963 - RNA, 19 nt, Homo sapiens
  misc_RNA (1)...(19): siRNA sense strand
gacacaggcacccaauaca

SEQ ID NO: 869964 - RNA, 19 nt, Homo sapiens
  misc_RNA (1)...(19): siRNA sense strand
caggaggccaggagagaug

SEQ ID NO: 869965 - RNA, 19 nt, Homo sapiens
  misc_RNA (1)...(19): siRNA sense strand
ggaagaagcuggaagaaga

SEQ ID NO: 869966 - RNA, 19 nt, Homo sapiens
  misc_RNA (1)...(19): siRNA sense strand
ccgcagagcuggaggcuaa

SEQ ID NO: 869967 - RNA, 19 nt, Homo sapiens
  misc_RNA (1)...(19): siRNA sense strand
ggacaucgcuaaguacuag

SEQ ID NO: 869968 - RNA, 19 nt, Homo sapiens
  misc_RNA (1)...(19): siRNA sense strand
ccacuacgcugccgccaaa

SEQ ID NO: 869969 - RNA, 19 nt, Homo sapiens
  misc_RNA (1)...(19): siRNA sense strand
cgcuagagcugcagacaua

SEQ ID NO: 869970 - RNA, 19 nt, Homo sapiens
  misc_RNA (1)...(19): siRNA sense strand
ugaacuggcucuugcauca

SEQ ID NO: 869971 - RNA, 19 nt, Homo sapiens
  misc_RNA (1)...(19): siRNA sense strand
caccaagucuuucaacaug

SEQ ID NO: 869972 - RNA, 19 nt, Homo sapiens
  misc_RNA (1)...(19): siRNA sense strand
ggcauguccucacccaaua

SEQ ID NO: 869973 - RNA, 19 nt, Homo sapiens
  misc_RNA (1)...(19): siRNA sense strand
gcagagugcaggacaaaga

SEQ ID NO: 869974 - RNA, 19 nt, Homo sapiens
  misc_RNA (1)...(19): siRNA sense strand
ccagcacccucuccaacua

SEQ ID NO: 869975 - RNA, 19 nt, Homo sapiens
  misc_RNA (1)...(19): siRNA sense strand
gaccucagcucgccuacca

SEQ ID NO: 869976 - RNA, 19 nt, Homo sapiens
  misc_RNA (1)...(19): siRNA sense strand
gcaagaugcagcugaagau

SEQ ID NO: 869977 - RNA, 19 nt, Homo sapiens
  misc_RNA (1)...(19): siRNA sense strand
gcaccaagucuuucaacau

SEQ ID NO: 869978 - RNA, 19 nt, Homo sapiens
  misc_RNA (1)...(19): siRNA sense strand
gaaggaacagucagagaag

SEQ ID NO: 869979 - RNA, 19 nt, Homo sapiens
  misc_RNA (1)...(19): siRNA sense strand
gagcuacuggcugagauua

SEQ ID NO: 869980 - RNA, 19 nt, Homo sapiens
  misc_RNA (1)...(19): siRNA sense strand
acaggcagcugacaucuac

SEQ ID NO: 869981 - RNA, 19 nt, Homo sapiens
  misc_RNA (1)...(19): siRNA sense strand
gcaaggggcugaccacagu

SEQ ID NO: 869982 - RNA, 19 nt, Homo sapiens
  misc_RNA (1)...(19): siRNA sense strand
ccaagucuuucaacaugau

SEQ ID NO: 869983 - RNA, 19 nt, Homo sapiens
  misc_RNA (1)...(19): siRNA sense strand
cagcugacaucuacaugca

SEQ ID NO: 869984 - RNA, 19 nt, Homo sapiens
  misc_RNA (1)...(19): siRNA sense strand
gagaaggaacagucagaga

SEQ ID NO: 869985 - RNA, 19 nt, Homo sapiens
  misc_RNA (1)...(19): siRNA sense strand
agaaggaacagucagagaa

SEQ ID NO: 869986 - RNA, 19 nt, Homo sapiens
  misc_RNA (1)...(19): siRNA sense strand
cugcagacauacagagcua

SEQ ID NO: 869987 - RNA, 19 nt, Homo sapiens
  misc_RNA (1)...(19): siRNA sense strand
gcuacuggcugagauuaag

SEQ ID NO: 869988 - RNA, 19 nt, Homo sapiens
  misc_RNA (1)...(19): siRNA sense strand
ggacguggaggcucucauc

SEQ ID NO: 869989 - RNA, 19 nt, Homo sapiens
  misc_RNA (1)...(19): siRNA sense strand
aagaagagagggagcagaa

SEQ ID NO: 869990 - RNA, 19 nt, Homo sapiens
  misc_RNA (1)...(19): siRNA sense strand
gugaaugcccaaaccaaga

SEQ ID NO: 869991 - RNA, 19 nt, Homo sapiens
  misc_RNA (1)...(19): siRNA sense strand
gaagaagcuggaagaagag

SEQ ID NO: 869992 - RNA, 19 nt, Homo sapiens
  misc_RNA (1)...(19): siRNA sense strand
gcccagucaucgugugguu

SEQ ID NO: 869993 - RNA, 19 nt, Homo sapiens
  misc_RNA (1)...(19): siRNA sense strand
ugaaugcccaaaccaagaa

SEQ ID NO: 869994 - RNA, 19 nt, Homo sapiens
  misc_RNA (1)...(19): siRNA sense strand
gggagaaggaacagucaga

SEQ ID NO: 869995 - RNA, 19 nt, Homo sapiens
  misc_RNA (1)...(19): siRNA sense strand
cugggaagcugcacugucu

SEQ ID NO: 869996 - RNA, 19 nt, Homo sapiens
  misc_RNA (1)...(19): siRNA sense strand
gagauuaaggcaggcaaga

SEQ ID NO: 869997 - RNA, 19 nt, Homo sapiens
  misc_RNA (1)...(19): siRNA sense strand
ggagcuacuggcugagauu

SEQ ID NO: 869998 - RNA, 19 nt, Homo sapiens
  misc_RNA (1)...(19): siRNA sense strand
ggacgcugggcuacgauga

SEQ ID NO: 869999 - RNA, 19 nt, Homo sapiens
  misc_RNA (1)...(19): siRNA sense strand
ugugucaccugcacuguca

SEQ ID NO: 870000 - RNA, 19 nt, Homo sapiens
  misc_RNA (1)...(19): siRNA sense strand
gagugaaugcccaaaccaa

SEQ ID NO: 870001 - RNA, 19 nt, Homo sapiens
  misc_RNA (1)...(19): siRNA sense strand
gcagacauacagagcuaca

SEQ ID NO: 870002 - RNA, 19 nt, Homo sapiens
  misc_RNA (1)...(19): siRNA sense strand
agacauacagagcuacaug

SEQ ID NO: 870003 - RNA, 19 nt, Homo sapiens
  misc_RNA (1)...(19): siRNA sense strand
gccgcugccuucuguguca

SEQ ID NO: 870004 - RNA, 19 nt, Homo sapiens
  misc_RNA (1)...(19): siRNA sense strand
gcaggacaaagacaauucu

SEQ ID NO: 870005 - RNA, 19 nt, Homo sapiens
  misc_RNA (1)...(19): siRNA sense strand
caagaugcagcugaagaug

SEQ ID NO: 870006 - RNA, 19 nt, Homo sapiens
  misc_RNA (1)...(19): siRNA sense strand
acaucuacaugcagaccaa

SEQ ID NO: 870007 - RNA, 19 nt, Homo sapiens
  misc_RNA (1)...(19): siRNA sense strand
gggacaucgcuaaguacua

SEQ ID NO: 870008 - RNA, 19 nt, Homo sapiens
  misc_RNA (1)...(19): siRNA sense strand
gcuagagugcugccagauc

SEQ ID NO: 870009 - RNA, 19 nt, Homo sapiens
  misc_RNA (1)...(19): siRNA sense strand
gggagcagaagcggaaaga

SEQ ID NO: 870010 - RNA, 19 nt, Homo sapiens
  misc_RNA (1)...(19): siRNA sense strand
gggagugaaugcccaaacc

SEQ ID NO: 870011 - RNA, 19 nt, Homo sapiens
  misc_RNA (1)...(19): siRNA sense strand
cgacaacucggagcuacug

SEQ ID NO: 870012 - RNA, 19 nt, Homo sapiens
  misc_RNA (1)...(19): siRNA sense strand
gcucaauggaagcuugguu

SEQ ID NO: 870013 - RNA, 19 nt, Homo sapiens
  misc_RNA (1)...(19): siRNA sense strand
ggugauggugcgcaagaug

SEQ ID NO: 870014 - RNA, 19 nt, Homo sapiens
  misc_RNA (1)...(19): siRNA sense strand
gaagaaaccuacacuccaa

SEQ ID NO: 870015 - RNA, 19 nt, Homo sapiens
  misc_RNA (1)...(19): siRNA sense strand
gcaacucacugcccaagaa

SEQ ID NO: 870016 - RNA, 19 nt, Homo sapiens
  misc_RNA (1)...(19): siRNA sense strand
ggagaacgcggucuacuuu

SEQ ID NO: 870017 - RNA, 19 nt, Homo sapiens
  misc_RNA (1)...(19): siRNA sense strand
gcaaaggguccacguguaa

SEQ ID NO: 870018 - RNA, 19 nt, Homo sapiens
  misc_RNA (1)...(19): siRNA sense strand
caacuuguguuaccgagaa

SEQ ID NO: 870019 - RNA, 19 nt, Homo sapiens
  misc_RNA (1)...(19): siRNA sense strand
gcaaauaccagcacaacga

SEQ ID NO: 870020 - RNA, 19 nt, Homo sapiens
  misc_RNA (1)...(19): siRNA sense strand
ggaggcagcugcaggaaca

SEQ ID NO: 870021 - RNA, 19 nt, Homo sapiens
  misc_RNA (1)...(19): siRNA sense strand
uaugaaagcucgucuagca

SEQ ID NO: 870022 - RNA, 19 nt, Homo sapiens
  misc_RNA (1)...(19): siRNA sense strand
gaaagcucgucuagcauau

SEQ ID NO: 870023 - RNA, 19 nt, Homo sapiens
  misc_RNA (1)...(19): siRNA sense strand
gcucauucauggugucaaa

SEQ ID NO: 870024 - RNA, 19 nt, Homo sapiens
  misc_RNA (1)...(19): siRNA sense strand
cuacugggcuccgguguuu

SEQ ID NO: 870025 - RNA, 19 nt, Homo sapiens
  misc_RNA (1)...(19): siRNA sense strand
gugaacaccugccggaaga

SEQ ID NO: 870026 - RNA, 19 nt, Homo sapiens
  misc_RNA (1)...(19): siRNA sense strand
ugaaagcucgucuagcaua

SEQ ID NO: 870027 - RNA, 19 nt, Homo sapiens
  misc_RNA (1)...(19): siRNA sense strand
gcaaagacgaaccuuccua

SEQ ID NO: 870028 - RNA, 19 nt, Homo sapiens
  misc_RNA (1)...(19): siRNA sense strand
gcgaagaucuuuggaacuc

SEQ ID NO: 870029 - RNA, 19 nt, Homo sapiens
  misc_RNA (1)...(19): siRNA sense strand
gcucagcugugcccguuug

SEQ ID NO: 870030 - RNA, 19 nt, Homo sapiens
  misc_RNA (1)...(19): siRNA sense strand
aaacggacgagaugaauga

SEQ ID NO: 870031 - RNA, 19 nt, Homo sapiens
  misc_RNA (1)...(19): siRNA sense strand
gaccugggaugacgaacug

SEQ ID NO: 870032 - RNA, 19 nt, Homo sapiens
  misc_RNA (1)...(19): siRNA sense strand
gaugugacaccaagaugaa

SEQ ID NO: 870033 - RNA, 19 nt, Homo sapiens
  misc_RNA (1)...(19): siRNA sense strand
ccacaaggcgaagaucuuu

SEQ ID NO: 870034 - RNA, 19 nt, Homo sapiens
  misc_RNA (1)...(19): siRNA sense strand
gaaaggccuuccggaucuu

SEQ ID NO: 870035 - RNA, 19 nt, Homo sapiens
  misc_RNA (1)...(19): siRNA sense strand
aagugaaagugcaggauuu

SEQ ID NO: 870036 - RNA, 19 nt, Homo sapiens
  misc_RNA (1)...(19): siRNA sense strand
gaaacggacgagaugaaug

SEQ ID NO: 870037 - RNA, 19 nt, Homo sapiens
  misc_RNA (1)...(19): siRNA sense strand
gcccaacgucacucucuua

SEQ ID NO: 870038 - RNA, 19 nt, Homo sapiens
  misc_RNA (1)...(19): siRNA sense strand
cgagaugaaugagguggaa

SEQ ID NO: 870039 - RNA, 19 nt, Homo sapiens
  misc_RNA (1)...(19): siRNA sense strand
ucaacuacaugacccaagu

SEQ ID NO: 870040 - RNA, 19 nt, Homo sapiens
  misc_RNA (1)...(19): siRNA sense strand
ugcagucccucagcaaaua

SEQ ID NO: 870041 - RNA, 19 nt, Homo sapiens
  misc_RNA (1)...(19): siRNA sense strand
ggacuccucgggauggaaa

SEQ ID NO: 870042 - RNA, 19 nt, Homo sapiens
  misc_RNA (1)...(19): siRNA sense strand
ugcaaaggguccacgugua

SEQ ID NO: 870043 - RNA, 19 nt, Homo sapiens
  misc_RNA (1)...(19): siRNA sense strand
cagcugugcccguuugaaa

SEQ ID NO: 870044 - RNA, 19 nt, Homo sapiens
  misc_RNA (1)...(19): siRNA sense strand
gaacaccugccggaagaug

SEQ ID NO: 870045 - RNA, 19 nt, Homo sapiens
  misc_RNA (1)...(19): siRNA sense strand
agaacgcggucuacuuugu

SEQ ID NO: 870046 - RNA, 19 nt, Homo sapiens
  misc_RNA (1)...(19): siRNA sense strand
gggagaacgcggucuacuu

SEQ ID NO: 870047 - RNA, 19 nt, Homo sapiens
  misc_RNA (1)...(19): siRNA sense strand
ggucuacuuugucugcaau

SEQ ID NO: 870048 - RNA, 19 nt, Homo sapiens
  misc_RNA (1)...(19): siRNA sense strand
ucuacuuugucugcaauua

SEQ ID NO: 870049 - RNA, 19 nt, Homo sapiens
  misc_RNA (1)...(19): siRNA sense strand
gcucaggaauggaguucag

SEQ ID NO: 870050 - RNA, 19 nt, Homo sapiens
  misc_RNA (1)...(19): siRNA sense strand
ugaaagugcaggauuugga

SEQ ID NO: 870051 - RNA, 19 nt, Homo sapiens
  misc_RNA (1)...(19): siRNA sense strand
gguaugacgaggugaagga

SEQ ID NO: 870052 - RNA, 19 nt, Homo sapiens
  misc_RNA (1)...(19): siRNA sense strand
agggaggccugguggauau

SEQ ID NO: 870053 - RNA, 19 nt, Homo sapiens
  misc_RNA (1)...(19): siRNA sense strand
ccucugcggucaacuacau

SEQ ID NO: 870054 - RNA, 19 nt, Homo sapiens
  misc_RNA (1)...(19): siRNA sense strand
gguggaaacggcucccauu

SEQ ID NO: 870055 - RNA, 19 nt, Homo sapiens
  misc_RNA (1)...(19): siRNA sense strand
gaacgcggucuacuuuguc

SEQ ID NO: 870056 - RNA, 19 nt, Homo sapiens
  misc_RNA (1)...(19): siRNA sense strand
aaaccucugcggucaacua

SEQ ID NO: 870057 - RNA, 19 nt, Homo sapiens
  misc_RNA (1)...(19): siRNA sense strand
aaagugaaagugcaggauu

SEQ ID NO: 870058 - RNA, 19 nt, Homo sapiens
  misc_RNA (1)...(19): siRNA sense strand
gaucgguugugcugugaac

SEQ ID NO: 870059 - RNA, 19 nt, Homo sapiens
  misc_RNA (1)...(19): siRNA sense strand
gagaacgcggucuacuuug

SEQ ID NO: 870060 - RNA, 19 nt, Homo sapiens
  misc_RNA (1)...(19): siRNA sense strand
gggagaaguuugggagaac

SEQ ID NO: 870061 - RNA, 19 nt, Homo sapiens
  misc_RNA (1)...(19): siRNA sense strand
caugugcaguccugguaug

SEQ ID NO: 870062 - RNA, 19 nt, Homo sapiens
  misc_RNA (1)...(19): siRNA sense strand
gaugaaggacaggugcaaa

SEQ ID NO: 870063 - RNA, 19 nt, Homo sapiens
  misc_RNA (1)...(19): siRNA sense strand
augacgaggugaaggacua

SEQ ID NO: 870064 - RNA, 19 nt, Homo sapiens
  misc_RNA (1)...(19): siRNA sense strand
gacccaagucgucagaugu

SEQ ID NO: 870065 - RNA, 19 nt, Homo sapiens
  misc_RNA (1)...(19): siRNA sense strand
cuacuuugucugcaauuau

SEQ ID NO: 870066 - RNA, 19 nt, Homo sapiens
  misc_RNA (1)...(19): siRNA sense strand
gacgugaugcccguggaua

SEQ ID NO: 870067 - RNA, 19 nt, Homo sapiens
  misc_RNA (1)...(19): siRNA sense strand
gaaaaccucugcggucaac

SEQ ID NO: 870068 - RNA, 19 nt, Homo sapiens
  misc_RNA (1)...(19): siRNA sense strand
caacucacugcccaagaau

SEQ ID NO: 870069 - RNA, 19 nt, Homo sapiens
  misc_RNA (1)...(19): siRNA sense strand
gguccacguguaacaggua

SEQ ID NO: 870070 - RNA, 19 nt, Homo sapiens
  misc_RNA (1)...(19): siRNA sense strand
gggaugacgaacuggagaa

SEQ ID NO: 870071 - RNA, 19 nt, Homo sapiens
  misc_RNA (1)...(19): siRNA sense strand
gugcagucccucagcaaau

SEQ ID NO: 870072 - RNA, 19 nt, Homo sapiens
  misc_RNA (1)...(19): siRNA sense strand
caagggaggccugguggau

SEQ ID NO: 870073 - RNA, 19 nt, Homo sapiens
  misc_RNA (1)...(19): siRNA sense strand
cggcucccauuccugaaga

SEQ ID NO: 870074 - RNA, 19 nt, Homo sapiens
  misc_RNA (1)...(19): siRNA sense strand
gcagcugcaggaacaacuu

SEQ ID NO: 870075 - RNA, 19 nt, Homo sapiens
  misc_RNA (1)...(19): siRNA sense strand
ugaaacggacgagaugaau

SEQ ID NO: 870076 - RNA, 19 nt, Homo sapiens
  misc_RNA (1)...(19): siRNA sense strand
gcacgcacuacacacagau

SEQ ID NO: 870077 - RNA, 19 nt, Homo sapiens
  misc_RNA (1)...(19): siRNA sense strand
cguccuggguggugucauc

SEQ ID NO: 870078 - RNA, 19 nt, Homo sapiens
  misc_RNA (1)...(19): siRNA sense strand
ucagaugugacaccaagau

SEQ ID NO: 870079 - RNA, 19 nt, Homo sapiens
  misc_RNA (1)...(19): siRNA sense strand
ggucauagcaccucucuuu

SEQ ID NO: 870080 - RNA, 19 nt, Homo sapiens
  misc_RNA (1)...(19): siRNA sense strand
ucaacgagcucgccgguaa

SEQ ID NO: 870081 - RNA, 19 nt, Homo sapiens
  misc_RNA (1)...(19): siRNA sense strand
ggaaagccauguacaaagg

SEQ ID NO: 870082 - RNA, 19 nt, Homo sapiens
  misc_RNA (1)...(19): siRNA sense strand
gagcgcaucuuaaaguguu

SEQ ID NO: 870083 - RNA, 19 nt, Homo sapiens
  misc_RNA (1)...(19): siRNA sense strand
gcaccucucuuugggauug

SEQ ID NO: 870084 - RNA, 19 nt, Homo sapiens
  misc_RNA (1)...(19): siRNA sense strand
gauuggagagcgcaucuua

SEQ ID NO: 870085 - RNA, 19 nt, Homo sapiens
  misc_RNA (1)...(19): siRNA sense strand
ggagagcgcaucuuaaagu

SEQ ID NO: 870086 - RNA, 19 nt, Homo sapiens
  misc_RNA (1)...(19): siRNA sense strand
cagccaaacucaucaaugg

SEQ ID NO: 870087 - RNA, 19 nt, Homo sapiens
  misc_RNA (1)...(19): siRNA sense strand
uggaaaugcucaagauuca

SEQ ID NO: 870088 - RNA, 19 nt, Homo sapiens
  misc_RNA (1)...(19): siRNA sense strand
gagagcgcaucuuaaagug

SEQ ID NO: 870089 - RNA, 19 nt, Homo sapiens
  misc_RNA (1)...(19): siRNA sense strand
gcagugacgccucuagaug

SEQ ID NO: 870090 - RNA, 19 nt, Homo sapiens
  misc_RNA (1)...(19): siRNA sense strand
gggaccaucugccuucaug

SEQ ID NO: 870091 - RNA, 19 nt, Homo sapiens
  misc_RNA (1)...(19): siRNA sense strand
ccauggaaaugcucaagau

SEQ ID NO: 870092 - RNA, 19 nt, Homo sapiens
  misc_RNA (1)...(19): siRNA sense strand
caaggggucuauuuuauug

SEQ ID NO: 870093 - RNA, 19 nt, Homo sapiens
  misc_RNA (1)...(19): siRNA sense strand
gaaccucacucuggucacu

SEQ ID NO: 870094 - RNA, 19 nt, Homo sapiens
  misc_RNA (1)...(19): siRNA sense strand
gccucuagauguucugaaa

SEQ ID NO: 870095 - RNA, 19 nt, Homo sapiens
  misc_RNA (1)...(19): siRNA sense strand
gacauuccuuucuccauca

SEQ ID NO: 870096 - RNA, 19 nt, Homo sapiens
  misc_RNA (1)...(19): siRNA sense strand
gcagaaccagcaugggaaa

SEQ ID NO: 870097 - RNA, 19 nt, Homo sapiens
  misc_RNA (1)...(19): siRNA sense strand
gaauccaaacccucaagaa

SEQ ID NO: 870098 - RNA, 19 nt, Homo sapiens
  misc_RNA (1)...(19): siRNA sense strand
acucaucaauggaggugua

SEQ ID NO: 870099 - RNA, 19 nt, Homo sapiens
  misc_RNA (1)...(19): siRNA sense strand
gaccaucugccuucaugaa

SEQ ID NO: 870100 - RNA, 19 nt, Homo sapiens
  misc_RNA (1)...(19): siRNA sense strand
gcucaaggggucuauuuua

SEQ ID NO: 870101 - RNA, 19 nt, Homo sapiens
  misc_RNA (1)...(19): siRNA sense strand
ggugaccugucccauggaa

SEQ ID NO: 870102 - RNA, 19 nt, Homo sapiens
  misc_RNA (1)...(19): siRNA sense strand
caucacagccaaacucauc

SEQ ID NO: 870103 - RNA, 19 nt, Homo sapiens
  misc_RNA (1)...(19): siRNA sense strand
aauccaaacccucaagaaa

SEQ ID NO: 870104 - RNA, 19 nt, Homo sapiens
  misc_RNA (1)...(19): siRNA sense strand
gaaagccauguacaaagga

SEQ ID NO: 870105 - RNA, 19 nt, Homo sapiens
  misc_RNA (1)...(19): siRNA sense strand
gagcaucacagccaaacuc

SEQ ID NO: 870106 - RNA, 19 nt, Homo sapiens
  misc_RNA (1)...(19): siRNA sense strand
ccaagacucgccugcagaa

SEQ ID NO: 870107 - RNA, 19 nt, Homo sapiens
  misc_RNA (1)...(19): siRNA sense strand
gggaaagccauguacaaag

SEQ ID NO: 870108 - RNA, 19 nt, Homo sapiens
  misc_RNA (1)...(19): siRNA sense strand
caucuacuucccacuguuu

SEQ ID NO: 870109 - RNA, 19 nt, Homo sapiens
  misc_RNA (1)...(19): siRNA sense strand
ggaugcagcggaaccugaa

SEQ ID NO: 870110 - RNA, 19 nt, Homo sapiens
  misc_RNA (1)...(19): siRNA sense strand
uuggagagcgcaucuuaaa

SEQ ID NO: 870111 - RNA, 19 nt, Homo sapiens
  misc_RNA (1)...(19): siRNA sense strand
caccgacugugccaggaaa

SEQ ID NO: 870112 - RNA, 19 nt, Homo sapiens
  misc_RNA (1)...(19): siRNA sense strand
aaagccauguacaaaggaa

SEQ ID NO: 870113 - RNA, 19 nt, Homo sapiens
  misc_RNA (1)...(19): siRNA sense strand
uccaaacccucaagaaagg

SEQ ID NO: 870114 - RNA, 19 nt, Homo sapiens
  misc_RNA (1)...(19): siRNA sense strand
ccucagagacauuccuuuc

SEQ ID NO: 870115 - RNA, 19 nt, Homo sapiens
  misc_RNA (1)...(19): siRNA sense strand
ccaucugccuucaugaaag

SEQ ID NO: 870116 - RNA, 19 nt, Homo sapiens
  misc_RNA (1)...(19): siRNA sense strand
gggugccacucuccucaga

SEQ ID NO: 870117 - RNA, 19 nt, Homo sapiens
  misc_RNA (1)...(19): siRNA sense strand
ugggaaagccauguacaaa

SEQ ID NO: 870118 - RNA, 19 nt, Homo sapiens
  misc_RNA (1)...(19): siRNA sense strand
ugaccugucccauggaaau

SEQ ID NO: 870119 - RNA, 19 nt, Homo sapiens
  misc_RNA (1)...(19): siRNA sense strand
ccacuguuugccaaccuua

SEQ ID NO: 870120 - RNA, 19 nt, Homo sapiens
  misc_RNA (1)...(19): siRNA sense strand
ggcggcugcucauggaaga

SEQ ID NO: 870121 - RNA, 19 nt, Homo sapiens
  misc_RNA (1)...(19): siRNA sense strand
gagggaccaucugccuuca

SEQ ID NO: 870122 - RNA, 19 nt, Homo sapiens
  misc_RNA (1)...(19): siRNA sense strand
agugacgccucuagauguu

SEQ ID NO: 870123 - RNA, 19 nt, Homo sapiens
  misc_RNA (1)...(19): siRNA sense strand
cagagaaggccaucaagcu

SEQ ID NO: 870124 - RNA, 19 nt, Homo sapiens
  misc_RNA (1)...(19): siRNA sense strand
cauggaaaugcucaagauu

SEQ ID NO: 870125 - RNA, 19 nt, Homo sapiens
  misc_RNA (1)...(19): siRNA sense strand
augaucgacugccugauga

SEQ ID NO: 870126 - RNA, 19 nt, Homo sapiens
  misc_RNA (1)...(19): siRNA sense strand
agacucgccugcagaacca

SEQ ID NO: 870127 - RNA, 19 nt, Homo sapiens
  misc_RNA (1)...(19): siRNA sense strand
aaugaucgacugccugaug

SEQ ID NO: 870128 - RNA, 19 nt, Homo sapiens
  misc_RNA (1)...(19): siRNA sense strand
cagugacgccucuagaugu

SEQ ID NO: 870129 - RNA, 19 nt, Homo sapiens
  misc_RNA (1)...(19): siRNA sense strand
ucugaaaacucgaauccaa

SEQ ID NO: 870130 - RNA, 19 nt, Homo sapiens
  misc_RNA (1)...(19): siRNA sense strand
ugacgccucuagauguucu

SEQ ID NO: 870131 - RNA, 19 nt, Homo sapiens
  misc_RNA (1)...(19): siRNA sense strand
ucauagcaccucucuuugg

SEQ ID NO: 870132 - RNA, 19 nt, Homo sapiens
  misc_RNA (1)...(19): siRNA sense strand
acugcaaccucaaggauua

SEQ ID NO: 870133 - RNA, 19 nt, Homo sapiens
  misc_RNA (1)...(19): siRNA sense strand
ggcgcugccuucuggauca

SEQ ID NO: 870134 - RNA, 19 nt, Homo sapiens
  misc_RNA (1)...(19): siRNA sense strand
gcugccuucuggaucacua

SEQ ID NO: 870135 - RNA, 19 nt, Homo sapiens
  misc_RNA (1)...(19): siRNA sense strand
cacggccucuaccugcuuu

SEQ ID NO: 870136 - RNA, 19 nt, Homo sapiens
  misc_RNA (1)...(19): siRNA sense strand
gcgagcaggucuucaggaa

SEQ ID NO: 870137 - RNA, 19 nt, Homo sapiens
  misc_RNA (1)...(19): siRNA sense strand
caaccucacuggcuacuac

SEQ ID NO: 870138 - RNA, 19 nt, Homo sapiens
  misc_RNA (1)...(19): siRNA sense strand
gaaaaugccagaccauagu

SEQ ID NO: 870139 - RNA, 19 nt, Homo sapiens
  misc_RNA (1)...(19): siRNA sense strand
ggagggagagaugcuguau

SEQ ID NO: 870140 - RNA, 19 nt, Homo sapiens
  misc_RNA (1)...(19): siRNA sense strand
gcucagcaccuuccgaaac

SEQ ID NO: 870141 - RNA, 19 nt, Homo sapiens
  misc_RNA (1)...(19): siRNA sense strand
caccagggcaaccacauga

SEQ ID NO: 870142 - RNA, 19 nt, Homo sapiens
  misc_RNA (1)...(19): siRNA sense strand
cugcaagcccuaaacauca

SEQ ID NO: 870143 - RNA, 19 nt, Homo sapiens
  misc_RNA (1)...(19): siRNA sense strand
ggacaaggagaucgaacac

SEQ ID NO: 870144 - RNA, 19 nt, Homo sapiens
  misc_RNA (1)...(19): siRNA sense strand
agaucgcgcugcugcugaa

SEQ ID NO: 870145 - RNA, 19 nt, Homo sapiens
  misc_RNA (1)...(19): siRNA sense strand
gagcguggacggacgaaaa

SEQ ID NO: 870146 - RNA, 19 nt, Homo sapiens
  misc_RNA (1)...(19): siRNA sense strand
gaugcuguaucuggaacug

SEQ ID NO: 870147 - RNA, 19 nt, Homo sapiens
  misc_RNA (1)...(19): siRNA sense strand
ccugcaagcccuaaacauc

SEQ ID NO: 870148 - RNA, 19 nt, Homo sapiens
  misc_RNA (1)...(19): siRNA sense strand
ccuggugugugugcagaaa

SEQ ID NO: 870149 - RNA, 19 nt, Homo sapiens
  misc_RNA (1)...(19): siRNA sense strand
ggaaggugcuggaauguga

SEQ ID NO: 870150 - RNA, 19 nt, Homo sapiens
  misc_RNA (1)...(19): siRNA sense strand
gaaagauuaugccuucgua

SEQ ID NO: 870151 - RNA, 19 nt, Homo sapiens
  misc_RNA (1)...(19): siRNA sense strand
gagccaaguuugaggagua

SEQ ID NO: 870152 - RNA, 19 nt, Homo sapiens
  misc_RNA (1)...(19): siRNA sense strand
ggaauucucuguaugacau

SEQ ID NO: 870153 - RNA, 19 nt, Homo sapiens
  misc_RNA (1)...(19): siRNA sense strand
gaagggcacugguccaaag

SEQ ID NO: 870154 - RNA, 19 nt, Homo sapiens
  misc_RNA (1)...(19): siRNA sense strand
ggagagggcuacgguuaug

SEQ ID NO: 870155 - RNA, 19 nt, Homo sapiens
  misc_RNA (1)...(19): siRNA sense strand
uacgcaaccugcaccauua

SEQ ID NO: 870156 - RNA, 19 nt, Homo sapiens
  misc_RNA (1)...(19): siRNA sense strand
ugaacaauauggagcaguu

SEQ ID NO: 870157 - RNA, 19 nt, Homo sapiens
  misc_RNA (1)...(19): siRNA sense strand
gguaugaacgggagcagua

SEQ ID NO: 870158 - RNA, 19 nt, Homo sapiens
  misc_RNA (1)...(19): siRNA sense strand
uuacaacgaugcauaugga

SEQ ID NO: 870159 - RNA, 19 nt, Homo sapiens
  misc_RNA (1)...(19): siRNA sense strand
gauaccggguccgcucuua

SEQ ID NO: 870160 - RNA, 19 nt, Homo sapiens
  misc_RNA (1)...(19): siRNA sense strand
gaagccagcaagaauaaga

SEQ ID NO: 870161 - RNA, 19 nt, Homo sapiens
  misc_RNA (1)...(19): siRNA sense strand
cauuaagaauuacggcuuu

SEQ ID NO: 870162 - RNA, 19 nt, Homo sapiens
  misc_RNA (1)...(19): siRNA sense strand
gcaaagcuucaaccaaguu

SEQ ID NO: 870163 - RNA, 19 nt, Homo sapiens
  misc_RNA (1)...(19): siRNA sense strand
gugacaucgugaaagauua

SEQ ID NO: 870164 - RNA, 19 nt, Homo sapiens
  misc_RNA (1)...(19): siRNA sense strand
gagcaguucgaacaccuua

SEQ ID NO: 870165 - RNA, 19 nt, Homo sapiens
  misc_RNA (1)...(19): siRNA sense strand
acagacaccuauugccaaa

SEQ ID NO: 870166 - RNA, 19 nt, Homo sapiens
  misc_RNA (1)...(19): siRNA sense strand
caaagcuucaaccaaguua

SEQ ID NO: 870167 - RNA, 19 nt, Homo sapiens
  misc_RNA (1)...(19): siRNA sense strand
gcacucgacuacuauaagc

SEQ ID NO: 870168 - RNA, 19 nt, Homo sapiens
  misc_RNA (1)...(19): siRNA sense strand
gauuaugccuucguacaca

SEQ ID NO: 870169 - RNA, 19 nt, Homo sapiens
  misc_RNA (1)...(19): siRNA sense strand
ccucaacucuacuucuguu

SEQ ID NO: 870170 - RNA, 19 nt, Homo sapiens
  misc_RNA (1)...(19): siRNA sense strand
guggaagccagcaagaaua

SEQ ID NO: 870171 - RNA, 19 nt, Homo sapiens
  misc_RNA (1)...(19): siRNA sense strand
gagcacucgacuacuauaa

SEQ ID NO: 870172 - RNA, 19 nt, Homo sapiens
  misc_RNA (1)...(19): siRNA sense strand
caaagagugcccaguagau

SEQ ID NO: 870173 - RNA, 19 nt, Homo sapiens
  misc_RNA (1)...(19): siRNA sense strand
gagcuucgagccaaguuug

SEQ ID NO: 870174 - RNA, 19 nt, Homo sapiens
  misc_RNA (1)...(19): siRNA sense strand
acacggaauucucuguaug

SEQ ID NO: 870175 - RNA, 19 nt, Homo sapiens
  misc_RNA (1)...(19): siRNA sense strand
gccagagagugaauuaucu

SEQ ID NO: 870176 - RNA, 19 nt, Homo sapiens
  misc_RNA (1)...(19): siRNA sense strand
guccaaagagugcccagua

SEQ ID NO: 870177 - RNA, 19 nt, Homo sapiens
  misc_RNA (1)...(19): siRNA sense strand
gaauaagagcaaagcuuca

SEQ ID NO: 870178 - RNA, 19 nt, Homo sapiens
  misc_RNA (1)...(19): siRNA sense strand
guuaugggccagagaguga

SEQ ID NO: 870179 - RNA, 19 nt, Homo sapiens
  misc_RNA (1)...(19): siRNA sense strand
ccaaagagugcccaguaga

SEQ ID NO: 870180 - RNA, 19 nt, Homo sapiens
  misc_RNA (1)...(19): siRNA sense strand
ggagauucgcucacucuuc

SEQ ID NO: 870181 - RNA, 19 nt, Homo sapiens
  misc_RNA (1)...(19): siRNA sense strand
ggagcacucgacuacuaua

SEQ ID NO: 870182 - RNA, 19 nt, Homo sapiens
  misc_RNA (1)...(19): siRNA sense strand
cagcaagaauaagagcaaa

SEQ ID NO: 870183 - RNA, 19 nt, Homo sapiens
  misc_RNA (1)...(19): siRNA sense strand
uggaagccagcaagaauaa

SEQ ID NO: 870184 - RNA, 19 nt, Homo sapiens
  misc_RNA (1)...(19): siRNA sense strand
ggccagagagugaauuauc

SEQ ID NO: 870185 - RNA, 19 nt, Homo sapiens
  misc_RNA (1)...(19): siRNA sense strand
auggagcacucgacuacua

SEQ ID NO: 870186 - RNA, 19 nt, Homo sapiens
  misc_RNA (1)...(19): siRNA sense strand
guauuacaacgaugcauau

SEQ ID NO: 870187 - RNA, 19 nt, Homo sapiens
  misc_RNA (1)...(19): siRNA sense strand
gcaguucgaacaccuuaca

SEQ ID NO: 870188 - RNA, 19 nt, Homo sapiens
  misc_RNA (1)...(19): siRNA sense strand
uuacggcuuugugcacaua

SEQ ID NO: 870189 - RNA, 19 nt, Homo sapiens
  misc_RNA (1)...(19): siRNA sense strand
ggaguaugguccggucauc

SEQ ID NO: 870190 - RNA, 19 nt, Homo sapiens
  misc_RNA (1)...(19): siRNA sense strand
cuacagagcaggagauucg

SEQ ID NO: 870191 - RNA, 19 nt, Homo sapiens
  misc_RNA (1)...(19): siRNA sense strand
caccucaacucuacuucug

SEQ ID NO: 870192 - RNA, 19 nt, Homo sapiens
  misc_RNA (1)...(19): siRNA sense strand
ccagccaccucaacucuac

SEQ ID NO: 870193 - RNA, 19 nt, Homo sapiens
  misc_RNA (1)...(19): siRNA sense strand
gggcacugguccaaagagu

SEQ ID NO: 870194 - RNA, 19 nt, Homo sapiens
  misc_RNA (1)...(19): siRNA sense strand
gcaaccugcaccauuacaa

SEQ ID NO: 870195 - RNA, 19 nt, Homo sapiens
  misc_RNA (1)...(19): siRNA sense strand
agacaccuauugccaaacu

SEQ ID NO: 870196 - RNA, 19 nt, Homo sapiens
  misc_RNA (1)...(19): siRNA sense strand
cacagaguuucaaggcaaa

SEQ ID NO: 870197 - RNA, 19 nt, Homo sapiens
  misc_RNA (1)...(19): siRNA sense strand
ugacaucgugaaagauuau

SEQ ID NO: 870198 - RNA, 19 nt, Homo sapiens
  misc_RNA (1)...(19): siRNA sense strand
ugagcaguauaaugaacaa

SEQ ID NO: 870199 - RNA, 19 nt, Homo sapiens
  misc_RNA (1)...(19): siRNA sense strand
caagacggcagcugaggau

SEQ ID NO: 870200 - RNA, 19 nt, Homo sapiens
  misc_RNA (1)...(19): siRNA sense strand
ccaucugccucaaguccaa

SEQ ID NO: 870201 - RNA, 19 nt, Homo sapiens
  misc_RNA (1)...(19): siRNA sense strand
ugugacaucgugaaagauu

SEQ ID NO: 870202 - RNA, 19 nt, Homo sapiens
  misc_RNA (1)...(19): siRNA sense strand
cacggaauucucuguauga

SEQ ID NO: 870203 - RNA, 19 nt, Homo sapiens
  misc_RNA (1)...(19): siRNA sense strand
uuggagagggcuacgguua

SEQ ID NO: 870204 - RNA, 19 nt, Homo sapiens
  misc_RNA (1)...(19): siRNA sense strand
agaccagaguggcugcuau

SEQ ID NO: 870205 - RNA, 19 nt, Homo sapiens
  misc_RNA (1)...(19): siRNA sense strand
ccagcaagaauaagagcaa

SEQ ID NO: 870206 - RNA, 19 nt, Homo sapiens
  misc_RNA (1)...(19): siRNA sense strand
caauauggagcaguucgaa

SEQ ID NO: 870207 - RNA, 19 nt, Homo sapiens
  misc_RNA (1)...(19): siRNA sense strand
ggucguguggcagacuuua

SEQ ID NO: 870208 - RNA, 19 nt, Homo sapiens
  misc_RNA (1)...(19): siRNA sense strand
gcaagaauaagagcaaagc

SEQ ID NO: 870209 - RNA, 19 nt, Homo sapiens
  misc_RNA (1)...(19): siRNA sense strand
uaagaauuacggcuuugug

SEQ ID NO: 870210 - RNA, 19 nt, Homo sapiens
  misc_RNA (1)...(19): siRNA sense strand
ccaccacuuccuccuacua

SEQ ID NO: 870211 - RNA, 19 nt, Homo sapiens
  misc_RNA (1)...(19): siRNA sense strand
cgacuacuauaagcgauac

SEQ ID NO: 870212 - RNA, 19 nt, Homo sapiens
  misc_RNA (1)...(19): siRNA sense strand
caaccugcaccauuacaag

SEQ ID NO: 870213 - RNA, 19 nt, Homo sapiens
  misc_RNA (1)...(19): siRNA sense strand
ugacaacacagaguuucaa

SEQ ID NO: 870214 - RNA, 19 nt, Homo sapiens
  misc_RNA (1)...(19): siRNA sense strand
guccggucaucgaauguga

SEQ ID NO: 870215 - RNA, 19 nt, Homo sapiens
  misc_RNA (1)...(19): siRNA sense strand
aagaauaagagcaaagcuu

SEQ ID NO: 870216 - RNA, 19 nt, Homo sapiens
  misc_RNA (1)...(19): siRNA sense strand
cguggaagccagcaagaau

SEQ ID NO: 870217 - RNA, 19 nt, Homo sapiens
  misc_RNA (1)...(19): siRNA sense strand
auacgcaaccugcaccauu

SEQ ID NO: 870218 - RNA, 19 nt, Homo sapiens
  misc_RNA (1)...(19): siRNA sense strand
uccaaagagugcccaguag

SEQ ID NO: 870219 - RNA, 19 nt, Homo sapiens
  misc_RNA (1)...(19): siRNA sense strand
gaccagaguggcugcuauc

SEQ ID NO: 870220 - RNA, 19 nt, Homo sapiens
  misc_RNA (1)...(19): siRNA sense strand
ccacuuccuccuacuaugg

SEQ ID NO: 870221 - RNA, 19 nt, Homo sapiens
  misc_RNA (1)...(19): siRNA sense strand
augggaaggugcuggaaug

SEQ ID NO: 870222 - RNA, 19 nt, Homo sapiens
  misc_RNA (1)...(19): siRNA sense strand
gaccagccaccucaacucu

SEQ ID NO: 870223 - RNA, 19 nt, Homo sapiens
  misc_RNA (1)...(19): siRNA sense strand
ccucaaguccaaagcacaa

SEQ ID NO: 870224 - RNA, 19 nt, Homo sapiens
  misc_RNA (1)...(19): siRNA sense strand
aauaagagcaaagcuucaa

SEQ ID NO: 870225 - RNA, 19 nt, Homo sapiens
  misc_RNA (1)...(19): siRNA sense strand
cauauggagcacucgacua

SEQ ID NO: 870226 - RNA, 19 nt, Homo sapiens
  misc_RNA (1)...(19): siRNA sense strand
gcagcuacacggaauucuc

SEQ ID NO: 870227 - RNA, 19 nt, Homo sapiens
  misc_RNA (1)...(19): siRNA sense strand
ggaagagucuaccaacguu

SEQ ID NO: 870228 - RNA, 19 nt, Homo sapiens
  misc_RNA (1)...(19): siRNA sense strand
gaagaaaacucagcuaaau

SEQ ID NO: 870229 - RNA, 19 nt, Homo sapiens
  misc_RNA (1)...(19): siRNA sense strand
cacugaaucugguuauaaa

SEQ ID NO: 870230 - RNA, 19 nt, Homo sapiens
  misc_RNA (1)...(19): siRNA sense strand
ucagcuaaauuuccuauag

SEQ ID NO: 870231 - RNA, 19 nt, Homo sapiens
  misc_RNA (1)...(19): siRNA sense strand
ucacugaaucugguuauaa

SEQ ID NO: 870232 - RNA, 19 nt, Homo sapiens
  misc_RNA (1)...(19): siRNA sense strand
agaaggaucuguagcuuuu

SEQ ID NO: 870233 - RNA, 19 nt, Homo sapiens
  misc_RNA (1)...(19): siRNA sense strand
aaccuuaucuugcacuaga

SEQ ID NO: 870234 - RNA, 19 nt, Homo sapiens
  misc_RNA (1)...(19): siRNA sense strand
gcacuagaaggaucuguag

SEQ ID NO: 870235 - RNA, 19 nt, Homo sapiens
  misc_RNA (1)...(19): siRNA sense strand
gauaccgaaucaacacuag

SEQ ID NO: 870236 - RNA, 19 nt, Homo sapiens
  misc_RNA (1)...(19): siRNA sense strand
ggauaccgaaucaacacua

SEQ ID NO: 870237 - RNA, 19 nt, Homo sapiens
  misc_RNA (1)...(19): siRNA sense strand
gagagaaacuggggaugaa

SEQ ID NO: 870238 - RNA, 19 nt, Homo sapiens
  misc_RNA (1)...(19): siRNA sense strand
aaacucagcuaaauuuccu

SEQ ID NO: 870239 - RNA, 19 nt, Homo sapiens
  misc_RNA (1)...(19): siRNA sense strand
gauguaugcugggaagagu

SEQ ID NO: 870240 - RNA, 19 nt, Homo sapiens
  misc_RNA (1)...(19): siRNA sense strand
cuagaaggaucuguagcuu

SEQ ID NO: 870241 - RNA, 19 nt, Homo sapiens
  misc_RNA (1)...(19): siRNA sense strand
cagcuaaauuuccuauagg

SEQ ID NO: 870242 - RNA, 19 nt, Homo sapiens
  misc_RNA (1)...(19): siRNA sense strand
aaucauggucugucacuga

SEQ ID NO: 870243 - RNA, 19 nt, Homo sapiens
  misc_RNA (1)...(19): siRNA sense strand
uagaaggaucuguagcuuu

SEQ ID NO: 870244 - RNA, 19 nt, Homo sapiens
  misc_RNA (1)...(19): siRNA sense strand
gggaagagucuaccaacgu

SEQ ID NO: 870245 - RNA, 19 nt, Homo sapiens
  misc_RNA (1)...(19): siRNA sense strand
gagaaugggguucaggaua

SEQ ID NO: 870246 - RNA, 19 nt, Homo sapiens
  misc_RNA (1)...(19): siRNA sense strand
cauggucugucacugaauc

SEQ ID NO: 870247 - RNA, 19 nt, Homo sapiens
  misc_RNA (1)...(19): siRNA sense strand
gucacugaaucugguuaua

SEQ ID NO: 870248 - RNA, 19 nt, Homo sapiens
  misc_RNA (1)...(19): siRNA sense strand
gguucaggauaccgaauca

SEQ ID NO: 870249 - RNA, 19 nt, Homo sapiens
  misc_RNA (1)...(19): siRNA sense strand
cuuaaaucauggucuguca

SEQ ID NO: 870250 - RNA, 19 nt, Homo sapiens
  misc_RNA (1)...(19): siRNA sense strand
ccuauaggaaggagagauu

SEQ ID NO: 870251 - RNA, 19 nt, Homo sapiens
  misc_RNA (1)...(19): siRNA sense strand
ggagagauuuugacacacu

SEQ ID NO: 870252 - RNA, 19 nt, Homo sapiens
  misc_RNA (1)...(19): siRNA sense strand
uaccgaaucaacacuagaa

SEQ ID NO: 870253 - RNA, 19 nt, Homo sapiens
  misc_RNA (1)...(19): siRNA sense strand
aaggagagauuuugacaca

SEQ ID NO: 870254 - RNA, 19 nt, Homo sapiens
  misc_RNA (1)...(19): siRNA sense strand
gaauacaccuugucucaaa

SEQ ID NO: 870255 - RNA, 19 nt, Homo sapiens
  misc_RNA (1)...(19): siRNA sense strand
caagaaggaugccauauga

SEQ ID NO: 870256 - RNA, 19 nt, Homo sapiens
  misc_RNA (1)...(19): siRNA sense strand
gcacagaacccacagcuaa

SEQ ID NO: 870257 - RNA, 19 nt, Homo sapiens
  misc_RNA (1)...(19): siRNA sense strand
gcacauuuauuucaccuaa

SEQ ID NO: 870258 - RNA, 19 nt, Homo sapiens
  misc_RNA (1)...(19): siRNA sense strand
gcaaagaccaucuaacauu

SEQ ID NO: 870259 - RNA, 19 nt, Homo sapiens
  misc_RNA (1)...(19): siRNA sense strand
gcaaauaacuaggaugaau

SEQ ID NO: 870260 - RNA, 19 nt, Homo sapiens
  misc_RNA (1)...(19): siRNA sense strand
gaggaacaauuuaagagua

SEQ ID NO: 870261 - RNA, 19 nt, Homo sapiens
  misc_RNA (1)...(19): siRNA sense strand
caaaucagccaaaggaaua

SEQ ID NO: 870262 - RNA, 19 nt, Homo sapiens
  misc_RNA (1)...(19): siRNA sense strand
caucuaacauucugcauuu

SEQ ID NO: 870263 - RNA, 19 nt, Homo sapiens
  misc_RNA (1)...(19): siRNA sense strand
gaaagaaggccguauuuua

SEQ ID NO: 870264 - RNA, 19 nt, Homo sapiens
  misc_RNA (1)...(19): siRNA sense strand
ugaaagaacuguugaccuu

SEQ ID NO: 870265 - RNA, 19 nt, Homo sapiens
  misc_RNA (1)...(19): siRNA sense strand
cagcaaaucucagaagaaa

SEQ ID NO: 870266 - RNA, 19 nt, Homo sapiens
  misc_RNA (1)...(19): siRNA sense strand
ggaagacagugguauuuca

SEQ ID NO: 870267 - RNA, 19 nt, Homo sapiens
  misc_RNA (1)...(19): siRNA sense strand
guacaagacugcuuacuac

SEQ ID NO: 870268 - RNA, 19 nt, Homo sapiens
  misc_RNA (1)...(19): siRNA sense strand
gaaauccaguuuaucacaa

SEQ ID NO: 870269 - RNA, 19 nt, Homo sapiens
  misc_RNA (1)...(19): siRNA sense strand
gagagaacauucaucuuuc

SEQ ID NO: 870270 - RNA, 19 nt, Homo sapiens
  misc_RNA (1)...(19): siRNA sense strand
gaacacaguccauuugaau

SEQ ID NO: 870271 - RNA, 19 nt, Homo sapiens
  misc_RNA (1)...(19): siRNA sense strand
caaagaccaucuaacauuc

SEQ ID NO: 870272 - RNA, 19 nt, Homo sapiens
  misc_RNA (1)...(19): siRNA sense strand
gaacaacauucuggaacaa

SEQ ID NO: 870273 - RNA, 19 nt, Homo sapiens
  misc_RNA (1)...(19): siRNA sense strand
uaauacagcuucuacuaug

SEQ ID NO: 870274 - RNA, 19 nt, Homo sapiens
  misc_RNA (1)...(19): siRNA sense strand
ccaguucccuucaaucaaa

SEQ ID NO: 870275 - RNA, 19 nt, Homo sapiens
  misc_RNA (1)...(19): siRNA sense strand
agaagaagauccuccuaaa

SEQ ID NO: 870276 - RNA, 19 nt, Homo sapiens
  misc_RNA (1)...(19): siRNA sense strand
aaaggaggcccaacaguua

SEQ ID NO: 870277 - RNA, 19 nt, Homo sapiens
  misc_RNA (1)...(19): siRNA sense strand
gcaugaaggugagaauuug

SEQ ID NO: 870278 - RNA, 19 nt, Homo sapiens
  misc_RNA (1)...(19): siRNA sense strand
ggaacaacauucuggaaca

SEQ ID NO: 870279 - RNA, 19 nt, Homo sapiens
  misc_RNA (1)...(19): siRNA sense strand
ugaguuagcuacugaggaa

SEQ ID NO: 870280 - RNA, 19 nt, Homo sapiens
  misc_RNA (1)...(19): siRNA sense strand
caagacugcuuacuacuuc

SEQ ID NO: 870281 - RNA, 19 nt, Homo sapiens
  misc_RNA (1)...(19): siRNA sense strand
cuaugaaggugaacaauau

SEQ ID NO: 870282 - RNA, 19 nt, Homo sapiens
  misc_RNA (1)...(19): siRNA sense strand
gagaaagaaggccguauuu

SEQ ID NO: 870283 - RNA, 19 nt, Homo sapiens
  misc_RNA (1)...(19): siRNA sense strand
gaggcaagaagaacauuua

SEQ ID NO: 870284 - RNA, 19 nt, Homo sapiens
  misc_RNA (1)...(19): siRNA sense strand
gaaagaacuguugaccuua

SEQ ID NO: 870285 - RNA, 19 nt, Homo sapiens
  misc_RNA (1)...(19): siRNA sense strand
gaaacucucaacaguauga

SEQ ID NO: 870286 - RNA, 19 nt, Homo sapiens
  misc_RNA (1)...(19): siRNA sense strand
gaacuauggcaugcaaaua

SEQ ID NO: 870287 - RNA, 19 nt, Homo sapiens
  misc_RNA (1)...(19): siRNA sense strand
caaaggaggcccaacaguu

SEQ ID NO: 870288 - RNA, 19 nt, Homo sapiens
  misc_RNA (1)...(19): siRNA sense strand
gaagacaaccagcucaaug

SEQ ID NO: 870289 - RNA, 19 nt, Homo sapiens
  misc_RNA (1)...(19): siRNA sense strand
agaaacagcucagagaaga

SEQ ID NO: 870290 - RNA, 19 nt, Homo sapiens
  misc_RNA (1)...(19): siRNA sense strand
caaagaaacagcucagaga

SEQ ID NO: 870291 - RNA, 19 nt, Homo sapiens
  misc_RNA (1)...(19): siRNA sense strand
caaccaccauggcaaauuc

SEQ ID NO: 870292 - RNA, 19 nt, Homo sapiens
  misc_RNA (1)...(19): siRNA sense strand
agagagaacauucaucuuu

SEQ ID NO: 870293 - RNA, 19 nt, Homo sapiens
  misc_RNA (1)...(19): siRNA sense strand
ugaagcagccaucacauaa

SEQ ID NO: 870294 - RNA, 19 nt, Homo sapiens
  misc_RNA (1)...(19): siRNA sense strand
gcaaauuccacagagguua

SEQ ID NO: 870295 - RNA, 19 nt, Homo sapiens
  misc_RNA (1)...(19): siRNA sense strand
gguacaagacugcuuacua

SEQ ID NO: 870296 - RNA, 19 nt, Homo sapiens
  misc_RNA (1)...(19): siRNA sense strand
cagcaaagaccaucuaaca

SEQ ID NO: 870297 - RNA, 19 nt, Homo sapiens
  misc_RNA (1)...(19): siRNA sense strand
gagaugaugcgguauaauc

SEQ ID NO: 870298 - RNA, 19 nt, Homo sapiens
  misc_RNA (1)...(19): siRNA sense strand
agacuacacuccauccuau

SEQ ID NO: 870299 - RNA, 19 nt, Homo sapiens
  misc_RNA (1)...(19): siRNA sense strand
gaaaucccuucuccugcaa

SEQ ID NO: 870300 - RNA, 19 nt, Homo sapiens
  misc_RNA (1)...(19): siRNA sense strand
ggaaauccagcaaaucuca

SEQ ID NO: 870301 - RNA, 19 nt, Homo sapiens
  misc_RNA (1)...(19): siRNA sense strand
gaccaagucagccaaauau

SEQ ID NO: 870302 - RNA, 19 nt, Homo sapiens
  misc_RNA (1)...(19): siRNA sense strand
caacaaccaccauggcaaa

SEQ ID NO: 870303 - RNA, 19 nt, Homo sapiens
  misc_RNA (1)...(19): siRNA sense strand
gaggagaugaugcgguaua

SEQ ID NO: 870304 - RNA, 19 nt, Homo sapiens
  misc_RNA (1)...(19): siRNA sense strand
gaugaacacaguccauuug

SEQ ID NO: 870305 - RNA, 19 nt, Homo sapiens
  misc_RNA (1)...(19): siRNA sense strand
ucaauuacgccuacugaaa

SEQ ID NO: 870306 - RNA, 19 nt, Homo sapiens
  misc_RNA (1)...(19): siRNA sense strand
cagaaggcauccaaaguca

SEQ ID NO: 870307 - RNA, 19 nt, Homo sapiens
  misc_RNA (1)...(19): siRNA sense strand
ggugagaauuugaacuaug

SEQ ID NO: 870308 - RNA, 19 nt, Homo sapiens
  misc_RNA (1)...(19): siRNA sense strand
gaaauccucagcacccaaa

SEQ ID NO: 870309 - RNA, 19 nt, Homo sapiens
  misc_RNA (1)...(19): siRNA sense strand
agaagaaagcacucuauuu

SEQ ID NO: 870310 - RNA, 19 nt, Homo sapiens
  misc_RNA (1)...(19): siRNA sense strand
ucaaagagggaccaaugua

SEQ ID NO: 870311 - RNA, 19 nt, Homo sapiens
  misc_RNA (1)...(19): siRNA sense strand
uagcaaagcaucacucuuc

SEQ ID NO: 870312 - RNA, 19 nt, Homo sapiens
  misc_RNA (1)...(19): siRNA sense strand
gagaagagggaaagccaaa

SEQ ID NO: 870313 - RNA, 19 nt, Homo sapiens
  misc_RNA (1)...(19): siRNA sense strand
gaaaucaacaaguucaaag

SEQ ID NO: 870314 - RNA, 19 nt, Homo sapiens
  misc_RNA (1)...(19): siRNA sense strand
aagguaaccagcccuauua

SEQ ID NO: 870315 - RNA, 19 nt, Homo sapiens
  misc_RNA (1)...(19): siRNA sense strand
ggaucaggcaacacauuua

SEQ ID NO: 870316 - RNA, 19 nt, Homo sapiens
  misc_RNA (1)...(19): siRNA sense strand
ccauaugaaucagaaacua

SEQ ID NO: 870317 - RNA, 19 nt, Homo sapiens
  misc_RNA (1)...(19): siRNA sense strand
gaagaagauccuccuaaag

SEQ ID NO: 870318 - RNA, 19 nt, Homo sapiens
  misc_RNA (1)...(19): siRNA sense strand
caacagcaaagaccaucua

SEQ ID NO: 870319 - RNA, 19 nt, Homo sapiens
  misc_RNA (1)...(19): siRNA sense strand
caaagucaaguccaagaaa

SEQ ID NO: 870320 - RNA, 19 nt, Homo sapiens
  misc_RNA (1)...(19): siRNA sense strand
ccacagggcccaaggacaa

SEQ ID NO: 870321 - RNA, 19 nt, Homo sapiens
  misc_RNA (1)...(19): siRNA sense strand
caacaguuaggcacuauga

SEQ ID NO: 870322 - RNA, 19 nt, Homo sapiens
  misc_RNA (1)...(19): siRNA sense strand
gaugccauaugaaucagaa

SEQ ID NO: 870323 - RNA, 19 nt, Homo sapiens
  misc_RNA (1)...(19): siRNA sense strand
ggaaauccaguuuaucaca

SEQ ID NO: 870324 - RNA, 19 nt, Homo sapiens
  misc_RNA (1)...(19): siRNA sense strand
caggaaauccaguuuauca

SEQ ID NO: 870325 - RNA, 19 nt, Homo sapiens
  misc_RNA (1)...(19): siRNA sense strand
gcuacuacguuaauaaugc

SEQ ID NO: 870326 - RNA, 19 nt, Homo sapiens
  misc_RNA (1)...(19): siRNA sense strand
caaaucccauggagaccaa

SEQ ID NO: 870327 - RNA, 19 nt, Homo sapiens
  misc_RNA (1)...(19): siRNA sense strand
ccagguacaagacugcuua

SEQ ID NO: 870328 - RNA, 19 nt, Homo sapiens
  misc_RNA (1)...(19): siRNA sense strand
cuacugaggaacaauuuaa

SEQ ID NO: 870329 - RNA, 19 nt, Homo sapiens
  misc_RNA (1)...(19): siRNA sense strand
ggcaugaaggugagaauuu

SEQ ID NO: 870330 - RNA, 19 nt, Homo sapiens
  misc_RNA (1)...(19): siRNA sense strand
ggcaauacaugggaugaga

SEQ ID NO: 870331 - RNA, 19 nt, Homo sapiens
  misc_RNA (1)...(19): siRNA sense strand
aaacuccuauuacccaaga

SEQ ID NO: 870332 - RNA, 19 nt, Homo sapiens
  misc_RNA (1)...(19): siRNA sense strand
ucucaacaguaugaaguua

SEQ ID NO: 870333 - RNA, 19 nt, Homo sapiens
  misc_RNA (1)...(19): siRNA sense strand
gcaaaucucagaagaaagc

SEQ ID NO: 870334 - RNA, 19 nt, Homo sapiens
  misc_RNA (1)...(19): siRNA sense strand
caguuuaucacaaagcuua

SEQ ID NO: 870335 - RNA, 19 nt, Homo sapiens
  misc_RNA (1)...(19): siRNA sense strand
gaagaggacccaguugauc

SEQ ID NO: 870336 - RNA, 19 nt, Homo sapiens
  misc_RNA (1)...(19): siRNA sense strand
gagcagcuuguuauuggua

SEQ ID NO: 870337 - RNA, 19 nt, Homo sapiens
  misc_RNA (1)...(19): siRNA sense strand
ucccuucaaucaaagaaua

SEQ ID NO: 870338 - RNA, 19 nt, Homo sapiens
  misc_RNA (1)...(19): siRNA sense strand
ggacaauccacuagcucua

SEQ ID NO: 870339 - RNA, 19 nt, Homo sapiens
  misc_RNA (1)...(19): siRNA sense strand
ccaagucagccaaauauuc

SEQ ID NO: 870340 - RNA, 19 nt, Homo sapiens
  misc_RNA (1)...(19): siRNA sense strand
acaaccagcucaaugaaag

SEQ ID NO: 870341 - RNA, 19 nt, Homo sapiens
  misc_RNA (1)...(19): siRNA sense strand
gugagaauuugaacuaugg

SEQ ID NO: 870342 - RNA, 19 nt, Homo sapiens
  misc_RNA (1)...(19): siRNA sense strand
aaccagcccuauuacagua

SEQ ID NO: 870343 - RNA, 19 nt, Homo sapiens
  misc_RNA (1)...(19): siRNA sense strand
gggaucaggcaacacauuu

SEQ ID NO: 870344 - RNA, 19 nt, Homo sapiens
  misc_RNA (1)...(19): siRNA sense strand
gaacaauauaccucaaauc

SEQ ID NO: 870345 - RNA, 19 nt, Homo sapiens
  misc_RNA (1)...(19): siRNA sense strand
gaaacuaaucagucagaau

SEQ ID NO: 870346 - RNA, 19 nt, Homo sapiens
  misc_RNA (1)...(19): siRNA sense strand
gaaggaugccauaugaauc

SEQ ID NO: 870347 - RNA, 19 nt, Homo sapiens
  misc_RNA (1)...(19): siRNA sense strand
caagaggagauuccagaaa

SEQ ID NO: 870348 - RNA, 19 nt, Homo sapiens
  misc_RNA (1)...(19): siRNA sense strand
ggucaagaaggaugccaua

SEQ ID NO: 870349 - RNA, 19 nt, Homo sapiens
  misc_RNA (1)...(19): siRNA sense strand
ugaacacaguccauuugaa

SEQ ID NO: 870350 - RNA, 19 nt, Homo sapiens
  misc_RNA (1)...(19): siRNA sense strand
gauaucaucuccccaacaa

SEQ ID NO: 870351 - RNA, 19 nt, Homo sapiens
  misc_RNA (1)...(19): siRNA sense strand
caccagaccagaaagguaa

SEQ ID NO: 870352 - RNA, 19 nt, Homo sapiens
  misc_RNA (1)...(19): siRNA sense strand
uaucuucccuauucuuuag

SEQ ID NO: 870353 - RNA, 19 nt, Homo sapiens
  misc_RNA (1)...(19): siRNA sense strand
gaugcgguauaaucaauuc

SEQ ID NO: 870354 - RNA, 19 nt, Homo sapiens
  misc_RNA (1)...(19): siRNA sense strand
gcuguggccucucagaauu

SEQ ID NO: 870355 - RNA, 19 nt, Homo sapiens
  misc_RNA (1)...(19): siRNA sense strand
caccugcgcuaccugcuua

SEQ ID NO: 870356 - RNA, 19 nt, Homo sapiens
  misc_RNA (1)...(19): siRNA sense strand
gcuccuggaucgccacuga

SEQ ID NO: 870357 - RNA, 19 nt, Homo sapiens
  misc_RNA (1)...(19): siRNA sense strand
gcucauggcuaugucaaca

SEQ ID NO: 870358 - RNA, 19 nt, Homo sapiens
  misc_RNA (1)...(19): siRNA sense strand
gcuuaucgccgucuacuuc

SEQ ID NO: 870359 - RNA, 19 nt, Homo sapiens
  misc_RNA (1)...(19): siRNA sense strand
gggcugggccaucuucuuc

SEQ ID NO: 870360 - RNA, 19 nt, Homo sapiens
  misc_RNA (1)...(19): siRNA sense strand
uaccuggccuggcuuaucu

SEQ ID NO: 870361 - RNA, 19 nt, Homo sapiens
  misc_RNA (1)...(19): siRNA sense strand
gcaccugcgcuaccugcuu

SEQ ID NO: 870362 - RNA, 19 nt, Homo sapiens
  misc_RNA (1)...(19): siRNA sense strand
uggccuggcuuaucuacuc

SEQ ID NO: 870363 - RNA, 19 nt, Homo sapiens
  misc_RNA (1)...(19): siRNA sense strand
ggacaaagagcaaggauua

SEQ ID NO: 870364 - RNA, 19 nt, Homo sapiens
  misc_RNA (1)...(19): siRNA sense strand
aaagaaagcucuacaauca

SEQ ID NO: 870365 - RNA, 19 nt, Homo sapiens
  misc_RNA (1)...(19): siRNA sense strand
agaaagagaugaagaaaga

SEQ ID NO: 870366 - RNA, 19 nt, Homo sapiens
  misc_RNA (1)...(19): siRNA sense strand
aaagauaccuccugaaaga

SEQ ID NO: 870367 - RNA, 19 nt, Homo sapiens
  misc_RNA (1)...(19): siRNA sense strand
gagcaaggauuacugcaaa

SEQ ID NO: 870368 - RNA, 19 nt, Homo sapiens
  misc_RNA (1)...(19): siRNA sense strand
gaaaguuggcgacaucaua

SEQ ID NO: 870369 - RNA, 19 nt, Homo sapiens
  misc_RNA (1)...(19): siRNA sense strand
gggaacagcuggacacaga

SEQ ID NO: 870370 - RNA, 19 nt, Homo sapiens
  misc_RNA (1)...(19): siRNA sense strand
gaccagaaaugcuuccaaa

SEQ ID NO: 870371 - RNA, 19 nt, Homo sapiens
  misc_RNA (1)...(19): siRNA sense strand
caacaaagcuccagaaaag

SEQ ID NO: 870372 - RNA, 19 nt, Homo sapiens
  misc_RNA (1)...(19): siRNA sense strand
gaagugaacgacauaaaga

SEQ ID NO: 870373 - RNA, 19 nt, Homo sapiens
  misc_RNA (1)...(19): siRNA sense strand
agaaagcucuacaaucaaa

SEQ ID NO: 870374 - RNA, 19 nt, Homo sapiens
  misc_RNA (1)...(19): siRNA sense strand
gaaaucaucaccaacauca

SEQ ID NO: 870375 - RNA, 19 nt, Homo sapiens
  misc_RNA (1)...(19): siRNA sense strand
gguaucaucuacugagaaa

SEQ ID NO: 870376 - RNA, 19 nt, Homo sapiens
  misc_RNA (1)...(19): siRNA sense strand
gggaagaaguuaccugcaa

SEQ ID NO: 870377 - RNA, 19 nt, Homo sapiens
  misc_RNA (1)...(19): siRNA sense strand
gaaacucuuugcugucuuc

SEQ ID NO: 870378 - RNA, 19 nt, Homo sapiens
  misc_RNA (1)...(19): siRNA sense strand
cgggaagacuggaauguuu

SEQ ID NO: 870379 - RNA, 19 nt, Homo sapiens
  misc_RNA (1)...(19): siRNA sense strand
acagaaugaugaugaauug

SEQ ID NO: 870380 - RNA, 19 nt, Homo sapiens
  misc_RNA (1)...(19): siRNA sense strand
gaaugaugaugaauugaca

SEQ ID NO: 870381 - RNA, 19 nt, Homo sapiens
  misc_RNA (1)...(19): siRNA sense strand
gaaaugcuuccaaacagaa

SEQ ID NO: 870382 - RNA, 19 nt, Homo sapiens
  misc_RNA (1)...(19): siRNA sense strand
cagcagaaacgagagauua

SEQ ID NO: 870383 - RNA, 19 nt, Homo sapiens
  misc_RNA (1)...(19): siRNA sense strand
gaaugacgaugaacuugag

SEQ ID NO: 870384 - RNA, 19 nt, Homo sapiens
  misc_RNA (1)...(19): siRNA sense strand
gaaauggacagcaggacaa

SEQ ID NO: 870385 - RNA, 19 nt, Homo sapiens
  misc_RNA (1)...(19): siRNA sense strand
caaggucaauugaaguaga

SEQ ID NO: 870386 - RNA, 19 nt, Homo sapiens
  misc_RNA (1)...(19): siRNA sense strand
gagcagcuauccaagucaa

SEQ ID NO: 870387 - RNA, 19 nt, Homo sapiens
  misc_RNA (1)...(19): siRNA sense strand
ggagugggcuuuggagaca

SEQ ID NO: 870388 - RNA, 19 nt, Homo sapiens
  misc_RNA (1)...(19): siRNA sense strand
uauagucacucucaucaau

SEQ ID NO: 870389 - RNA, 19 nt, Homo sapiens
  misc_RNA (1)...(19): siRNA sense strand
caaagaaggagauauaguc

SEQ ID NO: 870390 - RNA, 19 nt, Homo sapiens
  misc_RNA (1)...(19): siRNA sense strand
gaggaacacauuucacuug

SEQ ID NO: 870391 - RNA, 19 nt, Homo sapiens
  misc_RNA (1)...(19): siRNA sense strand
gacauugacuuagaagguu

SEQ ID NO: 870392 - RNA, 19 nt, Homo sapiens
  misc_RNA (1)...(19): siRNA sense strand
gcugaaaguuggcgacauc

SEQ ID NO: 870393 - RNA, 19 nt, Homo sapiens
  misc_RNA (1)...(19): siRNA sense strand
cauaugaggcacagaauga

SEQ ID NO: 870394 - RNA, 19 nt, Homo sapiens
  misc_RNA (1)...(19): siRNA sense strand
ggauaaggaggaacacauu

SEQ ID NO: 870395 - RNA, 19 nt, Homo sapiens
  misc_RNA (1)...(19): siRNA sense strand
gacaagccaaucaaacuaa

SEQ ID NO: 870396 - RNA, 19 nt, Homo sapiens
  misc_RNA (1)...(19): siRNA sense strand
ggaagugaacgacauaaag

SEQ ID NO: 870397 - RNA, 19 nt, Homo sapiens
  misc_RNA (1)...(19): siRNA sense strand
aacgagagauuaaacaguu

SEQ ID NO: 870398 - RNA, 19 nt, Homo sapiens
  misc_RNA (1)...(19): siRNA sense strand
gcagaaacgagagauuaaa

SEQ ID NO: 870399 - RNA, 19 nt, Homo sapiens
  misc_RNA (1)...(19): siRNA sense strand
ccaagacuguuaccauauc

SEQ ID NO: 870400 - RNA, 19 nt, Homo sapiens
  misc_RNA (1)...(19): siRNA sense strand
gauaaggaggaacacauuu

SEQ ID NO: 870401 - RNA, 19 nt, Homo sapiens
  misc_RNA (1)...(19): siRNA sense strand
uagucacucucaucaauaa

SEQ ID NO: 870402 - RNA, 19 nt, Homo sapiens
  misc_RNA (1)...(19): siRNA sense strand
cggaugagcuuggcauuuc

SEQ ID NO: 870403 - RNA, 19 nt, Homo sapiens
  misc_RNA (1)...(19): siRNA sense strand
uaaagaaagcucuacaauc

SEQ ID NO: 870404 - RNA, 19 nt, Homo sapiens
  misc_RNA (1)...(19): siRNA sense strand
caaagacaagccaaucaaa

SEQ ID NO: 870405 - RNA, 19 nt, Homo sapiens
  misc_RNA (1)...(19): siRNA sense strand
gauauagucacucucauca

SEQ ID NO: 870406 - RNA, 19 nt, Homo sapiens
  misc_RNA (1)...(19): siRNA sense strand
agaaaugcuuccaaacaga

SEQ ID NO: 870407 - RNA, 19 nt, Homo sapiens
  misc_RNA (1)...(19): siRNA sense strand
ugaaagaccagaaaugcuu

SEQ ID NO: 870408 - RNA, 19 nt, Homo sapiens
  misc_RNA (1)...(19): siRNA sense strand
ccagaaaugcuuccaaaca

SEQ ID NO: 870409 - RNA, 19 nt, Homo sapiens
  misc_RNA (1)...(19): siRNA sense strand
ggaguggacgcgucaaaga

SEQ ID NO: 870410 - RNA, 19 nt, Homo sapiens
  misc_RNA (1)...(19): siRNA sense strand
cagaaaugcuuccaaacag

SEQ ID NO: 870411 - RNA, 19 nt, Homo sapiens
  misc_RNA (1)...(19): siRNA sense strand
agaaagacccucucaccaa

SEQ ID NO: 870412 - RNA, 19 nt, Homo sapiens
  misc_RNA (1)...(19): siRNA sense strand
gaauguuuccuuccaacuu

SEQ ID NO: 870413 - RNA, 19 nt, Homo sapiens
  misc_RNA (1)...(19): siRNA sense strand
gauggaagugaacgacaua

SEQ ID NO: 870414 - RNA, 19 nt, Homo sapiens
  misc_RNA (1)...(19): siRNA sense strand
aaacaguuauugucugagu

SEQ ID NO: 870415 - RNA, 19 nt, Homo sapiens
  misc_RNA (1)...(19): siRNA sense strand
uuccaagacuguuaccaua

SEQ ID NO: 870416 - RNA, 19 nt, Homo sapiens
  misc_RNA (1)...(19): siRNA sense strand
gaagggaauagacccaaga

SEQ ID NO: 870417 - RNA, 19 nt, Homo sapiens
  misc_RNA (1)...(19): siRNA sense strand
ugucugaguuggaugaaga

SEQ ID NO: 870418 - RNA, 19 nt, Homo sapiens
  misc_RNA (1)...(19): siRNA sense strand
cagcgugggugaaaucauc

SEQ ID NO: 870419 - RNA, 19 nt, Homo sapiens
  misc_RNA (1)...(19): siRNA sense strand
acucuuugcugucuucuga

SEQ ID NO: 870420 - RNA, 19 nt, Homo sapiens
  misc_RNA (1)...(19): siRNA sense strand
ccaaacagaacagaagaaa

SEQ ID NO: 870421 - RNA, 19 nt, Homo sapiens
  misc_RNA (1)...(19): siRNA sense strand
acgaugaacuugagcugaa

SEQ ID NO: 870422 - RNA, 19 nt, Homo sapiens
  misc_RNA (1)...(19): siRNA sense strand
ugaguuggaugaagagaag

SEQ ID NO: 870423 - RNA, 19 nt, Homo sapiens
  misc_RNA (1)...(19): siRNA sense strand
gguaggagagguagaggaa

SEQ ID NO: 870424 - RNA, 19 nt, Homo sapiens
  misc_RNA (1)...(19): siRNA sense strand
cgaagaggauaaggaggaa

SEQ ID NO: 870425 - RNA, 19 nt, Homo sapiens
  misc_RNA (1)...(19): siRNA sense strand
gggugacaguccaaagauu

SEQ ID NO: 870426 - RNA, 19 nt, Homo sapiens
  misc_RNA (1)...(19): siRNA sense strand
ggugacaguccaaagauug

SEQ ID NO: 870427 - RNA, 19 nt, Homo sapiens
  misc_RNA (1)...(19): siRNA sense strand
gcagcaauccagcccaaga

SEQ ID NO: 870428 - RNA, 19 nt, Homo sapiens
  misc_RNA (1)...(19): siRNA sense strand
cgacauaaagaaagcucua

SEQ ID NO: 870429 - RNA, 19 nt, Homo sapiens
  misc_RNA (1)...(19): siRNA sense strand
gaaacgagagauuaaacag

SEQ ID NO: 870430 - RNA, 19 nt, Homo sapiens
  misc_RNA (1)...(19): siRNA sense strand
ggaggaacacauuucacuu

SEQ ID NO: 870431 - RNA, 19 nt, Homo sapiens
  misc_RNA (1)...(19): siRNA sense strand
agacaagccaaucaaacua

SEQ ID NO: 870432 - RNA, 19 nt, Homo sapiens
  misc_RNA (1)...(19): siRNA sense strand
gcuauccaagucaaguuua

SEQ ID NO: 870433 - RNA, 19 nt, Homo sapiens
  misc_RNA (1)...(19): siRNA sense strand
acgagagauuaaacaguua

SEQ ID NO: 870434 - RNA, 19 nt, Homo sapiens
  misc_RNA (1)...(19): siRNA sense strand
gaccagagagagagccaaa

SEQ ID NO: 870435 - RNA, 19 nt, Homo sapiens
  misc_RNA (1)...(19): siRNA sense strand
agaaggagauauagucacu

SEQ ID NO: 870436 - RNA, 19 nt, Homo sapiens
  misc_RNA (1)...(19): siRNA sense strand
uacagcaacuccagacuca

SEQ ID NO: 870437 - RNA, 19 nt, Homo sapiens
  misc_RNA (1)...(19): siRNA sense strand
cuauccaagucaaguuuaa

SEQ ID NO: 870438 - RNA, 19 nt, Homo sapiens
  misc_RNA (1)...(19): siRNA sense strand
gaucagcgugggugaaauc

SEQ ID NO: 870439 - RNA, 19 nt, Homo sapiens
  misc_RNA (1)...(19): siRNA sense strand
gguugcagauggaagugaa

SEQ ID NO: 870440 - RNA, 19 nt, Homo sapiens
  misc_RNA (1)...(19): siRNA sense strand
gaguggacgcgucaaagaa

SEQ ID NO: 870441 - RNA, 19 nt, Homo sapiens
  misc_RNA (1)...(19): siRNA sense strand
ucaaagacaagccaaucaa

SEQ ID NO: 870442 - RNA, 19 nt, Homo sapiens
  misc_RNA (1)...(19): siRNA sense strand
gcugucuucugaaacgauu

SEQ ID NO: 870443 - RNA, 19 nt, Homo sapiens
  misc_RNA (1)...(19): siRNA sense strand
ggaaacucuuugcugucuu

SEQ ID NO: 870444 - RNA, 19 nt, Homo sapiens
  misc_RNA (1)...(19): siRNA sense strand
ccaaucaaacuaagaccaa

SEQ ID NO: 870445 - RNA, 19 nt, Homo sapiens
  misc_RNA (1)...(19): siRNA sense strand
ccagaaugacgaugaacuu

SEQ ID NO: 870446 - RNA, 19 nt, Homo sapiens
  misc_RNA (1)...(19): siRNA sense strand
ggcacagaaugaugaugaa

SEQ ID NO: 870447 - RNA, 19 nt, Homo sapiens
  misc_RNA (1)...(19): siRNA sense strand
caacuccagacucaucaaa

SEQ ID NO: 870448 - RNA, 19 nt, Homo sapiens
  misc_RNA (1)...(19): siRNA sense strand
ucaccaacaucaggaagga

SEQ ID NO: 870449 - RNA, 19 nt, Homo sapiens
  misc_RNA (1)...(19): siRNA sense strand
cgaugaacuugagcugaaa

SEQ ID NO: 870450 - RNA, 19 nt, Homo sapiens
  misc_RNA (1)...(19): siRNA sense strand
cauaaagaaagcucuacaa

SEQ ID NO: 870451 - RNA, 19 nt, Homo sapiens
  misc_RNA (1)...(19): siRNA sense strand
guuauugucugaguuggau

SEQ ID NO: 870452 - RNA, 19 nt, Homo sapiens
  misc_RNA (1)...(19): siRNA sense strand
gcccuccguuccugccaua

SEQ ID NO: 870453 - RNA, 19 nt, Homo sapiens
  misc_RNA (1)...(19): siRNA sense strand
ccacaggcuccgagaguga

SEQ ID NO: 870454 - RNA, 19 nt, Homo sapiens
  misc_RNA (1)...(19): siRNA sense strand
ucacucucaucaauaagga

SEQ ID NO: 870455 - RNA, 19 nt, Homo sapiens
  misc_RNA (1)...(19): siRNA sense strand
gaaacgauuuuaagaacca

SEQ ID NO: 870456 - RNA, 19 nt, Homo sapiens
  misc_RNA (1)...(19): siRNA sense strand
uaaggaggaacacauuuca

SEQ ID NO: 870457 - RNA, 19 nt, Homo sapiens
  misc_RNA (1)...(19): siRNA sense strand
caucauagaggugguagga

SEQ ID NO: 870458 - RNA, 19 nt, Homo sapiens
  misc_RNA (1)...(19): siRNA sense strand
cccagucccucacaucuuc

SEQ ID NO: 870459 - RNA, 19 nt, Homo sapiens
  misc_RNA (1)...(19): siRNA sense strand
uaucuggcauccuggacaa

SEQ ID NO: 870460 - RNA, 19 nt, Homo sapiens
  misc_RNA (1)...(19): siRNA sense strand
cacagaaugaugaugaauu

SEQ ID NO: 870461 - RNA, 19 nt, Homo sapiens
  misc_RNA (1)...(19): siRNA sense strand
caauccagcccaagaaagu

SEQ ID NO: 870462 - RNA, 19 nt, Homo sapiens
  misc_RNA (1)...(19): siRNA sense strand
gugggaagguguucucaac

SEQ ID NO: 870463 - RNA, 19 nt, Homo sapiens
  misc_RNA (1)...(19): siRNA sense strand
guaagacgcugucgguuaa

SEQ ID NO: 870464 - RNA, 19 nt, Homo sapiens
  misc_RNA (1)...(19): siRNA sense strand
cgguuaagcugaugaagaa

SEQ ID NO: 870465 - RNA, 19 nt, Homo sapiens
  misc_RNA (1)...(19): siRNA sense strand
gcaaguacaucaccuucuc

SEQ ID NO: 870466 - RNA, 19 nt, Homo sapiens
  misc_RNA (1)...(19): siRNA sense strand
cguaagacgcugucgguua

SEQ ID NO: 870467 - RNA, 19 nt, Homo sapiens
  misc_RNA (1)...(19): siRNA sense strand
gaggugcaggccaugauuu

SEQ ID NO: 870468 - RNA, 19 nt, Homo sapiens
  misc_RNA (1)...(19): siRNA sense strand
gcgccuacuucuucuccuu

SEQ ID NO: 870469 - RNA, 19 nt, Homo sapiens
  misc_RNA (1)...(19): siRNA sense strand
gcgccuacuucuucuccuu

SEQ ID NO: 870470 - RNA, 19 nt, Homo sapiens
  misc_RNA (1)...(19): siRNA sense strand
ucgacaagguguacgugaa

SEQ ID NO: 870471 - RNA, 19 nt, Homo sapiens
  misc_RNA (1)...(19): siRNA sense strand
acaagagccugucggugau

SEQ ID NO: 870472 - RNA, 19 nt, Homo sapiens
  misc_RNA (1)...(19): siRNA sense strand
acaccgaguucgucaacau

SEQ ID NO: 870473 - RNA, 19 nt, Homo sapiens
  misc_RNA (1)...(19): siRNA sense strand
gacaagguguacgugaaca

SEQ ID NO: 870474 - RNA, 19 nt, Homo sapiens
  misc_RNA (1)...(19): siRNA sense strand
gcagagccagagcgugaug

SEQ ID NO: 870475 - RNA, 19 nt, Homo sapiens
  misc_RNA (1)...(19): siRNA sense strand
cggugaugcuggugcgaaa

SEQ ID NO: 870476 - RNA, 19 nt, Homo sapiens
  misc_RNA (1)...(19): siRNA sense strand
cgaggugcaggccaugauu

SEQ ID NO: 870477 - RNA, 19 nt, Homo sapiens
  misc_RNA (1)...(19): siRNA sense strand
aggugcaggccaugauuua

SEQ ID NO: 870478 - RNA, 19 nt, Homo sapiens
  misc_RNA (1)...(19): siRNA sense strand
gcaaccacggcaaguacau

SEQ ID NO: 870479 - RNA, 19 nt, Homo sapiens
  misc_RNA (1)...(19): siRNA sense strand
gaucaggacuuagauaaua

SEQ ID NO: 870480 - RNA, 19 nt, Homo sapiens
  misc_RNA (1)...(19): siRNA sense strand
gcaaauuccuuguuucuug

SEQ ID NO: 870481 - RNA, 19 nt, Homo sapiens
  misc_RNA (1)...(19): siRNA sense strand
caaacuagaucaggacuua

SEQ ID NO: 870482 - RNA, 19 nt, Homo sapiens
  misc_RNA (1)...(19): siRNA sense strand
gcacagggccucccagaua

SEQ ID NO: 870483 - RNA, 19 nt, Homo sapiens
  misc_RNA (1)...(19): siRNA sense strand
gaucauuucucauguugua

SEQ ID NO: 870484 - RNA, 19 nt, Homo sapiens
  misc_RNA (1)...(19): siRNA sense strand
gcaagcaggagauauguua

SEQ ID NO: 870485 - RNA, 19 nt, Homo sapiens
  misc_RNA (1)...(19): siRNA sense strand
caaacaagacucuaaauug

SEQ ID NO: 870486 - RNA, 19 nt, Homo sapiens
  misc_RNA (1)...(19): siRNA sense strand
gaacaggacaggaccaauu

SEQ ID NO: 870487 - RNA, 19 nt, Homo sapiens
  misc_RNA (1)...(19): siRNA sense strand
gcaaacaagacucuaaauu

SEQ ID NO: 870488 - RNA, 19 nt, Homo sapiens
  misc_RNA (1)...(19): siRNA sense strand
gaugucacguugaugauuu

SEQ ID NO: 870489 - RNA, 19 nt, Homo sapiens
  misc_RNA (1)...(19): siRNA sense strand
ggaugcaaauuccuuguuu

SEQ ID NO: 870490 - RNA, 19 nt, Homo sapiens
  misc_RNA (1)...(19): siRNA sense strand
ggacucauguuccacaaug

SEQ ID NO: 870491 - RNA, 19 nt, Homo sapiens
  misc_RNA (1)...(19): siRNA sense strand
gagccaagaaguaauauaa

SEQ ID NO: 870492 - RNA, 19 nt, Homo sapiens
  misc_RNA (1)...(19): siRNA sense strand
ggaagagcaucaccuugaa

SEQ ID NO: 870493 - RNA, 19 nt, Homo sapiens
  misc_RNA (1)...(19): siRNA sense strand
aaacguacuuugaagauga

SEQ ID NO: 870494 - RNA, 19 nt, Homo sapiens
  misc_RNA (1)...(19): siRNA sense strand
gcgauuaucuguggaaaug

SEQ ID NO: 870495 - RNA, 19 nt, Homo sapiens
  misc_RNA (1)...(19): siRNA sense strand
gaagaugacccgagagaga

SEQ ID NO: 870496 - RNA, 19 nt, Homo sapiens
  misc_RNA (1)...(19): siRNA sense strand
gcaaaggacucauguucca

SEQ ID NO: 870497 - RNA, 19 nt, Homo sapiens
  misc_RNA (1)...(19): siRNA sense strand
ccacaucccugcucacuca

SEQ ID NO: 870498 - RNA, 19 nt, Homo sapiens
  misc_RNA (1)...(19): siRNA sense strand
ggacuuagauaauauucag

SEQ ID NO: 870499 - RNA, 19 nt, Homo sapiens
  misc_RNA (1)...(19): siRNA sense strand
caaauuccuuguuucuuga

SEQ ID NO: 870500 - RNA, 19 nt, Homo sapiens
  misc_RNA (1)...(19): siRNA sense strand
ugaaguggaucauuucuca

SEQ ID NO: 870501 - RNA, 19 nt, Homo sapiens
  misc_RNA (1)...(19): siRNA sense strand
gaagauggcacagaaguau

SEQ ID NO: 870502 - RNA, 19 nt, Homo sapiens
  misc_RNA (1)...(19): siRNA sense strand
ggauaucucggguuuauga

SEQ ID NO: 870503 - RNA, 19 nt, Homo sapiens
  misc_RNA (1)...(19): siRNA sense strand
gaaagugacucugguucug

SEQ ID NO: 870504 - RNA, 19 nt, Homo sapiens
  misc_RNA (1)...(19): siRNA sense strand
gaaacguacuuugaagaug

SEQ ID NO: 870505 - RNA, 19 nt, Homo sapiens
  misc_RNA (1)...(19): siRNA sense strand
gaucaaaggcagccauuuc

SEQ ID NO: 870506 - RNA, 19 nt, Homo sapiens
  misc_RNA (1)...(19): siRNA sense strand
acacuuugcuggaauccua

SEQ ID NO: 870507 - RNA, 19 nt, Homo sapiens
  misc_RNA (1)...(19): siRNA sense strand
gaagaacaagacaaugauu

SEQ ID NO: 870508 - RNA, 19 nt, Homo sapiens
  misc_RNA (1)...(19): siRNA sense strand
uauaacaggcguacuauga

SEQ ID NO: 870509 - RNA, 19 nt, Homo sapiens
  misc_RNA (1)...(19): siRNA sense strand
ucucagagcccaucucaaa

SEQ ID NO: 870510 - RNA, 19 nt, Homo sapiens
  misc_RNA (1)...(19): siRNA sense strand
caagagaugucccguugca

SEQ ID NO: 870511 - RNA, 19 nt, Homo sapiens
  misc_RNA (1)...(19): siRNA sense strand
cggagaagauggcacagaa

SEQ ID NO: 870512 - RNA, 19 nt, Homo sapiens
  misc_RNA (1)...(19): siRNA sense strand
cacagggccucccagauaa

SEQ ID NO: 870513 - RNA, 19 nt, Homo sapiens
  misc_RNA (1)...(19): siRNA sense strand
cacaugugcuuucuucuau

SEQ ID NO: 870514 - RNA, 19 nt, Homo sapiens
  misc_RNA (1)...(19): siRNA sense strand
acgaagagcuguccacauc

SEQ ID NO: 870515 - RNA, 19 nt, Homo sapiens
  misc_RNA (1)...(19): siRNA sense strand
ggaaacguacuuugaagau

SEQ ID NO: 870516 - RNA, 19 nt, Homo sapiens
  misc_RNA (1)...(19): siRNA sense strand
gggaggagaugaaggaaac

SEQ ID NO: 870517 - RNA, 19 nt, Homo sapiens
  misc_RNA (1)...(19): siRNA sense strand
ccgagcaccugauacauau

SEQ ID NO: 870518 - RNA, 19 nt, Homo sapiens
  misc_RNA (1)...(19): siRNA sense strand
ccacaugugcuuucuucua

SEQ ID NO: 870519 - RNA, 19 nt, Homo sapiens
  misc_RNA (1)...(19): siRNA sense strand
gaagagcaucaccuugaaa

SEQ ID NO: 870520 - RNA, 19 nt, Homo sapiens
  misc_RNA (1)...(19): siRNA sense strand
ggaggugaucaaacaauuu

SEQ ID NO: 870521 - RNA, 19 nt, Homo sapiens
  misc_RNA (1)...(19): siRNA sense strand
gcugcugccugguaagaaa

SEQ ID NO: 870522 - RNA, 19 nt, Homo sapiens
  misc_RNA (1)...(19): siRNA sense strand
gauuaucuguggaaaugau

SEQ ID NO: 870523 - RNA, 19 nt, Homo sapiens
  misc_RNA (1)...(19): siRNA sense strand
uccgaaaccucgcuguuaa

SEQ ID NO: 870524 - RNA, 19 nt, Homo sapiens
  misc_RNA (1)...(19): siRNA sense strand
gaccgcaaguuaccacaug

SEQ ID NO: 870525 - RNA, 19 nt, Homo sapiens
  misc_RNA (1)...(19): siRNA sense strand
ggagaugaaggaaaccaaa

SEQ ID NO: 870526 - RNA, 19 nt, Homo sapiens
  misc_RNA (1)...(19): siRNA sense strand
uaacaggcguacuaugaag

SEQ ID NO: 870527 - RNA, 19 nt, Homo sapiens
  misc_RNA (1)...(19): siRNA sense strand
ggaccgaaguggugucaac

SEQ ID NO: 870528 - RNA, 19 nt, Homo sapiens
  misc_RNA (1)...(19): siRNA sense strand
caugugcuuucuucuauug

SEQ ID NO: 870529 - RNA, 19 nt, Homo sapiens
  misc_RNA (1)...(19): siRNA sense strand
uuaugaagcucuccagcaa

SEQ ID NO: 870530 - RNA, 19 nt, Homo sapiens
  misc_RNA (1)...(19): siRNA sense strand
gccuuucucuuccuggaua

SEQ ID NO: 870531 - RNA, 19 nt, Homo sapiens
  misc_RNA (1)...(19): siRNA sense strand
uaagcaaacaagacucuaa

SEQ ID NO: 870532 - RNA, 19 nt, Homo sapiens
  misc_RNA (1)...(19): siRNA sense strand
ggaggaagagcaucaccuu

SEQ ID NO: 870533 - RNA, 19 nt, Homo sapiens
  misc_RNA (1)...(19): siRNA sense strand
caaguuaccacaugugcuu

SEQ ID NO: 870534 - RNA, 19 nt, Homo sapiens
  misc_RNA (1)...(19): siRNA sense strand
guacuuugaagaugaagaa

SEQ ID NO: 870535 - RNA, 19 nt, Homo sapiens
  misc_RNA (1)...(19): siRNA sense strand
ccacaucuucugacaguga

SEQ ID NO: 870536 - RNA, 19 nt, Homo sapiens
  misc_RNA (1)...(19): siRNA sense strand
guugaugauuuccguuuau

SEQ ID NO: 870537 - RNA, 19 nt, Homo sapiens
  misc_RNA (1)...(19): siRNA sense strand
gaugggagagaaacuauuc

SEQ ID NO: 870538 - RNA, 19 nt, Homo sapiens
  misc_RNA (1)...(19): siRNA sense strand
ggagacagcuuuugaacag

SEQ ID NO: 870539 - RNA, 19 nt, Homo sapiens
  misc_RNA (1)...(19): siRNA sense strand
uagaucaggacuuagauaa

SEQ ID NO: 870540 - RNA, 19 nt, Homo sapiens
  misc_RNA (1)...(19): siRNA sense strand
ggcguacuaugaagcguaa

SEQ ID NO: 870541 - RNA, 19 nt, Homo sapiens
  misc_RNA (1)...(19): siRNA sense strand
gagaaugaugggagagaaa

SEQ ID NO: 870542 - RNA, 19 nt, Homo sapiens
  misc_RNA (1)...(19): siRNA sense strand
agacaggauuggagcagaa

SEQ ID NO: 870543 - RNA, 19 nt, Homo sapiens
  misc_RNA (1)...(19): siRNA sense strand
gaugcaaauuccuuguuuc

SEQ ID NO: 870544 - RNA, 19 nt, Homo sapiens
  misc_RNA (1)...(19): siRNA sense strand
acgaggaggugaucaaaca

SEQ ID NO: 870545 - RNA, 19 nt, Homo sapiens
  misc_RNA (1)...(19): siRNA sense strand
gagaugauuggcuggauug

SEQ ID NO: 870546 - RNA, 19 nt, Homo sapiens
  misc_RNA (1)...(19): siRNA sense strand
gagaagauggcacagaagu

SEQ ID NO: 870547 - RNA, 19 nt, Homo sapiens
  misc_RNA (1)...(19): siRNA sense strand
ucaggaaacguacuuugaa

SEQ ID NO: 870548 - RNA, 19 nt, Homo sapiens
  misc_RNA (1)...(19): siRNA sense strand
gagaggaggaacaagauca

SEQ ID NO: 870549 - RNA, 19 nt, Homo sapiens
  misc_RNA (1)...(19): siRNA sense strand
guuuauaacaggcguacua

SEQ ID NO: 870550 - RNA, 19 nt, Homo sapiens
  misc_RNA (1)...(19): siRNA sense strand
cggcacaucucaccaagag

SEQ ID NO: 870551 - RNA, 19 nt, Homo sapiens
  misc_RNA (1)...(19): siRNA sense strand
guccacaucuucugacagu

SEQ ID NO: 870552 - RNA, 19 nt, Homo sapiens
  misc_RNA (1)...(19): siRNA sense strand
gaagaugaagaacaagaca

SEQ ID NO: 870553 - RNA, 19 nt, Homo sapiens
  misc_RNA (1)...(19): siRNA sense strand
cguugaugauuuccguuua

SEQ ID NO: 870554 - RNA, 19 nt, Homo sapiens
  misc_RNA (1)...(19): siRNA sense strand
uaaccgagcaccugauaca

SEQ ID NO: 870555 - RNA, 19 nt, Homo sapiens
  misc_RNA (1)...(19): siRNA sense strand
gccaagaaguaauauaagc

SEQ ID NO: 870556 - RNA, 19 nt, Homo sapiens
  misc_RNA (1)...(19): siRNA sense strand
uaccacaugugcuuucuuc

SEQ ID NO: 870557 - RNA, 19 nt, Homo sapiens
  misc_RNA (1)...(19): siRNA sense strand
gucaagaggaugcaaauuc

SEQ ID NO: 870558 - RNA, 19 nt, Homo sapiens
  misc_RNA (1)...(19): siRNA sense strand
caggaaacguacuuugaag

SEQ ID NO: 870559 - RNA, 19 nt, Homo sapiens
  misc_RNA (1)...(19): siRNA sense strand
cuggauaucucggguuuau

SEQ ID NO: 870560 - RNA, 19 nt, Homo sapiens
  misc_RNA (1)...(19): siRNA sense strand
gcccaauccugucuauaag

SEQ ID NO: 870561 - RNA, 19 nt, Homo sapiens
  misc_RNA (1)...(19): siRNA sense strand
gagaugucccguugcaaga

SEQ ID NO: 870562 - RNA, 19 nt, Homo sapiens
  misc_RNA (1)...(19): siRNA sense strand
ucaauucugugggucaaga

SEQ ID NO: 870563 - RNA, 19 nt, Homo sapiens
  misc_RNA (1)...(19): siRNA sense strand
guuaaccgagcaccugaua

SEQ ID NO: 870564 - RNA, 19 nt, Homo sapiens
  misc_RNA (1)...(19): siRNA sense strand
aaaguguggugaccuagau

SEQ ID NO: 870565 - RNA, 19 nt, Homo sapiens
  misc_RNA (1)...(19): siRNA sense strand
gaaagcagacaggauugga

SEQ ID NO: 870566 - RNA, 19 nt, Homo sapiens
  misc_RNA (1)...(19): siRNA sense strand
guggaucauuucucauguu

SEQ ID NO: 870567 - RNA, 19 nt, Homo sapiens
  misc_RNA (1)...(19): siRNA sense strand
guagugcugcugccuggua

SEQ ID NO: 870568 - RNA, 19 nt, Homo sapiens
  misc_RNA (1)...(19): siRNA sense strand
aaggaaagcagacaggauu

SEQ ID NO: 870569 - RNA, 19 nt, Homo sapiens
  misc_RNA (1)...(19): siRNA sense strand
uaacauaagcaaacaagac

SEQ ID NO: 870570 - RNA, 19 nt, Homo sapiens
  misc_RNA (1)...(19): siRNA sense strand
cuuugaagaugaagaacaa

SEQ ID NO: 870571 - RNA, 19 nt, Homo sapiens
  misc_RNA (1)...(19): siRNA sense strand
agagaugauuggcuggauu

SEQ ID NO: 870572 - RNA, 19 nt, Homo sapiens
  misc_RNA (1)...(19): siRNA sense strand
ggagccaagaaguaauaua

SEQ ID NO: 870573 - RNA, 19 nt, Homo sapiens
  misc_RNA (1)...(19): siRNA sense strand
gaaucucuccuacggugaa

SEQ ID NO: 870574 - RNA, 19 nt, Homo sapiens
  misc_RNA (1)...(19): siRNA sense strand
ccaauugggccagugauga

SEQ ID NO: 870575 - RNA, 19 nt, Homo sapiens
  misc_RNA (1)...(19): siRNA sense strand
aauucaagcccaagccuua

SEQ ID NO: 870576 - RNA, 19 nt, Homo sapiens
  misc_RNA (1)...(19): siRNA sense strand
ugacaucugagaaaggaaa

SEQ ID NO: 870577 - RNA, 19 nt, Homo sapiens
  misc_RNA (1)...(19): siRNA sense strand
cugcuucgcugguuaacau

SEQ ID NO: 870578 - RNA, 19 nt, Homo sapiens
  misc_RNA (1)...(19): siRNA sense strand
ccagcaagcaggagauaug

SEQ ID NO: 870579 - RNA, 19 nt, Homo sapiens
  misc_RNA (1)...(19): siRNA sense strand
guagaaagcucccacaguu

SEQ ID NO: 870580 - RNA, 19 nt, Homo sapiens
  misc_RNA (1)...(19): siRNA sense strand
gaaauucucucucuugaag

SEQ ID NO: 870581 - RNA, 19 nt, Homo sapiens
  misc_RNA (1)...(19): siRNA sense strand
ggacauuuguuugcauuua

SEQ ID NO: 870582 - RNA, 19 nt, Homo sapiens
  misc_RNA (1)...(19): siRNA sense strand
ccaccaaaguucaguaaua

SEQ ID NO: 870583 - RNA, 19 nt, Homo sapiens
  misc_RNA (1)...(19): siRNA sense strand
gaaguugcauguucagauu

SEQ ID NO: 870584 - RNA, 19 nt, Homo sapiens
  misc_RNA (1)...(19): siRNA sense strand
ggauggagcuagaagauga

SEQ ID NO: 870585 - RNA, 19 nt, Homo sapiens
  misc_RNA (1)...(19): siRNA sense strand
ccaaggagcuuacuaugga

SEQ ID NO: 870586 - RNA, 19 nt, Homo sapiens
  misc_RNA (1)...(19): siRNA sense strand
guaaugaaauugacaguag

SEQ ID NO: 870587 - RNA, 19 nt, Homo sapiens
  misc_RNA (1)...(19): siRNA sense strand
gaaauuagaaguugcaugu

SEQ ID NO: 870588 - RNA, 19 nt, Homo sapiens
  misc_RNA (1)...(19): siRNA sense strand
caaauguaaucgacaauug

SEQ ID NO: 870589 - RNA, 19 nt, Homo sapiens
  misc_RNA (1)...(19): siRNA sense strand
agacucaucuucgaauuua

SEQ ID NO: 870590 - RNA, 19 nt, Homo sapiens
  misc_RNA (1)...(19): siRNA sense strand
ccagaagacuguacauuuc

SEQ ID NO: 870591 - RNA, 19 nt, Homo sapiens
  misc_RNA (1)...(19): siRNA sense strand
caccaaaguucaguaauaa

SEQ ID NO: 870592 - RNA, 19 nt, Homo sapiens
  misc_RNA (1)...(19): siRNA sense strand
gacaaacucucauucuuca

SEQ ID NO: 870593 - RNA, 19 nt, Homo sapiens
  misc_RNA (1)...(19): siRNA sense strand
gaugaagaguugcuaagug

SEQ ID NO: 870594 - RNA, 19 nt, Homo sapiens
  misc_RNA (1)...(19): siRNA sense strand
gaaaucuucugccaaugug

SEQ ID NO: 870595 - RNA, 19 nt, Homo sapiens
  misc_RNA (1)...(19): siRNA sense strand
gcaaagacaaacucucauu

SEQ ID NO: 870596 - RNA, 19 nt, Homo sapiens
  misc_RNA (1)...(19): siRNA sense strand
ggaaacacauccuagaacu

SEQ ID NO: 870597 - RNA, 19 nt, Homo sapiens
  misc_RNA (1)...(19): siRNA sense strand
agaaagcucccacaguuua

SEQ ID NO: 870598 - RNA, 19 nt, Homo sapiens
  misc_RNA (1)...(19): siRNA sense strand
gguguacgcugucuagaug

SEQ ID NO: 870599 - RNA, 19 nt, Homo sapiens
  misc_RNA (1)...(19): siRNA sense strand
gaagaaacuccaccaagga

SEQ ID NO: 870600 - RNA, 19 nt, Homo sapiens
  misc_RNA (1)...(19): siRNA sense strand
ggagagaugagaauacuau

SEQ ID NO: 870601 - RNA, 19 nt, Homo sapiens
  misc_RNA (1)...(19): siRNA sense strand
guuguagacuuuagagaaa

SEQ ID NO: 870602 - RNA, 19 nt, Homo sapiens
  misc_RNA (1)...(19): siRNA sense strand
ccaagaauacuucaucuga

SEQ ID NO: 870603 - RNA, 19 nt, Homo sapiens
  misc_RNA (1)...(19): siRNA sense strand
gaagaguugcuaagugaaa

SEQ ID NO: 870604 - RNA, 19 nt, Homo sapiens
  misc_RNA (1)...(19): siRNA sense strand
gagaugagaauacuaugaa

SEQ ID NO: 870605 - RNA, 19 nt, Homo sapiens
  misc_RNA (1)...(19): siRNA sense strand
caacaugguccucaaguga

SEQ ID NO: 870606 - RNA, 19 nt, Homo sapiens
  misc_RNA (1)...(19): siRNA sense strand
gcaauggaguggaaucagu

SEQ ID NO: 870607 - RNA, 19 nt, Homo sapiens
  misc_RNA (1)...(19): siRNA sense strand
caaaccauguugaugaguu

SEQ ID NO: 870608 - RNA, 19 nt, Homo sapiens
  misc_RNA (1)...(19): siRNA sense strand
gagcuaacaugggauuaug

SEQ ID NO: 870609 - RNA, 19 nt, Homo sapiens
  misc_RNA (1)...(19): siRNA sense strand
ucaggaagauuacuaagca

SEQ ID NO: 870610 - RNA, 19 nt, Homo sapiens
  misc_RNA (1)...(19): siRNA sense strand
caauaaagggaauguguuu

SEQ ID NO: 870611 - RNA, 19 nt, Homo sapiens
  misc_RNA (1)...(19): siRNA sense strand
aagcagagcuaacacugaa

SEQ ID NO: 870612 - RNA, 19 nt, Homo sapiens
  misc_RNA (1)...(19): siRNA sense strand
gaauacauccaagcaauga

SEQ ID NO: 870613 - RNA, 19 nt, Homo sapiens
  misc_RNA (1)...(19): siRNA sense strand
ggaaaucuucugccaaugu

SEQ ID NO: 870614 - RNA, 19 nt, Homo sapiens
  misc_RNA (1)...(19): siRNA sense strand
ggacucaaguucaaaccau

SEQ ID NO: 870615 - RNA, 19 nt, Homo sapiens
  misc_RNA (1)...(19): siRNA sense strand
caauaccuauguucaguug

SEQ ID NO: 870616 - RNA, 19 nt, Homo sapiens
  misc_RNA (1)...(19): siRNA sense strand
ccaaagcagugauccuaug

SEQ ID NO: 870617 - RNA, 19 nt, Homo sapiens
  misc_RNA (1)...(19): siRNA sense strand
gaaguucucccauuaggau

SEQ ID NO: 870618 - RNA, 19 nt, Homo sapiens
  misc_RNA (1)...(19): siRNA sense strand
aaagggagcaucacagaaa

SEQ ID NO: 870619 - RNA, 19 nt, Homo sapiens
  misc_RNA (1)...(19): siRNA sense strand
ggacugugccugagaagga

SEQ ID NO: 870620 - RNA, 19 nt, Homo sapiens
  misc_RNA (1)...(19): siRNA sense strand
caagaauacuucaucugau

SEQ ID NO: 870621 - RNA, 19 nt, Homo sapiens
  misc_RNA (1)...(19): siRNA sense strand
gcuagaagaugauggaaaa

SEQ ID NO: 870622 - RNA, 19 nt, Homo sapiens
  misc_RNA (1)...(19): siRNA sense strand
gaaagcucccacaguuuaa

SEQ ID NO: 870623 - RNA, 19 nt, Homo sapiens
  misc_RNA (1)...(19): siRNA sense strand
aaucaaaugucacuuccaa

SEQ ID NO: 870624 - RNA, 19 nt, Homo sapiens
  misc_RNA (1)...(19): siRNA sense strand
gaaacacacaacaggaauu

SEQ ID NO: 870625 - RNA, 19 nt, Homo sapiens
  misc_RNA (1)...(19): siRNA sense strand
guugaugaguuugaagaua

SEQ ID NO: 870626 - RNA, 19 nt, Homo sapiens
  misc_RNA (1)...(19): siRNA sense strand
gagcauauaaucuaaccaa

SEQ ID NO: 870627 - RNA, 19 nt, Homo sapiens
  misc_RNA (1)...(19): siRNA sense strand
gaaauguccaccaaaguuc

SEQ ID NO: 870628 - RNA, 19 nt, Homo sapiens
  misc_RNA (1)...(19): siRNA sense strand
caacagguaugugaaagca

SEQ ID NO: 870629 - RNA, 19 nt, Homo sapiens
  misc_RNA (1)...(19): siRNA sense strand
gugaaugaagcaacuauaa

SEQ ID NO: 870630 - RNA, 19 nt, Homo sapiens
  misc_RNA (1)...(19): siRNA sense strand
caaaaggacucaaguucaa

SEQ ID NO: 870631 - RNA, 19 nt, Homo sapiens
  misc_RNA (1)...(19): siRNA sense strand
ugagaaauguccaccaaag

SEQ ID NO: 870632 - RNA, 19 nt, Homo sapiens
  misc_RNA (1)...(19): siRNA sense strand
gcaaauguaaucgacaauu

SEQ ID NO: 870633 - RNA, 19 nt, Homo sapiens
  misc_RNA (1)...(19): siRNA sense strand
gacuguacauuucuaacaa

SEQ ID NO: 870634 - RNA, 19 nt, Homo sapiens
  misc_RNA (1)...(19): siRNA sense strand
gaagacuguacauuucuaa

SEQ ID NO: 870635 - RNA, 19 nt, Homo sapiens
  misc_RNA (1)...(19): siRNA sense strand
gaaauugacaguagaaagc

SEQ ID NO: 870636 - RNA, 19 nt, Homo sapiens
  misc_RNA (1)...(19): siRNA sense strand
ucaaagacagcagguauuu

SEQ ID NO: 870637 - RNA, 19 nt, Homo sapiens
  misc_RNA (1)...(19): siRNA sense strand
ugagacagaguguaacuuu

SEQ ID NO: 870638 - RNA, 19 nt, Homo sapiens
  misc_RNA (1)...(19): siRNA sense strand
aaggaaaucuucugccaau

SEQ ID NO: 870639 - RNA, 19 nt, Homo sapiens
  misc_RNA (1)...(19): siRNA sense strand
aagaauacauccaagcaau

SEQ ID NO: 870640 - RNA, 19 nt, Homo sapiens
  misc_RNA (1)...(19): siRNA sense strand
gugcaaauguaaucgacaa

SEQ ID NO: 870641 - RNA, 19 nt, Homo sapiens
  misc_RNA (1)...(19): siRNA sense strand
cuacagagacagauuccua

SEQ ID NO: 870642 - RNA, 19 nt, Homo sapiens
  misc_RNA (1)...(19): siRNA sense strand
gaaaacaaauccaaugcau

SEQ ID NO: 870643 - RNA, 19 nt, Homo sapiens
  misc_RNA (1)...(19): siRNA sense strand
aaucagugcccauuucuuu

SEQ ID NO: 870644 - RNA, 19 nt, Homo sapiens
  misc_RNA (1)...(19): siRNA sense strand
ggaaauaaggaaauucucu

SEQ ID NO: 870645 - RNA, 19 nt, Homo sapiens
  misc_RNA (1)...(19): siRNA sense strand
caacaggaaauaaggaaau

SEQ ID NO: 870646 - RNA, 19 nt, Homo sapiens
  misc_RNA (1)...(19): siRNA sense strand
gcauuucccucuacaucau

SEQ ID NO: 870647 - RNA, 19 nt, Homo sapiens
  misc_RNA (1)...(19): siRNA sense strand
ccucgagcauauaaucuaa

SEQ ID NO: 870648 - RNA, 19 nt, Homo sapiens
  misc_RNA (1)...(19): siRNA sense strand
gaaagcaagaacagagcua

SEQ ID NO: 870649 - RNA, 19 nt, Homo sapiens
  misc_RNA (1)...(19): siRNA sense strand
gggacgaucuacagcaugu

SEQ ID NO: 870650 - RNA, 19 nt, Homo sapiens
  misc_RNA (1)...(19): siRNA sense strand
gacagagggacauuuguuu

SEQ ID NO: 870651 - RNA, 19 nt, Homo sapiens
  misc_RNA (1)...(19): siRNA sense strand
ugacugcucuggugcuugu

SEQ ID NO: 870652 - RNA, 19 nt, Homo sapiens
  misc_RNA (1)...(19): siRNA sense strand
aguugaaguucucccauua

SEQ ID NO: 870653 - RNA, 19 nt, Homo sapiens
  misc_RNA (1)...(19): siRNA sense strand
caacugacagcaaggaaug

SEQ ID NO: 870654 - RNA, 19 nt, Homo sapiens
  misc_RNA (1)...(19): siRNA sense strand
caaaugucacuuccaaaga

SEQ ID NO: 870655 - RNA, 19 nt, Homo sapiens
  misc_RNA (1)...(19): siRNA sense strand
augaagaguugcuaaguga

SEQ ID NO: 870656 - RNA, 19 nt, Homo sapiens
  misc_RNA (1)...(19): siRNA sense strand
caaaauaaccacuggauau

SEQ ID NO: 870657 - RNA, 19 nt, Homo sapiens
  misc_RNA (1)...(19): siRNA sense strand
gcauagacauaacaaaaug

SEQ ID NO: 870658 - RNA, 19 nt, Homo sapiens
  misc_RNA (1)...(19): siRNA sense strand
ggaauuacccaaagcaaaa

SEQ ID NO: 870659 - RNA, 19 nt, Homo sapiens
  misc_RNA (1)...(19): siRNA sense strand
uaaggaaauucucucucuu

SEQ ID NO: 870660 - RNA, 19 nt, Homo sapiens
  misc_RNA (1)...(19): siRNA sense strand
aaacacacaacaggaauuu

SEQ ID NO: 870661 - RNA, 19 nt, Homo sapiens
  misc_RNA (1)...(19): siRNA sense strand
uaagugaaaccaagaauac

SEQ ID NO: 870662 - RNA, 19 nt, Homo sapiens
  misc_RNA (1)...(19): siRNA sense strand
gagcaucacagaaagaagu

SEQ ID NO: 870663 - RNA, 19 nt, Homo sapiens
  misc_RNA (1)...(19): siRNA sense strand
cgaccacauuggauaauca

SEQ ID NO: 870664 - RNA, 19 nt, Homo sapiens
  misc_RNA (1)...(19): siRNA sense strand
cagaagauaaugauggauu

SEQ ID NO: 870665 - RNA, 19 nt, Homo sapiens
  misc_RNA (1)...(19): siRNA sense strand
agaaauguccaccaaaguu

SEQ ID NO: 870666 - RNA, 19 nt, Homo sapiens
  misc_RNA (1)...(19): siRNA sense strand
aagaggaaauuagaaguug

SEQ ID NO: 870667 - RNA, 19 nt, Homo sapiens
  misc_RNA (1)...(19): siRNA sense strand
gcccauuucuuucuguaau

SEQ ID NO: 870668 - RNA, 19 nt, Homo sapiens
  misc_RNA (1)...(19): siRNA sense strand
ggaaauucucucucuugaa

SEQ ID NO: 870669 - RNA, 19 nt, Homo sapiens
  misc_RNA (1)...(19): siRNA sense strand
caguuuaaguacagaaaga

SEQ ID NO: 870670 - RNA, 19 nt, Homo sapiens
  misc_RNA (1)...(19): siRNA sense strand
caucugauucucuaacaaa

SEQ ID NO: 870671 - RNA, 19 nt, Homo sapiens
  misc_RNA (1)...(19): siRNA sense strand
ccaccaaggagcagaugua

SEQ ID NO: 870672 - RNA, 19 nt, Homo sapiens
  misc_RNA (1)...(19): siRNA sense strand
ccaaaguucaguaauaauc

SEQ ID NO: 870673 - RNA, 19 nt, Homo sapiens
  misc_RNA (1)...(19): siRNA sense strand
cugauucucuaacaaaguu

SEQ ID NO: 870674 - RNA, 19 nt, Homo sapiens
  misc_RNA (1)...(19): siRNA sense strand
cuaagugaaaccaagaaua

SEQ ID NO: 870675 - RNA, 19 nt, Homo sapiens
  misc_RNA (1)...(19): siRNA sense strand
guaaccaggcgaccacauu

SEQ ID NO: 870676 - RNA, 19 nt, Homo sapiens
  misc_RNA (1)...(19): siRNA sense strand
aauuagaaguugcauguuc

SEQ ID NO: 870677 - RNA, 19 nt, Homo sapiens
  misc_RNA (1)...(19): siRNA sense strand
gagggacgaucuacagcau

SEQ ID NO: 870678 - RNA, 19 nt, Homo sapiens
  misc_RNA (1)...(19): siRNA sense strand
caagcaaugauucuaguga

SEQ ID NO: 870679 - RNA, 19 nt, Homo sapiens
  misc_RNA (1)...(19): siRNA sense strand
uacaaguccucgcaccuaa

SEQ ID NO: 870680 - RNA, 19 nt, Homo sapiens
  misc_RNA (1)...(19): siRNA sense strand
gccaaagccuacuacaagu

SEQ ID NO: 870681 - RNA, 19 nt, Homo sapiens
  misc_RNA (1)...(19): siRNA sense strand
cgccaaagccuacuacaag

SEQ ID NO: 870682 - RNA, 19 nt, Homo sapiens
  misc_RNA (1)...(19): siRNA sense strand
cuacaaguccucgcaccua

SEQ ID NO: 870683 - RNA, 19 nt, Homo sapiens
  misc_RNA (1)...(19): siRNA sense strand
gcgccaaagccuacuacaa

SEQ ID NO: 870684 - RNA, 19 nt, Homo sapiens
  misc_RNA (1)...(19): siRNA sense strand
ggaacgcccuuuugcuugu

SEQ ID NO: 870685 - RNA, 19 nt, Homo sapiens
  misc_RNA (1)...(19): siRNA sense strand
uggcgugcguggauuacuu

SEQ ID NO: 870686 - RNA, 19 nt, Homo sapiens
  misc_RNA (1)...(19): siRNA sense strand
gugaccaccuggccaagca

SEQ ID NO: 870687 - RNA, 19 nt, Homo sapiens
  misc_RNA (1)...(19): siRNA sense strand
caaguccucgcaccuaaag

SEQ ID NO: 870688 - RNA, 19 nt, Homo sapiens
  misc_RNA (1)...(19): siRNA sense strand
ccaaagccuacuacaaguc

SEQ ID NO: 870689 - RNA, 19 nt, Homo sapiens
  misc_RNA (1)...(19): siRNA sense strand
gcaacaaggucauuagaua

SEQ ID NO: 870690 - RNA, 19 nt, Homo sapiens
  misc_RNA (1)...(19): siRNA sense strand
ggagaacucugaagaacua

SEQ ID NO: 870691 - RNA, 19 nt, Homo sapiens
  misc_RNA (1)...(19): siRNA sense strand
aaaggaaccugaagaauuu

SEQ ID NO: 870692 - RNA, 19 nt, Homo sapiens
  misc_RNA (1)...(19): siRNA sense strand
gaacucugaagaacuauua

SEQ ID NO: 870693 - RNA, 19 nt, Homo sapiens
  misc_RNA (1)...(19): siRNA sense strand
uaaaggaaccugaagaauu

SEQ ID NO: 870694 - RNA, 19 nt, Homo sapiens
  misc_RNA (1)...(19): siRNA sense strand
ggaacaagcucguaaaucc

SEQ ID NO: 870695 - RNA, 19 nt, Homo sapiens
  misc_RNA (1)...(19): siRNA sense strand
uuucaacucuggcaaauaa

SEQ ID NO: 870696 - RNA, 19 nt, Homo sapiens
  misc_RNA (1)...(19): siRNA sense strand
guaauaaugcccuggagaa

SEQ ID NO: 870697 - RNA, 19 nt, Homo sapiens
  misc_RNA (1)...(19): siRNA sense strand
caacaaggucauuagauau

SEQ ID NO: 870698 - RNA, 19 nt, Homo sapiens
  misc_RNA (1)...(19): siRNA sense strand
gcucguaaaucccaagagu

SEQ ID NO: 870699 - RNA, 19 nt, Homo sapiens
  misc_RNA (1)...(19): siRNA sense strand
ucguaaaucccaagaguua

SEQ ID NO: 870700 - RNA, 19 nt, Homo sapiens
  misc_RNA (1)...(19): siRNA sense strand
uaaaaggaguucaggaaaa

SEQ ID NO: 870701 - RNA, 19 nt, Homo sapiens
  misc_RNA (1)...(19): siRNA sense strand
ucucagaguuagaugaaga

SEQ ID NO: 870702 - RNA, 19 nt, Homo sapiens
  misc_RNA (1)...(19): siRNA sense strand
gcaggaacaagcucguaaa

SEQ ID NO: 870703 - RNA, 19 nt, Homo sapiens
  misc_RNA (1)...(19): siRNA sense strand
gaguuacagagucagauua

SEQ ID NO: 870704 - RNA, 19 nt, Homo sapiens
  misc_RNA (1)...(19): siRNA sense strand
ggaaaauucguccaacaua

SEQ ID NO: 870705 - RNA, 19 nt, Homo sapiens
  misc_RNA (1)...(19): siRNA sense strand
uauaaaggaaccugaagaa

SEQ ID NO: 870706 - RNA, 19 nt, Homo sapiens
  misc_RNA (1)...(19): siRNA sense strand
cuacagaggaucauuucaa

SEQ ID NO: 870707 - RNA, 19 nt, Homo sapiens
  misc_RNA (1)...(19): siRNA sense strand
uacacuacaucauacacua

SEQ ID NO: 870708 - RNA, 19 nt, Homo sapiens
  misc_RNA (1)...(19): siRNA sense strand
gaaaauucguccaacauac

SEQ ID NO: 870709 - RNA, 19 nt, Homo sapiens
  misc_RNA (1)...(19): siRNA sense strand
agagucagauuagucaaug

SEQ ID NO: 870710 - RNA, 19 nt, Homo sapiens
  misc_RNA (1)...(19): siRNA sense strand
cccaagaguuacagaguca

SEQ ID NO: 870711 - RNA, 19 nt, Homo sapiens
  misc_RNA (1)...(19): siRNA sense strand
cagaaagaagcucuacaga

SEQ ID NO: 870712 - RNA, 19 nt, Homo sapiens
  misc_RNA (1)...(19): siRNA sense strand
ggucauuagauauaaagga

SEQ ID NO: 870713 - RNA, 19 nt, Homo sapiens
  misc_RNA (1)...(19): siRNA sense strand
gauauaaaggaaccugaag

SEQ ID NO: 870714 - RNA, 19 nt, Homo sapiens
  misc_RNA (1)...(19): siRNA sense strand
ccagaaagaagcucuacag

SEQ ID NO: 870715 - RNA, 19 nt, Homo sapiens
  misc_RNA (1)...(19): siRNA sense strand
cguccaacauacucucaga

SEQ ID NO: 870716 - RNA, 19 nt, Homo sapiens
  misc_RNA (1)...(19): siRNA sense strand
auaaugcccuggagaacuc

SEQ ID NO: 870717 - RNA, 19 nt, Homo sapiens
  misc_RNA (1)...(19): siRNA sense strand
aaaaggaguucaggaaaau

SEQ ID NO: 870718 - RNA, 19 nt, Homo sapiens
  misc_RNA (1)...(19): siRNA sense strand
cagaggaucauuucaacuc

SEQ ID NO: 870719 - RNA, 19 nt, Homo sapiens
  misc_RNA (1)...(19): siRNA sense strand
acacuacaucauacacuaa

SEQ ID NO: 870720 - RNA, 19 nt, Homo sapiens
  misc_RNA (1)...(19): siRNA sense strand
caagaguuacagagucaga

SEQ ID NO: 870721 - RNA, 19 nt, Homo sapiens
  misc_RNA (1)...(19): siRNA sense strand
uacagaggaucauuucaac

SEQ ID NO: 870722 - RNA, 19 nt, Homo sapiens
  misc_RNA (1)...(19): siRNA sense strand
uuacagagucagauuaguc

SEQ ID NO: 870723 - RNA, 19 nt, Homo sapiens
  misc_RNA (1)...(19): siRNA sense strand
agucagauuagucaaugua

SEQ ID NO: 870724 - RNA, 19 nt, Homo sapiens
  misc_RNA (1)...(19): siRNA sense strand
caggaacaagcucguaaau

SEQ ID NO: 870725 - RNA, 19 nt, Homo sapiens
  misc_RNA (1)...(19): siRNA sense strand
gagucagauuagucaaugu

SEQ ID NO: 870726 - RNA, 19 nt, Homo sapiens
  misc_RNA (1)...(19): siRNA sense strand
cagaguuagaugaagaauu

SEQ ID NO: 870727 - RNA, 19 nt, Homo sapiens
  misc_RNA (1)...(19): siRNA sense strand
acucuauacuggaugaagu

SEQ ID NO: 870728 - RNA, 19 nt, Homo sapiens
  misc_RNA (1)...(19): siRNA sense strand
cagagucagauuagucaau

SEQ ID NO: 870729 - RNA, 19 nt, Homo sapiens
  misc_RNA (1)...(19): siRNA sense strand
agaguuacagagucagauu

SEQ ID NO: 870730 - RNA, 19 nt, Homo sapiens
  misc_RNA (1)...(19): siRNA sense strand
gaaauucgcuucugguaau

SEQ ID NO: 870731 - RNA, 19 nt, Homo sapiens
  misc_RNA (1)...(19): siRNA sense strand
gaagaauggcuaugauuua

SEQ ID NO: 870732 - RNA, 19 nt, Homo sapiens
  misc_RNA (1)...(19): siRNA sense strand
gaacaaagacaguauuaug

SEQ ID NO: 870733 - RNA, 19 nt, Homo sapiens
  misc_RNA (1)...(19): siRNA sense strand
gaaaccaucugaccuuuua

SEQ ID NO: 870734 - RNA, 19 nt, Homo sapiens
  misc_RNA (1)...(19): siRNA sense strand
gaacagaucgggagcaaug

SEQ ID NO: 870735 - RNA, 19 nt, Homo sapiens
  misc_RNA (1)...(19): siRNA sense strand
guaauacuguagaugguua

SEQ ID NO: 870736 - RNA, 19 nt, Homo sapiens
  misc_RNA (1)...(19): siRNA sense strand
ccacagcccucucauucua

SEQ ID NO: 870737 - RNA, 19 nt, Homo sapiens
  misc_RNA (1)...(19): siRNA sense strand
ggaagaauggcuaugauuu

SEQ ID NO: 870738 - RNA, 19 nt, Homo sapiens
  misc_RNA (1)...(19): siRNA sense strand
ugauaaagauggugcauug

SEQ ID NO: 870739 - RNA, 19 nt, Homo sapiens
  misc_RNA (1)...(19): siRNA sense strand
gaugaucccuggaaaauaa

SEQ ID NO: 870740 - RNA, 19 nt, Homo sapiens
  misc_RNA (1)...(19): siRNA sense strand
ggaaagauaagaaagcuau

SEQ ID NO: 870741 - RNA, 19 nt, Homo sapiens
  misc_RNA (1)...(19): siRNA sense strand
gauaugaaucggaccuuua

SEQ ID NO: 870742 - RNA, 19 nt, Homo sapiens
  misc_RNA (1)...(19): siRNA sense strand
cacaaacucugacccaauu

SEQ ID NO: 870743 - RNA, 19 nt, Homo sapiens
  misc_RNA (1)...(19): siRNA sense strand
ggaugccgauggccucaua

SEQ ID NO: 870744 - RNA, 19 nt, Homo sapiens
  misc_RNA (1)...(19): siRNA sense strand
guagaugguuacaguaguu

SEQ ID NO: 870745 - RNA, 19 nt, Homo sapiens
  misc_RNA (1)...(19): siRNA sense strand
ggaacaacuucgaccauuc

SEQ ID NO: 870746 - RNA, 19 nt, Homo sapiens
  misc_RNA (1)...(19): siRNA sense strand
gcuauucaggcaucaauua

SEQ ID NO: 870747 - RNA, 19 nt, Homo sapiens
  misc_RNA (1)...(19): siRNA sense strand
caauguaacucgucaaagg

SEQ ID NO: 870748 - RNA, 19 nt, Homo sapiens
  misc_RNA (1)...(19): siRNA sense strand
cgagaaacauccagaaguc

SEQ ID NO: 870749 - RNA, 19 nt, Homo sapiens
  misc_RNA (1)...(19): siRNA sense strand
gaagucaguucuacauugc

SEQ ID NO: 870750 - RNA, 19 nt, Homo sapiens
  misc_RNA (1)...(19): siRNA sense strand
gaauuaaggccagaaguug

SEQ ID NO: 870751 - RNA, 19 nt, Homo sapiens
  misc_RNA (1)...(19): siRNA sense strand
aaucggaccuuuacaguca

SEQ ID NO: 870752 - RNA, 19 nt, Homo sapiens
  misc_RNA (1)...(19): siRNA sense strand
ugucuuagcugcuguucuu

SEQ ID NO: 870753 - RNA, 19 nt, Homo sapiens
  misc_RNA (1)...(19): siRNA sense strand
cuacauugcuuugaaacuu

SEQ ID NO: 870754 - RNA, 19 nt, Homo sapiens
  misc_RNA (1)...(19): siRNA sense strand
cagauugaauagcgaauug

SEQ ID NO: 870755 - RNA, 19 nt, Homo sapiens
  misc_RNA (1)...(19): siRNA sense strand
ugaaguauuugcugcauca

SEQ ID NO: 870756 - RNA, 19 nt, Homo sapiens
  misc_RNA (1)...(19): siRNA sense strand
uaccagagcaaccaaauuu

SEQ ID NO: 870757 - RNA, 19 nt, Homo sapiens
  misc_RNA (1)...(19): siRNA sense strand
ugacccaauuugauucuaa

SEQ ID NO: 870758 - RNA, 19 nt, Homo sapiens
  misc_RNA (1)...(19): siRNA sense strand
ggccagaaguugaugaaca

SEQ ID NO: 870759 - RNA, 19 nt, Homo sapiens
  misc_RNA (1)...(19): siRNA sense strand
ccucauaacucacacuagu

SEQ ID NO: 870760 - RNA, 19 nt, Homo sapiens
  misc_RNA (1)...(19): siRNA sense strand
gaacgucgccugauaacac

SEQ ID NO: 870761 - RNA, 19 nt, Homo sapiens
  misc_RNA (1)...(19): siRNA sense strand
ccaccaaccaguacucuuu

SEQ ID NO: 870762 - RNA, 19 nt, Homo sapiens
  misc_RNA (1)...(19): siRNA sense strand
accauucucucaccuauaa

SEQ ID NO: 870763 - RNA, 19 nt, Homo sapiens
  misc_RNA (1)...(19): siRNA sense strand
gagcagugggagacauuua

SEQ ID NO: 870764 - RNA, 19 nt, Homo sapiens
  misc_RNA (1)...(19): siRNA sense strand
gaauggcuaugauuuacca

SEQ ID NO: 870765 - RNA, 19 nt, Homo sapiens
  misc_RNA (1)...(19): siRNA sense strand
uaaagauggugcauugaca

SEQ ID NO: 870766 - RNA, 19 nt, Homo sapiens
  misc_RNA (1)...(19): siRNA sense strand
ugcccaaacugauugauuu

SEQ ID NO: 870767 - RNA, 19 nt, Homo sapiens
  misc_RNA (1)...(19): siRNA sense strand
gaucauacaaaucccacua

SEQ ID NO: 870768 - RNA, 19 nt, Homo sapiens
  misc_RNA (1)...(19): siRNA sense strand
gcaggaaauggaacuuaaa

SEQ ID NO: 870769 - RNA, 19 nt, Homo sapiens
  misc_RNA (1)...(19): siRNA sense strand
gaacaacuucgaccauucu

SEQ ID NO: 870770 - RNA, 19 nt, Homo sapiens
  misc_RNA (1)...(19): siRNA sense strand
ccagaucuguugggaaaga

SEQ ID NO: 870771 - RNA, 19 nt, Homo sapiens
  misc_RNA (1)...(19): siRNA sense strand
guucuacauugcuuugaaa

SEQ ID NO: 870772 - RNA, 19 nt, Homo sapiens
  misc_RNA (1)...(19): siRNA sense strand
ucagucaguuugaaguauu

SEQ ID NO: 870773 - RNA, 19 nt, Homo sapiens
  misc_RNA (1)...(19): siRNA sense strand
caacugccauugaaauucg

SEQ ID NO: 870774 - RNA, 19 nt, Homo sapiens
  misc_RNA (1)...(19): siRNA sense strand
gccaagauuuguugcuuca

SEQ ID NO: 870775 - RNA, 19 nt, Homo sapiens
  misc_RNA (1)...(19): siRNA sense strand
uggcagcgaucauacaaau

SEQ ID NO: 870776 - RNA, 19 nt, Homo sapiens
  misc_RNA (1)...(19): siRNA sense strand
caacuucuccacacacaug

SEQ ID NO: 870777 - RNA, 19 nt, Homo sapiens
  misc_RNA (1)...(19): siRNA sense strand
gugaaaccaucugaccuuu

SEQ ID NO: 870778 - RNA, 19 nt, Homo sapiens
  misc_RNA (1)...(19): siRNA sense strand
ggaaauggaacuuaaaaga

SEQ ID NO: 870779 - RNA, 19 nt, Homo sapiens
  misc_RNA (1)...(19): siRNA sense strand
gcaauccaguaguuaugau

SEQ ID NO: 870780 - RNA, 19 nt, Homo sapiens
  misc_RNA (1)...(19): siRNA sense strand
gaucugcagcuaaagaguu

SEQ ID NO: 870781 - RNA, 19 nt, Homo sapiens
  misc_RNA (1)...(19): siRNA sense strand
gccagaaguugaugaacau

SEQ ID NO: 870782 - RNA, 19 nt, Homo sapiens
  misc_RNA (1)...(19): siRNA sense strand
gcagauuucagucaguuug

SEQ ID NO: 870783 - RNA, 19 nt, Homo sapiens
  misc_RNA (1)...(19): siRNA sense strand
ccgauggccucauaacuca

SEQ ID NO: 870784 - RNA, 19 nt, Homo sapiens
  misc_RNA (1)...(19): siRNA sense strand
ccaguucccauucguauga

SEQ ID NO: 870785 - RNA, 19 nt, Homo sapiens
  misc_RNA (1)...(19): siRNA sense strand
cguaggcaauccaguaguu

SEQ ID NO: 870786 - RNA, 19 nt, Homo sapiens
  misc_RNA (1)...(19): siRNA sense strand
ugaauuaaggccagaaguu

SEQ ID NO: 870787 - RNA, 19 nt, Homo sapiens
  misc_RNA (1)...(19): siRNA sense strand
caucugaccuuuuagaaga

SEQ ID NO: 870788 - RNA, 19 nt, Homo sapiens
  misc_RNA (1)...(19): siRNA sense strand
ugcaggaaauggaacuuaa

SEQ ID NO: 870789 - RNA, 19 nt, Homo sapiens
  misc_RNA (1)...(19): siRNA sense strand
ggaagauucagcagauguu

SEQ ID NO: 870790 - RNA, 19 nt, Homo sapiens
  misc_RNA (1)...(19): siRNA sense strand
gaacucucagacuuugaua

SEQ ID NO: 870791 - RNA, 19 nt, Homo sapiens
  misc_RNA (1)...(19): siRNA sense strand
uaccucaccucagcagaua

SEQ ID NO: 870792 - RNA, 19 nt, Homo sapiens
  misc_RNA (1)...(19): siRNA sense strand
ggccacagcccucucauuc

SEQ ID NO: 870793 - RNA, 19 nt, Homo sapiens
  misc_RNA (1)...(19): siRNA sense strand
agacauggccugagcugaa

SEQ ID NO: 870794 - RNA, 19 nt, Homo sapiens
  misc_RNA (1)...(19): siRNA sense strand
gaagcacaaucagguucuu

SEQ ID NO: 870795 - RNA, 19 nt, Homo sapiens
  misc_RNA (1)...(19): siRNA sense strand
cgaccauucucucaccuau

SEQ ID NO: 870796 - RNA, 19 nt, Homo sapiens
  misc_RNA (1)...(19): siRNA sense strand
cauugacacuggaugaguu

SEQ ID NO: 870797 - RNA, 19 nt, Homo sapiens
  misc_RNA (1)...(19): siRNA sense strand
uccaggaucugcagcuaaa

SEQ ID NO: 870798 - RNA, 19 nt, Homo sapiens
  misc_RNA (1)...(19): siRNA sense strand
gucguauucugguguaauu

SEQ ID NO: 870799 - RNA, 19 nt, Homo sapiens
  misc_RNA (1)...(19): siRNA sense strand
cgacgaacaagaugaugaa

SEQ ID NO: 870800 - RNA, 19 nt, Homo sapiens
  misc_RNA (1)...(19): siRNA sense strand
cgucaaaggucucauucag

SEQ ID NO: 870801 - RNA, 19 nt, Homo sapiens
  misc_RNA (1)...(19): siRNA sense strand
aaaucccacuagcccauua

SEQ ID NO: 870802 - RNA, 19 nt, Homo sapiens
  misc_RNA (1)...(19): siRNA sense strand
ggaccuuccucugccaaga

SEQ ID NO: 870803 - RNA, 19 nt, Homo sapiens
  misc_RNA (1)...(19): siRNA sense strand
gacauggccugagcugaau

SEQ ID NO: 870804 - RNA, 19 nt, Homo sapiens
  misc_RNA (1)...(19): siRNA sense strand
ugauugauuuggaagauuc

SEQ ID NO: 870805 - RNA, 19 nt, Homo sapiens
  misc_RNA (1)...(19): siRNA sense strand
gaugaacaaagacaguauu

SEQ ID NO: 870806 - RNA, 19 nt, Homo sapiens
  misc_RNA (1)...(19): siRNA sense strand
gcaguguggucagggcauu

SEQ ID NO: 870807 - RNA, 19 nt, Homo sapiens
  misc_RNA (1)...(19): siRNA sense strand
agaaguugaugaacauaca

SEQ ID NO: 870808 - RNA, 19 nt, Homo sapiens
  misc_RNA (1)...(19): siRNA sense strand
cagaacagaucgggagcaa

SEQ ID NO: 870809 - RNA, 19 nt, Homo sapiens
  misc_RNA (1)...(19): siRNA sense strand
ugaaauucgcuucugguaa

SEQ ID NO: 870810 - RNA, 19 nt, Homo sapiens
  misc_RNA (1)...(19): siRNA sense strand
ccaagcaagucaccaucga

SEQ ID NO: 870811 - RNA, 19 nt, Homo sapiens
  misc_RNA (1)...(19): siRNA sense strand
aaucaagggucguauucug

SEQ ID NO: 870812 - RNA, 19 nt, Homo sapiens
  misc_RNA (1)...(19): siRNA sense strand
uggaacaacuucgaccauu

SEQ ID NO: 870813 - RNA, 19 nt, Homo sapiens
  misc_RNA (1)...(19): siRNA sense strand
gaacuggcagcgaucauac

SEQ ID NO: 870814 - RNA, 19 nt, Homo sapiens
  misc_RNA (1)...(19): siRNA sense strand
caggugagguagguuauuc

SEQ ID NO: 870815 - RNA, 19 nt, Homo sapiens
  misc_RNA (1)...(19): siRNA sense strand
aguacgaacuguagcauca

SEQ ID NO: 870816 - RNA, 19 nt, Homo sapiens
  misc_RNA (1)...(19): siRNA sense strand
guucuugcaucacaaccuu

SEQ ID NO: 870817 - RNA, 19 nt, Homo sapiens
  misc_RNA (1)...(19): siRNA sense strand
gcaaguucucuucgaguug

SEQ ID NO: 870818 - RNA, 19 nt, Homo sapiens
  misc_RNA (1)...(19): siRNA sense strand
ccacaugcaggaaauggaa

SEQ ID NO: 870819 - RNA, 19 nt, Homo sapiens
  misc_RNA (1)...(19): siRNA sense strand
acaggaaucucgccaugca

SEQ ID NO: 870820 - RNA, 19 nt, Homo sapiens
  misc_RNA (1)...(19): siRNA sense strand
uaacagaugaacaaagaca

SEQ ID NO: 870821 - RNA, 19 nt, Homo sapiens
  misc_RNA (1)...(19): siRNA sense strand
guaggcaauccaguaguua

SEQ ID NO: 870822 - RNA, 19 nt, Homo sapiens
  misc_RNA (1)...(19): siRNA sense strand
cagucaguuugaaguauuu

SEQ ID NO: 870823 - RNA, 19 nt, Homo sapiens
  misc_RNA (1)...(19): siRNA sense strand
aaaacuuccugaaagcuua

SEQ ID NO: 870824 - RNA, 19 nt, Homo sapiens
  misc_RNA (1)...(19): siRNA sense strand
ggcuaugauuuaccagaaa

SEQ ID NO: 870825 - RNA, 19 nt, Homo sapiens
  misc_RNA (1)...(19): siRNA sense strand
ugaacuuucucauauuugg

SEQ ID NO: 870826 - RNA, 19 nt, Homo sapiens
  misc_RNA (1)...(19): siRNA sense strand
ucguaugacuccaagcaaa

SEQ ID NO: 870827 - RNA, 19 nt, Homo sapiens
  misc_RNA (1)...(19): siRNA sense strand
uacauugcuuugaaacuug

SEQ ID NO: 870828 - RNA, 19 nt, Homo sapiens
  misc_RNA (1)...(19): siRNA sense strand
gaaagcuauucaggcauca

SEQ ID NO: 870829 - RNA, 19 nt, Homo sapiens
  misc_RNA (1)...(19): siRNA sense strand
gugaaauucgcuucuggua

SEQ ID NO: 870830 - RNA, 19 nt, Homo sapiens
  misc_RNA (1)...(19): siRNA sense strand
ggacacuucuggcagcuuu

SEQ ID NO: 870831 - RNA, 19 nt, Homo sapiens
  misc_RNA (1)...(19): siRNA sense strand
ugaccaaacuucagaacaa

SEQ ID NO: 870832 - RNA, 19 nt, Homo sapiens
  misc_RNA (1)...(19): siRNA sense strand
gccaaggccucuucuuuga

SEQ ID NO: 870833 - RNA, 19 nt, Homo sapiens
  misc_RNA (1)...(19): siRNA sense strand
gaaccaauuccucuccuuu

SEQ ID NO: 870834 - RNA, 19 nt, Homo sapiens
  misc_RNA (1)...(19): siRNA sense strand
ggacgaguaugagaaguuc

SEQ ID NO: 870835 - RNA, 19 nt, Homo sapiens
  misc_RNA (1)...(19): siRNA sense strand
uaagaagaauggauuguac

SEQ ID NO: 870836 - RNA, 19 nt, Homo sapiens
  misc_RNA (1)...(19): siRNA sense strand
gagcaagcaggcuaaguuu

SEQ ID NO: 870837 - RNA, 19 nt, Homo sapiens
  misc_RNA (1)...(19): siRNA sense strand
cagcaggacuuccagaaca

SEQ ID NO: 870838 - RNA, 19 nt, Homo sapiens
  misc_RNA (1)...(19): siRNA sense strand
gcgccaaggccucuucuuu

SEQ ID NO: 870839 - RNA, 19 nt, Homo sapiens
  misc_RNA (1)...(19): siRNA sense strand
caaggccucuucuuugaca

SEQ ID NO: 870840 - RNA, 19 nt, Homo sapiens
  misc_RNA (1)...(19): siRNA sense strand
gaccaaacuucagaacaau

SEQ ID NO: 870841 - RNA, 19 nt, Homo sapiens
  misc_RNA (1)...(19): siRNA sense strand
gcugguggguguuccauca

SEQ ID NO: 870842 - RNA, 19 nt, Homo sapiens
  misc_RNA (1)...(19): siRNA sense strand
uggaggagcugaccaaacu

SEQ ID NO: 870843 - RNA, 19 nt, Homo sapiens
  misc_RNA (1)...(19): siRNA sense strand
gagagcauccucaucaaca

SEQ ID NO: 870844 - RNA, 19 nt, Homo sapiens
  misc_RNA (1)...(19): siRNA sense strand
ugacauggaggccuauuug

SEQ ID NO: 870845 - RNA, 19 nt, Homo sapiens
  misc_RNA (1)...(19): siRNA sense strand
cacaggagcuggagaacca

SEQ ID NO: 870846 - RNA, 19 nt, Homo sapiens
  misc_RNA (1)...(19): siRNA sense strand
ccaaacuucagaacaauug

SEQ ID NO: 870847 - RNA, 19 nt, Homo sapiens
  misc_RNA (1)...(19): siRNA sense strand
gggagagcauccucaucaa

SEQ ID NO: 870848 - RNA, 19 nt, Homo sapiens
  misc_RNA (1)...(19): siRNA sense strand
caacggcucccggaucaaa

SEQ ID NO: 870849 - RNA, 19 nt, Homo sapiens
  misc_RNA (1)...(19): siRNA sense strand
ggucucauguaccagaaau

SEQ ID NO: 870850 - RNA, 19 nt, Homo sapiens
  misc_RNA (1)...(19): siRNA sense strand
ucaccuuccugcugccuuu

SEQ ID NO: 870851 - RNA, 19 nt, Homo sapiens
  misc_RNA (1)...(19): siRNA sense strand
cuaagaagaauggauugua

SEQ ID NO: 870852 - RNA, 19 nt, Homo sapiens
  misc_RNA (1)...(19): siRNA sense strand
ugacagaugcugccuucaa

SEQ ID NO: 870853 - RNA, 19 nt, Homo sapiens
  misc_RNA (1)...(19): siRNA sense strand
ccuauuugccuaagaagaa

SEQ ID NO: 870854 - RNA, 19 nt, Homo sapiens
  misc_RNA (1)...(19): siRNA sense strand
ugagcaagcaggcuaaguu

SEQ ID NO: 870855 - RNA, 19 nt, Homo sapiens
  misc_RNA (1)...(19): siRNA sense strand
gacagaugcugccuucaac

SEQ ID NO: 870856 - RNA, 19 nt, Homo sapiens
  misc_RNA (1)...(19): siRNA sense strand
uggagaaccagaugaaaga

SEQ ID NO: 870857 - RNA, 19 nt, Homo sapiens
  misc_RNA (1)...(19): siRNA sense strand
gguggguguuccaucacua

SEQ ID NO: 870858 - RNA, 19 nt, Homo sapiens
  misc_RNA (1)...(19): siRNA sense strand
aacaacggcucccggauca

SEQ ID NO: 870859 - RNA, 19 nt, Homo sapiens
  misc_RNA (1)...(19): siRNA sense strand
ccuacaaggacgaguauga

SEQ ID NO: 870860 - RNA, 19 nt, Homo sapiens
  misc_RNA (1)...(19): siRNA sense strand
ugcaguuucuccaguacua

SEQ ID NO: 870861 - RNA, 19 nt, Homo sapiens
  misc_RNA (1)...(19): siRNA sense strand
gcccgacggucucauguac

SEQ ID NO: 870862 - RNA, 19 nt, Homo sapiens
  misc_RNA (1)...(19): siRNA sense strand
cgggagagcauccucauca

SEQ ID NO: 870863 - RNA, 19 nt, Homo sapiens
  misc_RNA (1)...(19): siRNA sense strand
cgccaaggccucuucuuug

SEQ ID NO: 870864 - RNA, 19 nt, Homo sapiens
  misc_RNA (1)...(19): siRNA sense strand
gaggagcugaccaaacuuc

SEQ ID NO: 870865 - RNA, 19 nt, Homo sapiens
  misc_RNA (1)...(19): siRNA sense strand
ggacugggaggaucuacag

SEQ ID NO: 870866 - RNA, 19 nt, Homo sapiens
  misc_RNA (1)...(19): siRNA sense strand
acaaggacgaguaugagaa

SEQ ID NO: 870867 - RNA, 19 nt, Homo sapiens
  misc_RNA (1)...(19): siRNA sense strand
caaggacgaguaugagaag

SEQ ID NO: 870868 - RNA, 19 nt, Homo sapiens
  misc_RNA (1)...(19): siRNA sense strand
gugcuuaugugcggcuuuc

SEQ ID NO: 870869 - RNA, 19 nt, Homo sapiens
  misc_RNA (1)...(19): siRNA sense strand
ggagacccaucggcucuac

SEQ ID NO: 870870 - RNA, 19 nt, Homo sapiens
  misc_RNA (1)...(19): siRNA sense strand
augagaaguucaagcucua

SEQ ID NO: 870871 - RNA, 19 nt, Homo sapiens
  misc_RNA (1)...(19): siRNA sense strand
cagaaauuccggaaccaau

SEQ ID NO: 870872 - RNA, 19 nt, Homo sapiens
  misc_RNA (1)...(19): siRNA sense strand
agagcauccucaucaacaa

SEQ ID NO: 870873 - RNA, 19 nt, Homo sapiens
  misc_RNA (1)...(19): siRNA sense strand
cagaugcugccuucaacuu

SEQ ID NO: 870874 - RNA, 19 nt, Homo sapiens
  misc_RNA (1)...(19): siRNA sense strand
ccagagcuucgugcaguuu

SEQ ID NO: 870875 - RNA, 19 nt, Homo sapiens
  misc_RNA (1)...(19): siRNA sense strand
gcaccacaaguuucacagu

SEQ ID NO: 870876 - RNA, 19 nt, Homo sapiens
  misc_RNA (1)...(19): siRNA sense strand
ucgugcaguuucuccagua

SEQ ID NO: 870877 - RNA, 19 nt, Homo sapiens
  misc_RNA (1)...(19): siRNA sense strand
ggagagcauccucaucaac

SEQ ID NO: 870878 - RNA, 19 nt, Homo sapiens
  misc_RNA (1)...(19): siRNA sense strand
ccaucacgcggcagaagaa

SEQ ID NO: 870879 - RNA, 19 nt, Homo sapiens
  misc_RNA (1)...(19): siRNA sense strand
gggugucacuggccuguua

SEQ ID NO: 870880 - RNA, 19 nt, Homo sapiens
  misc_RNA (1)...(19): siRNA sense strand
cuacguggcuuagugguaa

SEQ ID NO: 870881 - RNA, 19 nt, Homo sapiens
  misc_RNA (1)...(19): siRNA sense strand
gcuccuacguggcuuagug

SEQ ID NO: 870882 - RNA, 19 nt, Homo sapiens
  misc_RNA (1)...(19): siRNA sense strand
cacaugcugucgucucuca

SEQ ID NO: 870883 - RNA, 19 nt, Homo sapiens
  misc_RNA (1)...(19): siRNA sense strand
acagacccgugcccucuug

SEQ ID NO: 870884 - RNA, 19 nt, Homo sapiens
  misc_RNA (1)...(19): siRNA sense strand
gaccucuccugagcuccua

SEQ ID NO: 870885 - RNA, 19 nt, Homo sapiens
  misc_RNA (1)...(19): siRNA sense strand
gugguaagugucccaucua

SEQ ID NO: 870886 - RNA, 19 nt, Homo sapiens
  misc_RNA (1)...(19): siRNA sense strand
gcacuggaaugggguguca

SEQ ID NO: 870887 - RNA, 19 nt, Homo sapiens
  misc_RNA (1)...(19): siRNA sense strand
gcagaacccuggaaaguuu

SEQ ID NO: 870888 - RNA, 19 nt, Homo sapiens
  misc_RNA (1)...(19): siRNA sense strand
acaaauggauggccaagaa

SEQ ID NO: 870889 - RNA, 19 nt, Homo sapiens
  misc_RNA (1)...(19): siRNA sense strand
ugacagagcgccagauuga

SEQ ID NO: 870890 - RNA, 19 nt, Homo sapiens
  misc_RNA (1)...(19): siRNA sense strand
gaagagcaacggagagaau

SEQ ID NO: 870891 - RNA, 19 nt, Homo sapiens
  misc_RNA (1)...(19): siRNA sense strand
ggagagggcagcuggagaa

SEQ ID NO: 870892 - RNA, 19 nt, Homo sapiens
  misc_RNA (1)...(19): siRNA sense strand
gaggcaaggugaaguuaca

SEQ ID NO: 870893 - RNA, 19 nt, Homo sapiens
  misc_RNA (1)...(19): siRNA sense strand
ccaaguggcuggacgugau

SEQ ID NO: 870894 - RNA, 19 nt, Homo sapiens
  misc_RNA (1)...(19): siRNA sense strand
ugaggacaccuacuuguaa

SEQ ID NO: 870895 - RNA, 19 nt, Homo sapiens
  misc_RNA (1)...(19): siRNA sense strand
ggacauguucuucugugaa

SEQ ID NO: 870896 - RNA, 19 nt, Homo sapiens
  misc_RNA (1)...(19): siRNA sense strand
gagcagcggaaacagauga

SEQ ID NO: 870897 - RNA, 19 nt, Homo sapiens
  misc_RNA (1)...(19): siRNA sense strand
ccaaguggcuggacaugcu

SEQ ID NO: 870898 - RNA, 19 nt, Homo sapiens
  misc_RNA (1)...(19): siRNA sense strand
gacccgcuccucuauauga

SEQ ID NO: 870899 - RNA, 19 nt, Homo sapiens
  misc_RNA (1)...(19): siRNA sense strand
gugaggacaccuacuugua

SEQ ID NO: 870900 - RNA, 19 nt, Homo sapiens
  misc_RNA (1)...(19): siRNA sense strand
caacaacugggacaaaugg

SEQ ID NO: 870901 - RNA, 19 nt, Homo sapiens
  misc_RNA (1)...(19): siRNA sense strand
gaucgacccgcuccucuau

SEQ ID NO: 870902 - RNA, 19 nt, Homo sapiens
  misc_RNA (1)...(19): siRNA sense strand
gggacauguucuucuguga

SEQ ID NO: 870903 - RNA, 19 nt, Homo sapiens
  misc_RNA (1)...(19): siRNA sense strand
gcccauugccgcugucuug

SEQ ID NO: 870904 - RNA, 19 nt, Homo sapiens
  misc_RNA (1)...(19): siRNA sense strand
ccaagcaggcccagaagga

SEQ ID NO: 870905 - RNA, 19 nt, Homo sapiens
  misc_RNA (1)...(19): siRNA sense strand
ucgacccgcuccucuauau

SEQ ID NO: 870906 - RNA, 19 nt, Homo sapiens
  misc_RNA (1)...(19): siRNA sense strand
gcucaacaacugggacaaa

SEQ ID NO: 870907 - RNA, 19 nt, Homo sapiens
  misc_RNA (1)...(19): siRNA sense strand
cagcagaacccuggaaagu

SEQ ID NO: 870908 - RNA, 19 nt, Homo sapiens
  misc_RNA (1)...(19): siRNA sense strand
gcgaagagcaacggagaga

SEQ ID NO: 870909 - RNA, 19 nt, Homo sapiens
  misc_RNA (1)...(19): siRNA sense strand
ggcuggacaugcucaacaa

SEQ ID NO: 870910 - RNA, 19 nt, Homo sapiens
  misc_RNA (1)...(19): siRNA sense strand
gaucaugcaggaggccuuu

SEQ ID NO: 870911 - RNA, 19 nt, Homo sapiens
  misc_RNA (1)...(19): siRNA sense strand
caccucagccgucagaaga

SEQ ID NO: 870912 - RNA, 19 nt, Homo sapiens
  misc_RNA (1)...(19): siRNA sense strand
cccauuccaugagauguuu

SEQ ID NO: 870913 - RNA, 19 nt, Homo sapiens
  misc_RNA (1)...(19): siRNA sense strand
ugacagaaugguucaugug

SEQ ID NO: 870914 - RNA, 19 nt, Homo sapiens
  misc_RNA (1)...(19): siRNA sense strand
gagugaggacaccuacuug

SEQ ID NO: 870915 - RNA, 19 nt, Homo sapiens
  misc_RNA (1)...(19): siRNA sense strand
ugacgucccaagagaguga

SEQ ID NO: 870916 - RNA, 19 nt, Homo sapiens
  misc_RNA (1)...(19): siRNA sense strand
gcaguucccauuccaugag

SEQ ID NO: 870917 - RNA, 19 nt, Homo sapiens
  misc_RNA (1)...(19): siRNA sense strand
cgacaaguucggcuucauc

SEQ ID NO: 870918 - RNA, 19 nt, Homo sapiens
  misc_RNA (1)...(19): siRNA sense strand
agaaggagcagcggaaaca

SEQ ID NO: 870919 - RNA, 19 nt, Homo sapiens
  misc_RNA (1)...(19): siRNA sense strand
gcaccggcaguucccauuc

SEQ ID NO: 870920 - RNA, 19 nt, Homo sapiens
  misc_RNA (1)...(19): siRNA sense strand
agagugaggacaccuacuu

SEQ ID NO: 870921 - RNA, 19 nt, Homo sapiens
  misc_RNA (1)...(19): siRNA sense strand
uaucuuggaugcagaaccu

SEQ ID NO: 870922 - RNA, 19 nt, Homo sapiens
  misc_RNA (1)...(19): siRNA sense strand
uugacgagcuggacauguc

SEQ ID NO: 870923 - RNA, 19 nt, Homo sapiens
  misc_RNA (1)...(19): siRNA sense strand
ggacucagccccucaggau

SEQ ID NO: 870924 - RNA, 19 nt, Homo sapiens
  misc_RNA (1)...(19): siRNA sense strand
gcuccucuauaugacagaa

SEQ ID NO: 870925 - RNA, 19 nt, Homo sapiens
  misc_RNA (1)...(19): siRNA sense strand
gcaccucagccgucagaag

SEQ ID NO: 870926 - RNA, 19 nt, Homo sapiens
  misc_RNA (1)...(19): siRNA sense strand
caaguggcuggacgugauu

SEQ ID NO: 870927 - RNA, 19 nt, Homo sapiens
  misc_RNA (1)...(19): siRNA sense strand
uggacaugcucaacaacug

SEQ ID NO: 870928 - RNA, 19 nt, Homo sapiens
  misc_RNA (1)...(19): siRNA sense strand
cuacaaccuucaccaucca

SEQ ID NO: 870929 - RNA, 19 nt, Homo sapiens
  misc_RNA (1)...(19): siRNA sense strand
ucaacaacugggacaaaug

SEQ ID NO: 870930 - RNA, 19 nt, Homo sapiens
  misc_RNA (1)...(19): siRNA sense strand
caggaggcaaggugaaguu

SEQ ID NO: 870931 - RNA, 19 nt, Homo sapiens
  misc_RNA (1)...(19): siRNA sense strand
cucaacaacugggacaaau

SEQ ID NO: 870932 - RNA, 19 nt, Homo sapiens
  misc_RNA (1)...(19): siRNA sense strand
cgugacagagcgccagauu

SEQ ID NO: 870933 - RNA, 19 nt, Homo sapiens
  misc_RNA (1)...(19): siRNA sense strand
cacccaagcaggcccagaa

SEQ ID NO: 870934 - RNA, 19 nt, Homo sapiens
  misc_RNA (1)...(19): siRNA sense strand
gaagaacccuagaaguuua

SEQ ID NO: 870935 - RNA, 19 nt, Homo sapiens
  misc_RNA (1)...(19): siRNA sense strand
gagaccaacuuuaugaaua

SEQ ID NO: 870936 - RNA, 19 nt, Homo sapiens
  misc_RNA (1)...(19): siRNA sense strand
gaccagggcuguguuauaa

SEQ ID NO: 870937 - RNA, 19 nt, Homo sapiens
  misc_RNA (1)...(19): siRNA sense strand
ggaaggaggcauugaauuu

SEQ ID NO: 870938 - RNA, 19 nt, Homo sapiens
  misc_RNA (1)...(19): siRNA sense strand
ccuagaaguuuaccaguua

SEQ ID NO: 870939 - RNA, 19 nt, Homo sapiens
  misc_RNA (1)...(19): siRNA sense strand
ugaauaaaguggacauuga

SEQ ID NO: 870940 - RNA, 19 nt, Homo sapiens
  misc_RNA (1)...(19): siRNA sense strand
ggaagaacccuagaaguuu

SEQ ID NO: 870941 - RNA, 19 nt, Homo sapiens
  misc_RNA (1)...(19): siRNA sense strand
caacugcacauccucauua

SEQ ID NO: 870942 - RNA, 19 nt, Homo sapiens
  misc_RNA (1)...(19): siRNA sense strand
gauuugugcugucaagaua

SEQ ID NO: 870943 - RNA, 19 nt, Homo sapiens
  misc_RNA (1)...(19): siRNA sense strand
uaccauagcuuuggaauga

SEQ ID NO: 870944 - RNA, 19 nt, Homo sapiens
  misc_RNA (1)...(19): siRNA sense strand
gaacaaccucuaaagauga

SEQ ID NO: 870945 - RNA, 19 nt, Homo sapiens
  misc_RNA (1)...(19): siRNA sense strand
gcaaguuucuacagaguga

SEQ ID NO: 870946 - RNA, 19 nt, Homo sapiens
  misc_RNA (1)...(19): siRNA sense strand
gggaaauacuccucagaaa

SEQ ID NO: 870947 - RNA, 19 nt, Homo sapiens
  misc_RNA (1)...(19): siRNA sense strand
guacaagggugauuacuac

SEQ ID NO: 870948 - RNA, 19 nt, Homo sapiens
  misc_RNA (1)...(19): siRNA sense strand
gguuugagcugccugguaa

SEQ ID NO: 870949 - RNA, 19 nt, Homo sapiens
  misc_RNA (1)...(19): siRNA sense strand
ggaaugacaaggaacuaua

SEQ ID NO: 870950 - RNA, 19 nt, Homo sapiens
  misc_RNA (1)...(19): siRNA sense strand
caggugauauguucuauug

SEQ ID NO: 870951 - RNA, 19 nt, Homo sapiens
  misc_RNA (1)...(19): siRNA sense strand
cauaugguuucuccuauaa

SEQ ID NO: 870952 - RNA, 19 nt, Homo sapiens
  misc_RNA (1)...(19): siRNA sense strand
ugaacaaccucuaaagaug

SEQ ID NO: 870953 - RNA, 19 nt, Homo sapiens
  misc_RNA (1)...(19): siRNA sense strand
ggaaggauaaguacaauca

SEQ ID NO: 870954 - RNA, 19 nt, Homo sapiens
  misc_RNA (1)...(19): siRNA sense strand
ggaccagggcuguguuaua

SEQ ID NO: 870955 - RNA, 19 nt, Homo sapiens
  misc_RNA (1)...(19): siRNA sense strand
gcaccgagaccaacuuuau

SEQ ID NO: 870956 - RNA, 19 nt, Homo sapiens
  misc_RNA (1)...(19): siRNA sense strand
ccagggcuguguuauaauu

SEQ ID NO: 870957 - RNA, 19 nt, Homo sapiens
  misc_RNA (1)...(19): siRNA sense strand
ccauaugguuucuccuaua

SEQ ID NO: 870958 - RNA, 19 nt, Homo sapiens
  misc_RNA (1)...(19): siRNA sense strand
gaauaaaguggacauugaa

SEQ ID NO: 870959 - RNA, 19 nt, Homo sapiens
  misc_RNA (1)...(19): siRNA sense strand
guagauuggagcaaauuua

SEQ ID NO: 870960 - RNA, 19 nt, Homo sapiens
  misc_RNA (1)...(19): siRNA sense strand
gauggaacagcauacaaua

SEQ ID NO: 870961 - RNA, 19 nt, Homo sapiens
  misc_RNA (1)...(19): siRNA sense strand
gagacaaccugaguccauu

SEQ ID NO: 870962 - RNA, 19 nt, Homo sapiens
  misc_RNA (1)...(19): siRNA sense strand
gagagaagauggcuuuuau

SEQ ID NO: 870963 - RNA, 19 nt, Homo sapiens
  misc_RNA (1)...(19): siRNA sense strand
gauuggagcaaauuuauug

SEQ ID NO: 870964 - RNA, 19 nt, Homo sapiens
  misc_RNA (1)...(19): siRNA sense strand
aaagguagauuggagcaaa

SEQ ID NO: 870965 - RNA, 19 nt, Homo sapiens
  misc_RNA (1)...(19): siRNA sense strand
gcaauuuucuccuaguuuu

SEQ ID NO: 870966 - RNA, 19 nt, Homo sapiens
  misc_RNA (1)...(19): siRNA sense strand
gggauucucugaucaaggu

SEQ ID NO: 870967 - RNA, 19 nt, Homo sapiens
  misc_RNA (1)...(19): siRNA sense strand
gagcaaguuucuacagagu

SEQ ID NO: 870968 - RNA, 19 nt, Homo sapiens
  misc_RNA (1)...(19): siRNA sense strand
guaauacgcgguuucaugu

SEQ ID NO: 870969 - RNA, 19 nt, Homo sapiens
  misc_RNA (1)...(19): siRNA sense strand
caaagggcacagugacaua

SEQ ID NO: 870970 - RNA, 19 nt, Homo sapiens
  misc_RNA (1)...(19): siRNA sense strand
gaaugacaaggaacuauau

SEQ ID NO: 870971 - RNA, 19 nt, Homo sapiens
  misc_RNA (1)...(19): siRNA sense strand
cuacagagugauacauaua

SEQ ID NO: 870972 - RNA, 19 nt, Homo sapiens
  misc_RNA (1)...(19): siRNA sense strand
gaaggaggcauugaauuuc

SEQ ID NO: 870973 - RNA, 19 nt, Homo sapiens
  misc_RNA (1)...(19): siRNA sense strand
uggaagaacccuagaaguu

SEQ ID NO: 870974 - RNA, 19 nt, Homo sapiens
  misc_RNA (1)...(19): siRNA sense strand
caaccagaaugaaagcaau

SEQ ID NO: 870975 - RNA, 19 nt, Homo sapiens
  misc_RNA (1)...(19): siRNA sense strand
gcauugaauuuccucagau

SEQ ID NO: 870976 - RNA, 19 nt, Homo sapiens
  misc_RNA (1)...(19): siRNA sense strand
gaacuccuuugggccauau

SEQ ID NO: 870977 - RNA, 19 nt, Homo sapiens
  misc_RNA (1)...(19): siRNA sense strand
auaagacacugaagguuug

SEQ ID NO: 870978 - RNA, 19 nt, Homo sapiens
  misc_RNA (1)...(19): siRNA sense strand
gguacaagggugauuacua

SEQ ID NO: 870979 - RNA, 19 nt, Homo sapiens
  misc_RNA (1)...(19): siRNA sense strand
aauaagacacugaagguuu

SEQ ID NO: 870980 - RNA, 19 nt, Homo sapiens
  misc_RNA (1)...(19): siRNA sense strand
gaaguuuaccaguuacaga

SEQ ID NO: 870981 - RNA, 19 nt, Homo sapiens
  misc_RNA (1)...(19): siRNA sense strand
gaaaccuucuuacuaccau

SEQ ID NO: 870982 - RNA, 19 nt, Homo sapiens
  misc_RNA (1)...(19): siRNA sense strand
ggcauugaauuuccucaga

SEQ ID NO: 870983 - RNA, 19 nt, Homo sapiens
  misc_RNA (1)...(19): siRNA sense strand
gauacuacagcaaaccuuu

SEQ ID NO: 870984 - RNA, 19 nt, Homo sapiens
  misc_RNA (1)...(19): siRNA sense strand
ggaacuccuuugggccaua

SEQ ID NO: 870985 - RNA, 19 nt, Homo sapiens
  misc_RNA (1)...(19): siRNA sense strand
ggauggaacagcauacaau

SEQ ID NO: 870986 - RNA, 19 nt, Homo sapiens
  misc_RNA (1)...(19): siRNA sense strand
cucaauggcucucuacuuc

SEQ ID NO: 870987 - RNA, 19 nt, Homo sapiens
  misc_RNA (1)...(19): siRNA sense strand
gaaaauugccacuucuaaa

SEQ ID NO: 870988 - RNA, 19 nt, Homo sapiens
  misc_RNA (1)...(19): siRNA sense strand
ggaaauacuccucagaaaa

SEQ ID NO: 870989 - RNA, 19 nt, Homo sapiens
  misc_RNA (1)...(19): siRNA sense strand
gaauaagacacugaagguu

SEQ ID NO: 870990 - RNA, 19 nt, Homo sapiens
  misc_RNA (1)...(19): siRNA sense strand
caauggcucucuacuucga

SEQ ID NO: 870991 - RNA, 19 nt, Homo sapiens
  misc_RNA (1)...(19): siRNA sense strand
ggugauauguucuauugcu

SEQ ID NO: 870992 - RNA, 19 nt, Homo sapiens
  misc_RNA (1)...(19): siRNA sense strand
agguugauguggugaauaa

SEQ ID NO: 870993 - RNA, 19 nt, Homo sapiens
  misc_RNA (1)...(19): siRNA sense strand
ggagacaaccugaguccau

SEQ ID NO: 870994 - RNA, 19 nt, Homo sapiens
  misc_RNA (1)...(19): siRNA sense strand
ggacauugaaacucuggaa

SEQ ID NO: 870995 - RNA, 19 nt, Homo sapiens
  misc_RNA (1)...(19): siRNA sense strand
gaucugcugcucucaugaa

SEQ ID NO: 870996 - RNA, 19 nt, Homo sapiens
  misc_RNA (1)...(19): siRNA sense strand
gaggaccagggcuguguua

SEQ ID NO: 870997 - RNA, 19 nt, Homo sapiens
  misc_RNA (1)...(19): siRNA sense strand
gaguccaggugauauguuc

SEQ ID NO: 870998 - RNA, 19 nt, Homo sapiens
  misc_RNA (1)...(19): siRNA sense strand
aaagguacaugggaaauac

SEQ ID NO: 870999 - RNA, 19 nt, Homo sapiens
  misc_RNA (1)...(19): siRNA sense strand
gccuuuaaaugucaguuug

SEQ ID NO: 871000 - RNA, 19 nt, Homo sapiens
  misc_RNA (1)...(19): siRNA sense strand
uugaucagguccauaauuc

SEQ ID NO: 871001 - RNA, 19 nt, Homo sapiens
  misc_RNA (1)...(19): siRNA sense strand
gauccaugcaagaauguuu

SEQ ID NO: 871002 - RNA, 19 nt, Homo sapiens
  misc_RNA (1)...(19): siRNA sense strand
cugaguccauuguccuaua

SEQ ID NO: 871003 - RNA, 19 nt, Homo sapiens
  misc_RNA (1)...(19): siRNA sense strand
gauauguucuauugcuucu

SEQ ID NO: 871004 - RNA, 19 nt, Homo sapiens
  misc_RNA (1)...(19): siRNA sense strand
gccauaugguuucuccuau

SEQ ID NO: 871005 - RNA, 19 nt, Homo sapiens
  misc_RNA (1)...(19): siRNA sense strand
ugacugacgauacuaaugu

SEQ ID NO: 871006 - RNA, 19 nt, Homo sapiens
  misc_RNA (1)...(19): siRNA sense strand
agggaaaccuucuuacuac

SEQ ID NO: 871007 - RNA, 19 nt, Homo sapiens
  misc_RNA (1)...(19): siRNA sense strand
guuccaugguaccuucaua

SEQ ID NO: 871008 - RNA, 19 nt, Homo sapiens
  misc_RNA (1)...(19): siRNA sense strand
agagguaccugugcagaug

SEQ ID NO: 871009 - RNA, 19 nt, Homo sapiens
  misc_RNA (1)...(19): siRNA sense strand
ggcuguggcuuucggcauu

SEQ ID NO: 871010 - RNA, 19 nt, Homo sapiens
  misc_RNA (1)...(19): siRNA sense strand
uuccucagaucuacuauga

SEQ ID NO: 871011 - RNA, 19 nt, Homo sapiens
  misc_RNA (1)...(19): siRNA sense strand
gcuuuggaaugacaaggaa

SEQ ID NO: 871012 - RNA, 19 nt, Homo sapiens
  misc_RNA (1)...(19): siRNA sense strand
ucaacuaugugcgguacaa

SEQ ID NO: 871013 - RNA, 19 nt, Homo sapiens
  misc_RNA (1)...(19): siRNA sense strand
caagguugauguggugaau

SEQ ID NO: 871014 - RNA, 19 nt, Homo sapiens
  misc_RNA (1)...(19): siRNA sense strand
cuacuaugaucgauucagu

SEQ ID NO: 871015 - RNA, 19 nt, Homo sapiens
  misc_RNA (1)...(19): siRNA sense strand
ggaaaauugccacuucuaa

SEQ ID NO: 871016 - RNA, 19 nt, Homo sapiens
  misc_RNA (1)...(19): siRNA sense strand
gguuucuccuauaagguua

SEQ ID NO: 871017 - RNA, 19 nt, Homo sapiens
  misc_RNA (1)...(19): siRNA sense strand
ggccauaugguuucuccua

SEQ ID NO: 871018 - RNA, 19 nt, Homo sapiens
  misc_RNA (1)...(19): siRNA sense strand
gcaacugcacauccucauu

SEQ ID NO: 871019 - RNA, 19 nt, Homo sapiens
  misc_RNA (1)...(19): siRNA sense strand
gcucaauggcucucuacuu

SEQ ID NO: 871020 - RNA, 19 nt, Homo sapiens
  misc_RNA (1)...(19): siRNA sense strand
gcaaagggcacagugacau

SEQ ID NO: 871021 - RNA, 19 nt, Homo sapiens
  misc_RNA (1)...(19): siRNA sense strand
aaaggaaggaggcauugaa

SEQ ID NO: 871022 - RNA, 19 nt, Homo sapiens
  misc_RNA (1)...(19): siRNA sense strand
cgauacuaaugucaacuau

SEQ ID NO: 871023 - RNA, 19 nt, Homo sapiens
  misc_RNA (1)...(19): siRNA sense strand
gaauggagcaacugcacau

SEQ ID NO: 871024 - RNA, 19 nt, Homo sapiens
  misc_RNA (1)...(19): siRNA sense strand
ugacauacaggagcaaguu

SEQ ID NO: 871025 - RNA, 19 nt, Homo sapiens
  misc_RNA (1)...(19): siRNA sense strand
ggagagaagauggcuuuua

SEQ ID NO: 871026 - RNA, 19 nt, Homo sapiens
  misc_RNA (1)...(19): siRNA sense strand
ugaauaagacacugaaggu

SEQ ID NO: 871027 - RNA, 19 nt, Homo sapiens
  misc_RNA (1)...(19): siRNA sense strand
ccggauccaugcaagaaug

SEQ ID NO: 871028 - RNA, 19 nt, Homo sapiens
  misc_RNA (1)...(19): siRNA sense strand
uaauugauuugugcuguca

SEQ ID NO: 871029 - RNA, 19 nt, Homo sapiens
  misc_RNA (1)...(19): siRNA sense strand
ucuacagagugauacauau

SEQ ID NO: 871030 - RNA, 19 nt, Homo sapiens
  misc_RNA (1)...(19): siRNA sense strand
uguaauacgcgguuucaug

SEQ ID NO: 871031 - RNA, 19 nt, Homo sapiens
  misc_RNA (1)...(19): siRNA sense strand
uaaagaugaaccuguggaa

SEQ ID NO: 871032 - RNA, 19 nt, Homo sapiens
  misc_RNA (1)...(19): siRNA sense strand
uaaaguggacauugaaacu

SEQ ID NO: 871033 - RNA, 19 nt, Homo sapiens
  misc_RNA (1)...(19): siRNA sense strand
aaaccgaauugugaucuca

SEQ ID NO: 871034 - RNA, 19 nt, Homo sapiens
  misc_RNA (1)...(19): siRNA sense strand
gaacauguaugaacugcau

SEQ ID NO: 871035 - RNA, 19 nt, Homo sapiens
  misc_RNA (1)...(19): siRNA sense strand
gaguugaccugaucaugaa

SEQ ID NO: 871036 - RNA, 19 nt, Homo sapiens
  misc_RNA (1)...(19): siRNA sense strand
caagugaccugcagcaagu

SEQ ID NO: 871037 - RNA, 19 nt, Homo sapiens
  misc_RNA (1)...(19): siRNA sense strand
ggaauuugcuaagaacaug

SEQ ID NO: 871038 - RNA, 19 nt, Homo sapiens
  misc_RNA (1)...(19): siRNA sense strand
cagaugaagugguuguuga

SEQ ID NO: 871039 - RNA, 19 nt, Homo sapiens
  misc_RNA (1)...(19): siRNA sense strand
ggacacaagucuccagaac

SEQ ID NO: 871040 - RNA, 19 nt, Homo sapiens
  misc_RNA (1)...(19): siRNA sense strand
caagggugcugcccgaguu

SEQ ID NO: 871041 - RNA, 19 nt, Homo sapiens
  misc_RNA (1)...(19): siRNA sense strand
ugagucagaugaagugguu

SEQ ID NO: 871042 - RNA, 19 nt, Homo sapiens
  misc_RNA (1)...(19): siRNA sense strand
gagcauaguguugcaauau

SEQ ID NO: 871043 - RNA, 19 nt, Homo sapiens
  misc_RNA (1)...(19): siRNA sense strand
ggaggucaccaauugcuuu

SEQ ID NO: 871044 - RNA, 19 nt, Homo sapiens
  misc_RNA (1)...(19): siRNA sense strand
ugaagugguuguugacaug

SEQ ID NO: 871045 - RNA, 19 nt, Homo sapiens
  misc_RNA (1)...(19): siRNA sense strand
gacauggaauuugcuaaga

SEQ ID NO: 871046 - RNA, 19 nt, Homo sapiens
  misc_RNA (1)...(19): siRNA sense strand
cuaagaacauguaugaacu

SEQ ID NO: 871047 - RNA, 19 nt, Homo sapiens
  misc_RNA (1)...(19): siRNA sense strand
gcuaagaacauguaugaac

SEQ ID NO: 871048 - RNA, 19 nt, Homo sapiens
  misc_RNA (1)...(19): siRNA sense strand
acauggaauuugcuaagaa

SEQ ID NO: 871049 - RNA, 19 nt, Homo sapiens
  misc_RNA (1)...(19): siRNA sense strand
ugagcauaguguugcaaua

SEQ ID NO: 871050 - RNA, 19 nt, Homo sapiens
  misc_RNA (1)...(19): siRNA sense strand
gaucaugaagaccugcuuu

SEQ ID NO: 871051 - RNA, 19 nt, Homo sapiens
  misc_RNA (1)...(19): siRNA sense strand
acucugugcugauccauga

SEQ ID NO: 871052 - RNA, 19 nt, Homo sapiens
  misc_RNA (1)...(19): siRNA sense strand
cuguggaggucaccaauug

SEQ ID NO: 871053 - RNA, 19 nt, Homo sapiens
  misc_RNA (1)...(19): siRNA sense strand
agaguugaccugaucauga

SEQ ID NO: 871054 - RNA, 19 nt, Homo sapiens
  misc_RNA (1)...(19): siRNA sense strand
ugacagugaaauaugcaua

SEQ ID NO: 871055 - RNA, 19 nt, Homo sapiens
  misc_RNA (1)...(19): siRNA sense strand
aagccuaugucagcacuuu

SEQ ID NO: 871056 - RNA, 19 nt, Homo sapiens
  misc_RNA (1)...(19): siRNA sense strand
uugcuaagaacauguauga

SEQ ID NO: 871057 - RNA, 19 nt, Homo sapiens
  misc_RNA (1)...(19): siRNA sense strand
ggaggaccgugggaguguu

SEQ ID NO: 871058 - RNA, 19 nt, Homo sapiens
  misc_RNA (1)...(19): siRNA sense strand
caccuuugacagugaaaua

SEQ ID NO: 871059 - RNA, 19 nt, Homo sapiens
  misc_RNA (1)...(19): siRNA sense strand
ugggaacugucaacaaaca

SEQ ID NO: 871060 - RNA, 19 nt, Homo sapiens
  misc_RNA (1)...(19): siRNA sense strand
ugguuggacucucaaguga

SEQ ID NO: 871061 - RNA, 19 nt, Homo sapiens
  misc_RNA (1)...(19): siRNA sense strand
gccuaugucagcacuuuaa

SEQ ID NO: 871062 - RNA, 19 nt, Homo sapiens
  misc_RNA (1)...(19): siRNA sense strand
caaugagucagaugaagug

SEQ ID NO: 871063 - RNA, 19 nt, Homo sapiens
  misc_RNA (1)...(19): siRNA sense strand
cauacaaugagucagauga

SEQ ID NO: 871064 - RNA, 19 nt, Homo sapiens
  misc_RNA (1)...(19): siRNA sense strand
cuccagaacggccauauga

SEQ ID NO: 871065 - RNA, 19 nt, Homo sapiens
  misc_RNA (1)...(19): siRNA sense strand
gcugauccaugaguacuac

SEQ ID NO: 871066 - RNA, 19 nt, Homo sapiens
  misc_RNA (1)...(19): siRNA sense strand
agucacagauugcccucaa

SEQ ID NO: 871067 - RNA, 19 nt, Homo sapiens
  misc_RNA (1)...(19): siRNA sense strand
cauggaauuugcuaagaac

SEQ ID NO: 871068 - RNA, 19 nt, Homo sapiens
  misc_RNA (1)...(19): siRNA sense strand
ugacauggaauuugcuaag

SEQ ID NO: 871069 - RNA, 19 nt, Homo sapiens
  misc_RNA (1)...(19): siRNA sense strand
gacccuggccucagcacaa

SEQ ID NO: 871070 - RNA, 19 nt, Homo sapiens
  misc_RNA (1)...(19): siRNA sense strand
gagcaucaaagccuauguc

SEQ ID NO: 871071 - RNA, 19 nt, Homo sapiens
  misc_RNA (1)...(19): siRNA sense strand
uaugucagcacuuuaaugg

SEQ ID NO: 871072 - RNA, 19 nt, Homo sapiens
  misc_RNA (1)...(19): siRNA sense strand
acaauacaaucaggaaggu

SEQ ID NO: 871073 - RNA, 19 nt, Homo sapiens
  misc_RNA (1)...(19): siRNA sense strand
ccucacacagucacagauu

SEQ ID NO: 871074 - RNA, 19 nt, Homo sapiens
  misc_RNA (1)...(19): siRNA sense strand
uaagaacauguaugaacug

SEQ ID NO: 871075 - RNA, 19 nt, Homo sapiens
  misc_RNA (1)...(19): siRNA sense strand
ggccauaugagcaucaaag

SEQ ID NO: 871076 - RNA, 19 nt, Homo sapiens
  misc_RNA (1)...(19): siRNA sense strand
ggucaccaauugcuuuuca

SEQ ID NO: 871077 - RNA, 19 nt, Homo sapiens
  misc_RNA (1)...(19): siRNA sense strand
ccgaugacuuugagaccau

SEQ ID NO: 871078 - RNA, 19 nt, Homo sapiens
  misc_RNA (1)...(19): siRNA sense strand
gcuaugagagacgcaacaa

SEQ ID NO: 871079 - RNA, 19 nt, Homo sapiens
  misc_RNA (1)...(19): siRNA sense strand
gugguuggacucucaagug

SEQ ID NO: 871080 - RNA, 19 nt, Homo sapiens
  misc_RNA (1)...(19): siRNA sense strand
acaaugagucagaugaagu

SEQ ID NO: 871081 - RNA, 19 nt, Homo sapiens
  misc_RNA (1)...(19): siRNA sense strand
cagugaaauaugcauacua

SEQ ID NO: 871082 - RNA, 19 nt, Homo sapiens
  misc_RNA (1)...(19): siRNA sense strand
gaauuugcuaagaacaugu

SEQ ID NO: 871083 - RNA, 19 nt, Homo sapiens
  misc_RNA (1)...(19): siRNA sense strand
guucaaagcuggacucaug

SEQ ID NO: 871084 - RNA, 19 nt, Homo sapiens
  misc_RNA (1)...(19): siRNA sense strand
gaacaggcgugccaagucu

SEQ ID NO: 871085 - RNA, 19 nt, Homo sapiens
  misc_RNA (1)...(19): siRNA sense strand
gaacugaaacgaaaugucu

SEQ ID NO: 871086 - RNA, 19 nt, Homo sapiens
  misc_RNA (1)...(19): siRNA sense strand
ggccggagauuauccucaa

SEQ ID NO: 871087 - RNA, 19 nt, Homo sapiens
  misc_RNA (1)...(19): siRNA sense strand
gaaauccuuccaaccuuug

SEQ ID NO: 871088 - RNA, 19 nt, Homo sapiens
  misc_RNA (1)...(19): siRNA sense strand
ccacugugcuccuggaacu

SEQ ID NO: 871089 - RNA, 19 nt, Homo sapiens
  misc_RNA (1)...(19): siRNA sense strand
gcucccaaggucagaauuu

SEQ ID NO: 871090 - RNA, 19 nt, Homo sapiens
  misc_RNA (1)...(19): siRNA sense strand
gccgcaagcgcacgucuuu

SEQ ID NO: 871091 - RNA, 19 nt, Homo sapiens
  misc_RNA (1)...(19): siRNA sense strand
uggcuaggccggagauuau

SEQ ID NO: 871092 - RNA, 19 nt, Homo sapiens
  misc_RNA (1)...(19): siRNA sense strand
gaagacauugguucaaagc

SEQ ID NO: 871093 - RNA, 19 nt, Homo sapiens
  misc_RNA (1)...(19): siRNA sense strand
uccuggaacugaaacgaaa

SEQ ID NO: 871094 - RNA, 19 nt, Homo sapiens
  misc_RNA (1)...(19): siRNA sense strand
acacaucuuuucugccuuu

SEQ ID NO: 871095 - RNA, 19 nt, Homo sapiens
  misc_RNA (1)...(19): siRNA sense strand
ggaacugaaacgaaauguc

SEQ ID NO: 871096 - RNA, 19 nt, Homo sapiens
  misc_RNA (1)...(19): siRNA sense strand
cgcaagcgcacgucuuuca

SEQ ID NO: 871097 - RNA, 19 nt, Homo sapiens
  misc_RNA (1)...(19): siRNA sense strand
caggauggcuauugcuuua

SEQ ID NO: 871098 - RNA, 19 nt, Homo sapiens
  misc_RNA (1)...(19): siRNA sense strand
gcuaauaagcagaguaaua

SEQ ID NO: 871099 - RNA, 19 nt, Homo sapiens
  misc_RNA (1)...(19): siRNA sense strand
cagcuuacaugcagacuuu

SEQ ID NO: 871100 - RNA, 19 nt, Homo sapiens
  misc_RNA (1)...(19): siRNA sense strand
guagaugaguuuaaagaug

SEQ ID NO: 871101 - RNA, 19 nt, Homo sapiens
  misc_RNA (1)...(19): siRNA sense strand
agccagacauuucagauua

SEQ ID NO: 871102 - RNA, 19 nt, Homo sapiens
  misc_RNA (1)...(19): siRNA sense strand
gaagaauccauaaggcaaa

SEQ ID NO: 871103 - RNA, 19 nt, Homo sapiens
  misc_RNA (1)...(19): siRNA sense strand
ugaagaagguaaagaacau

SEQ ID NO: 871104 - RNA, 19 nt, Homo sapiens
  misc_RNA (1)...(19): siRNA sense strand
gaauuucccaccauccuaa

SEQ ID NO: 871105 - RNA, 19 nt, Homo sapiens
  misc_RNA (1)...(19): siRNA sense strand
ggaagaagaauccauaagg

SEQ ID NO: 871106 - RNA, 19 nt, Homo sapiens
  misc_RNA (1)...(19): siRNA sense strand
caacauuaauucguggauu

SEQ ID NO: 871107 - RNA, 19 nt, Homo sapiens
  misc_RNA (1)...(19): siRNA sense strand
aaagagaaccugcgcagaa

SEQ ID NO: 871108 - RNA, 19 nt, Homo sapiens
  misc_RNA (1)...(19): siRNA sense strand
ccaggaagaagaauccaua

SEQ ID NO: 871109 - RNA, 19 nt, Homo sapiens
  misc_RNA (1)...(19): siRNA sense strand
ggagaagccagacauuuca

SEQ ID NO: 871110 - RNA, 19 nt, Homo sapiens
  misc_RNA (1)...(19): siRNA sense strand
ccaaaucaguggccaaacu

SEQ ID NO: 871111 - RNA, 19 nt, Homo sapiens
  misc_RNA (1)...(19): siRNA sense strand
uuaaugcugugcugaagaa

SEQ ID NO: 871112 - RNA, 19 nt, Homo sapiens
  misc_RNA (1)...(19): siRNA sense strand
cauaugcagcacuaauuua

SEQ ID NO: 871113 - RNA, 19 nt, Homo sapiens
  misc_RNA (1)...(19): siRNA sense strand
gcagaguaauaacauccaa

SEQ ID NO: 871114 - RNA, 19 nt, Homo sapiens
  misc_RNA (1)...(19): siRNA sense strand
cagaaaacauccaaaauca

SEQ ID NO: 871115 - RNA, 19 nt, Homo sapiens
  misc_RNA (1)...(19): siRNA sense strand
aagagaaccugcgcagaaa

SEQ ID NO: 871116 - RNA, 19 nt, Homo sapiens
  misc_RNA (1)...(19): siRNA sense strand
gugggcagguguugaagaa

SEQ ID NO: 871117 - RNA, 19 nt, Homo sapiens
  misc_RNA (1)...(19): siRNA sense strand
uaagauuaaucgagcaaca

SEQ ID NO: 871118 - RNA, 19 nt, Homo sapiens
  misc_RNA (1)...(19): siRNA sense strand
aaggugaaaucaaagcaaa

SEQ ID NO: 871119 - RNA, 19 nt, Homo sapiens
  misc_RNA (1)...(19): siRNA sense strand
gaaggugaaaucaaagcaa

SEQ ID NO: 871120 - RNA, 19 nt, Homo sapiens
  misc_RNA (1)...(19): siRNA sense strand
ugaccaaucagcugaaaug

SEQ ID NO: 871121 - RNA, 19 nt, Homo sapiens
  misc_RNA (1)...(19): siRNA sense strand
ccuuguagaugaguuuaaa

SEQ ID NO: 871122 - RNA, 19 nt, Homo sapiens
  misc_RNA (1)...(19): siRNA sense strand
ucauaugcagcacuaauuu

SEQ ID NO: 871123 - RNA, 19 nt, Homo sapiens
  misc_RNA (1)...(19): siRNA sense strand
cuaagauuaucacagucua

SEQ ID NO: 871124 - RNA, 19 nt, Homo sapiens
  misc_RNA (1)...(19): siRNA sense strand
uauguuugcugaaggugaa

SEQ ID NO: 871125 - RNA, 19 nt, Homo sapiens
  misc_RNA (1)...(19): siRNA sense strand
gagaggagagugaaaauug

SEQ ID NO: 871126 - RNA, 19 nt, Homo sapiens
  misc_RNA (1)...(19): siRNA sense strand
caaaucaguggccaaacuu

SEQ ID NO: 871127 - RNA, 19 nt, Homo sapiens
  misc_RNA (1)...(19): siRNA sense strand
gggcagguguugaagaacu

SEQ ID NO: 871128 - RNA, 19 nt, Homo sapiens
  misc_RNA (1)...(19): siRNA sense strand
gcagaaaacauccaaaauc

SEQ ID NO: 871129 - RNA, 19 nt, Homo sapiens
  misc_RNA (1)...(19): siRNA sense strand
uaucacagucuaaucagaa

SEQ ID NO: 871130 - RNA, 19 nt, Homo sapiens
  misc_RNA (1)...(19): siRNA sense strand
ggaccuuguagaugaguuu

SEQ ID NO: 871131 - RNA, 19 nt, Homo sapiens
  misc_RNA (1)...(19): siRNA sense strand
gagccuauguuugcugaag

SEQ ID NO: 871132 - RNA, 19 nt, Homo sapiens
  misc_RNA (1)...(19): siRNA sense strand
uuaaacagcauauccagau

SEQ ID NO: 871133 - RNA, 19 nt, Homo sapiens
  misc_RNA (1)...(19): siRNA sense strand
uaaacagcauauccagauc

SEQ ID NO: 871134 - RNA, 19 nt, Homo sapiens
  misc_RNA (1)...(19): siRNA sense strand
ugcugaaggugaaaucaaa

SEQ ID NO: 871135 - RNA, 19 nt, Homo sapiens
  misc_RNA (1)...(19): siRNA sense strand
cggagaagccagacauuuc

SEQ ID NO: 871136 - RNA, 19 nt, Homo sapiens
  misc_RNA (1)...(19): siRNA sense strand
aaacagagaggagagugaa

SEQ ID NO: 871137 - RNA, 19 nt, Homo sapiens
  misc_RNA (1)...(19): siRNA sense strand
gaagccagacauuucagau

SEQ ID NO: 871138 - RNA, 19 nt, Homo sapiens
  misc_RNA (1)...(19): siRNA sense strand
aaucauggaccuuguagau

SEQ ID NO: 871139 - RNA, 19 nt, Homo sapiens
  misc_RNA (1)...(19): siRNA sense strand
gcaaucauggaccuuguag

SEQ ID NO: 871140 - RNA, 19 nt, Homo sapiens
  misc_RNA (1)...(19): siRNA sense strand
uaagcagaguaauaacauc

SEQ ID NO: 871141 - RNA, 19 nt, Homo sapiens
  misc_RNA (1)...(19): siRNA sense strand
cgaggcaaccccuauauaa

SEQ ID NO: 871142 - RNA, 19 nt, Homo sapiens
  misc_RNA (1)...(19): siRNA sense strand
ggcagguguugaagaacuu

SEQ ID NO: 871143 - RNA, 19 nt, Homo sapiens
  misc_RNA (1)...(19): siRNA sense strand
ucaggauggcuauugcuuu

SEQ ID NO: 871144 - RNA, 19 nt, Homo sapiens
  misc_RNA (1)...(19): siRNA sense strand
caaaccuguuggguggaua

SEQ ID NO: 871145 - RNA, 19 nt, Homo sapiens
  misc_RNA (1)...(19): siRNA sense strand
ccuguuggguggauaugug

SEQ ID NO: 871146 - RNA, 19 nt, Homo sapiens
  misc_RNA (1)...(19): siRNA sense strand
caggaagaagaauccauaa

SEQ ID NO: 871147 - RNA, 19 nt, Homo sapiens
  misc_RNA (1)...(19): siRNA sense strand
gagcuaagggacauaucug

SEQ ID NO: 871148 - RNA, 19 nt, Homo sapiens
  misc_RNA (1)...(19): siRNA sense strand
gauccagaaagcaaucaug

SEQ ID NO: 871149 - RNA, 19 nt, Homo sapiens
  misc_RNA (1)...(19): siRNA sense strand
gccagacauuucagauuac

SEQ ID NO: 871150 - RNA, 19 nt, Homo sapiens
  misc_RNA (1)...(19): siRNA sense strand
gaagaagguaaagaacauc

SEQ ID NO: 871151 - RNA, 19 nt, Homo sapiens
  misc_RNA (1)...(19): siRNA sense strand
ugaauuucccaccauccua

SEQ ID NO: 871152 - RNA, 19 nt, Homo sapiens
  misc_RNA (1)...(19): siRNA sense strand
uguuugaaaucaucuccuu

SEQ ID NO: 871153 - RNA, 19 nt, Homo sapiens
  misc_RNA (1)...(19): siRNA sense strand
gaguaauaacauccaaguu

SEQ ID NO: 871154 - RNA, 19 nt, Homo sapiens
  misc_RNA (1)...(19): siRNA sense strand
ccggagaagccagacauuu

SEQ ID NO: 871155 - RNA, 19 nt, Homo sapiens
  misc_RNA (1)...(19): siRNA sense strand
gcuaagauuaaucgagcaa

SEQ ID NO: 871156 - RNA, 19 nt, Homo sapiens
  misc_RNA (1)...(19): siRNA sense strand
gaaaucaaagcaaaaccuu

SEQ ID NO: 871157 - RNA, 19 nt, Homo sapiens
  misc_RNA (1)...(19): siRNA sense strand
uuucugagccugugcuuuc

SEQ ID NO: 871158 - RNA, 19 nt, Homo sapiens
  misc_RNA (1)...(19): siRNA sense strand
ggauaugugggcagguguu

SEQ ID NO: 871159 - RNA, 19 nt, Homo sapiens
  misc_RNA (1)...(19): siRNA sense strand
uauuuggcagucuguguua

SEQ ID NO: 871160 - RNA, 19 nt, Homo sapiens
  misc_RNA (1)...(19): siRNA sense strand
agauuaaucgagcaacauu

SEQ ID NO: 871161 - RNA, 19 nt, Homo sapiens
  misc_RNA (1)...(19): siRNA sense strand
gcgcagaaaacauccaaaa

SEQ ID NO: 871162 - RNA, 19 nt, Homo sapiens
  misc_RNA (1)...(19): siRNA sense strand
gaccaaucagcugaaauga

SEQ ID NO: 871163 - RNA, 19 nt, Homo sapiens
  misc_RNA (1)...(19): siRNA sense strand
gaccuuguagaugaguuua

SEQ ID NO: 871164 - RNA, 19 nt, Homo sapiens
  misc_RNA (1)...(19): siRNA sense strand
aagaugaauuucccaccau

SEQ ID NO: 871165 - RNA, 19 nt, Homo sapiens
  misc_RNA (1)...(19): siRNA sense strand
gaaagcaaucauggaccuu

SEQ ID NO: 871166 - RNA, 19 nt, Homo sapiens
  misc_RNA (1)...(19): siRNA sense strand
ucaaaccuguuggguggau

SEQ ID NO: 871167 - RNA, 19 nt, Homo sapiens
  misc_RNA (1)...(19): siRNA sense strand
uaugugggcagguguugaa

SEQ ID NO: 871168 - RNA, 19 nt, Homo sapiens
  misc_RNA (1)...(19): siRNA sense strand
auccagauccuccaaauca

SEQ ID NO: 871169 - RNA, 19 nt, Homo sapiens
  misc_RNA (1)...(19): siRNA sense strand
aagcaaucauggaccuugu

SEQ ID NO: 871170 - RNA, 19 nt, Homo sapiens
  misc_RNA (1)...(19): siRNA sense strand
auccuaagauuaucacagu

SEQ ID NO: 871171 - RNA, 19 nt, Homo sapiens
  misc_RNA (1)...(19): siRNA sense strand
uaacauucaggucagaaag

SEQ ID NO: 871172 - RNA, 19 nt, Homo sapiens
  misc_RNA (1)...(19): siRNA sense strand
gcagcacuaauuuauuugg

SEQ ID NO: 871173 - RNA, 19 nt, Homo sapiens
  misc_RNA (1)...(19): siRNA sense strand
gauaugugggcagguguug

SEQ ID NO: 871174 - RNA, 19 nt, Homo sapiens
  misc_RNA (1)...(19): siRNA sense strand
aaucgagcaacauuaauuc

SEQ ID NO: 871175 - RNA, 19 nt, Homo sapiens
  misc_RNA (1)...(19): siRNA sense strand
uuaucacagucuaaucaga

SEQ ID NO: 871176 - RNA, 19 nt, Homo sapiens
  misc_RNA (1)...(19): siRNA sense strand
gcuuucggagccuauguuu

SEQ ID NO: 871177 - RNA, 19 nt, Homo sapiens
  misc_RNA (1)...(19): siRNA sense strand
gaggagagugaaaauugua

SEQ ID NO: 871178 - RNA, 19 nt, Homo sapiens
  misc_RNA (1)...(19): siRNA sense strand
aaggguucuuuguuugaaa

SEQ ID NO: 871179 - RNA, 19 nt, Homo sapiens
  misc_RNA (1)...(19): siRNA sense strand
gaacucagaugaugaagua

SEQ ID NO: 871180 - RNA, 19 nt, Homo sapiens
  misc_RNA (1)...(19): siRNA sense strand
caacuaagguaucaaauug

SEQ ID NO: 871181 - RNA, 19 nt, Homo sapiens
  misc_RNA (1)...(19): siRNA sense strand
ggauaaagcucugaaagaa

SEQ ID NO: 871182 - RNA, 19 nt, Homo sapiens
  misc_RNA (1)...(19): siRNA sense strand
ggacuuuacucacucauuu

SEQ ID NO: 871183 - RNA, 19 nt, Homo sapiens
  misc_RNA (1)...(19): siRNA sense strand
aaagagcucugauuaguuu

SEQ ID NO: 871184 - RNA, 19 nt, Homo sapiens
  misc_RNA (1)...(19): siRNA sense strand
gaacuucgaggaauguuua

SEQ ID NO: 871185 - RNA, 19 nt, Homo sapiens
  misc_RNA (1)...(19): siRNA sense strand
gaagaaccaucaacaaaca

SEQ ID NO: 871186 - RNA, 19 nt, Homo sapiens
  misc_RNA (1)...(19): siRNA sense strand
gcacaaagguaaagaaacu

SEQ ID NO: 871187 - RNA, 19 nt, Homo sapiens
  misc_RNA (1)...(19): siRNA sense strand
aaacaugccucacagauga

SEQ ID NO: 871188 - RNA, 19 nt, Homo sapiens
  misc_RNA (1)...(19): siRNA sense strand
gaagauuguuuccaaguug

SEQ ID NO: 871189 - RNA, 19 nt, Homo sapiens
  misc_RNA (1)...(19): siRNA sense strand
ucucucagcuuacguauaa

SEQ ID NO: 871190 - RNA, 19 nt, Homo sapiens
  misc_RNA (1)...(19): siRNA sense strand
gggaaucuguggaacauuu

SEQ ID NO: 871191 - RNA, 19 nt, Homo sapiens
  misc_RNA (1)...(19): siRNA sense strand
ugaaagaaguguucgacua

SEQ ID NO: 871192 - RNA, 19 nt, Homo sapiens
  misc_RNA (1)...(19): siRNA sense strand
gcaauugccauguuacuuu

SEQ ID NO: 871193 - RNA, 19 nt, Homo sapiens
  misc_RNA (1)...(19): siRNA sense strand
caagagagccuacaccuau

SEQ ID NO: 871194 - RNA, 19 nt, Homo sapiens
  misc_RNA (1)...(19): siRNA sense strand
ccaggaacaugaagaggua

SEQ ID NO: 871195 - RNA, 19 nt, Homo sapiens
  misc_RNA (1)...(19): siRNA sense strand
uaaagaaacugcggcaaug

SEQ ID NO: 871196 - RNA, 19 nt, Homo sapiens
  misc_RNA (1)...(19): siRNA sense strand
gaauguacauggaaaggau

SEQ ID NO: 871197 - RNA, 19 nt, Homo sapiens
  misc_RNA (1)...(19): siRNA sense strand
ucagugaccuguaugagaa

SEQ ID NO: 871198 - RNA, 19 nt, Homo sapiens
  misc_RNA (1)...(19): siRNA sense strand
ucagcgaguuucagaauuu

SEQ ID NO: 871199 - RNA, 19 nt, Homo sapiens
  misc_RNA (1)...(19): siRNA sense strand
gaaugagcaucacaagaga

SEQ ID NO: 871200 - RNA, 19 nt, Homo sapiens
  misc_RNA (1)...(19): siRNA sense strand
gcugagaguucauuuagau

SEQ ID NO: 871201 - RNA, 19 nt, Homo sapiens
  misc_RNA (1)...(19): siRNA sense strand
gugagcaaauguugguuua

SEQ ID NO: 871202 - RNA, 19 nt, Homo sapiens
  misc_RNA (1)...(19): siRNA sense strand
gaugaaagacugugucaga

SEQ ID NO: 871203 - RNA, 19 nt, Homo sapiens
  misc_RNA (1)...(19): siRNA sense strand
gcaacuaagguaucaaauu

SEQ ID NO: 871204 - RNA, 19 nt, Homo sapiens
  misc_RNA (1)...(19): siRNA sense strand
gaaauaauccaggcgacua

SEQ ID NO: 871205 - RNA, 19 nt, Homo sapiens
  misc_RNA (1)...(19): siRNA sense strand
gagaugagggacaacuuua

SEQ ID NO: 871206 - RNA, 19 nt, Homo sapiens
  misc_RNA (1)...(19): siRNA sense strand
ccaaucagaucaaugaaca

SEQ ID NO: 871207 - RNA, 19 nt, Homo sapiens
  misc_RNA (1)...(19): siRNA sense strand
guaccaaucagaucaauga

SEQ ID NO: 871208 - RNA, 19 nt, Homo sapiens
  misc_RNA (1)...(19): siRNA sense strand
guauaaugcuugcagaaau

SEQ ID NO: 871209 - RNA, 19 nt, Homo sapiens
  misc_RNA (1)...(19): siRNA sense strand
caaaggaugugcagucucu

SEQ ID NO: 871210 - RNA, 19 nt, Homo sapiens
  misc_RNA (1)...(19): siRNA sense strand
guggagagguuacagaaga

SEQ ID NO: 871211 - RNA, 19 nt, Homo sapiens
  misc_RNA (1)...(19): siRNA sense strand
guacagagagcaaaugaau

SEQ ID NO: 871212 - RNA, 19 nt, Homo sapiens
  misc_RNA (1)...(19): siRNA sense strand
gcaaagaagcagugugaga

SEQ ID NO: 871213 - RNA, 19 nt, Homo sapiens
  misc_RNA (1)...(19): siRNA sense strand
caaguugaaggaugaaaua

SEQ ID NO: 871214 - RNA, 19 nt, Homo sapiens
  misc_RNA (1)...(19): siRNA sense strand
ggcaagcucuaaauucuau

SEQ ID NO: 871215 - RNA, 19 nt, Homo sapiens
  misc_RNA (1)...(19): siRNA sense strand
aaaguugucugcaaugaug

SEQ ID NO: 871216 - RNA, 19 nt, Homo sapiens
  misc_RNA (1)...(19): siRNA sense strand
gugagcaauugccauguua

SEQ ID NO: 871217 - RNA, 19 nt, Homo sapiens
  misc_RNA (1)...(19): siRNA sense strand
gaaauucagcagugucuug

SEQ ID NO: 871218 - RNA, 19 nt, Homo sapiens
  misc_RNA (1)...(19): siRNA sense strand
gaacuaaaugagaaacuug

SEQ ID NO: 871219 - RNA, 19 nt, Homo sapiens
  misc_RNA (1)...(19): siRNA sense strand
guugaaggaugaaauaauc

SEQ ID NO: 871220 - RNA, 19 nt, Homo sapiens
  misc_RNA (1)...(19): siRNA sense strand
uaugagacccuaaaggaua

SEQ ID NO: 871221 - RNA, 19 nt, Homo sapiens
  misc_RNA (1)...(19): siRNA sense strand
gaaagacgccuuggcugaa

SEQ ID NO: 871222 - RNA, 19 nt, Homo sapiens
  misc_RNA (1)...(19): siRNA sense strand
caaagaagcagugugagaa

SEQ ID NO: 871223 - RNA, 19 nt, Homo sapiens
  misc_RNA (1)...(19): siRNA sense strand
ccagaaggcucagcgaguu

SEQ ID NO: 871224 - RNA, 19 nt, Homo sapiens
  misc_RNA (1)...(19): siRNA sense strand
acaagaaguuggaggaguu

SEQ ID NO: 871225 - RNA, 19 nt, Homo sapiens
  misc_RNA (1)...(19): siRNA sense strand
gagaugggcccaagagaug

SEQ ID NO: 871226 - RNA, 19 nt, Homo sapiens
  misc_RNA (1)...(19): siRNA sense strand
cgagagcacuuuggaaugu

SEQ ID NO: 871227 - RNA, 19 nt, Homo sapiens
  misc_RNA (1)...(19): siRNA sense strand
acagagagcaaaugaauga

SEQ ID NO: 871228 - RNA, 19 nt, Homo sapiens
  misc_RNA (1)...(19): siRNA sense strand
aaacagagagcacagcaaa

SEQ ID NO: 871229 - RNA, 19 nt, Homo sapiens
  misc_RNA (1)...(19): siRNA sense strand
gugagaagaacauuaauug

SEQ ID NO: 871230 - RNA, 19 nt, Homo sapiens
  misc_RNA (1)...(19): siRNA sense strand
gaaagaaguguucgacuac

SEQ ID NO: 871231 - RNA, 19 nt, Homo sapiens
  misc_RNA (1)...(19): siRNA sense strand
caaagaaauucagcagugu

SEQ ID NO: 871232 - RNA, 19 nt, Homo sapiens
  misc_RNA (1)...(19): siRNA sense strand
caagcugccuuucaaaucu

SEQ ID NO: 871233 - RNA, 19 nt, Homo sapiens
  misc_RNA (1)...(19): siRNA sense strand
ucacguggaugugguuaaa

SEQ ID NO: 871234 - RNA, 19 nt, Homo sapiens
  misc_RNA (1)...(19): siRNA sense strand
gaaagaacgcacagaccuu

SEQ ID NO: 871235 - RNA, 19 nt, Homo sapiens
  misc_RNA (1)...(19): siRNA sense strand
ccaggaagauguuuaugag

SEQ ID NO: 871236 - RNA, 19 nt, Homo sapiens
  misc_RNA (1)...(19): siRNA sense strand
caaaagagcucugauuagu

SEQ ID NO: 871237 - RNA, 19 nt, Homo sapiens
  misc_RNA (1)...(19): siRNA sense strand
gaagaggcacaaagguaaa

SEQ ID NO: 871238 - RNA, 19 nt, Homo sapiens
  misc_RNA (1)...(19): siRNA sense strand
gaagaacagccaagaccuu

SEQ ID NO: 871239 - RNA, 19 nt, Homo sapiens
  misc_RNA (1)...(19): siRNA sense strand
ugaagaggcacaaagguaa

SEQ ID NO: 871240 - RNA, 19 nt, Homo sapiens
  misc_RNA (1)...(19): siRNA sense strand
gagcugagaguucauuuag

SEQ ID NO: 871241 - RNA, 19 nt, Homo sapiens
  misc_RNA (1)...(19): siRNA sense strand
cgacuacaguuauagagau

SEQ ID NO: 871242 - RNA, 19 nt, Homo sapiens
  misc_RNA (1)...(19): siRNA sense strand
gugagugcgucccuucuuu

SEQ ID NO: 871243 - RNA, 19 nt, Homo sapiens
  misc_RNA (1)...(19): siRNA sense strand
cagcgaguuucagaauuua

SEQ ID NO: 871244 - RNA, 19 nt, Homo sapiens
  misc_RNA (1)...(19): siRNA sense strand
caauugccauguuacuuug

SEQ ID NO: 871245 - RNA, 19 nt, Homo sapiens
  misc_RNA (1)...(19): siRNA sense strand
ggugagcaauugccauguu

SEQ ID NO: 871246 - RNA, 19 nt, Homo sapiens
  misc_RNA (1)...(19): siRNA sense strand
ccucacagaugauuuccaa

SEQ ID NO: 871247 - RNA, 19 nt, Homo sapiens
  misc_RNA (1)...(19): siRNA sense strand
guaaagaaacugcggcaau

SEQ ID NO: 871248 - RNA, 19 nt, Homo sapiens
  misc_RNA (1)...(19): siRNA sense strand
gagagcacuuuggaaugua

SEQ ID NO: 871249 - RNA, 19 nt, Homo sapiens
  misc_RNA (1)...(19): siRNA sense strand
gagaguucauuuagaucaa

SEQ ID NO: 871250 - RNA, 19 nt, Homo sapiens
  misc_RNA (1)...(19): siRNA sense strand
gagcaaauguugguuuacu

SEQ ID NO: 871251 - RNA, 19 nt, Homo sapiens
  misc_RNA (1)...(19): siRNA sense strand
ucaaugaacaagccaguuu

SEQ ID NO: 871252 - RNA, 19 nt, Homo sapiens
  misc_RNA (1)...(19): siRNA sense strand
ggaaucuguggaacauuua

SEQ ID NO: 871253 - RNA, 19 nt, Homo sapiens
  misc_RNA (1)...(19): siRNA sense strand
gacaaaagagcucugauua

SEQ ID NO: 871254 - RNA, 19 nt, Homo sapiens
  misc_RNA (1)...(19): siRNA sense strand
cagcagagaugagggacaa

SEQ ID NO: 871255 - RNA, 19 nt, Homo sapiens
  misc_RNA (1)...(19): siRNA sense strand
ggaagaaccaucaacaaac

SEQ ID NO: 871256 - RNA, 19 nt, Homo sapiens
  misc_RNA (1)...(19): siRNA sense strand
auaaagcucugaaagaagu

SEQ ID NO: 871257 - RNA, 19 nt, Homo sapiens
  misc_RNA (1)...(19): siRNA sense strand
gccaagaccuuuuguguug

SEQ ID NO: 871258 - RNA, 19 nt, Homo sapiens
  misc_RNA (1)...(19): siRNA sense strand
gcaagcugccuuucaaauc

SEQ ID NO: 871259 - RNA, 19 nt, Homo sapiens
  misc_RNA (1)...(19): siRNA sense strand
gaaguuggaggaguugaaa

SEQ ID NO: 871260 - RNA, 19 nt, Homo sapiens
  misc_RNA (1)...(19): siRNA sense strand
ggaaaccucagcagagaug

SEQ ID NO: 871261 - RNA, 19 nt, Homo sapiens
  misc_RNA (1)...(19): siRNA sense strand
aaacaaacugcgagaacua

SEQ ID NO: 871262 - RNA, 19 nt, Homo sapiens
  misc_RNA (1)...(19): siRNA sense strand
gguuaaaguugucugcaau

SEQ ID NO: 871263 - RNA, 19 nt, Homo sapiens
  misc_RNA (1)...(19): siRNA sense strand
gaagcagugugagaagaga

SEQ ID NO: 871264 - RNA, 19 nt, Homo sapiens
  misc_RNA (1)...(19): siRNA sense strand
gaggaacucagaugaugaa

SEQ ID NO: 871265 - RNA, 19 nt, Homo sapiens
  misc_RNA (1)...(19): siRNA sense strand
uggaacugcugcuaauuga

SEQ ID NO: 871266 - RNA, 19 nt, Homo sapiens
  misc_RNA (1)...(19): siRNA sense strand
ggacacagucagcuggauu

SEQ ID NO: 871267 - RNA, 19 nt, Homo sapiens
  misc_RNA (1)...(19): siRNA sense strand
agacagaggaggacaguga

SEQ ID NO: 871268 - RNA, 19 nt, Homo sapiens
  misc_RNA (1)...(19): siRNA sense strand
caaagaaauaucuguggaa

SEQ ID NO: 871269 - RNA, 19 nt, Homo sapiens
  misc_RNA (1)...(19): siRNA sense strand
ccucaaagccagaagauuc

SEQ ID NO: 871270 - RNA, 19 nt, Homo sapiens
  misc_RNA (1)...(19): siRNA sense strand
gaagagguacaucaaccaa

SEQ ID NO: 871271 - RNA, 19 nt, Homo sapiens
  misc_RNA (1)...(19): siRNA sense strand
ugaagcaacuaagguauca

SEQ ID NO: 871272 - RNA, 19 nt, Homo sapiens
  misc_RNA (1)...(19): siRNA sense strand
agaagauuguuuccaaguu

SEQ ID NO: 871273 - RNA, 19 nt, Homo sapiens
  misc_RNA (1)...(19): siRNA sense strand
gaacugcugcuaauugaac

SEQ ID NO: 871274 - RNA, 19 nt, Homo sapiens
  misc_RNA (1)...(19): siRNA sense strand
ggugagaagaacauuaauu

SEQ ID NO: 871275 - RNA, 19 nt, Homo sapiens
  misc_RNA (1)...(19): siRNA sense strand
gacuacaguuauagagauu

SEQ ID NO: 871276 - RNA, 19 nt, Homo sapiens
  misc_RNA (1)...(19): siRNA sense strand
uuagcaagcugccuuucaa

SEQ ID NO: 871277 - RNA, 19 nt, Homo sapiens
  misc_RNA (1)...(19): siRNA sense strand
cagcuuacguauaaugcuu

SEQ ID NO: 871278 - RNA, 19 nt, Homo sapiens
  misc_RNA (1)...(19): siRNA sense strand
gaagcaaagagcaaaguca

SEQ ID NO: 871279 - RNA, 19 nt, Homo sapiens
  misc_RNA (1)...(19): siRNA sense strand
uaacagaacuugacaauca

SEQ ID NO: 871280 - RNA, 19 nt, Homo sapiens
  misc_RNA (1)...(19): siRNA sense strand
gaacagcacuugagcuuug

SEQ ID NO: 871281 - RNA, 19 nt, Homo sapiens
  misc_RNA (1)...(19): siRNA sense strand
gaacguguguggaauauga

SEQ ID NO: 871282 - RNA, 19 nt, Homo sapiens
  misc_RNA (1)...(19): siRNA sense strand
gaaggaagaagaaacaaua

SEQ ID NO: 871283 - RNA, 19 nt, Homo sapiens
  misc_RNA (1)...(19): siRNA sense strand
caauaucucuugacucuug

SEQ ID NO: 871284 - RNA, 19 nt, Homo sapiens
  misc_RNA (1)...(19): siRNA sense strand
ggaaaugucacaagagauu

SEQ ID NO: 871285 - RNA, 19 nt, Homo sapiens
  misc_RNA (1)...(19): siRNA sense strand
ccaagcugcugaaauagua

SEQ ID NO: 871286 - RNA, 19 nt, Homo sapiens
  misc_RNA (1)...(19): siRNA sense strand
gaaagaaacaggcaaagau

SEQ ID NO: 871287 - RNA, 19 nt, Homo sapiens
  misc_RNA (1)...(19): siRNA sense strand
gaugccagcucuugcuaua

SEQ ID NO: 871288 - RNA, 19 nt, Homo sapiens
  misc_RNA (1)...(19): siRNA sense strand
gcacacaggagcauuguuu

SEQ ID NO: 871289 - RNA, 19 nt, Homo sapiens
  misc_RNA (1)...(19): siRNA sense strand
caaagcuuguuaccuguua

SEQ ID NO: 871290 - RNA, 19 nt, Homo sapiens
  misc_RNA (1)...(19): siRNA sense strand
guacacagaucuucaagca

SEQ ID NO: 871291 - RNA, 19 nt, Homo sapiens
  misc_RNA (1)...(19): siRNA sense strand
guacauaauuucagcuuuc

SEQ ID NO: 871292 - RNA, 19 nt, Homo sapiens
  misc_RNA (1)...(19): siRNA sense strand
guagaaaucacacuugaaa

SEQ ID NO: 871293 - RNA, 19 nt, Homo sapiens
  misc_RNA (1)...(19): siRNA sense strand
aagcgaaucuugccaauau

SEQ ID NO: 871294 - RNA, 19 nt, Homo sapiens
  misc_RNA (1)...(19): siRNA sense strand
caccagagcugaaucuuuc

SEQ ID NO: 871295 - RNA, 19 nt, Homo sapiens
  misc_RNA (1)...(19): siRNA sense strand
ggaagaagaaacaauaaug

SEQ ID NO: 871296 - RNA, 19 nt, Homo sapiens
  misc_RNA (1)...(19): siRNA sense strand
gaaaugaaguuggucuaca

SEQ ID NO: 871297 - RNA, 19 nt, Homo sapiens
  misc_RNA (1)...(19): siRNA sense strand
gaagauacagugaggcaaa

SEQ ID NO: 871298 - RNA, 19 nt, Homo sapiens
  misc_RNA (1)...(19): siRNA sense strand
uagcaaguguggcaaguuu

SEQ ID NO: 871299 - RNA, 19 nt, Homo sapiens
  misc_RNA (1)...(19): siRNA sense strand
cagaguauauguacacaga

SEQ ID NO: 871300 - RNA, 19 nt, Homo sapiens
  misc_RNA (1)...(19): siRNA sense strand
uuagaugucuggagaggua

SEQ ID NO: 871301 - RNA, 19 nt, Homo sapiens
  misc_RNA (1)...(19): siRNA sense strand
gaaaucacacuugaaagaa

SEQ ID NO: 871302 - RNA, 19 nt, Homo sapiens
  misc_RNA (1)...(19): siRNA sense strand
uaagcaagcucaucaaacu

SEQ ID NO: 871303 - RNA, 19 nt, Homo sapiens
  misc_RNA (1)...(19): siRNA sense strand
gcaggaagcaguaggaguu

SEQ ID NO: 871304 - RNA, 19 nt, Homo sapiens
  misc_RNA (1)...(19): siRNA sense strand
cauaauggauguggaaaug

SEQ ID NO: 871305 - RNA, 19 nt, Homo sapiens
  misc_RNA (1)...(19): siRNA sense strand
aaagaaacaggcaaagaua

SEQ ID NO: 871306 - RNA, 19 nt, Homo sapiens
  misc_RNA (1)...(19): siRNA sense strand
caaguuucauugagacaaa

SEQ ID NO: 871307 - RNA, 19 nt, Homo sapiens
  misc_RNA (1)...(19): siRNA sense strand
augccaagcugcugaaaua

SEQ ID NO: 871308 - RNA, 19 nt, Homo sapiens
  misc_RNA (1)...(19): siRNA sense strand
gcaaagauaacagaacuug

SEQ ID NO: 871309 - RNA, 19 nt, Homo sapiens
  misc_RNA (1)...(19): siRNA sense strand
ugacaaagggcaucaaaga

SEQ ID NO: 871310 - RNA, 19 nt, Homo sapiens
  misc_RNA (1)...(19): siRNA sense strand
ugaaguuggucuacauuga

SEQ ID NO: 871311 - RNA, 19 nt, Homo sapiens
  misc_RNA (1)...(19): siRNA sense strand
gaaggcagaaggugaagaa

SEQ ID NO: 871312 - RNA, 19 nt, Homo sapiens
  misc_RNA (1)...(19): siRNA sense strand
gauaaacacaagcaagaaa

SEQ ID NO: 871313 - RNA, 19 nt, Homo sapiens
  misc_RNA (1)...(19): siRNA sense strand
uaauggauguggaaaugaa

SEQ ID NO: 871314 - RNA, 19 nt, Homo sapiens
  misc_RNA (1)...(19): siRNA sense strand
gaaaugucacaagagauua

SEQ ID NO: 871315 - RNA, 19 nt, Homo sapiens
  misc_RNA (1)...(19): siRNA sense strand
acaaagggcaucaaagaaa

SEQ ID NO: 871316 - RNA, 19 nt, Homo sapiens
  misc_RNA (1)...(19): siRNA sense strand
gcaagcucaucaaacugua

SEQ ID NO: 871317 - RNA, 19 nt, Homo sapiens
  misc_RNA (1)...(19): siRNA sense strand
gauaacagaacuugacaau

SEQ ID NO: 871318 - RNA, 19 nt, Homo sapiens
  misc_RNA (1)...(19): siRNA sense strand
gaaauaguagacccuuuga

SEQ ID NO: 871319 - RNA, 19 nt, Homo sapiens
  misc_RNA (1)...(19): siRNA sense strand
ugacaaauggcuucaggua

SEQ ID NO: 871320 - RNA, 19 nt, Homo sapiens
  misc_RNA (1)...(19): siRNA sense strand
gaagaaaagccaacuagaa

SEQ ID NO: 871321 - RNA, 19 nt, Homo sapiens
  misc_RNA (1)...(19): siRNA sense strand
gcugaaucuuucucgguua

SEQ ID NO: 871322 - RNA, 19 nt, Homo sapiens
  misc_RNA (1)...(19): siRNA sense strand
gaucuugcccugaaucaug

SEQ ID NO: 871323 - RNA, 19 nt, Homo sapiens
  misc_RNA (1)...(19): siRNA sense strand
ggaagcgaaucuugccaau

SEQ ID NO: 871324 - RNA, 19 nt, Homo sapiens
  misc_RNA (1)...(19): siRNA sense strand
agaaaucacacuugaaaga

SEQ ID NO: 871325 - RNA, 19 nt, Homo sapiens
  misc_RNA (1)...(19): siRNA sense strand
gaguauauguacacagauc

SEQ ID NO: 871326 - RNA, 19 nt, Homo sapiens
  misc_RNA (1)...(19): siRNA sense strand
aaagccaacuagaaagaaa

SEQ ID NO: 871327 - RNA, 19 nt, Homo sapiens
  misc_RNA (1)...(19): siRNA sense strand
gacaaagggcaucaaagaa

SEQ ID NO: 871328 - RNA, 19 nt, Homo sapiens
  misc_RNA (1)...(19): siRNA sense strand
gaauugcugcagucacuaa

SEQ ID NO: 871329 - RNA, 19 nt, Homo sapiens
  misc_RNA (1)...(19): siRNA sense strand
gaagcgaaucuugccaaua

SEQ ID NO: 871330 - RNA, 19 nt, Homo sapiens
  misc_RNA (1)...(19): siRNA sense strand
aacaauaucucuugacucu

SEQ ID NO: 871331 - RNA, 19 nt, Homo sapiens
  misc_RNA (1)...(19): siRNA sense strand
gagguaaacagguagaaau

SEQ ID NO: 871332 - RNA, 19 nt, Homo sapiens
  misc_RNA (1)...(19): siRNA sense strand
ggaagggaagagagcauaa

SEQ ID NO: 871333 - RNA, 19 nt, Homo sapiens
  misc_RNA (1)...(19): siRNA sense strand
caaagggcaucaaagaaaa

SEQ ID NO: 871334 - RNA, 19 nt, Homo sapiens
  misc_RNA (1)...(19): siRNA sense strand
gcaagaaaauguccaccuu

SEQ ID NO: 871335 - RNA, 19 nt, Homo sapiens
  misc_RNA (1)...(19): siRNA sense strand
gggaagagagcauaagcaa

SEQ ID NO: 871336 - RNA, 19 nt, Homo sapiens
  misc_RNA (1)...(19): siRNA sense strand
gaaguuggucuacauugau

SEQ ID NO: 871337 - RNA, 19 nt, Homo sapiens
  misc_RNA (1)...(19): siRNA sense strand
gcaguaggaguuuggagaa

SEQ ID NO: 871338 - RNA, 19 nt, Homo sapiens
  misc_RNA (1)...(19): siRNA sense strand
gagcagucccaggugauua

SEQ ID NO: 871339 - RNA, 19 nt, Homo sapiens
  misc_RNA (1)...(19): siRNA sense strand
gagaaugcagugaauagga

SEQ ID NO: 871340 - RNA, 19 nt, Homo sapiens
  misc_RNA (1)...(19): siRNA sense strand
cgugauugcugacuacaug

SEQ ID NO: 871341 - RNA, 19 nt, Homo sapiens
  misc_RNA (1)...(19): siRNA sense strand
aaccagaucuugcccugaa

SEQ ID NO: 871342 - RNA, 19 nt, Homo sapiens
  misc_RNA (1)...(19): siRNA sense strand
ugaaauaguagacccuuug

SEQ ID NO: 871343 - RNA, 19 nt, Homo sapiens
  misc_RNA (1)...(19): siRNA sense strand
ugauggagaaguugcaaua

SEQ ID NO: 871344 - RNA, 19 nt, Homo sapiens
  misc_RNA (1)...(19): siRNA sense strand
caccuaacauccuggaaau

SEQ ID NO: 871345 - RNA, 19 nt, Homo sapiens
  misc_RNA (1)...(19): siRNA sense strand
gauauucacagagcauaaa

SEQ ID NO: 871346 - RNA, 19 nt, Homo sapiens
  misc_RNA (1)...(19): siRNA sense strand
gaaucuuucucgguuaugu

SEQ ID NO: 871347 - RNA, 19 nt, Homo sapiens
  misc_RNA (1)...(19): siRNA sense strand
ccucaggugugauggagaa

SEQ ID NO: 871348 - RNA, 19 nt, Homo sapiens
  misc_RNA (1)...(19): siRNA sense strand
ccaauuagaggacaguuuc

SEQ ID NO: 871349 - RNA, 19 nt, Homo sapiens
  misc_RNA (1)...(19): siRNA sense strand
gaucagcuuguuccaaaga

SEQ ID NO: 871350 - RNA, 19 nt, Homo sapiens
  misc_RNA (1)...(19): siRNA sense strand
cagaauugcugcagucacu

SEQ ID NO: 871351 - RNA, 19 nt, Homo sapiens
  misc_RNA (1)...(19): siRNA sense strand
ccaacaauaucucuugacu

SEQ ID NO: 871352 - RNA, 19 nt, Homo sapiens
  misc_RNA (1)...(19): siRNA sense strand
guaaacagguagaaaucac

SEQ ID NO: 871353 - RNA, 19 nt, Homo sapiens
  misc_RNA (1)...(19): siRNA sense strand
gcaaguguggcaaguuuca

SEQ ID NO: 871354 - RNA, 19 nt, Homo sapiens
  misc_RNA (1)...(19): siRNA sense strand
ucagcuuguuccaaagaua

SEQ ID NO: 871355 - RNA, 19 nt, Homo sapiens
  misc_RNA (1)...(19): siRNA sense strand
gaaaagccaacuagaaaga

SEQ ID NO: 871356 - RNA, 19 nt, Homo sapiens
  misc_RNA (1)...(19): siRNA sense strand
gaaacaggcaaagauaaca

SEQ ID NO: 871357 - RNA, 19 nt, Homo sapiens
  misc_RNA (1)...(19): siRNA sense strand
gcagagcuagcaaccauuc

SEQ ID NO: 871358 - RNA, 19 nt, Homo sapiens
  misc_RNA (1)...(19): siRNA sense strand
caggugugauggagaaguu

SEQ ID NO: 871359 - RNA, 19 nt, Homo sapiens
  misc_RNA (1)...(19): siRNA sense strand
uagaagcacccaauugaau

SEQ ID NO: 871360 - RNA, 19 nt, Homo sapiens
  misc_RNA (1)...(19): siRNA sense strand
gcgaaucuugccaauauug

SEQ ID NO: 871361 - RNA, 19 nt, Homo sapiens
  misc_RNA (1)...(19): siRNA sense strand
cuggaaaugucacaagaga

SEQ ID NO: 871362 - RNA, 19 nt, Homo sapiens
  misc_RNA (1)...(19): siRNA sense strand
augaucagcuuguuccaaa

SEQ ID NO: 871363 - RNA, 19 nt, Homo sapiens
  misc_RNA (1)...(19): siRNA sense strand
uaaaggaugccagcucuug

SEQ ID NO: 871364 - RNA, 19 nt, Homo sapiens
  misc_RNA (1)...(19): siRNA sense strand
gguguucgcuaugaguuug

SEQ ID NO: 871365 - RNA, 19 nt, Homo sapiens
  misc_RNA (1)...(19): siRNA sense strand
aaaugaaguuggucuacau

SEQ ID NO: 871366 - RNA, 19 nt, Homo sapiens
  misc_RNA (1)...(19): siRNA sense strand
ccaccuaacauccuggaaa

SEQ ID NO: 871367 - RNA, 19 nt, Homo sapiens
  misc_RNA (1)...(19): siRNA sense strand
ugaggcaaauggagacaau

SEQ ID NO: 871368 - RNA, 19 nt, Homo sapiens
  misc_RNA (1)...(19): siRNA sense strand
ggagguaaacagguagaaa

SEQ ID NO: 871369 - RNA, 19 nt, Homo sapiens
  misc_RNA (1)...(19): siRNA sense strand
cauaagcaagcucaucaaa

SEQ ID NO: 871370 - RNA, 19 nt, Homo sapiens
  misc_RNA (1)...(19): siRNA sense strand
ugccagcucuugcuauaga

SEQ ID NO: 871371 - RNA, 19 nt, Homo sapiens
  misc_RNA (1)...(19): siRNA sense strand
agaaugcagugaauaggau

SEQ ID NO: 871372 - RNA, 19 nt, Homo sapiens
  misc_RNA (1)...(19): siRNA sense strand
aaacuguucagcaaaggua

SEQ ID NO: 871373 - RNA, 19 nt, Homo sapiens
  misc_RNA (1)...(19): siRNA sense strand
uggcagagcuagcaaccau

SEQ ID NO: 871374 - RNA, 19 nt, Homo sapiens
  misc_RNA (1)...(19): siRNA sense strand
cagaacagcacuugagcuu

SEQ ID NO: 871375 - RNA, 19 nt, Homo sapiens
  misc_RNA (1)...(19): siRNA sense strand
ugccucagauugacaaaug

SEQ ID NO: 871376 - RNA, 19 nt, Homo sapiens
  misc_RNA (1)...(19): siRNA sense strand
ugaugcaccugcugaagau

SEQ ID NO: 871377 - RNA, 19 nt, Homo sapiens
  misc_RNA (1)...(19): siRNA sense strand
guggcaaguuucauugaga

SEQ ID NO: 871378 - RNA, 19 nt, Homo sapiens
  misc_RNA (1)...(19): siRNA sense strand
cugaagauauagcaagugu

SEQ ID NO: 871379 - RNA, 19 nt, Homo sapiens
  misc_RNA (1)...(19): siRNA sense strand
caacaaagcuucugaaugc

SEQ ID NO: 871380 - RNA, 19 nt, Homo sapiens
  misc_RNA (1)...(19): siRNA sense strand
uaacaguccuugacacuua

SEQ ID NO: 871381 - RNA, 19 nt, Homo sapiens
  misc_RNA (1)...(19): siRNA sense strand
ggaaaccucuuacuacuug

SEQ ID NO: 871382 - RNA, 19 nt, Homo sapiens
  misc_RNA (1)...(19): siRNA sense strand
ccacagaccuggaugauga

SEQ ID NO: 871383 - RNA, 19 nt, Homo sapiens
  misc_RNA (1)...(19): siRNA sense strand
gaaagaauccuucgaagau

SEQ ID NO: 871384 - RNA, 19 nt, Homo sapiens
  misc_RNA (1)...(19): siRNA sense strand
uggauuaccuguaccauua

SEQ ID NO: 871385 - RNA, 19 nt, Homo sapiens
  misc_RNA (1)...(19): siRNA sense strand
gagcagagguaacauugaa

SEQ ID NO: 871386 - RNA, 19 nt, Homo sapiens
  misc_RNA (1)...(19): siRNA sense strand
ccugaggacuuacagauua

SEQ ID NO: 871387 - RNA, 19 nt, Homo sapiens
  misc_RNA (1)...(19): siRNA sense strand
acacuuagcugcugaggaa

SEQ ID NO: 871388 - RNA, 19 nt, Homo sapiens
  misc_RNA (1)...(19): siRNA sense strand
gaacaacuauauagagucu

SEQ ID NO: 871389 - RNA, 19 nt, Homo sapiens
  misc_RNA (1)...(19): siRNA sense strand
uguaugcucuggccuguua

SEQ ID NO: 871390 - RNA, 19 nt, Homo sapiens
  misc_RNA (1)...(19): siRNA sense strand
gaagacaaguggguaagga

SEQ ID NO: 871391 - RNA, 19 nt, Homo sapiens
  misc_RNA (1)...(19): siRNA sense strand
ggaaagaauccuucgaaga

SEQ ID NO: 871392 - RNA, 19 nt, Homo sapiens
  misc_RNA (1)...(19): siRNA sense strand
ugaaauagccaaagaagga

SEQ ID NO: 871393 - RNA, 19 nt, Homo sapiens
  misc_RNA (1)...(19): siRNA sense strand
aagaggaaguugcugcuua

SEQ ID NO: 871394 - RNA, 19 nt, Homo sapiens
  misc_RNA (1)...(19): siRNA sense strand
ggaauaugaaacagcauua

SEQ ID NO: 871395 - RNA, 19 nt, Homo sapiens
  misc_RNA (1)...(19): siRNA sense strand
ggaaguugcugcuuauagg

SEQ ID NO: 871396 - RNA, 19 nt, Homo sapiens
  misc_RNA (1)...(19): siRNA sense strand
uaaggaaccacuucuauga

SEQ ID NO: 871397 - RNA, 19 nt, Homo sapiens
  misc_RNA (1)...(19): siRNA sense strand
gcauaugggucuucucuac

SEQ ID NO: 871398 - RNA, 19 nt, Homo sapiens
  misc_RNA (1)...(19): siRNA sense strand
uggaagaacucaguaggua

SEQ ID NO: 871399 - RNA, 19 nt, Homo sapiens
  misc_RNA (1)...(19): siRNA sense strand
ucaacuaccugcugucaug

SEQ ID NO: 871400 - RNA, 19 nt, Homo sapiens
  misc_RNA (1)...(19): siRNA sense strand
gcaugccucugauggauga

SEQ ID NO: 871401 - RNA, 19 nt, Homo sapiens
  misc_RNA (1)...(19): siRNA sense strand
gaauaucuguguggacaug

SEQ ID NO: 871402 - RNA, 19 nt, Homo sapiens
  misc_RNA (1)...(19): siRNA sense strand
caaagaaggaagugacaaa

SEQ ID NO: 871403 - RNA, 19 nt, Homo sapiens
  misc_RNA (1)...(19): siRNA sense strand
ggucucaauugaucaaaga

SEQ ID NO: 871404 - RNA, 19 nt, Homo sapiens
  misc_RNA (1)...(19): siRNA sense strand
gaugacagaagcaauuaaa

SEQ ID NO: 871405 - RNA, 19 nt, Homo sapiens
  misc_RNA (1)...(19): siRNA sense strand
cgaggaagauggucagcuu

SEQ ID NO: 871406 - RNA, 19 nt, Homo sapiens
  misc_RNA (1)...(19): siRNA sense strand
ccacuucuaugaacgaugu

SEQ ID NO: 871407 - RNA, 19 nt, Homo sapiens
  misc_RNA (1)...(19): siRNA sense strand
gagaugacagaagcaauua

SEQ ID NO: 871408 - RNA, 19 nt, Homo sapiens
  misc_RNA (1)...(19): siRNA sense strand
agagguaaauuucaaagga

SEQ ID NO: 871409 - RNA, 19 nt, Homo sapiens
  misc_RNA (1)...(19): siRNA sense strand
cuaaugagcaugccucuga

SEQ ID NO: 871410 - RNA, 19 nt, Homo sapiens
  misc_RNA (1)...(19): siRNA sense strand
ggagcagccugauaaacug

SEQ ID NO: 871411 - RNA, 19 nt, Homo sapiens
  misc_RNA (1)...(19): siRNA sense strand
ggaaggagagcagagguaa

SEQ ID NO: 871412 - RNA, 19 nt, Homo sapiens
  misc_RNA (1)...(19): siRNA sense strand
gagguaaauuucaaaggau

SEQ ID NO: 871413 - RNA, 19 nt, Homo sapiens
  misc_RNA (1)...(19): siRNA sense strand
gagcaugccucugauggau

SEQ ID NO: 871414 - RNA, 19 nt, Homo sapiens
  misc_RNA (1)...(19): siRNA sense strand
gaacgauguuuuaagauug

SEQ ID NO: 871415 - RNA, 19 nt, Homo sapiens
  misc_RNA (1)...(19): siRNA sense strand
gcucuggccuguuacuuca

SEQ ID NO: 871416 - RNA, 19 nt, Homo sapiens
  misc_RNA (1)...(19): siRNA sense strand
uaaacuggauuaccuguac

SEQ ID NO: 871417 - RNA, 19 nt, Homo sapiens
  misc_RNA (1)...(19): siRNA sense strand
cauugaaccugauccaguu

SEQ ID NO: 871418 - RNA, 19 nt, Homo sapiens
  misc_RNA (1)...(19): siRNA sense strand
caauaauucugaagacaag

SEQ ID NO: 871419 - RNA, 19 nt, Homo sapiens
  misc_RNA (1)...(19): siRNA sense strand
gugaacaacuauauagagu

SEQ ID NO: 871420 - RNA, 19 nt, Homo sapiens
  misc_RNA (1)...(19): siRNA sense strand
gagagcagagguaacauug

SEQ ID NO: 871421 - RNA, 19 nt, Homo sapiens
  misc_RNA (1)...(19): siRNA sense strand
ggagagcagagguaacauu

SEQ ID NO: 871422 - RNA, 19 nt, Homo sapiens
  misc_RNA (1)...(19): siRNA sense strand
gguaaggaaccacuucuau

SEQ ID NO: 871423 - RNA, 19 nt, Homo sapiens
  misc_RNA (1)...(19): siRNA sense strand
cagaugaugcuuacaguga

SEQ ID NO: 871424 - RNA, 19 nt, Homo sapiens
  misc_RNA (1)...(19): siRNA sense strand
gacagaagcaauuaaauac

SEQ ID NO: 871425 - RNA, 19 nt, Homo sapiens
  misc_RNA (1)...(19): siRNA sense strand
gcggaaaccucuuacuacu

SEQ ID NO: 871426 - RNA, 19 nt, Homo sapiens
  misc_RNA (1)...(19): siRNA sense strand
guaaggaaccacuucuaug

SEQ ID NO: 871427 - RNA, 19 nt, Homo sapiens
  misc_RNA (1)...(19): siRNA sense strand
uaagauugcucagcugauc

SEQ ID NO: 871428 - RNA, 19 nt, Homo sapiens
  misc_RNA (1)...(19): siRNA sense strand
ugacacaacaguagagcua

SEQ ID NO: 871429 - RNA, 19 nt, Homo sapiens
  misc_RNA (1)...(19): siRNA sense strand
ccuguuacuucaauaauuc

SEQ ID NO: 871430 - RNA, 19 nt, Homo sapiens
  misc_RNA (1)...(19): siRNA sense strand
ugaggacgcugagaggaaa

SEQ ID NO: 871431 - RNA, 19 nt, Homo sapiens
  misc_RNA (1)...(19): siRNA sense strand
ggugagagcaaguacaaug

SEQ ID NO: 871432 - RNA, 19 nt, Homo sapiens
  misc_RNA (1)...(19): siRNA sense strand
gaaauagccaaagaaggaa

SEQ ID NO: 871433 - RNA, 19 nt, Homo sapiens
  misc_RNA (1)...(19): siRNA sense strand
gccuguuacuucaauaauu

SEQ ID NO: 871434 - RNA, 19 nt, Homo sapiens
  misc_RNA (1)...(19): siRNA sense strand
uggaggagcagccugauaa

SEQ ID NO: 871435 - RNA, 19 nt, Homo sapiens
  misc_RNA (1)...(19): siRNA sense strand
agaggaaguugcugcuuau

SEQ ID NO: 871436 - RNA, 19 nt, Homo sapiens
  misc_RNA (1)...(19): siRNA sense strand
gaagcauuccaucaauuga

SEQ ID NO: 871437 - RNA, 19 nt, Homo sapiens
  misc_RNA (1)...(19): siRNA sense strand
uaugaagcauuccaucaau

SEQ ID NO: 871438 - RNA, 19 nt, Homo sapiens
  misc_RNA (1)...(19): siRNA sense strand
aaagaauccuucgaagaug

SEQ ID NO: 871439 - RNA, 19 nt, Homo sapiens
  misc_RNA (1)...(19): siRNA sense strand
caguagagcuaaugagcau

SEQ ID NO: 871440 - RNA, 19 nt, Homo sapiens
  misc_RNA (1)...(19): siRNA sense strand
acagauuacucucagacaa

SEQ ID NO: 871441 - RNA, 19 nt, Homo sapiens
  misc_RNA (1)...(19): siRNA sense strand
cagauuacucucagacaaa

SEQ ID NO: 871442 - RNA, 19 nt, Homo sapiens
  misc_RNA (1)...(19): siRNA sense strand
ugaagcauuccaucaauug

SEQ ID NO: 871443 - RNA, 19 nt, Homo sapiens
  misc_RNA (1)...(19): siRNA sense strand
cuucugaaauagccaaaga

SEQ ID NO: 871444 - RNA, 19 nt, Homo sapiens
  misc_RNA (1)...(19): siRNA sense strand
acaagaagaauaucugugu

SEQ ID NO: 871445 - RNA, 19 nt, Homo sapiens
  misc_RNA (1)...(19): siRNA sense strand
ggaggagcagccugauaaa

SEQ ID NO: 871446 - RNA, 19 nt, Homo sapiens
  misc_RNA (1)...(19): siRNA sense strand
gacaaaaguucacuaugga

SEQ ID NO: 871447 - RNA, 19 nt, Homo sapiens
  misc_RNA (1)...(19): siRNA sense strand
gaaguugcugcuuauagga

SEQ ID NO: 871448 - RNA, 19 nt, Homo sapiens
  misc_RNA (1)...(19): siRNA sense strand
gaaccacuucuaugaacga

SEQ ID NO: 871449 - RNA, 19 nt, Homo sapiens
  misc_RNA (1)...(19): siRNA sense strand
agagaugacagaagcaauu

SEQ ID NO: 871450 - RNA, 19 nt, Homo sapiens
  misc_RNA (1)...(19): siRNA sense strand
aagcggaaaccucuuacua

SEQ ID NO: 871451 - RNA, 19 nt, Homo sapiens
  misc_RNA (1)...(19): siRNA sense strand
aguggaagcuguaucucaa

SEQ ID NO: 871452 - RNA, 19 nt, Homo sapiens
  misc_RNA (1)...(19): siRNA sense strand
gcagagccaaggagagaug

SEQ ID NO: 871453 - RNA, 19 nt, Homo sapiens
  misc_RNA (1)...(19): siRNA sense strand
gcugcgagaugguuaucau

SEQ ID NO: 871454 - RNA, 19 nt, Homo sapiens
  misc_RNA (1)...(19): siRNA sense strand
auuccaaggucucaauuga

SEQ ID NO: 871455 - RNA, 19 nt, Homo sapiens
  misc_RNA (1)...(19): siRNA sense strand
uccaaggucucaauugauc

SEQ ID NO: 871456 - RNA, 19 nt, Homo sapiens
  misc_RNA (1)...(19): siRNA sense strand
acacaacaguagagcuaau

SEQ ID NO: 871457 - RNA, 19 nt, Homo sapiens
  misc_RNA (1)...(19): siRNA sense strand
auacaaacaggccaucaaa

SEQ ID NO: 871458 - RNA, 19 nt, Homo sapiens
  misc_RNA (1)...(19): siRNA sense strand
aagaauccuucgaagaugu

SEQ ID NO: 871459 - RNA, 19 nt, Homo sapiens
  misc_RNA (1)...(19): siRNA sense strand
uggaagcggaaaccucuua

SEQ ID NO: 871460 - RNA, 19 nt, Homo sapiens
  misc_RNA (1)...(19): siRNA sense strand
agacaaaaguucacuaugg

SEQ ID NO: 871461 - RNA, 19 nt, Homo sapiens
  misc_RNA (1)...(19): siRNA sense strand
ggaacuccuacaagaagaa

SEQ ID NO: 871462 - RNA, 19 nt, Homo sapiens
  misc_RNA (1)...(19): siRNA sense strand
ggggacaucuacaaugaaa

SEQ ID NO: 871463 - RNA, 19 nt, Homo sapiens
  misc_RNA (1)...(19): siRNA sense strand
caaacaggccaucaaaauu

SEQ ID NO: 871464 - RNA, 19 nt, Homo sapiens
  misc_RNA (1)...(19): siRNA sense strand
agaugaugcuuacagugaa

SEQ ID NO: 871465 - RNA, 19 nt, Homo sapiens
  misc_RNA (1)...(19): siRNA sense strand
ggagagaugacagaagcaa

SEQ ID NO: 871466 - RNA, 19 nt, Homo sapiens
  misc_RNA (1)...(19): siRNA sense strand
gggcuuagcacacuuagcu

SEQ ID NO: 871467 - RNA, 19 nt, Homo sapiens
  misc_RNA (1)...(19): siRNA sense strand
gaucauuaucuagagguaa

SEQ ID NO: 871468 - RNA, 19 nt, Homo sapiens
  misc_RNA (1)...(19): siRNA sense strand
uauagagucugcagaucuc

SEQ ID NO: 871469 - RNA, 19 nt, Homo sapiens
  misc_RNA (1)...(19): siRNA sense strand
aagccuagauuuggugaga

SEQ ID NO: 871470 - RNA, 19 nt, Homo sapiens
  misc_RNA (1)...(19): siRNA sense strand
cagacaaaaugcuagaaaa

SEQ ID NO: 871471 - RNA, 19 nt, Homo sapiens
  misc_RNA (1)...(19): siRNA sense strand
gccgcucucucaacuuguu

SEQ ID NO: 871472 - RNA, 19 nt, Homo sapiens
  misc_RNA (1)...(19): siRNA sense strand
gcauuaacaguccuugaca

SEQ ID NO: 871473 - RNA, 19 nt, Homo sapiens
  misc_RNA (1)...(19): siRNA sense strand
acucagaacguuuggaaga

SEQ ID NO: 871474 - RNA, 19 nt, Homo sapiens
  misc_RNA (1)...(19): siRNA sense strand
aaaggauacuacaacaaag

SEQ ID NO: 871475 - RNA, 19 nt, Homo sapiens
  misc_RNA (1)...(19): siRNA sense strand
acaacaaagcuucugaaug

SEQ ID NO: 871476 - RNA, 19 nt, Homo sapiens
  misc_RNA (1)...(19): siRNA sense strand
gaggaaguugcugcuuaua

SEQ ID NO: 871477 - RNA, 19 nt, Homo sapiens
  misc_RNA (1)...(19): siRNA sense strand
acagugaacaacuauauag

SEQ ID NO: 871478 - RNA, 19 nt, Homo sapiens
  misc_RNA (1)...(19): siRNA sense strand
gauauggaaggaugagaca

SEQ ID NO: 871479 - RNA, 19 nt, Homo sapiens
  misc_RNA (1)...(19): siRNA sense strand
caaaugaccuucaagacua

SEQ ID NO: 871480 - RNA, 19 nt, Homo sapiens
  misc_RNA (1)...(19): siRNA sense strand
gaauaucacccuuauagua

SEQ ID NO: 871481 - RNA, 19 nt, Homo sapiens
  misc_RNA (1)...(19): siRNA sense strand
gaaccaaguugucuuccuu

SEQ ID NO: 871482 - RNA, 19 nt, Homo sapiens
  misc_RNA (1)...(19): siRNA sense strand
gcaaaugaccggccugauu

SEQ ID NO: 871483 - RNA, 19 nt, Homo sapiens
  misc_RNA (1)...(19): siRNA sense strand
ggaaacugguggugggaaa

SEQ ID NO: 871484 - RNA, 19 nt, Homo sapiens
  misc_RNA (1)...(19): siRNA sense strand
gacaagaugcugaaacaaa

SEQ ID NO: 871485 - RNA, 19 nt, Homo sapiens
  misc_RNA (1)...(19): siRNA sense strand
ggaaaccucucuccuccau

SEQ ID NO: 871486 - RNA, 19 nt, Homo sapiens
  misc_RNA (1)...(19): siRNA sense strand
ucaguucucuuuggccuua

SEQ ID NO: 871487 - RNA, 19 nt, Homo sapiens
  misc_RNA (1)...(19): siRNA sense strand
gcagaugggaagaauauga

SEQ ID NO: 871488 - RNA, 19 nt, Homo sapiens
  misc_RNA (1)...(19): siRNA sense strand
ucacacacccguagccaua

SEQ ID NO: 871489 - RNA, 19 nt, Homo sapiens
  misc_RNA (1)...(19): siRNA sense strand
gcacuccuccucuauguau

SEQ ID NO: 871490 - RNA, 19 nt, Homo sapiens
  misc_RNA (1)...(19): siRNA sense strand
acaagaugcugaaacaaau

SEQ ID NO: 871491 - RNA, 19 nt, Homo sapiens
  misc_RNA (1)...(19): siRNA sense strand
cagacaagaugcugaaaca

SEQ ID NO: 871492 - RNA, 19 nt, Homo sapiens
  misc_RNA (1)...(19): siRNA sense strand
gggauugacuuagagcaaa

SEQ ID NO: 871493 - RNA, 19 nt, Homo sapiens
  misc_RNA (1)...(19): siRNA sense strand
gggcagaugggaagaauau

SEQ ID NO: 871494 - RNA, 19 nt, Homo sapiens
  misc_RNA (1)...(19): siRNA sense strand
gcaacgcugugagaagauu

SEQ ID NO: 871495 - RNA, 19 nt, Homo sapiens
  misc_RNA (1)...(19): siRNA sense strand
gagagaguccugcuguaaa

SEQ ID NO: 871496 - RNA, 19 nt, Homo sapiens
  misc_RNA (1)...(19): siRNA sense strand
aaaccucucuccuccauuc

SEQ ID NO: 871497 - RNA, 19 nt, Homo sapiens
  misc_RNA (1)...(19): siRNA sense strand
ucauugugcuggaauuuga

SEQ ID NO: 871498 - RNA, 19 nt, Homo sapiens
  misc_RNA (1)...(19): siRNA sense strand
ggaccugacuccuuuacag

SEQ ID NO: 871499 - RNA, 19 nt, Homo sapiens
  misc_RNA (1)...(19): siRNA sense strand
caaaggcucugcaaaugac

SEQ ID NO: 871500 - RNA, 19 nt, Homo sapiens
  misc_RNA (1)...(19): siRNA sense strand
aaacaaaugaccuucaaga

SEQ ID NO: 871501 - RNA, 19 nt, Homo sapiens
  misc_RNA (1)...(19): siRNA sense strand
ucaugaagaaggagaauaa

SEQ ID NO: 871502 - RNA, 19 nt, Homo sapiens
  misc_RNA (1)...(19): siRNA sense strand
ucuacaggcucaugaagaa

SEQ ID NO: 871503 - RNA, 19 nt, Homo sapiens
  misc_RNA (1)...(19): siRNA sense strand
gaccagauuuagucaaugg

SEQ ID NO: 871504 - RNA, 19 nt, Homo sapiens
  misc_RNA (1)...(19): siRNA sense strand
uacauuaccugacagacaa

SEQ ID NO: 871505 - RNA, 19 nt, Homo sapiens
  misc_RNA (1)...(19): siRNA sense strand
gagcaaaugcgaaccaagu

SEQ ID NO: 871506 - RNA, 19 nt, Homo sapiens
  misc_RNA (1)...(19): siRNA sense strand
ccaaaggcucugcaaauga

SEQ ID NO: 871507 - RNA, 19 nt, Homo sapiens
  misc_RNA (1)...(19): siRNA sense strand
gccauugccuucccacaga

SEQ ID NO: 871508 - RNA, 19 nt, Homo sapiens
  misc_RNA (1)...(19): siRNA sense strand
ugaagaaggagaauaacaa

SEQ ID NO: 871509 - RNA, 19 nt, Homo sapiens
  misc_RNA (1)...(19): siRNA sense strand
aaucauugcuauugaagga

SEQ ID NO: 871510 - RNA, 19 nt, Homo sapiens
  misc_RNA (1)...(19): siRNA sense strand
gcaaaugcgaaccaaguug

SEQ ID NO: 871511 - RNA, 19 nt, Homo sapiens
  misc_RNA (1)...(19): siRNA sense strand
aaaugaccuucaagacuaa

SEQ ID NO: 871512 - RNA, 19 nt, Homo sapiens
  misc_RNA (1)...(19): siRNA sense strand
caucaucuccaaagaguug

SEQ ID NO: 871513 - RNA, 19 nt, Homo sapiens
  misc_RNA (1)...(19): siRNA sense strand
ggauugacuuagagcaaau

SEQ ID NO: 871514 - RNA, 19 nt, Homo sapiens
  misc_RNA (1)...(19): siRNA sense strand
ccacaggccaggacucuug

SEQ ID NO: 871515 - RNA, 19 nt, Homo sapiens
  misc_RNA (1)...(19): siRNA sense strand
gaucaagccggaagagcaa

SEQ ID NO: 871516 - RNA, 19 nt, Homo sapiens
  misc_RNA (1)...(19): siRNA sense strand
uaacacuccugccaugaag

SEQ ID NO: 871517 - RNA, 19 nt, Homo sapiens
  misc_RNA (1)...(19): siRNA sense strand
uauugaaggaccagauuua

SEQ ID NO: 871518 - RNA, 19 nt, Homo sapiens
  misc_RNA (1)...(19): siRNA sense strand
gccaaaagcugggaaaaga

SEQ ID NO: 871519 - RNA, 19 nt, Homo sapiens
  misc_RNA (1)...(19): siRNA sense strand
caagagagagggcuucaag

SEQ ID NO: 871520 - RNA, 19 nt, Homo sapiens
  misc_RNA (1)...(19): siRNA sense strand
ggaacgggaugggauugug

SEQ ID NO: 871521 - RNA, 19 nt, Homo sapiens
  misc_RNA (1)...(19): siRNA sense strand
ccucaggucaguucucuuu

SEQ ID NO: 871522 - RNA, 19 nt, Homo sapiens
  misc_RNA (1)...(19): siRNA sense strand
guaacacuccugccaugaa

SEQ ID NO: 871523 - RNA, 19 nt, Homo sapiens
  misc_RNA (1)...(19): siRNA sense strand
caagugagcaucauugacu

SEQ ID NO: 871524 - RNA, 19 nt, Homo sapiens
  misc_RNA (1)...(19): siRNA sense strand
ggaccagauuuagucaaug

SEQ ID NO: 871525 - RNA, 19 nt, Homo sapiens
  misc_RNA (1)...(19): siRNA sense strand
gacggugacuaccaguuug

SEQ ID NO: 871526 - RNA, 19 nt, Homo sapiens
  misc_RNA (1)...(19): siRNA sense strand
caaccgcacagaaggcuuu

SEQ ID NO: 871527 - RNA, 19 nt, Homo sapiens
  misc_RNA (1)...(19): siRNA sense strand
ugagagaguccugcuguaa

SEQ ID NO: 871528 - RNA, 19 nt, Homo sapiens
  misc_RNA (1)...(19): siRNA sense strand
auaguaaugugcucugguu

SEQ ID NO: 871529 - RNA, 19 nt, Homo sapiens
  misc_RNA (1)...(19): siRNA sense strand
gaagaaggagaauaacaac

SEQ ID NO: 871530 - RNA, 19 nt, Homo sapiens
  misc_RNA (1)...(19): siRNA sense strand
ugacggugacuaccaguuu

SEQ ID NO: 871531 - RNA, 19 nt, Homo sapiens
  misc_RNA (1)...(19): siRNA sense strand
agaagaaaauugugacuga

SEQ ID NO: 871532 - RNA, 19 nt, Homo sapiens
  misc_RNA (1)...(19): siRNA sense strand
cugcaacgcugugagaaga

SEQ ID NO: 871533 - RNA, 19 nt, Homo sapiens
  misc_RNA (1)...(19): siRNA sense strand
aaccagggcuuccuucagu

SEQ ID NO: 871534 - RNA, 19 nt, Homo sapiens
  misc_RNA (1)...(19): siRNA sense strand
gggaugggauugugguuuu

SEQ ID NO: 871535 - RNA, 19 nt, Homo sapiens
  misc_RNA (1)...(19): siRNA sense strand
gggaagagcagcacuaucc

SEQ ID NO: 871536 - RNA, 19 nt, Homo sapiens
  misc_RNA (1)...(19): siRNA sense strand
caaaugcgaaccaaguugu

SEQ ID NO: 871537 - RNA, 19 nt, Homo sapiens
  misc_RNA (1)...(19): siRNA sense strand
cgagcucgcccaagccuaa

SEQ ID NO: 871538 - RNA, 19 nt, Homo sapiens
  misc_RNA (1)...(19): siRNA sense strand
caaccaaaggcucugcaaa

SEQ ID NO: 871539 - RNA, 19 nt, Homo sapiens
  misc_RNA (1)...(19): siRNA sense strand
cagaaaaccuuugaggaaa

SEQ ID NO: 871540 - RNA, 19 nt, Homo sapiens
  misc_RNA (1)...(19): siRNA sense strand
ugaaggaccagauuuaguc

SEQ ID NO: 871541 - RNA, 19 nt, Homo sapiens
  misc_RNA (1)...(19): siRNA sense strand
caucagugccucccuguuc

SEQ ID NO: 871542 - RNA, 19 nt, Homo sapiens
  misc_RNA (1)...(19): siRNA sense strand
acaggacaaugcugaacuu

SEQ ID NO: 871543 - RNA, 19 nt, Homo sapiens
  misc_RNA (1)...(19): siRNA sense strand
gccaugaagcaaauuaaga

SEQ ID NO: 871544 - RNA, 19 nt, Homo sapiens
  misc_RNA (1)...(19): siRNA sense strand
gaccggaggcguuucuuca

SEQ ID NO: 871545 - RNA, 19 nt, Homo sapiens
  misc_RNA (1)...(19): siRNA sense strand
ccucuuauccggugaagug

SEQ ID NO: 871546 - RNA, 19 nt, Homo sapiens
  misc_RNA (1)...(19): siRNA sense strand
acacacccguagccauaaa

SEQ ID NO: 871547 - RNA, 19 nt, Homo sapiens
  misc_RNA (1)...(19): siRNA sense strand
aacaauugcugaucacaca

SEQ ID NO: 871548 - RNA, 19 nt, Homo sapiens
  misc_RNA (1)...(19): siRNA sense strand
cuggaucccuccuaucaga

SEQ ID NO: 871549 - RNA, 19 nt, Homo sapiens
  misc_RNA (1)...(19): siRNA sense strand
ugacagacaagaugcugaa

SEQ ID NO: 871550 - RNA, 19 nt, Homo sapiens
  misc_RNA (1)...(19): siRNA sense strand
gaaggaccagauuuaguca

SEQ ID NO: 871551 - RNA, 19 nt, Homo sapiens
  misc_RNA (1)...(19): siRNA sense strand
gguguuuggcgaaguguuu

SEQ ID NO: 871552 - RNA, 19 nt, Homo sapiens
  misc_RNA (1)...(19): siRNA sense strand
gcuauugaaggaccagauu

SEQ ID NO: 871553 - RNA, 19 nt, Homo sapiens
  misc_RNA (1)...(19): siRNA sense strand
accaaaggcucugcaaaug

SEQ ID NO: 871554 - RNA, 19 nt, Homo sapiens
  misc_RNA (1)...(19): siRNA sense strand
gaaauccugccagagauca

SEQ ID NO: 871555 - RNA, 19 nt, Homo sapiens
  misc_RNA (1)...(19): siRNA sense strand
gaccugacuccuuuacaga

SEQ ID NO: 871556 - RNA, 19 nt, Homo sapiens
  misc_RNA (1)...(19): siRNA sense strand
aggcaucacugcgcuuuga

SEQ ID NO: 871557 - RNA, 19 nt, Homo sapiens
  misc_RNA (1)...(19): siRNA sense strand
ugggaucacuauaauucaa

SEQ ID NO: 871558 - RNA, 19 nt, Homo sapiens
  misc_RNA (1)...(19): siRNA sense strand
gaucuuacccucccuugcu

SEQ ID NO: 871559 - RNA, 19 nt, Homo sapiens
  misc_RNA (1)...(19): siRNA sense strand
gaucaucaucuccaaagag

SEQ ID NO: 871560 - RNA, 19 nt, Homo sapiens
  misc_RNA (1)...(19): siRNA sense strand
cagacaggcuggagagaac

SEQ ID NO: 871561 - RNA, 19 nt, Homo sapiens
  misc_RNA (1)...(19): siRNA sense strand
ccuucaagacuaaauguaa

SEQ ID NO: 871562 - RNA, 19 nt, Homo sapiens
  misc_RNA (1)...(19): siRNA sense strand
uaucacccuuauaguaaug

SEQ ID NO: 871563 - RNA, 19 nt, Homo sapiens
  misc_RNA (1)...(19): siRNA sense strand
guuuggagggauugacuua

SEQ ID NO: 871564 - RNA, 19 nt, Homo sapiens
  misc_RNA (1)...(19): siRNA sense strand
ggaaauccugccagagauc

SEQ ID NO: 871565 - RNA, 19 nt, Homo sapiens
  misc_RNA (1)...(19): siRNA sense strand
aaacugcaacgcugugaga

SEQ ID NO: 871566 - RNA, 19 nt, Homo sapiens
  misc_RNA (1)...(19): siRNA sense strand
gaggucugcagcaucuaua

SEQ ID NO: 871567 - RNA, 19 nt, Homo sapiens
  misc_RNA (1)...(19): siRNA sense strand
ccugggaucacuauaauuc

SEQ ID NO: 871568 - RNA, 19 nt, Homo sapiens
  misc_RNA (1)...(19): siRNA sense strand
uuggagggauugacuuaga

SEQ ID NO: 871569 - RNA, 19 nt, Homo sapiens
  misc_RNA (1)...(19): siRNA sense strand
cccugaggauucugaguuu

SEQ ID NO: 871570 - RNA, 19 nt, Homo sapiens
  misc_RNA (1)...(19): siRNA sense strand
ucaggucaguucucuuugg

SEQ ID NO: 871571 - RNA, 19 nt, Homo sapiens
  misc_RNA (1)...(19): siRNA sense strand
ggauugugguuuucuguga

SEQ ID NO: 871572 - RNA, 19 nt, Homo sapiens
  misc_RNA (1)...(19): siRNA sense strand
gugcuggaauuugaguuug

SEQ ID NO: 871573 - RNA, 19 nt, Homo sapiens
  misc_RNA (1)...(19): siRNA sense strand
gcucuucauugugcuggaa

SEQ ID NO: 871574 - RNA, 19 nt, Homo sapiens
  misc_RNA (1)...(19): siRNA sense strand
acgaccagcucuucauugu

SEQ ID NO: 871575 - RNA, 19 nt, Homo sapiens
  misc_RNA (1)...(19): siRNA sense strand
caaagccugggaucacuau

SEQ ID NO: 871576 - RNA, 19 nt, Homo sapiens
  misc_RNA (1)...(19): siRNA sense strand
acaaaugaccuucaagacu

SEQ ID NO: 871577 - RNA, 19 nt, Homo sapiens
  misc_RNA (1)...(19): siRNA sense strand
caagaugcugaaacaaaug

SEQ ID NO: 871578 - RNA, 19 nt, Homo sapiens
  misc_RNA (1)...(19): siRNA sense strand
aaccaaaggcucugcaaau

SEQ ID NO: 871579 - RNA, 19 nt, Homo sapiens
  misc_RNA (1)...(19): siRNA sense strand
ggacagcccuucucaauuu

SEQ ID NO: 871580 - RNA, 19 nt, Homo sapiens
  misc_RNA (1)...(19): siRNA sense strand
gaacaauacugcuguaauu

SEQ ID NO: 871581 - RNA, 19 nt, Homo sapiens
  misc_RNA (1)...(19): siRNA sense strand
gauaggaacucuucuuuua

SEQ ID NO: 871582 - RNA, 19 nt, Homo sapiens
  misc_RNA (1)...(19): siRNA sense strand
gagauaaggugaacaauac

SEQ ID NO: 871583 - RNA, 19 nt, Homo sapiens
  misc_RNA (1)...(19): siRNA sense strand
ggagauaaggugaacaaua

SEQ ID NO: 871584 - RNA, 19 nt, Homo sapiens
  misc_RNA (1)...(19): siRNA sense strand
gagaaacgcuaccaugugu

SEQ ID NO: 871585 - RNA, 19 nt, Homo sapiens
  misc_RNA (1)...(19): siRNA sense strand
uggagaagauguuagauaa

SEQ ID NO: 871586 - RNA, 19 nt, Homo sapiens
  misc_RNA (1)...(19): siRNA sense strand
cuaaggaaguucaaauuug

SEQ ID NO: 871587 - RNA, 19 nt, Homo sapiens
  misc_RNA (1)...(19): siRNA sense strand
gagaauggauaacucacaa

SEQ ID NO: 871588 - RNA, 19 nt, Homo sapiens
  misc_RNA (1)...(19): siRNA sense strand
caaaauggcuggcuucuau

SEQ ID NO: 871589 - RNA, 19 nt, Homo sapiens
  misc_RNA (1)...(19): siRNA sense strand
ccagguccuucuucuaaua

SEQ ID NO: 871590 - RNA, 19 nt, Homo sapiens
  misc_RNA (1)...(19): siRNA sense strand
ugauugaagucacaaguaa

SEQ ID NO: 871591 - RNA, 19 nt, Homo sapiens
  misc_RNA (1)...(19): siRNA sense strand
gcacaaaggacagaaguug

SEQ ID NO: 871592 - RNA, 19 nt, Homo sapiens
  misc_RNA (1)...(19): siRNA sense strand
cuaacaacguguaucagua

SEQ ID NO: 871593 - RNA, 19 nt, Homo sapiens
  misc_RNA (1)...(19): siRNA sense strand
gauauuguuuccuuuguuc

SEQ ID NO: 871594 - RNA, 19 nt, Homo sapiens
  misc_RNA (1)...(19): siRNA sense strand
gcaaucaucgguccuauuc

SEQ ID NO: 871595 - RNA, 19 nt, Homo sapiens
  misc_RNA (1)...(19): siRNA sense strand
gguccuucuucuaauauua

SEQ ID NO: 871596 - RNA, 19 nt, Homo sapiens
  misc_RNA (1)...(19): siRNA sense strand
guuaugagccggaauguga

SEQ ID NO: 871597 - RNA, 19 nt, Homo sapiens
  misc_RNA (1)...(19): siRNA sense strand
gaagaaaacuagugacauc

SEQ ID NO: 871598 - RNA, 19 nt, Homo sapiens
  misc_RNA (1)...(19): siRNA sense strand
gaagucacaaguaauuuga

SEQ ID NO: 871599 - RNA, 19 nt, Homo sapiens
  misc_RNA (1)...(19): siRNA sense strand
caagagaguguacacauga

SEQ ID NO: 871600 - RNA, 19 nt, Homo sapiens
  misc_RNA (1)...(19): siRNA sense strand
aaucuacucugacauauca

SEQ ID NO: 871601 - RNA, 19 nt, Homo sapiens
  misc_RNA (1)...(19): siRNA sense strand
cuucauaccaucagcauua

SEQ ID NO: 871602 - RNA, 19 nt, Homo sapiens
  misc_RNA (1)...(19): siRNA sense strand
ccagugaagugggugauaa

SEQ ID NO: 871603 - RNA, 19 nt, Homo sapiens
  misc_RNA (1)...(19): siRNA sense strand
ggacgagaauggauaacuc

SEQ ID NO: 871604 - RNA, 19 nt, Homo sapiens
  misc_RNA (1)...(19): siRNA sense strand
ggauauuguuuccuuuguu

SEQ ID NO: 871605 - RNA, 19 nt, Homo sapiens
  misc_RNA (1)...(19): siRNA sense strand
gcaaucuacucugacauau

SEQ ID NO: 871606 - RNA, 19 nt, Homo sapiens
  misc_RNA (1)...(19): siRNA sense strand
gcaaagguacaucaagaga

SEQ ID NO: 871607 - RNA, 19 nt, Homo sapiens
  misc_RNA (1)...(19): siRNA sense strand
ggcacuggcuaaauaagaa

SEQ ID NO: 871608 - RNA, 19 nt, Homo sapiens
  misc_RNA (1)...(19): siRNA sense strand
ucaagagaguguacacaug

SEQ ID NO: 871609 - RNA, 19 nt, Homo sapiens
  misc_RNA (1)...(19): siRNA sense strand
cgagaacauugagacauuu

SEQ ID NO: 871610 - RNA, 19 nt, Homo sapiens
  misc_RNA (1)...(19): siRNA sense strand
agacauuucuuucgaucuu

SEQ ID NO: 871611 - RNA, 19 nt, Homo sapiens
  misc_RNA (1)...(19): siRNA sense strand
gagucucuguggaucguua

SEQ ID NO: 871612 - RNA, 19 nt, Homo sapiens
  misc_RNA (1)...(19): siRNA sense strand
ggagaagauguuagauaaa

SEQ ID NO: 871613 - RNA, 19 nt, Homo sapiens
  misc_RNA (1)...(19): siRNA sense strand
ggugaacaauacugcugua

SEQ ID NO: 871614 - RNA, 19 nt, Homo sapiens
  misc_RNA (1)...(19): siRNA sense strand
uaacaacguguaucaguau

SEQ ID NO: 871615 - RNA, 19 nt, Homo sapiens
  misc_RNA (1)...(19): siRNA sense strand
ggcuauguguugacuguuu

SEQ ID NO: 871616 - RNA, 19 nt, Homo sapiens
  misc_RNA (1)...(19): siRNA sense strand
gcaugucagucgucagaau

SEQ ID NO: 871617 - RNA, 19 nt, Homo sapiens
  misc_RNA (1)...(19): siRNA sense strand
uaacucacaagcuccauaa

SEQ ID NO: 871618 - RNA, 19 nt, Homo sapiens
  misc_RNA (1)...(19): siRNA sense strand
aaagguacaucaagagagu

SEQ ID NO: 871619 - RNA, 19 nt, Homo sapiens
  misc_RNA (1)...(19): siRNA sense strand
cuagugacaucuacuuugu

SEQ ID NO: 871620 - RNA, 19 nt, Homo sapiens
  misc_RNA (1)...(19): siRNA sense strand
cugcaaagguacaucaaga

SEQ ID NO: 871621 - RNA, 19 nt, Homo sapiens
  misc_RNA (1)...(19): siRNA sense strand
aaucaucgguccuauucuu

SEQ ID NO: 871622 - RNA, 19 nt, Homo sapiens
  misc_RNA (1)...(19): siRNA sense strand
gaacauugagacauuucuu

SEQ ID NO: 871623 - RNA, 19 nt, Homo sapiens
  misc_RNA (1)...(19): siRNA sense strand
ccaaagagcccugaauucu

SEQ ID NO: 871624 - RNA, 19 nt, Homo sapiens
  misc_RNA (1)...(19): siRNA sense strand
gagaauccgcuccaacguu

SEQ ID NO: 871625 - RNA, 19 nt, Homo sapiens
  misc_RNA (1)...(19): siRNA sense strand
acgagaacauugagacauu

SEQ ID NO: 871626 - RNA, 19 nt, Homo sapiens
  misc_RNA (1)...(19): siRNA sense strand
caacguguaucaguaugga

SEQ ID NO: 871627 - RNA, 19 nt, Homo sapiens
  misc_RNA (1)...(19): siRNA sense strand
gaaagaagaaaacuaguga

SEQ ID NO: 871628 - RNA, 19 nt, Homo sapiens
  misc_RNA (1)...(19): siRNA sense strand
ucacuacacucuugaccau

SEQ ID NO: 871629 - RNA, 19 nt, Homo sapiens
  misc_RNA (1)...(19): siRNA sense strand
auacugcaaucuacucuga

SEQ ID NO: 871630 - RNA, 19 nt, Homo sapiens
  misc_RNA (1)...(19): siRNA sense strand
uuuguacucucucugauaa

SEQ ID NO: 871631 - RNA, 19 nt, Homo sapiens
  misc_RNA (1)...(19): siRNA sense strand
gcacugaacgcuacuugag

SEQ ID NO: 871632 - RNA, 19 nt, Homo sapiens
  misc_RNA (1)...(19): siRNA sense strand
guaucacucuugguuugua

SEQ ID NO: 871633 - RNA, 19 nt, Homo sapiens
  misc_RNA (1)...(19): siRNA sense strand
acgaaggccugaaauagga

SEQ ID NO: 871634 - RNA, 19 nt, Homo sapiens
  misc_RNA (1)...(19): siRNA sense strand
aagcaggccuucuacaaca

SEQ ID NO: 871635 - RNA, 19 nt, Homo sapiens
  misc_RNA (1)...(19): siRNA sense strand
gcaucaauauugucuucau

SEQ ID NO: 871636 - RNA, 19 nt, Homo sapiens
  misc_RNA (1)...(19): siRNA sense strand
ucaauuccugucuggauua

SEQ ID NO: 871637 - RNA, 19 nt, Homo sapiens
  misc_RNA (1)...(19): siRNA sense strand
cuauuaaguuccagugaug

SEQ ID NO: 871638 - RNA, 19 nt, Homo sapiens
  misc_RNA (1)...(19): siRNA sense strand
ggacuggcaggauauuguu

SEQ ID NO: 871639 - RNA, 19 nt, Homo sapiens
  misc_RNA (1)...(19): siRNA sense strand
ccauuaagcaggccuucua

SEQ ID NO: 871640 - RNA, 19 nt, Homo sapiens
  misc_RNA (1)...(19): siRNA sense strand
guggguacccucuaugaaa

SEQ ID NO: 871641 - RNA, 19 nt, Homo sapiens
  misc_RNA (1)...(19): siRNA sense strand
cagacgaaggccugaaaua

SEQ ID NO: 871642 - RNA, 19 nt, Homo sapiens
  misc_RNA (1)...(19): siRNA sense strand
gguuuccucugcagugauu

SEQ ID NO: 871643 - RNA, 19 nt, Homo sapiens
  misc_RNA (1)...(19): siRNA sense strand
ggacuuuccgugacauuuc

SEQ ID NO: 871644 - RNA, 19 nt, Homo sapiens
  misc_RNA (1)...(19): siRNA sense strand
caaagagcccugaauucug

SEQ ID NO: 871645 - RNA, 19 nt, Homo sapiens
  misc_RNA (1)...(19): siRNA sense strand
gagaguguacacaugauug

SEQ ID NO: 871646 - RNA, 19 nt, Homo sapiens
  misc_RNA (1)...(19): siRNA sense strand
gugauaggaacucuucuuu

SEQ ID NO: 871647 - RNA, 19 nt, Homo sapiens
  misc_RNA (1)...(19): siRNA sense strand
cuucuacucuggcaaacuu

SEQ ID NO: 871648 - RNA, 19 nt, Homo sapiens
  misc_RNA (1)...(19): siRNA sense strand
gcuagugagucccacgaau

SEQ ID NO: 871649 - RNA, 19 nt, Homo sapiens
  misc_RNA (1)...(19): siRNA sense strand
gagcaaucaucgguccuau

SEQ ID NO: 871650 - RNA, 19 nt, Homo sapiens
  misc_RNA (1)...(19): siRNA sense strand
uggcuucuauggauuguau

SEQ ID NO: 871651 - RNA, 19 nt, Homo sapiens
  misc_RNA (1)...(19): siRNA sense strand
uguguugacuguuucauuc

SEQ ID NO: 871652 - RNA, 19 nt, Homo sapiens
  misc_RNA (1)...(19): siRNA sense strand
acacaugauugaagucaca

SEQ ID NO: 871653 - RNA, 19 nt, Homo sapiens
  misc_RNA (1)...(19): siRNA sense strand
uaucacaggguaugaauca

SEQ ID NO: 871654 - RNA, 19 nt, Homo sapiens
  misc_RNA (1)...(19): siRNA sense strand
gucauucacuuuggaguug

SEQ ID NO: 871655 - RNA, 19 nt, Homo sapiens
  misc_RNA (1)...(19): siRNA sense strand
caguaagguugaugugguu

SEQ ID NO: 871656 - RNA, 19 nt, Homo sapiens
  misc_RNA (1)...(19): siRNA sense strand
uaaguuccagugaugagua

SEQ ID NO: 871657 - RNA, 19 nt, Homo sapiens
  misc_RNA (1)...(19): siRNA sense strand
uguacucucucugauaauu

SEQ ID NO: 871658 - RNA, 19 nt, Homo sapiens
  misc_RNA (1)...(19): siRNA sense strand
caugucagucgucagaaua

SEQ ID NO: 871659 - RNA, 19 nt, Homo sapiens
  misc_RNA (1)...(19): siRNA sense strand
uaucacucuugguuuguaa

SEQ ID NO: 871660 - RNA, 19 nt, Homo sapiens
  misc_RNA (1)...(19): siRNA sense strand
caaacuuggccaucucuau

SEQ ID NO: 871661 - RNA, 19 nt, Homo sapiens
  misc_RNA (1)...(19): siRNA sense strand
gcucagcuguggccuucug

SEQ ID NO: 871662 - RNA, 19 nt, Homo sapiens
  misc_RNA (1)...(19): siRNA sense strand
auucuucucugcauacuug

SEQ ID NO: 871663 - RNA, 19 nt, Homo sapiens
  misc_RNA (1)...(19): siRNA sense strand
guacucucucugauaauuu

SEQ ID NO: 871664 - RNA, 19 nt, Homo sapiens
  misc_RNA (1)...(19): siRNA sense strand
gggacagcccuucucaauu

SEQ ID NO: 871665 - RNA, 19 nt, Homo sapiens
  misc_RNA (1)...(19): siRNA sense strand
guauggacgagaauggaua

SEQ ID NO: 871666 - RNA, 19 nt, Homo sapiens
  misc_RNA (1)...(19): siRNA sense strand
gcuaacaacguguaucagu

SEQ ID NO: 871667 - RNA, 19 nt, Homo sapiens
  misc_RNA (1)...(19): siRNA sense strand
guccaaagagcccugaauu

SEQ ID NO: 871668 - RNA, 19 nt, Homo sapiens
  misc_RNA (1)...(19): siRNA sense strand
caguauuccugguuauugu

SEQ ID NO: 871669 - RNA, 19 nt, Homo sapiens
  misc_RNA (1)...(19): siRNA sense strand
uaucuauagugccaugcua

SEQ ID NO: 871670 - RNA, 19 nt, Homo sapiens
  misc_RNA (1)...(19): siRNA sense strand
gcuauguguugacuguuuc

SEQ ID NO: 871671 - RNA, 19 nt, Homo sapiens
  misc_RNA (1)...(19): siRNA sense strand
gcaaggccauuuuacuguu

SEQ ID NO: 871672 - RNA, 19 nt, Homo sapiens
  misc_RNA (1)...(19): siRNA sense strand
augaaacucuagcaaauca

SEQ ID NO: 871673 - RNA, 19 nt, Homo sapiens
  misc_RNA (1)...(19): siRNA sense strand
ugaagucacaaguaauuug

SEQ ID NO: 871674 - RNA, 19 nt, Homo sapiens
  misc_RNA (1)...(19): siRNA sense strand
acuccugacugcaaaggua

SEQ ID NO: 871675 - RNA, 19 nt, Homo sapiens
  misc_RNA (1)...(19): siRNA sense strand
ccgcggugcuggucuacuu

SEQ ID NO: 871676 - RNA, 19 nt, Homo sapiens
  misc_RNA (1)...(19): siRNA sense strand
guucaccacugucacuaca

SEQ ID NO: 871677 - RNA, 19 nt, Homo sapiens
  misc_RNA (1)...(19): siRNA sense strand
auucuggacuggcaggaua

SEQ ID NO: 871678 - RNA, 19 nt, Homo sapiens
  misc_RNA (1)...(19): siRNA sense strand
guaucaguauggacgagaa

SEQ ID NO: 871679 - RNA, 19 nt, Homo sapiens
  misc_RNA (1)...(19): siRNA sense strand
gaucaaggcugccgaguau

SEQ ID NO: 871680 - RNA, 19 nt, Homo sapiens
  misc_RNA (1)...(19): siRNA sense strand
gcucaugacuucagcgaua

SEQ ID NO: 871681 - RNA, 19 nt, Homo sapiens
  misc_RNA (1)...(19): siRNA sense strand
aaagagagcuggaccauuc

SEQ ID NO: 871682 - RNA, 19 nt, Homo sapiens
  misc_RNA (1)...(19): siRNA sense strand
gcaagugguuccugacauu

SEQ ID NO: 871683 - RNA, 19 nt, Homo sapiens
  misc_RNA (1)...(19): siRNA sense strand
ggaaagauggcacggauga

SEQ ID NO: 871684 - RNA, 19 nt, Homo sapiens
  misc_RNA (1)...(19): siRNA sense strand
ggaagcugcugguccuuga

SEQ ID NO: 871685 - RNA, 19 nt, Homo sapiens
  misc_RNA (1)...(19): siRNA sense strand
ggauaaccaucaccaacuu

SEQ ID NO: 871686 - RNA, 19 nt, Homo sapiens
  misc_RNA (1)...(19): siRNA sense strand
gcacggaugacuucuauca

SEQ ID NO: 871687 - RNA, 19 nt, Homo sapiens
  misc_RNA (1)...(19): siRNA sense strand
caagaggacacaucggaua

SEQ ID NO: 871688 - RNA, 19 nt, Homo sapiens
  misc_RNA (1)...(19): siRNA sense strand
ggaacauggugcucaacaa

SEQ ID NO: 871689 - RNA, 19 nt, Homo sapiens
  misc_RNA (1)...(19): siRNA sense strand
uaagaccgcugaccucauc

SEQ ID NO: 871690 - RNA, 19 nt, Homo sapiens
  misc_RNA (1)...(19): siRNA sense strand
caaaugagcaaugcggaua

SEQ ID NO: 871691 - RNA, 19 nt, Homo sapiens
  misc_RNA (1)...(19): siRNA sense strand
ggccaaggcucuaggaagu

SEQ ID NO: 871692 - RNA, 19 nt, Homo sapiens
  misc_RNA (1)...(19): siRNA sense strand
ggaagugggauuucuggaa

SEQ ID NO: 871693 - RNA, 19 nt, Homo sapiens
  misc_RNA (1)...(19): siRNA sense strand
gcauagagagccaggaaga

SEQ ID NO: 871694 - RNA, 19 nt, Homo sapiens
  misc_RNA (1)...(19): siRNA sense strand
caagcauagugcaguguuu

SEQ ID NO: 871695 - RNA, 19 nt, Homo sapiens
  misc_RNA (1)...(19): siRNA sense strand
gaacauggugcucaacaag

SEQ ID NO: 871696 - RNA, 19 nt, Homo sapiens
  misc_RNA (1)...(19): siRNA sense strand
gcggagagcaucagacaga

SEQ ID NO: 871697 - RNA, 19 nt, Homo sapiens
  misc_RNA (1)...(19): siRNA sense strand
ggaccgcaccugugaaauc

SEQ ID NO: 871698 - RNA, 19 nt, Homo sapiens
  misc_RNA (1)...(19): siRNA sense strand
ggacacaucggauaaccau

SEQ ID NO: 871699 - RNA, 19 nt, Homo sapiens
  misc_RNA (1)...(19): siRNA sense strand
gagggagacugugguaauc

SEQ ID NO: 871700 - RNA, 19 nt, Homo sapiens
  misc_RNA (1)...(19): siRNA sense strand
ucaucaaccugcagcacua

SEQ ID NO: 871701 - RNA, 19 nt, Homo sapiens
  misc_RNA (1)...(19): siRNA sense strand
gggagacugugguaaucuu

SEQ ID NO: 871702 - RNA, 19 nt, Homo sapiens
  misc_RNA (1)...(19): siRNA sense strand
ccucugugcucaugacuuc

SEQ ID NO: 871703 - RNA, 19 nt, Homo sapiens
  misc_RNA (1)...(19): siRNA sense strand
uggcacggaugacuucuau

SEQ ID NO: 871704 - RNA, 19 nt, Homo sapiens
  misc_RNA (1)...(19): siRNA sense strand
ccagccggaugguuaagaa

SEQ ID NO: 871705 - RNA, 19 nt, Homo sapiens
  misc_RNA (1)...(19): siRNA sense strand
agacugugguaaucuucua

SEQ ID NO: 871706 - RNA, 19 nt, Homo sapiens
  misc_RNA (1)...(19): siRNA sense strand
ugaaaucguugaggacaca

SEQ ID NO: 871707 - RNA, 19 nt, Homo sapiens
  misc_RNA (1)...(19): siRNA sense strand
gaagagcggcagggcaaga

SEQ ID NO: 871708 - RNA, 19 nt, Homo sapiens
  misc_RNA (1)...(19): siRNA sense strand
uggaaauaaugcaaagaga

SEQ ID NO: 871709 - RNA, 19 nt, Homo sapiens
  misc_RNA (1)...(19): siRNA sense strand
gcaaagagagcuggaccau

SEQ ID NO: 871710 - RNA, 19 nt, Homo sapiens
  misc_RNA (1)...(19): siRNA sense strand
ggcagucccugucaucucu

SEQ ID NO: 871711 - RNA, 19 nt, Homo sapiens
  misc_RNA (1)...(19): siRNA sense strand
uggaggcccugcaccagaa

SEQ ID NO: 871712 - RNA, 19 nt, Homo sapiens
  misc_RNA (1)...(19): siRNA sense strand
gaagagcuccauccaugac

SEQ ID NO: 871713 - RNA, 19 nt, Homo sapiens
  misc_RNA (1)...(19): siRNA sense strand
gagugggccuuugcaagug

SEQ ID NO: 871714 - RNA, 19 nt, Homo sapiens
  misc_RNA (1)...(19): siRNA sense strand
acacaucggauaaccauca

SEQ ID NO: 871715 - RNA, 19 nt, Homo sapiens
  misc_RNA (1)...(19): siRNA sense strand
ccgcaccugugaaaucguu

SEQ ID NO: 871716 - RNA, 19 nt, Homo sapiens
  misc_RNA (1)...(19): siRNA sense strand
gcucuaggaagugggauuu

SEQ ID NO: 871717 - RNA, 19 nt, Homo sapiens
  misc_RNA (1)...(19): siRNA sense strand
ggcccucagugccaucauu

SEQ ID NO: 871718 - RNA, 19 nt, Homo sapiens
  misc_RNA (1)...(19): siRNA sense strand
gauggacggguuucugaga

SEQ ID NO: 871719 - RNA, 19 nt, Homo sapiens
  misc_RNA (1)...(19): siRNA sense strand
cgagagggagacuguggua

SEQ ID NO: 871720 - RNA, 19 nt, Homo sapiens
  misc_RNA (1)...(19): siRNA sense strand
caaagagagcuggaccauu

SEQ ID NO: 871721 - RNA, 19 nt, Homo sapiens
  misc_RNA (1)...(19): siRNA sense strand
aagaggacacaucggauaa

SEQ ID NO: 871722 - RNA, 19 nt, Homo sapiens
  misc_RNA (1)...(19): siRNA sense strand
gaccgcaccugugaaaucg

SEQ ID NO: 871723 - RNA, 19 nt, Homo sapiens
  misc_RNA (1)...(19): siRNA sense strand
ugagugggccuuugcaagu

SEQ ID NO: 871724 - RNA, 19 nt, Homo sapiens
  misc_RNA (1)...(19): siRNA sense strand
gccggaugguuaagaagau

SEQ ID NO: 871725 - RNA, 19 nt, Homo sapiens
  misc_RNA (1)...(19): siRNA sense strand
ccgcugaccucaucaaccu

SEQ ID NO: 871726 - RNA, 19 nt, Homo sapiens
  misc_RNA (1)...(19): siRNA sense strand
gaugaccaaaugagcaaug

SEQ ID NO: 871727 - RNA, 19 nt, Homo sapiens
  misc_RNA (1)...(19): siRNA sense strand
caugcuguauggccaguuc

SEQ ID NO: 871728 - RNA, 19 nt, Homo sapiens
  misc_RNA (1)...(19): siRNA sense strand
gcaccugugaaaucguuga

SEQ ID NO: 871729 - RNA, 19 nt, Homo sapiens
  misc_RNA (1)...(19): siRNA sense strand
agcgcuaccugcggaaaua

SEQ ID NO: 871730 - RNA, 19 nt, Homo sapiens
  misc_RNA (1)...(19): siRNA sense strand
gcucuucaccaugcuguau

SEQ ID NO: 871731 - RNA, 19 nt, Homo sapiens
  misc_RNA (1)...(19): siRNA sense strand
gauaaccaucaccaacuuc

SEQ ID NO: 871732 - RNA, 19 nt, Homo sapiens
  misc_RNA (1)...(19): siRNA sense strand
agagggagacugugguaau

SEQ ID NO: 871733 - RNA, 19 nt, Homo sapiens
  misc_RNA (1)...(19): siRNA sense strand
gagagggagacugugguaa

SEQ ID NO: 871734 - RNA, 19 nt, Homo sapiens
  misc_RNA (1)...(19): siRNA sense strand
gggaacauggugcucaaca

SEQ ID NO: 871735 - RNA, 19 nt, Homo sapiens
  misc_RNA (1)...(19): siRNA sense strand
agaagagcuccauccauga

SEQ ID NO: 871736 - RNA, 19 nt, Homo sapiens
  misc_RNA (1)...(19): siRNA sense strand
ucaaggcugccgaguauac

SEQ ID NO: 871737 - RNA, 19 nt, Homo sapiens
  misc_RNA (1)...(19): siRNA sense strand
agaucaaggcugccgagua

SEQ ID NO: 871738 - RNA, 19 nt, Homo sapiens
  misc_RNA (1)...(19): siRNA sense strand
acauggugcucaacaagag

SEQ ID NO: 871739 - RNA, 19 nt, Homo sapiens
  misc_RNA (1)...(19): siRNA sense strand
ggagacugugguaaucuuc

SEQ ID NO: 871740 - RNA, 19 nt, Homo sapiens
  misc_RNA (1)...(19): siRNA sense strand
ccaagcauagugcaguguu

SEQ ID NO: 871741 - RNA, 19 nt, Homo sapiens
  misc_RNA (1)...(19): siRNA sense strand
cucaugacuucagcgauaa

SEQ ID NO: 871742 - RNA, 19 nt, Homo sapiens
  misc_RNA (1)...(19): siRNA sense strand
caagugguuccugacauug

SEQ ID NO: 871743 - RNA, 19 nt, Homo sapiens
  misc_RNA (1)...(19): siRNA sense strand
gcaagcccagugacaugug

SEQ ID NO: 871744 - RNA, 19 nt, Homo sapiens
  misc_RNA (1)...(19): siRNA sense strand
ucuaucagcugaagauccu

SEQ ID NO: 871745 - RNA, 19 nt, Homo sapiens
  misc_RNA (1)...(19): siRNA sense strand
gcagcacuacgucaucaag

SEQ ID NO: 871746 - RNA, 19 nt, Homo sapiens
  misc_RNA (1)...(19): siRNA sense strand
ugguuaagaagaugaagaa

SEQ ID NO: 871747 - RNA, 19 nt, Homo sapiens
  misc_RNA (1)...(19): siRNA sense strand
gcgcuaccugcggaaauaa

SEQ ID NO: 871748 - RNA, 19 nt, Homo sapiens
  misc_RNA (1)...(19): siRNA sense strand
gugccaucauugcaucaug

SEQ ID NO: 871749 - RNA, 19 nt, Homo sapiens
  misc_RNA (1)...(19): siRNA sense strand
gcacaguagucaccaauga

SEQ ID NO: 871750 - RNA, 19 nt, Homo sapiens
  misc_RNA (1)...(19): siRNA sense strand
gaacuggaaugccauagau

SEQ ID NO: 871751 - RNA, 19 nt, Homo sapiens
  misc_RNA (1)...(19): siRNA sense strand
cgaaguauguggaauuuau

SEQ ID NO: 871752 - RNA, 19 nt, Homo sapiens
  misc_RNA (1)...(19): siRNA sense strand
ccacuuaacuggauuucuu

SEQ ID NO: 871753 - RNA, 19 nt, Homo sapiens
  misc_RNA (1)...(19): siRNA sense strand
gaacagcacaggcuucuug

SEQ ID NO: 871754 - RNA, 19 nt, Homo sapiens
  misc_RNA (1)...(19): siRNA sense strand
ggacuguacuauucccuuu

SEQ ID NO: 871755 - RNA, 19 nt, Homo sapiens
  misc_RNA (1)...(19): siRNA sense strand
gagggaagcuggaaucucu

SEQ ID NO: 871756 - RNA, 19 nt, Homo sapiens
  misc_RNA (1)...(19): siRNA sense strand
caacagaggugaaacuacu

SEQ ID NO: 871757 - RNA, 19 nt, Homo sapiens
  misc_RNA (1)...(19): siRNA sense strand
gaggagcaccggaucaaua

SEQ ID NO: 871758 - RNA, 19 nt, Homo sapiens
  misc_RNA (1)...(19): siRNA sense strand
ccaaauacauugucuuaac

SEQ ID NO: 871759 - RNA, 19 nt, Homo sapiens
  misc_RNA (1)...(19): siRNA sense strand
gaacuugagguagccauua

SEQ ID NO: 871760 - RNA, 19 nt, Homo sapiens
  misc_RNA (1)...(19): siRNA sense strand
gauaauuacccuccuaguu

SEQ ID NO: 871761 - RNA, 19 nt, Homo sapiens
  misc_RNA (1)...(19): siRNA sense strand
gagaagcuauuuaugaaac

SEQ ID NO: 871762 - RNA, 19 nt, Homo sapiens
  misc_RNA (1)...(19): siRNA sense strand
gaggaaaucuuuugaugaa

SEQ ID NO: 871763 - RNA, 19 nt, Homo sapiens
  misc_RNA (1)...(19): siRNA sense strand
ggacaucuuuugccacaua

SEQ ID NO: 871764 - RNA, 19 nt, Homo sapiens
  misc_RNA (1)...(19): siRNA sense strand
uggagaagcuauuuaugaa

SEQ ID NO: 871765 - RNA, 19 nt, Homo sapiens
  misc_RNA (1)...(19): siRNA sense strand
ugccagagcucuaugaguu

SEQ ID NO: 871766 - RNA, 19 nt, Homo sapiens
  misc_RNA (1)...(19): siRNA sense strand
ggaccacuauuuacagcaa

SEQ ID NO: 871767 - RNA, 19 nt, Homo sapiens
  misc_RNA (1)...(19): siRNA sense strand
gaagcaacuuguagagaca

SEQ ID NO: 871768 - RNA, 19 nt, Homo sapiens
  misc_RNA (1)...(19): siRNA sense strand
auaauuacccuccuaguuu

SEQ ID NO: 871769 - RNA, 19 nt, Homo sapiens
  misc_RNA (1)...(19): siRNA sense strand
aaagauaauuacccuccua

SEQ ID NO: 871770 - RNA, 19 nt, Homo sapiens
  misc_RNA (1)...(19): siRNA sense strand
caaacaucaugaaggcuuu

SEQ ID NO: 871771 - RNA, 19 nt, Homo sapiens
  misc_RNA (1)...(19): siRNA sense strand
cugacuaucuuacaauuga

SEQ ID NO: 871772 - RNA, 19 nt, Homo sapiens
  misc_RNA (1)...(19): siRNA sense strand
ugucuuaacuuccaaacau

SEQ ID NO: 871773 - RNA, 19 nt, Homo sapiens
  misc_RNA (1)...(19): siRNA sense strand
ggagaagcuauuuaugaaa

SEQ ID NO: 871774 - RNA, 19 nt, Homo sapiens
  misc_RNA (1)...(19): siRNA sense strand
uaauuacccuccuaguuuc

SEQ ID NO: 871775 - RNA, 19 nt, Homo sapiens
  misc_RNA (1)...(19): siRNA sense strand
guagaacugccacagcuaa

SEQ ID NO: 871776 - RNA, 19 nt, Homo sapiens
  misc_RNA (1)...(19): siRNA sense strand
ggccauggacagccacuua

SEQ ID NO: 871777 - RNA, 19 nt, Homo sapiens
  misc_RNA (1)...(19): siRNA sense strand
aagcggcaauuuccaguuu

SEQ ID NO: 871778 - RNA, 19 nt, Homo sapiens
  misc_RNA (1)...(19): siRNA sense strand
gagcugguagcaucuguaa

SEQ ID NO: 871779 - RNA, 19 nt, Homo sapiens
  misc_RNA (1)...(19): siRNA sense strand
gcucuagcccugacuaaug

SEQ ID NO: 871780 - RNA, 19 nt, Homo sapiens
  misc_RNA (1)...(19): siRNA sense strand
caauggagaagcuauuuau

SEQ ID NO: 871781 - RNA, 19 nt, Homo sapiens
  misc_RNA (1)...(19): siRNA sense strand
caaaugggguccuggcuaa

SEQ ID NO: 871782 - RNA, 19 nt, Homo sapiens
  misc_RNA (1)...(19): siRNA sense strand
uggaaucucugacuaucuu

SEQ ID NO: 871783 - RNA, 19 nt, Homo sapiens
  misc_RNA (1)...(19): siRNA sense strand
gaggagcgacugaggcaaa

SEQ ID NO: 871784 - RNA, 19 nt, Homo sapiens
  misc_RNA (1)...(19): siRNA sense strand
gcgagugguucugguggua

SEQ ID NO: 871785 - RNA, 19 nt, Homo sapiens
  misc_RNA (1)...(19): siRNA sense strand
ccuccuaguuucaaauaug

SEQ ID NO: 871786 - RNA, 19 nt, Homo sapiens
  misc_RNA (1)...(19): siRNA sense strand
cagcuaaccauucaucaga

SEQ ID NO: 871787 - RNA, 19 nt, Homo sapiens
  misc_RNA (1)...(19): siRNA sense strand
ucaauggagaagcuauuua

SEQ ID NO: 871788 - RNA, 19 nt, Homo sapiens
  misc_RNA (1)...(19): siRNA sense strand
gaauauugggcccacacua

SEQ ID NO: 871789 - RNA, 19 nt, Homo sapiens
  misc_RNA (1)...(19): siRNA sense strand
gaacugaccugcguuuugg

SEQ ID NO: 871790 - RNA, 19 nt, Homo sapiens
  misc_RNA (1)...(19): siRNA sense strand
ugccaaauacauugucuua

SEQ ID NO: 871791 - RNA, 19 nt, Homo sapiens
  misc_RNA (1)...(19): siRNA sense strand
ggaacuggaaugccauaga

SEQ ID NO: 871792 - RNA, 19 nt, Homo sapiens
  misc_RNA (1)...(19): siRNA sense strand
gacagccacuuaacuggau

SEQ ID NO: 871793 - RNA, 19 nt, Homo sapiens
  misc_RNA (1)...(19): siRNA sense strand
gagugguucuggugguauu

SEQ ID NO: 871794 - RNA, 19 nt, Homo sapiens
  misc_RNA (1)...(19): siRNA sense strand
ggcaauuuccaguuucuaa

SEQ ID NO: 871795 - RNA, 19 nt, Homo sapiens
  misc_RNA (1)...(19): siRNA sense strand
gaaguauguggaauuuaug

SEQ ID NO: 871796 - RNA, 19 nt, Homo sapiens
  misc_RNA (1)...(19): siRNA sense strand
uuaacuggauuucuuugga

SEQ ID NO: 871797 - RNA, 19 nt, Homo sapiens
  misc_RNA (1)...(19): siRNA sense strand
aagcuggaaucucugacua

SEQ ID NO: 871798 - RNA, 19 nt, Homo sapiens
  misc_RNA (1)...(19): siRNA sense strand
ucuaugaguuagugaacaa

SEQ ID NO: 871799 - RNA, 19 nt, Homo sapiens
  misc_RNA (1)...(19): siRNA sense strand
gccagagcucuaugaguua

SEQ ID NO: 871800 - RNA, 19 nt, Homo sapiens
  misc_RNA (1)...(19): siRNA sense strand
guacacauccaagccuaaa

SEQ ID NO: 871801 - RNA, 19 nt, Homo sapiens
  misc_RNA (1)...(19): siRNA sense strand
guagagacaguuucaugug

SEQ ID NO: 871802 - RNA, 19 nt, Homo sapiens
  misc_RNA (1)...(19): siRNA sense strand
gccaaccagugggcagaua

SEQ ID NO: 871803 - RNA, 19 nt, Homo sapiens
  misc_RNA (1)...(19): siRNA sense strand
gcuggaaucucugacuauc

SEQ ID NO: 871804 - RNA, 19 nt, Homo sapiens
  misc_RNA (1)...(19): siRNA sense strand
ggucagaauauucguggaa

SEQ ID NO: 871805 - RNA, 19 nt, Homo sapiens
  misc_RNA (1)...(19): siRNA sense strand
ucaggccucuggugccaaa

SEQ ID NO: 871806 - RNA, 19 nt, Homo sapiens
  misc_RNA (1)...(19): siRNA sense strand
ugccacagcuaaccauuca

SEQ ID NO: 871807 - RNA, 19 nt, Homo sapiens
  misc_RNA (1)...(19): siRNA sense strand
uaacuuccaaacaucauga

SEQ ID NO: 871808 - RNA, 19 nt, Homo sapiens
  misc_RNA (1)...(19): siRNA sense strand
gcaugacaauagacaaacu

SEQ ID NO: 871809 - RNA, 19 nt, Homo sapiens
  misc_RNA (1)...(19): siRNA sense strand
gaaaacugcaugacaauag

SEQ ID NO: 871810 - RNA, 19 nt, Homo sapiens
  misc_RNA (1)...(19): siRNA sense strand
gaccacuauuuacagcaaa

SEQ ID NO: 871811 - RNA, 19 nt, Homo sapiens
  misc_RNA (1)...(19): siRNA sense strand
caauuuccaguuucuaaga

SEQ ID NO: 871812 - RNA, 19 nt, Homo sapiens
  misc_RNA (1)...(19): siRNA sense strand
aggaaaagauaccgaagua

SEQ ID NO: 871813 - RNA, 19 nt, Homo sapiens
  misc_RNA (1)...(19): siRNA sense strand
gauuuuggaccacuauuua

SEQ ID NO: 871814 - RNA, 19 nt, Homo sapiens
  misc_RNA (1)...(19): siRNA sense strand
gaaacuacugggccaugga

SEQ ID NO: 871815 - RNA, 19 nt, Homo sapiens
  misc_RNA (1)...(19): siRNA sense strand
ccagagcucuaugaguuag

SEQ ID NO: 871816 - RNA, 19 nt, Homo sapiens
  misc_RNA (1)...(19): siRNA sense strand
acacauccaagccuaaaga

SEQ ID NO: 871817 - RNA, 19 nt, Homo sapiens
  misc_RNA (1)...(19): siRNA sense strand
gaauuggugaagcaacuug

SEQ ID NO: 871818 - RNA, 19 nt, Homo sapiens
  misc_RNA (1)...(19): siRNA sense strand
ggaaucucugacuaucuua

SEQ ID NO: 871819 - RNA, 19 nt, Homo sapiens
  misc_RNA (1)...(19): siRNA sense strand
caugguggcuucuauaccu

SEQ ID NO: 871820 - RNA, 19 nt, Homo sapiens
  misc_RNA (1)...(19): siRNA sense strand
gaacugccacagcuaacca

SEQ ID NO: 871821 - RNA, 19 nt, Homo sapiens
  misc_RNA (1)...(19): siRNA sense strand
ucauguggaggaaaucuuu

SEQ ID NO: 871822 - RNA, 19 nt, Homo sapiens
  misc_RNA (1)...(19): siRNA sense strand
caaccagugggcagauauu

SEQ ID NO: 871823 - RNA, 19 nt, Homo sapiens
  misc_RNA (1)...(19): siRNA sense strand
ggaacuugagguagccauu

SEQ ID NO: 871824 - RNA, 19 nt, Homo sapiens
  misc_RNA (1)...(19): siRNA sense strand
gguuugaccaggccaaguu

SEQ ID NO: 871825 - RNA, 19 nt, Homo sapiens
  misc_RNA (1)...(19): siRNA sense strand
cuccuaguuucaaauauga

SEQ ID NO: 871826 - RNA, 19 nt, Homo sapiens
  misc_RNA (1)...(19): siRNA sense strand
uggccugguuauauaauga

SEQ ID NO: 871827 - RNA, 19 nt, Homo sapiens
  misc_RNA (1)...(19): siRNA sense strand
gcaauuuccaguuucuaag

SEQ ID NO: 871828 - RNA, 19 nt, Homo sapiens
  misc_RNA (1)...(19): siRNA sense strand
gagcaccggaucaauacug

SEQ ID NO: 871829 - RNA, 19 nt, Homo sapiens
  misc_RNA (1)...(19): siRNA sense strand
ucagaugccguguaaaugg

SEQ ID NO: 871830 - RNA, 19 nt, Homo sapiens
  misc_RNA (1)...(19): siRNA sense strand
gccauggacagccacuuaa

SEQ ID NO: 871831 - RNA, 19 nt, Homo sapiens
  misc_RNA (1)...(19): siRNA sense strand
cauccaagccuaaagaaaa

SEQ ID NO: 871832 - RNA, 19 nt, Homo sapiens
  misc_RNA (1)...(19): siRNA sense strand
uauaacccaggacaucuuu

SEQ ID NO: 871833 - RNA, 19 nt, Homo sapiens
  misc_RNA (1)...(19): siRNA sense strand
ccacagcuaaccauucauc

SEQ ID NO: 871834 - RNA, 19 nt, Homo sapiens
  misc_RNA (1)...(19): siRNA sense strand
ggcaacagaggugaaacua

SEQ ID NO: 871835 - RNA, 19 nt, Homo sapiens
  misc_RNA (1)...(19): siRNA sense strand
gaucccagaaugacacugu

SEQ ID NO: 871836 - RNA, 19 nt, Homo sapiens
  misc_RNA (1)...(19): siRNA sense strand
uggcaccauuucuguaguu

SEQ ID NO: 871837 - RNA, 19 nt, Homo sapiens
  misc_RNA (1)...(19): siRNA sense strand
ggaggaaaucuuuugauga

SEQ ID NO: 871838 - RNA, 19 nt, Homo sapiens
  misc_RNA (1)...(19): siRNA sense strand
caaguucggcaucuucauc

SEQ ID NO: 871839 - RNA, 19 nt, Homo sapiens
  misc_RNA (1)...(19): siRNA sense strand
gggaagcuggaaucucuga

SEQ ID NO: 871840 - RNA, 19 nt, Homo sapiens
  misc_RNA (1)...(19): siRNA sense strand
ggaaaacugcaugacaaua

SEQ ID NO: 871841 - RNA, 19 nt, Homo sapiens
  misc_RNA (1)...(19): siRNA sense strand
gagguagccauuaggaaca

SEQ ID NO: 871842 - RNA, 19 nt, Homo sapiens
  misc_RNA (1)...(19): siRNA sense strand
gguagaacugccacagcua

SEQ ID NO: 871843 - RNA, 19 nt, Homo sapiens
  misc_RNA (1)...(19): siRNA sense strand
auggagaagcuauuuauga

SEQ ID NO: 871844 - RNA, 19 nt, Homo sapiens
  misc_RNA (1)...(19): siRNA sense strand
uaccugcagugaucguuau

SEQ ID NO: 871845 - RNA, 19 nt, Homo sapiens
  misc_RNA (1)...(19): siRNA sense strand
agacauugccagagcucua

SEQ ID NO: 871846 - RNA, 19 nt, Homo sapiens
  misc_RNA (1)...(19): siRNA sense strand
uugaagaauuggugaagca

SEQ ID NO: 871847 - RNA, 19 nt, Homo sapiens
  misc_RNA (1)...(19): siRNA sense strand
uacauugucuuaacuucca

SEQ ID NO: 871848 - RNA, 19 nt, Homo sapiens
  misc_RNA (1)...(19): siRNA sense strand
gcugguagcaucuguaagc

SEQ ID NO: 871849 - RNA, 19 nt, Homo sapiens
  misc_RNA (1)...(19): siRNA sense strand
gaaaguaaccagacaagaa

SEQ ID NO: 871850 - RNA, 19 nt, Homo sapiens
  misc_RNA (1)...(19): siRNA sense strand
ggcaaucauucuucaaaua

SEQ ID NO: 871851 - RNA, 19 nt, Homo sapiens
  misc_RNA (1)...(19): siRNA sense strand
ggaagugucgcuacguuua

SEQ ID NO: 871852 - RNA, 19 nt, Homo sapiens
  misc_RNA (1)...(19): siRNA sense strand
gaacucaucuuggacaaca

SEQ ID NO: 871853 - RNA, 19 nt, Homo sapiens
  misc_RNA (1)...(19): siRNA sense strand
ccagggaacucaccaguca

SEQ ID NO: 871854 - RNA, 19 nt, Homo sapiens
  misc_RNA (1)...(19): siRNA sense strand
caagagauacagaugcuuu

SEQ ID NO: 871855 - RNA, 19 nt, Homo sapiens
  misc_RNA (1)...(19): siRNA sense strand
gaggaagacuacaagagau

SEQ ID NO: 871856 - RNA, 19 nt, Homo sapiens
  misc_RNA (1)...(19): siRNA sense strand
ucagaggagucuucaugaa

SEQ ID NO: 871857 - RNA, 19 nt, Homo sapiens
  misc_RNA (1)...(19): siRNA sense strand
uguacaagcugcccaacuu

SEQ ID NO: 871858 - RNA, 19 nt, Homo sapiens
  misc_RNA (1)...(19): siRNA sense strand
ccuuaacccucaacaagaa

SEQ ID NO: 871859 - RNA, 19 nt, Homo sapiens
  misc_RNA (1)...(19): siRNA sense strand
ggucagaggagucuucaug

SEQ ID NO: 871860 - RNA, 19 nt, Homo sapiens
  misc_RNA (1)...(19): siRNA sense strand
uggagaaccugcuggauca

SEQ ID NO: 871861 - RNA, 19 nt, Homo sapiens
  misc_RNA (1)...(19): siRNA sense strand
ucagagggcaacagguuua

SEQ ID NO: 871862 - RNA, 19 nt, Homo sapiens
  misc_RNA (1)...(19): siRNA sense strand
agauacagaugcuuuguuc

SEQ ID NO: 871863 - RNA, 19 nt, Homo sapiens
  misc_RNA (1)...(19): siRNA sense strand
ucacucagcggcaaucauu

SEQ ID NO: 871864 - RNA, 19 nt, Homo sapiens
  misc_RNA (1)...(19): siRNA sense strand
uggaggaacucaucuugga

SEQ ID NO: 871865 - RNA, 19 nt, Homo sapiens
  misc_RNA (1)...(19): siRNA sense strand
caacagguuuauccgagau

SEQ ID NO: 871866 - RNA, 19 nt, Homo sapiens
  misc_RNA (1)...(19): siRNA sense strand
ugaggaagacuacaagaga

SEQ ID NO: 871867 - RNA, 19 nt, Homo sapiens
  misc_RNA (1)...(19): siRNA sense strand
gaaaaguauuugucacuca

SEQ ID NO: 871868 - RNA, 19 nt, Homo sapiens
  misc_RNA (1)...(19): siRNA sense strand
cagcggcaaucauucuuca

SEQ ID NO: 871869 - RNA, 19 nt, Homo sapiens
  misc_RNA (1)...(19): siRNA sense strand
gcggcaaucauucuucaaa

SEQ ID NO: 871870 - RNA, 19 nt, Homo sapiens
  misc_RNA (1)...(19): siRNA sense strand
gagauacagaugcuuuguu

SEQ ID NO: 871871 - RNA, 19 nt, Homo sapiens
  misc_RNA (1)...(19): siRNA sense strand
acaagaaccgaaucacuga

SEQ ID NO: 871872 - RNA, 19 nt, Homo sapiens
  misc_RNA (1)...(19): siRNA sense strand
caacaagaaccgaaucacu

SEQ ID NO: 871873 - RNA, 19 nt, Homo sapiens
  misc_RNA (1)...(19): siRNA sense strand
gaaccugcuggaucacuug

SEQ ID NO: 871874 - RNA, 19 nt, Homo sapiens
  misc_RNA (1)...(19): siRNA sense strand
cggcaaucauucuucaaau

SEQ ID NO: 871875 - RNA, 19 nt, Homo sapiens
  misc_RNA (1)...(19): siRNA sense strand
caacuugaaauuucuggau

SEQ ID NO: 871876 - RNA, 19 nt, Homo sapiens
  misc_RNA (1)...(19): siRNA sense strand
ggaacucaccagucaccaa

SEQ ID NO: 871877 - RNA, 19 nt, Homo sapiens
  misc_RNA (1)...(19): siRNA sense strand
gggaagugucgcuacguuu

SEQ ID NO: 871878 - RNA, 19 nt, Homo sapiens
  misc_RNA (1)...(19): siRNA sense strand
uggaaggacugagcgcauu

SEQ ID NO: 871879 - RNA, 19 nt, Homo sapiens
  misc_RNA (1)...(19): siRNA sense strand
cugcccaacuugaaauuuc

SEQ ID NO: 871880 - RNA, 19 nt, Homo sapiens
  misc_RNA (1)...(19): siRNA sense strand
aggaagacuacaagagaua

SEQ ID NO: 871881 - RNA, 19 nt, Homo sapiens
  misc_RNA (1)...(19): siRNA sense strand
gaagugucgcuacguuuac

SEQ ID NO: 871882 - RNA, 19 nt, Homo sapiens
  misc_RNA (1)...(19): siRNA sense strand
ggaaggacugagcgcauuc

SEQ ID NO: 871883 - RNA, 19 nt, Homo sapiens
  misc_RNA (1)...(19): siRNA sense strand
gaugaggaagacuacaaga

SEQ ID NO: 871884 - RNA, 19 nt, Homo sapiens
  misc_RNA (1)...(19): siRNA sense strand
ucacugauuuggagaaccu

SEQ ID NO: 871885 - RNA, 19 nt, Homo sapiens
  misc_RNA (1)...(19): siRNA sense strand
gaagacuacaagagauaca

SEQ ID NO: 871886 - RNA, 19 nt, Homo sapiens
  misc_RNA (1)...(19): siRNA sense strand
ggaaaaggaugaggaagac

SEQ ID NO: 871887 - RNA, 19 nt, Homo sapiens
  misc_RNA (1)...(19): siRNA sense strand
uacaagagauacagaugcu

SEQ ID NO: 871888 - RNA, 19 nt, Homo sapiens
  misc_RNA (1)...(19): siRNA sense strand
ccagaaaguaaccagacaa

SEQ ID NO: 871889 - RNA, 19 nt, Homo sapiens
  misc_RNA (1)...(19): siRNA sense strand
aaaguaaccagacaagaac

SEQ ID NO: 871890 - RNA, 19 nt, Homo sapiens
  misc_RNA (1)...(19): siRNA sense strand
uaccuuaacccucaacaag

SEQ ID NO: 871891 - RNA, 19 nt, Homo sapiens
  misc_RNA (1)...(19): siRNA sense strand
ggaugaggaagacuacaag

SEQ ID NO: 871892 - RNA, 19 nt, Homo sapiens
  misc_RNA (1)...(19): siRNA sense strand
agaaccugcuggaucacuu

SEQ ID NO: 871893 - RNA, 19 nt, Homo sapiens
  misc_RNA (1)...(19): siRNA sense strand
gaaggacugagcgcauuca

SEQ ID NO: 871894 - RNA, 19 nt, Homo sapiens
  misc_RNA (1)...(19): siRNA sense strand
uacccagacugcauaccuu

SEQ ID NO: 871895 - RNA, 19 nt, Homo sapiens
  misc_RNA (1)...(19): siRNA sense strand
gucagaggagucuucauga

SEQ ID NO: 871896 - RNA, 19 nt, Homo sapiens
  misc_RNA (1)...(19): siRNA sense strand
acucagagggcaacagguu

SEQ ID NO: 871897 - RNA, 19 nt, Homo sapiens
  misc_RNA (1)...(19): siRNA sense strand
ggaagacuacaagagauac

SEQ ID NO: 871898 - RNA, 19 nt, Homo sapiens
  misc_RNA (1)...(19): siRNA sense strand
cuacguuuacuaugggaaa

SEQ ID NO: 871899 - RNA, 19 nt, Homo sapiens
  misc_RNA (1)...(19): siRNA sense strand
gucgcuacguuuacuaugg

SEQ ID NO: 871900 - RNA, 19 nt, Homo sapiens
  misc_RNA (1)...(19): siRNA sense strand
gagccuggaggaacucauc

SEQ ID NO: 871901 - RNA, 19 nt, Homo sapiens
  misc_RNA (1)...(19): siRNA sense strand
acagguuuauccgagauga

SEQ ID NO: 871902 - RNA, 19 nt, Homo sapiens
  misc_RNA (1)...(19): siRNA sense strand
cccagaaaguaaccagaca

SEQ ID NO: 871903 - RNA, 19 nt, Homo sapiens
  misc_RNA (1)...(19): siRNA sense strand
ggacauguuugaaaucuuu

SEQ ID NO: 871904 - RNA, 19 nt, Homo sapiens
  misc_RNA (1)...(19): siRNA sense strand
gccaucaaaugcagaauua

SEQ ID NO: 871905 - RNA, 19 nt, Homo sapiens
  misc_RNA (1)...(19): siRNA sense strand
ucaagaaccuaaagaagaa

SEQ ID NO: 871906 - RNA, 19 nt, Homo sapiens
  misc_RNA (1)...(19): siRNA sense strand
caagguggcugucuauguu

SEQ ID NO: 871907 - RNA, 19 nt, Homo sapiens
  misc_RNA (1)...(19): siRNA sense strand
gguaauagcuagcacagau

SEQ ID NO: 871908 - RNA, 19 nt, Homo sapiens
  misc_RNA (1)...(19): siRNA sense strand
gaaauaaaccaaucaccaa

SEQ ID NO: 871909 - RNA, 19 nt, Homo sapiens
  misc_RNA (1)...(19): siRNA sense strand
caagugaaguacccaauga

SEQ ID NO: 871910 - RNA, 19 nt, Homo sapiens
  misc_RNA (1)...(19): siRNA sense strand
gcacagauguugacaagac

SEQ ID NO: 871911 - RNA, 19 nt, Homo sapiens
  misc_RNA (1)...(19): siRNA sense strand
caaauugcaugaagaggaa

SEQ ID NO: 871912 - RNA, 19 nt, Homo sapiens
  misc_RNA (1)...(19): siRNA sense strand
uuacaaugcuguggaauaa

SEQ ID NO: 871913 - RNA, 19 nt, Homo sapiens
  misc_RNA (1)...(19): siRNA sense strand
gcagaauuauggcagguuu

SEQ ID NO: 871914 - RNA, 19 nt, Homo sapiens
  misc_RNA (1)...(19): siRNA sense strand
ugacaagaguccagauuug

SEQ ID NO: 871915 - RNA, 19 nt, Homo sapiens
  misc_RNA (1)...(19): siRNA sense strand
gcuggaagauuuggaauug

SEQ ID NO: 871916 - RNA, 19 nt, Homo sapiens
  misc_RNA (1)...(19): siRNA sense strand
gcucccagguuacggguua

SEQ ID NO: 871917 - RNA, 19 nt, Homo sapiens
  misc_RNA (1)...(19): siRNA sense strand
agaagaaacugaaagcaau

SEQ ID NO: 871918 - RNA, 19 nt, Homo sapiens
  misc_RNA (1)...(19): siRNA sense strand
ccacagagcacaccacgaa

SEQ ID NO: 871919 - RNA, 19 nt, Homo sapiens
  misc_RNA (1)...(19): siRNA sense strand
gaacaagcagcaacuggaa

SEQ ID NO: 871920 - RNA, 19 nt, Homo sapiens
  misc_RNA (1)...(19): siRNA sense strand
gagaacaaacucuacacua

SEQ ID NO: 871921 - RNA, 19 nt, Homo sapiens
  misc_RNA (1)...(19): siRNA sense strand
gaacaaacucuacacuaca

SEQ ID NO: 871922 - RNA, 19 nt, Homo sapiens
  misc_RNA (1)...(19): siRNA sense strand
aaaggaagcaugaagcuaa

SEQ ID NO: 871923 - RNA, 19 nt, Homo sapiens
  misc_RNA (1)...(19): siRNA sense strand
ggaauucuaguucuacuga

SEQ ID NO: 871924 - RNA, 19 nt, Homo sapiens
  misc_RNA (1)...(19): siRNA sense strand
cuaaaccgguggcuucuga

SEQ ID NO: 871925 - RNA, 19 nt, Homo sapiens
  misc_RNA (1)...(19): siRNA sense strand
gauuuggaauuggguauuu

SEQ ID NO: 871926 - RNA, 19 nt, Homo sapiens
  misc_RNA (1)...(19): siRNA sense strand
ggaaccaccucagaauaug

SEQ ID NO: 871927 - RNA, 19 nt, Homo sapiens
  misc_RNA (1)...(19): siRNA sense strand
agaaagugcuguagugcaa

SEQ ID NO: 871928 - RNA, 19 nt, Homo sapiens
  misc_RNA (1)...(19): siRNA sense strand
gauguaguuuggaauucua

SEQ ID NO: 871929 - RNA, 19 nt, Homo sapiens
  misc_RNA (1)...(19): siRNA sense strand
aguauuagcuggauuugga

SEQ ID NO: 871930 - RNA, 19 nt, Homo sapiens
  misc_RNA (1)...(19): siRNA sense strand
gaauaugaaaccacaauca

SEQ ID NO: 871931 - RNA, 19 nt, Homo sapiens
  misc_RNA (1)...(19): siRNA sense strand
uacaugugcucccagguua

SEQ ID NO: 871932 - RNA, 19 nt, Homo sapiens
  misc_RNA (1)...(19): siRNA sense strand
gggaagaauugcaaagucu

SEQ ID NO: 871933 - RNA, 19 nt, Homo sapiens
  misc_RNA (1)...(19): siRNA sense strand
aacaauaacuuaccaagca

SEQ ID NO: 871934 - RNA, 19 nt, Homo sapiens
  misc_RNA (1)...(19): siRNA sense strand
gagcauauuuuaacagcua

SEQ ID NO: 871935 - RNA, 19 nt, Homo sapiens
  misc_RNA (1)...(19): siRNA sense strand
ggugcaccuucauuuguua

SEQ ID NO: 871936 - RNA, 19 nt, Homo sapiens
  misc_RNA (1)...(19): siRNA sense strand
uacccaaccuacaacuuua

SEQ ID NO: 871937 - RNA, 19 nt, Homo sapiens
  misc_RNA (1)...(19): siRNA sense strand
cauacaagguggcugucua

SEQ ID NO: 871938 - RNA, 19 nt, Homo sapiens
  misc_RNA (1)...(19): siRNA sense strand
ggaagugugggaugugaaa

SEQ ID NO: 871939 - RNA, 19 nt, Homo sapiens
  misc_RNA (1)...(19): siRNA sense strand
gcagauaaaguuacaaugc

SEQ ID NO: 871940 - RNA, 19 nt, Homo sapiens
  misc_RNA (1)...(19): siRNA sense strand
ccaagcaguuccaagugaa

SEQ ID NO: 871941 - RNA, 19 nt, Homo sapiens
  misc_RNA (1)...(19): siRNA sense strand
agaacaaacucuacacuac

SEQ ID NO: 871942 - RNA, 19 nt, Homo sapiens
  misc_RNA (1)...(19): siRNA sense strand
uagcacagauguugacaag

SEQ ID NO: 871943 - RNA, 19 nt, Homo sapiens
  misc_RNA (1)...(19): siRNA sense strand
cagaaggacuguacauggu

SEQ ID NO: 871944 - RNA, 19 nt, Homo sapiens
  misc_RNA (1)...(19): siRNA sense strand
ucgaacaacugaaagaaca

SEQ ID NO: 871945 - RNA, 19 nt, Homo sapiens
  misc_RNA (1)...(19): siRNA sense strand
gaaacugaaagcaaucgaa

SEQ ID NO: 871946 - RNA, 19 nt, Homo sapiens
  misc_RNA (1)...(19): siRNA sense strand
aggaaacgauaagccauua

SEQ ID NO: 871947 - RNA, 19 nt, Homo sapiens
  misc_RNA (1)...(19): siRNA sense strand
gaaccaccucagaauauga

SEQ ID NO: 871948 - RNA, 19 nt, Homo sapiens
  misc_RNA (1)...(19): siRNA sense strand
uaaggcagauaaaguuaca

SEQ ID NO: 871949 - RNA, 19 nt, Homo sapiens
  misc_RNA (1)...(19): siRNA sense strand
caacuuugcuggaccucau

SEQ ID NO: 871950 - RNA, 19 nt, Homo sapiens
  misc_RNA (1)...(19): siRNA sense strand
gggaaucugggaagaauug

SEQ ID NO: 871951 - RNA, 19 nt, Homo sapiens
  misc_RNA (1)...(19): siRNA sense strand
gaaagcaaucgaacaacug

SEQ ID NO: 871952 - RNA, 19 nt, Homo sapiens
  misc_RNA (1)...(19): siRNA sense strand
guaaugcagccuacuauag

SEQ ID NO: 871953 - RNA, 19 nt, Homo sapiens
  misc_RNA (1)...(19): siRNA sense strand
cuugaaaugugauccugua

SEQ ID NO: 871954 - RNA, 19 nt, Homo sapiens
  misc_RNA (1)...(19): siRNA sense strand
ccacgccgcucuugacagu

SEQ ID NO: 871955 - RNA, 19 nt, Homo sapiens
  misc_RNA (1)...(19): siRNA sense strand
guuacaaugcuguggaaua

SEQ ID NO: 871956 - RNA, 19 nt, Homo sapiens
  misc_RNA (1)...(19): siRNA sense strand
uacacuacauugcaacaaa

SEQ ID NO: 871957 - RNA, 19 nt, Homo sapiens
  misc_RNA (1)...(19): siRNA sense strand
gaaagaacaagcagcaacu

SEQ ID NO: 871958 - RNA, 19 nt, Homo sapiens
  misc_RNA (1)...(19): siRNA sense strand
auaaaccaaucaccaauuc

SEQ ID NO: 871959 - RNA, 19 nt, Homo sapiens
  misc_RNA (1)...(19): siRNA sense strand
ugaaguacccaaugaggaa

SEQ ID NO: 871960 - RNA, 19 nt, Homo sapiens
  misc_RNA (1)...(19): siRNA sense strand
ggaacugguccucguaaug

SEQ ID NO: 871961 - RNA, 19 nt, Homo sapiens
  misc_RNA (1)...(19): siRNA sense strand
aaagugcuguagugcaauu

SEQ ID NO: 871962 - RNA, 19 nt, Homo sapiens
  misc_RNA (1)...(19): siRNA sense strand
gaacugguccucguaaugc

SEQ ID NO: 871963 - RNA, 19 nt, Homo sapiens
  misc_RNA (1)...(19): siRNA sense strand
ggagaaaauucagaaagaa

SEQ ID NO: 871964 - RNA, 19 nt, Homo sapiens
  misc_RNA (1)...(19): siRNA sense strand
ugaaagcaaucgaacaacu

SEQ ID NO: 871965 - RNA, 19 nt, Homo sapiens
  misc_RNA (1)...(19): siRNA sense strand
aaugugauccuguauuuga

SEQ ID NO: 871966 - RNA, 19 nt, Homo sapiens
  misc_RNA (1)...(19): siRNA sense strand
gaagcaugaagcuaagaaa

SEQ ID NO: 871967 - RNA, 19 nt, Homo sapiens
  misc_RNA (1)...(19): siRNA sense strand
ggaagcaugaagcuaagaa

SEQ ID NO: 871968 - RNA, 19 nt, Homo sapiens
  misc_RNA (1)...(19): siRNA sense strand
caucaaaugcagaauuaug

SEQ ID NO: 871969 - RNA, 19 nt, Homo sapiens
  misc_RNA (1)...(19): siRNA sense strand
ccagguuacggguuaauaa

SEQ ID NO: 871970 - RNA, 19 nt, Homo sapiens
  misc_RNA (1)...(19): siRNA sense strand
gauccuguauuugacuuug

SEQ ID NO: 871971 - RNA, 19 nt, Homo sapiens
  misc_RNA (1)...(19): siRNA sense strand
caccuucauuuguuagauu

SEQ ID NO: 871972 - RNA, 19 nt, Homo sapiens
  misc_RNA (1)...(19): siRNA sense strand
gaagaaacugaaagcaauc

SEQ ID NO: 871973 - RNA, 19 nt, Homo sapiens
  misc_RNA (1)...(19): siRNA sense strand
gaagcaagaagugacaaga

SEQ ID NO: 871974 - RNA, 19 nt, Homo sapiens
  misc_RNA (1)...(19): siRNA sense strand
gguuacggguuaauaaugg

SEQ ID NO: 871975 - RNA, 19 nt, Homo sapiens
  misc_RNA (1)...(19): siRNA sense strand
uggagaaagugcuguagug

SEQ ID NO: 871976 - RNA, 19 nt, Homo sapiens
  misc_RNA (1)...(19): siRNA sense strand
gaagaauugcaaagucugu

SEQ ID NO: 871977 - RNA, 19 nt, Homo sapiens
  misc_RNA (1)...(19): siRNA sense strand
gcauuauacuggcucuauc

SEQ ID NO: 871978 - RNA, 19 nt, Homo sapiens
  misc_RNA (1)...(19): siRNA sense strand
ccaagggaaucugggaaga

SEQ ID NO: 871979 - RNA, 19 nt, Homo sapiens
  misc_RNA (1)...(19): siRNA sense strand
gugacaagaguccagauuu

SEQ ID NO: 871980 - RNA, 19 nt, Homo sapiens
  misc_RNA (1)...(19): siRNA sense strand
ugaggaaccuaaaguugca

SEQ ID NO: 871981 - RNA, 19 nt, Homo sapiens
  misc_RNA (1)...(19): siRNA sense strand
gacuguacauggugaaugg

SEQ ID NO: 871982 - RNA, 19 nt, Homo sapiens
  misc_RNA (1)...(19): siRNA sense strand
uacaguacuucuaaagaug

SEQ ID NO: 871983 - RNA, 19 nt, Homo sapiens
  misc_RNA (1)...(19): siRNA sense strand
ccacaaucaggaaacgaua

SEQ ID NO: 871984 - RNA, 19 nt, Homo sapiens
  misc_RNA (1)...(19): siRNA sense strand
caaugaggaaccuaaaguu

SEQ ID NO: 871985 - RNA, 19 nt, Homo sapiens
  misc_RNA (1)...(19): siRNA sense strand
acacuacauugcaacaaau

SEQ ID NO: 871986 - RNA, 19 nt, Homo sapiens
  misc_RNA (1)...(19): siRNA sense strand
cagauaaaguuacaaugcu

SEQ ID NO: 871987 - RNA, 19 nt, Homo sapiens
  misc_RNA (1)...(19): siRNA sense strand
caaacucuacacuacauug

SEQ ID NO: 871988 - RNA, 19 nt, Homo sapiens
  misc_RNA (1)...(19): siRNA sense strand
caaaggaagcaugaagcua

SEQ ID NO: 871989 - RNA, 19 nt, Homo sapiens
  misc_RNA (1)...(19): siRNA sense strand
guauuugacuuuggaacug

SEQ ID NO: 871990 - RNA, 19 nt, Homo sapiens
  misc_RNA (1)...(19): siRNA sense strand
cuacaacuuuaugauguga

SEQ ID NO: 871991 - RNA, 19 nt, Homo sapiens
  misc_RNA (1)...(19): siRNA sense strand
gcacaccacgaaacacugu

SEQ ID NO: 871992 - RNA, 19 nt, Homo sapiens
  misc_RNA (1)...(19): siRNA sense strand
ugaaaugugauccuguauu

SEQ ID NO: 871993 - RNA, 19 nt, Homo sapiens
  misc_RNA (1)...(19): siRNA sense strand
guuuggaauucuaguucua

SEQ ID NO: 871994 - RNA, 19 nt, Homo sapiens
  misc_RNA (1)...(19): siRNA sense strand
cuacugcuguguugguaau

SEQ ID NO: 871995 - RNA, 19 nt, Homo sapiens
  misc_RNA (1)...(19): siRNA sense strand
gcaccuucauuuguuagau

SEQ ID NO: 871996 - RNA, 19 nt, Homo sapiens
  misc_RNA (1)...(19): siRNA sense strand
cccgcaauguuaacaauga

SEQ ID NO: 871997 - RNA, 19 nt, Homo sapiens
  misc_RNA (1)...(19): siRNA sense strand
ccaaugaggaaccuaaagu

SEQ ID NO: 871998 - RNA, 19 nt, Homo sapiens
  misc_RNA (1)...(19): siRNA sense strand
cuaaaguugcaacagcuua

SEQ ID NO: 871999 - RNA, 19 nt, Homo sapiens
  misc_RNA (1)...(19): siRNA sense strand
acaaugcuguggaauaaaa

SEQ ID NO: 872000 - RNA, 19 nt, Homo sapiens
  misc_RNA (1)...(19): siRNA sense strand
ggagcuggaagauuuggaa

SEQ ID NO: 872001 - RNA, 19 nt, Homo sapiens
  misc_RNA (1)...(19): siRNA sense strand
aagaagaaacugaaagcaa

SEQ ID NO: 872002 - RNA, 19 nt, Homo sapiens
  misc_RNA (1)...(19): siRNA sense strand
gcaaagcaggaagcaagaa

SEQ ID NO: 872003 - RNA, 19 nt, Homo sapiens
  misc_RNA (1)...(19): siRNA sense strand
ggaauuagccaauacacua

SEQ ID NO: 872004 - RNA, 19 nt, Homo sapiens
  misc_RNA (1)...(19): siRNA sense strand
caaagauacucaacucaaa

SEQ ID NO: 872005 - RNA, 19 nt, Homo sapiens
  misc_RNA (1)...(19): siRNA sense strand
aaacucacaugcugaauuu

SEQ ID NO: 872006 - RNA, 19 nt, Homo sapiens
  misc_RNA (1)...(19): siRNA sense strand
uacaagauguggugaauuu

SEQ ID NO: 872007 - RNA, 19 nt, Homo sapiens
  misc_RNA (1)...(19): siRNA sense strand
gaauaacccugaucuuuac

SEQ ID NO: 872008 - RNA, 19 nt, Homo sapiens
  misc_RNA (1)...(19): siRNA sense strand
gaaaugaacccugccauau

SEQ ID NO: 872009 - RNA, 19 nt, Homo sapiens
  misc_RNA (1)...(19): siRNA sense strand
agaauaacccugaucuuua

SEQ ID NO: 872010 - RNA, 19 nt, Homo sapiens
  misc_RNA (1)...(19): siRNA sense strand
uaaaggaguugcuaaaucu

SEQ ID NO: 872011 - RNA, 19 nt, Homo sapiens
  misc_RNA (1)...(19): siRNA sense strand
aaugaacccugccauauaa

SEQ ID NO: 872012 - RNA, 19 nt, Homo sapiens
  misc_RNA (1)...(19): siRNA sense strand
gaagcuaauuuggaaguuu

SEQ ID NO: 872013 - RNA, 19 nt, Homo sapiens
  misc_RNA (1)...(19): siRNA sense strand
caacuugacugacccuaug

SEQ ID NO: 872014 - RNA, 19 nt, Homo sapiens
  misc_RNA (1)...(19): siRNA sense strand
gagauaaugucagcaguga

SEQ ID NO: 872015 - RNA, 19 nt, Homo sapiens
  misc_RNA (1)...(19): siRNA sense strand
uaacccugaucuuuacuua

SEQ ID NO: 872016 - RNA, 19 nt, Homo sapiens
  misc_RNA (1)...(19): siRNA sense strand
gaacugcauuuccuaccaa

SEQ ID NO: 872017 - RNA, 19 nt, Homo sapiens
  misc_RNA (1)...(19): siRNA sense strand
gaaacucacaugcugaauu

SEQ ID NO: 872018 - RNA, 19 nt, Homo sapiens
  misc_RNA (1)...(19): siRNA sense strand
ugaagucaauuccuaguga

SEQ ID NO: 872019 - RNA, 19 nt, Homo sapiens
  misc_RNA (1)...(19): siRNA sense strand
gaagucaauuccuagugaa

SEQ ID NO: 872020 - RNA, 19 nt, Homo sapiens
  misc_RNA (1)...(19): siRNA sense strand
ccacuggaauuagccaaua

SEQ ID NO: 872021 - RNA, 19 nt, Homo sapiens
  misc_RNA (1)...(19): siRNA sense strand
agggagagcugucgagauu

SEQ ID NO: 872022 - RNA, 19 nt, Homo sapiens
  misc_RNA (1)...(19): siRNA sense strand
ugauugacuuggaucuuua

SEQ ID NO: 872023 - RNA, 19 nt, Homo sapiens
  misc_RNA (1)...(19): siRNA sense strand
ggagaaugcggacuugauu

SEQ ID NO: 872024 - RNA, 19 nt, Homo sapiens
  misc_RNA (1)...(19): siRNA sense strand
aaaugaacccugccauaua

SEQ ID NO: 872025 - RNA, 19 nt, Homo sapiens
  misc_RNA (1)...(19): siRNA sense strand
aaauagagaucggugugua

SEQ ID NO: 872026 - RNA, 19 nt, Homo sapiens
  misc_RNA (1)...(19): siRNA sense strand
gauaaugucagcagugaga

SEQ ID NO: 872027 - RNA, 19 nt, Homo sapiens
  misc_RNA (1)...(19): siRNA sense strand
ggagagcugucgagauugg

SEQ ID NO: 872028 - RNA, 19 nt, Homo sapiens
  misc_RNA (1)...(19): siRNA sense strand
uuaaaggaguugcuaaauc

SEQ ID NO: 872029 - RNA, 19 nt, Homo sapiens
  misc_RNA (1)...(19): siRNA sense strand
ggaaaucuacaagacagua

SEQ ID NO: 872030 - RNA, 19 nt, Homo sapiens
  misc_RNA (1)...(19): siRNA sense strand
gaaaucuacaagacaguaa

SEQ ID NO: 872031 - RNA, 19 nt, Homo sapiens
  misc_RNA (1)...(19): siRNA sense strand
gacccuauguucagaggaa

SEQ ID NO: 872032 - RNA, 19 nt, Homo sapiens
  misc_RNA (1)...(19): siRNA sense strand
caagauguggugaauuuga

SEQ ID NO: 872033 - RNA, 19 nt, Homo sapiens
  misc_RNA (1)...(19): siRNA sense strand
ggaaaguuguggcaauagg

SEQ ID NO: 872034 - RNA, 19 nt, Homo sapiens
  misc_RNA (1)...(19): siRNA sense strand
gccaauacacuauauaaca

SEQ ID NO: 872035 - RNA, 19 nt, Homo sapiens
  misc_RNA (1)...(19): siRNA sense strand
gagaaugcggacuugauuu

SEQ ID NO: 872036 - RNA, 19 nt, Homo sapiens
  misc_RNA (1)...(19): siRNA sense strand
ccaaagauacucaacucaa

SEQ ID NO: 872037 - RNA, 19 nt, Homo sapiens
  misc_RNA (1)...(19): siRNA sense strand
gcuucaaguuuaucgauau

SEQ ID NO: 872038 - RNA, 19 nt, Homo sapiens
  misc_RNA (1)...(19): siRNA sense strand
gaacccugccauauaauuc

SEQ ID NO: 872039 - RNA, 19 nt, Homo sapiens
  misc_RNA (1)...(19): siRNA sense strand
gcacaaacaaaugguaugu

SEQ ID NO: 872040 - RNA, 19 nt, Homo sapiens
  misc_RNA (1)...(19): siRNA sense strand
gaauuagccaauacacuau

SEQ ID NO: 872041 - RNA, 19 nt, Homo sapiens
  misc_RNA (1)...(19): siRNA sense strand
agaaaugaacccugccaua

SEQ ID NO: 872042 - RNA, 19 nt, Homo sapiens
  misc_RNA (1)...(19): siRNA sense strand
aaacugaagcuaauuugga

SEQ ID NO: 872043 - RNA, 19 nt, Homo sapiens
  misc_RNA (1)...(19): siRNA sense strand
guacacaugcuggaucaaa

SEQ ID NO: 872044 - RNA, 19 nt, Homo sapiens
  misc_RNA (1)...(19): siRNA sense strand
gaaaguuguggcaauagga

SEQ ID NO: 872045 - RNA, 19 nt, Homo sapiens
  misc_RNA (1)...(19): siRNA sense strand
uauaagaacugcauuuccu

SEQ ID NO: 872046 - RNA, 19 nt, Homo sapiens
  misc_RNA (1)...(19): siRNA sense strand
cuacaagacaguaaagaug

SEQ ID NO: 872047 - RNA, 19 nt, Homo sapiens
  misc_RNA (1)...(19): siRNA sense strand
uuuaaugguugcucacuga

SEQ ID NO: 872048 - RNA, 19 nt, Homo sapiens
  misc_RNA (1)...(19): siRNA sense strand
agggaaaguuguggcaaua

SEQ ID NO: 872049 - RNA, 19 nt, Homo sapiens
  misc_RNA (1)...(19): siRNA sense strand
gugcauucauuugauggua

SEQ ID NO: 872050 - RNA, 19 nt, Homo sapiens
  misc_RNA (1)...(19): siRNA sense strand
ggaguggugcauucauuug

SEQ ID NO: 872051 - RNA, 19 nt, Homo sapiens
  misc_RNA (1)...(19): siRNA sense strand
aagauguggugaauuugaa

SEQ ID NO: 872052 - RNA, 19 nt, Homo sapiens
  misc_RNA (1)...(19): siRNA sense strand
uugauugacuuggaucuuu

SEQ ID NO: 872053 - RNA, 19 nt, Homo sapiens
  misc_RNA (1)...(19): siRNA sense strand
gggaguggugcauucauuu

SEQ ID NO: 872054 - RNA, 19 nt, Homo sapiens
  misc_RNA (1)...(19): siRNA sense strand
gaaauagagaucggugugu

SEQ ID NO: 872055 - RNA, 19 nt, Homo sapiens
  misc_RNA (1)...(19): siRNA sense strand
ucaaguuuaucgauauugg

SEQ ID NO: 872056 - RNA, 19 nt, Homo sapiens
  misc_RNA (1)...(19): siRNA sense strand
gaacugucagaacaaacaa

SEQ ID NO: 872057 - RNA, 19 nt, Homo sapiens
  misc_RNA (1)...(19): siRNA sense strand
caauaaagggaaaguugug

SEQ ID NO: 872058 - RNA, 19 nt, Homo sapiens
  misc_RNA (1)...(19): siRNA sense strand
aacugaagcuaauuuggaa

SEQ ID NO: 872059 - RNA, 19 nt, Homo sapiens
  misc_RNA (1)...(19): siRNA sense strand
guugcuaaaucuugcugaa

SEQ ID NO: 872060 - RNA, 19 nt, Homo sapiens
  misc_RNA (1)...(19): siRNA sense strand
ugucgagauugguguuaaa

SEQ ID NO: 872061 - RNA, 19 nt, Homo sapiens
  misc_RNA (1)...(19): siRNA sense strand
gaguggugcauucauuuga

SEQ ID NO: 872062 - RNA, 19 nt, Homo sapiens
  misc_RNA (1)...(19): siRNA sense strand
ugucagcagugagagauga

SEQ ID NO: 872063 - RNA, 19 nt, Homo sapiens
  misc_RNA (1)...(19): siRNA sense strand
cagcugcuuugauugacuu

SEQ ID NO: 872064 - RNA, 19 nt, Homo sapiens
  misc_RNA (1)...(19): siRNA sense strand
ccuacaagauguggugaau

SEQ ID NO: 872065 - RNA, 19 nt, Homo sapiens
  misc_RNA (1)...(19): siRNA sense strand
caugcuggaucaaaauaua

SEQ ID NO: 872066 - RNA, 19 nt, Homo sapiens
  misc_RNA (1)...(19): siRNA sense strand
gaaaacugaagcuaauuug

SEQ ID NO: 872067 - RNA, 19 nt, Homo sapiens
  misc_RNA (1)...(19): siRNA sense strand
aacaauaaagggaaaguug

SEQ ID NO: 872068 - RNA, 19 nt, Homo sapiens
  misc_RNA (1)...(19): siRNA sense strand
ucaguacaguuggauguca

SEQ ID NO: 872069 - RNA, 19 nt, Homo sapiens
  misc_RNA (1)...(19): siRNA sense strand
aagggaaaguuguggcaau

SEQ ID NO: 872070 - RNA, 19 nt, Homo sapiens
  misc_RNA (1)...(19): siRNA sense strand
ugaacccugccauauaauu

SEQ ID NO: 872071 - RNA, 19 nt, Homo sapiens
  misc_RNA (1)...(19): siRNA sense strand
ugaagcuaauuuggaaguu

SEQ ID NO: 872072 - RNA, 19 nt, Homo sapiens
  misc_RNA (1)...(19): siRNA sense strand
guggugcauucauuugaug

SEQ ID NO: 872073 - RNA, 19 nt, Homo sapiens
  misc_RNA (1)...(19): siRNA sense strand
aagaugacuuacaggaugu

SEQ ID NO: 872074 - RNA, 19 nt, Homo sapiens
  misc_RNA (1)...(19): siRNA sense strand
ucccaaagauacucaacuc

SEQ ID NO: 872075 - RNA, 19 nt, Homo sapiens
  misc_RNA (1)...(19): siRNA sense strand
cgcuucaaguuuaucgaua

SEQ ID NO: 872076 - RNA, 19 nt, Homo sapiens
  misc_RNA (1)...(19): siRNA sense strand
gcagcugcuuugauugacu

SEQ ID NO: 872077 - RNA, 19 nt, Homo sapiens
  misc_RNA (1)...(19): siRNA sense strand
aaguacacaugcuggauca

SEQ ID NO: 872078 - RNA, 19 nt, Homo sapiens
  misc_RNA (1)...(19): siRNA sense strand
acaagacaguaaagaugca

SEQ ID NO: 872079 - RNA, 19 nt, Homo sapiens
  misc_RNA (1)...(19): siRNA sense strand
ucaagaugacuuacaggau

SEQ ID NO: 872080 - RNA, 19 nt, Homo sapiens
  misc_RNA (1)...(19): siRNA sense strand
ggggaguggugcauucauu

SEQ ID NO: 872081 - RNA, 19 nt, Homo sapiens
  misc_RNA (1)...(19): siRNA sense strand
gguggaaaucuacaagaca

SEQ ID NO: 872082 - RNA, 19 nt, Homo sapiens
  misc_RNA (1)...(19): siRNA sense strand
cugcuuugauugacuugga

SEQ ID NO: 872083 - RNA, 19 nt, Homo sapiens
  misc_RNA (1)...(19): siRNA sense strand
gggcacugcuuaaaagaca

SEQ ID NO: 872084 - RNA, 19 nt, Homo sapiens
  misc_RNA (1)...(19): siRNA sense strand
agaacugcauuuccuacca

SEQ ID NO: 872085 - RNA, 19 nt, Homo sapiens
  misc_RNA (1)...(19): siRNA sense strand
guggugaauuugaaaagaa

SEQ ID NO: 872086 - RNA, 19 nt, Homo sapiens
  misc_RNA (1)...(19): siRNA sense strand
uaaugguugcucacugaaa

SEQ ID NO: 872087 - RNA, 19 nt, Homo sapiens
  misc_RNA (1)...(19): siRNA sense strand
aauaggagaaugcggacuu

SEQ ID NO: 872088 - RNA, 19 nt, Homo sapiens
  misc_RNA (1)...(19): siRNA sense strand
ccuauguucagaggaauuu

SEQ ID NO: 872089 - RNA, 19 nt, Homo sapiens
  misc_RNA (1)...(19): siRNA sense strand
uuacuuaaaggaguugcua

SEQ ID NO: 872090 - RNA, 19 nt, Homo sapiens
  misc_RNA (1)...(19): siRNA sense strand
acuuggaucuuuauauagg

SEQ ID NO: 872091 - RNA, 19 nt, Homo sapiens
  misc_RNA (1)...(19): siRNA sense strand
guucagaggaauuuauagg

SEQ ID NO: 872092 - RNA, 19 nt, Homo sapiens
  misc_RNA (1)...(19): siRNA sense strand
gaaagaugcuccaggauga

SEQ ID NO: 872093 - RNA, 19 nt, Homo sapiens
  misc_RNA (1)...(19): siRNA sense strand
ggagggagaugacaacuac

SEQ ID NO: 872094 - RNA, 19 nt, Homo sapiens
  misc_RNA (1)...(19): siRNA sense strand
gcagaagcauguccaauac

SEQ ID NO: 872095 - RNA, 19 nt, Homo sapiens
  misc_RNA (1)...(19): siRNA sense strand
caggauagcucuugaugca

SEQ ID NO: 872096 - RNA, 19 nt, Homo sapiens
  misc_RNA (1)...(19): siRNA sense strand
ucaaagagcagaagcaugu

SEQ ID NO: 872097 - RNA, 19 nt, Homo sapiens
  misc_RNA (1)...(19): siRNA sense strand
ugacccaucuccuuccuuu

SEQ ID NO: 872098 - RNA, 19 nt, Homo sapiens
  misc_RNA (1)...(19): siRNA sense strand
caaagucagugcuguccuu

SEQ ID NO: 872099 - RNA, 19 nt, Homo sapiens
  misc_RNA (1)...(19): siRNA sense strand
gaaauccucccacaagcaa

SEQ ID NO: 872100 - RNA, 19 nt, Homo sapiens
  misc_RNA (1)...(19): siRNA sense strand
ccacagagaggcuuguuug

SEQ ID NO: 872101 - RNA, 19 nt, Homo sapiens
  misc_RNA (1)...(19): siRNA sense strand
gcaugaaucugaccaucuc

SEQ ID NO: 872102 - RNA, 19 nt, Homo sapiens
  misc_RNA (1)...(19): siRNA sense strand
gagaguccaccuucaaaga

SEQ ID NO: 872103 - RNA, 19 nt, Homo sapiens
  misc_RNA (1)...(19): siRNA sense strand
gcaacaugcccagguuuaa

SEQ ID NO: 872104 - RNA, 19 nt, Homo sapiens
  misc_RNA (1)...(19): siRNA sense strand
agaagcauguccaauacaa

SEQ ID NO: 872105 - RNA, 19 nt, Homo sapiens
  misc_RNA (1)...(19): siRNA sense strand
cagcaagacuacagcuuca

SEQ ID NO: 872106 - RNA, 19 nt, Homo sapiens
  misc_RNA (1)...(19): siRNA sense strand
gaacuccagcugcagaugu

SEQ ID NO: 872107 - RNA, 19 nt, Homo sapiens
  misc_RNA (1)...(19): siRNA sense strand
caugagauccuauggaaca

SEQ ID NO: 872108 - RNA, 19 nt, Homo sapiens
  misc_RNA (1)...(19): siRNA sense strand
cgagcaacaugcccagguu

SEQ ID NO: 872109 - RNA, 19 nt, Homo sapiens
  misc_RNA (1)...(19): siRNA sense strand
ggaaauccucccacaagca

SEQ ID NO: 872110 - RNA, 19 nt, Homo sapiens
  misc_RNA (1)...(19): siRNA sense strand
gugcuguccuuacccagaa

SEQ ID NO: 872111 - RNA, 19 nt, Homo sapiens
  misc_RNA (1)...(19): siRNA sense strand
ccaccaaccaguauacuca

SEQ ID NO: 872112 - RNA, 19 nt, Homo sapiens
  misc_RNA (1)...(19): siRNA sense strand
gaugacacauuuucuggaa

SEQ ID NO: 872113 - RNA, 19 nt, Homo sapiens
  misc_RNA (1)...(19): siRNA sense strand
ccagagaguccaccuucaa

SEQ ID NO: 872114 - RNA, 19 nt, Homo sapiens
  misc_RNA (1)...(19): siRNA sense strand
gagcaacaugcccagguuu

SEQ ID NO: 872115 - RNA, 19 nt, Homo sapiens
  misc_RNA (1)...(19): siRNA sense strand
agcagaagcauguccaaua

SEQ ID NO: 872116 - RNA, 19 nt, Homo sapiens
  misc_RNA (1)...(19): siRNA sense strand
agugaagccuggagaacaa

SEQ ID NO: 872117 - RNA, 19 nt, Homo sapiens
  misc_RNA (1)...(19): siRNA sense strand
cagagaguccaccuucaaa

SEQ ID NO: 872118 - RNA, 19 nt, Homo sapiens
  misc_RNA (1)...(19): siRNA sense strand
gcuccaggaugacucucuu

SEQ ID NO: 872119 - RNA, 19 nt, Homo sapiens
  misc_RNA (1)...(19): siRNA sense strand
gaggagcugucaccaucca

SEQ ID NO: 872120 - RNA, 19 nt, Homo sapiens
  misc_RNA (1)...(19): siRNA sense strand
caacuaccaaggcugauag

SEQ ID NO: 872121 - RNA, 19 nt, Homo sapiens
  misc_RNA (1)...(19): siRNA sense strand
gugaggcugucccaacugu

SEQ ID NO: 872122 - RNA, 19 nt, Homo sapiens
  misc_RNA (1)...(19): siRNA sense strand
agggucaccuuaauucaga

SEQ ID NO: 872123 - RNA, 19 nt, Homo sapiens
  misc_RNA (1)...(19): siRNA sense strand
gaaacuuuggccugggaaa

SEQ ID NO: 872124 - RNA, 19 nt, Homo sapiens
  misc_RNA (1)...(19): siRNA sense strand
caaccaguauacucaccau

SEQ ID NO: 872125 - RNA, 19 nt, Homo sapiens
  misc_RNA (1)...(19): siRNA sense strand
ucaacaggcaccagaggaa

SEQ ID NO: 872126 - RNA, 19 nt, Homo sapiens
  misc_RNA (1)...(19): siRNA sense strand
caacaugcccagguuuaag

SEQ ID NO: 872127 - RNA, 19 nt, Homo sapiens
  misc_RNA (1)...(19): siRNA sense strand
gcauguccaauacaacaga

SEQ ID NO: 872128 - RNA, 19 nt, Homo sapiens
  misc_RNA (1)...(19): siRNA sense strand
gaaccacccagaccuuagg

SEQ ID NO: 872129 - RNA, 19 nt, Homo sapiens
  misc_RNA (1)...(19): siRNA sense strand
cacagacuuuccacagaga

SEQ ID NO: 872130 - RNA, 19 nt, Homo sapiens
  misc_RNA (1)...(19): siRNA sense strand
gauggagaggccacaguga

SEQ ID NO: 872131 - RNA, 19 nt, Homo sapiens
  misc_RNA (1)...(19): siRNA sense strand
ggaaccacccagaccuuag

SEQ ID NO: 872132 - RNA, 19 nt, Homo sapiens
  misc_RNA (1)...(19): siRNA sense strand
ggacagcaugggacacagu

SEQ ID NO: 872133 - RNA, 19 nt, Homo sapiens
  misc_RNA (1)...(19): siRNA sense strand
agaggguucugucaaagca

SEQ ID NO: 872134 - RNA, 19 nt, Homo sapiens
  misc_RNA (1)...(19): siRNA sense strand
agacagagguccccaagca

SEQ ID NO: 872135 - RNA, 19 nt, Homo sapiens
  misc_RNA (1)...(19): siRNA sense strand
ggccaagggaggacauaga

SEQ ID NO: 872136 - RNA, 19 nt, Homo sapiens
  misc_RNA (1)...(19): siRNA sense strand
gagcagaagcauguccaau

SEQ ID NO: 872137 - RNA, 19 nt, Homo sapiens
  misc_RNA (1)...(19): siRNA sense strand
gcagcuccaaauucauuga

SEQ ID NO: 872138 - RNA, 19 nt, Homo sapiens
  misc_RNA (1)...(19): siRNA sense strand
cauguccaauacaacagaa

SEQ ID NO: 872139 - RNA, 19 nt, Homo sapiens
  misc_RNA (1)...(19): siRNA sense strand
gcaaggacaggagggagau

SEQ ID NO: 872140 - RNA, 19 nt, Homo sapiens
  misc_RNA (1)...(19): siRNA sense strand
gacaggagggagaugacaa

SEQ ID NO: 872141 - RNA, 19 nt, Homo sapiens
  misc_RNA (1)...(19): siRNA sense strand
ggacaggagggagaugaca

SEQ ID NO: 872142 - RNA, 19 nt, Homo sapiens
  misc_RNA (1)...(19): siRNA sense strand
aaagucagugcuguccuua

SEQ ID NO: 872143 - RNA, 19 nt, Homo sapiens
  misc_RNA (1)...(19): siRNA sense strand
acagagaggcuuguuugug

SEQ ID NO: 872144 - RNA, 19 nt, Homo sapiens
  misc_RNA (1)...(19): siRNA sense strand
uugcagcuccaaauucauu

SEQ ID NO: 872145 - RNA, 19 nt, Homo sapiens
  misc_RNA (1)...(19): siRNA sense strand
gggucaggauagcucuuga

SEQ ID NO: 872146 - RNA, 19 nt, Homo sapiens
  misc_RNA (1)...(19): siRNA sense strand
acaacuaccaaggcugaua

SEQ ID NO: 872147 - RNA, 19 nt, Homo sapiens
  misc_RNA (1)...(19): siRNA sense strand
gacagcaugggacacaguu

SEQ ID NO: 872148 - RNA, 19 nt, Homo sapiens
  misc_RNA (1)...(19): siRNA sense strand
caccuuaauucagaugaca

SEQ ID NO: 872149 - RNA, 19 nt, Homo sapiens
  misc_RNA (1)...(19): siRNA sense strand
agcaacaugcccagguuua

SEQ ID NO: 872150 - RNA, 19 nt, Homo sapiens
  misc_RNA (1)...(19): siRNA sense strand
aagcauguccaauacaaca

SEQ ID NO: 872151 - RNA, 19 nt, Homo sapiens
  misc_RNA (1)...(19): siRNA sense strand
uuucuaagcaacaaucuca

SEQ ID NO: 872152 - RNA, 19 nt, Homo sapiens
  misc_RNA (1)...(19): siRNA sense strand
ucaccauccagugccauua

SEQ ID NO: 872153 - RNA, 19 nt, Homo sapiens
  misc_RNA (1)...(19): siRNA sense strand
aaacagggcuauacauuua

SEQ ID NO: 872154 - RNA, 19 nt, Homo sapiens
  misc_RNA (1)...(19): siRNA sense strand
ccaauuaucuguacuuuga

SEQ ID NO: 872155 - RNA, 19 nt, Homo sapiens
  misc_RNA (1)...(19): siRNA sense strand
gcaaugauauuucaaagug

SEQ ID NO: 872156 - RNA, 19 nt, Homo sapiens
  misc_RNA (1)...(19): siRNA sense strand
ggacuuguauauucucuga

SEQ ID NO: 872157 - RNA, 19 nt, Homo sapiens
  misc_RNA (1)...(19): siRNA sense strand
uauauuagcuccauguaug

SEQ ID NO: 872158 - RNA, 19 nt, Homo sapiens
  misc_RNA (1)...(19): siRNA sense strand
ccacacagcuuucuauugc

SEQ ID NO: 872159 - RNA, 19 nt, Homo sapiens
  misc_RNA (1)...(19): siRNA sense strand
gggcauggcucaaacucaa

SEQ ID NO: 872160 - RNA, 19 nt, Homo sapiens
  misc_RNA (1)...(19): siRNA sense strand
uggagaacauuacuaguuu

SEQ ID NO: 872161 - RNA, 19 nt, Homo sapiens
  misc_RNA (1)...(19): siRNA sense strand
acaacaggcuaaucaauau

SEQ ID NO: 872162 - RNA, 19 nt, Homo sapiens
  misc_RNA (1)...(19): siRNA sense strand
gcaccuaacuuuggcuaau

SEQ ID NO: 872163 - RNA, 19 nt, Homo sapiens
  misc_RNA (1)...(19): siRNA sense strand
ggacuaacgugugucuuuc

SEQ ID NO: 872164 - RNA, 19 nt, Homo sapiens
  misc_RNA (1)...(19): siRNA sense strand
auacuaccaugcaaugaua

SEQ ID NO: 872165 - RNA, 19 nt, Homo sapiens
  misc_RNA (1)...(19): siRNA sense strand
aaucuuaccugucuuucaa

SEQ ID NO: 872166 - RNA, 19 nt, Homo sapiens
  misc_RNA (1)...(19): siRNA sense strand
caauaugugggucauuaua

SEQ ID NO: 872167 - RNA, 19 nt, Homo sapiens
  misc_RNA (1)...(19): siRNA sense strand
cagcaaauccacuaauguu

SEQ ID NO: 872168 - RNA, 19 nt, Homo sapiens
  misc_RNA (1)...(19): siRNA sense strand
agauuaaccugugccauuu

SEQ ID NO: 872169 - RNA, 19 nt, Homo sapiens
  misc_RNA (1)...(19): siRNA sense strand
cagauuaaccugugccauu

SEQ ID NO: 872170 - RNA, 19 nt, Homo sapiens
  misc_RNA (1)...(19): siRNA sense strand
gggacuaacgugugucuuu

SEQ ID NO: 872171 - RNA, 19 nt, Homo sapiens
  misc_RNA (1)...(19): siRNA sense strand
aaagugccauguuuacuca

SEQ ID NO: 872172 - RNA, 19 nt, Homo sapiens
  misc_RNA (1)...(19): siRNA sense strand
ggacuaguuucuacauggu

SEQ ID NO: 872173 - RNA, 19 nt, Homo sapiens
  misc_RNA (1)...(19): siRNA sense strand
gguguuccauauauaaugu

SEQ ID NO: 872174 - RNA, 19 nt, Homo sapiens
  misc_RNA (1)...(19): siRNA sense strand
aacaacaggcuaaucaaua

SEQ ID NO: 872175 - RNA, 19 nt, Homo sapiens
  misc_RNA (1)...(19): siRNA sense strand
cuaaacaacaggcuaauca

SEQ ID NO: 872176 - RNA, 19 nt, Homo sapiens
  misc_RNA (1)...(19): siRNA sense strand
ucaucuuccuacccaauua

SEQ ID NO: 872177 - RNA, 19 nt, Homo sapiens
  misc_RNA (1)...(19): siRNA sense strand
ccacuaauguuggacuugu

SEQ ID NO: 872178 - RNA, 19 nt, Homo sapiens
  misc_RNA (1)...(19): siRNA sense strand
acgugugucuuuccacuua

SEQ ID NO: 872179 - RNA, 19 nt, Homo sapiens
  misc_RNA (1)...(19): siRNA sense strand
gggaacuuauugcuauuca

SEQ ID NO: 872180 - RNA, 19 nt, Homo sapiens
  misc_RNA (1)...(19): siRNA sense strand
acacaacacugggaaucuu

SEQ ID NO: 872181 - RNA, 19 nt, Homo sapiens
  misc_RNA (1)...(19): siRNA sense strand
guuaucaucuguccuuguc

SEQ ID NO: 872182 - RNA, 19 nt, Homo sapiens
  misc_RNA (1)...(19): siRNA sense strand
acagaagccagucauguuu

SEQ ID NO: 872183 - RNA, 19 nt, Homo sapiens
  misc_RNA (1)...(19): siRNA sense strand
gaaacagaagccagucaug

SEQ ID NO: 872184 - RNA, 19 nt, Homo sapiens
  misc_RNA (1)...(19): siRNA sense strand
cauggugacuauuuucuua

SEQ ID NO: 872185 - RNA, 19 nt, Homo sapiens
  misc_RNA (1)...(19): siRNA sense strand
guacauuucaggcuguuau

SEQ ID NO: 872186 - RNA, 19 nt, Homo sapiens
  misc_RNA (1)...(19): siRNA sense strand
ccacuuauauuagcuccau

SEQ ID NO: 872187 - RNA, 19 nt, Homo sapiens
  misc_RNA (1)...(19): siRNA sense strand
aucaauaugugggucauua

SEQ ID NO: 872188 - RNA, 19 nt, Homo sapiens
  misc_RNA (1)...(19): siRNA sense strand
uauaaugucauccuucaga

SEQ ID NO: 872189 - RNA, 19 nt, Homo sapiens
  misc_RNA (1)...(19): siRNA sense strand
gggaaucuuaccugucuuu

SEQ ID NO: 872190 - RNA, 19 nt, Homo sapiens
  misc_RNA (1)...(19): siRNA sense strand
cuggugagccgcuuuguuu

SEQ ID NO: 872191 - RNA, 19 nt, Homo sapiens
  misc_RNA (1)...(19): siRNA sense strand
gauuuggacuaguuucuac

SEQ ID NO: 872192 - RNA, 19 nt, Homo sapiens
  misc_RNA (1)...(19): siRNA sense strand
guauucaagugacacaaca

SEQ ID NO: 872193 - RNA, 19 nt, Homo sapiens
  misc_RNA (1)...(19): siRNA sense strand
ccccauaaauuuucccuua

SEQ ID NO: 872194 - RNA, 19 nt, Homo sapiens
  misc_RNA (1)...(19): siRNA sense strand
ucaaaucuccccauaaauu

SEQ ID NO: 872195 - RNA, 19 nt, Homo sapiens
  misc_RNA (1)...(19): siRNA sense strand
caagugggcauggcucaaa

SEQ ID NO: 872196 - RNA, 19 nt, Homo sapiens
  misc_RNA (1)...(19): siRNA sense strand
aaacucaaaucuccccaua

SEQ ID NO: 872197 - RNA, 19 nt, Homo sapiens
  misc_RNA (1)...(19): siRNA sense strand
aaacaacaggcuaaucaau

SEQ ID NO: 872198 - RNA, 19 nt, Homo sapiens
  misc_RNA (1)...(19): siRNA sense strand
ggagaacauuacuaguuuu

SEQ ID NO: 872199 - RNA, 19 nt, Homo sapiens
  misc_RNA (1)...(19): siRNA sense strand
gugugucuuuccacuuaua

SEQ ID NO: 872200 - RNA, 19 nt, Homo sapiens
  misc_RNA (1)...(19): siRNA sense strand
uuucaaagugccauguuua

SEQ ID NO: 872201 - RNA, 19 nt, Homo sapiens
  misc_RNA (1)...(19): siRNA sense strand
gugauucucaugcaccuaa

SEQ ID NO: 872202 - RNA, 19 nt, Homo sapiens
  misc_RNA (1)...(19): siRNA sense strand
aaacagaagccagucaugu

SEQ ID NO: 872203 - RNA, 19 nt, Homo sapiens
  misc_RNA (1)...(19): siRNA sense strand
cauguuuacucaagguuuc

SEQ ID NO: 872204 - RNA, 19 nt, Homo sapiens
  misc_RNA (1)...(19): siRNA sense strand
caaagugccauguuuacuc

SEQ ID NO: 872205 - RNA, 19 nt, Homo sapiens
  misc_RNA (1)...(19): siRNA sense strand
acucaaaucuccccauaaa

SEQ ID NO: 872206 - RNA, 19 nt, Homo sapiens
  misc_RNA (1)...(19): siRNA sense strand
caucagggguguuccauau

SEQ ID NO: 872207 - RNA, 19 nt, Homo sapiens
  misc_RNA (1)...(19): siRNA sense strand
gcauuuguguauguacuuc

SEQ ID NO: 872208 - RNA, 19 nt, Homo sapiens
  misc_RNA (1)...(19): siRNA sense strand
gaaucuuaccugucuuuca

SEQ ID NO: 872209 - RNA, 19 nt, Homo sapiens
  misc_RNA (1)...(19): siRNA sense strand
cacaacacugggaaucuua

SEQ ID NO: 872210 - RNA, 19 nt, Homo sapiens
  misc_RNA (1)...(19): siRNA sense strand
gcuguuaucaucuguccuu

SEQ ID NO: 872211 - RNA, 19 nt, Homo sapiens
  misc_RNA (1)...(19): siRNA sense strand
gaagaaccccuuagaugug

SEQ ID NO: 872212 - RNA, 19 nt, Homo sapiens
  misc_RNA (1)...(19): siRNA sense strand
guuucuacauggugacuau

SEQ ID NO: 872213 - RNA, 19 nt, Homo sapiens
  misc_RNA (1)...(19): siRNA sense strand
caccuaacuuuggcuaaug

SEQ ID NO: 872214 - RNA, 19 nt, Homo sapiens
  misc_RNA (1)...(19): siRNA sense strand
cuggagaacauuacuaguu

SEQ ID NO: 872215 - RNA, 19 nt, Homo sapiens
  misc_RNA (1)...(19): siRNA sense strand
caccguagccaccagcaaa

SEQ ID NO: 872216 - RNA, 19 nt, Homo sapiens
  misc_RNA (1)...(19): siRNA sense strand
uaaacaacaggcuaaucaa

SEQ ID NO: 872217 - RNA, 19 nt, Homo sapiens
  misc_RNA (1)...(19): siRNA sense strand
uaaaacagggcuauacauu

SEQ ID NO: 872218 - RNA, 19 nt, Homo sapiens
  misc_RNA (1)...(19): siRNA sense strand
gaaguacuuuuguugauac

SEQ ID NO: 872219 - RNA, 19 nt, Homo sapiens
  misc_RNA (1)...(19): siRNA sense strand
acacagcuuucuauugcau

SEQ ID NO: 872220 - RNA, 19 nt, Homo sapiens
  misc_RNA (1)...(19): siRNA sense strand
ggaacuuauugcuauucau

SEQ ID NO: 872221 - RNA, 19 nt, Homo sapiens
  misc_RNA (1)...(19): siRNA sense strand
caacaggcuaaucaauaug

SEQ ID NO: 872222 - RNA, 19 nt, Homo sapiens
  misc_RNA (1)...(19): siRNA sense strand
cucaugauuuggacuaguu

SEQ ID NO: 872223 - RNA, 19 nt, Homo sapiens
  misc_RNA (1)...(19): siRNA sense strand
cacuaauguuggacuugua

SEQ ID NO: 872224 - RNA, 19 nt, Homo sapiens
  misc_RNA (1)...(19): siRNA sense strand
uaucaucuguccuugucau

SEQ ID NO: 872225 - RNA, 19 nt, Homo sapiens
  misc_RNA (1)...(19): siRNA sense strand
aagguuuccucuucuuguu

SEQ ID NO: 872226 - RNA, 19 nt, Homo sapiens
  misc_RNA (1)...(19): siRNA sense strand
uauauacuaccaugcaaug

SEQ ID NO: 872227 - RNA, 19 nt, Homo sapiens
  misc_RNA (1)...(19): siRNA sense strand
cuucuucucuccugaguac

SEQ ID NO: 872228 - RNA, 19 nt, Homo sapiens
  misc_RNA (1)...(19): siRNA sense strand
cugggaaucuuaccugucu

SEQ ID NO: 872229 - RNA, 19 nt, Homo sapiens
  misc_RNA (1)...(19): siRNA sense strand
gagccgcuuuguuuucuuu

SEQ ID NO: 872230 - RNA, 19 nt, Homo sapiens
  misc_RNA (1)...(19): siRNA sense strand
ggucuuucauauucacagu

SEQ ID NO: 872231 - RNA, 19 nt, Homo sapiens
  misc_RNA (1)...(19): siRNA sense strand
cugcuuaccacacagcuuu

SEQ ID NO: 872232 - RNA, 19 nt, Homo sapiens
  misc_RNA (1)...(19): siRNA sense strand
uagaugugauucucaugca

SEQ ID NO: 872233 - RNA, 19 nt, Homo sapiens
  misc_RNA (1)...(19): siRNA sense strand
uuagcuccauguaugagaa

SEQ ID NO: 872234 - RNA, 19 nt, Homo sapiens
  misc_RNA (1)...(19): siRNA sense strand
gggcauuuguguauguacu

SEQ ID NO: 872235 - RNA, 19 nt, Homo sapiens
  misc_RNA (1)...(19): siRNA sense strand
cagaagaaccccuuagaug

SEQ ID NO: 872236 - RNA, 19 nt, Homo sapiens
  misc_RNA (1)...(19): siRNA sense strand
ccagcaaauccacuaaugu

SEQ ID NO: 872237 - RNA, 19 nt, Homo sapiens
  misc_RNA (1)...(19): siRNA sense strand
gcauggcucaaacucaaau

SEQ ID NO: 872238 - RNA, 19 nt, Homo sapiens
  misc_RNA (1)...(19): siRNA sense strand
gaguacauuucaggcuguu

SEQ ID NO: 872239 - RNA, 19 nt, Homo sapiens
  misc_RNA (1)...(19): siRNA sense strand
ucuuguuccucaugauuug

SEQ ID NO: 872240 - RNA, 19 nt, Homo sapiens
  misc_RNA (1)...(19): siRNA sense strand
accagcaaauccacuaaug

SEQ ID NO: 872241 - RNA, 19 nt, Homo sapiens
  misc_RNA (1)...(19): siRNA sense strand
ucucaugcaccuaacuuug

SEQ ID NO: 872242 - RNA, 19 nt, Homo sapiens
  misc_RNA (1)...(19): siRNA sense strand
cagucugucuccacaaucu

SEQ ID NO: 872243 - RNA, 19 nt, Homo sapiens
  misc_RNA (1)...(19): siRNA sense strand
uacucaagguuuccucuuc

SEQ ID NO: 872244 - RNA, 19 nt, Homo sapiens
  misc_RNA (1)...(19): siRNA sense strand
ucagggguguuccauauau

SEQ ID NO: 872245 - RNA, 19 nt, Homo sapiens
  misc_RNA (1)...(19): siRNA sense strand
aaaacagggcuauacauuu

SEQ ID NO: 872246 - RNA, 19 nt, Homo sapiens
  misc_RNA (1)...(19): siRNA sense strand
ccaccagcaaauccacuaa

SEQ ID NO: 872247 - RNA, 19 nt, Homo sapiens
  misc_RNA (1)...(19): siRNA sense strand
accaugcaaugauauuuca

SEQ ID NO: 872248 - RNA, 19 nt, Homo sapiens
  misc_RNA (1)...(19): siRNA sense strand
auguuggacuuguauauuc

SEQ ID NO: 872249 - RNA, 19 nt, Homo sapiens
  misc_RNA (1)...(19): siRNA sense strand
ucaauaugugggucauuau

SEQ ID NO: 872250 - RNA, 19 nt, Homo sapiens
  misc_RNA (1)...(19): siRNA sense strand
gccuaauccuggagaacau

SEQ ID NO: 872251 - RNA, 19 nt, Homo sapiens
  misc_RNA (1)...(19): siRNA sense strand
uuaugggacuaacgugugu

SEQ ID NO: 872252 - RNA, 19 nt, Homo sapiens
  misc_RNA (1)...(19): siRNA sense strand
auaugugggucauuauaag

SEQ ID NO: 872253 - RNA, 19 nt, Homo sapiens
  misc_RNA (1)...(19): siRNA sense strand
ugaaacagguguagaaauu

SEQ ID NO: 872254 - RNA, 19 nt, Homo sapiens
  misc_RNA (1)...(19): siRNA sense strand
gaagcugucucaaacauuc

SEQ ID NO: 872255 - RNA, 19 nt, Homo sapiens
  misc_RNA (1)...(19): siRNA sense strand
gcugagaaauucaaaguuc

SEQ ID NO: 872256 - RNA, 19 nt, Homo sapiens
  misc_RNA (1)...(19): siRNA sense strand
gaaacagguguagaaauua

SEQ ID NO: 872257 - RNA, 19 nt, Homo sapiens
  misc_RNA (1)...(19): siRNA sense strand
aaacagaggcggagugaaa

SEQ ID NO: 872258 - RNA, 19 nt, Homo sapiens
  misc_RNA (1)...(19): siRNA sense strand
gguagcagcugaaauugau

SEQ ID NO: 872259 - RNA, 19 nt, Homo sapiens
  misc_RNA (1)...(19): siRNA sense strand
aagccaagauugaagauuu

SEQ ID NO: 872260 - RNA, 19 nt, Homo sapiens
  misc_RNA (1)...(19): siRNA sense strand
cagcugaaauugaugaaga

SEQ ID NO: 872261 - RNA, 19 nt, Homo sapiens
  misc_RNA (1)...(19): siRNA sense strand
uaccagagcuugaagaaca

SEQ ID NO: 872262 - RNA, 19 nt, Homo sapiens
  misc_RNA (1)...(19): siRNA sense strand
ggugguagcagcugaaauu

SEQ ID NO: 872263 - RNA, 19 nt, Homo sapiens
  misc_RNA (1)...(19): siRNA sense strand
cugaagaacaguaaugaua

SEQ ID NO: 872264 - RNA, 19 nt, Homo sapiens
  misc_RNA (1)...(19): siRNA sense strand
ucggauaccuacaugguuu

SEQ ID NO: 872265 - RNA, 19 nt, Homo sapiens
  misc_RNA (1)...(19): siRNA sense strand
gaagaaccagucaguaaag

SEQ ID NO: 872266 - RNA, 19 nt, Homo sapiens
  misc_RNA (1)...(19): siRNA sense strand
gaaauucaaaguucaaggu

SEQ ID NO: 872267 - RNA, 19 nt, Homo sapiens
  misc_RNA (1)...(19): siRNA sense strand
gaaccagucaguaaagcaa

SEQ ID NO: 872268 - RNA, 19 nt, Homo sapiens
  misc_RNA (1)...(19): siRNA sense strand
ugaaauugaugaagaacca

SEQ ID NO: 872269 - RNA, 19 nt, Homo sapiens
  misc_RNA (1)...(19): siRNA sense strand
cagaaaccgucccugcuau

SEQ ID NO: 872270 - RNA, 19 nt, Homo sapiens
  misc_RNA (1)...(19): siRNA sense strand
caacagguuacaggaguua

SEQ ID NO: 872271 - RNA, 19 nt, Homo sapiens
  misc_RNA (1)...(19): siRNA sense strand
ugaagaaccagucaguaaa

SEQ ID NO: 872272 - RNA, 19 nt, Homo sapiens
  misc_RNA (1)...(19): siRNA sense strand
caaacugggucuucaacag

SEQ ID NO: 872273 - RNA, 19 nt, Homo sapiens
  misc_RNA (1)...(19): siRNA sense strand
agccaagauugaagauuua

SEQ ID NO: 872274 - RNA, 19 nt, Homo sapiens
  misc_RNA (1)...(19): siRNA sense strand
gaugaaacagguguagaaa

SEQ ID NO: 872275 - RNA, 19 nt, Homo sapiens
  misc_RNA (1)...(19): siRNA sense strand
gaauugguccugucacaag

SEQ ID NO: 872276 - RNA, 19 nt, Homo sapiens
  misc_RNA (1)...(19): siRNA sense strand
gaugaagaaccagucagua

SEQ ID NO: 872277 - RNA, 19 nt, Homo sapiens
  misc_RNA (1)...(19): siRNA sense strand
gugaagcugucucaaacau

SEQ ID NO: 872278 - RNA, 19 nt, Homo sapiens
  misc_RNA (1)...(19): siRNA sense strand
uuacaggaguuacuagagu

SEQ ID NO: 872279 - RNA, 19 nt, Homo sapiens
  misc_RNA (1)...(19): siRNA sense strand
cgaugaaacagguguagaa

SEQ ID NO: 872280 - RNA, 19 nt, Homo sapiens
  misc_RNA (1)...(19): siRNA sense strand
gcacggaaggcuagguuca

SEQ ID NO: 872281 - RNA, 19 nt, Homo sapiens
  misc_RNA (1)...(19): siRNA sense strand
gaauauccucuuugucauc

SEQ ID NO: 872282 - RNA, 19 nt, Homo sapiens
  misc_RNA (1)...(19): siRNA sense strand
auccggaaaucuaagaaua

SEQ ID NO: 872283 - RNA, 19 nt, Homo sapiens
  misc_RNA (1)...(19): siRNA sense strand
uagaauugguccugucaca

SEQ ID NO: 872284 - RNA, 19 nt, Homo sapiens
  misc_RNA (1)...(19): siRNA sense strand
acagaaaccgucccugcua

SEQ ID NO: 872285 - RNA, 19 nt, Homo sapiens
  misc_RNA (1)...(19): siRNA sense strand
ccagguaaccgcacaaguc

SEQ ID NO: 872286 - RNA, 19 nt, Homo sapiens
  misc_RNA (1)...(19): siRNA sense strand
gguguagaaauuaaggaua

SEQ ID NO: 872287 - RNA, 19 nt, Homo sapiens
  misc_RNA (1)...(19): siRNA sense strand
gaaaccgucccugcuauag

SEQ ID NO: 872288 - RNA, 19 nt, Homo sapiens
  misc_RNA (1)...(19): siRNA sense strand
ucaggaagcacaacuagca

SEQ ID NO: 872289 - RNA, 19 nt, Homo sapiens
  misc_RNA (1)...(19): siRNA sense strand
cgaagaggucgaugaaaca

SEQ ID NO: 872290 - RNA, 19 nt, Homo sapiens
  misc_RNA (1)...(19): siRNA sense strand
acgaagaggucgaugaaac

SEQ ID NO: 872291 - RNA, 19 nt, Homo sapiens
  misc_RNA (1)...(19): siRNA sense strand
agacgaagaggucgaugaa

SEQ ID NO: 872292 - RNA, 19 nt, Homo sapiens
  misc_RNA (1)...(19): siRNA sense strand
augaagaaccagucaguaa

SEQ ID NO: 872293 - RNA, 19 nt, Homo sapiens
  misc_RNA (1)...(19): siRNA sense strand
gggaagccaagauugaaga

SEQ ID NO: 872294 - RNA, 19 nt, Homo sapiens
  misc_RNA (1)...(19): siRNA sense strand
aaccagaugucuacaagag

SEQ ID NO: 872295 - RNA, 19 nt, Homo sapiens
  misc_RNA (1)...(19): siRNA sense strand
ccggaaaucuaagaauauc

SEQ ID NO: 872296 - RNA, 19 nt, Homo sapiens
  misc_RNA (1)...(19): siRNA sense strand
agagggcagugaagacgaa

SEQ ID NO: 872297 - RNA, 19 nt, Homo sapiens
  misc_RNA (1)...(19): siRNA sense strand
ucaacagguuacaggaguu

SEQ ID NO: 872298 - RNA, 19 nt, Homo sapiens
  misc_RNA (1)...(19): siRNA sense strand
agaaaccgucccugcuaua

SEQ ID NO: 872299 - RNA, 19 nt, Homo sapiens
  misc_RNA (1)...(19): siRNA sense strand
ggaaggcuagguucaaacu

SEQ ID NO: 872300 - RNA, 19 nt, Homo sapiens
  misc_RNA (1)...(19): siRNA sense strand
gaagccaagauugaagauu

SEQ ID NO: 872301 - RNA, 19 nt, Homo sapiens
  misc_RNA (1)...(19): siRNA sense strand
cugagaaauucaaaguuca

SEQ ID NO: 872302 - RNA, 19 nt, Homo sapiens
  misc_RNA (1)...(19): siRNA sense strand
acggaaggcuagguucaaa

SEQ ID NO: 872303 - RNA, 19 nt, Homo sapiens
  misc_RNA (1)...(19): siRNA sense strand
guacaagagggcagugaag

SEQ ID NO: 872304 - RNA, 19 nt, Homo sapiens
  misc_RNA (1)...(19): siRNA sense strand
aauauccucuuugucauca

SEQ ID NO: 872305 - RNA, 19 nt, Homo sapiens
  misc_RNA (1)...(19): siRNA sense strand
ucaccauccggaaaucuaa

SEQ ID NO: 872306 - RNA, 19 nt, Homo sapiens
  misc_RNA (1)...(19): siRNA sense strand
gagcuugaagaacaggauu

SEQ ID NO: 872307 - RNA, 19 nt, Homo sapiens
  misc_RNA (1)...(19): siRNA sense strand
gcaguccgagcccugaaga

SEQ ID NO: 872308 - RNA, 19 nt, Homo sapiens
  misc_RNA (1)...(19): siRNA sense strand
agaauauccucuuugucau

SEQ ID NO: 872309 - RNA, 19 nt, Homo sapiens
  misc_RNA (1)...(19): siRNA sense strand
ggaaaucuaagaauauccu

SEQ ID NO: 872310 - RNA, 19 nt, Homo sapiens
  misc_RNA (1)...(19): siRNA sense strand
aaggugaagcugucucaaa

SEQ ID NO: 872311 - RNA, 19 nt, Homo sapiens
  misc_RNA (1)...(19): siRNA sense strand
gcaaauguguggggagcaa

SEQ ID NO: 872312 - RNA, 19 nt, Homo sapiens
  misc_RNA (1)...(19): siRNA sense strand
gaaaacacacagacuccaa

SEQ ID NO: 872313 - RNA, 19 nt, Homo sapiens
  misc_RNA (1)...(19): siRNA sense strand
gguucaaacugggucuuca

SEQ ID NO: 872314 - RNA, 19 nt, Homo sapiens
  misc_RNA (1)...(19): siRNA sense strand
gagcccugaagaacaguaa

SEQ ID NO: 872315 - RNA, 19 nt, Homo sapiens
  misc_RNA (1)...(19): siRNA sense strand
gacuccaacuguacaagag

SEQ ID NO: 872316 - RNA, 19 nt, Homo sapiens
  misc_RNA (1)...(19): siRNA sense strand
uagcagcugaaauugauga

SEQ ID NO: 872317 - RNA, 19 nt, Homo sapiens
  misc_RNA (1)...(19): siRNA sense strand
ccgcacaaguccaguuggu

SEQ ID NO: 872318 - RNA, 19 nt, Homo sapiens
  misc_RNA (1)...(19): siRNA sense strand
ggaagccaagauugaagau

SEQ ID NO: 872319 - RNA, 19 nt, Homo sapiens
  misc_RNA (1)...(19): siRNA sense strand
uagagucaccauccggaaa

SEQ ID NO: 872320 - RNA, 19 nt, Homo sapiens
  misc_RNA (1)...(19): siRNA sense strand
gguccugucacaagcaaau

SEQ ID NO: 872321 - RNA, 19 nt, Homo sapiens
  misc_RNA (1)...(19): siRNA sense strand
gaagaggucgaugaaacag

SEQ ID NO: 872322 - RNA, 19 nt, Homo sapiens
  misc_RNA (1)...(19): siRNA sense strand
ucacaaaaccagaugucua

SEQ ID NO: 872323 - RNA, 19 nt, Homo sapiens
  misc_RNA (1)...(19): siRNA sense strand
caggauuccacccagguaa

SEQ ID NO: 872324 - RNA, 19 nt, Homo sapiens
  misc_RNA (1)...(19): siRNA sense strand
gguuacaggaguuacuaga

SEQ ID NO: 872325 - RNA, 19 nt, Homo sapiens
  misc_RNA (1)...(19): siRNA sense strand
gcccugaagaacaguaaug

SEQ ID NO: 872326 - RNA, 19 nt, Homo sapiens
  misc_RNA (1)...(19): siRNA sense strand
aaaccgucccugcuauaga

SEQ ID NO: 872327 - RNA, 19 nt, Homo sapiens
  misc_RNA (1)...(19): siRNA sense strand
aaccgucccugcuauagag

SEQ ID NO: 872328 - RNA, 19 nt, Homo sapiens
  misc_RNA (1)...(19): siRNA sense strand
guucaaacugggucuucaa

SEQ ID NO: 872329 - RNA, 19 nt, Homo sapiens
  misc_RNA (1)...(19): siRNA sense strand
uaaccgcacaaguccaguu

SEQ ID NO: 872330 - RNA, 19 nt, Homo sapiens
  misc_RNA (1)...(19): siRNA sense strand
ugaagcugucucaaacauu

SEQ ID NO: 872331 - RNA, 19 nt, Homo sapiens
  misc_RNA (1)...(19): siRNA sense strand
aggugaagcugucucaaac

SEQ ID NO: 872332 - RNA, 19 nt, Homo sapiens
  misc_RNA (1)...(19): siRNA sense strand
cagguuacaggaguuacua

SEQ ID NO: 872333 - RNA, 19 nt, Homo sapiens
  misc_RNA (1)...(19): siRNA sense strand
gaaacgaacuccaauuuau

SEQ ID NO: 872334 - RNA, 19 nt, Homo sapiens
  misc_RNA (1)...(19): siRNA sense strand
gaagugcucuggauguuaa

SEQ ID NO: 872335 - RNA, 19 nt, Homo sapiens
  misc_RNA (1)...(19): siRNA sense strand
ugacauaucuggcagcauu

SEQ ID NO: 872336 - RNA, 19 nt, Homo sapiens
  misc_RNA (1)...(19): siRNA sense strand
aaagaacacucccagauuu

SEQ ID NO: 872337 - RNA, 19 nt, Homo sapiens
  misc_RNA (1)...(19): siRNA sense strand
ggaaacgaacuccaauuua

SEQ ID NO: 872338 - RNA, 19 nt, Homo sapiens
  misc_RNA (1)...(19): siRNA sense strand
gaaacuaucucugaagugu

SEQ ID NO: 872339 - RNA, 19 nt, Homo sapiens
  misc_RNA (1)...(19): siRNA sense strand
gaacugagacagacaaugu

SEQ ID NO: 872340 - RNA, 19 nt, Homo sapiens
  misc_RNA (1)...(19): siRNA sense strand
cagcagaaaucacagauga

SEQ ID NO: 872341 - RNA, 19 nt, Homo sapiens
  misc_RNA (1)...(19): siRNA sense strand
ugaaugacuuugucucuaa

SEQ ID NO: 872342 - RNA, 19 nt, Homo sapiens
  misc_RNA (1)...(19): siRNA sense strand
caaucuggcugaagucuuu

SEQ ID NO: 872343 - RNA, 19 nt, Homo sapiens
  misc_RNA (1)...(19): siRNA sense strand
gggaaugaauccauaguug

SEQ ID NO: 872344 - RNA, 19 nt, Homo sapiens
  misc_RNA (1)...(19): siRNA sense strand
ugaaggacuuugaggauuu

SEQ ID NO: 872345 - RNA, 19 nt, Homo sapiens
  misc_RNA (1)...(19): siRNA sense strand
gaacaccugucaagauugg

SEQ ID NO: 872346 - RNA, 19 nt, Homo sapiens
  misc_RNA (1)...(19): siRNA sense strand
gaaaacagguacuuuacaa

SEQ ID NO: 872347 - RNA, 19 nt, Homo sapiens
  misc_RNA (1)...(19): siRNA sense strand
gcucagaguccauauacua

SEQ ID NO: 872348 - RNA, 19 nt, Homo sapiens
  misc_RNA (1)...(19): siRNA sense strand
cagcauaucugccauguac

SEQ ID NO: 872349 - RNA, 19 nt, Homo sapiens
  misc_RNA (1)...(19): siRNA sense strand
caaagaacacucccagauu

SEQ ID NO: 872350 - RNA, 19 nt, Homo sapiens
  misc_RNA (1)...(19): siRNA sense strand
gguaucagcuuugacaaga

SEQ ID NO: 872351 - RNA, 19 nt, Homo sapiens
  misc_RNA (1)...(19): siRNA sense strand
ggagaggacugacuaugag

SEQ ID NO: 872352 - RNA, 19 nt, Homo sapiens
  misc_RNA (1)...(19): siRNA sense strand
cgaugaaucugguuccauu

SEQ ID NO: 872353 - RNA, 19 nt, Homo sapiens
  misc_RNA (1)...(19): siRNA sense strand
ggacuuugaggauuucuuu

SEQ ID NO: 872354 - RNA, 19 nt, Homo sapiens
  misc_RNA (1)...(19): siRNA sense strand
gagaaauuccucagaguga

SEQ ID NO: 872355 - RNA, 19 nt, Homo sapiens
  misc_RNA (1)...(19): siRNA sense strand
ucaaagcugugcccacuau

SEQ ID NO: 872356 - RNA, 19 nt, Homo sapiens
  misc_RNA (1)...(19): siRNA sense strand
ugucaggacuguuguguga

SEQ ID NO: 872357 - RNA, 19 nt, Homo sapiens
  misc_RNA (1)...(19): siRNA sense strand
gaaagagaaauuccucaga

SEQ ID NO: 872358 - RNA, 19 nt, Homo sapiens
  misc_RNA (1)...(19): siRNA sense strand
gagagauguuccuguguga

SEQ ID NO: 872359 - RNA, 19 nt, Homo sapiens
  misc_RNA (1)...(19): siRNA sense strand
ggaugugccugaaugacuu

SEQ ID NO: 872360 - RNA, 19 nt, Homo sapiens
  misc_RNA (1)...(19): siRNA sense strand
ggaaggaaacgaacuccaa

SEQ ID NO: 872361 - RNA, 19 nt, Homo sapiens
  misc_RNA (1)...(19): siRNA sense strand
cuucugaccuuucgccuaa

SEQ ID NO: 872362 - RNA, 19 nt, Homo sapiens
  misc_RNA (1)...(19): siRNA sense strand
ugaauucuauguuccaugu

SEQ ID NO: 872363 - RNA, 19 nt, Homo sapiens
  misc_RNA (1)...(19): siRNA sense strand
ggagucaguucucaauagu

SEQ ID NO: 872364 - RNA, 19 nt, Homo sapiens
  misc_RNA (1)...(19): siRNA sense strand
ggaagcagcagaaaucaca

SEQ ID NO: 872365 - RNA, 19 nt, Homo sapiens
  misc_RNA (1)...(19): siRNA sense strand
gggagaggacugacuauga

SEQ ID NO: 872366 - RNA, 19 nt, Homo sapiens
  misc_RNA (1)...(19): siRNA sense strand
gaucaucagcuucucaaga

SEQ ID NO: 872367 - RNA, 19 nt, Homo sapiens
  misc_RNA (1)...(19): siRNA sense strand
gaaauuccucagagugaaa

SEQ ID NO: 872368 - RNA, 19 nt, Homo sapiens
  misc_RNA (1)...(19): siRNA sense strand
gggaaacuaucucugaagu

SEQ ID NO: 872369 - RNA, 19 nt, Homo sapiens
  misc_RNA (1)...(19): siRNA sense strand
caacagauucagcugauug

SEQ ID NO: 872370 - RNA, 19 nt, Homo sapiens
  misc_RNA (1)...(19): siRNA sense strand
ucucuaagacgguuauuaa

SEQ ID NO: 872371 - RNA, 19 nt, Homo sapiens
  misc_RNA (1)...(19): siRNA sense strand
aggaacaccugucaagauu

SEQ ID NO: 872372 - RNA, 19 nt, Homo sapiens
  misc_RNA (1)...(19): siRNA sense strand
caacagggacacauugguu

SEQ ID NO: 872373 - RNA, 19 nt, Homo sapiens
  misc_RNA (1)...(19): siRNA sense strand
gcgaagugcucuggauguu

SEQ ID NO: 872374 - RNA, 19 nt, Homo sapiens
  misc_RNA (1)...(19): siRNA sense strand
gaagacaacagcauaucug

SEQ ID NO: 872375 - RNA, 19 nt, Homo sapiens
  misc_RNA (1)...(19): siRNA sense strand
gagcagagaggucuuacug

SEQ ID NO: 872376 - RNA, 19 nt, Homo sapiens
  misc_RNA (1)...(19): siRNA sense strand
gaauaugcggaaucuguuu

SEQ ID NO: 872377 - RNA, 19 nt, Homo sapiens
  misc_RNA (1)...(19): siRNA sense strand
gugaaggacuuugaggauu

SEQ ID NO: 872378 - RNA, 19 nt, Homo sapiens
  misc_RNA (1)...(19): siRNA sense strand
guuccacccucacaaagaa

SEQ ID NO: 872379 - RNA, 19 nt, Homo sapiens
  misc_RNA (1)...(19): siRNA sense strand
ucagcaaaguggaugauau

SEQ ID NO: 872380 - RNA, 19 nt, Homo sapiens
  misc_RNA (1)...(19): siRNA sense strand
gaaggacuuugaggauuuc

SEQ ID NO: 872381 - RNA, 19 nt, Homo sapiens
  misc_RNA (1)...(19): siRNA sense strand
aaaccugaauucuauguuc

SEQ ID NO: 872382 - RNA, 19 nt, Homo sapiens
  misc_RNA (1)...(19): siRNA sense strand
gcgaaaagcuggagcaaca

SEQ ID NO: 872383 - RNA, 19 nt, Homo sapiens
  misc_RNA (1)...(19): siRNA sense strand
gauacuacuaugcugaaua

SEQ ID NO: 872384 - RNA, 19 nt, Homo sapiens
  misc_RNA (1)...(19): siRNA sense strand
gaaggaaacgaacuccaau

SEQ ID NO: 872385 - RNA, 19 nt, Homo sapiens
  misc_RNA (1)...(19): siRNA sense strand
gcaacagauucagcugauu

SEQ ID NO: 872386 - RNA, 19 nt, Homo sapiens
  misc_RNA (1)...(19): siRNA sense strand
gcugaagucuuuggcucua

SEQ ID NO: 872387 - RNA, 19 nt, Homo sapiens
  misc_RNA (1)...(19): siRNA sense strand
gaaagcagauaaaauuugg

SEQ ID NO: 872388 - RNA, 19 nt, Homo sapiens
  misc_RNA (1)...(19): siRNA sense strand
ggaaauacaaggaucuuuu

SEQ ID NO: 872389 - RNA, 19 nt, Homo sapiens
  misc_RNA (1)...(19): siRNA sense strand
aaaugaauguugccaaucu

SEQ ID NO: 872390 - RNA, 19 nt, Homo sapiens
  misc_RNA (1)...(19): siRNA sense strand
uaucagguaucagcuuuga

SEQ ID NO: 872391 - RNA, 19 nt, Homo sapiens
  misc_RNA (1)...(19): siRNA sense strand
gaaugaauccauaguugca

SEQ ID NO: 872392 - RNA, 19 nt, Homo sapiens
  misc_RNA (1)...(19): siRNA sense strand
gauaggaacaccugucaag

SEQ ID NO: 872393 - RNA, 19 nt, Homo sapiens
  misc_RNA (1)...(19): siRNA sense strand
ggauugcgacucuucuuug

SEQ ID NO: 872394 - RNA, 19 nt, Homo sapiens
  misc_RNA (1)...(19): siRNA sense strand
cagaaccagugacgauguu

SEQ ID NO: 872395 - RNA, 19 nt, Homo sapiens
  misc_RNA (1)...(19): siRNA sense strand
gaugaagacaacagcauau

SEQ ID NO: 872396 - RNA, 19 nt, Homo sapiens
  misc_RNA (1)...(19): siRNA sense strand
gcagaaaucacagaugaag

SEQ ID NO: 872397 - RNA, 19 nt, Homo sapiens
  misc_RNA (1)...(19): siRNA sense strand
ugugaucucucguccagaa

SEQ ID NO: 872398 - RNA, 19 nt, Homo sapiens
  misc_RNA (1)...(19): siRNA sense strand
ucuaguagccgacaguuug

SEQ ID NO: 872399 - RNA, 19 nt, Homo sapiens
  misc_RNA (1)...(19): siRNA sense strand
gaucucucguccagaaugu

SEQ ID NO: 872400 - RNA, 19 nt, Homo sapiens
  misc_RNA (1)...(19): siRNA sense strand
agagggaugugccugaaug

SEQ ID NO: 872401 - RNA, 19 nt, Homo sapiens
  misc_RNA (1)...(19): siRNA sense strand
cuauugagacugugccaua

SEQ ID NO: 872402 - RNA, 19 nt, Homo sapiens
  misc_RNA (1)...(19): siRNA sense strand
ucaagacuccuucaucuag

SEQ ID NO: 872403 - RNA, 19 nt, Homo sapiens
  misc_RNA (1)...(19): siRNA sense strand
ucucaagacuccuucaucu

SEQ ID NO: 872404 - RNA, 19 nt, Homo sapiens
  misc_RNA (1)...(19): siRNA sense strand
gcauuguugugcauugugu

SEQ ID NO: 872405 - RNA, 19 nt, Homo sapiens
  misc_RNA (1)...(19): siRNA sense strand
cugcauuccuacccugaua

SEQ ID NO: 872406 - RNA, 19 nt, Homo sapiens
  misc_RNA (1)...(19): siRNA sense strand
gaaugacuuugucucuaag

SEQ ID NO: 872407 - RNA, 19 nt, Homo sapiens
  misc_RNA (1)...(19): siRNA sense strand
gucuuuggcucuacaauag

SEQ ID NO: 872408 - RNA, 19 nt, Homo sapiens
  misc_RNA (1)...(19): siRNA sense strand
ugaagugucaggacuguug

SEQ ID NO: 872409 - RNA, 19 nt, Homo sapiens
  misc_RNA (1)...(19): siRNA sense strand
caagacuccuucaucuagu

SEQ ID NO: 872410 - RNA, 19 nt, Homo sapiens
  misc_RNA (1)...(19): siRNA sense strand
caacaccagauauuaaagu

SEQ ID NO: 872411 - RNA, 19 nt, Homo sapiens
  misc_RNA (1)...(19): siRNA sense strand
aaucacagaugaagacaac

SEQ ID NO: 872412 - RNA, 19 nt, Homo sapiens
  misc_RNA (1)...(19): siRNA sense strand
aggaaacgaacuccaauuu

SEQ ID NO: 872413 - RNA, 19 nt, Homo sapiens
  misc_RNA (1)...(19): siRNA sense strand
ugaaucugguuccauuuua

SEQ ID NO: 872414 - RNA, 19 nt, Homo sapiens
  misc_RNA (1)...(19): siRNA sense strand
gcagagaguggcucagagu

SEQ ID NO: 872415 - RNA, 19 nt, Homo sapiens
  misc_RNA (1)...(19): siRNA sense strand
cgaagugcucuggauguua

SEQ ID NO: 872416 - RNA, 19 nt, Homo sapiens
  misc_RNA (1)...(19): siRNA sense strand
gaccaggagccaaaggaaa

SEQ ID NO: 872417 - RNA, 19 nt, Homo sapiens
  misc_RNA (1)...(19): siRNA sense strand
ggaccaggagccaaaggaa

SEQ ID NO: 872418 - RNA, 19 nt, Homo sapiens
  misc_RNA (1)...(19): siRNA sense strand
acuaugagcuggggaaaua

SEQ ID NO: 872419 - RNA, 19 nt, Homo sapiens
  misc_RNA (1)...(19): siRNA sense strand
acaaagaacacucccagau

SEQ ID NO: 872420 - RNA, 19 nt, Homo sapiens
  misc_RNA (1)...(19): siRNA sense strand
uggagucaguucucaauag

SEQ ID NO: 872421 - RNA, 19 nt, Homo sapiens
  misc_RNA (1)...(19): siRNA sense strand
cuucgaaacuucaaagaac

SEQ ID NO: 872422 - RNA, 19 nt, Homo sapiens
  misc_RNA (1)...(19): siRNA sense strand
gaaauacaaggaucuuuug

SEQ ID NO: 872423 - RNA, 19 nt, Homo sapiens
  misc_RNA (1)...(19): siRNA sense strand
ggaaagcagauaaaauuug

SEQ ID NO: 872424 - RNA, 19 nt, Homo sapiens
  misc_RNA (1)...(19): siRNA sense strand
agaaauuccucagagugaa

SEQ ID NO: 872425 - RNA, 19 nt, Homo sapiens
  misc_RNA (1)...(19): siRNA sense strand
uuuaucagguaucagcuuu

SEQ ID NO: 872426 - RNA, 19 nt, Homo sapiens
  misc_RNA (1)...(19): siRNA sense strand
uauggaagcagcagaaauc

SEQ ID NO: 872427 - RNA, 19 nt, Homo sapiens
  misc_RNA (1)...(19): siRNA sense strand
guggaaagcagauaaaauu

SEQ ID NO: 872428 - RNA, 19 nt, Homo sapiens
  misc_RNA (1)...(19): siRNA sense strand
cugaaugacuuugucucua

SEQ ID NO: 872429 - RNA, 19 nt, Homo sapiens
  misc_RNA (1)...(19): siRNA sense strand
uccauuggcuccacaguag

SEQ ID NO: 872430 - RNA, 19 nt, Homo sapiens
  misc_RNA (1)...(19): siRNA sense strand
ucaggacuguugugugauc

SEQ ID NO: 872431 - RNA, 19 nt, Homo sapiens
  misc_RNA (1)...(19): siRNA sense strand
aaacgaacuccaauuuauc

SEQ ID NO: 872432 - RNA, 19 nt, Homo sapiens
  misc_RNA (1)...(19): siRNA sense strand
gaaccucuucugaccuuuc

SEQ ID NO: 872433 - RNA, 19 nt, Homo sapiens
  misc_RNA (1)...(19): siRNA sense strand
ucaacaagcuccucaagau

SEQ ID NO: 872434 - RNA, 19 nt, Homo sapiens
  misc_RNA (1)...(19): siRNA sense strand
gccacaagcugcccuucua

SEQ ID NO: 872435 - RNA, 19 nt, Homo sapiens
  misc_RNA (1)...(19): siRNA sense strand
ggucacaccugucaacaag

SEQ ID NO: 872436 - RNA, 19 nt, Homo sapiens
  misc_RNA (1)...(19): siRNA sense strand
gcgccuaccuccucaagug

SEQ ID NO: 872437 - RNA, 19 nt, Homo sapiens
  misc_RNA (1)...(19): siRNA sense strand
cggcugacgugcugguaua

SEQ ID NO: 872438 - RNA, 19 nt, Homo sapiens
  misc_RNA (1)...(19): siRNA sense strand
ugguauaccuggcagauga

SEQ ID NO: 872439 - RNA, 19 nt, Homo sapiens
  misc_RNA (1)...(19): siRNA sense strand
gcgugcagcucgugaccua

SEQ ID NO: 872440 - RNA, 19 nt, Homo sapiens
  misc_RNA (1)...(19): siRNA sense strand
ccaagaaccagcccuacaa

SEQ ID NO: 872441 - RNA, 19 nt, Homo sapiens
  misc_RNA (1)...(19): siRNA sense strand
caagcaggccgaacugaug

SEQ ID NO: 872442 - RNA, 19 nt, Homo sapiens
  misc_RNA (1)...(19): siRNA sense strand
acaagcuccucaagaucua

SEQ ID NO: 872443 - RNA, 19 nt, Homo sapiens
  misc_RNA (1)...(19): siRNA sense strand
ggugggcgcaaaucaguuu

SEQ ID NO: 872444 - RNA, 19 nt, Homo sapiens
  misc_RNA (1)...(19): siRNA sense strand
gagcaccacguccuucuuc

SEQ ID NO: 872445 - RNA, 19 nt, Homo sapiens
  misc_RNA (1)...(19): siRNA sense strand
caacaagcuccucaagauc

SEQ ID NO: 872446 - RNA, 19 nt, Homo sapiens
  misc_RNA (1)...(19): siRNA sense strand
ggccauggaugagccuuuc

SEQ ID NO: 872447 - RNA, 19 nt, Homo sapiens
  misc_RNA (1)...(19): siRNA sense strand
ucaggcgagugaagacgaa

SEQ ID NO: 872448 - RNA, 19 nt, Homo sapiens
  misc_RNA (1)...(19): siRNA sense strand
ccacaagcugcccuucuau

SEQ ID NO: 872449 - RNA, 19 nt, Homo sapiens
  misc_RNA (1)...(19): siRNA sense strand
caacuggcucgcccucaga

SEQ ID NO: 872450 - RNA, 19 nt, Homo sapiens
  misc_RNA (1)...(19): siRNA sense strand
ucacaccugucaacaagcu

SEQ ID NO: 872451 - RNA, 19 nt, Homo sapiens
  misc_RNA (1)...(19): siRNA sense strand
gagcugcugcugcgcuuca

SEQ ID NO: 872452 - RNA, 19 nt, Homo sapiens
  misc_RNA (1)...(19): siRNA sense strand
caagaaccagcccuacaag

SEQ ID NO: 872453 - RNA, 19 nt, Homo sapiens
  misc_RNA (1)...(19): siRNA sense strand
cgaagagcaccacguccuu

SEQ ID NO: 872454 - RNA, 19 nt, Homo sapiens
  misc_RNA (1)...(19): siRNA sense strand
gggaucaggcgagugaaga

SEQ ID NO: 872455 - RNA, 19 nt, Homo sapiens
  misc_RNA (1)...(19): siRNA sense strand
cuaugggugugccuucuuc

SEQ ID NO: 872456 - RNA, 19 nt, Homo sapiens
  misc_RNA (1)...(19): siRNA sense strand
ccaagcaggccgaacugau

SEQ ID NO: 872457 - RNA, 19 nt, Homo sapiens
  misc_RNA (1)...(19): siRNA sense strand
gggcgcaaaucaguuucug

SEQ ID NO: 872458 - RNA, 19 nt, Homo sapiens
  misc_RNA (1)...(19): siRNA sense strand
gucaacaagcuccucaaga

SEQ ID NO: 872459 - RNA, 19 nt, Homo sapiens
  misc_RNA (1)...(19): siRNA sense strand
uccugcggcugcucuauga

SEQ ID NO: 872460 - RNA, 19 nt, Homo sapiens
  misc_RNA (1)...(19): siRNA sense strand
ucuccaccaucgccuaugu

SEQ ID NO: 872461 - RNA, 19 nt, Homo sapiens
  misc_RNA (1)...(19): siRNA sense strand
aagcaggccgaacugauga

SEQ ID NO: 872462 - RNA, 19 nt, Homo sapiens
  misc_RNA (1)...(19): siRNA sense strand
gaaaguaccugaaguuaaa

SEQ ID NO: 872463 - RNA, 19 nt, Homo sapiens
  misc_RNA (1)...(19): siRNA sense strand
ggacuucacugauggcauu

SEQ ID NO: 872464 - RNA, 19 nt, Homo sapiens
  misc_RNA (1)...(19): siRNA sense strand
gaucaucgcccucuucauu

SEQ ID NO: 872465 - RNA, 19 nt, Homo sapiens
  misc_RNA (1)...(19): siRNA sense strand
aaacaaggcugugggcaaa

SEQ ID NO: 872466 - RNA, 19 nt, Homo sapiens
  misc_RNA (1)...(19): siRNA sense strand
gcacagaggaggaauucaa

SEQ ID NO: 872467 - RNA, 19 nt, Homo sapiens
  misc_RNA (1)...(19): siRNA sense strand
gcacuaagacugcgaugga

SEQ ID NO: 872468 - RNA, 19 nt, Homo sapiens
  misc_RNA (1)...(19): siRNA sense strand
ggacgggccuguggaauag

SEQ ID NO: 872469 - RNA, 19 nt, Homo sapiens
  misc_RNA (1)...(19): siRNA sense strand
gcuacacccucuaccaauu

SEQ ID NO: 872470 - RNA, 19 nt, Homo sapiens
  misc_RNA (1)...(19): siRNA sense strand
cgaaaguaccugaaguuaa

SEQ ID NO: 872471 - RNA, 19 nt, Homo sapiens
  misc_RNA (1)...(19): siRNA sense strand
acacaucuaugacacgauu

SEQ ID NO: 872472 - RNA, 19 nt, Homo sapiens
  misc_RNA (1)...(19): siRNA sense strand
agaggaagauccacuacuu

SEQ ID NO: 872473 - RNA, 19 nt, Homo sapiens
  misc_RNA (1)...(19): siRNA sense strand
ggagaacggacacaucuau

SEQ ID NO: 872474 - RNA, 19 nt, Homo sapiens
  misc_RNA (1)...(19): siRNA sense strand
acaaggcugugggcaaaua

SEQ ID NO: 872475 - RNA, 19 nt, Homo sapiens
  misc_RNA (1)...(19): siRNA sense strand
ccaccaacacugagaauga

SEQ ID NO: 872476 - RNA, 19 nt, Homo sapiens
  misc_RNA (1)...(19): siRNA sense strand
ggacgacuaucacacaaaa

SEQ ID NO: 872477 - RNA, 19 nt, Homo sapiens
  misc_RNA (1)...(19): siRNA sense strand
ggucaugagucucuucaag

SEQ ID NO: 872478 - RNA, 19 nt, Homo sapiens
  misc_RNA (1)...(19): siRNA sense strand
ggagaauuccugugagguu

SEQ ID NO: 872479 - RNA, 19 nt, Homo sapiens
  misc_RNA (1)...(19): siRNA sense strand
gauucaagcuacuacaagu

SEQ ID NO: 872480 - RNA, 19 nt, Homo sapiens
  misc_RNA (1)...(19): siRNA sense strand
acaaugagcccaacugcaa

SEQ ID NO: 872481 - RNA, 19 nt, Homo sapiens
  misc_RNA (1)...(19): siRNA sense strand
ggcauuacuuggacgacua

SEQ ID NO: 872482 - RNA, 19 nt, Homo sapiens
  misc_RNA (1)...(19): siRNA sense strand
ccaccacccuguuccucua

SEQ ID NO: 872483 - RNA, 19 nt, Homo sapiens
  misc_RNA (1)...(19): siRNA sense strand
gaauggauacuucgaggau

SEQ ID NO: 872484 - RNA, 19 nt, Homo sapiens
  misc_RNA (1)...(19): siRNA sense strand
gcacaccucccgaaaguac

SEQ ID NO: 872485 - RNA, 19 nt, Homo sapiens
  misc_RNA (1)...(19): siRNA sense strand
caccaacacugagaaugaa

SEQ ID NO: 872486 - RNA, 19 nt, Homo sapiens
  misc_RNA (1)...(19): siRNA sense strand
agagacagcugcucaccau

SEQ ID NO: 872487 - RNA, 19 nt, Homo sapiens
  misc_RNA (1)...(19): siRNA sense strand
acuaugaccuggacuucaa

SEQ ID NO: 872488 - RNA, 19 nt, Homo sapiens
  misc_RNA (1)...(19): siRNA sense strand
ggacuucaacuccuucuac

SEQ ID NO: 872489 - RNA, 19 nt, Homo sapiens
  misc_RNA (1)...(19): siRNA sense strand
caucgugucuggcgagagu

SEQ ID NO: 872490 - RNA, 19 nt, Homo sapiens
  misc_RNA (1)...(19): siRNA sense strand
gggcagccauuggugauuc

SEQ ID NO: 872491 - RNA, 19 nt, Homo sapiens
  misc_RNA (1)...(19): siRNA sense strand
gccaccauguucucggaua

SEQ ID NO: 872492 - RNA, 19 nt, Homo sapiens
  misc_RNA (1)...(19): siRNA sense strand
guuaaagaacuucaaggaa

SEQ ID NO: 872493 - RNA, 19 nt, Homo sapiens
  misc_RNA (1)...(19): siRNA sense strand
ccgaaaguaccugaaguua

SEQ ID NO: 872494 - RNA, 19 nt, Homo sapiens
  misc_RNA (1)...(19): siRNA sense strand
aaaucgagaugagcaaguu

SEQ ID NO: 872495 - RNA, 19 nt, Homo sapiens
  misc_RNA (1)...(19): siRNA sense strand
ucuauggccucuuccucua

SEQ ID NO: 872496 - RNA, 19 nt, Homo sapiens
  misc_RNA (1)...(19): siRNA sense strand
gcugucagauaccauccaa

SEQ ID NO: 872497 - RNA, 19 nt, Homo sapiens
  misc_RNA (1)...(19): siRNA sense strand
guacuacuaugggcauuac

SEQ ID NO: 872498 - RNA, 19 nt, Homo sapiens
  misc_RNA (1)...(19): siRNA sense strand
ggugauucgugucaucugu

SEQ ID NO: 872499 - RNA, 19 nt, Homo sapiens
  misc_RNA (1)...(19): siRNA sense strand
ccaccauguucucggauau

SEQ ID NO: 872500 - RNA, 19 nt, Homo sapiens
  misc_RNA (1)...(19): siRNA sense strand
ggagaucaucgcccucuuc

SEQ ID NO: 872501 - RNA, 19 nt, Homo sapiens
  misc_RNA (1)...(19): siRNA sense strand
cugcacaccucccgaaagu

SEQ ID NO: 872502 - RNA, 19 nt, Homo sapiens
  misc_RNA (1)...(19): siRNA sense strand
gaacggacacaucuaugac

SEQ ID NO: 872503 - RNA, 19 nt, Homo sapiens
  misc_RNA (1)...(19): siRNA sense strand
gugcucagccuccucauca

SEQ ID NO: 872504 - RNA, 19 nt, Homo sapiens
  misc_RNA (1)...(19): siRNA sense strand
gcacguuugccaccauguu

SEQ ID NO: 872505 - RNA, 19 nt, Homo sapiens
  misc_RNA (1)...(19): siRNA sense strand
ccaugaaggcccuacagaa

SEQ ID NO: 872506 - RNA, 19 nt, Homo sapiens
  misc_RNA (1)...(19): siRNA sense strand
ucaaugacgagaacacaga

SEQ ID NO: 872507 - RNA, 19 nt, Homo sapiens
  misc_RNA (1)...(19): siRNA sense strand
ccaccucccuggauaacgu

SEQ ID NO: 872508 - RNA, 19 nt, Homo sapiens
  misc_RNA (1)...(19): siRNA sense strand
ccaagcccgugcucuaugg

SEQ ID NO: 872509 - RNA, 19 nt, Homo sapiens
  misc_RNA (1)...(19): siRNA sense strand
gaaaucgagaugagcaagu

SEQ ID NO: 872510 - RNA, 19 nt, Homo sapiens
  misc_RNA (1)...(19): siRNA sense strand
gagaucaucgcccucuuca

SEQ ID NO: 872511 - RNA, 19 nt, Homo sapiens
  misc_RNA (1)...(19): siRNA sense strand
caugaaggcccuacagaag

SEQ ID NO: 872512 - RNA, 19 nt, Homo sapiens
  misc_RNA (1)...(19): siRNA sense strand
cuucacugauggcauuauu

SEQ ID NO: 872513 - RNA, 19 nt, Homo sapiens
  misc_RNA (1)...(19): siRNA sense strand
agaacggacacaucuauga

SEQ ID NO: 872514 - RNA, 19 nt, Homo sapiens
  misc_RNA (1)...(19): siRNA sense strand
gggcuacacccucuaccaa

SEQ ID NO: 872515 - RNA, 19 nt, Homo sapiens
  misc_RNA (1)...(19): siRNA sense strand
ucauuuccaucacguuugu

SEQ ID NO: 872516 - RNA, 19 nt, Homo sapiens
  misc_RNA (1)...(19): siRNA sense strand
guuucuuccuugcgcuuua

SEQ ID NO: 872517 - RNA, 19 nt, Homo sapiens
  misc_RNA (1)...(19): siRNA sense strand
uggacgggccuguggaaua

SEQ ID NO: 872518 - RNA, 19 nt, Homo sapiens
  misc_RNA (1)...(19): siRNA sense strand
ugauucgugucaucuguga

SEQ ID NO: 872519 - RNA, 19 nt, Homo sapiens
  misc_RNA (1)...(19): siRNA sense strand
gagaacggacacaucuaug

SEQ ID NO: 872520 - RNA, 19 nt, Homo sapiens
  misc_RNA (1)...(19): siRNA sense strand
gcacgcagguuccccuugu

SEQ ID NO: 872521 - RNA, 19 nt, Homo sapiens
  misc_RNA (1)...(19): siRNA sense strand
ucaucgcccucuucauuuc

SEQ ID NO: 872522 - RNA, 19 nt, Homo sapiens
  misc_RNA (1)...(19): siRNA sense strand
gcuuucgggucucucaaug

SEQ ID NO: 872523 - RNA, 19 nt, Homo sapiens
  misc_RNA (1)...(19): siRNA sense strand
caagcuacuacaaguguga

SEQ ID NO: 872524 - RNA, 19 nt, Homo sapiens
  misc_RNA (1)...(19): siRNA sense strand
ggaugaggccuucgacacu

SEQ ID NO: 872525 - RNA, 19 nt, Homo sapiens
  misc_RNA (1)...(19): siRNA sense strand
uggaggagcguguggagaa

SEQ ID NO: 872526 - RNA, 19 nt, Homo sapiens
  misc_RNA (1)...(19): siRNA sense strand
ccaggugauucgugucauc

SEQ ID NO: 872527 - RNA, 19 nt, Homo sapiens
  misc_RNA (1)...(19): siRNA sense strand
cagaggaggaauucaagga

SEQ ID NO: 872528 - RNA, 19 nt, Homo sapiens
  misc_RNA (1)...(19): siRNA sense strand
gcucuacgcgcucuucucu

SEQ ID NO: 872529 - RNA, 19 nt, Homo sapiens
  misc_RNA (1)...(19): siRNA sense strand
ggauucaagcuacuacaag

SEQ ID NO: 872530 - RNA, 19 nt, Homo sapiens
  misc_RNA (1)...(19): siRNA sense strand
ucauugaagccaaguacuu

SEQ ID NO: 872531 - RNA, 19 nt, Homo sapiens
  misc_RNA (1)...(19): siRNA sense strand
gcuggugaccuuucugcuu

SEQ ID NO: 872532 - RNA, 19 nt, Homo sapiens
  misc_RNA (1)...(19): siRNA sense strand
ugagcaaguuccgcuacaa

SEQ ID NO: 872533 - RNA, 19 nt, Homo sapiens
  misc_RNA (1)...(19): siRNA sense strand
gcucagccuccucaucaug

SEQ ID NO: 872534 - RNA, 19 nt, Homo sapiens
  misc_RNA (1)...(19): siRNA sense strand
gacagcugcucaccauggu

SEQ ID NO: 872535 - RNA, 19 nt, Homo sapiens
  misc_RNA (1)...(19): siRNA sense strand
gcugugggcaaauacauca

SEQ ID NO: 872536 - RNA, 19 nt, Homo sapiens
  misc_RNA (1)...(19): siRNA sense strand
guccaccugcugucagaua

SEQ ID NO: 872537 - RNA, 19 nt, Homo sapiens
  misc_RNA (1)...(19): siRNA sense strand
ugagcucccugcccuacau

SEQ ID NO: 872538 - RNA, 19 nt, Homo sapiens
  misc_RNA (1)...(19): siRNA sense strand
cuacuaugggcauuacuug

SEQ ID NO: 872539 - RNA, 19 nt, Homo sapiens
  misc_RNA (1)...(19): siRNA sense strand
ucacugauggcauuauugg

SEQ ID NO: 872540 - RNA, 19 nt, Homo sapiens
  misc_RNA (1)...(19): siRNA sense strand
caaccuggaccugcucaug

SEQ ID NO: 872541 - RNA, 19 nt, Homo sapiens
  misc_RNA (1)...(19): siRNA sense strand
gaaucauugaagccaagua

SEQ ID NO: 872542 - RNA, 19 nt, Homo sapiens
  misc_RNA (1)...(19): siRNA sense strand
uaaaguccaccugcuguca

SEQ ID NO: 872543 - RNA, 19 nt, Homo sapiens
  misc_RNA (1)...(19): siRNA sense strand
ggaggagcguguggagaac

SEQ ID NO: 872544 - RNA, 19 nt, Homo sapiens
  misc_RNA (1)...(19): siRNA sense strand
gcauuacuuggacgacuau

SEQ ID NO: 872545 - RNA, 19 nt, Homo sapiens
  misc_RNA (1)...(19): siRNA sense strand
ccuguggaauaguuucuuc

SEQ ID NO: 872546 - RNA, 19 nt, Homo sapiens
  misc_RNA (1)...(19): siRNA sense strand
gugcaucagccgccugguu

SEQ ID NO: 872547 - RNA, 19 nt, Homo sapiens
  misc_RNA (1)...(19): siRNA sense strand
ucuaugacacgauugugaa

SEQ ID NO: 872548 - RNA, 19 nt, Homo sapiens
  misc_RNA (1)...(19): siRNA sense strand
caacuccuccaucgugucu

SEQ ID NO: 872549 - RNA, 19 nt, Homo sapiens
  misc_RNA (1)...(19): siRNA sense strand
guggagaacggacacaucu

SEQ ID NO: 872550 - RNA, 19 nt, Homo sapiens
  misc_RNA (1)...(19): siRNA sense strand
ugaaugcaccggagaacag

SEQ ID NO: 872551 - RNA, 19 nt, Homo sapiens
  misc_RNA (1)...(19): siRNA sense strand
gagcaaguuccgcuacaac

SEQ ID NO: 872552 - RNA, 19 nt, Homo sapiens
  misc_RNA (1)...(19): siRNA sense strand
cuacacccucuaccaauuc

SEQ ID NO: 872553 - RNA, 19 nt, Homo sapiens
  misc_RNA (1)...(19): siRNA sense strand
acggccaccucccuggaua

SEQ ID NO: 872554 - RNA, 19 nt, Homo sapiens
  misc_RNA (1)...(19): siRNA sense strand
ucccugcccuacaugaaga

SEQ ID NO: 872555 - RNA, 19 nt, Homo sapiens
  misc_RNA (1)...(19): siRNA sense strand
acacagaugacaccuucga

SEQ ID NO: 872556 - RNA, 19 nt, Homo sapiens
  misc_RNA (1)...(19): siRNA sense strand
uguuugggcugccuuggau

SEQ ID NO: 872557 - RNA, 19 nt, Homo sapiens
  misc_RNA (1)...(19): siRNA sense strand
ccacccuguuccucuacuu

SEQ ID NO: 872558 - RNA, 19 nt, Homo sapiens
  misc_RNA (1)...(19): siRNA sense strand
caucaccaccacccuguuc

SEQ ID NO: 872559 - RNA, 19 nt, Homo sapiens
  misc_RNA (1)...(19): siRNA sense strand
cgaaggaacgcagcacagu

SEQ ID NO: 872560 - RNA, 19 nt, Homo sapiens
  misc_RNA (1)...(19): siRNA sense strand
gagaugcaggccaccaaca

SEQ ID NO: 872561 - RNA, 19 nt, Homo sapiens
  misc_RNA (1)...(19): siRNA sense strand
gagaagcgguugucuguuc

SEQ ID NO: 872562 - RNA, 19 nt, Homo sapiens
  misc_RNA (1)...(19): siRNA sense strand
aauuagagcugccucauuu

SEQ ID NO: 872563 - RNA, 19 nt, Homo sapiens
  misc_RNA (1)...(19): siRNA sense strand
ugacagacguuuccauugu

SEQ ID NO: 872564 - RNA, 19 nt, Homo sapiens
  misc_RNA (1)...(19): siRNA sense strand
gacagacguuuccauuguu

SEQ ID NO: 872565 - RNA, 19 nt, Homo sapiens
  misc_RNA (1)...(19): siRNA sense strand
gcacuacaccuucguaacu

SEQ ID NO: 872566 - RNA, 19 nt, Homo sapiens
  misc_RNA (1)...(19): siRNA sense strand
gcuguauacuauuccauug

SEQ ID NO: 872567 - RNA, 19 nt, Homo sapiens
  misc_RNA (1)...(19): siRNA sense strand
cugccaaccuugagauauu

SEQ ID NO: 872568 - RNA, 19 nt, Homo sapiens
  misc_RNA (1)...(19): siRNA sense strand
agagcugccucauuucauu

SEQ ID NO: 872569 - RNA, 19 nt, Homo sapiens
  misc_RNA (1)...(19): siRNA sense strand
acagacguuuccauuguuu

SEQ ID NO: 872570 - RNA, 19 nt, Homo sapiens
  misc_RNA (1)...(19): siRNA sense strand
ggaaagagaagcgguuguc

SEQ ID NO: 872571 - RNA, 19 nt, Homo sapiens
  misc_RNA (1)...(19): siRNA sense strand
gagcugccucauuucauuu

SEQ ID NO: 872572 - RNA, 19 nt, Homo sapiens
  misc_RNA (1)...(19): siRNA sense strand
caauuagagcugccucauu

SEQ ID NO: 872573 - RNA, 19 nt, Homo sapiens
  misc_RNA (1)...(19): siRNA sense strand
aagagaagcgguugucugu

SEQ ID NO: 872574 - RNA, 19 nt, Homo sapiens
  misc_RNA (1)...(19): siRNA sense strand
gcuguaaugaauauucuug

SEQ ID NO: 872575 - RNA, 19 nt, Homo sapiens
  misc_RNA (1)...(19): siRNA sense strand
ccaccuuccugccaaccuu

SEQ ID NO: 872576 - RNA, 19 nt, Homo sapiens
  misc_RNA (1)...(19): siRNA sense strand
uccauuguuuccugucuuu

SEQ ID NO: 872577 - RNA, 19 nt, Homo sapiens
  misc_RNA (1)...(19): siRNA sense strand
gcaugcuguucugcacuuu

SEQ ID NO: 872578 - RNA, 19 nt, Homo sapiens
  misc_RNA (1)...(19): siRNA sense strand
cuugagauauuguaugcau

SEQ ID NO: 872579 - RNA, 19 nt, Homo sapiens
  misc_RNA (1)...(19): siRNA sense strand
acacuccaaucuccaccuu

SEQ ID NO: 872580 - RNA, 19 nt, Homo sapiens
  misc_RNA (1)...(19): siRNA sense strand
gaaagagaagcgguugucu

SEQ ID NO: 872581 - RNA, 19 nt, Homo sapiens
  misc_RNA (1)...(19): siRNA sense strand
caaccuugagauauuguau

SEQ ID NO: 872582 - RNA, 19 nt, Homo sapiens
  misc_RNA (1)...(19): siRNA sense strand
agaagcgguugucuguuca

SEQ ID NO: 872583 - RNA, 19 nt, Homo sapiens
  misc_RNA (1)...(19): siRNA sense strand
gcaauuagagcugccucau

SEQ ID NO: 872584 - RNA, 19 nt, Homo sapiens
  misc_RNA (1)...(19): siRNA sense strand
ugccaaccuugagauauug

SEQ ID NO: 872585 - RNA, 19 nt, Homo sapiens
  misc_RNA (1)...(19): siRNA sense strand
uuagagcugccucauuuca

SEQ ID NO: 872586 - RNA, 19 nt, Homo sapiens
  misc_RNA (1)...(19): siRNA sense strand
uaaagaagaugaggcaaga

SEQ ID NO: 872587 - RNA, 19 nt, Homo sapiens
  misc_RNA (1)...(19): siRNA sense strand
agagaaacaugaggaauaa

SEQ ID NO: 872588 - RNA, 19 nt, Homo sapiens
  misc_RNA (1)...(19): siRNA sense strand
ggaauucaccuucuucuuc

SEQ ID NO: 872589 - RNA, 19 nt, Homo sapiens
  misc_RNA (1)...(19): siRNA sense strand
gaagaugaggcaagagaaa

SEQ ID NO: 872590 - RNA, 19 nt, Homo sapiens
  misc_RNA (1)...(19): siRNA sense strand
cagagaaacaugaggaaua

SEQ ID NO: 872591 - RNA, 19 nt, Homo sapiens
  misc_RNA (1)...(19): siRNA sense strand
gaauucaccuucuucuucu

SEQ ID NO: 872592 - RNA, 19 nt, Homo sapiens
  misc_RNA (1)...(19): siRNA sense strand
cagcugaacccgaggcuaa

SEQ ID NO: 872593 - RNA, 19 nt, Homo sapiens
  misc_RNA (1)...(19): siRNA sense strand
ucaagucagagaaacauga

SEQ ID NO: 872594 - RNA, 19 nt, Homo sapiens
  misc_RNA (1)...(19): siRNA sense strand
gauguccgcagcagccauu

SEQ ID NO: 872595 - RNA, 19 nt, Homo sapiens
  misc_RNA (1)...(19): siRNA sense strand
aagaagaugaggcaagaga

SEQ ID NO: 872596 - RNA, 19 nt, Homo sapiens
  misc_RNA (1)...(19): siRNA sense strand
gggaauucaccuucuucuu

SEQ ID NO: 872597 - RNA, 19 nt, Homo sapiens
  misc_RNA (1)...(19): siRNA sense strand
ccacucaagucagagaaac

SEQ ID NO: 872598 - RNA, 19 nt, Homo sapiens
  misc_RNA (1)...(19): siRNA sense strand
cuccauagcagccaagaug

SEQ ID NO: 872599 - RNA, 19 nt, Homo sapiens
  misc_RNA (1)...(19): siRNA sense strand
cauagcagccaagaugaug

SEQ ID NO: 872600 - RNA, 19 nt, Homo sapiens
  misc_RNA (1)...(19): siRNA sense strand
acccgaggcuaaagaagau

SEQ ID NO: 872601 - RNA, 19 nt, Homo sapiens
  misc_RNA (1)...(19): siRNA sense strand
ugagcgaacucgguuauaa

SEQ ID NO: 872602 - RNA, 19 nt, Homo sapiens
  misc_RNA (1)...(19): siRNA sense strand
gcgucaagcucaccgacuu

SEQ ID NO: 872603 - RNA, 19 nt, Homo sapiens
  misc_RNA (1)...(19): siRNA sense strand
gcaugggcgucgugcucua

SEQ ID NO: 872604 - RNA, 19 nt, Homo sapiens
  misc_RNA (1)...(19): siRNA sense strand
ccacauccaagaaguacaa

SEQ ID NO: 872605 - RNA, 19 nt, Homo sapiens
  misc_RNA (1)...(19): siRNA sense strand
gagcgaacucgguuauaag

SEQ ID NO: 872606 - RNA, 19 nt, Homo sapiens
  misc_RNA (1)...(19): siRNA sense strand
gcagcuacuccaaggugaa

SEQ ID NO: 872607 - RNA, 19 nt, Homo sapiens
  misc_RNA (1)...(19): siRNA sense strand
gugcacgucuucgaguuca

SEQ ID NO: 872608 - RNA, 19 nt, Homo sapiens
  misc_RNA (1)...(19): siRNA sense strand
gagagggcagcuacuccaa

SEQ ID NO: 872609 - RNA, 19 nt, Homo sapiens
  misc_RNA (1)...(19): siRNA sense strand
gcaacgggaaacuguacau

SEQ ID NO: 872610 - RNA, 19 nt, Homo sapiens
  misc_RNA (1)...(19): siRNA sense strand
gaccugagcaccaccuacu

SEQ ID NO: 872611 - RNA, 19 nt, Homo sapiens
  misc_RNA (1)...(19): siRNA sense strand
gaaagaaaaucgcaggaaa

SEQ ID NO: 872612 - RNA, 19 nt, Homo sapiens
  misc_RNA (1)...(19): siRNA sense strand
gaacgccggugcagaugug

SEQ ID NO: 872613 - RNA, 19 nt, Homo sapiens
  misc_RNA (1)...(19): siRNA sense strand
ggacuuagaggccgaaauc

SEQ ID NO: 872614 - RNA, 19 nt, Homo sapiens
  misc_RNA (1)...(19): siRNA sense strand
cagcgaauguggaggauag

SEQ ID NO: 872615 - RNA, 19 nt, Homo sapiens
  misc_RNA (1)...(19): siRNA sense strand
gugcagaugugcuucuugu

SEQ ID NO: 872616 - RNA, 19 nt, Homo sapiens
  misc_RNA (1)...(19): siRNA sense strand
ggacaggauccaagauguu

SEQ ID NO: 872617 - RNA, 19 nt, Homo sapiens
  misc_RNA (1)...(19): siRNA sense strand
gaauguggaggauagacua

SEQ ID NO: 872618 - RNA, 19 nt, Homo sapiens
  misc_RNA (1)...(19): siRNA sense strand
gaaaaucgcaggaaaaucu

SEQ ID NO: 872619 - RNA, 19 nt, Homo sapiens
  misc_RNA (1)...(19): siRNA sense strand
gcaccagauuggccucaga

SEQ ID NO: 872620 - RNA, 19 nt, Homo sapiens
  misc_RNA (1)...(19): siRNA sense strand
gugccgcuguuaucuauga

SEQ ID NO: 872621 - RNA, 19 nt, Homo sapiens
  misc_RNA (1)...(19): siRNA sense strand
gaacuggcaccgacagaca

SEQ ID NO: 872622 - RNA, 19 nt, Homo sapiens
  misc_RNA (1)...(19): siRNA sense strand
gggacaggauccaagaugu

SEQ ID NO: 872623 - RNA, 19 nt, Homo sapiens
  misc_RNA (1)...(19): siRNA sense strand
caacagcagcaacaauuuc

SEQ ID NO: 872624 - RNA, 19 nt, Homo sapiens
  misc_RNA (1)...(19): siRNA sense strand
ccagacaccuuggcuguag

SEQ ID NO: 872625 - RNA, 19 nt, Homo sapiens
  misc_RNA (1)...(19): siRNA sense strand
agacccaguucuuucauug

SEQ ID NO: 872626 - RNA, 19 nt, Homo sapiens
  misc_RNA (1)...(19): siRNA sense strand
ggacaggugcccacuacau

SEQ ID NO: 872627 - RNA, 19 nt, Homo sapiens
  misc_RNA (1)...(19): siRNA sense strand
cagugccgcuguuaucuau

SEQ ID NO: 872628 - RNA, 19 nt, Homo sapiens
  misc_RNA (1)...(19): siRNA sense strand
gaaauccaccccuugaaaa

SEQ ID NO: 872629 - RNA, 19 nt, Homo sapiens
  misc_RNA (1)...(19): siRNA sense strand
ccaacagcagcaacaauuu

SEQ ID NO: 872630 - RNA, 19 nt, Homo sapiens
  misc_RNA (1)...(19): siRNA sense strand
gcuguuaucuaugacuuuc

SEQ ID NO: 872631 - RNA, 19 nt, Homo sapiens
  misc_RNA (1)...(19): siRNA sense strand
gggcagacccaguucuuuc

SEQ ID NO: 872632 - RNA, 19 nt, Homo sapiens
  misc_RNA (1)...(19): siRNA sense strand
cagcccauguccugagaaa

SEQ ID NO: 872633 - RNA, 19 nt, Homo sapiens
  misc_RNA (1)...(19): siRNA sense strand
gggaaacccuguggaacca

SEQ ID NO: 872634 - RNA, 19 nt, Homo sapiens
  misc_RNA (1)...(19): siRNA sense strand
ucauugcagucaacuuguu

SEQ ID NO: 872635 - RNA, 19 nt, Homo sapiens
  misc_RNA (1)...(19): siRNA sense strand
caggacaggugcccacuac

SEQ ID NO: 872636 - RNA, 19 nt, Homo sapiens
  misc_RNA (1)...(19): siRNA sense strand
cagacccaguucuuucauu

SEQ ID NO: 872637 - RNA, 19 nt, Homo sapiens
  misc_RNA (1)...(19): siRNA sense strand
gcucagccuucuucuucug

SEQ ID NO: 872638 - RNA, 19 nt, Homo sapiens
  misc_RNA (1)...(19): siRNA sense strand
ccgcucagccuucuucuuc

SEQ ID NO: 872639 - RNA, 19 nt, Homo sapiens
  misc_RNA (1)...(19): siRNA sense strand
ggccuggucucugugauca

SEQ ID NO: 872640 - RNA, 19 nt, Homo sapiens
  misc_RNA (1)...(19): siRNA sense strand
ugcuggagcuggccaaugu

SEQ ID NO: 872641 - RNA, 19 nt, Homo sapiens
  misc_RNA (1)...(19): siRNA sense strand
gacaggauccaagauguuc

SEQ ID NO: 872642 - RNA, 19 nt, Homo sapiens
  misc_RNA (1)...(19): siRNA sense strand
agagaccuguggcccaaga

SEQ ID NO: 872643 - RNA, 19 nt, Homo sapiens
  misc_RNA (1)...(19): siRNA sense strand
gcuacaaaccagacaccuu

SEQ ID NO: 872644 - RNA, 19 nt, Homo sapiens
  misc_RNA (1)...(19): siRNA sense strand
gcaggaaaaucugggaaau

SEQ ID NO: 872645 - RNA, 19 nt, Homo sapiens
  misc_RNA (1)...(19): siRNA sense strand
gacaggugcccacuacauc

SEQ ID NO: 872646 - RNA, 19 nt, Homo sapiens
  misc_RNA (1)...(19): siRNA sense strand
gaccaccgcucagccuucu

SEQ ID NO: 872647 - RNA, 19 nt, Homo sapiens
  misc_RNA (1)...(19): siRNA sense strand
gagcagugcgcuaccugau

SEQ ID NO: 872648 - RNA, 19 nt, Homo sapiens
  misc_RNA (1)...(19): siRNA sense strand
ggcuguggaugauauaaac

SEQ ID NO: 872649 - RNA, 19 nt, Homo sapiens
  misc_RNA (1)...(19): siRNA sense strand
ggagcuggccaaugucucu

SEQ ID NO: 872650 - RNA, 19 nt, Homo sapiens
  misc_RNA (1)...(19): siRNA sense strand
aaaguggcuuccuccuuca

SEQ ID NO: 872651 - RNA, 19 nt, Homo sapiens
  misc_RNA (1)...(19): siRNA sense strand
ggcagcccauguccugaga

SEQ ID NO: 872652 - RNA, 19 nt, Homo sapiens
  misc_RNA (1)...(19): siRNA sense strand
accaacagcagcaacaauu

SEQ ID NO: 872653 - RNA, 19 nt, Homo sapiens
  misc_RNA (1)...(19): siRNA sense strand
guucuuucauugcagucaa

SEQ ID NO: 872654 - RNA, 19 nt, Homo sapiens
  misc_RNA (1)...(19): siRNA sense strand
gguguucgucgucucauuc

SEQ ID NO: 872655 - RNA, 19 nt, Homo sapiens
  misc_RNA (1)...(19): siRNA sense strand
cagcaccgggcaccagauu

SEQ ID NO: 872656 - RNA, 19 nt, Homo sapiens
  misc_RNA (1)...(19): siRNA sense strand
cgaaauccaccccuugaaa

SEQ ID NO: 872657 - RNA, 19 nt, Homo sapiens
  misc_RNA (1)...(19): siRNA sense strand
ggaacgccggugcagaugu

SEQ ID NO: 872658 - RNA, 19 nt, Homo sapiens
  misc_RNA (1)...(19): siRNA sense strand
ccgcuguuaucuaugacuu

SEQ ID NO: 872659 - RNA, 19 nt, Homo sapiens
  misc_RNA (1)...(19): siRNA sense strand
ggcagacccaguucuuuca

SEQ ID NO: 872660 - RNA, 19 nt, Homo sapiens
  misc_RNA (1)...(19): siRNA sense strand
gauccuguuucuggaccuu

SEQ ID NO: 872661 - RNA, 19 nt, Homo sapiens
  misc_RNA (1)...(19): siRNA sense strand
ggaccacaaggacuuagag

SEQ ID NO: 872662 - RNA, 19 nt, Homo sapiens
  misc_RNA (1)...(19): siRNA sense strand
uuucauugcagucaacuug

SEQ ID NO: 872663 - RNA, 19 nt, Homo sapiens
  misc_RNA (1)...(19): siRNA sense strand
ccaccgcucagccuucuuc

SEQ ID NO: 872664 - RNA, 19 nt, Homo sapiens
  misc_RNA (1)...(19): siRNA sense strand
ggucagagguuacagauaa

SEQ ID NO: 872665 - RNA, 19 nt, Homo sapiens
  misc_RNA (1)...(19): siRNA sense strand
ggaagaggcugcagauaau

SEQ ID NO: 872666 - RNA, 19 nt, Homo sapiens
  misc_RNA (1)...(19): siRNA sense strand
ggaagaggcugcagauaau

SEQ ID NO: 872667 - RNA, 19 nt, Homo sapiens
  misc_RNA (1)...(19): siRNA sense strand
ggaagaggcugcagauaau

SEQ ID NO: 872668 - RNA, 19 nt, Homo sapiens
  misc_RNA (1)...(19): siRNA sense strand
gaagcgaccuggagaguga

SEQ ID NO: 872669 - RNA, 19 nt, Homo sapiens
  misc_RNA (1)...(19): siRNA sense strand
gggaggacgucgacuauuu

SEQ ID NO: 872670 - RNA, 19 nt, Homo sapiens
  misc_RNA (1)...(19): siRNA sense strand
ggaaacaggucaagacagu

SEQ ID NO: 872671 - RNA, 19 nt, Homo sapiens
  misc_RNA (1)...(19): siRNA sense strand
ccaggaagcugaagucuca

SEQ ID NO: 872672 - RNA, 19 nt, Homo sapiens
  misc_RNA (1)...(19): siRNA sense strand
gggaagaggcugcagauaa

SEQ ID NO: 872673 - RNA, 19 nt, Homo sapiens
  misc_RNA (1)...(19): siRNA sense strand
gggaagaggcugcagauaa

SEQ ID NO: 872674 - RNA, 19 nt, Homo sapiens
  misc_RNA (1)...(19): siRNA sense strand
gggaagaggcugcagauaa

SEQ ID NO: 872675 - RNA, 19 nt, Homo sapiens
  misc_RNA (1)...(19): siRNA sense strand
gggaagaggccguacauga

SEQ ID NO: 872676 - RNA, 19 nt, Homo sapiens
  misc_RNA (1)...(19): siRNA sense strand
gcaagaagaccagcuguga

SEQ ID NO: 872677 - RNA, 19 nt, Homo sapiens
  misc_RNA (1)...(19): siRNA sense strand
gggagaggcugcagauagu

SEQ ID NO: 872678 - RNA, 19 nt, Homo sapiens
  misc_RNA (1)...(19): siRNA sense strand
ggucacagggcacagauaa

SEQ ID NO: 872679 - RNA, 19 nt, Homo sapiens
  misc_RNA (1)...(19): siRNA sense strand
gagugaggaugaugaggaa

SEQ ID NO: 872680 - RNA, 19 nt, Homo sapiens
  misc_RNA (1)...(19): siRNA sense strand
guacaugaccagagggaaa

SEQ ID NO: 872681 - RNA, 19 nt, Homo sapiens
  misc_RNA (1)...(19): siRNA sense strand
gcaagaaggugcgcaaaau

SEQ ID NO: 872682 - RNA, 19 nt, Homo sapiens
  misc_RNA (1)...(19): siRNA sense strand
ggaggagagugcagcagau

SEQ ID NO: 872683 - RNA, 19 nt, Homo sapiens
  misc_RNA (1)...(19): siRNA sense strand
gggaaacgcgggagauguu

SEQ ID NO: 872684 - RNA, 19 nt, Homo sapiens
  misc_RNA (1)...(19): siRNA sense strand
caccaaggaagcagaauuu

SEQ ID NO: 872685 - RNA, 19 nt, Homo sapiens
  misc_RNA (1)...(19): siRNA sense strand
ggaggacgucgacuauuug

SEQ ID NO: 872686 - RNA, 19 nt, Homo sapiens
  misc_RNA (1)...(19): siRNA sense strand
gaucaacugggccuccuuu

SEQ ID NO: 872687 - RNA, 19 nt, Homo sapiens
  misc_RNA (1)...(19): siRNA sense strand
gauggaggcccaagaucaa

SEQ ID NO: 872688 - RNA, 19 nt, Homo sapiens
  misc_RNA (1)...(19): siRNA sense strand
ggaaggggcugcagguaau

SEQ ID NO: 872689 - RNA, 19 nt, Homo sapiens
  misc_RNA (1)...(19): siRNA sense strand
aaacaggucaagacaguga

SEQ ID NO: 872690 - RNA, 19 nt, Homo sapiens
  misc_RNA (1)...(19): siRNA sense strand
gagguuacagauaaucaaa

SEQ ID NO: 872691 - RNA, 19 nt, Homo sapiens
  misc_RNA (1)...(19): siRNA sense strand
ggaagaggccguacaugac

SEQ ID NO: 872692 - RNA, 19 nt, Homo sapiens
  misc_RNA (1)...(19): siRNA sense strand
gcaaaaugcccgucagcua

SEQ ID NO: 872693 - RNA, 19 nt, Homo sapiens
  misc_RNA (1)...(19): siRNA sense strand
gguuacagauaaucaaagg

SEQ ID NO: 872694 - RNA, 19 nt, Homo sapiens
  misc_RNA (1)...(19): siRNA sense strand
ggccucagcuguccaaagc

SEQ ID NO: 872695 - RNA, 19 nt, Homo sapiens
  misc_RNA (1)...(19): siRNA sense strand
ucaaagggaagaggccaua

SEQ ID NO: 872696 - RNA, 19 nt, Homo sapiens
  misc_RNA (1)...(19): siRNA sense strand
ccaccaaggaagcagaauu

SEQ ID NO: 872697 - RNA, 19 nt, Homo sapiens
  misc_RNA (1)...(19): siRNA sense strand
ggacagguggcgggaguau

SEQ ID NO: 872698 - RNA, 19 nt, Homo sapiens
  misc_RNA (1)...(19): siRNA sense strand
gcagggagagcaagaagac

SEQ ID NO: 872699 - RNA, 19 nt, Homo sapiens
  misc_RNA (1)...(19): siRNA sense strand
cgauggaggcccaagauca

SEQ ID NO: 872700 - RNA, 19 nt, Homo sapiens
  misc_RNA (1)...(19): siRNA sense strand
cagauaaucagagggaaga

SEQ ID NO: 872701 - RNA, 19 nt, Homo sapiens
  misc_RNA (1)...(19): siRNA sense strand
gagggaagaggcugcagau

SEQ ID NO: 872702 - RNA, 19 nt, Homo sapiens
  misc_RNA (1)...(19): siRNA sense strand
gagggaagaggcugcagau

SEQ ID NO: 872703 - RNA, 19 nt, Homo sapiens
  misc_RNA (1)...(19): siRNA sense strand
ggagagugcagcagauggu

SEQ ID NO: 872704 - RNA, 19 nt, Homo sapiens
  misc_RNA (1)...(19): siRNA sense strand
gaagaggcugcagauaauc

SEQ ID NO: 872705 - RNA, 19 nt, Homo sapiens
  misc_RNA (1)...(19): siRNA sense strand
gaagaggcugcagauaauc

SEQ ID NO: 872706 - RNA, 19 nt, Homo sapiens
  misc_RNA (1)...(19): siRNA sense strand
gaagaggcugcagauaauc

SEQ ID NO: 872707 - RNA, 19 nt, Homo sapiens
  misc_RNA (1)...(19): siRNA sense strand
gagaggcugcagauaguca

SEQ ID NO: 872708 - RNA, 19 nt, Homo sapiens
  misc_RNA (1)...(19): siRNA sense strand
gcacguacgacagcagcaa

SEQ ID NO: 872709 - RNA, 19 nt, Homo sapiens
  misc_RNA (1)...(19): siRNA sense strand
ucagcuaccugggcagcaa

SEQ ID NO: 872710 - RNA, 19 nt, Homo sapiens
  misc_RNA (1)...(19): siRNA sense strand
cagauaaccacagggaaga

SEQ ID NO: 872711 - RNA, 19 nt, Homo sapiens
  misc_RNA (1)...(19): siRNA sense strand
cagauaaccagagggaaga

SEQ ID NO: 872712 - RNA, 19 nt, Homo sapiens
  misc_RNA (1)...(19): siRNA sense strand
acagguggcgggaguaugu

SEQ ID NO: 872713 - RNA, 19 nt, Homo sapiens
  misc_RNA (1)...(19): siRNA sense strand
gagcagggagagcaagaag

SEQ ID NO: 872714 - RNA, 19 nt, Homo sapiens
  misc_RNA (1)...(19): siRNA sense strand
gggcaggagaggucaggaa

SEQ ID NO: 872715 - RNA, 19 nt, Homo sapiens
  misc_RNA (1)...(19): siRNA sense strand
uguccagggugcagauaau

SEQ ID NO: 872716 - RNA, 19 nt, Homo sapiens
  misc_RNA (1)...(19): siRNA sense strand
gaggagagugcagcagaug

SEQ ID NO: 872717 - RNA, 19 nt, Homo sapiens
  misc_RNA (1)...(19): siRNA sense strand
ccaagggaccacaggaaca

SEQ ID NO: 872718 - RNA, 19 nt, Homo sapiens
  misc_RNA (1)...(19): siRNA sense strand
gcccaagggaccacaggaa

SEQ ID NO: 872719 - RNA, 19 nt, Homo sapiens
  misc_RNA (1)...(19): siRNA sense strand
gucagagguuacagauaau

SEQ ID NO: 872720 - RNA, 19 nt, Homo sapiens
  misc_RNA (1)...(19): siRNA sense strand
ugccagugcccauguuuga

SEQ ID NO: 872721 - RNA, 19 nt, Homo sapiens
  misc_RNA (1)...(19): siRNA sense strand
cagaggcugcacauaauca

SEQ ID NO: 872722 - RNA, 19 nt, Homo sapiens
  misc_RNA (1)...(19): siRNA sense strand
cagauaaucaaagggaaga

SEQ ID NO: 872723 - RNA, 19 nt, Homo sapiens
  misc_RNA (1)...(19): siRNA sense strand
cagaggcugcagauaauca

SEQ ID NO: 872724 - RNA, 19 nt, Homo sapiens
  misc_RNA (1)...(19): siRNA sense strand
ggagagugaggaugaugag

SEQ ID NO: 872725 - RNA, 19 nt, Homo sapiens
  misc_RNA (1)...(19): siRNA sense strand
uucgagaccuccagagaca

SEQ ID NO: 872726 - RNA, 19 nt, Homo sapiens
  misc_RNA (1)...(19): siRNA sense strand
gggaaggggcugcagguaa

SEQ ID NO: 872727 - RNA, 19 nt, Homo sapiens
  misc_RNA (1)...(19): siRNA sense strand
ggacggaaauggcuauauc

SEQ ID NO: 872728 - RNA, 19 nt, Homo sapiens
  misc_RNA (1)...(19): siRNA sense strand
gacaauagacuuuagagaa

SEQ ID NO: 872729 - RNA, 19 nt, Homo sapiens
  misc_RNA (1)...(19): siRNA sense strand
uaagaugguuuccucugua

SEQ ID NO: 872730 - RNA, 19 nt, Homo sapiens
  misc_RNA (1)...(19): siRNA sense strand
aaauggagaugggacaaua

SEQ ID NO: 872731 - RNA, 19 nt, Homo sapiens
  misc_RNA (1)...(19): siRNA sense strand
guauaaaggcuucuugaga

SEQ ID NO: 872732 - RNA, 19 nt, Homo sapiens
  misc_RNA (1)...(19): siRNA sense strand
gaaaaugccugaagaugag

SEQ ID NO: 872733 - RNA, 19 nt, Homo sapiens
  misc_RNA (1)...(19): siRNA sense strand
gaaaagaacagaaaagauc

SEQ ID NO: 872734 - RNA, 19 nt, Homo sapiens
  misc_RNA (1)...(19): siRNA sense strand
ggacaauagacuuuagaga

SEQ ID NO: 872735 - RNA, 19 nt, Homo sapiens
  misc_RNA (1)...(19): siRNA sense strand
caucaucgccuugagugua

SEQ ID NO: 872736 - RNA, 19 nt, Homo sapiens
  misc_RNA (1)...(19): siRNA sense strand
caauggaagaguuuaagaa

SEQ ID NO: 872737 - RNA, 19 nt, Homo sapiens
  misc_RNA (1)...(19): siRNA sense strand
aagaugguuuccucuguaa

SEQ ID NO: 872738 - RNA, 19 nt, Homo sapiens
  misc_RNA (1)...(19): siRNA sense strand
gaugggacaauagacuuua

SEQ ID NO: 872739 - RNA, 19 nt, Homo sapiens
  misc_RNA (1)...(19): siRNA sense strand
gaaauggcuauaucagcaa

SEQ ID NO: 872740 - RNA, 19 nt, Homo sapiens
  misc_RNA (1)...(19): siRNA sense strand
gaugguuuccucuguaaug

SEQ ID NO: 872741 - RNA, 19 nt, Homo sapiens
  misc_RNA (1)...(19): siRNA sense strand
aaaugggccuucagcaugu

SEQ ID NO: 872742 - RNA, 19 nt, Homo sapiens
  misc_RNA (1)...(19): siRNA sense strand
uguacgaccuggacggaaa

SEQ ID NO: 872743 - RNA, 19 nt, Homo sapiens
  misc_RNA (1)...(19): siRNA sense strand
caccuucgaugcaaaugga

SEQ ID NO: 872744 - RNA, 19 nt, Homo sapiens
  misc_RNA (1)...(19): siRNA sense strand
auaaaggcuucuugagaga

SEQ ID NO: 872745 - RNA, 19 nt, Homo sapiens
  misc_RNA (1)...(19): siRNA sense strand
gagaugggacaauagacuu

SEQ ID NO: 872746 - RNA, 19 nt, Homo sapiens
  misc_RNA (1)...(19): siRNA sense strand
gaucgugcaggcaaucuau

SEQ ID NO: 872747 - RNA, 19 nt, Homo sapiens
  misc_RNA (1)...(19): siRNA sense strand
ccagauggacaccaauaga

SEQ ID NO: 872748 - RNA, 19 nt, Homo sapiens
  misc_RNA (1)...(19): siRNA sense strand
aggcagagaugcuagugau

SEQ ID NO: 872749 - RNA, 19 nt, Homo sapiens
  misc_RNA (1)...(19): siRNA sense strand
agcaugagauccaggaaug

SEQ ID NO: 872750 - RNA, 19 nt, Homo sapiens
  misc_RNA (1)...(19): siRNA sense strand
augcaggacuugcuggaaa

SEQ ID NO: 872751 - RNA, 19 nt, Homo sapiens
  misc_RNA (1)...(19): siRNA sense strand
gaauucaucaucgccuuga

SEQ ID NO: 872752 - RNA, 19 nt, Homo sapiens
  misc_RNA (1)...(19): siRNA sense strand
ggagaugggacaauagacu

SEQ ID NO: 872753 - RNA, 19 nt, Homo sapiens
  misc_RNA (1)...(19): siRNA sense strand
gugcaggcaaucuauaaga

SEQ ID NO: 872754 - RNA, 19 nt, Homo sapiens
  misc_RNA (1)...(19): siRNA sense strand
gagaaaagaacagaaaaga

SEQ ID NO: 872755 - RNA, 19 nt, Homo sapiens
  misc_RNA (1)...(19): siRNA sense strand
auaagaugguuuccucugu

SEQ ID NO: 872756 - RNA, 19 nt, Homo sapiens
  misc_RNA (1)...(19): siRNA sense strand
gagcaugagauccaggaau

SEQ ID NO: 872757 - RNA, 19 nt, Homo sapiens
  misc_RNA (1)...(19): siRNA sense strand
gcaaauggagaugggacaa

SEQ ID NO: 872758 - RNA, 19 nt, Homo sapiens
  misc_RNA (1)...(19): siRNA sense strand
gauccaggaaugguauaaa

SEQ ID NO: 872759 - RNA, 19 nt, Homo sapiens
  misc_RNA (1)...(19): siRNA sense strand
ugaaaaugccugaagauga

SEQ ID NO: 872760 - RNA, 19 nt, Homo sapiens
  misc_RNA (1)...(19): siRNA sense strand
uuacagagcaugagaucca

SEQ ID NO: 872761 - RNA, 19 nt, Homo sapiens
  misc_RNA (1)...(19): siRNA sense strand
uaaugaaaaugccugaaga

SEQ ID NO: 872762 - RNA, 19 nt, Homo sapiens
  misc_RNA (1)...(19): siRNA sense strand
ucaauggaagaguuuaaga

SEQ ID NO: 872763 - RNA, 19 nt, Homo sapiens
  misc_RNA (1)...(19): siRNA sense strand
aaagcgacccguccauugu

SEQ ID NO: 872764 - RNA, 19 nt, Homo sapiens
  misc_RNA (1)...(19): siRNA sense strand
ggaaacagaacagcaagcu

SEQ ID NO: 872765 - RNA, 19 nt, Homo sapiens
  misc_RNA (1)...(19): siRNA sense strand
gagauccaggaaugguaua

SEQ ID NO: 872766 - RNA, 19 nt, Homo sapiens
  misc_RNA (1)...(19): siRNA sense strand
gacggaaauggcuauauca

SEQ ID NO: 872767 - RNA, 19 nt, Homo sapiens
  misc_RNA (1)...(19): siRNA sense strand
uggggaugcuuccaaauuu

SEQ ID NO: 872768 - RNA, 19 nt, Homo sapiens
  misc_RNA (1)...(19): siRNA sense strand
cgccagauggacaccaaua

SEQ ID NO: 872769 - RNA, 19 nt, Homo sapiens
  misc_RNA (1)...(19): siRNA sense strand
gcaaggcagagaugcuagu

SEQ ID NO: 872770 - RNA, 19 nt, Homo sapiens
  misc_RNA (1)...(19): siRNA sense strand
gacuuuagagaauucauca

SEQ ID NO: 872771 - RNA, 19 nt, Homo sapiens
  misc_RNA (1)...(19): siRNA sense strand
ccaaauuugcagagcaugu

SEQ ID NO: 872772 - RNA, 19 nt, Homo sapiens
  misc_RNA (1)...(19): siRNA sense strand
aucaucgccuugaguguaa

SEQ ID NO: 872773 - RNA, 19 nt, Homo sapiens
  misc_RNA (1)...(19): siRNA sense strand
gguauaaaggcuucuugag

SEQ ID NO: 872774 - RNA, 19 nt, Homo sapiens
  misc_RNA (1)...(19): siRNA sense strand
ugagauccaggaaugguau

SEQ ID NO: 872775 - RNA, 19 nt, Homo sapiens
  misc_RNA (1)...(19): siRNA sense strand
caaauggagaugggacaau

SEQ ID NO: 872776 - RNA, 19 nt, Homo sapiens
  misc_RNA (1)...(19): siRNA sense strand
ccagagaaaagaacagaaa

SEQ ID NO: 872777 - RNA, 19 nt, Homo sapiens
  misc_RNA (1)...(19): siRNA sense strand
uaucagcaaggcagagaug

SEQ ID NO: 872778 - RNA, 19 nt, Homo sapiens
  misc_RNA (1)...(19): siRNA sense strand
guucauccgaggagccaaa

SEQ ID NO: 872779 - RNA, 19 nt, Homo sapiens
  misc_RNA (1)...(19): siRNA sense strand
ggggaugcuuccaaauuug

SEQ ID NO: 872780 - RNA, 19 nt, Homo sapiens
  misc_RNA (1)...(19): siRNA sense strand
agauggacaccaauagaga

SEQ ID NO: 872781 - RNA, 19 nt, Homo sapiens
  misc_RNA (1)...(19): siRNA sense strand
ugucaauggaagaguuuaa

SEQ ID NO: 872782 - RNA, 19 nt, Homo sapiens
  misc_RNA (1)...(19): siRNA sense strand
cagagaugcuagugaucgu

SEQ ID NO: 872783 - RNA, 19 nt, Homo sapiens
  misc_RNA (1)...(19): siRNA sense strand
gaaaugcaaugacuacuug

SEQ ID NO: 872784 - RNA, 19 nt, Homo sapiens
  misc_RNA (1)...(19): siRNA sense strand
ggacaagucucugcuuaaa

SEQ ID NO: 872785 - RNA, 19 nt, Homo sapiens
  misc_RNA (1)...(19): siRNA sense strand
gaaugcaucuccagcaaga

SEQ ID NO: 872786 - RNA, 19 nt, Homo sapiens
  misc_RNA (1)...(19): siRNA sense strand
aaacaaaccugguguguac

SEQ ID NO: 872787 - RNA, 19 nt, Homo sapiens
  misc_RNA (1)...(19): siRNA sense strand
ggagacagaugacaagaca

SEQ ID NO: 872788 - RNA, 19 nt, Homo sapiens
  misc_RNA (1)...(19): siRNA sense strand
gccaacagcuucucaaucu

SEQ ID NO: 872789 - RNA, 19 nt, Homo sapiens
  misc_RNA (1)...(19): siRNA sense strand
gaaacaaaccuggugugua

SEQ ID NO: 872790 - RNA, 19 nt, Homo sapiens
  misc_RNA (1)...(19): siRNA sense strand
ggaaugacuccuacucaga

SEQ ID NO: 872791 - RNA, 19 nt, Homo sapiens
  misc_RNA (1)...(19): siRNA sense strand
caacagcuucucaaucuug

SEQ ID NO: 872792 - RNA, 19 nt, Homo sapiens
  misc_RNA (1)...(19): siRNA sense strand
ccagcaaccugcaccaguu

SEQ ID NO: 872793 - RNA, 19 nt, Homo sapiens
  misc_RNA (1)...(19): siRNA sense strand
aaugagaccugcuggauca

SEQ ID NO: 872794 - RNA, 19 nt, Homo sapiens
  misc_RNA (1)...(19): siRNA sense strand
gggaaugcaucuccagcaa

SEQ ID NO: 872795 - RNA, 19 nt, Homo sapiens
  misc_RNA (1)...(19): siRNA sense strand
ugggacaagucucugcuua

SEQ ID NO: 872796 - RNA, 19 nt, Homo sapiens
  misc_RNA (1)...(19): siRNA sense strand
guucuucccuggauuuaca

SEQ ID NO: 872797 - RNA, 19 nt, Homo sapiens
  misc_RNA (1)...(19): siRNA sense strand
acacagggaucagguacaa

SEQ ID NO: 872798 - RNA, 19 nt, Homo sapiens
  misc_RNA (1)...(19): siRNA sense strand
gcagcuggguuucgagagu

SEQ ID NO: 872799 - RNA, 19 nt, Homo sapiens
  misc_RNA (1)...(19): siRNA sense strand
gcaacuggaaugacuccua

SEQ ID NO: 872800 - RNA, 19 nt, Homo sapiens
  misc_RNA (1)...(19): siRNA sense strand
ggagagcccaguccaguuc

SEQ ID NO: 872801 - RNA, 19 nt, Homo sapiens
  misc_RNA (1)...(19): siRNA sense strand
acugcaagcugaagaguga

SEQ ID NO: 872802 - RNA, 19 nt, Homo sapiens
  misc_RNA (1)...(19): siRNA sense strand
caaccagaguguaccuugu

SEQ ID NO: 872803 - RNA, 19 nt, Homo sapiens
  misc_RNA (1)...(19): siRNA sense strand
gcaaugacuacuuggucua

SEQ ID NO: 872804 - RNA, 19 nt, Homo sapiens
  misc_RNA (1)...(19): siRNA sense strand
ggaggacgacuaugacauc

SEQ ID NO: 872805 - RNA, 19 nt, Homo sapiens
  misc_RNA (1)...(19): siRNA sense strand
ucucaucgacuucaagaaa

SEQ ID NO: 872806 - RNA, 19 nt, Homo sapiens
  misc_RNA (1)...(19): siRNA sense strand
gggacaagucucugcuuaa

SEQ ID NO: 872807 - RNA, 19 nt, Homo sapiens
  misc_RNA (1)...(19): siRNA sense strand
caagaaaugcaaugacuac

SEQ ID NO: 872808 - RNA, 19 nt, Homo sapiens
  misc_RNA (1)...(19): siRNA sense strand
guauaucucccuccagugu

SEQ ID NO: 872809 - RNA, 19 nt, Homo sapiens
  misc_RNA (1)...(19): siRNA sense strand
gcaagaccagggagacaga

SEQ ID NO: 872810 - RNA, 19 nt, Homo sapiens
  misc_RNA (1)...(19): siRNA sense strand
gaggugcgauucagaaaau

SEQ ID NO: 872811 - RNA, 19 nt, Homo sapiens
  misc_RNA (1)...(19): siRNA sense strand
ucaagaaaugcaaugacua

SEQ ID NO: 872812 - RNA, 19 nt, Homo sapiens
  misc_RNA (1)...(19): siRNA sense strand
acaccaaagugacagaagu

SEQ ID NO: 872813 - RNA, 19 nt, Homo sapiens
  misc_RNA (1)...(19): siRNA sense strand
acaagucucugcuuaaaau

SEQ ID NO: 872814 - RNA, 19 nt, Homo sapiens
  misc_RNA (1)...(19): siRNA sense strand
caacuccaccauccaggaa

SEQ ID NO: 872815 - RNA, 19 nt, Homo sapiens
  misc_RNA (1)...(19): siRNA sense strand
ucaucgacuucaagaaaug

SEQ ID NO: 872816 - RNA, 19 nt, Homo sapiens
  misc_RNA (1)...(19): siRNA sense strand
ggauuuacagcaagaugga

SEQ ID NO: 872817 - RNA, 19 nt, Homo sapiens
  misc_RNA (1)...(19): siRNA sense strand
accagaguguaccuuguua

SEQ ID NO: 872818 - RNA, 19 nt, Homo sapiens
  misc_RNA (1)...(19): siRNA sense strand
ccaacagcuucucaaucuu

SEQ ID NO: 872819 - RNA, 19 nt, Homo sapiens
  misc_RNA (1)...(19): siRNA sense strand
agaaaugcaaugacuacuu

SEQ ID NO: 872820 - RNA, 19 nt, Homo sapiens
  misc_RNA (1)...(19): siRNA sense strand
cagaguguaccuuguuaga

SEQ ID NO: 872821 - RNA, 19 nt, Homo sapiens
  misc_RNA (1)...(19): siRNA sense strand
ggagagcgaggugcgauuc

SEQ ID NO: 872822 - RNA, 19 nt, Homo sapiens
  misc_RNA (1)...(19): siRNA sense strand
gcucacauccacccugcuu

SEQ ID NO: 872823 - RNA, 19 nt, Homo sapiens
  misc_RNA (1)...(19): siRNA sense strand
gagguugcccacagggauu

SEQ ID NO: 872824 - RNA, 19 nt, Homo sapiens
  misc_RNA (1)...(19): siRNA sense strand
gagcgaggugcgauucaga

SEQ ID NO: 872825 - RNA, 19 nt, Homo sapiens
  misc_RNA (1)...(19): siRNA sense strand
gucuaugacaguuaccuua

SEQ ID NO: 872826 - RNA, 19 nt, Homo sapiens
  misc_RNA (1)...(19): siRNA sense strand
ccagggagacagaugacaa

SEQ ID NO: 872827 - RNA, 19 nt, Homo sapiens
  misc_RNA (1)...(19): siRNA sense strand
gccgagaucaucaucaaca

SEQ ID NO: 872828 - RNA, 19 nt, Homo sapiens
  misc_RNA (1)...(19): siRNA sense strand
gcgaggugcgauucagaaa

SEQ ID NO: 872829 - RNA, 19 nt, Homo sapiens
  misc_RNA (1)...(19): siRNA sense strand
gcucuggcaucacuuucca

SEQ ID NO: 872830 - RNA, 19 nt, Homo sapiens
  misc_RNA (1)...(19): siRNA sense strand
gaucaucaucaacagcaau

SEQ ID NO: 872831 - RNA, 19 nt, Homo sapiens
  misc_RNA (1)...(19): siRNA sense strand
ccgaugaggaggacgacua

SEQ ID NO: 872832 - RNA, 19 nt, Homo sapiens
  misc_RNA (1)...(19): siRNA sense strand
gggagagcccaguccaguu

SEQ ID NO: 872833 - RNA, 19 nt, Homo sapiens
  misc_RNA (1)...(19): siRNA sense strand
caccaaagugacagaaguu

SEQ ID NO: 872834 - RNA, 19 nt, Homo sapiens
  misc_RNA (1)...(19): siRNA sense strand
ucaaucucaucgacuucaa

SEQ ID NO: 872835 - RNA, 19 nt, Homo sapiens
  misc_RNA (1)...(19): siRNA sense strand
ucaguggcuucccaucugu

SEQ ID NO: 872836 - RNA, 19 nt, Homo sapiens
  misc_RNA (1)...(19): siRNA sense strand
uugccgagaucaucaucaa

SEQ ID NO: 872837 - RNA, 19 nt, Homo sapiens
  misc_RNA (1)...(19): siRNA sense strand
augacuacuuggucuauga

SEQ ID NO: 872838 - RNA, 19 nt, Homo sapiens
  misc_RNA (1)...(19): siRNA sense strand
ucaaugagaccugcuggau

SEQ ID NO: 872839 - RNA, 19 nt, Homo sapiens
  misc_RNA (1)...(19): siRNA sense strand
guggaggcacgcucauuga

SEQ ID NO: 872840 - RNA, 19 nt, Homo sapiens
  misc_RNA (1)...(19): siRNA sense strand
gaggaggacgacuaugaca

SEQ ID NO: 872841 - RNA, 19 nt, Homo sapiens
  misc_RNA (1)...(19): siRNA sense strand
augcauggacagaccuuua

SEQ ID NO: 872842 - RNA, 19 nt, Homo sapiens
  misc_RNA (1)...(19): siRNA sense strand
ggacagccacgggaaugca

SEQ ID NO: 872843 - RNA, 19 nt, Homo sapiens
  misc_RNA (1)...(19): siRNA sense strand
caaugacuacuuggucuau

SEQ ID NO: 872844 - RNA, 19 nt, Homo sapiens
  misc_RNA (1)...(19): siRNA sense strand
gaggugcaggucaaucuca

SEQ ID NO: 872845 - RNA, 19 nt, Homo sapiens
  misc_RNA (1)...(19): siRNA sense strand
gggaggugcaggucaaucu

SEQ ID NO: 872846 - RNA, 19 nt, Homo sapiens
  misc_RNA (1)...(19): siRNA sense strand
cagccuccauugccgagau

SEQ ID NO: 872847 - RNA, 19 nt, Homo sapiens
  misc_RNA (1)...(19): siRNA sense strand
guacaccaaagugacagaa

SEQ ID NO: 872848 - RNA, 19 nt, Homo sapiens
  misc_RNA (1)...(19): siRNA sense strand
cucaucgacuucaagaaau

SEQ ID NO: 872849 - RNA, 19 nt, Homo sapiens
  misc_RNA (1)...(19): siRNA sense strand
cgaugaggaggacgacuau

SEQ ID NO: 872850 - RNA, 19 nt, Homo sapiens
  misc_RNA (1)...(19): siRNA sense strand
caucaucaacagcaauuac

SEQ ID NO: 872851 - RNA, 19 nt, Homo sapiens
  misc_RNA (1)...(19): siRNA sense strand
gaagaacgcugaagaacau

SEQ ID NO: 872852 - RNA, 19 nt, Homo sapiens
  misc_RNA (1)...(19): siRNA sense strand
cgaaauagcuugaagaaag

SEQ ID NO: 872853 - RNA, 19 nt, Homo sapiens
  misc_RNA (1)...(19): siRNA sense strand
ugaauuggcugaagucaaa

SEQ ID NO: 872854 - RNA, 19 nt, Homo sapiens
  misc_RNA (1)...(19): siRNA sense strand
gaagaaagccacagauaau

SEQ ID NO: 872855 - RNA, 19 nt, Homo sapiens
  misc_RNA (1)...(19): siRNA sense strand
gaacauugcuuuuacauug

SEQ ID NO: 872856 - RNA, 19 nt, Homo sapiens
  misc_RNA (1)...(19): siRNA sense strand
ggacggaguucaaguuguu

SEQ ID NO: 872857 - RNA, 19 nt, Homo sapiens
  misc_RNA (1)...(19): siRNA sense strand
ugaaggacaucaagucuga

SEQ ID NO: 872858 - RNA, 19 nt, Homo sapiens
  misc_RNA (1)...(19): siRNA sense strand
uggaagagcuggauggaaa

SEQ ID NO: 872859 - RNA, 19 nt, Homo sapiens
  misc_RNA (1)...(19): siRNA sense strand
ggacaucaagucugaauug

SEQ ID NO: 872860 - RNA, 19 nt, Homo sapiens
  misc_RNA (1)...(19): siRNA sense strand
ugcaagaucuggucaaauu

SEQ ID NO: 872861 - RNA, 19 nt, Homo sapiens
  misc_RNA (1)...(19): siRNA sense strand
gaaaugagcaauuguagag

SEQ ID NO: 872862 - RNA, 19 nt, Homo sapiens
  misc_RNA (1)...(19): siRNA sense strand
gaacaaaccauccagaaac

SEQ ID NO: 872863 - RNA, 19 nt, Homo sapiens
  misc_RNA (1)...(19): siRNA sense strand
uaaggaaucuggcaugaag

SEQ ID NO: 872864 - RNA, 19 nt, Homo sapiens
  misc_RNA (1)...(19): siRNA sense strand
gcacaggaaguuucaagaa

SEQ ID NO: 872865 - RNA, 19 nt, Homo sapiens
  misc_RNA (1)...(19): siRNA sense strand
gucaacagaucaagacauu

SEQ ID NO: 872866 - RNA, 19 nt, Homo sapiens
  misc_RNA (1)...(19): siRNA sense strand
gaacuucagaccuagauau

SEQ ID NO: 872867 - RNA, 19 nt, Homo sapiens
  misc_RNA (1)...(19): siRNA sense strand
gaagucaccuccuguagcu

SEQ ID NO: 872868 - RNA, 19 nt, Homo sapiens
  misc_RNA (1)...(19): siRNA sense strand
caggaaaucuucagaggau

SEQ ID NO: 872869 - RNA, 19 nt, Homo sapiens
  misc_RNA (1)...(19): siRNA sense strand
aaagcuggcugaccugaaa

SEQ ID NO: 872870 - RNA, 19 nt, Homo sapiens
  misc_RNA (1)...(19): siRNA sense strand
ugaagaaagccacagauaa

SEQ ID NO: 872871 - RNA, 19 nt, Homo sapiens
  misc_RNA (1)...(19): siRNA sense strand
ggagaagaacgcugaagaa

SEQ ID NO: 872872 - RNA, 19 nt, Homo sapiens
  misc_RNA (1)...(19): siRNA sense strand
gaaagccacagauaaugaa

SEQ ID NO: 872873 - RNA, 19 nt, Homo sapiens
  misc_RNA (1)...(19): siRNA sense strand
ugucuucucuggugucuuu

SEQ ID NO: 872874 - RNA, 19 nt, Homo sapiens
  misc_RNA (1)...(19): siRNA sense strand
gaaggacggaguucaaguu

SEQ ID NO: 872875 - RNA, 19 nt, Homo sapiens
  misc_RNA (1)...(19): siRNA sense strand
ccagauuucuacugauuug

SEQ ID NO: 872876 - RNA, 19 nt, Homo sapiens
  misc_RNA (1)...(19): siRNA sense strand
acacagacuuugaugaaau

SEQ ID NO: 872877 - RNA, 19 nt, Homo sapiens
  misc_RNA (1)...(19): siRNA sense strand
gagagacgccuacguggaa

SEQ ID NO: 872878 - RNA, 19 nt, Homo sapiens
  misc_RNA (1)...(19): siRNA sense strand
gcagcagugugaugacuau

SEQ ID NO: 872879 - RNA, 19 nt, Homo sapiens
  misc_RNA (1)...(19): siRNA sense strand
gaugggcgcuaccugauca

SEQ ID NO: 872880 - RNA, 19 nt, Homo sapiens
  misc_RNA (1)...(19): siRNA sense strand
ccaagaaggucccaaagac

SEQ ID NO: 872881 - RNA, 19 nt, Homo sapiens
  misc_RNA (1)...(19): siRNA sense strand
ggaauuaaaccaccugaag

SEQ ID NO: 872882 - RNA, 19 nt, Homo sapiens
  misc_RNA (1)...(19): siRNA sense strand
gaaggaaacaagccugaga

SEQ ID NO: 872883 - RNA, 19 nt, Homo sapiens
  misc_RNA (1)...(19): siRNA sense strand
gaggugcuguccuggcuuu

SEQ ID NO: 872884 - RNA, 19 nt, Homo sapiens
  misc_RNA (1)...(19): siRNA sense strand
gcuggaugcuuguaaggaa

SEQ ID NO: 872885 - RNA, 19 nt, Homo sapiens
  misc_RNA (1)...(19): siRNA sense strand
caauuaaaccacacagaaa

SEQ ID NO: 872886 - RNA, 19 nt, Homo sapiens
  misc_RNA (1)...(19): siRNA sense strand
ggaucaaugugacggagaa

SEQ ID NO: 872887 - RNA, 19 nt, Homo sapiens
  misc_RNA (1)...(19): siRNA sense strand
acaaagugcuggugaacga

SEQ ID NO: 872888 - RNA, 19 nt, Homo sapiens
  misc_RNA (1)...(19): siRNA sense strand
ucacacagacuuugaugaa

SEQ ID NO: 872889 - RNA, 19 nt, Homo sapiens
  misc_RNA (1)...(19): siRNA sense strand
gaacgggucaugauggaau

SEQ ID NO: 872890 - RNA, 19 nt, Homo sapiens
  misc_RNA (1)...(19): siRNA sense strand
gcagcuuguugaucagaaa

SEQ ID NO: 872891 - RNA, 19 nt, Homo sapiens
  misc_RNA (1)...(19): siRNA sense strand
uaaggugggugagcaagaa

SEQ ID NO: 872892 - RNA, 19 nt, Homo sapiens
  misc_RNA (1)...(19): siRNA sense strand
gcgccuacaucgugaacaa

SEQ ID NO: 872893 - RNA, 19 nt, Homo sapiens
  misc_RNA (1)...(19): siRNA sense strand
ggucaaauuucagccauca

SEQ ID NO: 872894 - RNA, 19 nt, Homo sapiens
  misc_RNA (1)...(19): siRNA sense strand
ggaaaugagcaauuguaga

SEQ ID NO: 872895 - RNA, 19 nt, Homo sapiens
  misc_RNA (1)...(19): siRNA sense strand
ucaauuaaaccacacagaa

SEQ ID NO: 872896 - RNA, 19 nt, Homo sapiens
  misc_RNA (1)...(19): siRNA sense strand
ccagaaacuucaacaggau

SEQ ID NO: 872897 - RNA, 19 nt, Homo sapiens
  misc_RNA (1)...(19): siRNA sense strand
aagccuauguggacaguaa

SEQ ID NO: 872898 - RNA, 19 nt, Homo sapiens
  misc_RNA (1)...(19): siRNA sense strand
gaaacaagccugagaaaag

SEQ ID NO: 872899 - RNA, 19 nt, Homo sapiens
  misc_RNA (1)...(19): siRNA sense strand
caacagaucaagacauugg

SEQ ID NO: 872900 - RNA, 19 nt, Homo sapiens
  misc_RNA (1)...(19): siRNA sense strand
gcaagaucuggucaaauuu

SEQ ID NO: 872901 - RNA, 19 nt, Homo sapiens
  misc_RNA (1)...(19): siRNA sense strand
cgaacaaaccauccagaaa

SEQ ID NO: 872902 - RNA, 19 nt, Homo sapiens
  misc_RNA (1)...(19): siRNA sense strand
gaacuggugcgccuacauc

SEQ ID NO: 872903 - RNA, 19 nt, Homo sapiens
  misc_RNA (1)...(19): siRNA sense strand
gaaaauacagucucuggaa

SEQ ID NO: 872904 - RNA, 19 nt, Homo sapiens
  misc_RNA (1)...(19): siRNA sense strand
uccuacagaugaccaauaa

SEQ ID NO: 872905 - RNA, 19 nt, Homo sapiens
  misc_RNA (1)...(19): siRNA sense strand
agaauucaguccagcaguu

SEQ ID NO: 872906 - RNA, 19 nt, Homo sapiens
  misc_RNA (1)...(19): siRNA sense strand
gagggcagggugucucaua

SEQ ID NO: 872907 - RNA, 19 nt, Homo sapiens
  misc_RNA (1)...(19): siRNA sense strand
gauaugucacuagguauaa

SEQ ID NO: 872908 - RNA, 19 nt, Homo sapiens
  misc_RNA (1)...(19): siRNA sense strand
gcgcugguguaucgaguga

SEQ ID NO: 872909 - RNA, 19 nt, Homo sapiens
  misc_RNA (1)...(19): siRNA sense strand
gaugcaaggaucaauguga

SEQ ID NO: 872910 - RNA, 19 nt, Homo sapiens
  misc_RNA (1)...(19): siRNA sense strand
uaagaucgacgcccugaga

SEQ ID NO: 872911 - RNA, 19 nt, Homo sapiens
  misc_RNA (1)...(19): siRNA sense strand
ucaagacauuggaccagaa

SEQ ID NO: 872912 - RNA, 19 nt, Homo sapiens
  misc_RNA (1)...(19): siRNA sense strand
gcaccaggauacccgaagu

SEQ ID NO: 872913 - RNA, 19 nt, Homo sapiens
  misc_RNA (1)...(19): siRNA sense strand
gauaaugaacccagccaau

SEQ ID NO: 872914 - RNA, 19 nt, Homo sapiens
  misc_RNA (1)...(19): siRNA sense strand
ggaaaucuucagaggauca

SEQ ID NO: 872915 - RNA, 19 nt, Homo sapiens
  misc_RNA (1)...(19): siRNA sense strand
agaaagccacagauaauga

SEQ ID NO: 872916 - RNA, 19 nt, Homo sapiens
  misc_RNA (1)...(19): siRNA sense strand
gagcuccggugucuucucu

SEQ ID NO: 872917 - RNA, 19 nt, Homo sapiens
  misc_RNA (1)...(19): siRNA sense strand
caagaucuggucaaauuuc

SEQ ID NO: 872918 - RNA, 19 nt, Homo sapiens
  misc_RNA (1)...(19): siRNA sense strand
ggagcuggaugcuuguaag

SEQ ID NO: 872919 - RNA, 19 nt, Homo sapiens
  misc_RNA (1)...(19): siRNA sense strand
auggaagacuggacaauga

SEQ ID NO: 872920 - RNA, 19 nt, Homo sapiens
  misc_RNA (1)...(19): siRNA sense strand
gaagacuggacaaugaguu

SEQ ID NO: 872921 - RNA, 19 nt, Homo sapiens
  misc_RNA (1)...(19): siRNA sense strand
caacaggauuuuaguuuuc

SEQ ID NO: 872922 - RNA, 19 nt, Homo sapiens
  misc_RNA (1)...(19): siRNA sense strand
gaagugagaguuuuauuca

SEQ ID NO: 872923 - RNA, 19 nt, Homo sapiens
  misc_RNA (1)...(19): siRNA sense strand
cuacugauuugcaagaucu

SEQ ID NO: 872924 - RNA, 19 nt, Homo sapiens
  misc_RNA (1)...(19): siRNA sense strand
agacauuucuggccugaag

SEQ ID NO: 872925 - RNA, 19 nt, Homo sapiens
  misc_RNA (1)...(19): siRNA sense strand
gcauggguagguucacuaa

SEQ ID NO: 872926 - RNA, 19 nt, Homo sapiens
  misc_RNA (1)...(19): siRNA sense strand
cagggaagaccgcgcagua

SEQ ID NO: 872927 - RNA, 19 nt, Homo sapiens
  misc_RNA (1)...(19): siRNA sense strand
gaagaacauugcuuuuaca

SEQ ID NO: 872928 - RNA, 19 nt, Homo sapiens
  misc_RNA (1)...(19): siRNA sense strand
ccaccagaaugcugaaugg

SEQ ID NO: 872929 - RNA, 19 nt, Homo sapiens
  misc_RNA (1)...(19): siRNA sense strand
uaaugaacccagccaauuc

SEQ ID NO: 872930 - RNA, 19 nt, Homo sapiens
  misc_RNA (1)...(19): siRNA sense strand
gcucagacagcuccaggaa

SEQ ID NO: 872931 - RNA, 19 nt, Homo sapiens
  misc_RNA (1)...(19): siRNA sense strand
agacuuugaugaaauguac

SEQ ID NO: 872932 - RNA, 19 nt, Homo sapiens
  misc_RNA (1)...(19): siRNA sense strand
cacagacuuugaugaaaug

SEQ ID NO: 872933 - RNA, 19 nt, Homo sapiens
  misc_RNA (1)...(19): siRNA sense strand
aaaaggaaaugagcaauug

SEQ ID NO: 872934 - RNA, 19 nt, Homo sapiens
  misc_RNA (1)...(19): siRNA sense strand
caaaccauccagaaacuuc

SEQ ID NO: 872935 - RNA, 19 nt, Homo sapiens
  misc_RNA (1)...(19): siRNA sense strand
cuacagaugaccaauaaca

SEQ ID NO: 872936 - RNA, 19 nt, Homo sapiens
  misc_RNA (1)...(19): siRNA sense strand
aaacaagccugagaaaaga

SEQ ID NO: 872937 - RNA, 19 nt, Homo sapiens
  misc_RNA (1)...(19): siRNA sense strand
auaagacagugacacaguu

SEQ ID NO: 872938 - RNA, 19 nt, Homo sapiens
  misc_RNA (1)...(19): siRNA sense strand
gugcuguccuggcuuuaga

SEQ ID NO: 872939 - RNA, 19 nt, Homo sapiens
  misc_RNA (1)...(19): siRNA sense strand
uuaacaaagugcuggugaa

SEQ ID NO: 872940 - RNA, 19 nt, Homo sapiens
  misc_RNA (1)...(19): siRNA sense strand
ggaacgcucaggucgcauu

SEQ ID NO: 872941 - RNA, 19 nt, Homo sapiens
  misc_RNA (1)...(19): siRNA sense strand
gguauaagacagugacaca

SEQ ID NO: 872942 - RNA, 19 nt, Homo sapiens
  misc_RNA (1)...(19): siRNA sense strand
agaccuagauaugucacua

SEQ ID NO: 872943 - RNA, 19 nt, Homo sapiens
  misc_RNA (1)...(19): siRNA sense strand
gaguuugaccgccuuauag

SEQ ID NO: 872944 - RNA, 19 nt, Homo sapiens
  misc_RNA (1)...(19): siRNA sense strand
ugaguuugaccgccuuaua

SEQ ID NO: 872945 - RNA, 19 nt, Homo sapiens
  misc_RNA (1)...(19): siRNA sense strand
caagacauuggaccagaaa

SEQ ID NO: 872946 - RNA, 19 nt, Homo sapiens
  misc_RNA (1)...(19): siRNA sense strand
gccaagaaggucccaaaga

SEQ ID NO: 872947 - RNA, 19 nt, Homo sapiens
  misc_RNA (1)...(19): siRNA sense strand
gaaagcuggcugaccugaa

SEQ ID NO: 872948 - RNA, 19 nt, Homo sapiens
  misc_RNA (1)...(19): siRNA sense strand
gaagauacaggugcuagag

SEQ ID NO: 872949 - RNA, 19 nt, Homo sapiens
  misc_RNA (1)...(19): siRNA sense strand
ugacucaucuucaaaagga

SEQ ID NO: 872950 - RNA, 19 nt, Homo sapiens
  misc_RNA (1)...(19): siRNA sense strand
agccacgucuuccagauuu

SEQ ID NO: 872951 - RNA, 19 nt, Homo sapiens
  misc_RNA (1)...(19): siRNA sense strand
gaaguuaguucgucuguug

SEQ ID NO: 872952 - RNA, 19 nt, Homo sapiens
  misc_RNA (1)...(19): siRNA sense strand
cgaauuagauccugauauu

SEQ ID NO: 872953 - RNA, 19 nt, Homo sapiens
  misc_RNA (1)...(19): siRNA sense strand
ggaagaagcuaagaaguug

SEQ ID NO: 872954 - RNA, 19 nt, Homo sapiens
  misc_RNA (1)...(19): siRNA sense strand
ggaggaauaugaacaaguu

SEQ ID NO: 872955 - RNA, 19 nt, Homo sapiens
  misc_RNA (1)...(19): siRNA sense strand
gaagaaauccgugcacuuu

SEQ ID NO: 872956 - RNA, 19 nt, Homo sapiens
  misc_RNA (1)...(19): siRNA sense strand
ggacauugaugaagcuuug

SEQ ID NO: 872957 - RNA, 19 nt, Homo sapiens
  misc_RNA (1)...(19): siRNA sense strand
gaacuucagaugccuguua

SEQ ID NO: 872958 - RNA, 19 nt, Homo sapiens
  misc_RNA (1)...(19): siRNA sense strand
gagcacauccuauaucaaa

SEQ ID NO: 872959 - RNA, 19 nt, Homo sapiens
  misc_RNA (1)...(19): siRNA sense strand
gcaaugagacggcguauca

SEQ ID NO: 872960 - RNA, 19 nt, Homo sapiens
  misc_RNA (1)...(19): siRNA sense strand
gaaaagccuucuacaagua

SEQ ID NO: 872961 - RNA, 19 nt, Homo sapiens
  misc_RNA (1)...(19): siRNA sense strand
gaaggaagaauaugcaaga

SEQ ID NO: 872962 - RNA, 19 nt, Homo sapiens
  misc_RNA (1)...(19): siRNA sense strand
gaauuuggcugagauuugu

SEQ ID NO: 872963 - RNA, 19 nt, Homo sapiens
  misc_RNA (1)...(19): siRNA sense strand
ugacaagccuccagauuuc

SEQ ID NO: 872964 - RNA, 19 nt, Homo sapiens
  misc_RNA (1)...(19): siRNA sense strand
gaaagaaauggcaggagua

SEQ ID NO: 872965 - RNA, 19 nt, Homo sapiens
  misc_RNA (1)...(19): siRNA sense strand
gaaauuacgacucaucaau

SEQ ID NO: 872966 - RNA, 19 nt, Homo sapiens
  misc_RNA (1)...(19): siRNA sense strand
gaauaugcccuucuuggaa

SEQ ID NO: 872967 - RNA, 19 nt, Homo sapiens
  misc_RNA (1)...(19): siRNA sense strand
gguauuggcugcuacuaau

SEQ ID NO: 872968 - RNA, 19 nt, Homo sapiens
  misc_RNA (1)...(19): siRNA sense strand
gcaaagaaaggaagagaau

SEQ ID NO: 872969 - RNA, 19 nt, Homo sapiens
  misc_RNA (1)...(19): siRNA sense strand
ucagaugccuguuaccaaa

SEQ ID NO: 872970 - RNA, 19 nt, Homo sapiens
  misc_RNA (1)...(19): siRNA sense strand
ugacauagcagaucuggaa

SEQ ID NO: 872971 - RNA, 19 nt, Homo sapiens
  misc_RNA (1)...(19): siRNA sense strand
ugaauuggcccuaaagaaa

SEQ ID NO: 872972 - RNA, 19 nt, Homo sapiens
  misc_RNA (1)...(19): siRNA sense strand
gaugaagcuuugcgaagaa

SEQ ID NO: 872973 - RNA, 19 nt, Homo sapiens
  misc_RNA (1)...(19): siRNA sense strand
cuaaagcuguugccacuga

SEQ ID NO: 872974 - RNA, 19 nt, Homo sapiens
  misc_RNA (1)...(19): siRNA sense strand
gaugaaccauuuagagauc

SEQ ID NO: 872975 - RNA, 19 nt, Homo sapiens
  misc_RNA (1)...(19): siRNA sense strand
gguggaagcccuugaaaga

SEQ ID NO: 872976 - RNA, 19 nt, Homo sapiens
  misc_RNA (1)...(19): siRNA sense strand
gacaagggaaggaagaaua

SEQ ID NO: 872977 - RNA, 19 nt, Homo sapiens
  misc_RNA (1)...(19): siRNA sense strand
ucagagacauugccaguca

SEQ ID NO: 872978 - RNA, 19 nt, Homo sapiens
  misc_RNA (1)...(19): siRNA sense strand
gauucuaucugcagucgaa

SEQ ID NO: 872979 - RNA, 19 nt, Homo sapiens
  misc_RNA (1)...(19): siRNA sense strand
cuucuacacugacaucuaa

SEQ ID NO: 872980 - RNA, 19 nt, Homo sapiens
  misc_RNA (1)...(19): siRNA sense strand
gacaaggacuauagagcaa

SEQ ID NO: 872981 - RNA, 19 nt, Homo sapiens
  misc_RNA (1)...(19): siRNA sense strand
uggcugagauuugugauaa

SEQ ID NO: 872982 - RNA, 19 nt, Homo sapiens
  misc_RNA (1)...(19): siRNA sense strand
gcacauccuauaucaaaga

SEQ ID NO: 872983 - RNA, 19 nt, Homo sapiens
  misc_RNA (1)...(19): siRNA sense strand
guaaaacuaugcuagcuaa

SEQ ID NO: 872984 - RNA, 19 nt, Homo sapiens
  misc_RNA (1)...(19): siRNA sense strand
cuaccacgaucuucauuga

SEQ ID NO: 872985 - RNA, 19 nt, Homo sapiens
  misc_RNA (1)...(19): siRNA sense strand
uugcagggaugccucuuua

SEQ ID NO: 872986 - RNA, 19 nt, Homo sapiens
  misc_RNA (1)...(19): siRNA sense strand
gauauucaacuggaagaua

SEQ ID NO: 872987 - RNA, 19 nt, Homo sapiens
  misc_RNA (1)...(19): siRNA sense strand
acacugacaucuaaauaca

SEQ ID NO: 872988 - RNA, 19 nt, Homo sapiens
  misc_RNA (1)...(19): siRNA sense strand
gcugagauuugugauaaug

SEQ ID NO: 872989 - RNA, 19 nt, Homo sapiens
  misc_RNA (1)...(19): siRNA sense strand
gaagauauagccgagaaga

SEQ ID NO: 872990 - RNA, 19 nt, Homo sapiens
  misc_RNA (1)...(19): siRNA sense strand
ucagauggauggaguugga

SEQ ID NO: 872991 - RNA, 19 nt, Homo sapiens
  misc_RNA (1)...(19): siRNA sense strand
gaaccucugaugaacauga

SEQ ID NO: 872992 - RNA, 19 nt, Homo sapiens
  misc_RNA (1)...(19): siRNA sense strand
aauaugcccuucuuggaaa

SEQ ID NO: 872993 - RNA, 19 nt, Homo sapiens
  misc_RNA (1)...(19): siRNA sense strand
uggcuuaaguccagaagaa

SEQ ID NO: 872994 - RNA, 19 nt, Homo sapiens
  misc_RNA (1)...(19): siRNA sense strand
ugaugaagcuuugcgaaga

SEQ ID NO: 872995 - RNA, 19 nt, Homo sapiens
  misc_RNA (1)...(19): siRNA sense strand
cauagcagaucuggaagaa

SEQ ID NO: 872996 - RNA, 19 nt, Homo sapiens
  misc_RNA (1)...(19): siRNA sense strand
uggaagcccuugaaagaga

SEQ ID NO: 872997 - RNA, 19 nt, Homo sapiens
  misc_RNA (1)...(19): siRNA sense strand
gcaagauggugcaagugau

SEQ ID NO: 872998 - RNA, 19 nt, Homo sapiens
  misc_RNA (1)...(19): siRNA sense strand
gaucaggcgucccaaucga

SEQ ID NO: 872999 - RNA, 19 nt, Homo sapiens
  misc_RNA (1)...(19): siRNA sense strand
caacauucuucaacguuuc

SEQ ID NO: 873000 - RNA, 19 nt, Homo sapiens
  misc_RNA (1)...(19): siRNA sense strand
aagggaagcuguuguucuu

SEQ ID NO: 873001 - RNA, 19 nt, Homo sapiens
  misc_RNA (1)...(19): siRNA sense strand
caaggacuauagagcaaga

SEQ ID NO: 873002 - RNA, 19 nt, Homo sapiens
  misc_RNA (1)...(19): siRNA sense strand
caaagaaaggaagagaaua

SEQ ID NO: 873003 - RNA, 19 nt, Homo sapiens
  misc_RNA (1)...(19): siRNA sense strand
gcagggaugccucuuuaau

SEQ ID NO: 873004 - RNA, 19 nt, Homo sapiens
  misc_RNA (1)...(19): siRNA sense strand
caauguggaugccugacuu

SEQ ID NO: 873005 - RNA, 19 nt, Homo sapiens
  misc_RNA (1)...(19): siRNA sense strand
acaacauucuucaacguuu

SEQ ID NO: 873006 - RNA, 19 nt, Homo sapiens
  misc_RNA (1)...(19): siRNA sense strand
guacaacauucuucaacgu

SEQ ID NO: 873007 - RNA, 19 nt, Homo sapiens
  misc_RNA (1)...(19): siRNA sense strand
gacauuguauccaggaauc

SEQ ID NO: 873008 - RNA, 19 nt, Homo sapiens
  misc_RNA (1)...(19): siRNA sense strand
gaagcuaagaaguugcuaa

SEQ ID NO: 873009 - RNA, 19 nt, Homo sapiens
  misc_RNA (1)...(19): siRNA sense strand
guucgucuguuguuugaga

SEQ ID NO: 873010 - RNA, 19 nt, Homo sapiens
  misc_RNA (1)...(19): siRNA sense strand
gauauagccgagaagauug

SEQ ID NO: 873011 - RNA, 19 nt, Homo sapiens
  misc_RNA (1)...(19): siRNA sense strand
agaaauggcaggaguagga

SEQ ID NO: 873012 - RNA, 19 nt, Homo sapiens
  misc_RNA (1)...(19): siRNA sense strand
uaaagaggaacuucagaug

SEQ ID NO: 873013 - RNA, 19 nt, Homo sapiens
  misc_RNA (1)...(19): siRNA sense strand
uguuugagauggcuagauu

SEQ ID NO: 873014 - RNA, 19 nt, Homo sapiens
  misc_RNA (1)...(19): siRNA sense strand
aggugaaucugagaaguua

SEQ ID NO: 873015 - RNA, 19 nt, Homo sapiens
  misc_RNA (1)...(19): siRNA sense strand
gaggugaaucugagaaguu

SEQ ID NO: 873016 - RNA, 19 nt, Homo sapiens
  misc_RNA (1)...(19): siRNA sense strand
uuagagauccugcuguuug

SEQ ID NO: 873017 - RNA, 19 nt, Homo sapiens
  misc_RNA (1)...(19): siRNA sense strand
uggaagauauagccgagaa

SEQ ID NO: 873018 - RNA, 19 nt, Homo sapiens
  misc_RNA (1)...(19): siRNA sense strand
cuacacugacaucuaaaua

SEQ ID NO: 873019 - RNA, 19 nt, Homo sapiens
  misc_RNA (1)...(19): siRNA sense strand
ccgagcacauccuauauca

SEQ ID NO: 873020 - RNA, 19 nt, Homo sapiens
  misc_RNA (1)...(19): siRNA sense strand
gcaacagguucggcaggaa

SEQ ID NO: 873021 - RNA, 19 nt, Homo sapiens
  misc_RNA (1)...(19): siRNA sense strand
gcguaucaauggcuuaagu

SEQ ID NO: 873022 - RNA, 19 nt, Homo sapiens
  misc_RNA (1)...(19): siRNA sense strand
agauauagccgagaagauu

SEQ ID NO: 873023 - RNA, 19 nt, Homo sapiens
  misc_RNA (1)...(19): siRNA sense strand
uggaagaagcuaagaaguu

SEQ ID NO: 873024 - RNA, 19 nt, Homo sapiens
  misc_RNA (1)...(19): siRNA sense strand
caagaugaaccauuuagag

SEQ ID NO: 873025 - RNA, 19 nt, Homo sapiens
  misc_RNA (1)...(19): siRNA sense strand
auauauaccucucccaaca

SEQ ID NO: 873026 - RNA, 19 nt, Homo sapiens
  misc_RNA (1)...(19): siRNA sense strand
gauaaugcaaagaaaggaa

SEQ ID NO: 873027 - RNA, 19 nt, Homo sapiens
  misc_RNA (1)...(19): siRNA sense strand
ggaaggguguacugauggu

SEQ ID NO: 873028 - RNA, 19 nt, Homo sapiens
  misc_RNA (1)...(19): siRNA sense strand
gcuaagggaagcuguuguu

SEQ ID NO: 873029 - RNA, 19 nt, Homo sapiens
  misc_RNA (1)...(19): siRNA sense strand
gggaugacauagcagaucu

SEQ ID NO: 873030 - RNA, 19 nt, Homo sapiens
  misc_RNA (1)...(19): siRNA sense strand
caaguagggacaaggacua

SEQ ID NO: 873031 - RNA, 19 nt, Homo sapiens
  misc_RNA (1)...(19): siRNA sense strand
ugagauggcuagauuuuau

SEQ ID NO: 873032 - RNA, 19 nt, Homo sapiens
  misc_RNA (1)...(19): siRNA sense strand
caaaaugguuaugguauug

SEQ ID NO: 873033 - RNA, 19 nt, Homo sapiens
  misc_RNA (1)...(19): siRNA sense strand
aaaugaugauccuuccaaa

SEQ ID NO: 873034 - RNA, 19 nt, Homo sapiens
  misc_RNA (1)...(19): siRNA sense strand
ggaaauuacgacucaucaa

SEQ ID NO: 873035 - RNA, 19 nt, Homo sapiens
  misc_RNA (1)...(19): siRNA sense strand
uggaggagcuuuagaaaau

SEQ ID NO: 873036 - RNA, 19 nt, Homo sapiens
  misc_RNA (1)...(19): siRNA sense strand
gaagauugagggcuauucu

SEQ ID NO: 873037 - RNA, 19 nt, Homo sapiens
  misc_RNA (1)...(19): siRNA sense strand
ccaaaaugguuaugguauu

SEQ ID NO: 873038 - RNA, 19 nt, Homo sapiens
  misc_RNA (1)...(19): siRNA sense strand
uuacgacucaucaauggua

SEQ ID NO: 873039 - RNA, 19 nt, Homo sapiens
  misc_RNA (1)...(19): siRNA sense strand
agucagagauccagcuauc

SEQ ID NO: 873040 - RNA, 19 nt, Homo sapiens
  misc_RNA (1)...(19): siRNA sense strand
aaacuaugcuagcuaaagc

SEQ ID NO: 873041 - RNA, 19 nt, Homo sapiens
  misc_RNA (1)...(19): siRNA sense strand
ugauaaggaucugguggaa

SEQ ID NO: 873042 - RNA, 19 nt, Homo sapiens
  misc_RNA (1)...(19): siRNA sense strand
uugacaagccuccagauuu

SEQ ID NO: 873043 - RNA, 19 nt, Homo sapiens
  misc_RNA (1)...(19): siRNA sense strand
gauggugcugguuaugaua

SEQ ID NO: 873044 - RNA, 19 nt, Homo sapiens
  misc_RNA (1)...(19): siRNA sense strand
caagauggugcaagugaug

SEQ ID NO: 873045 - RNA, 19 nt, Homo sapiens
  misc_RNA (1)...(19): siRNA sense strand
guagggacaaggacuauag

SEQ ID NO: 873046 - RNA, 19 nt, Homo sapiens
  misc_RNA (1)...(19): siRNA sense strand
ucagagauccagcuaucaa

SEQ ID NO: 873047 - RNA, 19 nt, Homo sapiens
  misc_RNA (1)...(19): siRNA sense strand
cugucaagaugaaccauuu

SEQ ID NO: 873048 - RNA, 19 nt, Homo sapiens
  misc_RNA (1)...(19): siRNA sense strand
cgagaaguaagaccucuga

SEQ ID NO: 873049 - RNA, 19 nt, Homo sapiens
  misc_RNA (1)...(19): siRNA sense strand
gaauuggcccuaaagaaaa

SEQ ID NO: 873050 - RNA, 19 nt, Homo sapiens
  misc_RNA (1)...(19): siRNA sense strand
acugacaucuaaauacaga

SEQ ID NO: 873051 - RNA, 19 nt, Homo sapiens
  misc_RNA (1)...(19): siRNA sense strand
caaagaagcugcuaacaga

SEQ ID NO: 873052 - RNA, 19 nt, Homo sapiens
  misc_RNA (1)...(19): siRNA sense strand
gaucggaacuucuaauuau

SEQ ID NO: 873053 - RNA, 19 nt, Homo sapiens
  misc_RNA (1)...(19): siRNA sense strand
gcuaacagauggacugaua

SEQ ID NO: 873054 - RNA, 19 nt, Homo sapiens
  misc_RNA (1)...(19): siRNA sense strand
gaaauacgccaagcaaaua

SEQ ID NO: 873055 - RNA, 19 nt, Homo sapiens
  misc_RNA (1)...(19): siRNA sense strand
caaauaaaguagccaaaga

SEQ ID NO: 873056 - RNA, 19 nt, Homo sapiens
  misc_RNA (1)...(19): siRNA sense strand
cagauggacugauaacaua

SEQ ID NO: 873057 - RNA, 19 nt, Homo sapiens
  misc_RNA (1)...(19): siRNA sense strand
gaagauugcucccaaagag

SEQ ID NO: 873058 - RNA, 19 nt, Homo sapiens
  misc_RNA (1)...(19): siRNA sense strand
aaagagaacucgcaugaug

SEQ ID NO: 873059 - RNA, 19 nt, Homo sapiens
  misc_RNA (1)...(19): siRNA sense strand
gaacucgcaugauggaaau

SEQ ID NO: 873060 - RNA, 19 nt, Homo sapiens
  misc_RNA (1)...(19): siRNA sense strand
gagaaaggcauuacugcua

SEQ ID NO: 873061 - RNA, 19 nt, Homo sapiens
  misc_RNA (1)...(19): siRNA sense strand
gaagaaauacgccaagcaa

SEQ ID NO: 873062 - RNA, 19 nt, Homo sapiens
  misc_RNA (1)...(19): siRNA sense strand
gcuaaaggcagaaguagaa

SEQ ID NO: 873063 - RNA, 19 nt, Homo sapiens
  misc_RNA (1)...(19): siRNA sense strand
gcaaguuguggaagaaaua

SEQ ID NO: 873064 - RNA, 19 nt, Homo sapiens
  misc_RNA (1)...(19): siRNA sense strand
ggaucggaacuucuaauua

SEQ ID NO: 873065 - RNA, 19 nt, Homo sapiens
  misc_RNA (1)...(19): siRNA sense strand
agaagacuuugacuacaua

SEQ ID NO: 873066 - RNA, 19 nt, Homo sapiens
  misc_RNA (1)...(19): siRNA sense strand
gaaaagagaacucgcauga

SEQ ID NO: 873067 - RNA, 19 nt, Homo sapiens
  misc_RNA (1)...(19): siRNA sense strand
gagaggaucggaacuucua

SEQ ID NO: 873068 - RNA, 19 nt, Homo sapiens
  misc_RNA (1)...(19): siRNA sense strand
gaaaggcauuacugcuaug

SEQ ID NO: 873069 - RNA, 19 nt, Homo sapiens
  misc_RNA (1)...(19): siRNA sense strand
gaaccaggcuagcaaaaga

SEQ ID NO: 873070 - RNA, 19 nt, Homo sapiens
  misc_RNA (1)...(19): siRNA sense strand
agaaaggcauuacugcuau

SEQ ID NO: 873071 - RNA, 19 nt, Homo sapiens
  misc_RNA (1)...(19): siRNA sense strand
cagaagacuuugacuacau

SEQ ID NO: 873072 - RNA, 19 nt, Homo sapiens
  misc_RNA (1)...(19): siRNA sense strand
caaggaaacauaaguugga

SEQ ID NO: 873073 - RNA, 19 nt, Homo sapiens
  misc_RNA (1)...(19): siRNA sense strand
gaccaaagggaacagcuaa

SEQ ID NO: 873074 - RNA, 19 nt, Homo sapiens
  misc_RNA (1)...(19): siRNA sense strand
ggacugagugcagaagaaa

SEQ ID NO: 873075 - RNA, 19 nt, Homo sapiens
  misc_RNA (1)...(19): siRNA sense strand
uaaaguagccaaagaagcu

SEQ ID NO: 873076 - RNA, 19 nt, Homo sapiens
  misc_RNA (1)...(19): siRNA sense strand
aaguaaagcucuucaugca

SEQ ID NO: 873077 - RNA, 19 nt, Homo sapiens
  misc_RNA (1)...(19): siRNA sense strand
gcaaauaaaguagccaaag

SEQ ID NO: 873078 - RNA, 19 nt, Homo sapiens
  misc_RNA (1)...(19): siRNA sense strand
agaaauacgccaagcaaau

SEQ ID NO: 873079 - RNA, 19 nt, Homo sapiens
  misc_RNA (1)...(19): siRNA sense strand
ccaaguaaagcucuucaug

SEQ ID NO: 873080 - RNA, 19 nt, Homo sapiens
  misc_RNA (1)...(19): siRNA sense strand
gagcgaaccaggcuagcaa

SEQ ID NO: 873081 - RNA, 19 nt, Homo sapiens
  misc_RNA (1)...(19): siRNA sense strand
gcaugcaagccuacagaaa

SEQ ID NO: 873082 - RNA, 19 nt, Homo sapiens
  misc_RNA (1)...(19): siRNA sense strand
ccagaagacuuugacuaca

SEQ ID NO: 873083 - RNA, 19 nt, Homo sapiens
  misc_RNA (1)...(19): siRNA sense strand
uaaaagacuuggagaagau

SEQ ID NO: 873084 - RNA, 19 nt, Homo sapiens
  misc_RNA (1)...(19): siRNA sense strand
gauggacugauaacauauu

SEQ ID NO: 873085 - RNA, 19 nt, Homo sapiens
  misc_RNA (1)...(19): siRNA sense strand
ccaaagaagcugcuaacag

SEQ ID NO: 873086 - RNA, 19 nt, Homo sapiens
  misc_RNA (1)...(19): siRNA sense strand
ggaagaaauacgccaagca

SEQ ID NO: 873087 - RNA, 19 nt, Homo sapiens
  misc_RNA (1)...(19): siRNA sense strand
uaaguuggagguucuggaa

SEQ ID NO: 873088 - RNA, 19 nt, Homo sapiens
  misc_RNA (1)...(19): siRNA sense strand
aaaauuggccgaugugaaa

SEQ ID NO: 873089 - RNA, 19 nt, Homo sapiens
  misc_RNA (1)...(19): siRNA sense strand
guucuggaaucucaguugu

SEQ ID NO: 873090 - RNA, 19 nt, Homo sapiens
  misc_RNA (1)...(19): siRNA sense strand
aggcauuacugcuauguca

SEQ ID NO: 873091 - RNA, 19 nt, Homo sapiens
  misc_RNA (1)...(19): siRNA sense strand
gugagaggaucggaacuuc

SEQ ID NO: 873092 - RNA, 19 nt, Homo sapiens
  misc_RNA (1)...(19): siRNA sense strand
aaagagaaaggcauuacug

SEQ ID NO: 873093 - RNA, 19 nt, Homo sapiens
  misc_RNA (1)...(19): siRNA sense strand
gauagaacuuuuggaauuc

SEQ ID NO: 873094 - RNA, 19 nt, Homo sapiens
  misc_RNA (1)...(19): siRNA sense strand
gagaagauugcucccaaag

SEQ ID NO: 873095 - RNA, 19 nt, Homo sapiens
  misc_RNA (1)...(19): siRNA sense strand
aaauacgccaagcaaauaa

SEQ ID NO: 873096 - RNA, 19 nt, Homo sapiens
  misc_RNA (1)...(19): siRNA sense strand
aagcuuaguugaugauggu

SEQ ID NO: 873097 - RNA, 19 nt, Homo sapiens
  misc_RNA (1)...(19): siRNA sense strand
agacugugauccgcaaguu

SEQ ID NO: 873098 - RNA, 19 nt, Homo sapiens
  misc_RNA (1)...(19): siRNA sense strand
ucgcaugauggaaauauuu

SEQ ID NO: 873099 - RNA, 19 nt, Homo sapiens
  misc_RNA (1)...(19): siRNA sense strand
cuucaugcaaggaaacaua

SEQ ID NO: 873100 - RNA, 19 nt, Homo sapiens
  misc_RNA (1)...(19): siRNA sense strand
acgccaagcaaauaaagua

SEQ ID NO: 873101 - RNA, 19 nt, Homo sapiens
  misc_RNA (1)...(19): siRNA sense strand
uggagguucuggaaucuca

SEQ ID NO: 873102 - RNA, 19 nt, Homo sapiens
  misc_RNA (1)...(19): siRNA sense strand
agaacucgcaugauggaaa

SEQ ID NO: 873103 - RNA, 19 nt, Homo sapiens
  misc_RNA (1)...(19): siRNA sense strand
acagcuaaaggcagaagua

SEQ ID NO: 873104 - RNA, 19 nt, Homo sapiens
  misc_RNA (1)...(19): siRNA sense strand
gaaaauuuggguuugaaga

SEQ ID NO: 873105 - RNA, 19 nt, Homo sapiens
  misc_RNA (1)...(19): siRNA sense strand
acagauggacugauaacau

SEQ ID NO: 873106 - RNA, 19 nt, Homo sapiens
  misc_RNA (1)...(19): siRNA sense strand
ccaaagggaacagcuaaag

SEQ ID NO: 873107 - RNA, 19 nt, Homo sapiens
  misc_RNA (1)...(19): siRNA sense strand
uaacagauggacugauaac

SEQ ID NO: 873108 - RNA, 19 nt, Homo sapiens
  misc_RNA (1)...(19): siRNA sense strand
gaauuccagaagacuuuga

SEQ ID NO: 873109 - RNA, 19 nt, Homo sapiens
  misc_RNA (1)...(19): siRNA sense strand
cugauaacauauucgcaau

SEQ ID NO: 873110 - RNA, 19 nt, Homo sapiens
  misc_RNA (1)...(19): siRNA sense strand
caaagggaacagcuaaagg

SEQ ID NO: 873111 - RNA, 19 nt, Homo sapiens
  misc_RNA (1)...(19): siRNA sense strand
aagaagcugcuaacagaug

SEQ ID NO: 873112 - RNA, 19 nt, Homo sapiens
  misc_RNA (1)...(19): siRNA sense strand
gaacagcuaaaggcagaag

SEQ ID NO: 873113 - RNA, 19 nt, Homo sapiens
  misc_RNA (1)...(19): siRNA sense strand
gaggaucggaacuucuaau

SEQ ID NO: 873114 - RNA, 19 nt, Homo sapiens
  misc_RNA (1)...(19): siRNA sense strand
uuaaaagacuuggagaaga

SEQ ID NO: 873115 - RNA, 19 nt, Homo sapiens
  misc_RNA (1)...(19): siRNA sense strand
ggaauuccagaagacuuug

SEQ ID NO: 873116 - RNA, 19 nt, Homo sapiens
  misc_RNA (1)...(19): siRNA sense strand
ccaaagagaaaggcauuac

SEQ ID NO: 873117 - RNA, 19 nt, Homo sapiens
  misc_RNA (1)...(19): siRNA sense strand
cgcaaguuguggaagaaau

SEQ ID NO: 873118 - RNA, 19 nt, Homo sapiens
  misc_RNA (1)...(19): siRNA sense strand
cuuaguugaugaugguaug

SEQ ID NO: 873119 - RNA, 19 nt, Homo sapiens
  misc_RNA (1)...(19): siRNA sense strand
gaaacauaaguuggagguu

SEQ ID NO: 873120 - RNA, 19 nt, Homo sapiens
  misc_RNA (1)...(19): siRNA sense strand
agaagauugcucccaaaga

SEQ ID NO: 873121 - RNA, 19 nt, Homo sapiens
  misc_RNA (1)...(19): siRNA sense strand
aggacugagugcagaagaa

SEQ ID NO: 873122 - RNA, 19 nt, Homo sapiens
  misc_RNA (1)...(19): siRNA sense strand
caaagagaaaggcauuacu

SEQ ID NO: 873123 - RNA, 19 nt, Homo sapiens
  misc_RNA (1)...(19): siRNA sense strand
agauugcucccaaagagaa

SEQ ID NO: 873124 - RNA, 19 nt, Homo sapiens
  misc_RNA (1)...(19): siRNA sense strand
gacuuugacuacauagacu

SEQ ID NO: 873125 - RNA, 19 nt, Homo sapiens
  misc_RNA (1)...(19): siRNA sense strand
agagaacucgcaugaugga

SEQ ID NO: 873126 - RNA, 19 nt, Homo sapiens
  misc_RNA (1)...(19): siRNA sense strand
gaaaagcauugagaaagcu

SEQ ID NO: 873127 - RNA, 19 nt, Homo sapiens
  misc_RNA (1)...(19): siRNA sense strand
ucuggaaucucaguugucu

SEQ ID NO: 873128 - RNA, 19 nt, Homo sapiens
  misc_RNA (1)...(19): siRNA sense strand
aacauaaguuggagguucu

SEQ ID NO: 873129 - RNA, 19 nt, Homo sapiens
  misc_RNA (1)...(19): siRNA sense strand
aagaaauacgccaagcaaa

SEQ ID NO: 873130 - RNA, 19 nt, Homo sapiens
  misc_RNA (1)...(19): siRNA sense strand
agaccaaagggaacagcua

SEQ ID NO: 873131 - RNA, 19 nt, Homo sapiens
  misc_RNA (1)...(19): siRNA sense strand
gaagauggcuuauuuguug

SEQ ID NO: 873132 - RNA, 19 nt, Homo sapiens
  misc_RNA (1)...(19): siRNA sense strand
gaaaggagaagcuaaauua

SEQ ID NO: 873133 - RNA, 19 nt, Homo sapiens
  misc_RNA (1)...(19): siRNA sense strand
ggaggaaggucaagauuua

SEQ ID NO: 873134 - RNA, 19 nt, Homo sapiens
  misc_RNA (1)...(19): siRNA sense strand
ggaaauagcugagauaaug

SEQ ID NO: 873135 - RNA, 19 nt, Homo sapiens
  misc_RNA (1)...(19): siRNA sense strand
ggaaggagcuguuaugaga

SEQ ID NO: 873136 - RNA, 19 nt, Homo sapiens
  misc_RNA (1)...(19): siRNA sense strand
gaacaucacacuaucaaua

SEQ ID NO: 873137 - RNA, 19 nt, Homo sapiens
  misc_RNA (1)...(19): siRNA sense strand
acaaauagcucgagauaaa

SEQ ID NO: 873138 - RNA, 19 nt, Homo sapiens
  misc_RNA (1)...(19): siRNA sense strand
gaaagaaguuccugugcua

SEQ ID NO: 873139 - RNA, 19 nt, Homo sapiens
  misc_RNA (1)...(19): siRNA sense strand
guauagcacuguuacauua

SEQ ID NO: 873140 - RNA, 19 nt, Homo sapiens
  misc_RNA (1)...(19): siRNA sense strand
guagaaauaucuccaguaa

SEQ ID NO: 873141 - RNA, 19 nt, Homo sapiens
  misc_RNA (1)...(19): siRNA sense strand
gaacaaacucuuacccuua

SEQ ID NO: 873142 - RNA, 19 nt, Homo sapiens
  misc_RNA (1)...(19): siRNA sense strand
ggaauuaaguagugaguuu

SEQ ID NO: 873143 - RNA, 19 nt, Homo sapiens
  misc_RNA (1)...(19): siRNA sense strand
ggaaaugaaugaaacugua

SEQ ID NO: 873144 - RNA, 19 nt, Homo sapiens
  misc_RNA (1)...(19): siRNA sense strand
gguagugcaucaauaauua

SEQ ID NO: 873145 - RNA, 19 nt, Homo sapiens
  misc_RNA (1)...(19): siRNA sense strand
ggaaaguucucaaguaaga

SEQ ID NO: 873146 - RNA, 19 nt, Homo sapiens
  misc_RNA (1)...(19): siRNA sense strand
gagcagagauuggcauuaa

SEQ ID NO: 873147 - RNA, 19 nt, Homo sapiens
  misc_RNA (1)...(19): siRNA sense strand
gcaggaaggugaugaauuc

SEQ ID NO: 873148 - RNA, 19 nt, Homo sapiens
  misc_RNA (1)...(19): siRNA sense strand
guaaagccgugccaauaua

SEQ ID NO: 873149 - RNA, 19 nt, Homo sapiens
  misc_RNA (1)...(19): siRNA sense strand
gaggaaauguuacuguuaa

SEQ ID NO: 873150 - RNA, 19 nt, Homo sapiens
  misc_RNA (1)...(19): siRNA sense strand
gggaauggauguuguguuu

SEQ ID NO: 873151 - RNA, 19 nt, Homo sapiens
  misc_RNA (1)...(19): siRNA sense strand
ccacagcgaucuuauuaaa

SEQ ID NO: 873152 - RNA, 19 nt, Homo sapiens
  misc_RNA (1)...(19): siRNA sense strand
gacaaaugcugcagaaauu

SEQ ID NO: 873153 - RNA, 19 nt, Homo sapiens
  misc_RNA (1)...(19): siRNA sense strand
caacaucacucuugucuca

SEQ ID NO: 873154 - RNA, 19 nt, Homo sapiens
  misc_RNA (1)...(19): siRNA sense strand
gaaacaaguacaacaguua

SEQ ID NO: 873155 - RNA, 19 nt, Homo sapiens
  misc_RNA (1)...(19): siRNA sense strand
ggaauuugcugaaacauca

SEQ ID NO: 873156 - RNA, 19 nt, Homo sapiens
  misc_RNA (1)...(19): siRNA sense strand
gaagugaauuccucaaaug

SEQ ID NO: 873157 - RNA, 19 nt, Homo sapiens
  misc_RNA (1)...(19): siRNA sense strand
gaaugaaacuguaacacuu

SEQ ID NO: 873158 - RNA, 19 nt, Homo sapiens
  misc_RNA (1)...(19): siRNA sense strand
gaaaggacaguuauaauug

SEQ ID NO: 873159 - RNA, 19 nt, Homo sapiens
  misc_RNA (1)...(19): siRNA sense strand
gacaaugcauuuggaauua

SEQ ID NO: 873160 - RNA, 19 nt, Homo sapiens
  misc_RNA (1)...(19): siRNA sense strand
agacaacagucaugaaaua

SEQ ID NO: 873161 - RNA, 19 nt, Homo sapiens
  misc_RNA (1)...(19): siRNA sense strand
ggacuaaugaugucuguua

SEQ ID NO: 873162 - RNA, 19 nt, Homo sapiens
  misc_RNA (1)...(19): siRNA sense strand
gaggagggaucaaccauuu

SEQ ID NO: 873163 - RNA, 19 nt, Homo sapiens
  misc_RNA (1)...(19): siRNA sense strand
gauuggaucugaugaauau

SEQ ID NO: 873164 - RNA, 19 nt, Homo sapiens
  misc_RNA (1)...(19): siRNA sense strand
gcaaugaauucuauggaaa

SEQ ID NO: 873165 - RNA, 19 nt, Homo sapiens
  misc_RNA (1)...(19): siRNA sense strand
gaagaaaucacagugguua

SEQ ID NO: 873166 - RNA, 19 nt, Homo sapiens
  misc_RNA (1)...(19): siRNA sense strand
ggaaacagaugagcccuuu

SEQ ID NO: 873167 - RNA, 19 nt, Homo sapiens
  misc_RNA (1)...(19): siRNA sense strand
gagacaggaucuuuaaauu

SEQ ID NO: 873168 - RNA, 19 nt, Homo sapiens
  misc_RNA (1)...(19): siRNA sense strand
acagagacguucaauauuu

SEQ ID NO: 873169 - RNA, 19 nt, Homo sapiens
  misc_RNA (1)...(19): siRNA sense strand
ccaaauauuucuacaguug

SEQ ID NO: 873170 - RNA, 19 nt, Homo sapiens
  misc_RNA (1)...(19): siRNA sense strand
ggaggaagauggagaaauc

SEQ ID NO: 873171 - RNA, 19 nt, Homo sapiens
  misc_RNA (1)...(19): siRNA sense strand
uggaguagcuacaguaaua

SEQ ID NO: 873172 - RNA, 19 nt, Homo sapiens
  misc_RNA (1)...(19): siRNA sense strand
ggaaggagauuacauucga

SEQ ID NO: 873173 - RNA, 19 nt, Homo sapiens
  misc_RNA (1)...(19): siRNA sense strand
caucauaucuccagcuauu

SEQ ID NO: 873174 - RNA, 19 nt, Homo sapiens
  misc_RNA (1)...(19): siRNA sense strand
ucacaugguucucuguuua

SEQ ID NO: 873175 - RNA, 19 nt, Homo sapiens
  misc_RNA (1)...(19): siRNA sense strand
uaccagagcuagaagaaua

SEQ ID NO: 873176 - RNA, 19 nt, Homo sapiens
  misc_RNA (1)...(19): siRNA sense strand
cagaagaaauggaagaauu

SEQ ID NO: 873177 - RNA, 19 nt, Homo sapiens
  misc_RNA (1)...(19): siRNA sense strand
gacaggaucuuuaaauuca

SEQ ID NO: 873178 - RNA, 19 nt, Homo sapiens
  misc_RNA (1)...(19): siRNA sense strand
ggagcaagauagccuagua

SEQ ID NO: 873179 - RNA, 19 nt, Homo sapiens
  misc_RNA (1)...(19): siRNA sense strand
gaaaaguccuugucucaua

SEQ ID NO: 873180 - RNA, 19 nt, Homo sapiens
  misc_RNA (1)...(19): siRNA sense strand
gcaagcagcguuccacaua

SEQ ID NO: 873181 - RNA, 19 nt, Homo sapiens
  misc_RNA (1)...(19): siRNA sense strand
guucacaacuccugacuaa

SEQ ID NO: 873182 - RNA, 19 nt, Homo sapiens
  misc_RNA (1)...(19): siRNA sense strand
gaggagugcugaaacaauu

SEQ ID NO: 873183 - RNA, 19 nt, Homo sapiens
  misc_RNA (1)...(19): siRNA sense strand
gaucgccagucaauacuua

SEQ ID NO: 873184 - RNA, 19 nt, Homo sapiens
  misc_RNA (1)...(19): siRNA sense strand
ugacauuacugaagacuuu

SEQ ID NO: 873185 - RNA, 19 nt, Homo sapiens
  misc_RNA (1)...(19): siRNA sense strand
gaacagcuacugaagguuu

SEQ ID NO: 873186 - RNA, 19 nt, Homo sapiens
  misc_RNA (1)...(19): siRNA sense strand
gaagguggaaguagaauuu

SEQ ID NO: 873187 - RNA, 19 nt, Homo sapiens
  misc_RNA (1)...(19): siRNA sense strand
gaaggaugauacuggauuu

SEQ ID NO: 873188 - RNA, 19 nt, Homo sapiens
  misc_RNA (1)...(19): siRNA sense strand
caauaaccauucugucuaa

SEQ ID NO: 873189 - RNA, 19 nt, Homo sapiens
  misc_RNA (1)...(19): siRNA sense strand
guaauugaauggcaacaaa

SEQ ID NO: 873190 - RNA, 19 nt, Homo sapiens
  misc_RNA (1)...(19): siRNA sense strand
gaugaugucuucagaggaa

SEQ ID NO: 873191 - RNA, 19 nt, Homo sapiens
  misc_RNA (1)...(19): siRNA sense strand
ggacaggcguuucaccauu

SEQ ID NO: 873192 - RNA, 19 nt, Homo sapiens
  misc_RNA (1)...(19): siRNA sense strand
uaacaacuuugcccaauga

SEQ ID NO: 873193 - RNA, 19 nt, Homo sapiens
  misc_RNA (1)...(19): siRNA sense strand
ggcagaagcuuaucuacuu

SEQ ID NO: 873194 - RNA, 19 nt, Homo sapiens
  misc_RNA (1)...(19): siRNA sense strand
caacagugguuuauaagug

SEQ ID NO: 873195 - RNA, 19 nt, Homo sapiens
  misc_RNA (1)...(19): siRNA sense strand
gaggaaggauuuauuguca

SEQ ID NO: 873196 - RNA, 19 nt, Homo sapiens
  misc_RNA (1)...(19): siRNA sense strand
gaagaaauggagcaagaua

SEQ ID NO: 873197 - RNA, 19 nt, Homo sapiens
  misc_RNA (1)...(19): siRNA sense strand
gaggagcucuggauuaugu

SEQ ID NO: 873198 - RNA, 19 nt, Homo sapiens
  misc_RNA (1)...(19): siRNA sense strand
gggagaaacuaacaaauca

SEQ ID NO: 873199 - RNA, 19 nt, Homo sapiens
  misc_RNA (1)...(19): siRNA sense strand
ggacaguuauaauugauga

SEQ ID NO: 873200 - RNA, 19 nt, Homo sapiens
  misc_RNA (1)...(19): siRNA sense strand
gaaacagccuuuggcauga

SEQ ID NO: 873201 - RNA, 19 nt, Homo sapiens
  misc_RNA (1)...(19): siRNA sense strand
gaugaucccuuuggaguuu

SEQ ID NO: 873202 - RNA, 19 nt, Homo sapiens
  misc_RNA (1)...(19): siRNA sense strand
gagagcaacucaaggaaga

SEQ ID NO: 873203 - RNA, 19 nt, Homo sapiens
  misc_RNA (1)...(19): siRNA sense strand
ccuaaacgcuuccagauug

SEQ ID NO: 873204 - RNA, 19 nt, Homo sapiens
  misc_RNA (1)...(19): siRNA sense strand
gagaagcacuguauuggau

SEQ ID NO: 873205 - RNA, 19 nt, Homo sapiens
  misc_RNA (1)...(19): siRNA sense strand
gaacaaaggaaaggaguuu

SEQ ID NO: 873206 - RNA, 19 nt, Homo sapiens
  misc_RNA (1)...(19): siRNA sense strand
gaagaccacauacucauaa

SEQ ID NO: 873207 - RNA, 19 nt, Homo sapiens
  misc_RNA (1)...(19): siRNA sense strand
gcaaaucaauggacacaag

SEQ ID NO: 873208 - RNA, 19 nt, Homo sapiens
  misc_RNA (1)...(19): siRNA sense strand
aaagauaacuacugaagga

SEQ ID NO: 873209 - RNA, 19 nt, Homo sapiens
  misc_RNA (1)...(19): siRNA sense strand
gaaagagaacguaaaguau

SEQ ID NO: 873210 - RNA, 19 nt, Homo sapiens
  misc_RNA (1)...(19): siRNA sense strand
gcauugcccuuucguggua

SEQ ID NO: 873211 - RNA, 19 nt, Homo sapiens
  misc_RNA (1)...(19): siRNA sense strand
cagauuacauguacaaaga

SEQ ID NO: 873212 - RNA, 19 nt, Homo sapiens
  misc_RNA (1)...(19): siRNA sense strand
ugacagagacguucaauau

SEQ ID NO: 873213 - RNA, 19 nt, Homo sapiens
  misc_RNA (1)...(19): siRNA sense strand
caggugaacugauauuuga

SEQ ID NO: 873214 - RNA, 19 nt, Homo sapiens
  misc_RNA (1)...(19): siRNA sense strand
ggagaguguugcaguauug

SEQ ID NO: 873215 - RNA, 19 nt, Homo sapiens
  misc_RNA (1)...(19): siRNA sense strand
gaucaaccauuucuugugu

SEQ ID NO: 873216 - RNA, 19 nt, Homo sapiens
  misc_RNA (1)...(19): siRNA sense strand
cgaggaaggagaagaauua

SEQ ID NO: 873217 - RNA, 19 nt, Homo sapiens
  misc_RNA (1)...(19): siRNA sense strand
gaacggaugcuuuguacuu

SEQ ID NO: 873218 - RNA, 19 nt, Homo sapiens
  misc_RNA (1)...(19): siRNA sense strand
aaauggagcucacuuucua

SEQ ID NO: 873219 - RNA, 19 nt, Homo sapiens
  misc_RNA (1)...(19): siRNA sense strand
gcagagcaacaguaauuua

SEQ ID NO: 873220 - RNA, 19 nt, Homo sapiens
  misc_RNA (1)...(19): siRNA sense strand
gaaagcauaugaugauguc

SEQ ID NO: 873221 - RNA, 19 nt, Homo sapiens
  misc_RNA (1)...(19): siRNA sense strand
ccgaagaacugguggguuu

SEQ ID NO: 873222 - RNA, 19 nt, Homo sapiens
  misc_RNA (1)...(19): siRNA sense strand
gggaggcucuguguucuua

SEQ ID NO: 873223 - RNA, 19 nt, Homo sapiens
  misc_RNA (1)...(19): siRNA sense strand
guuuaaagcugugccaaua

SEQ ID NO: 873224 - RNA, 19 nt, Homo sapiens
  misc_RNA (1)...(19): siRNA sense strand
gaugagcccuuuuauauaa

SEQ ID NO: 873225 - RNA, 19 nt, Homo sapiens
  misc_RNA (1)...(19): siRNA sense strand
caaauggaguuguucaguu

SEQ ID NO: 873226 - RNA, 19 nt, Homo sapiens
  misc_RNA (1)...(19): siRNA sense strand
gagguucucuacaggauuu

SEQ ID NO: 873227 - RNA, 19 nt, Homo sapiens
  misc_RNA (1)...(19): siRNA sense strand
ugaaagaugugcucagaug

SEQ ID NO: 873228 - RNA, 19 nt, Homo sapiens
  misc_RNA (1)...(19): siRNA sense strand
ccaagccacuggaagauuu

SEQ ID NO: 873229 - RNA, 19 nt, Homo sapiens
  misc_RNA (1)...(19): siRNA sense strand
uccacuagcucaagaaaua

SEQ ID NO: 873230 - RNA, 19 nt, Homo sapiens
  misc_RNA (1)...(19): siRNA sense strand
ucacugggcucuaauuuca

SEQ ID NO: 873231 - RNA, 19 nt, Homo sapiens
  misc_RNA (1)...(19): siRNA sense strand
guacaaugcucuagaugaa

SEQ ID NO: 873232 - RNA, 19 nt, Homo sapiens
  misc_RNA (1)...(19): siRNA sense strand
gaacucaaauccuuaucuu

SEQ ID NO: 873233 - RNA, 19 nt, Homo sapiens
  misc_RNA (1)...(19): siRNA sense strand
gcagggaacucaaauccuu

SEQ ID NO: 873234 - RNA, 19 nt, Homo sapiens
  misc_RNA (1)...(19): siRNA sense strand
gcagaagacuuuacugaag

SEQ ID NO: 873235 - RNA, 19 nt, Homo sapiens
  misc_RNA (1)...(19): siRNA sense strand
gaagagaagaugaucguaa

SEQ ID NO: 873236 - RNA, 19 nt, Homo sapiens
  misc_RNA (1)...(19): siRNA sense strand
gugcuaugcuccagaauuu

SEQ ID NO: 873237 - RNA, 19 nt, Homo sapiens
  misc_RNA (1)...(19): siRNA sense strand
ggacaagccagaagaugua

SEQ ID NO: 873238 - RNA, 19 nt, Homo sapiens
  misc_RNA (1)...(19): siRNA sense strand
gcauaaacuuaaagaggua

SEQ ID NO: 873239 - RNA, 19 nt, Homo sapiens
  misc_RNA (1)...(19): siRNA sense strand
gugaauugccuuuauguua

SEQ ID NO: 873240 - RNA, 19 nt, Homo sapiens
  misc_RNA (1)...(19): siRNA sense strand
acaaugcucuagaugaaua

SEQ ID NO: 873241 - RNA, 19 nt, Homo sapiens
  misc_RNA (1)...(19): siRNA sense strand
caaacaaacccaacuggua

SEQ ID NO: 873242 - RNA, 19 nt, Homo sapiens
  misc_RNA (1)...(19): siRNA sense strand
gaauacaacggcgaauuua

SEQ ID NO: 873243 - RNA, 19 nt, Homo sapiens
  misc_RNA (1)...(19): siRNA sense strand
acauacaagucauccauua

SEQ ID NO: 873244 - RNA, 19 nt, Homo sapiens
  misc_RNA (1)...(19): siRNA sense strand
aaacaaacccaacugguaa

SEQ ID NO: 873245 - RNA, 19 nt, Homo sapiens
  misc_RNA (1)...(19): siRNA sense strand
gaagaugaucguaaacuug

SEQ ID NO: 873246 - RNA, 19 nt, Homo sapiens
  misc_RNA (1)...(19): siRNA sense strand
gaaggcauauguaguaaaa

SEQ ID NO: 873247 - RNA, 19 nt, Homo sapiens
  misc_RNA (1)...(19): siRNA sense strand
gcggaaggcauauguagua

SEQ ID NO: 873248 - RNA, 19 nt, Homo sapiens
  misc_RNA (1)...(19): siRNA sense strand
ggaaucucaguacuuauua

SEQ ID NO: 873249 - RNA, 19 nt, Homo sapiens
  misc_RNA (1)...(19): siRNA sense strand
aagagaagaugaucguaaa

SEQ ID NO: 873250 - RNA, 19 nt, Homo sapiens
  misc_RNA (1)...(19): siRNA sense strand
gacaagacuuccacucaga

SEQ ID NO: 873251 - RNA, 19 nt, Homo sapiens
  misc_RNA (1)...(19): siRNA sense strand
gaaauugguuacagagcau

SEQ ID NO: 873252 - RNA, 19 nt, Homo sapiens
  misc_RNA (1)...(19): siRNA sense strand
aaagagguauuucaucugu

SEQ ID NO: 873253 - RNA, 19 nt, Homo sapiens
  misc_RNA (1)...(19): siRNA sense strand
gcaccagacuccucuaagg

SEQ ID NO: 873254 - RNA, 19 nt, Homo sapiens
  misc_RNA (1)...(19): siRNA sense strand
uaaagaccauuacgugaca

SEQ ID NO: 873255 - RNA, 19 nt, Homo sapiens
  misc_RNA (1)...(19): siRNA sense strand
ugaauacaacggcgaauuu

SEQ ID NO: 873256 - RNA, 19 nt, Homo sapiens
  misc_RNA (1)...(19): siRNA sense strand
gugaagguauauacaauca

SEQ ID NO: 873257 - RNA, 19 nt, Homo sapiens
  misc_RNA (1)...(19): siRNA sense strand
ccagggaguuuauuugauc

SEQ ID NO: 873258 - RNA, 19 nt, Homo sapiens
  misc_RNA (1)...(19): siRNA sense strand
agaagaaauugguuacaga

SEQ ID NO: 873259 - RNA, 19 nt, Homo sapiens
  misc_RNA (1)...(19): siRNA sense strand
uaaccacaaugacucuuug

SEQ ID NO: 873260 - RNA, 19 nt, Homo sapiens
  misc_RNA (1)...(19): siRNA sense strand
uuuggaaucucaguacuua

SEQ ID NO: 873261 - RNA, 19 nt, Homo sapiens
  misc_RNA (1)...(19): siRNA sense strand
cagaggcaguugacagauu

SEQ ID NO: 873262 - RNA, 19 nt, Homo sapiens
  misc_RNA (1)...(19): siRNA sense strand
gcaaggacagccaagagaa

SEQ ID NO: 873263 - RNA, 19 nt, Homo sapiens
  misc_RNA (1)...(19): siRNA sense strand
agaggcaguugacagauuu

SEQ ID NO: 873264 - RNA, 19 nt, Homo sapiens
  misc_RNA (1)...(19): siRNA sense strand
uaccagacaucucuaaagu

SEQ ID NO: 873265 - RNA, 19 nt, Homo sapiens
  misc_RNA (1)...(19): siRNA sense strand
agaagaugaucguaaacuu

SEQ ID NO: 873266 - RNA, 19 nt, Homo sapiens
  misc_RNA (1)...(19): siRNA sense strand
agacaucucuaaaguggau

SEQ ID NO: 873267 - RNA, 19 nt, Homo sapiens
  misc_RNA (1)...(19): siRNA sense strand
cagcagaagacuuuacuga

SEQ ID NO: 873268 - RNA, 19 nt, Homo sapiens
  misc_RNA (1)...(19): siRNA sense strand
caaugacucuuugcggaaa

SEQ ID NO: 873269 - RNA, 19 nt, Homo sapiens
  misc_RNA (1)...(19): siRNA sense strand
gcuaugcuccagaauuuga

SEQ ID NO: 873270 - RNA, 19 nt, Homo sapiens
  misc_RNA (1)...(19): siRNA sense strand
caaucaauuuggaaucuca

SEQ ID NO: 873271 - RNA, 19 nt, Homo sapiens
  misc_RNA (1)...(19): siRNA sense strand
caaggacagccaagagaaa

SEQ ID NO: 873272 - RNA, 19 nt, Homo sapiens
  misc_RNA (1)...(19): siRNA sense strand
ggagccagggaguuuauuu

SEQ ID NO: 873273 - RNA, 19 nt, Homo sapiens
  misc_RNA (1)...(19): siRNA sense strand
gcauaaagacacagaggau

SEQ ID NO: 873274 - RNA, 19 nt, Homo sapiens
  misc_RNA (1)...(19): siRNA sense strand
gcgacacacgggccaaaua

SEQ ID NO: 873275 - RNA, 19 nt, Homo sapiens
  misc_RNA (1)...(19): siRNA sense strand
cgacacacgggccaaauau

SEQ ID NO: 873276 - RNA, 19 nt, Homo sapiens
  misc_RNA (1)...(19): siRNA sense strand
gaucguaaacuuggaacuu

SEQ ID NO: 873277 - RNA, 19 nt, Homo sapiens
  misc_RNA (1)...(19): siRNA sense strand
auaaagacacagaggauuu

SEQ ID NO: 873278 - RNA, 19 nt, Homo sapiens
  misc_RNA (1)...(19): siRNA sense strand
gagcaccagacuccucuaa

SEQ ID NO: 873279 - RNA, 19 nt, Homo sapiens
  misc_RNA (1)...(19): siRNA sense strand
gaccauuacgugacaaaga

SEQ ID NO: 873280 - RNA, 19 nt, Homo sapiens
  misc_RNA (1)...(19): siRNA sense strand
ggauaugcacgaugacuca

SEQ ID NO: 873281 - RNA, 19 nt, Homo sapiens
  misc_RNA (1)...(19): siRNA sense strand
ggaaggcauauguaguaaa

SEQ ID NO: 873282 - RNA, 19 nt, Homo sapiens
  misc_RNA (1)...(19): siRNA sense strand
ugacaaagaagaaauuggu

SEQ ID NO: 873283 - RNA, 19 nt, Homo sapiens
  misc_RNA (1)...(19): siRNA sense strand
cggaaggcauauguaguaa

SEQ ID NO: 873284 - RNA, 19 nt, Homo sapiens
  misc_RNA (1)...(19): siRNA sense strand
cauacaagucauccauuaa

SEQ ID NO: 873285 - RNA, 19 nt, Homo sapiens
  misc_RNA (1)...(19): siRNA sense strand
guacauacaagucauccau

SEQ ID NO: 873286 - RNA, 19 nt, Homo sapiens
  misc_RNA (1)...(19): siRNA sense strand
gcaguugacagauuuaugc

SEQ ID NO: 873287 - RNA, 19 nt, Homo sapiens
  misc_RNA (1)...(19): siRNA sense strand
acacagauaaacucuuuga

SEQ ID NO: 873288 - RNA, 19 nt, Homo sapiens
  misc_RNA (1)...(19): siRNA sense strand
gagccagggaguuuauuug

SEQ ID NO: 873289 - RNA, 19 nt, Homo sapiens
  misc_RNA (1)...(19): siRNA sense strand
uaaaguggauaugcacgau

SEQ ID NO: 873290 - RNA, 19 nt, Homo sapiens
  misc_RNA (1)...(19): siRNA sense strand
uaugauuggaccucuguua

SEQ ID NO: 873291 - RNA, 19 nt, Homo sapiens
  misc_RNA (1)...(19): siRNA sense strand
aaacccaacugguaaugag

SEQ ID NO: 873292 - RNA, 19 nt, Homo sapiens
  misc_RNA (1)...(19): siRNA sense strand
accauuacgugacaaagaa

SEQ ID NO: 873293 - RNA, 19 nt, Homo sapiens
  misc_RNA (1)...(19): siRNA sense strand
acaguacaaugcucuagau

SEQ ID NO: 873294 - RNA, 19 nt, Homo sapiens
  misc_RNA (1)...(19): siRNA sense strand
gguagaaaccaucauaaaa

SEQ ID NO: 873295 - RNA, 19 nt, Homo sapiens
  misc_RNA (1)...(19): siRNA sense strand
auccuuaucuuccguauuc

SEQ ID NO: 873296 - RNA, 19 nt, Homo sapiens
  misc_RNA (1)...(19): siRNA sense strand
caaagaagaaauugguuac

SEQ ID NO: 873297 - RNA, 19 nt, Homo sapiens
  misc_RNA (1)...(19): siRNA sense strand
uggaaucucaguacuuauu

SEQ ID NO: 873298 - RNA, 19 nt, Homo sapiens
  misc_RNA (1)...(19): siRNA sense strand
aaguggauaugcacgauga

SEQ ID NO: 873299 - RNA, 19 nt, Homo sapiens
  misc_RNA (1)...(19): siRNA sense strand
gauuggaccucuguuacca

SEQ ID NO: 873300 - RNA, 19 nt, Homo sapiens
  misc_RNA (1)...(19): siRNA sense strand
gccagggaguuuauuugau

SEQ ID NO: 873301 - RNA, 19 nt, Homo sapiens
  misc_RNA (1)...(19): siRNA sense strand
gaacaguacaaugcucuag

SEQ ID NO: 873302 - RNA, 19 nt, Homo sapiens
  misc_RNA (1)...(19): siRNA sense strand
auacaacggcgaauuuaau

SEQ ID NO: 873303 - RNA, 19 nt, Homo sapiens
  misc_RNA (1)...(19): siRNA sense strand
gcugugaagguauauacaa

SEQ ID NO: 873304 - RNA, 19 nt, Homo sapiens
  misc_RNA (1)...(19): siRNA sense strand
ggaacucaaauccuuaucu

SEQ ID NO: 873305 - RNA, 19 nt, Homo sapiens
  misc_RNA (1)...(19): siRNA sense strand
ccugugaauugccuuuaug

SEQ ID NO: 873306 - RNA, 19 nt, Homo sapiens
  misc_RNA (1)...(19): siRNA sense strand
cgcuuuauauggugcaauu

SEQ ID NO: 873307 - RNA, 19 nt, Homo sapiens
  misc_RNA (1)...(19): siRNA sense strand
ucucuaaaguggauaugca

SEQ ID NO: 873308 - RNA, 19 nt, Homo sapiens
  misc_RNA (1)...(19): siRNA sense strand
uccagaauuugaaacaguu

SEQ ID NO: 873309 - RNA, 19 nt, Homo sapiens
  misc_RNA (1)...(19): siRNA sense strand
aaagaagaagagaagauga

SEQ ID NO: 873310 - RNA, 19 nt, Homo sapiens
  misc_RNA (1)...(19): siRNA sense strand
cagggaacucaaauccuua

SEQ ID NO: 873311 - RNA, 19 nt, Homo sapiens
  misc_RNA (1)...(19): siRNA sense strand
uagacaagacuuccacuca

SEQ ID NO: 873312 - RNA, 19 nt, Homo sapiens
  misc_RNA (1)...(19): siRNA sense strand
gacaaagaagaaauugguu

SEQ ID NO: 873313 - RNA, 19 nt, Homo sapiens
  misc_RNA (1)...(19): siRNA sense strand
auacccagcagaagacuuu

SEQ ID NO: 873314 - RNA, 19 nt, Homo sapiens
  misc_RNA (1)...(19): siRNA sense strand
gaugaucguaaacuuggaa

SEQ ID NO: 873315 - RNA, 19 nt, Homo sapiens
  misc_RNA (1)...(19): siRNA sense strand
gagaagaugaucguaaacu

SEQ ID NO: 873316 - RNA, 19 nt, Homo sapiens
  misc_RNA (1)...(19): siRNA sense strand
caaaauguauguguucauc

SEQ ID NO: 873317 - RNA, 19 nt, Homo sapiens
  misc_RNA (1)...(19): siRNA sense strand
ggaugaacagaguuucuuc

SEQ ID NO: 873318 - RNA, 19 nt, Homo sapiens
  misc_RNA (1)...(19): siRNA sense strand
cauaaagacacagaggauu

SEQ ID NO: 873319 - RNA, 19 nt, Homo sapiens
  misc_RNA (1)...(19): siRNA sense strand
aagaagaaauugguuacag

SEQ ID NO: 873320 - RNA, 19 nt, Homo sapiens
  misc_RNA (1)...(19): siRNA sense strand
ucaauuuggaaucucagua

SEQ ID NO: 873321 - RNA, 19 nt, Homo sapiens
  misc_RNA (1)...(19): siRNA sense strand
aauacaacggcgaauuuaa

SEQ ID NO: 873322 - RNA, 19 nt, Homo sapiens
  misc_RNA (1)...(19): siRNA sense strand
caaacccaacugguaauga

SEQ ID NO: 873323 - RNA, 19 nt, Homo sapiens
  misc_RNA (1)...(19): siRNA sense strand
ugggagucaugaaggaauu

SEQ ID NO: 873324 - RNA, 19 nt, Homo sapiens
  misc_RNA (1)...(19): siRNA sense strand
aaauggaugaacagaguuu

SEQ ID NO: 873325 - RNA, 19 nt, Homo sapiens
  misc_RNA (1)...(19): siRNA sense strand
aaaaggcuauuacgucuuc

SEQ ID NO: 873326 - RNA, 19 nt, Homo sapiens
  misc_RNA (1)...(19): siRNA sense strand
aggaauuaguugagcgauu

SEQ ID NO: 873327 - RNA, 19 nt, Homo sapiens
  misc_RNA (1)...(19): siRNA sense strand
agagaugucuggauuuugu

SEQ ID NO: 873328 - RNA, 19 nt, Homo sapiens
  misc_RNA (1)...(19): siRNA sense strand
cagaggacaagccagaaga

SEQ ID NO: 873329 - RNA, 19 nt, Homo sapiens
  misc_RNA (1)...(19): siRNA sense strand
gggagucaugaaggaauua

SEQ ID NO: 873330 - RNA, 19 nt, Homo sapiens
  misc_RNA (1)...(19): siRNA sense strand
gaggacaagccagaagaug

SEQ ID NO: 873331 - RNA, 19 nt, Homo sapiens
  misc_RNA (1)...(19): siRNA sense strand
agacggacaugaagcaaua

SEQ ID NO: 873332 - RNA, 19 nt, Homo sapiens
  misc_RNA (1)...(19): siRNA sense strand
ggacaugaagcaauaucaa

SEQ ID NO: 873333 - RNA, 19 nt, Homo sapiens
  misc_RNA (1)...(19): siRNA sense strand
gcauuggcccugaaucuga

SEQ ID NO: 873334 - RNA, 19 nt, Homo sapiens
  misc_RNA (1)...(19): siRNA sense strand
caacagcaccaacuggaau

SEQ ID NO: 873335 - RNA, 19 nt, Homo sapiens
  misc_RNA (1)...(19): siRNA sense strand
gaaagccugccaaguacug

SEQ ID NO: 873336 - RNA, 19 nt, Homo sapiens
  misc_RNA (1)...(19): siRNA sense strand
uggaaagccugccaaguac

SEQ ID NO: 873337 - RNA, 19 nt, Homo sapiens
  misc_RNA (1)...(19): siRNA sense strand
ggacaacauggccuuugga

SEQ ID NO: 873338 - RNA, 19 nt, Homo sapiens
  misc_RNA (1)...(19): siRNA sense strand
gacaacauggccuuuggaa

SEQ ID NO: 873339 - RNA, 19 nt, Homo sapiens
  misc_RNA (1)...(19): siRNA sense strand
ccgucagccuggucuuuaa

SEQ ID NO: 873340 - RNA, 19 nt, Homo sapiens
  misc_RNA (1)...(19): siRNA sense strand
cugaugcgcuacaacaaca

SEQ ID NO: 873341 - RNA, 19 nt, Homo sapiens
  misc_RNA (1)...(19): siRNA sense strand
agaccuggcugcccuucau

SEQ ID NO: 873342 - RNA, 19 nt, Homo sapiens
  misc_RNA (1)...(19): siRNA sense strand
gacaugaagcaauaucaag

SEQ ID NO: 873343 - RNA, 19 nt, Homo sapiens
  misc_RNA (1)...(19): siRNA sense strand
gaggacaacauggccuuug

SEQ ID NO: 873344 - RNA, 19 nt, Homo sapiens
  misc_RNA (1)...(19): siRNA sense strand
ugaaucugaugcgcuacaa

SEQ ID NO: 873345 - RNA, 19 nt, Homo sapiens
  misc_RNA (1)...(19): siRNA sense strand
gagacggacaugaagcaau

SEQ ID NO: 873346 - RNA, 19 nt, Homo sapiens
  misc_RNA (1)...(19): siRNA sense strand
cauuggcccugaaucugau

SEQ ID NO: 873347 - RNA, 19 nt, Homo sapiens
  misc_RNA (1)...(19): siRNA sense strand
gugacgcucugcuucuucu

SEQ ID NO: 873348 - RNA, 19 nt, Homo sapiens
  misc_RNA (1)...(19): siRNA sense strand
ucccggugcucacgugguu

SEQ ID NO: 873349 - RNA, 19 nt, Homo sapiens
  misc_RNA (1)...(19): siRNA sense strand
gagaagagcucaaggagaa

SEQ ID NO: 873350 - RNA, 19 nt, Homo sapiens
  misc_RNA (1)...(19): siRNA sense strand
ggacaaggauuuugauaaa

SEQ ID NO: 873351 - RNA, 19 nt, Homo sapiens
  misc_RNA (1)...(19): siRNA sense strand
gggaaagacucacagagaa

SEQ ID NO: 873352 - RNA, 19 nt, Homo sapiens
  misc_RNA (1)...(19): siRNA sense strand
ugaaggaaaugcagaaaga

SEQ ID NO: 873353 - RNA, 19 nt, Homo sapiens
  misc_RNA (1)...(19): siRNA sense strand
uaaaggaucuaauggacaa

SEQ ID NO: 873354 - RNA, 19 nt, Homo sapiens
  misc_RNA (1)...(19): siRNA sense strand
agaaagauauggaugagaa

SEQ ID NO: 873355 - RNA, 19 nt, Homo sapiens
  misc_RNA (1)...(19): siRNA sense strand
caaagcaguuaaacaagaa

SEQ ID NO: 873356 - RNA, 19 nt, Homo sapiens
  misc_RNA (1)...(19): siRNA sense strand
gaagggcgguuuaccaaag

SEQ ID NO: 873357 - RNA, 19 nt, Homo sapiens
  misc_RNA (1)...(19): siRNA sense strand
cacaggaccuaaagaauga

SEQ ID NO: 873358 - RNA, 19 nt, Homo sapiens
  misc_RNA (1)...(19): siRNA sense strand
acaaagcaguuaaacaaga

SEQ ID NO: 873359 - RNA, 19 nt, Homo sapiens
  misc_RNA (1)...(19): siRNA sense strand
cgagaaauguuuguugugu

SEQ ID NO: 873360 - RNA, 19 nt, Homo sapiens
  misc_RNA (1)...(19): siRNA sense strand
gcagaaagauauggaugag

SEQ ID NO: 873361 - RNA, 19 nt, Homo sapiens
  misc_RNA (1)...(19): siRNA sense strand
ugacacaggaccuaaagaa

SEQ ID NO: 873362 - RNA, 19 nt, Homo sapiens
  misc_RNA (1)...(19): siRNA sense strand
gaugagaagauggacauuu

SEQ ID NO: 873363 - RNA, 19 nt, Homo sapiens
  misc_RNA (1)...(19): siRNA sense strand
gaaaauggaggagauaaaa

SEQ ID NO: 873364 - RNA, 19 nt, Homo sapiens
  misc_RNA (1)...(19): siRNA sense strand
ggaaaugcagaaagauaug

SEQ ID NO: 873365 - RNA, 19 nt, Homo sapiens
  misc_RNA (1)...(19): siRNA sense strand
caagagggcagaauugaag

SEQ ID NO: 873366 - RNA, 19 nt, Homo sapiens
  misc_RNA (1)...(19): siRNA sense strand
acacaggaccuaaagaaug

SEQ ID NO: 873367 - RNA, 19 nt, Homo sapiens
  misc_RNA (1)...(19): siRNA sense strand
gcaguuugccuggaauuga

SEQ ID NO: 873368 - RNA, 19 nt, Homo sapiens
  misc_RNA (1)...(19): siRNA sense strand
caaaggagcagcaggaacu

SEQ ID NO: 873369 - RNA, 19 nt, Homo sapiens
  misc_RNA (1)...(19): siRNA sense strand
agaaugaacucagggaagu

SEQ ID NO: 873370 - RNA, 19 nt, Homo sapiens
  misc_RNA (1)...(19): siRNA sense strand
caguuugccuggaauugaa

SEQ ID NO: 873371 - RNA, 19 nt, Homo sapiens
  misc_RNA (1)...(19): siRNA sense strand
gaucuaauggacaaggauu

SEQ ID NO: 873372 - RNA, 19 nt, Homo sapiens
  misc_RNA (1)...(19): siRNA sense strand
aaggaaaugcagaaagaua

SEQ ID NO: 873373 - RNA, 19 nt, Homo sapiens
  misc_RNA (1)...(19): siRNA sense strand
ccacagcucaggcccaaga

SEQ ID NO: 873374 - RNA, 19 nt, Homo sapiens
  misc_RNA (1)...(19): siRNA sense strand
ucagggaagugagagaaga

SEQ ID NO: 873375 - RNA, 19 nt, Homo sapiens
  misc_RNA (1)...(19): siRNA sense strand
cuaaagaacaacuacaauc

SEQ ID NO: 873376 - RNA, 19 nt, Homo sapiens
  misc_RNA (1)...(19): siRNA sense strand
caagaagggcgguuuacca

SEQ ID NO: 873377 - RNA, 19 nt, Homo sapiens
  misc_RNA (1)...(19): siRNA sense strand
uaaagaacaacuacaaucg

SEQ ID NO: 873378 - RNA, 19 nt, Homo sapiens
  misc_RNA (1)...(19): siRNA sense strand
gaaauuaugaaggaaaugc

SEQ ID NO: 873379 - RNA, 19 nt, Homo sapiens
  misc_RNA (1)...(19): siRNA sense strand
ccaagagggcagaauugaa

SEQ ID NO: 873380 - RNA, 19 nt, Homo sapiens
  misc_RNA (1)...(19): siRNA sense strand
ggagugacacaggaccuaa

SEQ ID NO: 873381 - RNA, 19 nt, Homo sapiens
  misc_RNA (1)...(19): siRNA sense strand
agauauggaugagaagaug

SEQ ID NO: 873382 - RNA, 19 nt, Homo sapiens
  misc_RNA (1)...(19): siRNA sense strand
ggaaagacucacagagaac

SEQ ID NO: 873383 - RNA, 19 nt, Homo sapiens
  misc_RNA (1)...(19): siRNA sense strand
gagaagauggacauuuuaa

SEQ ID NO: 873384 - RNA, 19 nt, Homo sapiens
  misc_RNA (1)...(19): siRNA sense strand
gaaggaaaugcagaaagau

SEQ ID NO: 873385 - RNA, 19 nt, Homo sapiens
  misc_RNA (1)...(19): siRNA sense strand
gccaagagggcagaauuga

SEQ ID NO: 873386 - RNA, 19 nt, Homo sapiens
  misc_RNA (1)...(19): siRNA sense strand
gauaaacuucacgaauuug

SEQ ID NO: 873387 - RNA, 19 nt, Homo sapiens
  misc_RNA (1)...(19): siRNA sense strand
ugggaaagacucacagaga

SEQ ID NO: 873388 - RNA, 19 nt, Homo sapiens
  misc_RNA (1)...(19): siRNA sense strand
uaccaaagcaggagugaca

SEQ ID NO: 873389 - RNA, 19 nt, Homo sapiens
  misc_RNA (1)...(19): siRNA sense strand
ggccaagagggcagaauug

SEQ ID NO: 873390 - RNA, 19 nt, Homo sapiens
  misc_RNA (1)...(19): siRNA sense strand
gacacaggaccuaaagaau

SEQ ID NO: 873391 - RNA, 19 nt, Homo sapiens
  misc_RNA (1)...(19): siRNA sense strand
ugugugcucuaaagaacaa

SEQ ID NO: 873392 - RNA, 19 nt, Homo sapiens
  misc_RNA (1)...(19): siRNA sense strand
gagggcagaauugaagaaa

SEQ ID NO: 873393 - RNA, 19 nt, Homo sapiens
  misc_RNA (1)...(19): siRNA sense strand
gaaaugcagaaagauaugg

SEQ ID NO: 873394 - RNA, 19 nt, Homo sapiens
  misc_RNA (1)...(19): siRNA sense strand
guugugugcucuaaagaac

SEQ ID NO: 873395 - RNA, 19 nt, Homo sapiens
  misc_RNA (1)...(19): siRNA sense strand
ccagugaccacccaaccuu

SEQ ID NO: 873396 - RNA, 19 nt, Homo sapiens
  misc_RNA (1)...(19): siRNA sense strand
aagaagggcgguuuaccaa

SEQ ID NO: 873397 - RNA, 19 nt, Homo sapiens
  misc_RNA (1)...(19): siRNA sense strand
gaaagauauggaugagaag

SEQ ID NO: 873398 - RNA, 19 nt, Homo sapiens
  misc_RNA (1)...(19): siRNA sense strand
ugcgagaaauguuuguugu

SEQ ID NO: 873399 - RNA, 19 nt, Homo sapiens
  misc_RNA (1)...(19): siRNA sense strand
gaugggaaagacucacaga

SEQ ID NO: 873400 - RNA, 19 nt, Homo sapiens
  misc_RNA (1)...(19): siRNA sense strand
gaggagauaaaacagauaa

SEQ ID NO: 873401 - RNA, 19 nt, Homo sapiens
  misc_RNA (1)...(19): siRNA sense strand
acagaagaacuauaagcuu

SEQ ID NO: 873402 - RNA, 19 nt, Homo sapiens
  misc_RNA (1)...(19): siRNA sense strand
gagugacacaggaccuaaa

SEQ ID NO: 873403 - RNA, 19 nt, Homo sapiens
  misc_RNA (1)...(19): siRNA sense strand
guggaaauuaugaaggaaa

SEQ ID NO: 873404 - RNA, 19 nt, Homo sapiens
  misc_RNA (1)...(19): siRNA sense strand
ggaccugcugcgagaaaug

SEQ ID NO: 873405 - RNA, 19 nt, Homo sapiens
  misc_RNA (1)...(19): siRNA sense strand
aggaaaugcagaaagauau

SEQ ID NO: 873406 - RNA, 19 nt, Homo sapiens
  misc_RNA (1)...(19): siRNA sense strand
gaagccagagccgaccaaa

SEQ ID NO: 873407 - RNA, 19 nt, Homo sapiens
  misc_RNA (1)...(19): siRNA sense strand
gaagacgauggcaccacaa

SEQ ID NO: 873408 - RNA, 19 nt, Homo sapiens
  misc_RNA (1)...(19): siRNA sense strand
augagaagauggacauuuu

SEQ ID NO: 873409 - RNA, 19 nt, Homo sapiens
  misc_RNA (1)...(19): siRNA sense strand
gggcagaauugaagaaaac

SEQ ID NO: 873410 - RNA, 19 nt, Homo sapiens
  misc_RNA (1)...(19): siRNA sense strand
ggaccuaaagaaugaacuc

SEQ ID NO: 873411 - RNA, 19 nt, Homo sapiens
  misc_RNA (1)...(19): siRNA sense strand
gcgagaaauguuuguugug

SEQ ID NO: 873412 - RNA, 19 nt, Homo sapiens
  misc_RNA (1)...(19): siRNA sense strand
uuguggaaauuaugaagga

SEQ ID NO: 873413 - RNA, 19 nt, Homo sapiens
  misc_RNA (1)...(19): siRNA sense strand
ggaaauuaugaaggaaaug

SEQ ID NO: 873414 - RNA, 19 nt, Homo sapiens
  misc_RNA (1)...(19): siRNA sense strand
ggagaaaauggaggagaua

SEQ ID NO: 873415 - RNA, 19 nt, Homo sapiens
  misc_RNA (1)...(19): siRNA sense strand
cggccaagagggcagaauu

SEQ ID NO: 873416 - RNA, 19 nt, Homo sapiens
  misc_RNA (1)...(19): siRNA sense strand
aaagauauggaugagaaga

SEQ ID NO: 873417 - RNA, 19 nt, Homo sapiens
  misc_RNA (1)...(19): siRNA sense strand
gaaacuauuugaagugcua

SEQ ID NO: 873418 - RNA, 19 nt, Homo sapiens
  misc_RNA (1)...(19): siRNA sense strand
agaagcaguugguugauua

SEQ ID NO: 873419 - RNA, 19 nt, Homo sapiens
  misc_RNA (1)...(19): siRNA sense strand
caagaaugcugucuacugu

SEQ ID NO: 873420 - RNA, 19 nt, Homo sapiens
  misc_RNA (1)...(19): siRNA sense strand
caaccacacuuaccagaug

SEQ ID NO: 873421 - RNA, 19 nt, Homo sapiens
  misc_RNA (1)...(19): siRNA sense strand
acaauuaccuggaguaucu

SEQ ID NO: 873422 - RNA, 19 nt, Homo sapiens
  misc_RNA (1)...(19): siRNA sense strand
gcaguugguugauuauauc

SEQ ID NO: 873423 - RNA, 19 nt, Homo sapiens
  misc_RNA (1)...(19): siRNA sense strand
acgagcagcugacaaguuu

SEQ ID NO: 873424 - RNA, 19 nt, Homo sapiens
  misc_RNA (1)...(19): siRNA sense strand
gccaagaaguaccucauug

SEQ ID NO: 873425 - RNA, 19 nt, Homo sapiens
  misc_RNA (1)...(19): siRNA sense strand
caacugaaacuauuugaag

SEQ ID NO: 873426 - RNA, 19 nt, Homo sapiens
  misc_RNA (1)...(19): siRNA sense strand
cuucauggcugugcucuuu

SEQ ID NO: 873427 - RNA, 19 nt, Homo sapiens
  misc_RNA (1)...(19): siRNA sense strand
gguaucuuguuccauguaa

SEQ ID NO: 873428 - RNA, 19 nt, Homo sapiens
  misc_RNA (1)...(19): siRNA sense strand
cagaagcaguugguugauu

SEQ ID NO: 873429 - RNA, 19 nt, Homo sapiens
  misc_RNA (1)...(19): siRNA sense strand
gaagccggcuguucgugau

SEQ ID NO: 873430 - RNA, 19 nt, Homo sapiens
  misc_RNA (1)...(19): siRNA sense strand
cuggagagcuggaagacaa

SEQ ID NO: 873431 - RNA, 19 nt, Homo sapiens
  misc_RNA (1)...(19): siRNA sense strand
gcagcugguucucagguau

SEQ ID NO: 873432 - RNA, 19 nt, Homo sapiens
  misc_RNA (1)...(19): siRNA sense strand
ugacauggcagcugcaaug

SEQ ID NO: 873433 - RNA, 19 nt, Homo sapiens
  misc_RNA (1)...(19): siRNA sense strand
guuggagacuucagaggaa

SEQ ID NO: 873434 - RNA, 19 nt, Homo sapiens
  misc_RNA (1)...(19): siRNA sense strand
gcagaacuccgucuauguc

SEQ ID NO: 873435 - RNA, 19 nt, Homo sapiens
  misc_RNA (1)...(19): siRNA sense strand
gcggaucacucuuacuucu

SEQ ID NO: 873436 - RNA, 19 nt, Homo sapiens
  misc_RNA (1)...(19): siRNA sense strand
acucaucacugccucgaaa

SEQ ID NO: 873437 - RNA, 19 nt, Homo sapiens
  misc_RNA (1)...(19): siRNA sense strand
guucucagguaucuuguuc

SEQ ID NO: 873438 - RNA, 19 nt, Homo sapiens
  misc_RNA (1)...(19): siRNA sense strand
cugagcaacugaaacuauu

SEQ ID NO: 873439 - RNA, 19 nt, Homo sapiens
  misc_RNA (1)...(19): siRNA sense strand
gagcaggacuuggccuaag

SEQ ID NO: 873440 - RNA, 19 nt, Homo sapiens
  misc_RNA (1)...(19): siRNA sense strand
gugcugggcucugugaaga

SEQ ID NO: 873441 - RNA, 19 nt, Homo sapiens
  misc_RNA (1)...(19): siRNA sense strand
gagagcuggaagacaauua

SEQ ID NO: 873442 - RNA, 19 nt, Homo sapiens
  misc_RNA (1)...(19): siRNA sense strand
gaacuuuuccuacggagua

SEQ ID NO: 873443 - RNA, 19 nt, Homo sapiens
  misc_RNA (1)...(19): siRNA sense strand
gagcaacugaaacuauuug

SEQ ID NO: 873444 - RNA, 19 nt, Homo sapiens
  misc_RNA (1)...(19): siRNA sense strand
gcaacugaaacuauuugaa

SEQ ID NO: 873445 - RNA, 19 nt, Homo sapiens
  misc_RNA (1)...(19): siRNA sense strand
ucgagaacaugcugcagaa

SEQ ID NO: 873446 - RNA, 19 nt, Homo sapiens
  misc_RNA (1)...(19): siRNA sense strand
ucagugcccuguacucauc

SEQ ID NO: 873447 - RNA, 19 nt, Homo sapiens
  misc_RNA (1)...(19): siRNA sense strand
caccucgccuuucuuguug

SEQ ID NO: 873448 - RNA, 19 nt, Homo sapiens
  misc_RNA (1)...(19): siRNA sense strand
gcagaggaccgugcaguuc

SEQ ID NO: 873449 - RNA, 19 nt, Homo sapiens
  misc_RNA (1)...(19): siRNA sense strand
cugaauuucucaaggaguu

SEQ ID NO: 873450 - RNA, 19 nt, Homo sapiens
  misc_RNA (1)...(19): siRNA sense strand
ggaugaaggcuuggugcua

SEQ ID NO: 873451 - RNA, 19 nt, Homo sapiens
  misc_RNA (1)...(19): siRNA sense strand
gaagcucgccagccacugu

SEQ ID NO: 873452 - RNA, 19 nt, Homo sapiens
  misc_RNA (1)...(19): siRNA sense strand
gcugagcaacugaaacuau

SEQ ID NO: 873453 - RNA, 19 nt, Homo sapiens
  misc_RNA (1)...(19): siRNA sense strand
ucaccucgccuuucuuguu

SEQ ID NO: 873454 - RNA, 19 nt, Homo sapiens
  misc_RNA (1)...(19): siRNA sense strand
cuucauugcucgaguucuu

SEQ ID NO: 873455 - RNA, 19 nt, Homo sapiens
  misc_RNA (1)...(19): siRNA sense strand
gaggagaugaucgccagua

SEQ ID NO: 873456 - RNA, 19 nt, Homo sapiens
  misc_RNA (1)...(19): siRNA sense strand
acaaguuucucucccuaau

SEQ ID NO: 873457 - RNA, 19 nt, Homo sapiens
  misc_RNA (1)...(19): siRNA sense strand
ugaauuggcugagcagacu

SEQ ID NO: 873458 - RNA, 19 nt, Homo sapiens
  misc_RNA (1)...(19): siRNA sense strand
ucaagaaugcugucuacug

SEQ ID NO: 873459 - RNA, 19 nt, Homo sapiens
  misc_RNA (1)...(19): siRNA sense strand
ugggcucugugaagaauaa

SEQ ID NO: 873460 - RNA, 19 nt, Homo sapiens
  misc_RNA (1)...(19): siRNA sense strand
guggacuccucuucuguga

SEQ ID NO: 873461 - RNA, 19 nt, Homo sapiens
  misc_RNA (1)...(19): siRNA sense strand
ugaguucccuggaguucug

SEQ ID NO: 873462 - RNA, 19 nt, Homo sapiens
  misc_RNA (1)...(19): siRNA sense strand
gcugggcucugugaagaau

SEQ ID NO: 873463 - RNA, 19 nt, Homo sapiens
  misc_RNA (1)...(19): siRNA sense strand
gacgagcagcugacaaguu

SEQ ID NO: 873464 - RNA, 19 nt, Homo sapiens
  misc_RNA (1)...(19): siRNA sense strand
gggcauggcaggacuagag

SEQ ID NO: 873465 - RNA, 19 nt, Homo sapiens
  misc_RNA (1)...(19): siRNA sense strand
gaagcaguugguugauuau

SEQ ID NO: 873466 - RNA, 19 nt, Homo sapiens
  misc_RNA (1)...(19): siRNA sense strand
gaacuccgucuaugucaac

SEQ ID NO: 873467 - RNA, 19 nt, Homo sapiens
  misc_RNA (1)...(19): siRNA sense strand
ggucccagguggugcgaau

SEQ ID NO: 873468 - RNA, 19 nt, Homo sapiens
  misc_RNA (1)...(19): siRNA sense strand
caucucgucugguucucuu

SEQ ID NO: 873469 - RNA, 19 nt, Homo sapiens
  misc_RNA (1)...(19): siRNA sense strand
gaggugggccuagcagaga

SEQ ID NO: 873470 - RNA, 19 nt, Homo sapiens
  misc_RNA (1)...(19): siRNA sense strand
gcaaccacacuuaccagau

SEQ ID NO: 873471 - RNA, 19 nt, Homo sapiens
  misc_RNA (1)...(19): siRNA sense strand
uguccaaagccaagaagua

SEQ ID NO: 873472 - RNA, 19 nt, Homo sapiens
  misc_RNA (1)...(19): siRNA sense strand
cugcagaacuccgucuaug

SEQ ID NO: 873473 - RNA, 19 nt, Homo sapiens
  misc_RNA (1)...(19): siRNA sense strand
ggagcuagagguggcauug

SEQ ID NO: 873474 - RNA, 19 nt, Homo sapiens
  misc_RNA (1)...(19): siRNA sense strand
cuacaucgcggaucacucu

SEQ ID NO: 873475 - RNA, 19 nt, Homo sapiens
  misc_RNA (1)...(19): siRNA sense strand
ggagcaggacuuggccuaa

SEQ ID NO: 873476 - RNA, 19 nt, Homo sapiens
  misc_RNA (1)...(19): siRNA sense strand
gagaacaugcugcagaacu

SEQ ID NO: 873477 - RNA, 19 nt, Homo sapiens
  misc_RNA (1)...(19): siRNA sense strand
uaagaaacgcagccuacug

SEQ ID NO: 873478 - RNA, 19 nt, Homo sapiens
  misc_RNA (1)...(19): siRNA sense strand
gcagagagacagggagaag

SEQ ID NO: 873479 - RNA, 19 nt, Homo sapiens
  misc_RNA (1)...(19): siRNA sense strand
agcaguugguugauuauau

SEQ ID NO: 873480 - RNA, 19 nt, Homo sapiens
  misc_RNA (1)...(19): siRNA sense strand
gacaaguuucucucccuaa

SEQ ID NO: 873481 - RNA, 19 nt, Homo sapiens
  misc_RNA (1)...(19): siRNA sense strand
gggcugagcaacugaaacu

SEQ ID NO: 873482 - RNA, 19 nt, Homo sapiens
  misc_RNA (1)...(19): siRNA sense strand
gcccuugcacucuucauga

SEQ ID NO: 873483 - RNA, 19 nt, Homo sapiens
  misc_RNA (1)...(19): siRNA sense strand
gcucagugcccuguacuca

SEQ ID NO: 873484 - RNA, 19 nt, Homo sapiens
  misc_RNA (1)...(19): siRNA sense strand
uuucucgccuugucccuuu

SEQ ID NO: 873485 - RNA, 19 nt, Homo sapiens
  misc_RNA (1)...(19): siRNA sense strand
gagcagcugacaaguuucu

SEQ ID NO: 873486 - RNA, 19 nt, Homo sapiens
  misc_RNA (1)...(19): siRNA sense strand
ucacugccucgaaagauug

SEQ ID NO: 873487 - RNA, 19 nt, Homo sapiens
  misc_RNA (1)...(19): siRNA sense strand
cgugaugcccuacuucuuc

SEQ ID NO: 873488 - RNA, 19 nt, Homo sapiens
  misc_RNA (1)...(19): siRNA sense strand
agaacaugcugcagaacuc

SEQ ID NO: 873489 - RNA, 19 nt, Homo sapiens
  misc_RNA (1)...(19): siRNA sense strand
ggagagcuggaagacaauu

SEQ ID NO: 873490 - RNA, 19 nt, Homo sapiens
  misc_RNA (1)...(19): siRNA sense strand
gaucuggcccucucaucuc

SEQ ID NO: 873491 - RNA, 19 nt, Homo sapiens
  misc_RNA (1)...(19): siRNA sense strand
ggaucuggcccucucaucu

SEQ ID NO: 873492 - RNA, 19 nt, Homo sapiens
  misc_RNA (1)...(19): siRNA sense strand
ucccugaauuucucaagga

SEQ ID NO: 873493 - RNA, 19 nt, Homo sapiens
  misc_RNA (1)...(19): siRNA sense strand
agucaagaaugcugucuac

SEQ ID NO: 873494 - RNA, 19 nt, Homo sapiens
  misc_RNA (1)...(19): siRNA sense strand
ugacccguguguugacaug

SEQ ID NO: 873495 - RNA, 19 nt, Homo sapiens
  misc_RNA (1)...(19): siRNA sense strand
cggcacaauugguccuuca

SEQ ID NO: 873496 - RNA, 19 nt, Homo sapiens
  misc_RNA (1)...(19): siRNA sense strand
caucgcggaucacucuuac

SEQ ID NO: 873497 - RNA, 19 nt, Homo sapiens
  misc_RNA (1)...(19): siRNA sense strand
gcucuuuccugcucaacac

SEQ ID NO: 873498 - RNA, 19 nt, Homo sapiens
  misc_RNA (1)...(19): siRNA sense strand
caauggagugccaggauca

SEQ ID NO: 873499 - RNA, 19 nt, Homo sapiens
  misc_RNA (1)...(19): siRNA sense strand
uucgugauguggaccuaua

SEQ ID NO: 873500 - RNA, 19 nt, Homo sapiens
  misc_RNA (1)...(19): siRNA sense strand
gugaugcccuacuucuucu

SEQ ID NO: 873501 - RNA, 19 nt, Homo sapiens
  misc_RNA (1)...(19): siRNA sense strand
gccgucaccucgccuuucu

SEQ ID NO: 873502 - RNA, 19 nt, Homo sapiens
  misc_RNA (1)...(19): siRNA sense strand
ggcagaggaccgugcaguu

SEQ ID NO: 873503 - RNA, 19 nt, Homo sapiens
  misc_RNA (1)...(19): siRNA sense strand
gagucaagaaugcugucua

SEQ ID NO: 873504 - RNA, 19 nt, Homo sapiens
  misc_RNA (1)...(19): siRNA sense strand
gcucugugaagaauaagau

SEQ ID NO: 873505 - RNA, 19 nt, Homo sapiens
  misc_RNA (1)...(19): siRNA sense strand
gagcuagagguggcauuga

SEQ ID NO: 873506 - RNA, 19 nt, Homo sapiens
  misc_RNA (1)...(19): siRNA sense strand
gaucugcugacccgugugu

SEQ ID NO: 873507 - RNA, 19 nt, Homo sapiens
  misc_RNA (1)...(19): siRNA sense strand
ugcagaagcaguugguuga

SEQ ID NO: 873508 - RNA, 19 nt, Homo sapiens
  misc_RNA (1)...(19): siRNA sense strand
ucgcggaucacucuuacuu

SEQ ID NO: 873509 - RNA, 19 nt, Homo sapiens
  misc_RNA (1)...(19): siRNA sense strand
ugagcaacugaaacuauuu

SEQ ID NO: 873510 - RNA, 19 nt, Homo sapiens
  misc_RNA (1)...(19): siRNA sense strand
gcagucauuuucccugaau

SEQ ID NO: 873511 - RNA, 19 nt, Homo sapiens
  misc_RNA (1)...(19): siRNA sense strand
gugaggcucuucgagucaa

SEQ ID NO: 873512 - RNA, 19 nt, Homo sapiens
  misc_RNA (1)...(19): siRNA sense strand
gugaagaauaagauugaga

SEQ ID NO: 873513 - RNA, 19 nt, Homo sapiens
  misc_RNA (1)...(19): siRNA sense strand
agaacuccgucuaugucaa

SEQ ID NO: 873514 - RNA, 19 nt, Homo sapiens
  misc_RNA (1)...(19): siRNA sense strand
uugccaaacucgagaacau

SEQ ID NO: 873515 - RNA, 19 nt, Homo sapiens
  misc_RNA (1)...(19): siRNA sense strand
guugguugauuauauccau

SEQ ID NO: 873516 - RNA, 19 nt, Homo sapiens
  misc_RNA (1)...(19): siRNA sense strand
gaagaauaagauugagaac

SEQ ID NO: 873517 - RNA, 19 nt, Homo sapiens
  misc_RNA (1)...(19): siRNA sense strand
ugaggcagcugcaauauuu

SEQ ID NO: 873518 - RNA, 19 nt, Homo sapiens
  misc_RNA (1)...(19): siRNA sense strand
gaucuuuacucuugcauuc

SEQ ID NO: 873519 - RNA, 19 nt, Homo sapiens
  misc_RNA (1)...(19): siRNA sense strand
auucagaucuuuacucuug

SEQ ID NO: 873520 - RNA, 19 nt, Homo sapiens
  misc_RNA (1)...(19): siRNA sense strand
gaaaugaggcagcugcaau

SEQ ID NO: 873521 - RNA, 19 nt, Homo sapiens
  misc_RNA (1)...(19): siRNA sense strand
ggcgaucgcuggagcuaaa

SEQ ID NO: 873522 - RNA, 19 nt, Homo sapiens
  misc_RNA (1)...(19): siRNA sense strand
ccacugaagccagaaauaa

SEQ ID NO: 873523 - RNA, 19 nt, Homo sapiens
  misc_RNA (1)...(19): siRNA sense strand
caaggcaguugguggaaau

SEQ ID NO: 873524 - RNA, 19 nt, Homo sapiens
  misc_RNA (1)...(19): siRNA sense strand
cagcugcaauauuuaauuc

SEQ ID NO: 873525 - RNA, 19 nt, Homo sapiens
  misc_RNA (1)...(19): siRNA sense strand
gaggaaagacugguucaug

SEQ ID NO: 873526 - RNA, 19 nt, Homo sapiens
  misc_RNA (1)...(19): siRNA sense strand
ucacacccaucaacgaaug

SEQ ID NO: 873527 - RNA, 19 nt, Homo sapiens
  misc_RNA (1)...(19): siRNA sense strand
uaacaguggacuaucauug

SEQ ID NO: 873528 - RNA, 19 nt, Homo sapiens
  misc_RNA (1)...(19): siRNA sense strand
gcagcugcaauauuuaauu

SEQ ID NO: 873529 - RNA, 19 nt, Homo sapiens
  misc_RNA (1)...(19): siRNA sense strand
aaaugaggcagcugcaaua

SEQ ID NO: 873530 - RNA, 19 nt, Homo sapiens
  misc_RNA (1)...(19): siRNA sense strand
gaagccagaaauaacugua

SEQ ID NO: 873531 - RNA, 19 nt, Homo sapiens
  misc_RNA (1)...(19): siRNA sense strand
gugcuuuggugcaucuaaa

SEQ ID NO: 873532 - RNA, 19 nt, Homo sapiens
  misc_RNA (1)...(19): siRNA sense strand
acaguggacuaucauugaa

SEQ ID NO: 873533 - RNA, 19 nt, Homo sapiens
  misc_RNA (1)...(19): siRNA sense strand
caacgaauggcuuuuaaaa

SEQ ID NO: 873534 - RNA, 19 nt, Homo sapiens
  misc_RNA (1)...(19): siRNA sense strand
cagaaauaacuguauccua

SEQ ID NO: 873535 - RNA, 19 nt, Homo sapiens
  misc_RNA (1)...(19): siRNA sense strand
uaauucagccuuuggaagu

SEQ ID NO: 873536 - RNA, 19 nt, Homo sapiens
  misc_RNA (1)...(19): siRNA sense strand
ggaaagacugguucauggu

SEQ ID NO: 873537 - RNA, 19 nt, Homo sapiens
  misc_RNA (1)...(19): siRNA sense strand
gaaugaggaaagacugguu

SEQ ID NO: 873538 - RNA, 19 nt, Homo sapiens
  misc_RNA (1)...(19): siRNA sense strand
gaggcagcugcaauauuua

SEQ ID NO: 873539 - RNA, 19 nt, Homo sapiens
  misc_RNA (1)...(19): siRNA sense strand
guucauggucggaauagug

SEQ ID NO: 873540 - RNA, 19 nt, Homo sapiens
  misc_RNA (1)...(19): siRNA sense strand
ccagcaacaauauggcuuu

SEQ ID NO: 873541 - RNA, 19 nt, Homo sapiens
  misc_RNA (1)...(19): siRNA sense strand
gcugcaauauuuaauucag

SEQ ID NO: 873542 - RNA, 19 nt, Homo sapiens
  misc_RNA (1)...(19): siRNA sense strand
ggagcugaccagugcuuug

SEQ ID NO: 873543 - RNA, 19 nt, Homo sapiens
  misc_RNA (1)...(19): siRNA sense strand
ggaaaugaggcagcugcaa

SEQ ID NO: 873544 - RNA, 19 nt, Homo sapiens
  misc_RNA (1)...(19): siRNA sense strand
caucuaaaacugcaucuuu

SEQ ID NO: 873545 - RNA, 19 nt, Homo sapiens
  misc_RNA (1)...(19): siRNA sense strand
cuuuaacaguggacuauca

SEQ ID NO: 873546 - RNA, 19 nt, Homo sapiens
  misc_RNA (1)...(19): siRNA sense strand
aaucacacccaucaacgaa

SEQ ID NO: 873547 - RNA, 19 nt, Homo sapiens
  misc_RNA (1)...(19): siRNA sense strand
uggagagaaugaggaaaga

SEQ ID NO: 873548 - RNA, 19 nt, Homo sapiens
  misc_RNA (1)...(19): siRNA sense strand
ggaccacugaagccagaaa

SEQ ID NO: 873549 - RNA, 19 nt, Homo sapiens
  misc_RNA (1)...(19): siRNA sense strand
gagagaaugaggaaagacu

SEQ ID NO: 873550 - RNA, 19 nt, Homo sapiens
  misc_RNA (1)...(19): siRNA sense strand
aacaguggacuaucauuga

SEQ ID NO: 873551 - RNA, 19 nt, Homo sapiens
  misc_RNA (1)...(19): siRNA sense strand
ucuuuacucuugcauucuu

SEQ ID NO: 873552 - RNA, 19 nt, Homo sapiens
  misc_RNA (1)...(19): siRNA sense strand
gagcugaccagugcuuugg

SEQ ID NO: 873553 - RNA, 19 nt, Homo sapiens
  misc_RNA (1)...(19): siRNA sense strand
ccagugcuuuggugcaucu

SEQ ID NO: 873554 - RNA, 19 nt, Homo sapiens
  misc_RNA (1)...(19): siRNA sense strand
aggcagcugcaauauuuaa

SEQ ID NO: 873555 - RNA, 19 nt, Homo sapiens
  misc_RNA (1)...(19): siRNA sense strand
caaucacacccaucaacga

SEQ ID NO: 873556 - RNA, 19 nt, Homo sapiens
  misc_RNA (1)...(19): siRNA sense strand
uaaaagguuugcagacagu

SEQ ID NO: 873557 - RNA, 19 nt, Homo sapiens
  misc_RNA (1)...(19): siRNA sense strand
ucagaucuuuacucuugca

SEQ ID NO: 873558 - RNA, 19 nt, Homo sapiens
  misc_RNA (1)...(19): siRNA sense strand
ugugucuucugcagugauu

SEQ ID NO: 873559 - RNA, 19 nt, Homo sapiens
  misc_RNA (1)...(19): siRNA sense strand
gaggagcugaccagugcuu

SEQ ID NO: 873560 - RNA, 19 nt, Homo sapiens
  misc_RNA (1)...(19): siRNA sense strand
ggcaguugguggaaaugag

SEQ ID NO: 873561 - RNA, 19 nt, Homo sapiens
  misc_RNA (1)...(19): siRNA sense strand
caucaacgaauggcuuuua

SEQ ID NO: 873562 - RNA, 19 nt, Homo sapiens
  misc_RNA (1)...(19): siRNA sense strand
auucuucccagcaacaaua

SEQ ID NO: 873563 - RNA, 19 nt, Homo sapiens
  misc_RNA (1)...(19): siRNA sense strand
ccaacaagcucuuccacua

SEQ ID NO: 873564 - RNA, 19 nt, Homo sapiens
  misc_RNA (1)...(19): siRNA sense strand
gagcacgccuuccagauca

SEQ ID NO: 873565 - RNA, 19 nt, Homo sapiens
  misc_RNA (1)...(19): siRNA sense strand
ccagaaagcccucgcugaa

SEQ ID NO: 873566 - RNA, 19 nt, Homo sapiens
  misc_RNA (1)...(19): siRNA sense strand
cggaaggacucacauuuca

SEQ ID NO: 873567 - RNA, 19 nt, Homo sapiens
  misc_RNA (1)...(19): siRNA sense strand
gagcuggaccgcuggcuuu

SEQ ID NO: 873568 - RNA, 19 nt, Homo sapiens
  misc_RNA (1)...(19): siRNA sense strand
ggacgggcuuugcuucaag

SEQ ID NO: 873569 - RNA, 19 nt, Homo sapiens
  misc_RNA (1)...(19): siRNA sense strand
gauccgcuccuuccugauu

SEQ ID NO: 873570 - RNA, 19 nt, Homo sapiens
  misc_RNA (1)...(19): siRNA sense strand
ggagggugccugugaggaa

SEQ ID NO: 873571 - RNA, 19 nt, Homo sapiens
  misc_RNA (1)...(19): siRNA sense strand
ugggaaaaguugugcauua

SEQ ID NO: 873572 - RNA, 19 nt, Homo sapiens
  misc_RNA (1)...(19): siRNA sense strand
caacguccuuggccauuuu

SEQ ID NO: 873573 - RNA, 19 nt, Homo sapiens
  misc_RNA (1)...(19): siRNA sense strand
acaucaaccuggaggagaa

SEQ ID NO: 873574 - RNA, 19 nt, Homo sapiens
  misc_RNA (1)...(19): siRNA sense strand
gaacccuggcugccucuga

SEQ ID NO: 873575 - RNA, 19 nt, Homo sapiens
  misc_RNA (1)...(19): siRNA sense strand
caacaagcucuuccacuac

SEQ ID NO: 873576 - RNA, 19 nt, Homo sapiens
  misc_RNA (1)...(19): siRNA sense strand
ugaccacacuucggaaaca

SEQ ID NO: 873577 - RNA, 19 nt, Homo sapiens
  misc_RNA (1)...(19): siRNA sense strand
aacaagcucuuccacuaca

SEQ ID NO: 873578 - RNA, 19 nt, Homo sapiens
  misc_RNA (1)...(19): siRNA sense strand
gcucggaaggacucacauu

SEQ ID NO: 873579 - RNA, 19 nt, Homo sapiens
  misc_RNA (1)...(19): siRNA sense strand
agaagcagauccgcuccuu

SEQ ID NO: 873580 - RNA, 19 nt, Homo sapiens
  misc_RNA (1)...(19): siRNA sense strand
acugcuaccuggagcuauu

SEQ ID NO: 873581 - RNA, 19 nt, Homo sapiens
  misc_RNA (1)...(19): siRNA sense strand
gagagcacgccuuccagau

SEQ ID NO: 873582 - RNA, 19 nt, Homo sapiens
  misc_RNA (1)...(19): siRNA sense strand
gaccacacuucggaaacau

SEQ ID NO: 873583 - RNA, 19 nt, Homo sapiens
  misc_RNA (1)...(19): siRNA sense strand
ccacacuucggaaacauca

SEQ ID NO: 873584 - RNA, 19 nt, Homo sapiens
  misc_RNA (1)...(19): siRNA sense strand
cagcacagccaggauguca

SEQ ID NO: 873585 - RNA, 19 nt, Homo sapiens
  misc_RNA (1)...(19): siRNA sense strand
ugucugugccugccucuga

SEQ ID NO: 873586 - RNA, 19 nt, Homo sapiens
  misc_RNA (1)...(19): siRNA sense strand
cgacugcuaccuggagcua

SEQ ID NO: 873587 - RNA, 19 nt, Homo sapiens
  misc_RNA (1)...(19): siRNA sense strand
uucccagggucgcagguua

SEQ ID NO: 873588 - RNA, 19 nt, Homo sapiens
  misc_RNA (1)...(19): siRNA sense strand
ucggaaggacucacauuuc

SEQ ID NO: 873589 - RNA, 19 nt, Homo sapiens
  misc_RNA (1)...(19): siRNA sense strand
ggagcagccauuccugagu

SEQ ID NO: 873590 - RNA, 19 nt, Homo sapiens
  misc_RNA (1)...(19): siRNA sense strand
caagaaaucugccuccuuu

SEQ ID NO: 873591 - RNA, 19 nt, Homo sapiens
  misc_RNA (1)...(19): siRNA sense strand
caaauuaaguuccacugua

SEQ ID NO: 873592 - RNA, 19 nt, Homo sapiens
  misc_RNA (1)...(19): siRNA sense strand
gcaagcagcugucucuaga

SEQ ID NO: 873593 - RNA, 19 nt, Homo sapiens
  misc_RNA (1)...(19): siRNA sense strand
gaaggcagagcuaucauua

SEQ ID NO: 873594 - RNA, 19 nt, Homo sapiens
  misc_RNA (1)...(19): siRNA sense strand
gaucgcagguuuccuaaga

SEQ ID NO: 873595 - RNA, 19 nt, Homo sapiens
  misc_RNA (1)...(19): siRNA sense strand
ccacaaagcccaagaaauc

SEQ ID NO: 873596 - RNA, 19 nt, Homo sapiens
  misc_RNA (1)...(19): siRNA sense strand
gaucaaccauguacaaauc

SEQ ID NO: 873597 - RNA, 19 nt, Homo sapiens
  misc_RNA (1)...(19): siRNA sense strand
ggagauggguccagcuaga

SEQ ID NO: 873598 - RNA, 19 nt, Homo sapiens
  misc_RNA (1)...(19): siRNA sense strand
gagagacccucccaaggaa

SEQ ID NO: 873599 - RNA, 19 nt, Homo sapiens
  misc_RNA (1)...(19): siRNA sense strand
ggaaagcagagaccuauga

SEQ ID NO: 873600 - RNA, 19 nt, Homo sapiens
  misc_RNA (1)...(19): siRNA sense strand
ggauugaagugacggagaa

SEQ ID NO: 873601 - RNA, 19 nt, Homo sapiens
  misc_RNA (1)...(19): siRNA sense strand
ggaagaagcccacagacau

SEQ ID NO: 873602 - RNA, 19 nt, Homo sapiens
  misc_RNA (1)...(19): siRNA sense strand
ccaaagaugcuaugaugaa

SEQ ID NO: 873603 - RNA, 19 nt, Homo sapiens
  misc_RNA (1)...(19): siRNA sense strand
gcagagaccuaugaguuca

SEQ ID NO: 873604 - RNA, 19 nt, Homo sapiens
  misc_RNA (1)...(19): siRNA sense strand
cagcagcucuggacgaaug

SEQ ID NO: 873605 - RNA, 19 nt, Homo sapiens
  misc_RNA (1)...(19): siRNA sense strand
gaagaaggcucagaaugcu

SEQ ID NO: 873606 - RNA, 19 nt, Homo sapiens
  misc_RNA (1)...(19): siRNA sense strand
gugacacucugaccuauga

SEQ ID NO: 873607 - RNA, 19 nt, Homo sapiens
  misc_RNA (1)...(19): siRNA sense strand
ggaaagaaacagucaugga

SEQ ID NO: 873608 - RNA, 19 nt, Homo sapiens
  misc_RNA (1)...(19): siRNA sense strand
cuuaguagaucgcagguuu

SEQ ID NO: 873609 - RNA, 19 nt, Homo sapiens
  misc_RNA (1)...(19): siRNA sense strand
guagaucgcagguuuccua

SEQ ID NO: 873610 - RNA, 19 nt, Homo sapiens
  misc_RNA (1)...(19): siRNA sense strand
ggacaguggugcuauagcu

SEQ ID NO: 873611 - RNA, 19 nt, Homo sapiens
  misc_RNA (1)...(19): siRNA sense strand
ggaaagaccgguggcagaa

SEQ ID NO: 873612 - RNA, 19 nt, Homo sapiens
  misc_RNA (1)...(19): siRNA sense strand
gagaagcaccuguaugaca

SEQ ID NO: 873613 - RNA, 19 nt, Homo sapiens
  misc_RNA (1)...(19): siRNA sense strand
gacccaaucugcucaccaa

SEQ ID NO: 873614 - RNA, 19 nt, Homo sapiens
  misc_RNA (1)...(19): siRNA sense strand
ggaggaaagccaacaggaa

SEQ ID NO: 873615 - RNA, 19 nt, Homo sapiens
  misc_RNA (1)...(19): siRNA sense strand
gaagaagguguaccacaug

SEQ ID NO: 873616 - RNA, 19 nt, Homo sapiens
  misc_RNA (1)...(19): siRNA sense strand
gaagaagcccacagacauc

SEQ ID NO: 873617 - RNA, 19 nt, Homo sapiens
  misc_RNA (1)...(19): siRNA sense strand
aaacggaggcuuccuacaa

SEQ ID NO: 873618 - RNA, 19 nt, Homo sapiens
  misc_RNA (1)...(19): siRNA sense strand
ggagaaggcagagcuauca

SEQ ID NO: 873619 - RNA, 19 nt, Homo sapiens
  misc_RNA (1)...(19): siRNA sense strand
uggcugagguuucuguuga

SEQ ID NO: 873620 - RNA, 19 nt, Homo sapiens
  misc_RNA (1)...(19): siRNA sense strand
ccacuaagcccagaacaga

SEQ ID NO: 873621 - RNA, 19 nt, Homo sapiens
  misc_RNA (1)...(19): siRNA sense strand
gcucgagggucgcagaugu

SEQ ID NO: 873622 - RNA, 19 nt, Homo sapiens
  misc_RNA (1)...(19): siRNA sense strand
aagaagcgaucaaccaugu

SEQ ID NO: 873623 - RNA, 19 nt, Homo sapiens
  misc_RNA (1)...(19): siRNA sense strand
gcagggcaccagccacuuu

SEQ ID NO: 873624 - RNA, 19 nt, Homo sapiens
  misc_RNA (1)...(19): siRNA sense strand
aagcagcccuuucugucua

SEQ ID NO: 873625 - RNA, 19 nt, Homo sapiens
  misc_RNA (1)...(19): siRNA sense strand
aaauuaaguuccacuguag

SEQ ID NO: 873626 - RNA, 19 nt, Homo sapiens
  misc_RNA (1)...(19): siRNA sense strand
ccaggaagaauuaggauau

SEQ ID NO: 873627 - RNA, 19 nt, Homo sapiens
  misc_RNA (1)...(19): siRNA sense strand
agaagaagguguaccacau

SEQ ID NO: 873628 - RNA, 19 nt, Homo sapiens
  misc_RNA (1)...(19): siRNA sense strand
acaaagaccaggaggacua

SEQ ID NO: 873629 - RNA, 19 nt, Homo sapiens
  misc_RNA (1)...(19): siRNA sense strand
cuccaaagaugcuaugaug

SEQ ID NO: 873630 - RNA, 19 nt, Homo sapiens
  misc_RNA (1)...(19): siRNA sense strand
gcaagaagcgaucaaccau

SEQ ID NO: 873631 - RNA, 19 nt, Homo sapiens
  misc_RNA (1)...(19): siRNA sense strand
caggaagagugaagaggaa

SEQ ID NO: 873632 - RNA, 19 nt, Homo sapiens
  misc_RNA (1)...(19): siRNA sense strand
gaaggagaagcaccuguau

SEQ ID NO: 873633 - RNA, 19 nt, Homo sapiens
  misc_RNA (1)...(19): siRNA sense strand
gagauugggcccaggaaga

SEQ ID NO: 873634 - RNA, 19 nt, Homo sapiens
  misc_RNA (1)...(19): siRNA sense strand
gaagcagguagagaucuua

SEQ ID NO: 873635 - RNA, 19 nt, Homo sapiens
  misc_RNA (1)...(19): siRNA sense strand
caaagggcaagaagagauu

SEQ ID NO: 873636 - RNA, 19 nt, Homo sapiens
  misc_RNA (1)...(19): siRNA sense strand
aggcagagcuaucauuagu

SEQ ID NO: 873637 - RNA, 19 nt, Homo sapiens
  misc_RNA (1)...(19): siRNA sense strand
ucagguacauggccacugu

SEQ ID NO: 873638 - RNA, 19 nt, Homo sapiens
  misc_RNA (1)...(19): siRNA sense strand
caaagaugcuaugaugaag

SEQ ID NO: 873639 - RNA, 19 nt, Homo sapiens
  misc_RNA (1)...(19): siRNA sense strand
aagcagagaccuaugaguu

SEQ ID NO: 873640 - RNA, 19 nt, Homo sapiens
  misc_RNA (1)...(19): siRNA sense strand
gcccuuugcuccacucuca

SEQ ID NO: 873641 - RNA, 19 nt, Homo sapiens
  misc_RNA (1)...(19): siRNA sense strand
ggacgaauggauugaagug

SEQ ID NO: 873642 - RNA, 19 nt, Homo sapiens
  misc_RNA (1)...(19): siRNA sense strand
ugaaggagaagcaccugua

SEQ ID NO: 873643 - RNA, 19 nt, Homo sapiens
  misc_RNA (1)...(19): siRNA sense strand
ugaagcagguagagaucuu

SEQ ID NO: 873644 - RNA, 19 nt, Homo sapiens
  misc_RNA (1)...(19): siRNA sense strand
cgccaaagccaaagaaaug

SEQ ID NO: 873645 - RNA, 19 nt, Homo sapiens
  misc_RNA (1)...(19): siRNA sense strand
ggaagaauuaggauaugau

SEQ ID NO: 873646 - RNA, 19 nt, Homo sapiens
  misc_RNA (1)...(19): siRNA sense strand
ugcaguaccugugccauaa

SEQ ID NO: 873647 - RNA, 19 nt, Homo sapiens
  misc_RNA (1)...(19): siRNA sense strand
gaaagaccgguggcagaaa

SEQ ID NO: 873648 - RNA, 19 nt, Homo sapiens
  misc_RNA (1)...(19): siRNA sense strand
gaaacagucauggaggaaa

SEQ ID NO: 873649 - RNA, 19 nt, Homo sapiens
  misc_RNA (1)...(19): siRNA sense strand
gaagcaggccuuggaguuc

SEQ ID NO: 873650 - RNA, 19 nt, Homo sapiens
  misc_RNA (1)...(19): siRNA sense strand
ggagggaugcucugcugaa

SEQ ID NO: 873651 - RNA, 19 nt, Homo sapiens
  misc_RNA (1)...(19): siRNA sense strand
aggagaagcaccuguauga

SEQ ID NO: 873652 - RNA, 19 nt, Homo sapiens
  misc_RNA (1)...(19): siRNA sense strand
cccagaaccucuacaucuu

SEQ ID NO: 873653 - RNA, 19 nt, Homo sapiens
  misc_RNA (1)...(19): siRNA sense strand
guuggugacucccacauca

SEQ ID NO: 873654 - RNA, 19 nt, Homo sapiens
  misc_RNA (1)...(19): siRNA sense strand
gaagugacggagaaagugu

SEQ ID NO: 873655 - RNA, 19 nt, Homo sapiens
  misc_RNA (1)...(19): siRNA sense strand
aagaugcuaugaugaagga

SEQ ID NO: 873656 - RNA, 19 nt, Homo sapiens
  misc_RNA (1)...(19): siRNA sense strand
aaacagucauggaggaaag

SEQ ID NO: 873657 - RNA, 19 nt, Homo sapiens
  misc_RNA (1)...(19): siRNA sense strand
agagagacccucccaagga

SEQ ID NO: 873658 - RNA, 19 nt, Homo sapiens
  misc_RNA (1)...(19): siRNA sense strand
gcaccuguaugacauucuc

SEQ ID NO: 873659 - RNA, 19 nt, Homo sapiens
  misc_RNA (1)...(19): siRNA sense strand
agaagcaccuguaugacau

SEQ ID NO: 873660 - RNA, 19 nt, Homo sapiens
  misc_RNA (1)...(19): siRNA sense strand
ggucacaaguguccaaacg

SEQ ID NO: 873661 - RNA, 19 nt, Homo sapiens
  misc_RNA (1)...(19): siRNA sense strand
gagggucgcagauguguuc

SEQ ID NO: 873662 - RNA, 19 nt, Homo sapiens
  misc_RNA (1)...(19): siRNA sense strand
ugaaggaggagcaguuguu

SEQ ID NO: 873663 - RNA, 19 nt, Homo sapiens
  misc_RNA (1)...(19): siRNA sense strand
ugaagaaggcucagaaugc

SEQ ID NO: 873664 - RNA, 19 nt, Homo sapiens
  misc_RNA (1)...(19): siRNA sense strand
gggaagaagcccacagaca

SEQ ID NO: 873665 - RNA, 19 nt, Homo sapiens
  misc_RNA (1)...(19): siRNA sense strand
gcccagaaccucuacaucu

SEQ ID NO: 873666 - RNA, 19 nt, Homo sapiens
  misc_RNA (1)...(19): siRNA sense strand
aaagaccgguggcagaaag

SEQ ID NO: 873667 - RNA, 19 nt, Homo sapiens
  misc_RNA (1)...(19): siRNA sense strand
caggaagaauuaggauaug

SEQ ID NO: 873668 - RNA, 19 nt, Homo sapiens
  misc_RNA (1)...(19): siRNA sense strand
gcaaaugcaggcgaccaaa

SEQ ID NO: 873669 - RNA, 19 nt, Homo sapiens
  misc_RNA (1)...(19): siRNA sense strand
gaaggaggagcaguuguuc

SEQ ID NO: 873670 - RNA, 19 nt, Homo sapiens
  misc_RNA (1)...(19): siRNA sense strand
ugaagcaggccuuggaguu

SEQ ID NO: 873671 - RNA, 19 nt, Homo sapiens
  misc_RNA (1)...(19): siRNA sense strand
ccaaagggcaagaagagau

SEQ ID NO: 873672 - RNA, 19 nt, Homo sapiens
  misc_RNA (1)...(19): siRNA sense strand
cuacccagcucucagacau

SEQ ID NO: 873673 - RNA, 19 nt, Homo sapiens
  misc_RNA (1)...(19): siRNA sense strand
gagagugccugagcagcau

SEQ ID NO: 873674 - RNA, 19 nt, Homo sapiens
  misc_RNA (1)...(19): siRNA sense strand
gauccaaagggcaagaaga

SEQ ID NO: 873675 - RNA, 19 nt, Homo sapiens
  misc_RNA (1)...(19): siRNA sense strand
gaagcaccuguaugacauu

SEQ ID NO: 873676 - RNA, 19 nt, Homo sapiens
  misc_RNA (1)...(19): siRNA sense strand
gaagcgaucaaccauguac

SEQ ID NO: 873677 - RNA, 19 nt, Homo sapiens
  misc_RNA (1)...(19): siRNA sense strand
gccauaaguacaucuucua

SEQ ID NO: 873678 - RNA, 19 nt, Homo sapiens
  misc_RNA (1)...(19): siRNA sense strand
gaaagcagagaccuaugag

SEQ ID NO: 873679 - RNA, 19 nt, Homo sapiens
  misc_RNA (1)...(19): siRNA sense strand
ccaaucugcucaccaaagc

SEQ ID NO: 873680 - RNA, 19 nt, Homo sapiens
  misc_RNA (1)...(19): siRNA sense strand
ggcagcagcggcagaagaa

SEQ ID NO: 873681 - RNA, 19 nt, Homo sapiens
  misc_RNA (1)...(19): siRNA sense strand
cuacaggucaggcagaaga

SEQ ID NO: 873682 - RNA, 19 nt, Homo sapiens
  misc_RNA (1)...(19): siRNA sense strand
aagaaaaggucacaagugu

SEQ ID NO: 873683 - RNA, 19 nt, Homo sapiens
  misc_RNA (1)...(19): siRNA sense strand
gccaaagaaaugcaaguug

SEQ ID NO: 873684 - RNA, 19 nt, Homo sapiens
  misc_RNA (1)...(19): siRNA sense strand
ugaguucaguggaguuuac

SEQ ID NO: 873685 - RNA, 19 nt, Homo sapiens
  misc_RNA (1)...(19): siRNA sense strand
gcaggagcaucaggagaag

SEQ ID NO: 873686 - RNA, 19 nt, Homo sapiens
  misc_RNA (1)...(19): siRNA sense strand
acccagcucucagacauuu

SEQ ID NO: 873687 - RNA, 19 nt, Homo sapiens
  misc_RNA (1)...(19): siRNA sense strand
gaugaaggaggagcaguug

SEQ ID NO: 873688 - RNA, 19 nt, Homo sapiens
  misc_RNA (1)...(19): siRNA sense strand
gcucaagaggauauuucua

SEQ ID NO: 873689 - RNA, 19 nt, Homo sapiens
  misc_RNA (1)...(19): siRNA sense strand
aggaagaauuaggauauga

SEQ ID NO: 873690 - RNA, 19 nt, Homo sapiens
  misc_RNA (1)...(19): siRNA sense strand
ugacagauauggcugauua

SEQ ID NO: 873691 - RNA, 19 nt, Homo sapiens
  misc_RNA (1)...(19): siRNA sense strand
gcacagagcagcaugauuu

SEQ ID NO: 873692 - RNA, 19 nt, Homo sapiens
  misc_RNA (1)...(19): siRNA sense strand
ucacagagauggacaacaa

SEQ ID NO: 873693 - RNA, 19 nt, Homo sapiens
  misc_RNA (1)...(19): siRNA sense strand
uaaagacgcuagccaaaga

SEQ ID NO: 873694 - RNA, 19 nt, Homo sapiens
  misc_RNA (1)...(19): siRNA sense strand
uagagaagcuauucaaaga

SEQ ID NO: 873695 - RNA, 19 nt, Homo sapiens
  misc_RNA (1)...(19): siRNA sense strand
gagcaggacuggcagaaga

SEQ ID NO: 873696 - RNA, 19 nt, Homo sapiens
  misc_RNA (1)...(19): siRNA sense strand
gagacaaccuggugcauau

SEQ ID NO: 873697 - RNA, 19 nt, Homo sapiens
  misc_RNA (1)...(19): siRNA sense strand
gcacaggucagcaugauuu

SEQ ID NO: 873698 - RNA, 19 nt, Homo sapiens
  misc_RNA (1)...(19): siRNA sense strand
gguccaaccuggcagauuu

SEQ ID NO: 873699 - RNA, 19 nt, Homo sapiens
  misc_RNA (1)...(19): siRNA sense strand
ccacagagcgcccagauuu

SEQ ID NO: 873700 - RNA, 19 nt, Homo sapiens
  misc_RNA (1)...(19): siRNA sense strand
cagaaacacuuaugggauu

SEQ ID NO: 873701 - RNA, 19 nt, Homo sapiens
  misc_RNA (1)...(19): siRNA sense strand
gaccauaccuccugaacug

SEQ ID NO: 873702 - RNA, 19 nt, Homo sapiens
  misc_RNA (1)...(19): siRNA sense strand
gagaagcuauucaaagauc

SEQ ID NO: 873703 - RNA, 19 nt, Homo sapiens
  misc_RNA (1)...(19): siRNA sense strand
gguacaaccuggugcauau

SEQ ID NO: 873704 - RNA, 19 nt, Homo sapiens
  misc_RNA (1)...(19): siRNA sense strand
gaauggaucaguaugguuu

SEQ ID NO: 873705 - RNA, 19 nt, Homo sapiens
  misc_RNA (1)...(19): siRNA sense strand
ggagcgaagucucgaguga

SEQ ID NO: 873706 - RNA, 19 nt, Homo sapiens
  misc_RNA (1)...(19): siRNA sense strand
gcaacuggcuucauacaac

SEQ ID NO: 873707 - RNA, 19 nt, Homo sapiens
  misc_RNA (1)...(19): siRNA sense strand
gaauggaucagucugguuu

SEQ ID NO: 873708 - RNA, 19 nt, Homo sapiens
  misc_RNA (1)...(19): siRNA sense strand
gaauggaucagucugguuu

SEQ ID NO: 873709 - RNA, 19 nt, Homo sapiens
  misc_RNA (1)...(19): siRNA sense strand
guagagaucagcaugguuu

SEQ ID NO: 873710 - RNA, 19 nt, Homo sapiens
  misc_RNA (1)...(19): siRNA sense strand
gagcagguccggcagcaua

SEQ ID NO: 873711 - RNA, 19 nt, Homo sapiens
  misc_RNA (1)...(19): siRNA sense strand
ggaagggaaucaagaagca

SEQ ID NO: 873712 - RNA, 19 nt, Homo sapiens
  misc_RNA (1)...(19): siRNA sense strand
guggagacauuucaucuga

SEQ ID NO: 873713 - RNA, 19 nt, Homo sapiens
  misc_RNA (1)...(19): siRNA sense strand
cgagugaaguccugaguga

SEQ ID NO: 873714 - RNA, 19 nt, Homo sapiens
  misc_RNA (1)...(19): siRNA sense strand
ggugcaaccugguauaguu

SEQ ID NO: 873715 - RNA, 19 nt, Homo sapiens
  misc_RNA (1)...(19): siRNA sense strand
gcagagaccagcaaggauu

SEQ ID NO: 873716 - RNA, 19 nt, Homo sapiens
  misc_RNA (1)...(19): siRNA sense strand
ucaaagaucgggagcaauu

SEQ ID NO: 873717 - RNA, 19 nt, Homo sapiens
  misc_RNA (1)...(19): siRNA sense strand
caccguggcugacauagaa

SEQ ID NO: 873718 - RNA, 19 nt, Homo sapiens
  misc_RNA (1)...(19): siRNA sense strand
gauccaaccuggugcagau

SEQ ID NO: 873719 - RNA, 19 nt, Homo sapiens
  misc_RNA (1)...(19): siRNA sense strand
gguccaaccuggugcaguu

SEQ ID NO: 873720 - RNA, 19 nt, Homo sapiens
  misc_RNA (1)...(19): siRNA sense strand
gguacaaccuggugccuau

SEQ ID NO: 873721 - RNA, 19 nt, Homo sapiens
  misc_RNA (1)...(19): siRNA sense strand
ggcacaaccuggugaaguu

SEQ ID NO: 873722 - RNA, 19 nt, Homo sapiens
  misc_RNA (1)...(19): siRNA sense strand
gaucagcguggauguguaa

SEQ ID NO: 873723 - RNA, 19 nt, Homo sapiens
  misc_RNA (1)...(19): siRNA sense strand
acaaacgggugacagauau

SEQ ID NO: 873724 - RNA, 19 nt, Homo sapiens
  misc_RNA (1)...(19): siRNA sense strand
ccaagaugcugaugaacau

SEQ ID NO: 873725 - RNA, 19 nt, Homo sapiens
  misc_RNA (1)...(19): siRNA sense strand
uaaaggagaguaugaagga

SEQ ID NO: 873726 - RNA, 19 nt, Homo sapiens
  misc_RNA (1)...(19): siRNA sense strand
gcagcuggguguccucaga

SEQ ID NO: 873727 - RNA, 19 nt, Homo sapiens
  misc_RNA (1)...(19): siRNA sense strand
cagcguggauguguaauau

SEQ ID NO: 873728 - RNA, 19 nt, Homo sapiens
  misc_RNA (1)...(19): siRNA sense strand
ggacauugcuaugcuguac

SEQ ID NO: 873729 - RNA, 19 nt, Homo sapiens
  misc_RNA (1)...(19): siRNA sense strand
guacguccauaucaacaug

SEQ ID NO: 873730 - RNA, 19 nt, Homo sapiens
  misc_RNA (1)...(19): siRNA sense strand
ggaauaggucagcaaggua

SEQ ID NO: 873731 - RNA, 19 nt, Homo sapiens
  misc_RNA (1)...(19): siRNA sense strand
gcguggauguguaauauca

SEQ ID NO: 873732 - RNA, 19 nt, Homo sapiens
  misc_RNA (1)...(19): siRNA sense strand
gaauaggucagcaagguau

SEQ ID NO: 873733 - RNA, 19 nt, Homo sapiens
  misc_RNA (1)...(19): siRNA sense strand
gaccgagucuuaucagaag

SEQ ID NO: 873734 - RNA, 19 nt, Homo sapiens
  misc_RNA (1)...(19): siRNA sense strand
gggaauugauaccauuugu

SEQ ID NO: 873735 - RNA, 19 nt, Homo sapiens
  misc_RNA (1)...(19): siRNA sense strand
ggcaucaccugguauagau

SEQ ID NO: 873736 - RNA, 19 nt, Homo sapiens
  misc_RNA (1)...(19): siRNA sense strand
gugcagaucagcaugguuu

SEQ ID NO: 873737 - RNA, 19 nt, Homo sapiens
  misc_RNA (1)...(19): siRNA sense strand
gugcagaucagcaugguuu

SEQ ID NO: 873738 - RNA, 19 nt, Homo sapiens
  misc_RNA (1)...(19): siRNA sense strand
gugcagaucagcaagguuu

SEQ ID NO: 873739 - RNA, 19 nt, Homo sapiens
  misc_RNA (1)...(19): siRNA sense strand
gcgagaagcucaacaucac

SEQ ID NO: 873740 - RNA, 19 nt, Homo sapiens
  misc_RNA (1)...(19): siRNA sense strand
gggagcaccuggagaugga

SEQ ID NO: 873741 - RNA, 19 nt, Homo sapiens
  misc_RNA (1)...(19): siRNA sense strand
gcacagaccaacgcaguau

SEQ ID NO: 873742 - RNA, 19 nt, Homo sapiens
  misc_RNA (1)...(19): siRNA sense strand
gauuacaccuacucaacug

SEQ ID NO: 873743 - RNA, 19 nt, Homo sapiens
  misc_RNA (1)...(19): siRNA sense strand
ggaaaauucugucucugaa

SEQ ID NO: 873744 - RNA, 19 nt, Homo sapiens
  misc_RNA (1)...(19): siRNA sense strand
aaaaggagcuggccgaguu

SEQ ID NO: 873745 - RNA, 19 nt, Homo sapiens
  misc_RNA (1)...(19): siRNA sense strand
gguccaaccuggugcagau

SEQ ID NO: 873746 - RNA, 19 nt, Homo sapiens
  misc_RNA (1)...(19): siRNA sense strand
gguccaaccuggugcagau

SEQ ID NO: 873747 - RNA, 19 nt, Homo sapiens
  misc_RNA (1)...(19): siRNA sense strand
gguccaaccuggugcagau

SEQ ID NO: 873748 - RNA, 19 nt, Homo sapiens
  misc_RNA (1)...(19): siRNA sense strand
ggucuggccuggaauggau

SEQ ID NO: 873749 - RNA, 19 nt, Homo sapiens
  misc_RNA (1)...(19): siRNA sense strand
gguccaaccuggugcagau

SEQ ID NO: 873750 - RNA, 19 nt, Homo sapiens
  misc_RNA (1)...(19): siRNA sense strand
gaucgggaauugauaccau

SEQ ID NO: 873751 - RNA, 19 nt, Homo sapiens
  misc_RNA (1)...(19): siRNA sense strand
ggaucaguaugguuugaga

SEQ ID NO: 873752 - RNA, 19 nt, Homo sapiens
  misc_RNA (1)...(19): siRNA sense strand
gugcagaucagccugguuu

SEQ ID NO: 873753 - RNA, 19 nt, Homo sapiens
  misc_RNA (1)...(19): siRNA sense strand
cagaagaagucaccauggu

SEQ ID NO: 873754 - RNA, 19 nt, Homo sapiens
  misc_RNA (1)...(19): siRNA sense strand
guauagaccagcaaggauu

SEQ ID NO: 873755 - RNA, 19 nt, Homo sapiens
  misc_RNA (1)...(19): siRNA sense strand
gcuaugagcaacuccaaga

SEQ ID NO: 873756 - RNA, 19 nt, Homo sapiens
  misc_RNA (1)...(19): siRNA sense strand
uggaaaggcugcagaggau

SEQ ID NO: 873757 - RNA, 19 nt, Homo sapiens
  misc_RNA (1)...(19): siRNA sense strand
gaccagguauacccagaug

SEQ ID NO: 873758 - RNA, 19 nt, Homo sapiens
  misc_RNA (1)...(19): siRNA sense strand
caacauggccugguucuac

SEQ ID NO: 873759 - RNA, 19 nt, Homo sapiens
  misc_RNA (1)...(19): siRNA sense strand
gaacuagagaagcuauuca

SEQ ID NO: 873760 - RNA, 19 nt, Homo sapiens
  misc_RNA (1)...(19): siRNA sense strand
caacaccucagaaagauag

SEQ ID NO: 873761 - RNA, 19 nt, Homo sapiens
  misc_RNA (1)...(19): siRNA sense strand
ggaucagcguggaugugua

SEQ ID NO: 873762 - RNA, 19 nt, Homo sapiens
  misc_RNA (1)...(19): siRNA sense strand
ggcaacaccucagaaagau

SEQ ID NO: 873763 - RNA, 19 nt, Homo sapiens
  misc_RNA (1)...(19): siRNA sense strand
guaugaaggaucuggauga

SEQ ID NO: 873764 - RNA, 19 nt, Homo sapiens
  misc_RNA (1)...(19): siRNA sense strand
gccagaucgucguggguua

SEQ ID NO: 873765 - RNA, 19 nt, Homo sapiens
  misc_RNA (1)...(19): siRNA sense strand
gcaacaccucagaaagaua

SEQ ID NO: 873766 - RNA, 19 nt, Homo sapiens
  misc_RNA (1)...(19): siRNA sense strand
gguuuggcaucaccuggua

SEQ ID NO: 873767 - RNA, 19 nt, Homo sapiens
  misc_RNA (1)...(19): siRNA sense strand
caacauuccaggcagauuc

SEQ ID NO: 873768 - RNA, 19 nt, Homo sapiens
  misc_RNA (1)...(19): siRNA sense strand
gaguggaucagcaugguuu

SEQ ID NO: 873769 - RNA, 19 nt, Homo sapiens
  misc_RNA (1)...(19): siRNA sense strand
gugcauaucagcaugguau

SEQ ID NO: 873770 - RNA, 19 nt, Homo sapiens
  misc_RNA (1)...(19): siRNA sense strand
agaaccaacuggcaugaau

SEQ ID NO: 873771 - RNA, 19 nt, Homo sapiens
  misc_RNA (1)...(19): siRNA sense strand
ccaucagucuucuacauuc

SEQ ID NO: 873772 - RNA, 19 nt, Homo sapiens
  misc_RNA (1)...(19): siRNA sense strand
aaacagaaggacauugcua

SEQ ID NO: 873773 - RNA, 19 nt, Homo sapiens
  misc_RNA (1)...(19): siRNA sense strand
caaaccgacuuggagaaga

SEQ ID NO: 873774 - RNA, 19 nt, Homo sapiens
  misc_RNA (1)...(19): siRNA sense strand
gaaguucagcguaguuugg

SEQ ID NO: 873775 - RNA, 19 nt, Homo sapiens
  misc_RNA (1)...(19): siRNA sense strand
cgacacaaccaagaagaaa

SEQ ID NO: 873776 - RNA, 19 nt, Homo sapiens
  misc_RNA (1)...(19): siRNA sense strand
gguuuggucuggccuggaa

SEQ ID NO: 873777 - RNA, 19 nt, Homo sapiens
  misc_RNA (1)...(19): siRNA sense strand
agauggagaucgaugugaa

SEQ ID NO: 873778 - RNA, 19 nt, Homo sapiens
  misc_RNA (1)...(19): siRNA sense strand
gacaagcucaggaugauca

SEQ ID NO: 873779 - RNA, 19 nt, Homo sapiens
  misc_RNA (1)...(19): siRNA sense strand
aaaccgacuuggagaagau

SEQ ID NO: 873780 - RNA, 19 nt, Homo sapiens
  misc_RNA (1)...(19): siRNA sense strand
gugccuauccucuugguuu

SEQ ID NO: 873781 - RNA, 19 nt, Homo sapiens
  misc_RNA (1)...(19): siRNA sense strand
ggaggguucacuuccuuaa

SEQ ID NO: 873782 - RNA, 19 nt, Homo sapiens
  misc_RNA (1)...(19): siRNA sense strand
ggaucagcgugguuugguu

SEQ ID NO: 873783 - RNA, 19 nt, Homo sapiens
  misc_RNA (1)...(19): siRNA sense strand
agaaacacuuaugggauuu

SEQ ID NO: 873784 - RNA, 19 nt, Homo sapiens
  misc_RNA (1)...(19): siRNA sense strand
gacgcuagccaaagaaguu

SEQ ID NO: 873785 - RNA, 19 nt, Homo sapiens
  misc_RNA (1)...(19): siRNA sense strand
gggcuaaaggagaguauga

SEQ ID NO: 873786 - RNA, 19 nt, Homo sapiens
  misc_RNA (1)...(19): siRNA sense strand
ggugcaaccuggaguggau

SEQ ID NO: 873787 - RNA, 19 nt, Homo sapiens
  misc_RNA (1)...(19): siRNA sense strand
gcagaaacagaaggacauu

SEQ ID NO: 873788 - RNA, 19 nt, Homo sapiens
  misc_RNA (1)...(19): siRNA sense strand
uacaaacgggugacagaua

SEQ ID NO: 873789 - RNA, 19 nt, Homo sapiens
  misc_RNA (1)...(19): siRNA sense strand
ggcagcuccuggcacauuu

SEQ ID NO: 873790 - RNA, 19 nt, Homo sapiens
  misc_RNA (1)...(19): siRNA sense strand
uaacauaccucgugccaaa

SEQ ID NO: 873791 - RNA, 19 nt, Homo sapiens
  misc_RNA (1)...(19): siRNA sense strand
aaacggagaucccuaauug

SEQ ID NO: 873792 - RNA, 19 nt, Homo sapiens
  misc_RNA (1)...(19): siRNA sense strand
ccacucagcuggucaguuu

SEQ ID NO: 873793 - RNA, 19 nt, Homo sapiens
  misc_RNA (1)...(19): siRNA sense strand
gcauuaaacucaaagauuc

SEQ ID NO: 873794 - RNA, 19 nt, Homo sapiens
  misc_RNA (1)...(19): siRNA sense strand
gaacaggauuaaauuagga

SEQ ID NO: 873795 - RNA, 19 nt, Homo sapiens
  misc_RNA (1)...(19): siRNA sense strand
gaaagauauuggugugaaa

SEQ ID NO: 873796 - RNA, 19 nt, Homo sapiens
  misc_RNA (1)...(19): siRNA sense strand
gcacgaggcugugauugaa

SEQ ID NO: 873797 - RNA, 19 nt, Homo sapiens
  misc_RNA (1)...(19): siRNA sense strand
ugaaggcucugguuuacua

SEQ ID NO: 873798 - RNA, 19 nt, Homo sapiens
  misc_RNA (1)...(19): siRNA sense strand
gaacaucgccucuuuccau

SEQ ID NO: 873799 - RNA, 19 nt, Homo sapiens
  misc_RNA (1)...(19): siRNA sense strand
gagggacucucaccugaaa

SEQ ID NO: 873800 - RNA, 19 nt, Homo sapiens
  misc_RNA (1)...(19): siRNA sense strand
caaggaagccucucugcua

SEQ ID NO: 873801 - RNA, 19 nt, Homo sapiens
  misc_RNA (1)...(19): siRNA sense strand
gauacugccugaccucauu

SEQ ID NO: 873802 - RNA, 19 nt, Homo sapiens
  misc_RNA (1)...(19): siRNA sense strand
ggaguucagcuuuaacaua

SEQ ID NO: 873803 - RNA, 19 nt, Homo sapiens
  misc_RNA (1)...(19): siRNA sense strand
gagauuauggcaagagaua

SEQ ID NO: 873804 - RNA, 19 nt, Homo sapiens
  misc_RNA (1)...(19): siRNA sense strand
ugaagugucuguuagauuc

SEQ ID NO: 873805 - RNA, 19 nt, Homo sapiens
  misc_RNA (1)...(19): siRNA sense strand
gaaacacgccccucauuua

SEQ ID NO: 873806 - RNA, 19 nt, Homo sapiens
  misc_RNA (1)...(19): siRNA sense strand
gagccuccgucaccacaua

SEQ ID NO: 873807 - RNA, 19 nt, Homo sapiens
  misc_RNA (1)...(19): siRNA sense strand
gauagaagugucccuaauu

SEQ ID NO: 873808 - RNA, 19 nt, Homo sapiens
  misc_RNA (1)...(19): siRNA sense strand
ugauggagaucuagaaaug

SEQ ID NO: 873809 - RNA, 19 nt, Homo sapiens
  misc_RNA (1)...(19): siRNA sense strand
ucaaagauucugucuguaa

SEQ ID NO: 873810 - RNA, 19 nt, Homo sapiens
  misc_RNA (1)...(19): siRNA sense strand
cgaaugcucucuacaccaa

SEQ ID NO: 873811 - RNA, 19 nt, Homo sapiens
  misc_RNA (1)...(19): siRNA sense strand
cauuaacgcuucuaacaau

SEQ ID NO: 873812 - RNA, 19 nt, Homo sapiens
  misc_RNA (1)...(19): siRNA sense strand
caaagauucugucuguaau

SEQ ID NO: 873813 - RNA, 19 nt, Homo sapiens
  misc_RNA (1)...(19): siRNA sense strand
aaaccggaguucagcuuua

SEQ ID NO: 873814 - RNA, 19 nt, Homo sapiens
  misc_RNA (1)...(19): siRNA sense strand
auagaagugucccuaauuu

SEQ ID NO: 873815 - RNA, 19 nt, Homo sapiens
  misc_RNA (1)...(19): siRNA sense strand
uuucagaccuuaaauggaa

SEQ ID NO: 873816 - RNA, 19 nt, Homo sapiens
  misc_RNA (1)...(19): siRNA sense strand
ggaauugcuucagguggua

SEQ ID NO: 873817 - RNA, 19 nt, Homo sapiens
  misc_RNA (1)...(19): siRNA sense strand
gcgcacggcuguagacugu

SEQ ID NO: 873818 - RNA, 19 nt, Homo sapiens
  misc_RNA (1)...(19): siRNA sense strand
gaguucagcuuuaacauac

SEQ ID NO: 873819 - RNA, 19 nt, Homo sapiens
  misc_RNA (1)...(19): siRNA sense strand
ggaacaggauuaaauuagg

SEQ ID NO: 873820 - RNA, 19 nt, Homo sapiens
  misc_RNA (1)...(19): siRNA sense strand
acaggaacaucgccucuuu

SEQ ID NO: 873821 - RNA, 19 nt, Homo sapiens
  misc_RNA (1)...(19): siRNA sense strand
caagggaacaggauuaaau

SEQ ID NO: 873822 - RNA, 19 nt, Homo sapiens
  misc_RNA (1)...(19): siRNA sense strand
agaagugucccuaauuuaa

SEQ ID NO: 873823 - RNA, 19 nt, Homo sapiens
  misc_RNA (1)...(19): siRNA sense strand
uggcucagcugaacaaaug

SEQ ID NO: 873824 - RNA, 19 nt, Homo sapiens
  misc_RNA (1)...(19): siRNA sense strand
agauauacguccaucauga

SEQ ID NO: 873825 - RNA, 19 nt, Homo sapiens
  misc_RNA (1)...(19): siRNA sense strand
gccaagaggaccaugauaa

SEQ ID NO: 873826 - RNA, 19 nt, Homo sapiens
  misc_RNA (1)...(19): siRNA sense strand
aaacugaccgcaaggagua

SEQ ID NO: 873827 - RNA, 19 nt, Homo sapiens
  misc_RNA (1)...(19): siRNA sense strand
gcagcaaaguggcccaaau

SEQ ID NO: 873828 - RNA, 19 nt, Homo sapiens
  misc_RNA (1)...(19): siRNA sense strand
ggauggcaaauuugaguua

SEQ ID NO: 873829 - RNA, 19 nt, Homo sapiens
  misc_RNA (1)...(19): siRNA sense strand
acucaaagauucugucugu

SEQ ID NO: 873830 - RNA, 19 nt, Homo sapiens
  misc_RNA (1)...(19): siRNA sense strand
ccaagaggaccaugauaaa

SEQ ID NO: 873831 - RNA, 19 nt, Homo sapiens
  misc_RNA (1)...(19): siRNA sense strand
ccacauagacucagcgaau

SEQ ID NO: 873832 - RNA, 19 nt, Homo sapiens
  misc_RNA (1)...(19): siRNA sense strand
uaucaguccuguuauacuu

SEQ ID NO: 873833 - RNA, 19 nt, Homo sapiens
  misc_RNA (1)...(19): siRNA sense strand
ccagucuacuugucaguuu

SEQ ID NO: 873834 - RNA, 19 nt, Homo sapiens
  misc_RNA (1)...(19): siRNA sense strand
gaaggacuacagagaggua

SEQ ID NO: 873835 - RNA, 19 nt, Homo sapiens
  misc_RNA (1)...(19): siRNA sense strand
auacguccaucaugaaauu

SEQ ID NO: 873836 - RNA, 19 nt, Homo sapiens
  misc_RNA (1)...(19): siRNA sense strand
gaagcaggcaguggagaua

SEQ ID NO: 873837 - RNA, 19 nt, Homo sapiens
  misc_RNA (1)...(19): siRNA sense strand
gaagcugccauugaauaua

SEQ ID NO: 873838 - RNA, 19 nt, Homo sapiens
  misc_RNA (1)...(19): siRNA sense strand
guaugucacuguuaagauc

SEQ ID NO: 873839 - RNA, 19 nt, Homo sapiens
  misc_RNA (1)...(19): siRNA sense strand
caaggaguaugucacuguu

SEQ ID NO: 873840 - RNA, 19 nt, Homo sapiens
  misc_RNA (1)...(19): siRNA sense strand
aaggaagccucucugcuaa

SEQ ID NO: 873841 - RNA, 19 nt, Homo sapiens
  misc_RNA (1)...(19): siRNA sense strand
gagagagaguucagaagag

SEQ ID NO: 873842 - RNA, 19 nt, Homo sapiens
  misc_RNA (1)...(19): siRNA sense strand
agaaggaccucaguggaaa

SEQ ID NO: 873843 - RNA, 19 nt, Homo sapiens
  misc_RNA (1)...(19): siRNA sense strand
gauucugucuguaauggaa

SEQ ID NO: 873844 - RNA, 19 nt, Homo sapiens
  misc_RNA (1)...(19): siRNA sense strand
aagcugccauugaauauau

SEQ ID NO: 873845 - RNA, 19 nt, Homo sapiens
  misc_RNA (1)...(19): siRNA sense strand
ggaugcggccuuuaacaaa

SEQ ID NO: 873846 - RNA, 19 nt, Homo sapiens
  misc_RNA (1)...(19): siRNA sense strand
agaaagauauuggugugaa

SEQ ID NO: 873847 - RNA, 19 nt, Homo sapiens
  misc_RNA (1)...(19): siRNA sense strand
gcaaggaguaugucacugu

SEQ ID NO: 873848 - RNA, 19 nt, Homo sapiens
  misc_RNA (1)...(19): siRNA sense strand
caaaggaugaacugggaua

SEQ ID NO: 873849 - RNA, 19 nt, Homo sapiens
  misc_RNA (1)...(19): siRNA sense strand
ccaaauccauggcauuguc

SEQ ID NO: 873850 - RNA, 19 nt, Homo sapiens
  misc_RNA (1)...(19): siRNA sense strand
ccauggcauugucuuagua

SEQ ID NO: 873851 - RNA, 19 nt, Homo sapiens
  misc_RNA (1)...(19): siRNA sense strand
ccauguggcugcugucugu

SEQ ID NO: 873852 - RNA, 19 nt, Homo sapiens
  misc_RNA (1)...(19): siRNA sense strand
gaagacacuccgagcgauu

SEQ ID NO: 873853 - RNA, 19 nt, Homo sapiens
  misc_RNA (1)...(19): siRNA sense strand
uagaagugucccuaauuua

SEQ ID NO: 873854 - RNA, 19 nt, Homo sapiens
  misc_RNA (1)...(19): siRNA sense strand
aggaguaugucacuguuaa

SEQ ID NO: 873855 - RNA, 19 nt, Homo sapiens
  misc_RNA (1)...(19): siRNA sense strand
ccaagaaggacuacagaga

SEQ ID NO: 873856 - RNA, 19 nt, Homo sapiens
  misc_RNA (1)...(19): siRNA sense strand
caaaguggcccaaauccau

SEQ ID NO: 873857 - RNA, 19 nt, Homo sapiens
  misc_RNA (1)...(19): siRNA sense strand
gcgcggaagugcaggacaa

SEQ ID NO: 873858 - RNA, 19 nt, Homo sapiens
  misc_RNA (1)...(19): siRNA sense strand
ugauaaagauaccguccaa

SEQ ID NO: 873859 - RNA, 19 nt, Homo sapiens
  misc_RNA (1)...(19): siRNA sense strand
gaccaugugugcugaugau

SEQ ID NO: 873860 - RNA, 19 nt, Homo sapiens
  misc_RNA (1)...(19): siRNA sense strand
gaaaccggaguucagcuuu

SEQ ID NO: 873861 - RNA, 19 nt, Homo sapiens
  misc_RNA (1)...(19): siRNA sense strand
gauauacguccaucaugaa

SEQ ID NO: 873862 - RNA, 19 nt, Homo sapiens
  misc_RNA (1)...(19): siRNA sense strand
ggagauauacguccaucau

SEQ ID NO: 873863 - RNA, 19 nt, Homo sapiens
  misc_RNA (1)...(19): siRNA sense strand
agaagaggcuggcgaaggu

SEQ ID NO: 873864 - RNA, 19 nt, Homo sapiens
  misc_RNA (1)...(19): siRNA sense strand
auucgaagcugccauugaa

SEQ ID NO: 873865 - RNA, 19 nt, Homo sapiens
  misc_RNA (1)...(19): siRNA sense strand
gcaaauuugaguuacauca

SEQ ID NO: 873866 - RNA, 19 nt, Homo sapiens
  misc_RNA (1)...(19): siRNA sense strand
caguuugaguccuacauuu

SEQ ID NO: 873867 - RNA, 19 nt, Homo sapiens
  misc_RNA (1)...(19): siRNA sense strand
uucaagaucuucagcagaa

SEQ ID NO: 873868 - RNA, 19 nt, Homo sapiens
  misc_RNA (1)...(19): siRNA sense strand
agaaagaaguggagagacu

SEQ ID NO: 873869 - RNA, 19 nt, Homo sapiens
  misc_RNA (1)...(19): siRNA sense strand
gagauagaagugucccuaa

SEQ ID NO: 873870 - RNA, 19 nt, Homo sapiens
  misc_RNA (1)...(19): siRNA sense strand
uuaguacccugcaaaggaa

SEQ ID NO: 873871 - RNA, 19 nt, Homo sapiens
  misc_RNA (1)...(19): siRNA sense strand
gggaacaggauuaaauuag

SEQ ID NO: 873872 - RNA, 19 nt, Homo sapiens
  misc_RNA (1)...(19): siRNA sense strand
ugaaugaucccucaguugu

SEQ ID NO: 873873 - RNA, 19 nt, Homo sapiens
  misc_RNA (1)...(19): siRNA sense strand
ggaagccucucugcuaaac

SEQ ID NO: 873874 - RNA, 19 nt, Homo sapiens
  misc_RNA (1)...(19): siRNA sense strand
gagugaaccuggagaccau

SEQ ID NO: 873875 - RNA, 19 nt, Homo sapiens
  misc_RNA (1)...(19): siRNA sense strand
aaggaugucuuuauucaag

SEQ ID NO: 873876 - RNA, 19 nt, Homo sapiens
  misc_RNA (1)...(19): siRNA sense strand
gagcuuacucucucagaug

SEQ ID NO: 873877 - RNA, 19 nt, Homo sapiens
  misc_RNA (1)...(19): siRNA sense strand
gugaggaugcggccuuuaa

SEQ ID NO: 873878 - RNA, 19 nt, Homo sapiens
  misc_RNA (1)...(19): siRNA sense strand
guguauagcccauccuuug

SEQ ID NO: 873879 - RNA, 19 nt, Homo sapiens
  misc_RNA (1)...(19): siRNA sense strand
guugaaugaucccucaguu

SEQ ID NO: 873880 - RNA, 19 nt, Homo sapiens
  misc_RNA (1)...(19): siRNA sense strand
gggagauuauggcaagaga

SEQ ID NO: 873881 - RNA, 19 nt, Homo sapiens
  misc_RNA (1)...(19): siRNA sense strand
gguggugaagugucuguua

SEQ ID NO: 873882 - RNA, 19 nt, Homo sapiens
  misc_RNA (1)...(19): siRNA sense strand
ccagugggcuuggugugaa

SEQ ID NO: 873883 - RNA, 19 nt, Homo sapiens
  misc_RNA (1)...(19): siRNA sense strand
ccaccgagauccagaacag

SEQ ID NO: 873884 - RNA, 19 nt, Homo sapiens
  misc_RNA (1)...(19): siRNA sense strand
agaugaaccugaugaagca

SEQ ID NO: 873885 - RNA, 19 nt, Homo sapiens
  misc_RNA (1)...(19): siRNA sense strand
gcucagaguggaucucaug

SEQ ID NO: 873886 - RNA, 19 nt, Homo sapiens
  misc_RNA (1)...(19): siRNA sense strand
caagugugcauuaaacuca

SEQ ID NO: 873887 - RNA, 19 nt, Homo sapiens
  misc_RNA (1)...(19): siRNA sense strand
gugugaaggcucugguuua

SEQ ID NO: 873888 - RNA, 19 nt, Homo sapiens
  misc_RNA (1)...(19): siRNA sense strand
ugaugaagaccuccugaaa

SEQ ID NO: 873889 - RNA, 19 nt, Homo sapiens
  misc_RNA (1)...(19): siRNA sense strand
aaaguggugcagcucauua

SEQ ID NO: 873890 - RNA, 19 nt, Homo sapiens
  misc_RNA (1)...(19): siRNA sense strand
ggacuucauucgucacaau

SEQ ID NO: 873891 - RNA, 19 nt, Homo sapiens
  misc_RNA (1)...(19): siRNA sense strand
ggaagcuggugcagguaga

SEQ ID NO: 873892 - RNA, 19 nt, Homo sapiens
  misc_RNA (1)...(19): siRNA sense strand
cuaaggaccaugagaagga

SEQ ID NO: 873893 - RNA, 19 nt, Homo sapiens
  misc_RNA (1)...(19): siRNA sense strand
ucaagaggaaggacccuaa

SEQ ID NO: 873894 - RNA, 19 nt, Homo sapiens
  misc_RNA (1)...(19): siRNA sense strand
caccaggucccgaagcuaa

SEQ ID NO: 873895 - RNA, 19 nt, Homo sapiens
  misc_RNA (1)...(19): siRNA sense strand
gaaggacccuaaggaccau

SEQ ID NO: 873896 - RNA, 19 nt, Homo sapiens
  misc_RNA (1)...(19): siRNA sense strand
aagcuggacuugcugacuu

SEQ ID NO: 873897 - RNA, 19 nt, Homo sapiens
  misc_RNA (1)...(19): siRNA sense strand
ugcacgagcugccaagaga

SEQ ID NO: 873898 - RNA, 19 nt, Homo sapiens
  misc_RNA (1)...(19): siRNA sense strand
uagaggaggccaucaagau

SEQ ID NO: 873899 - RNA, 19 nt, Homo sapiens
  misc_RNA (1)...(19): siRNA sense strand
ggcccaaagucuucgugaa

SEQ ID NO: 873900 - RNA, 19 nt, Homo sapiens
  misc_RNA (1)...(19): siRNA sense strand
gaucagggagauucagaag

SEQ ID NO: 873901 - RNA, 19 nt, Homo sapiens
  misc_RNA (1)...(19): siRNA sense strand
guagaggaggccaucaaga

SEQ ID NO: 873902 - RNA, 19 nt, Homo sapiens
  misc_RNA (1)...(19): siRNA sense strand
uggaaacacugaccaagcu

SEQ ID NO: 873903 - RNA, 19 nt, Homo sapiens
  misc_RNA (1)...(19): siRNA sense strand
gaggaggccaucaagaucu

SEQ ID NO: 873904 - RNA, 19 nt, Homo sapiens
  misc_RNA (1)...(19): siRNA sense strand
acacgcgcaugccugagaa

SEQ ID NO: 873905 - RNA, 19 nt, Homo sapiens
  misc_RNA (1)...(19): siRNA sense strand
gggacgugcuguugcaacu

SEQ ID NO: 873906 - RNA, 19 nt, Homo sapiens
  misc_RNA (1)...(19): siRNA sense strand
ggaucagggagauucagaa

SEQ ID NO: 873907 - RNA, 19 nt, Homo sapiens
  misc_RNA (1)...(19): siRNA sense strand
agaggaaggacccuaagga

SEQ ID NO: 873908 - RNA, 19 nt, Homo sapiens
  misc_RNA (1)...(19): siRNA sense strand
gagaaccugaggcggauca

SEQ ID NO: 873909 - RNA, 19 nt, Homo sapiens
  misc_RNA (1)...(19): siRNA sense strand
gcugcugcgugagcuggua

SEQ ID NO: 873910 - RNA, 19 nt, Homo sapiens
  misc_RNA (1)...(19): siRNA sense strand
gcaaagaccuauauugaga

SEQ ID NO: 873911 - RNA, 19 nt, Homo sapiens
  misc_RNA (1)...(19): siRNA sense strand
ggagaaauauucccaaaga

SEQ ID NO: 873912 - RNA, 19 nt, Homo sapiens
  misc_RNA (1)...(19): siRNA sense strand
gaaagcagcccaaauucua

SEQ ID NO: 873913 - RNA, 19 nt, Homo sapiens
  misc_RNA (1)...(19): siRNA sense strand
agagagagcugaagaagaa

SEQ ID NO: 873914 - RNA, 19 nt, Homo sapiens
  misc_RNA (1)...(19): siRNA sense strand
gaagaaagagggcacagua

SEQ ID NO: 873915 - RNA, 19 nt, Homo sapiens
  misc_RNA (1)...(19): siRNA sense strand
gaagaggcaugaacaggaa

SEQ ID NO: 873916 - RNA, 19 nt, Homo sapiens
  misc_RNA (1)...(19): siRNA sense strand
agaaagaagugacagagua

SEQ ID NO: 873917 - RNA, 19 nt, Homo sapiens
  misc_RNA (1)...(19): siRNA sense strand
ugaagaaacuguaauguca

SEQ ID NO: 873918 - RNA, 19 nt, Homo sapiens
  misc_RNA (1)...(19): siRNA sense strand
ggaguuugaugauaaagaa

SEQ ID NO: 873919 - RNA, 19 nt, Homo sapiens
  misc_RNA (1)...(19): siRNA sense strand
ggagaaagauagggagaaa

SEQ ID NO: 873920 - RNA, 19 nt, Homo sapiens
  misc_RNA (1)...(19): siRNA sense strand
agaaagaaaucaagacaga

SEQ ID NO: 873921 - RNA, 19 nt, Homo sapiens
  misc_RNA (1)...(19): siRNA sense strand
gagggaagcugcuaagaag

SEQ ID NO: 873922 - RNA, 19 nt, Homo sapiens
  misc_RNA (1)...(19): siRNA sense strand
ggaagagcauaugaaagua

SEQ ID NO: 873923 - RNA, 19 nt, Homo sapiens
  misc_RNA (1)...(19): siRNA sense strand
ggaagcauguuuggaugua

SEQ ID NO: 873924 - RNA, 19 nt, Homo sapiens
  misc_RNA (1)...(19): siRNA sense strand
acagaaagcccaaguauau

SEQ ID NO: 873925 - RNA, 19 nt, Homo sapiens
  misc_RNA (1)...(19): siRNA sense strand
gaacaaugaagaaacugua

SEQ ID NO: 873926 - RNA, 19 nt, Homo sapiens
  misc_RNA (1)...(19): siRNA sense strand
caagaaagauccaacaaaa

SEQ ID NO: 873927 - RNA, 19 nt, Homo sapiens
  misc_RNA (1)...(19): siRNA sense strand
agaaagagauagacaacaa

SEQ ID NO: 873928 - RNA, 19 nt, Homo sapiens
  misc_RNA (1)...(19): siRNA sense strand
gaaauauucccaaagagaa

SEQ ID NO: 873929 - RNA, 19 nt, Homo sapiens
  misc_RNA (1)...(19): siRNA sense strand
ccaaagagaacaagaaaga

SEQ ID NO: 873930 - RNA, 19 nt, Homo sapiens
  misc_RNA (1)...(19): siRNA sense strand
gaaaugcauucuucaaacu

SEQ ID NO: 873931 - RNA, 19 nt, Homo sapiens
  misc_RNA (1)...(19): siRNA sense strand
agaaagauagggagaaaua

SEQ ID NO: 873932 - RNA, 19 nt, Homo sapiens
  misc_RNA (1)...(19): siRNA sense strand
gaaccgacccagugagaaa

SEQ ID NO: 873933 - RNA, 19 nt, Homo sapiens
  misc_RNA (1)...(19): siRNA sense strand
ggauaaauuucuugaccaa

SEQ ID NO: 873934 - RNA, 19 nt, Homo sapiens
  misc_RNA (1)...(19): siRNA sense strand
gaagagcauaugaaaguaa

SEQ ID NO: 873935 - RNA, 19 nt, Homo sapiens
  misc_RNA (1)...(19): siRNA sense strand
agaaagaucucaguggauu

SEQ ID NO: 873936 - RNA, 19 nt, Homo sapiens
  misc_RNA (1)...(19): siRNA sense strand
aaacugaugugaaaguaga

SEQ ID NO: 873937 - RNA, 19 nt, Homo sapiens
  misc_RNA (1)...(19): siRNA sense strand
ugagaaacauggcaaagga

SEQ ID NO: 873938 - RNA, 19 nt, Homo sapiens
  misc_RNA (1)...(19): siRNA sense strand
gaaagaagugacagaguau

SEQ ID NO: 873939 - RNA, 19 nt, Homo sapiens
  misc_RNA (1)...(19): siRNA sense strand
uaaagaagcauuugugaca

SEQ ID NO: 873940 - RNA, 19 nt, Homo sapiens
  misc_RNA (1)...(19): siRNA sense strand
gaaacccucuaauucugaa

SEQ ID NO: 873941 - RNA, 19 nt, Homo sapiens
  misc_RNA (1)...(19): siRNA sense strand
ggacaaagaaagaaaccaa

SEQ ID NO: 873942 - RNA, 19 nt, Homo sapiens
  misc_RNA (1)...(19): siRNA sense strand
cagaauaccacaagagaaa

SEQ ID NO: 873943 - RNA, 19 nt, Homo sapiens
  misc_RNA (1)...(19): siRNA sense strand
gaagaggaaguaccuaaau

SEQ ID NO: 873944 - RNA, 19 nt, Homo sapiens
  misc_RNA (1)...(19): siRNA sense strand
ggaaaauaaucccaaauug

SEQ ID NO: 873945 - RNA, 19 nt, Homo sapiens
  misc_RNA (1)...(19): siRNA sense strand
agaccuauauugagaaaga

SEQ ID NO: 873946 - RNA, 19 nt, Homo sapiens
  misc_RNA (1)...(19): siRNA sense strand
gcaaaggaagagcauauga

SEQ ID NO: 873947 - RNA, 19 nt, Homo sapiens
  misc_RNA (1)...(19): siRNA sense strand
gauaaagaagcauuuguga

SEQ ID NO: 873948 - RNA, 19 nt, Homo sapiens
  misc_RNA (1)...(19): siRNA sense strand
gaagaagaagaaagagaaa

SEQ ID NO: 873949 - RNA, 19 nt, Homo sapiens
  misc_RNA (1)...(19): siRNA sense strand
agaaagaaaccaagagaaa

SEQ ID NO: 873950 - RNA, 19 nt, Homo sapiens
  misc_RNA (1)...(19): siRNA sense strand
gaaagagauagacaacaaa

SEQ ID NO: 873951 - RNA, 19 nt, Homo sapiens
  misc_RNA (1)...(19): siRNA sense strand
gaucugguauaaaggaaga

SEQ ID NO: 873952 - RNA, 19 nt, Homo sapiens
  misc_RNA (1)...(19): siRNA sense strand
ccuauuaaaucaagcaguu

SEQ ID NO: 873953 - RNA, 19 nt, Homo sapiens
  misc_RNA (1)...(19): siRNA sense strand
guaccuaaaugcagcuuuc

SEQ ID NO: 873954 - RNA, 19 nt, Homo sapiens
  misc_RNA (1)...(19): siRNA sense strand
ugagaaagaagaugauuga

SEQ ID NO: 873955 - RNA, 19 nt, Homo sapiens
  misc_RNA (1)...(19): siRNA sense strand
ucaaacugaugugaaagua

SEQ ID NO: 873956 - RNA, 19 nt, Homo sapiens
  misc_RNA (1)...(19): siRNA sense strand
gaaacagaccaaacuggaa

SEQ ID NO: 873957 - RNA, 19 nt, Homo sapiens
  misc_RNA (1)...(19): siRNA sense strand
gguguucagucuucagaaa

SEQ ID NO: 873958 - RNA, 19 nt, Homo sapiens
  misc_RNA (1)...(19): siRNA sense strand
gaagcauguuuggauguaa

SEQ ID NO: 873959 - RNA, 19 nt, Homo sapiens
  misc_RNA (1)...(19): siRNA sense strand
gacagaaagcccaaguaua

SEQ ID NO: 873960 - RNA, 19 nt, Homo sapiens
  misc_RNA (1)...(19): siRNA sense strand
gcaagagaaggguaaagaa

SEQ ID NO: 873961 - RNA, 19 nt, Homo sapiens
  misc_RNA (1)...(19): siRNA sense strand
cagugcggaugaugaaaua

SEQ ID NO: 873962 - RNA, 19 nt, Homo sapiens
  misc_RNA (1)...(19): siRNA sense strand
ggcaugaacaggaagauaa

SEQ ID NO: 873963 - RNA, 19 nt, Homo sapiens
  misc_RNA (1)...(19): siRNA sense strand
cagaagaugcuacugugua

SEQ ID NO: 873964 - RNA, 19 nt, Homo sapiens
  misc_RNA (1)...(19): siRNA sense strand
caaaggacaaagaaagaaa

SEQ ID NO: 873965 - RNA, 19 nt, Homo sapiens
  misc_RNA (1)...(19): siRNA sense strand
caaaggaagagcauaugaa

SEQ ID NO: 873966 - RNA, 19 nt, Homo sapiens
  misc_RNA (1)...(19): siRNA sense strand
gacagugacuucgaugcua

SEQ ID NO: 873967 - RNA, 19 nt, Homo sapiens
  misc_RNA (1)...(19): siRNA sense strand
ucauagagauucccauugg

SEQ ID NO: 873968 - RNA, 19 nt, Homo sapiens
  misc_RNA (1)...(19): siRNA sense strand
gaaacuguaaugucagcua

SEQ ID NO: 873969 - RNA, 19 nt, Homo sapiens
  misc_RNA (1)...(19): siRNA sense strand
gcaaaggacaaagaaagaa

SEQ ID NO: 873970 - RNA, 19 nt, Homo sapiens
  misc_RNA (1)...(19): siRNA sense strand
ccaagaaagauccaacaaa

SEQ ID NO: 873971 - RNA, 19 nt, Homo sapiens
  misc_RNA (1)...(19): siRNA sense strand
ggcaaaggauaaauuucuu

SEQ ID NO: 873972 - RNA, 19 nt, Homo sapiens
  misc_RNA (1)...(19): siRNA sense strand
gaaaguaaggaaggaaaga

SEQ ID NO: 873973 - RNA, 19 nt, Homo sapiens
  misc_RNA (1)...(19): siRNA sense strand
aaaggaagagcauaugaaa

SEQ ID NO: 873974 - RNA, 19 nt, Homo sapiens
  misc_RNA (1)...(19): siRNA sense strand
gcaagagagagcugaagaa

SEQ ID NO: 873975 - RNA, 19 nt, Homo sapiens
  misc_RNA (1)...(19): siRNA sense strand
aaggaaagcagcccaaauu

SEQ ID NO: 873976 - RNA, 19 nt, Homo sapiens
  misc_RNA (1)...(19): siRNA sense strand
gaacaggaagauaaaccaa

SEQ ID NO: 873977 - RNA, 19 nt, Homo sapiens
  misc_RNA (1)...(19): siRNA sense strand
gagaccaagagaaccauua

SEQ ID NO: 873978 - RNA, 19 nt, Homo sapiens
  misc_RNA (1)...(19): siRNA sense strand
agaagaugcuacuguguau

SEQ ID NO: 873979 - RNA, 19 nt, Homo sapiens
  misc_RNA (1)...(19): siRNA sense strand
ugaagaagaagaaagagaa

SEQ ID NO: 873980 - RNA, 19 nt, Homo sapiens
  misc_RNA (1)...(19): siRNA sense strand
aaacagaccaaacuggaaa

SEQ ID NO: 873981 - RNA, 19 nt, Homo sapiens
  misc_RNA (1)...(19): siRNA sense strand
gaaaggaaagcagcccaaa

SEQ ID NO: 873982 - RNA, 19 nt, Homo sapiens
  misc_RNA (1)...(19): siRNA sense strand
gaaagaucucaguggauuu

SEQ ID NO: 873983 - RNA, 19 nt, Homo sapiens
  misc_RNA (1)...(19): siRNA sense strand
uugcaaagcggaacaauga

SEQ ID NO: 873984 - RNA, 19 nt, Homo sapiens
  misc_RNA (1)...(19): siRNA sense strand
agagaaggguaaagaacaa

SEQ ID NO: 873985 - RNA, 19 nt, Homo sapiens
  misc_RNA (1)...(19): siRNA sense strand
gcaaaggauaaauuucuug

SEQ ID NO: 873986 - RNA, 19 nt, Homo sapiens
  misc_RNA (1)...(19): siRNA sense strand
gaagugacagaguauggaa

SEQ ID NO: 873987 - RNA, 19 nt, Homo sapiens
  misc_RNA (1)...(19): siRNA sense strand
gcaugaacaggaagauaaa

SEQ ID NO: 873988 - RNA, 19 nt, Homo sapiens
  misc_RNA (1)...(19): siRNA sense strand
gagagaacgagaaauggaa

SEQ ID NO: 873989 - RNA, 19 nt, Homo sapiens
  misc_RNA (1)...(19): siRNA sense strand
cuaagaagcaggccaugaa

SEQ ID NO: 873990 - RNA, 19 nt, Homo sapiens
  misc_RNA (1)...(19): siRNA sense strand
ggaaagcagcccaaauucu

SEQ ID NO: 873991 - RNA, 19 nt, Homo sapiens
  misc_RNA (1)...(19): siRNA sense strand
gaaagaaaucaagacagaa

SEQ ID NO: 873992 - RNA, 19 nt, Homo sapiens
  misc_RNA (1)...(19): siRNA sense strand
gaagcaauccagagaccaa

SEQ ID NO: 873993 - RNA, 19 nt, Homo sapiens
  misc_RNA (1)...(19): siRNA sense strand
gagcagugcggaugaugaa

SEQ ID NO: 873994 - RNA, 19 nt, Homo sapiens
  misc_RNA (1)...(19): siRNA sense strand
acagugacuucgaugcuaa

SEQ ID NO: 873995 - RNA, 19 nt, Homo sapiens
  misc_RNA (1)...(19): siRNA sense strand
aaaugcagcuuucgugaag

SEQ ID NO: 873996 - RNA, 19 nt, Homo sapiens
  misc_RNA (1)...(19): siRNA sense strand
gaaagaaaccaagagaaac

SEQ ID NO: 873997 - RNA, 19 nt, Homo sapiens
  misc_RNA (1)...(19): siRNA sense strand
gaaagcccaaguauauuca

SEQ ID NO: 873998 - RNA, 19 nt, Homo sapiens
  misc_RNA (1)...(19): siRNA sense strand
gggcaaaggauaaauuucu

SEQ ID NO: 873999 - RNA, 19 nt, Homo sapiens
  misc_RNA (1)...(19): siRNA sense strand
caucaguguuugggaauga

SEQ ID NO: 874000 - RNA, 19 nt, Homo sapiens
  misc_RNA (1)...(19): siRNA sense strand
aagaggaaguaccuaaaug

SEQ ID NO: 874001 - RNA, 19 nt, Homo sapiens
  misc_RNA (1)...(19): siRNA sense strand
ugacaucugcauauaagaa

SEQ ID NO: 874002 - RNA, 19 nt, Homo sapiens
  misc_RNA (1)...(19): siRNA sense strand
gaaaucaagacagaaagga

SEQ ID NO: 874003 - RNA, 19 nt, Homo sapiens
  misc_RNA (1)...(19): siRNA sense strand
aaagagaacaagaaagaga

SEQ ID NO: 874004 - RNA, 19 nt, Homo sapiens
  misc_RNA (1)...(19): siRNA sense strand
gagaaauauucccaaagag

SEQ ID NO: 874005 - RNA, 19 nt, Homo sapiens
  misc_RNA (1)...(19): siRNA sense strand
gaaagauagggagaaauau

SEQ ID NO: 874006 - RNA, 19 nt, Homo sapiens
  misc_RNA (1)...(19): siRNA sense strand
gaccaaagagaaagaagug

SEQ ID NO: 874007 - RNA, 19 nt, Homo sapiens
  misc_RNA (1)...(19): siRNA sense strand
gaauaccacaagagaaaug

SEQ ID NO: 874008 - RNA, 19 nt, Homo sapiens
  misc_RNA (1)...(19): siRNA sense strand
agaaauauucccaaagaga

SEQ ID NO: 874009 - RNA, 19 nt, Homo sapiens
  misc_RNA (1)...(19): siRNA sense strand
gcggaacaaugaagaaacu

SEQ ID NO: 874010 - RNA, 19 nt, Homo sapiens
  misc_RNA (1)...(19): siRNA sense strand
caagagauaucaucgauua

SEQ ID NO: 874011 - RNA, 19 nt, Homo sapiens
  misc_RNA (1)...(19): siRNA sense strand
caauaucgcucacugauuu

SEQ ID NO: 874012 - RNA, 19 nt, Homo sapiens
  misc_RNA (1)...(19): siRNA sense strand
guagagggcuggcaaugua

SEQ ID NO: 874013 - RNA, 19 nt, Homo sapiens
  misc_RNA (1)...(19): siRNA sense strand
gcaccuauaucaauaauuc

SEQ ID NO: 874014 - RNA, 19 nt, Homo sapiens
  misc_RNA (1)...(19): siRNA sense strand
gaucagacaucacacgauu

SEQ ID NO: 874015 - RNA, 19 nt, Homo sapiens
  misc_RNA (1)...(19): siRNA sense strand
cagaugagcuguaauuuca

SEQ ID NO: 874016 - RNA, 19 nt, Homo sapiens
  misc_RNA (1)...(19): siRNA sense strand
ggauucacaucuauacuaa

SEQ ID NO: 874017 - RNA, 19 nt, Homo sapiens
  misc_RNA (1)...(19): siRNA sense strand
gcaaauagauagccucaac

SEQ ID NO: 874018 - RNA, 19 nt, Homo sapiens
  misc_RNA (1)...(19): siRNA sense strand
gaaagaagacggacuuaca

SEQ ID NO: 874019 - RNA, 19 nt, Homo sapiens
  misc_RNA (1)...(19): siRNA sense strand
gacaaucucuagcaucaaa

SEQ ID NO: 874020 - RNA, 19 nt, Homo sapiens
  misc_RNA (1)...(19): siRNA sense strand
ccucaaagcugcaugaauc

SEQ ID NO: 874021 - RNA, 19 nt, Homo sapiens
  misc_RNA (1)...(19): siRNA sense strand
cuucaaagcucccauuaga

SEQ ID NO: 874022 - RNA, 19 nt, Homo sapiens
  misc_RNA (1)...(19): siRNA sense strand
gaaagaagccaggugagaa

SEQ ID NO: 874023 - RNA, 19 nt, Homo sapiens
  misc_RNA (1)...(19): siRNA sense strand
gaucagcgcaggugucaaa

SEQ ID NO: 874024 - RNA, 19 nt, Homo sapiens
  misc_RNA (1)...(19): siRNA sense strand
gcagugcuguuaugcaaau

SEQ ID NO: 874025 - RNA, 19 nt, Homo sapiens
  misc_RNA (1)...(19): siRNA sense strand
ccugagagccaaaguauuu

SEQ ID NO: 874026 - RNA, 19 nt, Homo sapiens
  misc_RNA (1)...(19): siRNA sense strand
ugucagcucuguaauguga

SEQ ID NO: 874027 - RNA, 19 nt, Homo sapiens
  misc_RNA (1)...(19): siRNA sense strand
auagauagccucaaccaua

SEQ ID NO: 874028 - RNA, 19 nt, Homo sapiens
  misc_RNA (1)...(19): siRNA sense strand
gcaugaaucacacaaggua

SEQ ID NO: 874029 - RNA, 19 nt, Homo sapiens
  misc_RNA (1)...(19): siRNA sense strand
agaguuaccuuauugugaa

SEQ ID NO: 874030 - RNA, 19 nt, Homo sapiens
  misc_RNA (1)...(19): siRNA sense strand
gcagguggaucacaucaag

SEQ ID NO: 874031 - RNA, 19 nt, Homo sapiens
  misc_RNA (1)...(19): siRNA sense strand
gaaaugucaggaagaguuu

SEQ ID NO: 874032 - RNA, 19 nt, Homo sapiens
  misc_RNA (1)...(19): siRNA sense strand
uagauagccucaaccauau

SEQ ID NO: 874033 - RNA, 19 nt, Homo sapiens
  misc_RNA (1)...(19): siRNA sense strand
gaacagcuaaaugaaauga

SEQ ID NO: 874034 - RNA, 19 nt, Homo sapiens
  misc_RNA (1)...(19): siRNA sense strand
gguaacaggugccgagcaa

SEQ ID NO: 874035 - RNA, 19 nt, Homo sapiens
  misc_RNA (1)...(19): siRNA sense strand
agagagaacugccagacaa

SEQ ID NO: 874036 - RNA, 19 nt, Homo sapiens
  misc_RNA (1)...(19): siRNA sense strand
aaagcgaacucuugggauu

SEQ ID NO: 874037 - RNA, 19 nt, Homo sapiens
  misc_RNA (1)...(19): siRNA sense strand
ccagaacaguggaagaguu

SEQ ID NO: 874038 - RNA, 19 nt, Homo sapiens
  misc_RNA (1)...(19): siRNA sense strand
uguagucucugcaccuaua

SEQ ID NO: 874039 - RNA, 19 nt, Homo sapiens
  misc_RNA (1)...(19): siRNA sense strand
agacuaagcaagcauguaa

SEQ ID NO: 874040 - RNA, 19 nt, Homo sapiens
  misc_RNA (1)...(19): siRNA sense strand
gucagaaccuggccaguug

SEQ ID NO: 874041 - RNA, 19 nt, Homo sapiens
  misc_RNA (1)...(19): siRNA sense strand
gagcaaggucugcagguuu

SEQ ID NO: 874042 - RNA, 19 nt, Homo sapiens
  misc_RNA (1)...(19): siRNA sense strand
ggaaagaagccaggugaga

SEQ ID NO: 874043 - RNA, 19 nt, Homo sapiens
  misc_RNA (1)...(19): siRNA sense strand
ggaaaauacuguaguguca

SEQ ID NO: 874044 - RNA, 19 nt, Homo sapiens
  misc_RNA (1)...(19): siRNA sense strand
gaagcccucuacauccaaa

SEQ ID NO: 874045 - RNA, 19 nt, Homo sapiens
  misc_RNA (1)...(19): siRNA sense strand
uggaagagaucacaaagca

SEQ ID NO: 874046 - RNA, 19 nt, Homo sapiens
  misc_RNA (1)...(19): siRNA sense strand
gaagaguucagacacuuug

SEQ ID NO: 874047 - RNA, 19 nt, Homo sapiens
  misc_RNA (1)...(19): siRNA sense strand
gcuguuaugcaaauagaua

SEQ ID NO: 874048 - RNA, 19 nt, Homo sapiens
  misc_RNA (1)...(19): siRNA sense strand
cagacaagcuaaggaaaga

SEQ ID NO: 874049 - RNA, 19 nt, Homo sapiens
  misc_RNA (1)...(19): siRNA sense strand
uaacugccaugaagcaaag

SEQ ID NO: 874050 - RNA, 19 nt, Homo sapiens
  misc_RNA (1)...(19): siRNA sense strand
cagcgcaggugucaaagga

SEQ ID NO: 874051 - RNA, 19 nt, Homo sapiens
  misc_RNA (1)...(19): siRNA sense strand
gaacugccagacaagcuaa

SEQ ID NO: 874052 - RNA, 19 nt, Homo sapiens
  misc_RNA (1)...(19): siRNA sense strand
ggaagaguucagacacuuu

SEQ ID NO: 874053 - RNA, 19 nt, Homo sapiens
  misc_RNA (1)...(19): siRNA sense strand
aagacaaucucuagcauca

SEQ ID NO: 874054 - RNA, 19 nt, Homo sapiens
  misc_RNA (1)...(19): siRNA sense strand
ucacaaagcaacaaaccaa

SEQ ID NO: 874055 - RNA, 19 nt, Homo sapiens
  misc_RNA (1)...(19): siRNA sense strand
gagauuuguucgagaaugg

SEQ ID NO: 874056 - RNA, 19 nt, Homo sapiens
  misc_RNA (1)...(19): siRNA sense strand
uuaauguucugugcaagua

SEQ ID NO: 874057 - RNA, 19 nt, Homo sapiens
  misc_RNA (1)...(19): siRNA sense strand
ucaaggcagugcuguuaug

SEQ ID NO: 874058 - RNA, 19 nt, Homo sapiens
  misc_RNA (1)...(19): siRNA sense strand
gcaaggaagaaacaccaaa

SEQ ID NO: 874059 - RNA, 19 nt, Homo sapiens
  misc_RNA (1)...(19): siRNA sense strand
uggauucgaucuaauaaca

SEQ ID NO: 874060 - RNA, 19 nt, Homo sapiens
  misc_RNA (1)...(19): siRNA sense strand
ucauuccucuggauauaaa

SEQ ID NO: 874061 - RNA, 19 nt, Homo sapiens
  misc_RNA (1)...(19): siRNA sense strand
ucacaucuauacuaaggau

SEQ ID NO: 874062 - RNA, 19 nt, Homo sapiens
  misc_RNA (1)...(19): siRNA sense strand
caucaaagcauggaucaga

SEQ ID NO: 874063 - RNA, 19 nt, Homo sapiens
  misc_RNA (1)...(19): siRNA sense strand
ugaaaugucaggaagaguu

SEQ ID NO: 874064 - RNA, 19 nt, Homo sapiens
  misc_RNA (1)...(19): siRNA sense strand
caacccacuugccagacua

SEQ ID NO: 874065 - RNA, 19 nt, Homo sapiens
  misc_RNA (1)...(19): siRNA sense strand
ugcaagcuguggauaauga

SEQ ID NO: 874066 - RNA, 19 nt, Homo sapiens
  misc_RNA (1)...(19): siRNA sense strand
ccucaaggcagugcuguua

SEQ ID NO: 874067 - RNA, 19 nt, Homo sapiens
  misc_RNA (1)...(19): siRNA sense strand
gaagcagccacuuacagaa

SEQ ID NO: 874068 - RNA, 19 nt, Homo sapiens
  misc_RNA (1)...(19): siRNA sense strand
gaagccaggugagaagaca

SEQ ID NO: 874069 - RNA, 19 nt, Homo sapiens
  misc_RNA (1)...(19): siRNA sense strand
ugaaggaaauccacuuugc

SEQ ID NO: 874070 - RNA, 19 nt, Homo sapiens
  misc_RNA (1)...(19): siRNA sense strand
gagaaagaagacggacuua

SEQ ID NO: 874071 - RNA, 19 nt, Homo sapiens
  misc_RNA (1)...(19): siRNA sense strand
auucagaguuaccuuauug

SEQ ID NO: 874072 - RNA, 19 nt, Homo sapiens
  misc_RNA (1)...(19): siRNA sense strand
caaacaaaauugcaccaaa

SEQ ID NO: 874073 - RNA, 19 nt, Homo sapiens
  misc_RNA (1)...(19): siRNA sense strand
ucagaaagacaccuccaaa

SEQ ID NO: 874074 - RNA, 19 nt, Homo sapiens
  misc_RNA (1)...(19): siRNA sense strand
ggacuucaaagcucccauu

SEQ ID NO: 874075 - RNA, 19 nt, Homo sapiens
  misc_RNA (1)...(19): siRNA sense strand
gauucgaucuaauaacagu

SEQ ID NO: 874076 - RNA, 19 nt, Homo sapiens
  misc_RNA (1)...(19): siRNA sense strand
gaccuccugugacgaauca

SEQ ID NO: 874077 - RNA, 19 nt, Homo sapiens
  misc_RNA (1)...(19): siRNA sense strand
ggacaaagugaagaauguu

SEQ ID NO: 874078 - RNA, 19 nt, Homo sapiens
  misc_RNA (1)...(19): siRNA sense strand
cgagaauggaguagucuaa

SEQ ID NO: 874079 - RNA, 19 nt, Homo sapiens
  misc_RNA (1)...(19): siRNA sense strand
guagcccaauucuugcuuu

SEQ ID NO: 874080 - RNA, 19 nt, Homo sapiens
  misc_RNA (1)...(19): siRNA sense strand
uaggaauacugaccggauu

SEQ ID NO: 874081 - RNA, 19 nt, Homo sapiens
  misc_RNA (1)...(19): siRNA sense strand
ugaagcagccacuuacaga

SEQ ID NO: 874082 - RNA, 19 nt, Homo sapiens
  misc_RNA (1)...(19): siRNA sense strand
uguugaaccugaaacgaaa

SEQ ID NO: 874083 - RNA, 19 nt, Homo sapiens
  misc_RNA (1)...(19): siRNA sense strand
caaagcaacaaaccaaaca

SEQ ID NO: 874084 - RNA, 19 nt, Homo sapiens
  misc_RNA (1)...(19): siRNA sense strand
gccaugaagcaaaggauaa

SEQ ID NO: 874085 - RNA, 19 nt, Homo sapiens
  misc_RNA (1)...(19): siRNA sense strand
cagaguuaccuuauuguga

SEQ ID NO: 874086 - RNA, 19 nt, Homo sapiens
  misc_RNA (1)...(19): siRNA sense strand
uggacaaagugaagaaugu

SEQ ID NO: 874087 - RNA, 19 nt, Homo sapiens
  misc_RNA (1)...(19): siRNA sense strand
uaugacaccuuaauguucu

SEQ ID NO: 874088 - RNA, 19 nt, Homo sapiens
  misc_RNA (1)...(19): siRNA sense strand
guaugacaccuuaauguuc

SEQ ID NO: 874089 - RNA, 19 nt, Homo sapiens
  misc_RNA (1)...(19): siRNA sense strand
gcaagagauaucaucgauu

SEQ ID NO: 874090 - RNA, 19 nt, Homo sapiens
  misc_RNA (1)...(19): siRNA sense strand
gaguuaccuuauugugaaa

SEQ ID NO: 874091 - RNA, 19 nt, Homo sapiens
  misc_RNA (1)...(19): siRNA sense strand
gaauggaguagucuaacug

SEQ ID NO: 874092 - RNA, 19 nt, Homo sapiens
  misc_RNA (1)...(19): siRNA sense strand
gaucacaucaagccagugu

SEQ ID NO: 874093 - RNA, 19 nt, Homo sapiens
  misc_RNA (1)...(19): siRNA sense strand
cauguaaagcgaacucuug

SEQ ID NO: 874094 - RNA, 19 nt, Homo sapiens
  misc_RNA (1)...(19): siRNA sense strand
gcaaaggauaaucaggaaa

SEQ ID NO: 874095 - RNA, 19 nt, Homo sapiens
  misc_RNA (1)...(19): siRNA sense strand
uuucauuccucuggauaua

SEQ ID NO: 874096 - RNA, 19 nt, Homo sapiens
  misc_RNA (1)...(19): siRNA sense strand
gcauggaucagacaucaca

SEQ ID NO: 874097 - RNA, 19 nt, Homo sapiens
  misc_RNA (1)...(19): siRNA sense strand
aagcauggaucagacauca

SEQ ID NO: 874098 - RNA, 19 nt, Homo sapiens
  misc_RNA (1)...(19): siRNA sense strand
uaugcuaccuggacuucaa

SEQ ID NO: 874099 - RNA, 19 nt, Homo sapiens
  misc_RNA (1)...(19): siRNA sense strand
cggauucacaucuauacua

SEQ ID NO: 874100 - RNA, 19 nt, Homo sapiens
  misc_RNA (1)...(19): siRNA sense strand
gcaaauccucagccacuca

SEQ ID NO: 874101 - RNA, 19 nt, Homo sapiens
  misc_RNA (1)...(19): siRNA sense strand
cgagcaaggucugcagguu

SEQ ID NO: 874102 - RNA, 19 nt, Homo sapiens
  misc_RNA (1)...(19): siRNA sense strand
cacgggauccuuucacaaa

SEQ ID NO: 874103 - RNA, 19 nt, Homo sapiens
  misc_RNA (1)...(19): siRNA sense strand
aauuagaccuuugggaaga

SEQ ID NO: 874104 - RNA, 19 nt, Homo sapiens
  misc_RNA (1)...(19): siRNA sense strand
gaccggauucacaucuaua

SEQ ID NO: 874105 - RNA, 19 nt, Homo sapiens
  misc_RNA (1)...(19): siRNA sense strand
ggaggaaaauacuguagug

SEQ ID NO: 874106 - RNA, 19 nt, Homo sapiens
  misc_RNA (1)...(19): siRNA sense strand
ucacaucaagccaguguau

SEQ ID NO: 874107 - RNA, 19 nt, Homo sapiens
  misc_RNA (1)...(19): siRNA sense strand
gugaagcccucuacaucca

SEQ ID NO: 874108 - RNA, 19 nt, Homo sapiens
  misc_RNA (1)...(19): siRNA sense strand
ggccauguccgucugauca

SEQ ID NO: 874109 - RNA, 19 nt, Homo sapiens
  misc_RNA (1)...(19): siRNA sense strand
gagaucacaaagcaacaaa

SEQ ID NO: 874110 - RNA, 19 nt, Homo sapiens
  misc_RNA (1)...(19): siRNA sense strand
gaacagaucuugcugacaa

SEQ ID NO: 874111 - RNA, 19 nt, Homo sapiens
  misc_RNA (1)...(19): siRNA sense strand
ggaauccgcugaggaaauu

SEQ ID NO: 874112 - RNA, 19 nt, Homo sapiens
  misc_RNA (1)...(19): siRNA sense strand
caaaguggauugaugaugu

SEQ ID NO: 874113 - RNA, 19 nt, Homo sapiens
  misc_RNA (1)...(19): siRNA sense strand
gaaagaggaagugauguua

SEQ ID NO: 874114 - RNA, 19 nt, Homo sapiens
  misc_RNA (1)...(19): siRNA sense strand
ggaaauagaacagaucuug

SEQ ID NO: 874115 - RNA, 19 nt, Homo sapiens
  misc_RNA (1)...(19): siRNA sense strand
aauauuggcuugaaccuuu

SEQ ID NO: 874116 - RNA, 19 nt, Homo sapiens
  misc_RNA (1)...(19): siRNA sense strand
caacaccuaucaggcaaua

SEQ ID NO: 874117 - RNA, 19 nt, Homo sapiens
  misc_RNA (1)...(19): siRNA sense strand
ccaaagggcugaauguuac

SEQ ID NO: 874118 - RNA, 19 nt, Homo sapiens
  misc_RNA (1)...(19): siRNA sense strand
gccaaagggcugaauguua

SEQ ID NO: 874119 - RNA, 19 nt, Homo sapiens
  misc_RNA (1)...(19): siRNA sense strand
gaugaugucagaacagaaa

SEQ ID NO: 874120 - RNA, 19 nt, Homo sapiens
  misc_RNA (1)...(19): siRNA sense strand
gaacagaaagaggaaguga

SEQ ID NO: 874121 - RNA, 19 nt, Homo sapiens
  misc_RNA (1)...(19): siRNA sense strand
cuacaaaguggauugauga

SEQ ID NO: 874122 - RNA, 19 nt, Homo sapiens
  misc_RNA (1)...(19): siRNA sense strand
gggcugaauguuacguuua

SEQ ID NO: 874123 - RNA, 19 nt, Homo sapiens
  misc_RNA (1)...(19): siRNA sense strand
cuucaacccuuccucagaa

SEQ ID NO: 874124 - RNA, 19 nt, Homo sapiens
  misc_RNA (1)...(19): siRNA sense strand
ugacugcagugugaauauu

SEQ ID NO: 874125 - RNA, 19 nt, Homo sapiens
  misc_RNA (1)...(19): siRNA sense strand
gggcuucggcugugggaua

SEQ ID NO: 874126 - RNA, 19 nt, Homo sapiens
  misc_RNA (1)...(19): siRNA sense strand
gcagcucuuucgacgugua

SEQ ID NO: 874127 - RNA, 19 nt, Homo sapiens
  misc_RNA (1)...(19): siRNA sense strand
guggauugaugaugucaga

SEQ ID NO: 874128 - RNA, 19 nt, Homo sapiens
  misc_RNA (1)...(19): siRNA sense strand
ggcugaauguuacguuuau

SEQ ID NO: 874129 - RNA, 19 nt, Homo sapiens
  misc_RNA (1)...(19): siRNA sense strand
ccagguacauccgugauuc

SEQ ID NO: 874130 - RNA, 19 nt, Homo sapiens
  misc_RNA (1)...(19): siRNA sense strand
gaaauucaagcugguguuc

SEQ ID NO: 874131 - RNA, 19 nt, Homo sapiens
  misc_RNA (1)...(19): siRNA sense strand
aagaggaagugauguuauc

SEQ ID NO: 874132 - RNA, 19 nt, Homo sapiens
  misc_RNA (1)...(19): siRNA sense strand
caaacuacaaaguggauug

SEQ ID NO: 874133 - RNA, 19 nt, Homo sapiens
  misc_RNA (1)...(19): siRNA sense strand
gauugaugaugucagaaca

SEQ ID NO: 874134 - RNA, 19 nt, Homo sapiens
  misc_RNA (1)...(19): siRNA sense strand
acagaaagaggaagugaug

SEQ ID NO: 874135 - RNA, 19 nt, Homo sapiens
  misc_RNA (1)...(19): siRNA sense strand
agaaagaggaagugauguu

SEQ ID NO: 874136 - RNA, 19 nt, Homo sapiens
  misc_RNA (1)...(19): siRNA sense strand
ggaaaagccucaggagcaa

SEQ ID NO: 874137 - RNA, 19 nt, Homo sapiens
  misc_RNA (1)...(19): siRNA sense strand
agaggcaagugucaguuga

SEQ ID NO: 874138 - RNA, 19 nt, Homo sapiens
  misc_RNA (1)...(19): siRNA sense strand
guuaacucauuccagcaaa

SEQ ID NO: 874139 - RNA, 19 nt, Homo sapiens
  misc_RNA (1)...(19): siRNA sense strand
gggaauccgcugaggaaau

SEQ ID NO: 874140 - RNA, 19 nt, Homo sapiens
  misc_RNA (1)...(19): siRNA sense strand
ucaucacgcuaguaggaaa

SEQ ID NO: 874141 - RNA, 19 nt, Homo sapiens
  misc_RNA (1)...(19): siRNA sense strand
uaucaucacgcuaguagga

SEQ ID NO: 874142 - RNA, 19 nt, Homo sapiens
  misc_RNA (1)...(19): siRNA sense strand
ggaaauucaagcugguguu

SEQ ID NO: 874143 - RNA, 19 nt, Homo sapiens
  misc_RNA (1)...(19): siRNA sense strand
gggcggagacuucgggaau

SEQ ID NO: 874144 - RNA, 19 nt, Homo sapiens
  misc_RNA (1)...(19): siRNA sense strand
cugcuacucucccauguca

SEQ ID NO: 874145 - RNA, 19 nt, Homo sapiens
  misc_RNA (1)...(19): siRNA sense strand
guaguaguuuacgauauca

SEQ ID NO: 874146 - RNA, 19 nt, Homo sapiens
  misc_RNA (1)...(19): siRNA sense strand
ucaccagauucagguauga

SEQ ID NO: 874147 - RNA, 19 nt, Homo sapiens
  misc_RNA (1)...(19): siRNA sense strand
gcuaguaggaaauagaaca

SEQ ID NO: 874148 - RNA, 19 nt, Homo sapiens
  misc_RNA (1)...(19): siRNA sense strand
gaauauuggcuugaaccuu

SEQ ID NO: 874149 - RNA, 19 nt, Homo sapiens
  misc_RNA (1)...(19): siRNA sense strand
uucauugacugcaguguga

SEQ ID NO: 874150 - RNA, 19 nt, Homo sapiens
  misc_RNA (1)...(19): siRNA sense strand
acuacaaaguggauugaug

SEQ ID NO: 874151 - RNA, 19 nt, Homo sapiens
  misc_RNA (1)...(19): siRNA sense strand
gcugaauguuacguuuauu

SEQ ID NO: 874152 - RNA, 19 nt, Homo sapiens
  misc_RNA (1)...(19): siRNA sense strand
gaucaccagauucagguau

SEQ ID NO: 874153 - RNA, 19 nt, Homo sapiens
  misc_RNA (1)...(19): siRNA sense strand
aaagaggaagugauguuau

SEQ ID NO: 874154 - RNA, 19 nt, Homo sapiens
  misc_RNA (1)...(19): siRNA sense strand
cagcagcuuugccgggaau

SEQ ID NO: 874155 - RNA, 19 nt, Homo sapiens
  misc_RNA (1)...(19): siRNA sense strand
guagccucauucccaggua

SEQ ID NO: 874156 - RNA, 19 nt, Homo sapiens
  misc_RNA (1)...(19): siRNA sense strand
acaccuaucaggcaauaau

SEQ ID NO: 874157 - RNA, 19 nt, Homo sapiens
  misc_RNA (1)...(19): siRNA sense strand
aaaguggauugaugauguc

SEQ ID NO: 874158 - RNA, 19 nt, Homo sapiens
  misc_RNA (1)...(19): siRNA sense strand
gugugaauauuggcuugaa

SEQ ID NO: 874159 - RNA, 19 nt, Homo sapiens
  misc_RNA (1)...(19): siRNA sense strand
aaacuacaaaguggauuga

SEQ ID NO: 874160 - RNA, 19 nt, Homo sapiens
  misc_RNA (1)...(19): siRNA sense strand
gcuacucucccaugucauc

SEQ ID NO: 874161 - RNA, 19 nt, Homo sapiens
  misc_RNA (1)...(19): siRNA sense strand
ggagagaggaaagccaaag

SEQ ID NO: 874162 - RNA, 19 nt, Homo sapiens
  misc_RNA (1)...(19): siRNA sense strand
guuaucaucacgcuaguag

SEQ ID NO: 874163 - RNA, 19 nt, Homo sapiens
  misc_RNA (1)...(19): siRNA sense strand
aguaggaaauagaacagau

SEQ ID NO: 874164 - RNA, 19 nt, Homo sapiens
  misc_RNA (1)...(19): siRNA sense strand
gauucagguaugacaguuu

SEQ ID NO: 874165 - RNA, 19 nt, Homo sapiens
  misc_RNA (1)...(19): siRNA sense strand
guaggaaauagaacagauc

SEQ ID NO: 874166 - RNA, 19 nt, Homo sapiens
  misc_RNA (1)...(19): siRNA sense strand
uugaugaugucagaacaga

SEQ ID NO: 874167 - RNA, 19 nt, Homo sapiens
  misc_RNA (1)...(19): siRNA sense strand
gcaaacuacaaaguggauu

SEQ ID NO: 874168 - RNA, 19 nt, Homo sapiens
  misc_RNA (1)...(19): siRNA sense strand
gacugcagugugaauauug

SEQ ID NO: 874169 - RNA, 19 nt, Homo sapiens
  misc_RNA (1)...(19): siRNA sense strand
caagaggcaagugucaguu

SEQ ID NO: 874170 - RNA, 19 nt, Homo sapiens
  misc_RNA (1)...(19): siRNA sense strand
ggauugaugaugucagaac

SEQ ID NO: 874171 - RNA, 19 nt, Homo sapiens
  misc_RNA (1)...(19): siRNA sense strand
ucgggaauccgcugaggaa

SEQ ID NO: 874172 - RNA, 19 nt, Homo sapiens
  misc_RNA (1)...(19): siRNA sense strand
cugaauguuacguuuauug

SEQ ID NO: 874173 - RNA, 19 nt, Homo sapiens
  misc_RNA (1)...(19): siRNA sense strand
ggaaauacuugcuauauga

SEQ ID NO: 874174 - RNA, 19 nt, Homo sapiens
  misc_RNA (1)...(19): siRNA sense strand
gaacaugguuugaacaauc

SEQ ID NO: 874175 - RNA, 19 nt, Homo sapiens
  misc_RNA (1)...(19): siRNA sense strand
gaauuggaguaucaaguua

SEQ ID NO: 874176 - RNA, 19 nt, Homo sapiens
  misc_RNA (1)...(19): siRNA sense strand
guagaaagauggaacuuau

SEQ ID NO: 874177 - RNA, 19 nt, Homo sapiens
  misc_RNA (1)...(19): siRNA sense strand
gaagauugguguucauguu

SEQ ID NO: 874178 - RNA, 19 nt, Homo sapiens
  misc_RNA (1)...(19): siRNA sense strand
gaaaguaugccuccaagaa

SEQ ID NO: 874179 - RNA, 19 nt, Homo sapiens
  misc_RNA (1)...(19): siRNA sense strand
gcugauaccucgucuaaug

SEQ ID NO: 874180 - RNA, 19 nt, Homo sapiens
  misc_RNA (1)...(19): siRNA sense strand
guaacaggauugagaaauu

SEQ ID NO: 874181 - RNA, 19 nt, Homo sapiens
  misc_RNA (1)...(19): siRNA sense strand
uacagaaacugaagcuuua

SEQ ID NO: 874182 - RNA, 19 nt, Homo sapiens
  misc_RNA (1)...(19): siRNA sense strand
gaaggauacuaauggguaa

SEQ ID NO: 874183 - RNA, 19 nt, Homo sapiens
  misc_RNA (1)...(19): siRNA sense strand
caagaaagaguuuacguuu

SEQ ID NO: 874184 - RNA, 19 nt, Homo sapiens
  misc_RNA (1)...(19): siRNA sense strand
aaacgaaggccaauaguaa

SEQ ID NO: 874185 - RNA, 19 nt, Homo sapiens
  misc_RNA (1)...(19): siRNA sense strand
aaaggaaacucaucaaaca

SEQ ID NO: 874186 - RNA, 19 nt, Homo sapiens
  misc_RNA (1)...(19): siRNA sense strand
acaagacgcucaggaauuu

SEQ ID NO: 874187 - RNA, 19 nt, Homo sapiens
  misc_RNA (1)...(19): siRNA sense strand
guacaggugaugauucuua

SEQ ID NO: 874188 - RNA, 19 nt, Homo sapiens
  misc_RNA (1)...(19): siRNA sense strand
caaauaccauagaaccuuu

SEQ ID NO: 874189 - RNA, 19 nt, Homo sapiens
  misc_RNA (1)...(19): siRNA sense strand
ucaaacaaguucugaaugu

SEQ ID NO: 874190 - RNA, 19 nt, Homo sapiens
  misc_RNA (1)...(19): siRNA sense strand
cagaaugcuuuaucuauga

SEQ ID NO: 874191 - RNA, 19 nt, Homo sapiens
  misc_RNA (1)...(19): siRNA sense strand
ggaauuggaguaucaaguu

SEQ ID NO: 874192 - RNA, 19 nt, Homo sapiens
  misc_RNA (1)...(19): siRNA sense strand
gggaaauacuugcuauaug

SEQ ID NO: 874193 - RNA, 19 nt, Homo sapiens
  misc_RNA (1)...(19): siRNA sense strand
aauaguaacuccuggugua

SEQ ID NO: 874194 - RNA, 19 nt, Homo sapiens
  misc_RNA (1)...(19): siRNA sense strand
ccagaaacaacuuaugaua

SEQ ID NO: 874195 - RNA, 19 nt, Homo sapiens
  misc_RNA (1)...(19): siRNA sense strand
ccagaaugcuuuaucuaug

SEQ ID NO: 874196 - RNA, 19 nt, Homo sapiens
  misc_RNA (1)...(19): siRNA sense strand
aaacuaagcaugugcacua

SEQ ID NO: 874197 - RNA, 19 nt, Homo sapiens
  misc_RNA (1)...(19): siRNA sense strand
gagagaagauugguguuca

SEQ ID NO: 874198 - RNA, 19 nt, Homo sapiens
  misc_RNA (1)...(19): siRNA sense strand
gagccaacaucccaaugaa

SEQ ID NO: 874199 - RNA, 19 nt, Homo sapiens
  misc_RNA (1)...(19): siRNA sense strand
gaagaucaacuguauacug

SEQ ID NO: 874200 - RNA, 19 nt, Homo sapiens
  misc_RNA (1)...(19): siRNA sense strand
agaaagaguuuacguuuac

SEQ ID NO: 874201 - RNA, 19 nt, Homo sapiens
  misc_RNA (1)...(19): siRNA sense strand
ggaauuucuuugugaacuu

SEQ ID NO: 874202 - RNA, 19 nt, Homo sapiens
  misc_RNA (1)...(19): siRNA sense strand
gaaagcagucauccuguug

SEQ ID NO: 874203 - RNA, 19 nt, Homo sapiens
  misc_RNA (1)...(19): siRNA sense strand
gcucaggaauuucuuugug

SEQ ID NO: 874204 - RNA, 19 nt, Homo sapiens
  misc_RNA (1)...(19): siRNA sense strand
caagucauguggucuggaa

SEQ ID NO: 874205 - RNA, 19 nt, Homo sapiens
  misc_RNA (1)...(19): siRNA sense strand
caaaggagccaacuucaca

SEQ ID NO: 874206 - RNA, 19 nt, Homo sapiens
  misc_RNA (1)...(19): siRNA sense strand
ggacuugucauuggaguuu

SEQ ID NO: 874207 - RNA, 19 nt, Homo sapiens
  misc_RNA (1)...(19): siRNA sense strand
gcaaggcucaagcuuauau

SEQ ID NO: 874208 - RNA, 19 nt, Homo sapiens
  misc_RNA (1)...(19): siRNA sense strand
gcagucauccuguugcauu

SEQ ID NO: 874209 - RNA, 19 nt, Homo sapiens
  misc_RNA (1)...(19): siRNA sense strand
gucaugaauugcauacuuu

SEQ ID NO: 874210 - RNA, 19 nt, Homo sapiens
  misc_RNA (1)...(19): siRNA sense strand
agucacagauacaguagua

SEQ ID NO: 874211 - RNA, 19 nt, Homo sapiens
  misc_RNA (1)...(19): siRNA sense strand
uacauuaagugccaucaaa

SEQ ID NO: 874212 - RNA, 19 nt, Homo sapiens
  misc_RNA (1)...(19): siRNA sense strand
aagcagaauuggaaaguau

SEQ ID NO: 874213 - RNA, 19 nt, Homo sapiens
  misc_RNA (1)...(19): siRNA sense strand
ugaaugagauguacguuuu

SEQ ID NO: 874214 - RNA, 19 nt, Homo sapiens
  misc_RNA (1)...(19): siRNA sense strand
uuacagaaacugaagcuuu

SEQ ID NO: 874215 - RNA, 19 nt, Homo sapiens
  misc_RNA (1)...(19): siRNA sense strand
ccagaaagguaucaaugca

SEQ ID NO: 874216 - RNA, 19 nt, Homo sapiens
  misc_RNA (1)...(19): siRNA sense strand
gacaacaaaucaaauacca

SEQ ID NO: 874217 - RNA, 19 nt, Homo sapiens
  misc_RNA (1)...(19): siRNA sense strand
ggaaacucaucaaacaagu

SEQ ID NO: 874218 - RNA, 19 nt, Homo sapiens
  misc_RNA (1)...(19): siRNA sense strand
uaaacgaaggccaauagua

SEQ ID NO: 874219 - RNA, 19 nt, Homo sapiens
  misc_RNA (1)...(19): siRNA sense strand
caacuucacaguacauuuc

SEQ ID NO: 874220 - RNA, 19 nt, Homo sapiens
  misc_RNA (1)...(19): siRNA sense strand
cuacguaugugaccagugu

SEQ ID NO: 874221 - RNA, 19 nt, Homo sapiens
  misc_RNA (1)...(19): siRNA sense strand
guacauuucucuuugucau

SEQ ID NO: 874222 - RNA, 19 nt, Homo sapiens
  misc_RNA (1)...(19): siRNA sense strand
cacaguacauuucucuuug

SEQ ID NO: 874223 - RNA, 19 nt, Homo sapiens
  misc_RNA (1)...(19): siRNA sense strand
gguagaaagauggaacuua

SEQ ID NO: 874224 - RNA, 19 nt, Homo sapiens
  misc_RNA (1)...(19): siRNA sense strand
caacuucuuagucagguua

SEQ ID NO: 874225 - RNA, 19 nt, Homo sapiens
  misc_RNA (1)...(19): siRNA sense strand
ggagccaacuucacaguac

SEQ ID NO: 874226 - RNA, 19 nt, Homo sapiens
  misc_RNA (1)...(19): siRNA sense strand
gguaaaaucuuucgaacau

SEQ ID NO: 874227 - RNA, 19 nt, Homo sapiens
  misc_RNA (1)...(19): siRNA sense strand
acacugcaaugauuccaaa

SEQ ID NO: 874228 - RNA, 19 nt, Homo sapiens
  misc_RNA (1)...(19): siRNA sense strand
gaauuagagacaacuggua

SEQ ID NO: 874229 - RNA, 19 nt, Homo sapiens
  misc_RNA (1)...(19): siRNA sense strand
caacgugaauuagagacaa

SEQ ID NO: 874230 - RNA, 19 nt, Homo sapiens
  misc_RNA (1)...(19): siRNA sense strand
ucacaguacauuucucuuu

SEQ ID NO: 874231 - RNA, 19 nt, Homo sapiens
  misc_RNA (1)...(19): siRNA sense strand
gguguugagucauuuacuu

SEQ ID NO: 874232 - RNA, 19 nt, Homo sapiens
  misc_RNA (1)...(19): siRNA sense strand
ggcaggaauuggaguauca

SEQ ID NO: 874233 - RNA, 19 nt, Homo sapiens
  misc_RNA (1)...(19): siRNA sense strand
gcccagaaacaacuuauga

SEQ ID NO: 874234 - RNA, 19 nt, Homo sapiens
  misc_RNA (1)...(19): siRNA sense strand
caaaccaguuguacucaca

SEQ ID NO: 874235 - RNA, 19 nt, Homo sapiens
  misc_RNA (1)...(19): siRNA sense strand
gagacucauuccugccuuu

SEQ ID NO: 874236 - RNA, 19 nt, Homo sapiens
  misc_RNA (1)...(19): siRNA sense strand
caggugaugauucuuauuu

SEQ ID NO: 874237 - RNA, 19 nt, Homo sapiens
  misc_RNA (1)...(19): siRNA sense strand
cugcaaugauuccaaacua

SEQ ID NO: 874238 - RNA, 19 nt, Homo sapiens
  misc_RNA (1)...(19): siRNA sense strand
cauguuggcuuugaggaaa

SEQ ID NO: 874239 - RNA, 19 nt, Homo sapiens
  misc_RNA (1)...(19): siRNA sense strand
ugaauugcauacuuuguuc

SEQ ID NO: 874240 - RNA, 19 nt, Homo sapiens
  misc_RNA (1)...(19): siRNA sense strand
ugucaugaauugcauacuu

SEQ ID NO: 874241 - RNA, 19 nt, Homo sapiens
  misc_RNA (1)...(19): siRNA sense strand
ggagccaacaucccaauga

SEQ ID NO: 874242 - RNA, 19 nt, Homo sapiens
  misc_RNA (1)...(19): siRNA sense strand
agaaagcagucauccuguu

SEQ ID NO: 874243 - RNA, 19 nt, Homo sapiens
  misc_RNA (1)...(19): siRNA sense strand
aagugaagaucaacuguau

SEQ ID NO: 874244 - RNA, 19 nt, Homo sapiens
  misc_RNA (1)...(19): siRNA sense strand
ccucagaccagaaugcuuu

SEQ ID NO: 874245 - RNA, 19 nt, Homo sapiens
  misc_RNA (1)...(19): siRNA sense strand
guaauaaccgagagaagau

SEQ ID NO: 874246 - RNA, 19 nt, Homo sapiens
  misc_RNA (1)...(19): siRNA sense strand
ucacagaagcccagaaaca

SEQ ID NO: 874247 - RNA, 19 nt, Homo sapiens
  misc_RNA (1)...(19): siRNA sense strand
caacaagacgcucaggaau

SEQ ID NO: 874248 - RNA, 19 nt, Homo sapiens
  misc_RNA (1)...(19): siRNA sense strand
gaaagaguuuacguuuaca

SEQ ID NO: 874249 - RNA, 19 nt, Homo sapiens
  misc_RNA (1)...(19): siRNA sense strand
aaagcaagaagaaccauuu

SEQ ID NO: 874250 - RNA, 19 nt, Homo sapiens
  misc_RNA (1)...(19): siRNA sense strand
aaucucugcuucaaaguga

SEQ ID NO: 874251 - RNA, 19 nt, Homo sapiens
  misc_RNA (1)...(19): siRNA sense strand
ccaacgaguuacugagaau

SEQ ID NO: 874252 - RNA, 19 nt, Homo sapiens
  misc_RNA (1)...(19): siRNA sense strand
gaaacaacuuaugauaugc

SEQ ID NO: 874253 - RNA, 19 nt, Homo sapiens
  misc_RNA (1)...(19): siRNA sense strand
ucaaaggaaacucaucaaa

SEQ ID NO: 874254 - RNA, 19 nt, Homo sapiens
  misc_RNA (1)...(19): siRNA sense strand
ucaggaauuucuuugugaa

SEQ ID NO: 874255 - RNA, 19 nt, Homo sapiens
  misc_RNA (1)...(19): siRNA sense strand
gaaagauggaacuuauuca

SEQ ID NO: 874256 - RNA, 19 nt, Homo sapiens
  misc_RNA (1)...(19): siRNA sense strand
aaaguaugccuccaagaaa

SEQ ID NO: 874257 - RNA, 19 nt, Homo sapiens
  misc_RNA (1)...(19): siRNA sense strand
aaagcagaauuggaaagua

SEQ ID NO: 874258 - RNA, 19 nt, Homo sapiens
  misc_RNA (1)...(19): siRNA sense strand
cacaggagaaggauacuaa

SEQ ID NO: 874259 - RNA, 19 nt, Homo sapiens
  misc_RNA (1)...(19): siRNA sense strand
gccaacaucccaaugaaga

SEQ ID NO: 874260 - RNA, 19 nt, Homo sapiens
  misc_RNA (1)...(19): siRNA sense strand
gacugcaccucaaacgauu

SEQ ID NO: 874261 - RNA, 19 nt, Homo sapiens
  misc_RNA (1)...(19): siRNA sense strand
gaaccuuucugggacuugu

SEQ ID NO: 874262 - RNA, 19 nt, Homo sapiens
  misc_RNA (1)...(19): siRNA sense strand
caaaggaaacucaucaaac

SEQ ID NO: 874263 - RNA, 19 nt, Homo sapiens
  misc_RNA (1)...(19): siRNA sense strand
ccaacaagacgcucaggaa

SEQ ID NO: 874264 - RNA, 19 nt, Homo sapiens
  misc_RNA (1)...(19): siRNA sense strand
gaacuuauucagccaaagg

SEQ ID NO: 874265 - RNA, 19 nt, Homo sapiens
  misc_RNA (1)...(19): siRNA sense strand
cuucagguguugagucauu

SEQ ID NO: 874266 - RNA, 19 nt, Homo sapiens
  misc_RNA (1)...(19): siRNA sense strand
ccaagaaagaguuuacguu

SEQ ID NO: 874267 - RNA, 19 nt, Homo sapiens
  misc_RNA (1)...(19): siRNA sense strand
uggguacacugcaaugauu

SEQ ID NO: 874268 - RNA, 19 nt, Homo sapiens
  misc_RNA (1)...(19): siRNA sense strand
ugcaaugauuccaaacuaa

SEQ ID NO: 874269 - RNA, 19 nt, Homo sapiens
  misc_RNA (1)...(19): siRNA sense strand
cuaagcaugugcacuaugg

SEQ ID NO: 874270 - RNA, 19 nt, Homo sapiens
  misc_RNA (1)...(19): siRNA sense strand
gauaccucgucuaaugaaa

SEQ ID NO: 874271 - RNA, 19 nt, Homo sapiens
  misc_RNA (1)...(19): siRNA sense strand
uaugcaaggcucaagcuua

SEQ ID NO: 874272 - RNA, 19 nt, Homo sapiens
  misc_RNA (1)...(19): siRNA sense strand
gcaugugcacuauggauga

SEQ ID NO: 874273 - RNA, 19 nt, Homo sapiens
  misc_RNA (1)...(19): siRNA sense strand
gcaaagcucuguagcauuu

SEQ ID NO: 874274 - RNA, 19 nt, Homo sapiens
  misc_RNA (1)...(19): siRNA sense strand
gagaaucccuuaguaauua

SEQ ID NO: 874275 - RNA, 19 nt, Homo sapiens
  misc_RNA (1)...(19): siRNA sense strand
gcacaagccuccacuacuu

SEQ ID NO: 874276 - RNA, 19 nt, Homo sapiens
  misc_RNA (1)...(19): siRNA sense strand
gaaaauaccuguugcagaa

SEQ ID NO: 874277 - RNA, 19 nt, Homo sapiens
  misc_RNA (1)...(19): siRNA sense strand
ggcaaaggcagccauauua

SEQ ID NO: 874278 - RNA, 19 nt, Homo sapiens
  misc_RNA (1)...(19): siRNA sense strand
caaggaguauacaagaaua

SEQ ID NO: 874279 - RNA, 19 nt, Homo sapiens
  misc_RNA (1)...(19): siRNA sense strand
gaagaaacaccucaaugga

SEQ ID NO: 874280 - RNA, 19 nt, Homo sapiens
  misc_RNA (1)...(19): siRNA sense strand
agaaugaugugaaagcaaa

SEQ ID NO: 874281 - RNA, 19 nt, Homo sapiens
  misc_RNA (1)...(19): siRNA sense strand
caaagagcauguuauccuu

SEQ ID NO: 874282 - RNA, 19 nt, Homo sapiens
  misc_RNA (1)...(19): siRNA sense strand
agauaaaccuguuaacuca

SEQ ID NO: 874283 - RNA, 19 nt, Homo sapiens
  misc_RNA (1)...(19): siRNA sense strand
gaagaacaggauaccauuu

SEQ ID NO: 874284 - RNA, 19 nt, Homo sapiens
  misc_RNA (1)...(19): siRNA sense strand
gggaagccacccacaguua

SEQ ID NO: 874285 - RNA, 19 nt, Homo sapiens
  misc_RNA (1)...(19): siRNA sense strand
ggauaccauuugccaauug

SEQ ID NO: 874286 - RNA, 19 nt, Homo sapiens
  misc_RNA (1)...(19): siRNA sense strand
ugacaaguaccaagaauga

SEQ ID NO: 874287 - RNA, 19 nt, Homo sapiens
  misc_RNA (1)...(19): siRNA sense strand
cagcuuugauucauucuga

SEQ ID NO: 874288 - RNA, 19 nt, Homo sapiens
  misc_RNA (1)...(19): siRNA sense strand
aaauaccuguugcagaaua

SEQ ID NO: 874289 - RNA, 19 nt, Homo sapiens
  misc_RNA (1)...(19): siRNA sense strand
ggaagccacccacaguuaa

SEQ ID NO: 874290 - RNA, 19 nt, Homo sapiens
  misc_RNA (1)...(19): siRNA sense strand
gcaaaggcagccauauuau

SEQ ID NO: 874291 - RNA, 19 nt, Homo sapiens
  misc_RNA (1)...(19): siRNA sense strand
gcacugcaguccagaagag

SEQ ID NO: 874292 - RNA, 19 nt, Homo sapiens
  misc_RNA (1)...(19): siRNA sense strand
gcaaggaguauacaagaau

SEQ ID NO: 874293 - RNA, 19 nt, Homo sapiens
  misc_RNA (1)...(19): siRNA sense strand
gagauaaaccuguuaacuc

SEQ ID NO: 874294 - RNA, 19 nt, Homo sapiens
  misc_RNA (1)...(19): siRNA sense strand
ggaagaaauuaaggccaaa

SEQ ID NO: 874295 - RNA, 19 nt, Homo sapiens
  misc_RNA (1)...(19): siRNA sense strand
agaagagucugccacauca

SEQ ID NO: 874296 - RNA, 19 nt, Homo sapiens
  misc_RNA (1)...(19): siRNA sense strand
gggcaaaggcagccauauu

SEQ ID NO: 874297 - RNA, 19 nt, Homo sapiens
  misc_RNA (1)...(19): siRNA sense strand
caaccagagugucaaguca

SEQ ID NO: 874298 - RNA, 19 nt, Homo sapiens
  misc_RNA (1)...(19): siRNA sense strand
uaccaagaaugaugugaaa

SEQ ID NO: 874299 - RNA, 19 nt, Homo sapiens
  misc_RNA (1)...(19): siRNA sense strand
gaugacaaguaccaagaau

SEQ ID NO: 874300 - RNA, 19 nt, Homo sapiens
  misc_RNA (1)...(19): siRNA sense strand
caaaagugcugaccagaga

SEQ ID NO: 874301 - RNA, 19 nt, Homo sapiens
  misc_RNA (1)...(19): siRNA sense strand
gagaaugcauuuggaacau

SEQ ID NO: 874302 - RNA, 19 nt, Homo sapiens
  misc_RNA (1)...(19): siRNA sense strand
ugagaaucccuuaguaauu

SEQ ID NO: 874303 - RNA, 19 nt, Homo sapiens
  misc_RNA (1)...(19): siRNA sense strand
uggccagucuaacuacuua

SEQ ID NO: 874304 - RNA, 19 nt, Homo sapiens
  misc_RNA (1)...(19): siRNA sense strand
gaagccacccacaguuaaa

SEQ ID NO: 874305 - RNA, 19 nt, Homo sapiens
  misc_RNA (1)...(19): siRNA sense strand
aagagugggucucagcuuu

SEQ ID NO: 874306 - RNA, 19 nt, Homo sapiens
  misc_RNA (1)...(19): siRNA sense strand
gagaagaacaggauaccau

SEQ ID NO: 874307 - RNA, 19 nt, Homo sapiens
  misc_RNA (1)...(19): siRNA sense strand
cagugagaaucccuuagua

SEQ ID NO: 874308 - RNA, 19 nt, Homo sapiens
  misc_RNA (1)...(19): siRNA sense strand
ccaaaggcaugcucuacuc

SEQ ID NO: 874309 - RNA, 19 nt, Homo sapiens
  misc_RNA (1)...(19): siRNA sense strand
caagaaugaugugaaagca

SEQ ID NO: 874310 - RNA, 19 nt, Homo sapiens
  misc_RNA (1)...(19): siRNA sense strand
gagugggucucagcuuuga

SEQ ID NO: 874311 - RNA, 19 nt, Homo sapiens
  misc_RNA (1)...(19): siRNA sense strand
ggucucagcuuugauucau

SEQ ID NO: 874312 - RNA, 19 nt, Homo sapiens
  misc_RNA (1)...(19): siRNA sense strand
guacugugaaugaugauga

SEQ ID NO: 874313 - RNA, 19 nt, Homo sapiens
  misc_RNA (1)...(19): siRNA sense strand
gaauauuucagcaaaccaa

SEQ ID NO: 874314 - RNA, 19 nt, Homo sapiens
  misc_RNA (1)...(19): siRNA sense strand
uaaaucaccacccacaguu

SEQ ID NO: 874315 - RNA, 19 nt, Homo sapiens
  misc_RNA (1)...(19): siRNA sense strand
gaugagaaugcauuuggaa

SEQ ID NO: 874316 - RNA, 19 nt, Homo sapiens
  misc_RNA (1)...(19): siRNA sense strand
uaacucaucacagaagaaa

SEQ ID NO: 874317 - RNA, 19 nt, Homo sapiens
  misc_RNA (1)...(19): siRNA sense strand
ggaacauugugggaaguug

SEQ ID NO: 874318 - RNA, 19 nt, Homo sapiens
  misc_RNA (1)...(19): siRNA sense strand
ccagaagagcccuguaaga

SEQ ID NO: 874319 - RNA, 19 nt, Homo sapiens
  misc_RNA (1)...(19): siRNA sense strand
ugcagaauauuucagcaaa

SEQ ID NO: 874320 - RNA, 19 nt, Homo sapiens
  misc_RNA (1)...(19): siRNA sense strand
agucaaggaucugaagaaa

SEQ ID NO: 874321 - RNA, 19 nt, Homo sapiens
  misc_RNA (1)...(19): siRNA sense strand
cuaucuggaucaggaaaua

SEQ ID NO: 874322 - RNA, 19 nt, Homo sapiens
  misc_RNA (1)...(19): siRNA sense strand
guaccaagaaugaugugaa

SEQ ID NO: 874323 - RNA, 19 nt, Homo sapiens
  misc_RNA (1)...(19): siRNA sense strand
aagaaacaccucaauggaa

SEQ ID NO: 874324 - RNA, 19 nt, Homo sapiens
  misc_RNA (1)...(19): siRNA sense strand
cagcaaggaguauacaaga

SEQ ID NO: 874325 - RNA, 19 nt, Homo sapiens
  misc_RNA (1)...(19): siRNA sense strand
cacaagccuccacuacuua

SEQ ID NO: 874326 - RNA, 19 nt, Homo sapiens
  misc_RNA (1)...(19): siRNA sense strand
cccaaacggugccaaagug

SEQ ID NO: 874327 - RNA, 19 nt, Homo sapiens
  misc_RNA (1)...(19): siRNA sense strand
gcagaauauuucagcaaac

SEQ ID NO: 874328 - RNA, 19 nt, Homo sapiens
  misc_RNA (1)...(19): siRNA sense strand
auuccaaucuguacuguga

SEQ ID NO: 874329 - RNA, 19 nt, Homo sapiens
  misc_RNA (1)...(19): siRNA sense strand
gugagaaucccuuaguaau

SEQ ID NO: 874330 - RNA, 19 nt, Homo sapiens
  misc_RNA (1)...(19): siRNA sense strand
cagaagagcccuguaagag

SEQ ID NO: 874331 - RNA, 19 nt, Homo sapiens
  misc_RNA (1)...(19): siRNA sense strand
gaucaaccaaccagagugu

SEQ ID NO: 874332 - RNA, 19 nt, Homo sapiens
  misc_RNA (1)...(19): siRNA sense strand
cagaagaaacaccucaaug

SEQ ID NO: 874333 - RNA, 19 nt, Homo sapiens
  misc_RNA (1)...(19): siRNA sense strand
uggcaaagcucuguagcau

SEQ ID NO: 874334 - RNA, 19 nt, Homo sapiens
  misc_RNA (1)...(19): siRNA sense strand
aaagagugcuucaaaacuu

SEQ ID NO: 874335 - RNA, 19 nt, Homo sapiens
  misc_RNA (1)...(19): siRNA sense strand
ucuguacugugaaugauga

SEQ ID NO: 874336 - RNA, 19 nt, Homo sapiens
  misc_RNA (1)...(19): siRNA sense strand
caaucuguacugugaauga

SEQ ID NO: 874337 - RNA, 19 nt, Homo sapiens
  misc_RNA (1)...(19): siRNA sense strand
gggaugacaaguaccaaga

SEQ ID NO: 874338 - RNA, 19 nt, Homo sapiens
  misc_RNA (1)...(19): siRNA sense strand
ccaaagagcauguuauccu

SEQ ID NO: 874339 - RNA, 19 nt, Homo sapiens
  misc_RNA (1)...(19): siRNA sense strand
caaaagaggcugagcacaa

SEQ ID NO: 874340 - RNA, 19 nt, Homo sapiens
  misc_RNA (1)...(19): siRNA sense strand
agaagaaacaccucaaugg

SEQ ID NO: 874341 - RNA, 19 nt, Homo sapiens
  misc_RNA (1)...(19): siRNA sense strand
ucucagcuuugauucauuc

SEQ ID NO: 874342 - RNA, 19 nt, Homo sapiens
  misc_RNA (1)...(19): siRNA sense strand
ggaugacaaguaccaagaa

SEQ ID NO: 874343 - RNA, 19 nt, Homo sapiens
  misc_RNA (1)...(19): siRNA sense strand
gaaugaugaugagaaugca

SEQ ID NO: 874344 - RNA, 19 nt, Homo sapiens
  misc_RNA (1)...(19): siRNA sense strand
ccacuacuuauaagaagaa

SEQ ID NO: 874345 - RNA, 19 nt, Homo sapiens
  misc_RNA (1)...(19): siRNA sense strand
ucaaggaucugaagaaaac

SEQ ID NO: 874346 - RNA, 19 nt, Homo sapiens
  misc_RNA (1)...(19): siRNA sense strand
aaagugcugaccagagaua

SEQ ID NO: 874347 - RNA, 19 nt, Homo sapiens
  misc_RNA (1)...(19): siRNA sense strand
guuaacucaucacagaaga

SEQ ID NO: 874348 - RNA, 19 nt, Homo sapiens
  misc_RNA (1)...(19): siRNA sense strand
aagaacaggauaccauuug

SEQ ID NO: 874349 - RNA, 19 nt, Homo sapiens
  misc_RNA (1)...(19): siRNA sense strand
gagcacaagccuccacuac

SEQ ID NO: 874350 - RNA, 19 nt, Homo sapiens
  misc_RNA (1)...(19): siRNA sense strand
auucugagcuugccgagau

SEQ ID NO: 874351 - RNA, 19 nt, Homo sapiens
  misc_RNA (1)...(19): siRNA sense strand
cuucagggaugacaaguac

SEQ ID NO: 874352 - RNA, 19 nt, Homo sapiens
  misc_RNA (1)...(19): siRNA sense strand
caaaggcuugaauaacauu

SEQ ID NO: 874353 - RNA, 19 nt, Homo sapiens
  misc_RNA (1)...(19): siRNA sense strand
gggaaguuggccagucuaa

SEQ ID NO: 874354 - RNA, 19 nt, Homo sapiens
  misc_RNA (1)...(19): siRNA sense strand
ugugaaugaugaugagaau

SEQ ID NO: 874355 - RNA, 19 nt, Homo sapiens
  misc_RNA (1)...(19): siRNA sense strand
aaucaccacccacaguuaa

SEQ ID NO: 874356 - RNA, 19 nt, Homo sapiens
  misc_RNA (1)...(19): siRNA sense strand
guccagaagagcccuguaa

SEQ ID NO: 874357 - RNA, 19 nt, Homo sapiens
  misc_RNA (1)...(19): siRNA sense strand
caggauaccauuugccaau

SEQ ID NO: 874358 - RNA, 19 nt, Homo sapiens
  misc_RNA (1)...(19): siRNA sense strand
agaagaacaggauaccauu

SEQ ID NO: 874359 - RNA, 19 nt, Homo sapiens
  misc_RNA (1)...(19): siRNA sense strand
auaaaccuguuaacucauc

SEQ ID NO: 874360 - RNA, 19 nt, Homo sapiens
  misc_RNA (1)...(19): siRNA sense strand
acaaguaccaagaaugaug

SEQ ID NO: 874361 - RNA, 19 nt, Homo sapiens
  misc_RNA (1)...(19): siRNA sense strand
caaguaccaagaaugaugu

SEQ ID NO: 874362 - RNA, 19 nt, Homo sapiens
  misc_RNA (1)...(19): siRNA sense strand
aagagcauguuauccuuca

SEQ ID NO: 874363 - RNA, 19 nt, Homo sapiens
  misc_RNA (1)...(19): siRNA sense strand
gagggcaaaggcagccaua

SEQ ID NO: 874364 - RNA, 19 nt, Homo sapiens
  misc_RNA (1)...(19): siRNA sense strand
aaaucaccacccacaguua

SEQ ID NO: 874365 - RNA, 19 nt, Homo sapiens
  misc_RNA (1)...(19): siRNA sense strand
ugaugagaaugcauuugga

SEQ ID NO: 874366 - RNA, 19 nt, Homo sapiens
  misc_RNA (1)...(19): siRNA sense strand
aaacaccauuugcauacca

SEQ ID NO: 874367 - RNA, 19 nt, Homo sapiens
  misc_RNA (1)...(19): siRNA sense strand
gugaaagcaaacaccauuu

SEQ ID NO: 874368 - RNA, 19 nt, Homo sapiens
  misc_RNA (1)...(19): siRNA sense strand
aagccuccacuacuuauaa

SEQ ID NO: 874369 - RNA, 19 nt, Homo sapiens
  misc_RNA (1)...(19): siRNA sense strand
ugugaaagcaaacaccauu

SEQ ID NO: 874370 - RNA, 19 nt, Homo sapiens
  misc_RNA (1)...(19): siRNA sense strand
ggaaccagcagcagagacu

SEQ ID NO: 874371 - RNA, 19 nt, Homo sapiens
  misc_RNA (1)...(19): siRNA sense strand
caaccucuguccccaaaga

SEQ ID NO: 874372 - RNA, 19 nt, Homo sapiens
  misc_RNA (1)...(19): siRNA sense strand
aaaccagugucagcaagga

SEQ ID NO: 874373 - RNA, 19 nt, Homo sapiens
  misc_RNA (1)...(19): siRNA sense strand
cagaaugguucaauguaua

SEQ ID NO: 874374 - RNA, 19 nt, Homo sapiens
  misc_RNA (1)...(19): siRNA sense strand
ggaauuaagugagagagau

SEQ ID NO: 874375 - RNA, 19 nt, Homo sapiens
  misc_RNA (1)...(19): siRNA sense strand
ggagaggaaccaagcuaua

SEQ ID NO: 874376 - RNA, 19 nt, Homo sapiens
  misc_RNA (1)...(19): siRNA sense strand
ccagaaugguucaauguau

SEQ ID NO: 874377 - RNA, 19 nt, Homo sapiens
  misc_RNA (1)...(19): siRNA sense strand
gcaggauggucggaauuaa

SEQ ID NO: 874378 - RNA, 19 nt, Homo sapiens
  misc_RNA (1)...(19): siRNA sense strand
aaucaggcauuuggcuuua

SEQ ID NO: 874379 - RNA, 19 nt, Homo sapiens
  misc_RNA (1)...(19): siRNA sense strand
aagcuauacuugaccuuaa

SEQ ID NO: 874380 - RNA, 19 nt, Homo sapiens
  misc_RNA (1)...(19): siRNA sense strand
gcagcaggauggucggaau

SEQ ID NO: 874381 - RNA, 19 nt, Homo sapiens
  misc_RNA (1)...(19): siRNA sense strand
gaagcuggccaaguuuauu

SEQ ID NO: 874382 - RNA, 19 nt, Homo sapiens
  misc_RNA (1)...(19): siRNA sense strand
gaggagaggaaccaagcua

SEQ ID NO: 874383 - RNA, 19 nt, Homo sapiens
  misc_RNA (1)...(19): siRNA sense strand
aagcagagaagaugaauca

SEQ ID NO: 874384 - RNA, 19 nt, Homo sapiens
  misc_RNA (1)...(19): siRNA sense strand
gcggccaugucaucaggua

SEQ ID NO: 874385 - RNA, 19 nt, Homo sapiens
  misc_RNA (1)...(19): siRNA sense strand
gugaagcuggccaaguuua

SEQ ID NO: 874386 - RNA, 19 nt, Homo sapiens
  misc_RNA (1)...(19): siRNA sense strand
gaauuaagugagagagaug

SEQ ID NO: 874387 - RNA, 19 nt, Homo sapiens
  misc_RNA (1)...(19): siRNA sense strand
ggcuuuaugucccgaguug

SEQ ID NO: 874388 - RNA, 19 nt, Homo sapiens
  misc_RNA (1)...(19): siRNA sense strand
agauaacucucaccucaca

SEQ ID NO: 874389 - RNA, 19 nt, Homo sapiens
  misc_RNA (1)...(19): siRNA sense strand
agaauucuccuuccacaau

SEQ ID NO: 874390 - RNA, 19 nt, Homo sapiens
  misc_RNA (1)...(19): siRNA sense strand
acaacaagguccagauaac

SEQ ID NO: 874391 - RNA, 19 nt, Homo sapiens
  misc_RNA (1)...(19): siRNA sense strand
acaaagaauucuccuucca

SEQ ID NO: 874392 - RNA, 19 nt, Homo sapiens
  misc_RNA (1)...(19): siRNA sense strand
auacaacaagguccagaua

SEQ ID NO: 874393 - RNA, 19 nt, Homo sapiens
  misc_RNA (1)...(19): siRNA sense strand
gagaggaaccaagcuauac

SEQ ID NO: 874394 - RNA, 19 nt, Homo sapiens
  misc_RNA (1)...(19): siRNA sense strand
caucagguacucacagguu

SEQ ID NO: 874395 - RNA, 19 nt, Homo sapiens
  misc_RNA (1)...(19): siRNA sense strand
ugaaucaucacccagaaug

SEQ ID NO: 874396 - RNA, 19 nt, Homo sapiens
  misc_RNA (1)...(19): siRNA sense strand
gauggucggaauuaaguga

SEQ ID NO: 874397 - RNA, 19 nt, Homo sapiens
  misc_RNA (1)...(19): siRNA sense strand
gaggaaccaagcuauacuu

SEQ ID NO: 874398 - RNA, 19 nt, Homo sapiens
  misc_RNA (1)...(19): siRNA sense strand
uaaucaggcauuuggcuuu

SEQ ID NO: 874399 - RNA, 19 nt, Homo sapiens
  misc_RNA (1)...(19): siRNA sense strand
gguucaauguauacaacaa

SEQ ID NO: 874400 - RNA, 19 nt, Homo sapiens
  misc_RNA (1)...(19): siRNA sense strand
ucaggcauuuggcuuuaug

SEQ ID NO: 874401 - RNA, 19 nt, Homo sapiens
  misc_RNA (1)...(19): siRNA sense strand
gguacucacagguugauug

SEQ ID NO: 874402 - RNA, 19 nt, Homo sapiens
  misc_RNA (1)...(19): siRNA sense strand
augugaagcuggccaaguu

SEQ ID NO: 874403 - RNA, 19 nt, Homo sapiens
  misc_RNA (1)...(19): siRNA sense strand
uacaacaagguccagauaa

SEQ ID NO: 874404 - RNA, 19 nt, Homo sapiens
  misc_RNA (1)...(19): siRNA sense strand
caacaagguccagauaacu

SEQ ID NO: 874405 - RNA, 19 nt, Homo sapiens
  misc_RNA (1)...(19): siRNA sense strand
cuacaagcagagaagauga

SEQ ID NO: 874406 - RNA, 19 nt, Homo sapiens
  misc_RNA (1)...(19): siRNA sense strand
uaacucucaccucacauga

SEQ ID NO: 874407 - RNA, 19 nt, Homo sapiens
  misc_RNA (1)...(19): siRNA sense strand
gucccgaguugcccuacaa

SEQ ID NO: 874408 - RNA, 19 nt, Homo sapiens
  misc_RNA (1)...(19): siRNA sense strand
cacccagaaugguucaaug

SEQ ID NO: 874409 - RNA, 19 nt, Homo sapiens
  misc_RNA (1)...(19): siRNA sense strand
cccagaaugguucaaugua

SEQ ID NO: 874410 - RNA, 19 nt, Homo sapiens
  misc_RNA (1)...(19): siRNA sense strand
ugaagcuggccaaguuuau

SEQ ID NO: 874411 - RNA, 19 nt, Homo sapiens
  misc_RNA (1)...(19): siRNA sense strand
cuggccaaguuuauugaaa

SEQ ID NO: 874412 - RNA, 19 nt, Homo sapiens
  misc_RNA (1)...(19): siRNA sense strand
aagcuggccaaguuuauug

SEQ ID NO: 874413 - RNA, 19 nt, Homo sapiens
  misc_RNA (1)...(19): siRNA sense strand
cagcaggauggucggaauu

SEQ ID NO: 874414 - RNA, 19 nt, Homo sapiens
  misc_RNA (1)...(19): siRNA sense strand
agcuauacuugaccuuaaa

SEQ ID NO: 874415 - RNA, 19 nt, Homo sapiens
  misc_RNA (1)...(19): siRNA sense strand
caucauccguucacaaagu

SEQ ID NO: 874416 - RNA, 19 nt, Homo sapiens
  misc_RNA (1)...(19): siRNA sense strand
gcuuguuccugcuccagaa

SEQ ID NO: 874417 - RNA, 19 nt, Homo sapiens
  misc_RNA (1)...(19): siRNA sense strand
ggacucaugcccgaagugu

SEQ ID NO: 874418 - RNA, 19 nt, Homo sapiens
  misc_RNA (1)...(19): siRNA sense strand
cagccucgccuccacauca

SEQ ID NO: 874419 - RNA, 19 nt, Homo sapiens
  misc_RNA (1)...(19): siRNA sense strand
ugcaucauccguucacaaa

SEQ ID NO: 874420 - RNA, 19 nt, Homo sapiens
  misc_RNA (1)...(19): siRNA sense strand
gaguguagaggagaugaga

SEQ ID NO: 874421 - RNA, 19 nt, Homo sapiens
  misc_RNA (1)...(19): siRNA sense strand
ggaaguagcuggaaauauu

SEQ ID NO: 874422 - RNA, 19 nt, Homo sapiens
  misc_RNA (1)...(19): siRNA sense strand
gaacuugacuaccucauua

SEQ ID NO: 874423 - RNA, 19 nt, Homo sapiens
  misc_RNA (1)...(19): siRNA sense strand
gaagaagugcuacauaauu

SEQ ID NO: 874424 - RNA, 19 nt, Homo sapiens
  misc_RNA (1)...(19): siRNA sense strand
ugaaggaucuacugucuaa

SEQ ID NO: 874425 - RNA, 19 nt, Homo sapiens
  misc_RNA (1)...(19): siRNA sense strand
aaacugaccugcccugaaa

SEQ ID NO: 874426 - RNA, 19 nt, Homo sapiens
  misc_RNA (1)...(19): siRNA sense strand
gaagcaagauacaccuaaa

SEQ ID NO: 874427 - RNA, 19 nt, Homo sapiens
  misc_RNA (1)...(19): siRNA sense strand
guuggaagcuguagagaaa

SEQ ID NO: 874428 - RNA, 19 nt, Homo sapiens
  misc_RNA (1)...(19): siRNA sense strand
gaagcaaacuccaaagucu

SEQ ID NO: 874429 - RNA, 19 nt, Homo sapiens
  misc_RNA (1)...(19): siRNA sense strand
ugacagaaguagauuauuc

SEQ ID NO: 874430 - RNA, 19 nt, Homo sapiens
  misc_RNA (1)...(19): siRNA sense strand
gcacuuacguuuucauuuu

SEQ ID NO: 874431 - RNA, 19 nt, Homo sapiens
  misc_RNA (1)...(19): siRNA sense strand
ucaaaugcuugcuugguua

SEQ ID NO: 874432 - RNA, 19 nt, Homo sapiens
  misc_RNA (1)...(19): siRNA sense strand
ucaagagacugcaaauuau

SEQ ID NO: 874433 - RNA, 19 nt, Homo sapiens
  misc_RNA (1)...(19): siRNA sense strand
gaacagaacaccaccaagu

SEQ ID NO: 874434 - RNA, 19 nt, Homo sapiens
  misc_RNA (1)...(19): siRNA sense strand
acaaguaucucaagcauca

SEQ ID NO: 874435 - RNA, 19 nt, Homo sapiens
  misc_RNA (1)...(19): siRNA sense strand
ugauggaacuauucaagua

SEQ ID NO: 874436 - RNA, 19 nt, Homo sapiens
  misc_RNA (1)...(19): siRNA sense strand
gaacacagaacccaaagau

SEQ ID NO: 874437 - RNA, 19 nt, Homo sapiens
  misc_RNA (1)...(19): siRNA sense strand
caacugccaucuauacaug

SEQ ID NO: 874438 - RNA, 19 nt, Homo sapiens
  misc_RNA (1)...(19): siRNA sense strand
cagcaagccucauaccaaa

SEQ ID NO: 874439 - RNA, 19 nt, Homo sapiens
  misc_RNA (1)...(19): siRNA sense strand
ggagauuaauaaccaauuc

SEQ ID NO: 874440 - RNA, 19 nt, Homo sapiens
  misc_RNA (1)...(19): siRNA sense strand
ggacucauaugccuuaaac

SEQ ID NO: 874441 - RNA, 19 nt, Homo sapiens
  misc_RNA (1)...(19): siRNA sense strand
agaccaaccuauuguguuu

SEQ ID NO: 874442 - RNA, 19 nt, Homo sapiens
  misc_RNA (1)...(19): siRNA sense strand
caaagaagcaaacuccaaa

SEQ ID NO: 874443 - RNA, 19 nt, Homo sapiens
  misc_RNA (1)...(19): siRNA sense strand
gaacagaggaaacaagaca

SEQ ID NO: 874444 - RNA, 19 nt, Homo sapiens
  misc_RNA (1)...(19): siRNA sense strand
gauacaaccacaagaguuu

SEQ ID NO: 874445 - RNA, 19 nt, Homo sapiens
  misc_RNA (1)...(19): siRNA sense strand
agagaaauaugaagaagug

SEQ ID NO: 874446 - RNA, 19 nt, Homo sapiens
  misc_RNA (1)...(19): siRNA sense strand
caacgaaaccuuuaacagu

SEQ ID NO: 874447 - RNA, 19 nt, Homo sapiens
  misc_RNA (1)...(19): siRNA sense strand
gaaauaugaagaagugcua

SEQ ID NO: 874448 - RNA, 19 nt, Homo sapiens
  misc_RNA (1)...(19): siRNA sense strand
cucaagagacugcaaauua

SEQ ID NO: 874449 - RNA, 19 nt, Homo sapiens
  misc_RNA (1)...(19): siRNA sense strand
ggaaacaagacaccucaaa

SEQ ID NO: 874450 - RNA, 19 nt, Homo sapiens
  misc_RNA (1)...(19): siRNA sense strand
gaaagaaaugaaagucuga

SEQ ID NO: 874451 - RNA, 19 nt, Homo sapiens
  misc_RNA (1)...(19): siRNA sense strand
caggcuaucuucuuuauca

SEQ ID NO: 874452 - RNA, 19 nt, Homo sapiens
  misc_RNA (1)...(19): siRNA sense strand
ucacagauuucuccaaagu

SEQ ID NO: 874453 - RNA, 19 nt, Homo sapiens
  misc_RNA (1)...(19): siRNA sense strand
gagccuagaucuacuaaaa

SEQ ID NO: 874454 - RNA, 19 nt, Homo sapiens
  misc_RNA (1)...(19): siRNA sense strand
ucaccuggcuacaaucaaa

SEQ ID NO: 874455 - RNA, 19 nt, Homo sapiens
  misc_RNA (1)...(19): siRNA sense strand
ccaggaaguugaacacaga

SEQ ID NO: 874456 - RNA, 19 nt, Homo sapiens
  misc_RNA (1)...(19): siRNA sense strand
ggucuacucugccggaaga

SEQ ID NO: 874457 - RNA, 19 nt, Homo sapiens
  misc_RNA (1)...(19): siRNA sense strand
gcuaauacaaucagagaaa

SEQ ID NO: 874458 - RNA, 19 nt, Homo sapiens
  misc_RNA (1)...(19): siRNA sense strand
ggaggaagaaaugcuaaua

SEQ ID NO: 874459 - RNA, 19 nt, Homo sapiens
  misc_RNA (1)...(19): siRNA sense strand
uggaagcuguagagaaaua

SEQ ID NO: 874460 - RNA, 19 nt, Homo sapiens
  misc_RNA (1)...(19): siRNA sense strand
guuccaagcuagagaguau

SEQ ID NO: 874461 - RNA, 19 nt, Homo sapiens
  misc_RNA (1)...(19): siRNA sense strand
ccaaagcuguggccaguuc

SEQ ID NO: 874462 - RNA, 19 nt, Homo sapiens
  misc_RNA (1)...(19): siRNA sense strand
gaccugcccugaaagaaau

SEQ ID NO: 874463 - RNA, 19 nt, Homo sapiens
  misc_RNA (1)...(19): siRNA sense strand
guacaaguaucucaagcau

SEQ ID NO: 874464 - RNA, 19 nt, Homo sapiens
  misc_RNA (1)...(19): siRNA sense strand
gaaagaacaagauccaaag

SEQ ID NO: 874465 - RNA, 19 nt, Homo sapiens
  misc_RNA (1)...(19): siRNA sense strand
augaagaagugcuacauaa

SEQ ID NO: 874466 - RNA, 19 nt, Homo sapiens
  misc_RNA (1)...(19): siRNA sense strand
caaaaucuguccagucaaa

SEQ ID NO: 874467 - RNA, 19 nt, Homo sapiens
  misc_RNA (1)...(19): siRNA sense strand
ggaccacucccauguguga

SEQ ID NO: 874468 - RNA, 19 nt, Homo sapiens
  misc_RNA (1)...(19): siRNA sense strand
caguucagcugcagaaaga

SEQ ID NO: 874469 - RNA, 19 nt, Homo sapiens
  misc_RNA (1)...(19): siRNA sense strand
guugggauaugcuuacuga

SEQ ID NO: 874470 - RNA, 19 nt, Homo sapiens
  misc_RNA (1)...(19): siRNA sense strand
ggaagaaaugcuaauacaa

SEQ ID NO: 874471 - RNA, 19 nt, Homo sapiens
  misc_RNA (1)...(19): siRNA sense strand
ggaagcaagauacaccuaa

SEQ ID NO: 874472 - RNA, 19 nt, Homo sapiens
  misc_RNA (1)...(19): siRNA sense strand
uaacagacgcuauaugaca

SEQ ID NO: 874473 - RNA, 19 nt, Homo sapiens
  misc_RNA (1)...(19): siRNA sense strand
ucauaugccuuaaacacaa

SEQ ID NO: 874474 - RNA, 19 nt, Homo sapiens
  misc_RNA (1)...(19): siRNA sense strand
cuggaaauauucuacguuu

SEQ ID NO: 874475 - RNA, 19 nt, Homo sapiens
  misc_RNA (1)...(19): siRNA sense strand
ggagcaauuuauggaagua

SEQ ID NO: 874476 - RNA, 19 nt, Homo sapiens
  misc_RNA (1)...(19): siRNA sense strand
acacagaacccaaagaugu

SEQ ID NO: 874477 - RNA, 19 nt, Homo sapiens
  misc_RNA (1)...(19): siRNA sense strand
gcaguuuccuuagaacaga

SEQ ID NO: 874478 - RNA, 19 nt, Homo sapiens
  misc_RNA (1)...(19): siRNA sense strand
ccaugaaacugcuagcaau

SEQ ID NO: 874479 - RNA, 19 nt, Homo sapiens
  misc_RNA (1)...(19): siRNA sense strand
gugaauggcacuuacguuu

SEQ ID NO: 874480 - RNA, 19 nt, Homo sapiens
  misc_RNA (1)...(19): siRNA sense strand
ggugggagauuaauaacca

SEQ ID NO: 874481 - RNA, 19 nt, Homo sapiens
  misc_RNA (1)...(19): siRNA sense strand
cguaugagaccuauauuga

SEQ ID NO: 874482 - RNA, 19 nt, Homo sapiens
  misc_RNA (1)...(19): siRNA sense strand
gaagacugaaucugucaaa

SEQ ID NO: 874483 - RNA, 19 nt, Homo sapiens
  misc_RNA (1)...(19): siRNA sense strand
uuauaaggaucgccugaaa

SEQ ID NO: 874484 - RNA, 19 nt, Homo sapiens
  misc_RNA (1)...(19): siRNA sense strand
gaucaggcuucuucuggau

SEQ ID NO: 874485 - RNA, 19 nt, Homo sapiens
  misc_RNA (1)...(19): siRNA sense strand
gcaagccucauaccaaaug

SEQ ID NO: 874486 - RNA, 19 nt, Homo sapiens
  misc_RNA (1)...(19): siRNA sense strand
gaucuacugucuaaauugc

SEQ ID NO: 874487 - RNA, 19 nt, Homo sapiens
  misc_RNA (1)...(19): siRNA sense strand
agucacagauuucuccaaa

SEQ ID NO: 874488 - RNA, 19 nt, Homo sapiens
  misc_RNA (1)...(19): siRNA sense strand
gaugcgaguugccuucuca

SEQ ID NO: 874489 - RNA, 19 nt, Homo sapiens
  misc_RNA (1)...(19): siRNA sense strand
agaggacucccuucaauuu

SEQ ID NO: 874490 - RNA, 19 nt, Homo sapiens
  misc_RNA (1)...(19): siRNA sense strand
gauggaacuauucaaguaa

SEQ ID NO: 874491 - RNA, 19 nt, Homo sapiens
  misc_RNA (1)...(19): siRNA sense strand
gcuacuucuucuccaguua

SEQ ID NO: 874492 - RNA, 19 nt, Homo sapiens
  misc_RNA (1)...(19): siRNA sense strand
ggaaguaccacuggaggaa

SEQ ID NO: 874493 - RNA, 19 nt, Homo sapiens
  misc_RNA (1)...(19): siRNA sense strand
agaacaagauccaaagaag

SEQ ID NO: 874494 - RNA, 19 nt, Homo sapiens
  misc_RNA (1)...(19): siRNA sense strand
caaacaaggcgaagagcaa

SEQ ID NO: 874495 - RNA, 19 nt, Homo sapiens
  misc_RNA (1)...(19): siRNA sense strand
gacugaaucugucaaagag

SEQ ID NO: 874496 - RNA, 19 nt, Homo sapiens
  misc_RNA (1)...(19): siRNA sense strand
gaaguagcuggaaauauuc

SEQ ID NO: 874497 - RNA, 19 nt, Homo sapiens
  misc_RNA (1)...(19): siRNA sense strand
cgagcucacuucuguggaa

SEQ ID NO: 874498 - RNA, 19 nt, Homo sapiens
  misc_RNA (1)...(19): siRNA sense strand
gacaaaccuucaagugcaa

SEQ ID NO: 874499 - RNA, 19 nt, Homo sapiens
  misc_RNA (1)...(19): siRNA sense strand
caagacaccucaaaacuca

SEQ ID NO: 874500 - RNA, 19 nt, Homo sapiens
  misc_RNA (1)...(19): siRNA sense strand
uugacuaccucauuaaguu

SEQ ID NO: 874501 - RNA, 19 nt, Homo sapiens
  misc_RNA (1)...(19): siRNA sense strand
ggaaguacaaguaucucaa

SEQ ID NO: 874502 - RNA, 19 nt, Homo sapiens
  misc_RNA (1)...(19): siRNA sense strand
ucaaacuggaggauuauaa

SEQ ID NO: 874503 - RNA, 19 nt, Homo sapiens
  misc_RNA (1)...(19): siRNA sense strand
cugaacaacuuaggagaaa

SEQ ID NO: 874504 - RNA, 19 nt, Homo sapiens
  misc_RNA (1)...(19): siRNA sense strand
cguagcaucuaaagaacaa

SEQ ID NO: 874505 - RNA, 19 nt, Homo sapiens
  misc_RNA (1)...(19): siRNA sense strand
gaacuuguaacuuuaugca

SEQ ID NO: 874506 - RNA, 19 nt, Homo sapiens
  misc_RNA (1)...(19): siRNA sense strand
cuuaacagacgcuauauga

SEQ ID NO: 874507 - RNA, 19 nt, Homo sapiens
  misc_RNA (1)...(19): siRNA sense strand
gaacucaggcuauuuugaa

SEQ ID NO: 874508 - RNA, 19 nt, Homo sapiens
  misc_RNA (1)...(19): siRNA sense strand
ugaauggugcaguguauuu

SEQ ID NO: 874509 - RNA, 19 nt, Homo sapiens
  misc_RNA (1)...(19): siRNA sense strand
guagagaaauaugaagaag

SEQ ID NO: 874510 - RNA, 19 nt, Homo sapiens
  misc_RNA (1)...(19): siRNA sense strand
agauacaccuaaauccaaa

SEQ ID NO: 874511 - RNA, 19 nt, Homo sapiens
  misc_RNA (1)...(19): siRNA sense strand
gguaucagccuaugccaau

SEQ ID NO: 874512 - RNA, 19 nt, Homo sapiens
  misc_RNA (1)...(19): siRNA sense strand
gaauggcacuuacguuuuc

SEQ ID NO: 874513 - RNA, 19 nt, Homo sapiens
  misc_RNA (1)...(19): siRNA sense strand
gauccaguauugaggaaag

SEQ ID NO: 874514 - RNA, 19 nt, Homo sapiens
  misc_RNA (1)...(19): siRNA sense strand
uaacaucacagucacagau

SEQ ID NO: 874515 - RNA, 19 nt, Homo sapiens
  misc_RNA (1)...(19): siRNA sense strand
agaaagaacaagauccaaa

SEQ ID NO: 874516 - RNA, 19 nt, Homo sapiens
  misc_RNA (1)...(19): siRNA sense strand
gcagaaagaacaagaucca

SEQ ID NO: 874517 - RNA, 19 nt, Homo sapiens
  misc_RNA (1)...(19): siRNA sense strand
gaacaacuuaggagaaacu

SEQ ID NO: 874518 - RNA, 19 nt, Homo sapiens
  misc_RNA (1)...(19): siRNA sense strand
gaacuauucaaguaagcaa

SEQ ID NO: 874519 - RNA, 19 nt, Homo sapiens
  misc_RNA (1)...(19): siRNA sense strand
gaacaaacuguccauucuc

SEQ ID NO: 874520 - RNA, 19 nt, Homo sapiens
  misc_RNA (1)...(19): siRNA sense strand
uccgaaggauccaguauug

SEQ ID NO: 874521 - RNA, 19 nt, Homo sapiens
  misc_RNA (1)...(19): siRNA sense strand
gaacuugacuaccucauua

SEQ ID NO: 874522 - RNA, 19 nt, Homo sapiens
  misc_RNA (1)...(19): siRNA sense strand
gaagaagugcuacauaauu

SEQ ID NO: 874523 - RNA, 19 nt, Homo sapiens
  misc_RNA (1)...(19): siRNA sense strand
ugaaggaucuacugucuaa

SEQ ID NO: 874524 - RNA, 19 nt, Homo sapiens
  misc_RNA (1)...(19): siRNA sense strand
aaacugaccugcccugaaa

SEQ ID NO: 874525 - RNA, 19 nt, Homo sapiens
  misc_RNA (1)...(19): siRNA sense strand
guuggaagcuguagagaaa

SEQ ID NO: 874526 - RNA, 19 nt, Homo sapiens
  misc_RNA (1)...(19): siRNA sense strand
acaaguaucucaagcauca

SEQ ID NO: 874527 - RNA, 19 nt, Homo sapiens
  misc_RNA (1)...(19): siRNA sense strand
ggacucauaugccuuaaac

SEQ ID NO: 874528 - RNA, 19 nt, Homo sapiens
  misc_RNA (1)...(19): siRNA sense strand
agagaaauaugaagaagug

SEQ ID NO: 874529 - RNA, 19 nt, Homo sapiens
  misc_RNA (1)...(19): siRNA sense strand
gaaauaugaagaagugcua

SEQ ID NO: 874530 - RNA, 19 nt, Homo sapiens
  misc_RNA (1)...(19): siRNA sense strand
gaaagaaaugaaagucuga

SEQ ID NO: 874531 - RNA, 19 nt, Homo sapiens
  misc_RNA (1)...(19): siRNA sense strand
gagccuagaucuacuaaaa

SEQ ID NO: 874532 - RNA, 19 nt, Homo sapiens
  misc_RNA (1)...(19): siRNA sense strand
uggaagcuguagagaaaua

SEQ ID NO: 874533 - RNA, 19 nt, Homo sapiens
  misc_RNA (1)...(19): siRNA sense strand
gaccugcccugaaagaaau

SEQ ID NO: 874534 - RNA, 19 nt, Homo sapiens
  misc_RNA (1)...(19): siRNA sense strand
guacaaguaucucaagcau

SEQ ID NO: 874535 - RNA, 19 nt, Homo sapiens
  misc_RNA (1)...(19): siRNA sense strand
augaagaagugcuacauaa

SEQ ID NO: 874536 - RNA, 19 nt, Homo sapiens
  misc_RNA (1)...(19): siRNA sense strand
ucauaugccuuaaacacaa

SEQ ID NO: 874537 - RNA, 19 nt, Homo sapiens
  misc_RNA (1)...(19): siRNA sense strand
cguaugagaccuauauuga

SEQ ID NO: 874538 - RNA, 19 nt, Homo sapiens
  misc_RNA (1)...(19): siRNA sense strand
uuauaaggaucgccugaaa

SEQ ID NO: 874539 - RNA, 19 nt, Homo sapiens
  misc_RNA (1)...(19): siRNA sense strand
cgagcucacuucuguggaa

SEQ ID NO: 874540 - RNA, 19 nt, Homo sapiens
  misc_RNA (1)...(19): siRNA sense strand
ggaaguacaaguaucucaa

SEQ ID NO: 874541 - RNA, 19 nt, Homo sapiens
  misc_RNA (1)...(19): siRNA sense strand
uugacuaccucauuaaguu

SEQ ID NO: 874542 - RNA, 19 nt, Homo sapiens
  misc_RNA (1)...(19): siRNA sense strand
ucaaacuggaggauuauaa

SEQ ID NO: 874543 - RNA, 19 nt, Homo sapiens
  misc_RNA (1)...(19): siRNA sense strand
ugaauggugcaguguauuu

SEQ ID NO: 874544 - RNA, 19 nt, Homo sapiens
  misc_RNA (1)...(19): siRNA sense strand
guagagaaauaugaagaag

SEQ ID NO: 874545 - RNA, 19 nt, Homo sapiens
  misc_RNA (1)...(19): siRNA sense strand
guaugagaccuauauugaa

SEQ ID NO: 874546 - RNA, 19 nt, Homo sapiens
  misc_RNA (1)...(19): siRNA sense strand
caaaagaacuugacuaccu

SEQ ID NO: 874547 - RNA, 19 nt, Homo sapiens
  misc_RNA (1)...(19): siRNA sense strand
cauaugccuuaaacacaaa

SEQ ID NO: 874548 - RNA, 19 nt, Homo sapiens
  misc_RNA (1)...(19): siRNA sense strand
guuucgagcucacuucugu

SEQ ID NO: 874549 - RNA, 19 nt, Homo sapiens
  misc_RNA (1)...(19): siRNA sense strand
gaaguacaaguaucucaag

SEQ ID NO: 874550 - RNA, 19 nt, Homo sapiens
  misc_RNA (1)...(19): siRNA sense strand
gaaagagaggggaauauga

SEQ ID NO: 874551 - RNA, 19 nt, Homo sapiens
  misc_RNA (1)...(19): siRNA sense strand
gagcucacuucuguggaaa

SEQ ID NO: 874552 - RNA, 19 nt, Homo sapiens
  misc_RNA (1)...(19): siRNA sense strand
gaagugcuacauaauuugg

SEQ ID NO: 874553 - RNA, 19 nt, Homo sapiens
  misc_RNA (1)...(19): siRNA sense strand
ugaccugcccugaaagaaa

SEQ ID NO: 874554 - RNA, 19 nt, Homo sapiens
  misc_RNA (1)...(19): siRNA sense strand
gcaguguauuugccuucaa

SEQ ID NO: 874555 - RNA, 19 nt, Homo sapiens
  misc_RNA (1)...(19): siRNA sense strand
ugaagaagugcuacauaau

SEQ ID NO: 874556 - RNA, 19 nt, Homo sapiens
  misc_RNA (1)...(19): siRNA sense strand
acaaacacuugaaggaucu

SEQ ID NO: 874557 - RNA, 19 nt, Homo sapiens
  misc_RNA (1)...(19): siRNA sense strand
gaauggugcaguguauuug

SEQ ID NO: 874558 - RNA, 19 nt, Homo sapiens
  misc_RNA (1)...(19): siRNA sense strand
ggaguggucuagacuuucc

SEQ ID NO: 874559 - RNA, 19 nt, Homo sapiens
  misc_RNA (1)...(19): siRNA sense strand
gcuucgaacuauacuucaa

SEQ ID NO: 874560 - RNA, 19 nt, Homo sapiens
  misc_RNA (1)...(19): siRNA sense strand
agcucaaacuggaggauua

SEQ ID NO: 874561 - RNA, 19 nt, Homo sapiens
  misc_RNA (1)...(19): siRNA sense strand
agggaguggucuagacuuu

SEQ ID NO: 874562 - RNA, 19 nt, Homo sapiens
  misc_RNA (1)...(19): siRNA sense strand
ccuucagccucaucuguuu

SEQ ID NO: 874563 - RNA, 19 nt, Homo sapiens
  misc_RNA (1)...(19): siRNA sense strand
ugacuaccucauuaaguuu

SEQ ID NO: 874564 - RNA, 19 nt, Homo sapiens
  misc_RNA (1)...(19): siRNA sense strand
ccucaucuguuucaauggu

SEQ ID NO: 874565 - RNA, 19 nt, Homo sapiens
  misc_RNA (1)...(19): siRNA sense strand
ucaaguucaguauguauug

SEQ ID NO: 874566 - RNA, 19 nt, Homo sapiens
  misc_RNA (1)...(19): siRNA sense strand
aauggacucauaugccuua

SEQ ID NO: 874567 - RNA, 19 nt, Homo sapiens
  misc_RNA (1)...(19): siRNA sense strand
gcguaugagaccuauauug

SEQ ID NO: 874568 - RNA, 19 nt, Homo sapiens
  misc_RNA (1)...(19): siRNA sense strand
caaacuggaggauuauaag

SEQ ID NO: 874569 - RNA, 19 nt, Homo sapiens
  misc_RNA (1)...(19): siRNA sense strand
aagcguaugagaccuauau

SEQ ID NO: 874570 - RNA, 19 nt, Homo sapiens
  misc_RNA (1)...(19): siRNA sense strand
agccucaucuguuucaaug

SEQ ID NO: 874571 - RNA, 19 nt, Homo sapiens
  misc_RNA (1)...(19): siRNA sense strand
ggaauuugccaaggagcuu

SEQ ID NO: 874572 - RNA, 19 nt, Homo sapiens
  misc_RNA (1)...(19): siRNA sense strand
gaagcuguagagaaauaug

SEQ ID NO: 874573 - RNA, 19 nt, Homo sapiens
  misc_RNA (1)...(19): siRNA sense strand
ccaagcguaugagaccuau

SEQ ID NO: 874574 - RNA, 19 nt, Homo sapiens
  misc_RNA (1)...(19): siRNA sense strand
aaaguggagagcaucuuaa

SEQ ID NO: 874575 - RNA, 19 nt, Homo sapiens
  misc_RNA (1)...(19): siRNA sense strand
cuugaaggaucuacugucu

SEQ ID NO: 874576 - RNA, 19 nt, Homo sapiens
  misc_RNA (1)...(19): siRNA sense strand
ggaaagagaggggaauaug

SEQ ID NO: 874577 - RNA, 19 nt, Homo sapiens
  misc_RNA (1)...(19): siRNA sense strand
uuugaauggugcaguguau

SEQ ID NO: 874578 - RNA, 19 nt, Homo sapiens
  misc_RNA (1)...(19): siRNA sense strand
caaaagaaggcccagagaa

SEQ ID NO: 874579 - RNA, 19 nt, Homo sapiens
  misc_RNA (1)...(19): siRNA sense strand
gcucaaacuggaggauuau

SEQ ID NO: 874580 - RNA, 19 nt, Homo sapiens
  misc_RNA (1)...(19): siRNA sense strand
guggagagcaucuuaaucc

SEQ ID NO: 874581 - RNA, 19 nt, Homo sapiens
  misc_RNA (1)...(19): siRNA sense strand
aaaaguggagagcaucuua

SEQ ID NO: 874582 - RNA, 19 nt, Homo sapiens
  misc_RNA (1)...(19): siRNA sense strand
agaacuugacuaccucauu

SEQ ID NO: 874583 - RNA, 19 nt, Homo sapiens
  misc_RNA (1)...(19): siRNA sense strand
caguauguauugcagaacu

SEQ ID NO: 874584 - RNA, 19 nt, Homo sapiens
  misc_RNA (1)...(19): siRNA sense strand
acuugaggcugagaagaaa

SEQ ID NO: 874585 - RNA, 19 nt, Homo sapiens
  misc_RNA (1)...(19): siRNA sense strand
acuggaggauuauaaggau

SEQ ID NO: 874586 - RNA, 19 nt, Homo sapiens
  misc_RNA (1)...(19): siRNA sense strand
ggaagcuguagagaaauau

SEQ ID NO: 874587 - RNA, 19 nt, Homo sapiens
  misc_RNA (1)...(19): siRNA sense strand
cugugucccucuaguccua

SEQ ID NO: 874588 - RNA, 19 nt, Homo sapiens
  misc_RNA (1)...(19): siRNA sense strand
uuaagggaguggucuagac

SEQ ID NO: 874589 - RNA, 19 nt, Homo sapiens
  misc_RNA (1)...(19): siRNA sense strand
caaguucaguauguauugc

SEQ ID NO: 874590 - RNA, 19 nt, Homo sapiens
  misc_RNA (1)...(19): siRNA sense strand
agaagugcuacauaauuug

SEQ ID NO: 874591 - RNA, 19 nt, Homo sapiens
  misc_RNA (1)...(19): siRNA sense strand
gcaaaagaaggcccagaga

SEQ ID NO: 874592 - RNA, 19 nt, Homo sapiens
  misc_RNA (1)...(19): siRNA sense strand
gacacaggagcacguacaa

SEQ ID NO: 874593 - RNA, 19 nt, Homo sapiens
  misc_RNA (1)...(19): siRNA sense strand
ugacacaggagcacguaca

SEQ ID NO: 874594 - RNA, 19 nt, Homo sapiens
  misc_RNA (1)...(19): siRNA sense strand
uucaguauguauugcagaa

SEQ ID NO: 874595 - RNA, 19 nt, Homo sapiens
  misc_RNA (1)...(19): siRNA sense strand
aagcuucgaacuauacuuc

SEQ ID NO: 874596 - RNA, 19 nt, Homo sapiens
  misc_RNA (1)...(19): siRNA sense strand
gcaaacagcuucuccauaa

SEQ ID NO: 874597 - RNA, 19 nt, Homo sapiens
  misc_RNA (1)...(19): siRNA sense strand
gaacaaagaagucaaauga

SEQ ID NO: 874598 - RNA, 19 nt, Homo sapiens
  misc_RNA (1)...(19): siRNA sense strand
gaucagaacucauuuacuu

SEQ ID NO: 874599 - RNA, 19 nt, Homo sapiens
  misc_RNA (1)...(19): siRNA sense strand
ggagacaccugguuuacua

SEQ ID NO: 874600 - RNA, 19 nt, Homo sapiens
  misc_RNA (1)...(19): siRNA sense strand
ccaaagaacuguggguaua

SEQ ID NO: 874601 - RNA, 19 nt, Homo sapiens
  misc_RNA (1)...(19): siRNA sense strand
gcagcagccuugagaauaa

SEQ ID NO: 874602 - RNA, 19 nt, Homo sapiens
  misc_RNA (1)...(19): siRNA sense strand
gaacuugccuagagaugaa

SEQ ID NO: 874603 - RNA, 19 nt, Homo sapiens
  misc_RNA (1)...(19): siRNA sense strand
ggaguacucuucacacuga

SEQ ID NO: 874604 - RNA, 19 nt, Homo sapiens
  misc_RNA (1)...(19): siRNA sense strand
guaacaaucugccuccuuu

SEQ ID NO: 874605 - RNA, 19 nt, Homo sapiens
  misc_RNA (1)...(19): siRNA sense strand
gaucauggcguuaauguuu

SEQ ID NO: 874606 - RNA, 19 nt, Homo sapiens
  misc_RNA (1)...(19): siRNA sense strand
gcaagcugcugaauuuaaa

SEQ ID NO: 874607 - RNA, 19 nt, Homo sapiens
  misc_RNA (1)...(19): siRNA sense strand
gaauggagcuggaaauugg

SEQ ID NO: 874608 - RNA, 19 nt, Homo sapiens
  misc_RNA (1)...(19): siRNA sense strand
gauaaaggaucuaaagcaa

SEQ ID NO: 874609 - RNA, 19 nt, Homo sapiens
  misc_RNA (1)...(19): siRNA sense strand
gcaagaagauuccccaaua

SEQ ID NO: 874610 - RNA, 19 nt, Homo sapiens
  misc_RNA (1)...(19): siRNA sense strand
guuauugccuugugguuua

SEQ ID NO: 874611 - RNA, 19 nt, Homo sapiens
  misc_RNA (1)...(19): siRNA sense strand
ugauagagaugcugaauau

SEQ ID NO: 874612 - RNA, 19 nt, Homo sapiens
  misc_RNA (1)...(19): siRNA sense strand
ccacuaauaugauagcauu

SEQ ID NO: 874613 - RNA, 19 nt, Homo sapiens
  misc_RNA (1)...(19): siRNA sense strand
gagcugaaauucucaaaca

SEQ ID NO: 874614 - RNA, 19 nt, Homo sapiens
  misc_RNA (1)...(19): siRNA sense strand
ggacucaauuuguuaaugu

SEQ ID NO: 874615 - RNA, 19 nt, Homo sapiens
  misc_RNA (1)...(19): siRNA sense strand
aaacagaacuugccuagag

SEQ ID NO: 874616 - RNA, 19 nt, Homo sapiens
  misc_RNA (1)...(19): siRNA sense strand
gggcauggauuuauucaau

SEQ ID NO: 874617 - RNA, 19 nt, Homo sapiens
  misc_RNA (1)...(19): siRNA sense strand
gaagugcagugacaguuau

SEQ ID NO: 874618 - RNA, 19 nt, Homo sapiens
  misc_RNA (1)...(19): siRNA sense strand
ggaaauaucaccaacuaau

SEQ ID NO: 874619 - RNA, 19 nt, Homo sapiens
  misc_RNA (1)...(19): siRNA sense strand
ccagaaagccagcuaguuu

SEQ ID NO: 874620 - RNA, 19 nt, Homo sapiens
  misc_RNA (1)...(19): siRNA sense strand
ccaagccacuaauaugaua

SEQ ID NO: 874621 - RNA, 19 nt, Homo sapiens
  misc_RNA (1)...(19): siRNA sense strand
gagaugagguuccaauugg

SEQ ID NO: 874622 - RNA, 19 nt, Homo sapiens
  misc_RNA (1)...(19): siRNA sense strand
ccaaguggaaugaaauuua

SEQ ID NO: 874623 - RNA, 19 nt, Homo sapiens
  misc_RNA (1)...(19): siRNA sense strand
ucacaagaauugcauaugu

SEQ ID NO: 874624 - RNA, 19 nt, Homo sapiens
  misc_RNA (1)...(19): siRNA sense strand
gcagauuuauugauaguuc

SEQ ID NO: 874625 - RNA, 19 nt, Homo sapiens
  misc_RNA (1)...(19): siRNA sense strand
cuaaauccgucacacagua

SEQ ID NO: 874626 - RNA, 19 nt, Homo sapiens
  misc_RNA (1)...(19): siRNA sense strand
ccuaggauauccaaaguuu

SEQ ID NO: 874627 - RNA, 19 nt, Homo sapiens
  misc_RNA (1)...(19): siRNA sense strand
gccuagagaugaaauuaaa

SEQ ID NO: 874628 - RNA, 19 nt, Homo sapiens
  misc_RNA (1)...(19): siRNA sense strand
ggagaaauccaagcaauga

SEQ ID NO: 874629 - RNA, 19 nt, Homo sapiens
  misc_RNA (1)...(19): siRNA sense strand
cacagaaagugcaagauuu

SEQ ID NO: 874630 - RNA, 19 nt, Homo sapiens
  misc_RNA (1)...(19): siRNA sense strand
cgauggauauuaauacuug

SEQ ID NO: 874631 - RNA, 19 nt, Homo sapiens
  misc_RNA (1)...(19): siRNA sense strand
gaauggaaggugucagaua

SEQ ID NO: 874632 - RNA, 19 nt, Homo sapiens
  misc_RNA (1)...(19): siRNA sense strand
gcaccgaccuaaagaugga

SEQ ID NO: 874633 - RNA, 19 nt, Homo sapiens
  misc_RNA (1)...(19): siRNA sense strand
gucagugccuucuuucaua

SEQ ID NO: 874634 - RNA, 19 nt, Homo sapiens
  misc_RNA (1)...(19): siRNA sense strand
caccaaagcaugcugauuu

SEQ ID NO: 874635 - RNA, 19 nt, Homo sapiens
  misc_RNA (1)...(19): siRNA sense strand
gugcuuugcuucucuuaaa

SEQ ID NO: 874636 - RNA, 19 nt, Homo sapiens
  misc_RNA (1)...(19): siRNA sense strand
guauagcagauuccaauua

SEQ ID NO: 874637 - RNA, 19 nt, Homo sapiens
  misc_RNA (1)...(19): siRNA sense strand
guaaacuggcccaauauuu

SEQ ID NO: 874638 - RNA, 19 nt, Homo sapiens
  misc_RNA (1)...(19): siRNA sense strand
gaaagcaccgaccuaaaga

SEQ ID NO: 874639 - RNA, 19 nt, Homo sapiens
  misc_RNA (1)...(19): siRNA sense strand
cuacaaagacuggcuagua

SEQ ID NO: 874640 - RNA, 19 nt, Homo sapiens
  misc_RNA (1)...(19): siRNA sense strand
ggagguaaaggcaaaugua

SEQ ID NO: 874641 - RNA, 19 nt, Homo sapiens
  misc_RNA (1)...(19): siRNA sense strand
gaugagggcauuguacaua

SEQ ID NO: 874642 - RNA, 19 nt, Homo sapiens
  misc_RNA (1)...(19): siRNA sense strand
gagagagucuuugccagaa

SEQ ID NO: 874643 - RNA, 19 nt, Homo sapiens
  misc_RNA (1)...(19): siRNA sense strand
uuaccuggcuuccaaagaa

SEQ ID NO: 874644 - RNA, 19 nt, Homo sapiens
  misc_RNA (1)...(19): siRNA sense strand
uguaagacaugauaggauu

SEQ ID NO: 874645 - RNA, 19 nt, Homo sapiens
  misc_RNA (1)...(19): siRNA sense strand
gcauuguacuguuuguuau

SEQ ID NO: 874646 - RNA, 19 nt, Homo sapiens
  misc_RNA (1)...(19): siRNA sense strand
gauaaucaucgaagacaaa

SEQ ID NO: 874647 - RNA, 19 nt, Homo sapiens
  misc_RNA (1)...(19): siRNA sense strand
ccaauuggccauuccuuaa

SEQ ID NO: 874648 - RNA, 19 nt, Homo sapiens
  misc_RNA (1)...(19): siRNA sense strand
ggagaugagguuccaauug

SEQ ID NO: 874649 - RNA, 19 nt, Homo sapiens
  misc_RNA (1)...(19): siRNA sense strand
ugcauuagcuuggugauuu

SEQ ID NO: 874650 - RNA, 19 nt, Homo sapiens
  misc_RNA (1)...(19): siRNA sense strand
gagguaaaggcaaauguaa

SEQ ID NO: 874651 - RNA, 19 nt, Homo sapiens
  misc_RNA (1)...(19): siRNA sense strand
gcauggauuuauucaaugu

SEQ ID NO: 874652 - RNA, 19 nt, Homo sapiens
  misc_RNA (1)...(19): siRNA sense strand
ccacauggaucuuccugau

SEQ ID NO: 874653 - RNA, 19 nt, Homo sapiens
  misc_RNA (1)...(19): siRNA sense strand
aggaaucugugagcaauua

SEQ ID NO: 874654 - RNA, 19 nt, Homo sapiens
  misc_RNA (1)...(19): siRNA sense strand
gaaaacuacugaaaggauu

SEQ ID NO: 874655 - RNA, 19 nt, Homo sapiens
  misc_RNA (1)...(19): siRNA sense strand
uaaauucggguuaugcuuu

SEQ ID NO: 874656 - RNA, 19 nt, Homo sapiens
  misc_RNA (1)...(19): siRNA sense strand
gcuaguuguugaucauauu

SEQ ID NO: 874657 - RNA, 19 nt, Homo sapiens
  misc_RNA (1)...(19): siRNA sense strand
uacaggacauuuacuauuc

SEQ ID NO: 874658 - RNA, 19 nt, Homo sapiens
  misc_RNA (1)...(19): siRNA sense strand
aguggaagcuggacguuaa

SEQ ID NO: 874659 - RNA, 19 nt, Homo sapiens
  misc_RNA (1)...(19): siRNA sense strand
aaacuaaugcgauggauau

SEQ ID NO: 874660 - RNA, 19 nt, Homo sapiens
  misc_RNA (1)...(19): siRNA sense strand
caggaugguuggcuacaaa

SEQ ID NO: 874661 - RNA, 19 nt, Homo sapiens
  misc_RNA (1)...(19): siRNA sense strand
guuaugcuuucgaguauga

SEQ ID NO: 874662 - RNA, 19 nt, Homo sapiens
  misc_RNA (1)...(19): siRNA sense strand
ccaagucuuuauucuuuga

SEQ ID NO: 874663 - RNA, 19 nt, Homo sapiens
  misc_RNA (1)...(19): siRNA sense strand
gagcuucgaugagggcauu

SEQ ID NO: 874664 - RNA, 19 nt, Homo sapiens
  misc_RNA (1)...(19): siRNA sense strand
gaggcugguugcagucuuu

SEQ ID NO: 874665 - RNA, 19 nt, Homo sapiens
  misc_RNA (1)...(19): siRNA sense strand
aauggaaggugucagauau

SEQ ID NO: 874666 - RNA, 19 nt, Homo sapiens
  misc_RNA (1)...(19): siRNA sense strand
gcaauaguaaagccuguaa

SEQ ID NO: 874667 - RNA, 19 nt, Homo sapiens
  misc_RNA (1)...(19): siRNA sense strand
uaucagaagugcagugaca

SEQ ID NO: 874668 - RNA, 19 nt, Homo sapiens
  misc_RNA (1)...(19): siRNA sense strand
ucagugccuucuuucauaa

SEQ ID NO: 874669 - RNA, 19 nt, Homo sapiens
  misc_RNA (1)...(19): siRNA sense strand
gacaugagcauccagauca

SEQ ID NO: 874670 - RNA, 19 nt, Homo sapiens
  misc_RNA (1)...(19): siRNA sense strand
ggaugaagguguggccuau

SEQ ID NO: 874671 - RNA, 19 nt, Homo sapiens
  misc_RNA (1)...(19): siRNA sense strand
gaggaaauguacgaguauu

SEQ ID NO: 874672 - RNA, 19 nt, Homo sapiens
  misc_RNA (1)...(19): siRNA sense strand
cugaggaaauguacgagua

SEQ ID NO: 874673 - RNA, 19 nt, Homo sapiens
  misc_RNA (1)...(19): siRNA sense strand
cagauuugcugccuacuag

SEQ ID NO: 874674 - RNA, 19 nt, Homo sapiens
  misc_RNA (1)...(19): siRNA sense strand
aaacauccaucugcaugaa

SEQ ID NO: 874675 - RNA, 19 nt, Homo sapiens
  misc_RNA (1)...(19): siRNA sense strand
gaacccacaaucacaagaa

SEQ ID NO: 874676 - RNA, 19 nt, Homo sapiens
  misc_RNA (1)...(19): siRNA sense strand
caagaagauuccccaauaa

SEQ ID NO: 874677 - RNA, 19 nt, Homo sapiens
  misc_RNA (1)...(19): siRNA sense strand
ggccauuccuuaacagguu

SEQ ID NO: 874678 - RNA, 19 nt, Homo sapiens
  misc_RNA (1)...(19): siRNA sense strand
caaaugcagugucccucuu

SEQ ID NO: 874679 - RNA, 19 nt, Homo sapiens
  misc_RNA (1)...(19): siRNA sense strand
ggacguuaaagcuucauuu

SEQ ID NO: 874680 - RNA, 19 nt, Homo sapiens
  misc_RNA (1)...(19): siRNA sense strand
gggguaaacuggcccaaua

SEQ ID NO: 874681 - RNA, 19 nt, Homo sapiens
  misc_RNA (1)...(19): siRNA sense strand
gaagauuccccaauaaauu

SEQ ID NO: 874682 - RNA, 19 nt, Homo sapiens
  misc_RNA (1)...(19): siRNA sense strand
gcccaaagguggaguacuc

SEQ ID NO: 874683 - RNA, 19 nt, Homo sapiens
  misc_RNA (1)...(19): siRNA sense strand
gcugaucaaggccaaauaa

SEQ ID NO: 874684 - RNA, 19 nt, Homo sapiens
  misc_RNA (1)...(19): siRNA sense strand
ggguuaugcuuucgaguau

SEQ ID NO: 874685 - RNA, 19 nt, Homo sapiens
  misc_RNA (1)...(19): siRNA sense strand
ccuacagccuacauugaua

SEQ ID NO: 874686 - RNA, 19 nt, Homo sapiens
  misc_RNA (1)...(19): siRNA sense strand
uacaaagacuggcuaguag

SEQ ID NO: 874687 - RNA, 19 nt, Homo sapiens
  misc_RNA (1)...(19): siRNA sense strand
gcacucaagcaauaguaaa

SEQ ID NO: 874688 - RNA, 19 nt, Homo sapiens
  misc_RNA (1)...(19): siRNA sense strand
ugagccaccuuaacaaugu

SEQ ID NO: 874689 - RNA, 19 nt, Homo sapiens
  misc_RNA (1)...(19): siRNA sense strand
ccauauuccuggauugaug

SEQ ID NO: 874690 - RNA, 19 nt, Homo sapiens
  misc_RNA (1)...(19): siRNA sense strand
gaaugugcgcaguggcuua

SEQ ID NO: 874691 - RNA, 19 nt, Homo sapiens
  misc_RNA (1)...(19): siRNA sense strand
cugaauauauuagggcuuu

SEQ ID NO: 874692 - RNA, 19 nt, Homo sapiens
  misc_RNA (1)...(19): siRNA sense strand
gcaguuggauuaauuuugu

SEQ ID NO: 874693 - RNA, 19 nt, Homo sapiens
  misc_RNA (1)...(19): siRNA sense strand
guaagacaugauaggauua

SEQ ID NO: 874694 - RNA, 19 nt, Homo sapiens
  misc_RNA (1)...(19): siRNA sense strand
gucuccagcugcagauuua

SEQ ID NO: 874695 - RNA, 19 nt, Homo sapiens
  misc_RNA (1)...(19): siRNA sense strand
ggacauuuacuauucuuag

SEQ ID NO: 874696 - RNA, 19 nt, Homo sapiens
  misc_RNA (1)...(19): siRNA sense strand
gaagaaagguccaguaugc

SEQ ID NO: 874697 - RNA, 19 nt, Homo sapiens
  misc_RNA (1)...(19): siRNA sense strand
gaagaggagucgaggauug

SEQ ID NO: 874698 - RNA, 19 nt, Homo sapiens
  misc_RNA (1)...(19): siRNA sense strand
aaacgaagaugacguguau

SEQ ID NO: 874699 - RNA, 19 nt, Homo sapiens
  misc_RNA (1)...(19): siRNA sense strand
gaagaaagugaccaacaua

SEQ ID NO: 874700 - RNA, 19 nt, Homo sapiens
  misc_RNA (1)...(19): siRNA sense strand
gaagaugacguguauggaa

SEQ ID NO: 874701 - RNA, 19 nt, Homo sapiens
  misc_RNA (1)...(19): siRNA sense strand
gaaagugaccaacauaauc

SEQ ID NO: 874702 - RNA, 19 nt, Homo sapiens
  misc_RNA (1)...(19): siRNA sense strand
ggaagaagaagaagaaagu

SEQ ID NO: 874703 - RNA, 19 nt, Homo sapiens
  misc_RNA (1)...(19): siRNA sense strand
ggucugaacuccauacucu

SEQ ID NO: 874704 - RNA, 19 nt, Homo sapiens
  misc_RNA (1)...(19): siRNA sense strand
uauggaaacucaucaggaa

SEQ ID NO: 874705 - RNA, 19 nt, Homo sapiens
  misc_RNA (1)...(19): siRNA sense strand
ccagaagcuugaugugaaa

SEQ ID NO: 874706 - RNA, 19 nt, Homo sapiens
  misc_RNA (1)...(19): siRNA sense strand
ugaccaacauaaucucauu

SEQ ID NO: 874707 - RNA, 19 nt, Homo sapiens
  misc_RNA (1)...(19): siRNA sense strand
ggagugagcagccuguuca

SEQ ID NO: 874708 - RNA, 19 nt, Homo sapiens
  misc_RNA (1)...(19): siRNA sense strand
ugacguguauggaaacuca

SEQ ID NO: 874709 - RNA, 19 nt, Homo sapiens
  misc_RNA (1)...(19): siRNA sense strand
gagcagcaacucauggaaa

SEQ ID NO: 874710 - RNA, 19 nt, Homo sapiens
  misc_RNA (1)...(19): siRNA sense strand
gaucacagaacaaugacaa

SEQ ID NO: 874711 - RNA, 19 nt, Homo sapiens
  misc_RNA (1)...(19): siRNA sense strand
aagaugacguguauggaaa

SEQ ID NO: 874712 - RNA, 19 nt, Homo sapiens
  misc_RNA (1)...(19): siRNA sense strand
gcggaucacagaacaauga

SEQ ID NO: 874713 - RNA, 19 nt, Homo sapiens
  misc_RNA (1)...(19): siRNA sense strand
ccaacauaaucucauuuga

SEQ ID NO: 874714 - RNA, 19 nt, Homo sapiens
  misc_RNA (1)...(19): siRNA sense strand
gcugcaggcugagcacuuu

SEQ ID NO: 874715 - RNA, 19 nt, Homo sapiens
  misc_RNA (1)...(19): siRNA sense strand
gaaaauugauucccugucu

SEQ ID NO: 874716 - RNA, 19 nt, Homo sapiens
  misc_RNA (1)...(19): siRNA sense strand
agaagaaagugaccaacau

SEQ ID NO: 874717 - RNA, 19 nt, Homo sapiens
  misc_RNA (1)...(19): siRNA sense strand
uccauacucuuugcgauua

SEQ ID NO: 874718 - RNA, 19 nt, Homo sapiens
  misc_RNA (1)...(19): siRNA sense strand
gaugaagaaagguccagua

SEQ ID NO: 874719 - RNA, 19 nt, Homo sapiens
  misc_RNA (1)...(19): siRNA sense strand
cggagucgcccgagaagua

SEQ ID NO: 874720 - RNA, 19 nt, Homo sapiens
  misc_RNA (1)...(19): siRNA sense strand
cagcaggucugaacuccau

SEQ ID NO: 874721 - RNA, 19 nt, Homo sapiens
  misc_RNA (1)...(19): siRNA sense strand
ggacgggcagaguaaguuu

SEQ ID NO: 874722 - RNA, 19 nt, Homo sapiens
  misc_RNA (1)...(19): siRNA sense strand
ggaaacucaucaggaagga

SEQ ID NO: 874723 - RNA, 19 nt, Homo sapiens
  misc_RNA (1)...(19): siRNA sense strand
gcugugcccucaacgaaca

SEQ ID NO: 874724 - RNA, 19 nt, Homo sapiens
  misc_RNA (1)...(19): siRNA sense strand
ugaugaagauguggaugaa

SEQ ID NO: 874725 - RNA, 19 nt, Homo sapiens
  misc_RNA (1)...(19): siRNA sense strand
accagaagcuugaugugaa

SEQ ID NO: 874726 - RNA, 19 nt, Homo sapiens
  misc_RNA (1)...(19): siRNA sense strand
uaucauguccgccuuugaa

SEQ ID NO: 874727 - RNA, 19 nt, Homo sapiens
  misc_RNA (1)...(19): siRNA sense strand
uaacaucgacaacaaggau

SEQ ID NO: 874728 - RNA, 19 nt, Homo sapiens
  misc_RNA (1)...(19): siRNA sense strand
ccaguaugcuuccuaccau

SEQ ID NO: 874729 - RNA, 19 nt, Homo sapiens
  misc_RNA (1)...(19): siRNA sense strand
ggagucgcccgagaaguaa

SEQ ID NO: 874730 - RNA, 19 nt, Homo sapiens
  misc_RNA (1)...(19): siRNA sense strand
aaauugauucccugucuuu

SEQ ID NO: 874731 - RNA, 19 nt, Homo sapiens
  misc_RNA (1)...(19): siRNA sense strand
uugauucccugucuuugaa

SEQ ID NO: 874732 - RNA, 19 nt, Homo sapiens
  misc_RNA (1)...(19): siRNA sense strand
gagcggaucacagaacaau

SEQ ID NO: 874733 - RNA, 19 nt, Homo sapiens
  misc_RNA (1)...(19): siRNA sense strand
aagaaagugaccaacauaa

SEQ ID NO: 874734 - RNA, 19 nt, Homo sapiens
  misc_RNA (1)...(19): siRNA sense strand
gauuuggacgggcagagua

SEQ ID NO: 874735 - RNA, 19 nt, Homo sapiens
  misc_RNA (1)...(19): siRNA sense strand
gcgcugugcccucaacgaa

SEQ ID NO: 874736 - RNA, 19 nt, Homo sapiens
  misc_RNA (1)...(19): siRNA sense strand
ggagggagaaaggagauug

SEQ ID NO: 874737 - RNA, 19 nt, Homo sapiens
  misc_RNA (1)...(19): siRNA sense strand
gaccaacauaaucucauuu

SEQ ID NO: 874738 - RNA, 19 nt, Homo sapiens
  misc_RNA (1)...(19): siRNA sense strand
gaagaagaagaagaaagug

SEQ ID NO: 874739 - RNA, 19 nt, Homo sapiens
  misc_RNA (1)...(19): siRNA sense strand
gagcggaagaagaagaaga

SEQ ID NO: 874740 - RNA, 19 nt, Homo sapiens
  misc_RNA (1)...(19): siRNA sense strand
aaaaggagcggaagaagaa

SEQ ID NO: 874741 - RNA, 19 nt, Homo sapiens
  misc_RNA (1)...(19): siRNA sense strand
ccauacucuuugcgauuaa

SEQ ID NO: 874742 - RNA, 19 nt, Homo sapiens
  misc_RNA (1)...(19): siRNA sense strand
ugugauggaugaagaaagg

SEQ ID NO: 874743 - RNA, 19 nt, Homo sapiens
  misc_RNA (1)...(19): siRNA sense strand
agaaagugaccaacauaau

SEQ ID NO: 874744 - RNA, 19 nt, Homo sapiens
  misc_RNA (1)...(19): siRNA sense strand
ucugaacuccauacucuuu

SEQ ID NO: 874745 - RNA, 19 nt, Homo sapiens
  misc_RNA (1)...(19): siRNA sense strand
aagaagaagaagaaaguga

SEQ ID NO: 874746 - RNA, 19 nt, Homo sapiens
  misc_RNA (1)...(19): siRNA sense strand
agaaagguccaguaugcuu

SEQ ID NO: 874747 - RNA, 19 nt, Homo sapiens
  misc_RNA (1)...(19): siRNA sense strand
acagaacaaugacaaaaga

SEQ ID NO: 874748 - RNA, 19 nt, Homo sapiens
  misc_RNA (1)...(19): siRNA sense strand
ugaggaagaugagcagaac

SEQ ID NO: 874749 - RNA, 19 nt, Homo sapiens
  misc_RNA (1)...(19): siRNA sense strand
aaagugaccaacauaaucu

SEQ ID NO: 874750 - RNA, 19 nt, Homo sapiens
  misc_RNA (1)...(19): siRNA sense strand
ugaagaaagguccaguaug

SEQ ID NO: 874751 - RNA, 19 nt, Homo sapiens
  misc_RNA (1)...(19): siRNA sense strand
gaacaaugacaaaagacaa

SEQ ID NO: 874752 - RNA, 19 nt, Homo sapiens
  misc_RNA (1)...(19): siRNA sense strand
caauaucauguccgccuuu

SEQ ID NO: 874753 - RNA, 19 nt, Homo sapiens
  misc_RNA (1)...(19): siRNA sense strand
gugcugaugccaaaugcaa

SEQ ID NO: 874754 - RNA, 19 nt, Homo sapiens
  misc_RNA (1)...(19): siRNA sense strand
cgcagaacgugaccuccuu

SEQ ID NO: 874755 - RNA, 19 nt, Homo sapiens
  misc_RNA (1)...(19): siRNA sense strand
uaccagaagcuugauguga

SEQ ID NO: 874756 - RNA, 19 nt, Homo sapiens
  misc_RNA (1)...(19): siRNA sense strand
ucacagcggcagcgaucaa

SEQ ID NO: 874757 - RNA, 19 nt, Homo sapiens
  misc_RNA (1)...(19): siRNA sense strand
gaugaagauguggaugaaa

SEQ ID NO: 874758 - RNA, 19 nt, Homo sapiens
  misc_RNA (1)...(19): siRNA sense strand
agaagaagaaagugaccaa

SEQ ID NO: 874759 - RNA, 19 nt, Homo sapiens
  misc_RNA (1)...(19): siRNA sense strand
ggucuuuugugauggauga

SEQ ID NO: 874760 - RNA, 19 nt, Homo sapiens
  misc_RNA (1)...(19): siRNA sense strand
gaagucagagcagcaacuc

SEQ ID NO: 874761 - RNA, 19 nt, Homo sapiens
  misc_RNA (1)...(19): siRNA sense strand
aauaucauguccgccuuug

SEQ ID NO: 874762 - RNA, 19 nt, Homo sapiens
  misc_RNA (1)...(19): siRNA sense strand
aagaagaaagugaccaaca

SEQ ID NO: 874763 - RNA, 19 nt, Homo sapiens
  misc_RNA (1)...(19): siRNA sense strand
ggaagucagagcagcaacu

SEQ ID NO: 874764 - RNA, 19 nt, Homo sapiens
  misc_RNA (1)...(19): siRNA sense strand
gaaacucaucaggaaggaa

SEQ ID NO: 874765 - RNA, 19 nt, Homo sapiens
  misc_RNA (1)...(19): siRNA sense strand
gguaccagaagcuugaugu

SEQ ID NO: 874766 - RNA, 19 nt, Homo sapiens
  misc_RNA (1)...(19): siRNA sense strand
ggaguuuggguaccagaag

SEQ ID NO: 874767 - RNA, 19 nt, Homo sapiens
  misc_RNA (1)...(19): siRNA sense strand
acacaaggguuuauucuua

SEQ ID NO: 874768 - RNA, 19 nt, Homo sapiens
  misc_RNA (1)...(19): siRNA sense strand
caacuacccuuaacagaaa

SEQ ID NO: 874769 - RNA, 19 nt, Homo sapiens
  misc_RNA (1)...(19): siRNA sense strand
gaaauaagaagcaugcuaa

SEQ ID NO: 874770 - RNA, 19 nt, Homo sapiens
  misc_RNA (1)...(19): siRNA sense strand
gagaagacauuauacauca

SEQ ID NO: 874771 - RNA, 19 nt, Homo sapiens
  misc_RNA (1)...(19): siRNA sense strand
gaacagcccaccuugguua

SEQ ID NO: 874772 - RNA, 19 nt, Homo sapiens
  misc_RNA (1)...(19): siRNA sense strand
gcauuuggcugcuuuggua

SEQ ID NO: 874773 - RNA, 19 nt, Homo sapiens
  misc_RNA (1)...(19): siRNA sense strand
gagcuugaauugcaaauga

SEQ ID NO: 874774 - RNA, 19 nt, Homo sapiens
  misc_RNA (1)...(19): siRNA sense strand
uaacacagguuuaggagaa

SEQ ID NO: 874775 - RNA, 19 nt, Homo sapiens
  misc_RNA (1)...(19): siRNA sense strand
caaagaugguuacuucaaa

SEQ ID NO: 874776 - RNA, 19 nt, Homo sapiens
  misc_RNA (1)...(19): siRNA sense strand
gagcuacuauugaacauau

SEQ ID NO: 874777 - RNA, 19 nt, Homo sapiens
  misc_RNA (1)...(19): siRNA sense strand
ccagagugauaaacaguua

SEQ ID NO: 874778 - RNA, 19 nt, Homo sapiens
  misc_RNA (1)...(19): siRNA sense strand
aaacugagcuugaauugca

SEQ ID NO: 874779 - RNA, 19 nt, Homo sapiens
  misc_RNA (1)...(19): siRNA sense strand
uagcaaagaugguuacuuc

SEQ ID NO: 874780 - RNA, 19 nt, Homo sapiens
  misc_RNA (1)...(19): siRNA sense strand
gcacuucucacucugauaa

SEQ ID NO: 874781 - RNA, 19 nt, Homo sapiens
  misc_RNA (1)...(19): siRNA sense strand
caacagagaagaauaagga

SEQ ID NO: 874782 - RNA, 19 nt, Homo sapiens
  misc_RNA (1)...(19): siRNA sense strand
cuggauagcugcccuuuaa

SEQ ID NO: 874783 - RNA, 19 nt, Homo sapiens
  misc_RNA (1)...(19): siRNA sense strand
ggaguggaaugcaaaauua

SEQ ID NO: 874784 - RNA, 19 nt, Homo sapiens
  misc_RNA (1)...(19): siRNA sense strand
caacaucaagguuuacuuu

SEQ ID NO: 874785 - RNA, 19 nt, Homo sapiens
  misc_RNA (1)...(19): siRNA sense strand
ccaaggccauuguauauuc

SEQ ID NO: 874786 - RNA, 19 nt, Homo sapiens
  misc_RNA (1)...(19): siRNA sense strand
caauuaaacugugggacua

SEQ ID NO: 874787 - RNA, 19 nt, Homo sapiens
  misc_RNA (1)...(19): siRNA sense strand
guacaaagucuccagaaga

SEQ ID NO: 874788 - RNA, 19 nt, Homo sapiens
  misc_RNA (1)...(19): siRNA sense strand
ggaaauagucacaauaugg

SEQ ID NO: 874789 - RNA, 19 nt, Homo sapiens
  misc_RNA (1)...(19): siRNA sense strand
gaggaaauagucacaauau

SEQ ID NO: 874790 - RNA, 19 nt, Homo sapiens
  misc_RNA (1)...(19): siRNA sense strand
uaagagugcuaaggaaauu

SEQ ID NO: 874791 - RNA, 19 nt, Homo sapiens
  misc_RNA (1)...(19): siRNA sense strand
cuaaguauaucuucugugu

SEQ ID NO: 874792 - RNA, 19 nt, Homo sapiens
  misc_RNA (1)...(19): siRNA sense strand
uacaaagucuccagaagaa

SEQ ID NO: 874793 - RNA, 19 nt, Homo sapiens
  misc_RNA (1)...(19): siRNA sense strand
gagccaaggccauuguaua

SEQ ID NO: 874794 - RNA, 19 nt, Homo sapiens
  misc_RNA (1)...(19): siRNA sense strand
guauggauauuaacagaug

SEQ ID NO: 874795 - RNA, 19 nt, Homo sapiens
  misc_RNA (1)...(19): siRNA sense strand
gcaaagaugguuacuucaa

SEQ ID NO: 874796 - RNA, 19 nt, Homo sapiens
  misc_RNA (1)...(19): siRNA sense strand
cacaaggguuuauucuuaa

SEQ ID NO: 874797 - RNA, 19 nt, Homo sapiens
  misc_RNA (1)...(19): siRNA sense strand
gaaaacauacccgcaauua

SEQ ID NO: 874798 - RNA, 19 nt, Homo sapiens
  misc_RNA (1)...(19): siRNA sense strand
gaaaucuggugacuggaau

SEQ ID NO: 874799 - RNA, 19 nt, Homo sapiens
  misc_RNA (1)...(19): siRNA sense strand
ucacagaguuuauugacau

SEQ ID NO: 874800 - RNA, 19 nt, Homo sapiens
  misc_RNA (1)...(19): siRNA sense strand
gcuuaccaguggcuaaaua

SEQ ID NO: 874801 - RNA, 19 nt, Homo sapiens
  misc_RNA (1)...(19): siRNA sense strand
guucagacuuguuuguauu

SEQ ID NO: 874802 - RNA, 19 nt, Homo sapiens
  misc_RNA (1)...(19): siRNA sense strand
guaguuaucacaaguauca

SEQ ID NO: 874803 - RNA, 19 nt, Homo sapiens
  misc_RNA (1)...(19): siRNA sense strand
aaaugaaacuguggaugua

SEQ ID NO: 874804 - RNA, 19 nt, Homo sapiens
  misc_RNA (1)...(19): siRNA sense strand
gauccaaauugaacuaaca

SEQ ID NO: 874805 - RNA, 19 nt, Homo sapiens
  misc_RNA (1)...(19): siRNA sense strand
ggagauuuauucugcacuu

SEQ ID NO: 874806 - RNA, 19 nt, Homo sapiens
  misc_RNA (1)...(19): siRNA sense strand
ggaacccgauccuaauuca

SEQ ID NO: 874807 - RNA, 19 nt, Homo sapiens
  misc_RNA (1)...(19): siRNA sense strand
caaaugaaacuguggaugu

SEQ ID NO: 874808 - RNA, 19 nt, Homo sapiens
  misc_RNA (1)...(19): siRNA sense strand
gaaacgagggaguauaugu

SEQ ID NO: 874809 - RNA, 19 nt, Homo sapiens
  misc_RNA (1)...(19): siRNA sense strand
agaaugagcugguacaacu

SEQ ID NO: 874810 - RNA, 19 nt, Homo sapiens
  misc_RNA (1)...(19): siRNA sense strand
cuaaauagaucccaguuuu

SEQ ID NO: 874811 - RNA, 19 nt, Homo sapiens
  misc_RNA (1)...(19): siRNA sense strand
gaaauauacguacacaugu

SEQ ID NO: 874812 - RNA, 19 nt, Homo sapiens
  misc_RNA (1)...(19): siRNA sense strand
ugaagcauccgcaguaauu

SEQ ID NO: 874813 - RNA, 19 nt, Homo sapiens
  misc_RNA (1)...(19): siRNA sense strand
aaacauacccgcaauuagu

SEQ ID NO: 874814 - RNA, 19 nt, Homo sapiens
  misc_RNA (1)...(19): siRNA sense strand
aaaggaaacugagcuugaa

SEQ ID NO: 874815 - RNA, 19 nt, Homo sapiens
  misc_RNA (1)...(19): siRNA sense strand
uaucuucacugguuugaug

SEQ ID NO: 874816 - RNA, 19 nt, Homo sapiens
  misc_RNA (1)...(19): siRNA sense strand
caucaagguuuacuuuauc

SEQ ID NO: 874817 - RNA, 19 nt, Homo sapiens
  misc_RNA (1)...(19): siRNA sense strand
ccaacgagcugggaaaaua

SEQ ID NO: 874818 - RNA, 19 nt, Homo sapiens
  misc_RNA (1)...(19): siRNA sense strand
caugggaacuuaaauguac

SEQ ID NO: 874819 - RNA, 19 nt, Homo sapiens
  misc_RNA (1)...(19): siRNA sense strand
ggaaacugagcuugaauug

SEQ ID NO: 874820 - RNA, 19 nt, Homo sapiens
  misc_RNA (1)...(19): siRNA sense strand
gaacuaaagcuuugguuuu

SEQ ID NO: 874821 - RNA, 19 nt, Homo sapiens
  misc_RNA (1)...(19): siRNA sense strand
uaaacuucaugcccucuuu

SEQ ID NO: 874822 - RNA, 19 nt, Homo sapiens
  misc_RNA (1)...(19): siRNA sense strand
ucacauggauggcaaaauu

SEQ ID NO: 874823 - RNA, 19 nt, Homo sapiens
  misc_RNA (1)...(19): siRNA sense strand
caucgcaucuggucacaug

SEQ ID NO: 874824 - RNA, 19 nt, Homo sapiens
  misc_RNA (1)...(19): siRNA sense strand
ucacugguuugaugauuga

SEQ ID NO: 874825 - RNA, 19 nt, Homo sapiens
  misc_RNA (1)...(19): siRNA sense strand
ggagaagacauuauacauc

SEQ ID NO: 874826 - RNA, 19 nt, Homo sapiens
  misc_RNA (1)...(19): siRNA sense strand
ggaguaucuucacugguuu

SEQ ID NO: 874827 - RNA, 19 nt, Homo sapiens
  misc_RNA (1)...(19): siRNA sense strand
gguuacagcuagcaaagau

SEQ ID NO: 874828 - RNA, 19 nt, Homo sapiens
  misc_RNA (1)...(19): siRNA sense strand
agaaauauacguacacaug

SEQ ID NO: 874829 - RNA, 19 nt, Homo sapiens
  misc_RNA (1)...(19): siRNA sense strand
uaacaugggaacuuaaaug

SEQ ID NO: 874830 - RNA, 19 nt, Homo sapiens
  misc_RNA (1)...(19): siRNA sense strand
gauauuaacagaugacucu

SEQ ID NO: 874831 - RNA, 19 nt, Homo sapiens
  misc_RNA (1)...(19): siRNA sense strand
ucgugaaucuguacuugua

SEQ ID NO: 874832 - RNA, 19 nt, Homo sapiens
  misc_RNA (1)...(19): siRNA sense strand
auucauugcugcugucuaa

SEQ ID NO: 874833 - RNA, 19 nt, Homo sapiens
  misc_RNA (1)...(19): siRNA sense strand
uuuaggagcuacuauugaa

SEQ ID NO: 874834 - RNA, 19 nt, Homo sapiens
  misc_RNA (1)...(19): siRNA sense strand
ucuguaacaugggaacuua

SEQ ID NO: 874835 - RNA, 19 nt, Homo sapiens
  misc_RNA (1)...(19): siRNA sense strand
aauaugggauucuguaaca

SEQ ID NO: 874836 - RNA, 19 nt, Homo sapiens
  misc_RNA (1)...(19): siRNA sense strand
acaaguaucaagcaacuaa

SEQ ID NO: 874837 - RNA, 19 nt, Homo sapiens
  misc_RNA (1)...(19): siRNA sense strand
aggaguaucuucacugguu

SEQ ID NO: 874838 - RNA, 19 nt, Homo sapiens
  misc_RNA (1)...(19): siRNA sense strand
aaaguuuacagcacaguua

SEQ ID NO: 874839 - RNA, 19 nt, Homo sapiens
  misc_RNA (1)...(19): siRNA sense strand
gcaauuagugagcuucuuc

SEQ ID NO: 874840 - RNA, 19 nt, Homo sapiens
  misc_RNA (1)...(19): siRNA sense strand
ggucgugaaucuguacuug

SEQ ID NO: 874841 - RNA, 19 nt, Homo sapiens
  misc_RNA (1)...(19): siRNA sense strand
uccaagaacuaaagcuuug

SEQ ID NO: 874842 - RNA, 19 nt, Homo sapiens
  misc_RNA (1)...(19): siRNA sense strand
uaaacugugggacuauaua

SEQ ID NO: 874843 - RNA, 19 nt, Homo sapiens
  misc_RNA (1)...(19): siRNA sense strand
gacuaagagugcuaaggaa

SEQ ID NO: 874844 - RNA, 19 nt, Homo sapiens
  misc_RNA (1)...(19): siRNA sense strand
gguucagacuuguuuguau

SEQ ID NO: 874845 - RNA, 19 nt, Homo sapiens
  misc_RNA (1)...(19): siRNA sense strand
gaugauugauccaagaacu

SEQ ID NO: 874846 - RNA, 19 nt, Homo sapiens
  misc_RNA (1)...(19): siRNA sense strand
ugaggauucugucuuuguu

SEQ ID NO: 874847 - RNA, 19 nt, Homo sapiens
  misc_RNA (1)...(19): siRNA sense strand
guaauucaaggccuaguga

SEQ ID NO: 874848 - RNA, 19 nt, Homo sapiens
  misc_RNA (1)...(19): siRNA sense strand
ucacaaguaucaagcaacu

SEQ ID NO: 874849 - RNA, 19 nt, Homo sapiens
  misc_RNA (1)...(19): siRNA sense strand
caaauugaacuaacaaagg

SEQ ID NO: 874850 - RNA, 19 nt, Homo sapiens
  misc_RNA (1)...(19): siRNA sense strand
gaggauucugucuuuguua

SEQ ID NO: 874851 - RNA, 19 nt, Homo sapiens
  misc_RNA (1)...(19): siRNA sense strand
gcuccauguuuguaaauuc

SEQ ID NO: 874852 - RNA, 19 nt, Homo sapiens
  misc_RNA (1)...(19): siRNA sense strand
cagagaagaauaaggaguu

SEQ ID NO: 874853 - RNA, 19 nt, Homo sapiens
  misc_RNA (1)...(19): siRNA sense strand
gauucugucuuuguuauag

SEQ ID NO: 874854 - RNA, 19 nt, Homo sapiens
  misc_RNA (1)...(19): siRNA sense strand
acaacuacccuuaacagaa

SEQ ID NO: 874855 - RNA, 19 nt, Homo sapiens
  misc_RNA (1)...(19): siRNA sense strand
gcugcaaucucucagucuu

SEQ ID NO: 874856 - RNA, 19 nt, Homo sapiens
  misc_RNA (1)...(19): siRNA sense strand
ugacuuuguugguaguuau

SEQ ID NO: 874857 - RNA, 19 nt, Homo sapiens
  misc_RNA (1)...(19): siRNA sense strand
caagugcauugccuuugga

SEQ ID NO: 874858 - RNA, 19 nt, Homo sapiens
  misc_RNA (1)...(19): siRNA sense strand
gaagacauuauacaucagu

SEQ ID NO: 874859 - RNA, 19 nt, Homo sapiens
  misc_RNA (1)...(19): siRNA sense strand
ccacaaccccauuuuauuu

SEQ ID NO: 874860 - RNA, 19 nt, Homo sapiens
  misc_RNA (1)...(19): siRNA sense strand
cagaguuuauugacauuca

SEQ ID NO: 874861 - RNA, 19 nt, Homo sapiens
  misc_RNA (1)...(19): siRNA sense strand
caaggccauuguauauuca

SEQ ID NO: 874862 - RNA, 19 nt, Homo sapiens
  misc_RNA (1)...(19): siRNA sense strand
aaguauaucuucugugucu

SEQ ID NO: 874863 - RNA, 19 nt, Homo sapiens
  misc_RNA (1)...(19): siRNA sense strand
ccacacgaagacugcauua

SEQ ID NO: 874864 - RNA, 19 nt, Homo sapiens
  misc_RNA (1)...(19): siRNA sense strand
augaaacuguggauguaua

SEQ ID NO: 874865 - RNA, 19 nt, Homo sapiens
  misc_RNA (1)...(19): siRNA sense strand
gauccaagaacuaaagcuu

SEQ ID NO: 874866 - RNA, 19 nt, Homo sapiens
  misc_RNA (1)...(19): siRNA sense strand
agagaagaauaaggaguuu

SEQ ID NO: 874867 - RNA, 19 nt, Homo sapiens
  misc_RNA (1)...(19): siRNA sense strand
gcauaucgaaccuuuauua

SEQ ID NO: 874868 - RNA, 19 nt, Homo sapiens
  misc_RNA (1)...(19): siRNA sense strand
aaucaaugcugcugaaaua

SEQ ID NO: 874869 - RNA, 19 nt, Homo sapiens
  misc_RNA (1)...(19): siRNA sense strand
gacaauugcuaguaucuuu

SEQ ID NO: 874870 - RNA, 19 nt, Homo sapiens
  misc_RNA (1)...(19): siRNA sense strand
caaagaagcaccuagaauu

SEQ ID NO: 874871 - RNA, 19 nt, Homo sapiens
  misc_RNA (1)...(19): siRNA sense strand
ggaaaucagucauguucuu

SEQ ID NO: 874872 - RNA, 19 nt, Homo sapiens
  misc_RNA (1)...(19): siRNA sense strand
cagcacaacuuccuacaaa

SEQ ID NO: 874873 - RNA, 19 nt, Homo sapiens
  misc_RNA (1)...(19): siRNA sense strand
acagggaucugaaacauuu

SEQ ID NO: 874874 - RNA, 19 nt, Homo sapiens
  misc_RNA (1)...(19): siRNA sense strand
ggaggacaauugcuaguau

SEQ ID NO: 874875 - RNA, 19 nt, Homo sapiens
  misc_RNA (1)...(19): siRNA sense strand
gaaaucagucauguucuua

SEQ ID NO: 874876 - RNA, 19 nt, Homo sapiens
  misc_RNA (1)...(19): siRNA sense strand
gaagaaggccugcauaucg

SEQ ID NO: 874877 - RNA, 19 nt, Homo sapiens
  misc_RNA (1)...(19): siRNA sense strand
caaugcugcugaaauaauu

SEQ ID NO: 874878 - RNA, 19 nt, Homo sapiens
  misc_RNA (1)...(19): siRNA sense strand
gaagaugagacaauaguug

SEQ ID NO: 874879 - RNA, 19 nt, Homo sapiens
  misc_RNA (1)...(19): siRNA sense strand
gaagaagaaggccugcaua

SEQ ID NO: 874880 - RNA, 19 nt, Homo sapiens
  misc_RNA (1)...(19): siRNA sense strand
auaggaaggugaaaguaua

SEQ ID NO: 874881 - RNA, 19 nt, Homo sapiens
  misc_RNA (1)...(19): siRNA sense strand
agaagcaccuagaauugua

SEQ ID NO: 874882 - RNA, 19 nt, Homo sapiens
  misc_RNA (1)...(19): siRNA sense strand
gcaaagaagcaccuagaau

SEQ ID NO: 874883 - RNA, 19 nt, Homo sapiens
  misc_RNA (1)...(19): siRNA sense strand
acaaaguaguccacaguuu

SEQ ID NO: 874884 - RNA, 19 nt, Homo sapiens
  misc_RNA (1)...(19): siRNA sense strand
ggucccacuuguacaauaa

SEQ ID NO: 874885 - RNA, 19 nt, Homo sapiens
  misc_RNA (1)...(19): siRNA sense strand
ccaaagagaauuguuagaa

SEQ ID NO: 874886 - RNA, 19 nt, Homo sapiens
  misc_RNA (1)...(19): siRNA sense strand
acaugaagaugagacaaua

SEQ ID NO: 874887 - RNA, 19 nt, Homo sapiens
  misc_RNA (1)...(19): siRNA sense strand
agagauugauuaccaaaga

SEQ ID NO: 874888 - RNA, 19 nt, Homo sapiens
  misc_RNA (1)...(19): siRNA sense strand
gggaugacauuuugauuaa

SEQ ID NO: 874889 - RNA, 19 nt, Homo sapiens
  misc_RNA (1)...(19): siRNA sense strand
ggaaaucugaagcaaagaa

SEQ ID NO: 874890 - RNA, 19 nt, Homo sapiens
  misc_RNA (1)...(19): siRNA sense strand
gauaggaaggugaaaguau

SEQ ID NO: 874891 - RNA, 19 nt, Homo sapiens
  misc_RNA (1)...(19): siRNA sense strand
gauuaugcagcuucaauuu

SEQ ID NO: 874892 - RNA, 19 nt, Homo sapiens
  misc_RNA (1)...(19): siRNA sense strand
aaagaagcaccuagaauug

SEQ ID NO: 874893 - RNA, 19 nt, Homo sapiens
  misc_RNA (1)...(19): siRNA sense strand
gaagcaacgggaugacauu

SEQ ID NO: 874894 - RNA, 19 nt, Homo sapiens
  misc_RNA (1)...(19): siRNA sense strand
aauggaauacugaguguua

SEQ ID NO: 874895 - RNA, 19 nt, Homo sapiens
  misc_RNA (1)...(19): siRNA sense strand
gagaauuguuagaaaccuu

SEQ ID NO: 874896 - RNA, 19 nt, Homo sapiens
  misc_RNA (1)...(19): siRNA sense strand
gaaggaaaucagucauguu

SEQ ID NO: 874897 - RNA, 19 nt, Homo sapiens
  misc_RNA (1)...(19): siRNA sense strand
gaaaguauacagcacaacu

SEQ ID NO: 874898 - RNA, 19 nt, Homo sapiens
  misc_RNA (1)...(19): siRNA sense strand
auaaagacacccgagauua

SEQ ID NO: 874899 - RNA, 19 nt, Homo sapiens
  misc_RNA (1)...(19): siRNA sense strand
uuaaacaucggaaaucuga

SEQ ID NO: 874900 - RNA, 19 nt, Homo sapiens
  misc_RNA (1)...(19): siRNA sense strand
ccaauggaauacugagugu

SEQ ID NO: 874901 - RNA, 19 nt, Homo sapiens
  misc_RNA (1)...(19): siRNA sense strand
gcaacgggaugacauuuug

SEQ ID NO: 874902 - RNA, 19 nt, Homo sapiens
  misc_RNA (1)...(19): siRNA sense strand
ucggaaaucugaagcaaag

SEQ ID NO: 874903 - RNA, 19 nt, Homo sapiens
  misc_RNA (1)...(19): siRNA sense strand
gccaagauuugcuccuguu

SEQ ID NO: 874904 - RNA, 19 nt, Homo sapiens
  misc_RNA (1)...(19): siRNA sense strand
ugacagggaucugaaacau

SEQ ID NO: 874905 - RNA, 19 nt, Homo sapiens
  misc_RNA (1)...(19): siRNA sense strand
gagaaggaaaucagucaug

SEQ ID NO: 874906 - RNA, 19 nt, Homo sapiens
  misc_RNA (1)...(19): siRNA sense strand
gagauuacgguguccauca

SEQ ID NO: 874907 - RNA, 19 nt, Homo sapiens
  misc_RNA (1)...(19): siRNA sense strand
aagauuugcuccuguuuua

SEQ ID NO: 874908 - RNA, 19 nt, Homo sapiens
  misc_RNA (1)...(19): siRNA sense strand
agaaggaaaucagucaugu

SEQ ID NO: 874909 - RNA, 19 nt, Homo sapiens
  misc_RNA (1)...(19): siRNA sense strand
uaaagacacccgagauuac

SEQ ID NO: 874910 - RNA, 19 nt, Homo sapiens
  misc_RNA (1)...(19): siRNA sense strand
gaggacaauugcuaguauc

SEQ ID NO: 874911 - RNA, 19 nt, Homo sapiens
  misc_RNA (1)...(19): siRNA sense strand
gugaaaguauacagcacaa

SEQ ID NO: 874912 - RNA, 19 nt, Homo sapiens
  misc_RNA (1)...(19): siRNA sense strand
ggauaggaaggugaaagua

SEQ ID NO: 874913 - RNA, 19 nt, Homo sapiens
  misc_RNA (1)...(19): siRNA sense strand
ggaaugaccaauggaauac

SEQ ID NO: 874914 - RNA, 19 nt, Homo sapiens
  misc_RNA (1)...(19): siRNA sense strand
cagcaaagaagcaccuaga

SEQ ID NO: 874915 - RNA, 19 nt, Homo sapiens
  misc_RNA (1)...(19): siRNA sense strand
aagaaggccugcauaucga

SEQ ID NO: 874916 - RNA, 19 nt, Homo sapiens
  misc_RNA (1)...(19): siRNA sense strand
caucggaaaucugaagcaa

SEQ ID NO: 874917 - RNA, 19 nt, Homo sapiens
  misc_RNA (1)...(19): siRNA sense strand
guaggaaugaccaauggaa

SEQ ID NO: 874918 - RNA, 19 nt, Homo sapiens
  misc_RNA (1)...(19): siRNA sense strand
gagauugauuaccaaagag

SEQ ID NO: 874919 - RNA, 19 nt, Homo sapiens
  misc_RNA (1)...(19): siRNA sense strand
uaacaggccagcaaagaag

SEQ ID NO: 874920 - RNA, 19 nt, Homo sapiens
  misc_RNA (1)...(19): siRNA sense strand
aggaaugaccaauggaaua

SEQ ID NO: 874921 - RNA, 19 nt, Homo sapiens
  misc_RNA (1)...(19): siRNA sense strand
caaaguaguccacaguuuu

SEQ ID NO: 874922 - RNA, 19 nt, Homo sapiens
  misc_RNA (1)...(19): siRNA sense strand
cagagaauaagaagauaga

SEQ ID NO: 874923 - RNA, 19 nt, Homo sapiens
  misc_RNA (1)...(19): siRNA sense strand
caauaaagacacccgagau

SEQ ID NO: 874924 - RNA, 19 nt, Homo sapiens
  misc_RNA (1)...(19): siRNA sense strand
aauaaagacacccgagauu

SEQ ID NO: 874925 - RNA, 19 nt, Homo sapiens
  misc_RNA (1)...(19): siRNA sense strand
gggaugauggauaugcuuu

SEQ ID NO: 874926 - RNA, 19 nt, Homo sapiens
  misc_RNA (1)...(19): siRNA sense strand
caauugcuaguaucuuuga

SEQ ID NO: 874927 - RNA, 19 nt, Homo sapiens
  misc_RNA (1)...(19): siRNA sense strand
gaaaucugaagcaaagaag

SEQ ID NO: 874928 - RNA, 19 nt, Homo sapiens
  misc_RNA (1)...(19): siRNA sense strand
ucaaugcugcugaaauaau

SEQ ID NO: 874929 - RNA, 19 nt, Homo sapiens
  misc_RNA (1)...(19): siRNA sense strand
gauuacgguguccaucaua

SEQ ID NO: 874930 - RNA, 19 nt, Homo sapiens
  misc_RNA (1)...(19): siRNA sense strand
caccuagaauuguaugaca

SEQ ID NO: 874931 - RNA, 19 nt, Homo sapiens
  misc_RNA (1)...(19): siRNA sense strand
gaagcaccuagaauuguau

SEQ ID NO: 874932 - RNA, 19 nt, Homo sapiens
  misc_RNA (1)...(19): siRNA sense strand
guucuuggucccacuugua

SEQ ID NO: 874933 - RNA, 19 nt, Homo sapiens
  misc_RNA (1)...(19): siRNA sense strand
gccugcauaucgaaccuuu

SEQ ID NO: 874934 - RNA, 19 nt, Homo sapiens
  misc_RNA (1)...(19): siRNA sense strand
ggacaauugcuaguaucuu

SEQ ID NO: 874935 - RNA, 19 nt, Homo sapiens
  misc_RNA (1)...(19): siRNA sense strand
aaggaaaucagucauguuc

SEQ ID NO: 874936 - RNA, 19 nt, Homo sapiens
  misc_RNA (1)...(19): siRNA sense strand
cauaaaggaguuaaaucga

SEQ ID NO: 874937 - RNA, 19 nt, Homo sapiens
  misc_RNA (1)...(19): siRNA sense strand
gacagggaucugaaacauu

SEQ ID NO: 874938 - RNA, 19 nt, Homo sapiens
  misc_RNA (1)...(19): siRNA sense strand
uuuaaucaaugcugcugaa

SEQ ID NO: 874939 - RNA, 19 nt, Homo sapiens
  misc_RNA (1)...(19): siRNA sense strand
gucuugcccuugcacauga

SEQ ID NO: 874940 - RNA, 19 nt, Homo sapiens
  misc_RNA (1)...(19): siRNA sense strand
guuaaaaggaggacaauug

SEQ ID NO: 874941 - RNA, 19 nt, Homo sapiens
  misc_RNA (1)...(19): siRNA sense strand
cuuucuggcucacuggaua

SEQ ID NO: 874942 - RNA, 19 nt, Homo sapiens
  misc_RNA (1)...(19): siRNA sense strand
aagaagaaggccugcauau

SEQ ID NO: 874943 - RNA, 19 nt, Homo sapiens
  misc_RNA (1)...(19): siRNA sense strand
uuaacaggccagcaaagaa

SEQ ID NO: 874944 - RNA, 19 nt, Homo sapiens
  misc_RNA (1)...(19): siRNA sense strand
ggauuuccagagaauaaga

SEQ ID NO: 874945 - RNA, 19 nt, Homo sapiens
  misc_RNA (1)...(19): siRNA sense strand
ugauaaggaaucuuucuca

SEQ ID NO: 874946 - RNA, 19 nt, Homo sapiens
  misc_RNA (1)...(19): siRNA sense strand
cugcauaucgaaccuuuau

SEQ ID NO: 874947 - RNA, 19 nt, Homo sapiens
  misc_RNA (1)...(19): siRNA sense strand
ucauaaaggaguuaaaucg

SEQ ID NO: 874948 - RNA, 19 nt, Homo sapiens
  misc_RNA (1)...(19): siRNA sense strand
aaacaucggaaaucugaag

SEQ ID NO: 874949 - RNA, 19 nt, Homo sapiens
  misc_RNA (1)...(19): siRNA sense strand
ugauuaugcagcuucaauu

SEQ ID NO: 874950 - RNA, 19 nt, Homo sapiens
  misc_RNA (1)...(19): siRNA sense strand
uuagaaaccuuggggauga

SEQ ID NO: 874951 - RNA, 19 nt, Homo sapiens
  misc_RNA (1)...(19): siRNA sense strand
uuaugcagcuucaauuuug

SEQ ID NO: 874952 - RNA, 19 nt, Homo sapiens
  misc_RNA (1)...(19): siRNA sense strand
uaaucaaugcugcugaaau

SEQ ID NO: 874953 - RNA, 19 nt, Homo sapiens
  misc_RNA (1)...(19): siRNA sense strand
gcacaugaagaugagacaa

SEQ ID NO: 874954 - RNA, 19 nt, Homo sapiens
  misc_RNA (1)...(19): siRNA sense strand
guaugacagggaucugaaa

SEQ ID NO: 874955 - RNA, 19 nt, Homo sapiens
  misc_RNA (1)...(19): siRNA sense strand
ggaauacugaguguuaaac

SEQ ID NO: 874956 - RNA, 19 nt, Homo sapiens
  misc_RNA (1)...(19): siRNA sense strand
ccaagauuugcuccuguuu

SEQ ID NO: 874957 - RNA, 19 nt, Homo sapiens
  misc_RNA (1)...(19): siRNA sense strand
ugaagaugagacaauaguu

SEQ ID NO: 874958 - RNA, 19 nt, Homo sapiens
  misc_RNA (1)...(19): siRNA sense strand
auuacgguguccaucauaa

SEQ ID NO: 874959 - RNA, 19 nt, Homo sapiens
  misc_RNA (1)...(19): siRNA sense strand
uggucccacuuguacaaua

SEQ ID NO: 874960 - RNA, 19 nt, Homo sapiens
  misc_RNA (1)...(19): siRNA sense strand
uccagagaauaagaagaua

SEQ ID NO: 874961 - RNA, 19 nt, Homo sapiens
  misc_RNA (1)...(19): siRNA sense strand
aaaaggaggacaauugcua

SEQ ID NO: 874962 - RNA, 19 nt, Homo sapiens
  misc_RNA (1)...(19): siRNA sense strand
ccagagaauaagaagauag

SEQ ID NO: 874963 - RNA, 19 nt, Homo sapiens
  misc_RNA (1)...(19): siRNA sense strand
gauugauuaccaaagagaa

SEQ ID NO: 874964 - RNA, 19 nt, Homo sapiens
  misc_RNA (1)...(19): siRNA sense strand
aaugaccaauggaauacug

SEQ ID NO: 874965 - RNA, 19 nt, Homo sapiens
  misc_RNA (1)...(19): siRNA sense strand
cgguguccaucauaaagga

SEQ ID NO: 874966 - RNA, 19 nt, Homo sapiens
  misc_RNA (1)...(19): siRNA sense strand
gauuuccagagaauaagaa

SEQ ID NO: 874967 - RNA, 19 nt, Homo sapiens
  misc_RNA (1)...(19): siRNA sense strand
gaaaguggcugaugaaauu

SEQ ID NO: 874968 - RNA, 19 nt, Homo sapiens
  misc_RNA (1)...(19): siRNA sense strand
gaccagaaaugaacuauaa

SEQ ID NO: 874969 - RNA, 19 nt, Homo sapiens
  misc_RNA (1)...(19): siRNA sense strand
ggaaaccgcugaaguugaa

SEQ ID NO: 874970 - RNA, 19 nt, Homo sapiens
  misc_RNA (1)...(19): siRNA sense strand
gaugauagcugucuuugga

SEQ ID NO: 874971 - RNA, 19 nt, Homo sapiens
  misc_RNA (1)...(19): siRNA sense strand
ggaacuagaugaauauaug

SEQ ID NO: 874972 - RNA, 19 nt, Homo sapiens
  misc_RNA (1)...(19): siRNA sense strand
acaaggaacuagaugaaua

SEQ ID NO: 874973 - RNA, 19 nt, Homo sapiens
  misc_RNA (1)...(19): siRNA sense strand
gaaggaaucucaagagcau

SEQ ID NO: 874974 - RNA, 19 nt, Homo sapiens
  misc_RNA (1)...(19): siRNA sense strand
gguggucucuuuauaauga

SEQ ID NO: 874975 - RNA, 19 nt, Homo sapiens
  misc_RNA (1)...(19): siRNA sense strand
ucaagaagcugaugauaca

SEQ ID NO: 874976 - RNA, 19 nt, Homo sapiens
  misc_RNA (1)...(19): siRNA sense strand
gaaacgaccugucaaagac

SEQ ID NO: 874977 - RNA, 19 nt, Homo sapiens
  misc_RNA (1)...(19): siRNA sense strand
gaauggaggccacuauuga

SEQ ID NO: 874978 - RNA, 19 nt, Homo sapiens
  misc_RNA (1)...(19): siRNA sense strand
ggaaacgaccugucaaaga

SEQ ID NO: 874979 - RNA, 19 nt, Homo sapiens
  misc_RNA (1)...(19): siRNA sense strand
ccaagaaacuuaggaagga

SEQ ID NO: 874980 - RNA, 19 nt, Homo sapiens
  misc_RNA (1)...(19): siRNA sense strand
caauugaacuucugaugga

SEQ ID NO: 874981 - RNA, 19 nt, Homo sapiens
  misc_RNA (1)...(19): siRNA sense strand
gaacagaccagaaaugaac

SEQ ID NO: 874982 - RNA, 19 nt, Homo sapiens
  misc_RNA (1)...(19): siRNA sense strand
ggaaagaagauuaacaaca

SEQ ID NO: 874983 - RNA, 19 nt, Homo sapiens
  misc_RNA (1)...(19): siRNA sense strand
gaggaaagaagauuaacaa

SEQ ID NO: 874984 - RNA, 19 nt, Homo sapiens
  misc_RNA (1)...(19): siRNA sense strand
gauggaaaccgcugaaguu

SEQ ID NO: 874985 - RNA, 19 nt, Homo sapiens
  misc_RNA (1)...(19): siRNA sense strand
caaaagaucuagacaagga

SEQ ID NO: 874986 - RNA, 19 nt, Homo sapiens
  misc_RNA (1)...(19): siRNA sense strand
guagugaggauuauuggua

SEQ ID NO: 874987 - RNA, 19 nt, Homo sapiens
  misc_RNA (1)...(19): siRNA sense strand
aauccgagaccuacaauua

SEQ ID NO: 874988 - RNA, 19 nt, Homo sapiens
  misc_RNA (1)...(19): siRNA sense strand
gaaauuucauucagguuac

SEQ ID NO: 874989 - RNA, 19 nt, Homo sapiens
  misc_RNA (1)...(19): siRNA sense strand
ccacugaacuugguaucuu

SEQ ID NO: 874990 - RNA, 19 nt, Homo sapiens
  misc_RNA (1)...(19): siRNA sense strand
gugcaccaguaucacauua

SEQ ID NO: 874991 - RNA, 19 nt, Homo sapiens
  misc_RNA (1)...(19): siRNA sense strand
gcaccaguaucacauuauc

SEQ ID NO: 874992 - RNA, 19 nt, Homo sapiens
  misc_RNA (1)...(19): siRNA sense strand
gaggauuauugguaacaaa

SEQ ID NO: 874993 - RNA, 19 nt, Homo sapiens
  misc_RNA (1)...(19): siRNA sense strand
aaaugguggucucuuuaua

SEQ ID NO: 874994 - RNA, 19 nt, Homo sapiens
  misc_RNA (1)...(19): siRNA sense strand
ggaauggaggccacuauug

SEQ ID NO: 874995 - RNA, 19 nt, Homo sapiens
  misc_RNA (1)...(19): siRNA sense strand
ccauugaaguugaucauuc

SEQ ID NO: 874996 - RNA, 19 nt, Homo sapiens
  misc_RNA (1)...(19): siRNA sense strand
aagagaaaguggcugauga

SEQ ID NO: 874997 - RNA, 19 nt, Homo sapiens
  misc_RNA (1)...(19): siRNA sense strand
gaacacggcaacugcaugu

SEQ ID NO: 874998 - RNA, 19 nt, Homo sapiens
  misc_RNA (1)...(19): siRNA sense strand
ggaacaaauuaaggacauu

SEQ ID NO: 874999 - RNA, 19 nt, Homo sapiens
  misc_RNA (1)...(19): siRNA sense strand
gaaugguagucgaagaaga

SEQ ID NO: 875000 - RNA, 19 nt, Homo sapiens
  misc_RNA (1)...(19): siRNA sense strand
gaccuacaauuauuugcuu

SEQ ID NO: 875001 - RNA, 19 nt, Homo sapiens
  misc_RNA (1)...(19): siRNA sense strand
ggaggccacuauugacaga

SEQ ID NO: 875002 - RNA, 19 nt, Homo sapiens
  misc_RNA (1)...(19): siRNA sense strand
gaaacgcaaacgacagaaa

SEQ ID NO: 875003 - RNA, 19 nt, Homo sapiens
  misc_RNA (1)...(19): siRNA sense strand
gggaacagaccagaaauga

SEQ ID NO: 875004 - RNA, 19 nt, Homo sapiens
  misc_RNA (1)...(19): siRNA sense strand
ggaacagaaucaagaugca

SEQ ID NO: 875005 - RNA, 19 nt, Homo sapiens
  misc_RNA (1)...(19): siRNA sense strand
gaucacagcggaagauucu

SEQ ID NO: 875006 - RNA, 19 nt, Homo sapiens
  misc_RNA (1)...(19): siRNA sense strand
caagaaacuuaggaaggaa

SEQ ID NO: 875007 - RNA, 19 nt, Homo sapiens
  misc_RNA (1)...(19): siRNA sense strand
ggaggucggcgauauggaa

SEQ ID NO: 875008 - RNA, 19 nt, Homo sapiens
  misc_RNA (1)...(19): siRNA sense strand
caaggaacuagaugaauau

SEQ ID NO: 875009 - RNA, 19 nt, Homo sapiens
  misc_RNA (1)...(19): siRNA sense strand
uaucagcgaggaacaaauu

SEQ ID NO: 875010 - RNA, 19 nt, Homo sapiens
  misc_RNA (1)...(19): siRNA sense strand
uagugaggauuauugguaa

SEQ ID NO: 875011 - RNA, 19 nt, Homo sapiens
  misc_RNA (1)...(19): siRNA sense strand
ugauagcugucuuuggaaa

SEQ ID NO: 875012 - RNA, 19 nt, Homo sapiens
  misc_RNA (1)...(19): siRNA sense strand
ggaacagaccagaaaugaa

SEQ ID NO: 875013 - RNA, 19 nt, Homo sapiens
  misc_RNA (1)...(19): siRNA sense strand
gaaaguguggauucaagug

SEQ ID NO: 875014 - RNA, 19 nt, Homo sapiens
  misc_RNA (1)...(19): siRNA sense strand
agaggaagccauugaaguu

SEQ ID NO: 875015 - RNA, 19 nt, Homo sapiens
  misc_RNA (1)...(19): siRNA sense strand
gaagauuaacaacauaugg

SEQ ID NO: 875016 - RNA, 19 nt, Homo sapiens
  misc_RNA (1)...(19): siRNA sense strand
ggaagccauugaaguugau

SEQ ID NO: 875017 - RNA, 19 nt, Homo sapiens
  misc_RNA (1)...(19): siRNA sense strand
gcagacaauccgagaccua

SEQ ID NO: 875018 - RNA, 19 nt, Homo sapiens
  misc_RNA (1)...(19): siRNA sense strand
gaugaugauagcugucuuu

SEQ ID NO: 875019 - RNA, 19 nt, Homo sapiens
  misc_RNA (1)...(19): siRNA sense strand
ccugauagcccgaguagug

SEQ ID NO: 875020 - RNA, 19 nt, Homo sapiens
  misc_RNA (1)...(19): siRNA sense strand
uccgagaccuacaauuauu

SEQ ID NO: 875021 - RNA, 19 nt, Homo sapiens
  misc_RNA (1)...(19): siRNA sense strand
gcuggaggaaagaagauua

SEQ ID NO: 875022 - RNA, 19 nt, Homo sapiens
  misc_RNA (1)...(19): siRNA sense strand
uuaucgagcuguugaaagu

SEQ ID NO: 875023 - RNA, 19 nt, Homo sapiens
  misc_RNA (1)...(19): siRNA sense strand
gcgacaggccgcugcaauu

SEQ ID NO: 875024 - RNA, 19 nt, Homo sapiens
  misc_RNA (1)...(19): siRNA sense strand
gaagaggagaacacaagug

SEQ ID NO: 875025 - RNA, 19 nt, Homo sapiens
  misc_RNA (1)...(19): siRNA sense strand
gcgaggaacaaauuaagga

SEQ ID NO: 875026 - RNA, 19 nt, Homo sapiens
  misc_RNA (1)...(19): siRNA sense strand
ggaggaaagaagauuaaca

SEQ ID NO: 875027 - RNA, 19 nt, Homo sapiens
  misc_RNA (1)...(19): siRNA sense strand
gaaguugaucauucucaug

SEQ ID NO: 875028 - RNA, 19 nt, Homo sapiens
  misc_RNA (1)...(19): siRNA sense strand
ggaggcagaggaagccauu

SEQ ID NO: 875029 - RNA, 19 nt, Homo sapiens
  misc_RNA (1)...(19): siRNA sense strand
ugggcaaggucaucucaaa

SEQ ID NO: 875030 - RNA, 19 nt, Homo sapiens
  misc_RNA (1)...(19): siRNA sense strand
gggaauggaggccacuauu

SEQ ID NO: 875031 - RNA, 19 nt, Homo sapiens
  misc_RNA (1)...(19): siRNA sense strand
cgacaggccgcugcaauug

SEQ ID NO: 875032 - RNA, 19 nt, Homo sapiens
  misc_RNA (1)...(19): siRNA sense strand
caaaaugguggucucuuua

SEQ ID NO: 875033 - RNA, 19 nt, Homo sapiens
  misc_RNA (1)...(19): siRNA sense strand
gagaaaguggcugaugaaa

SEQ ID NO: 875034 - RNA, 19 nt, Homo sapiens
  misc_RNA (1)...(19): siRNA sense strand
agacaaggaacuagaugaa

SEQ ID NO: 875035 - RNA, 19 nt, Homo sapiens
  misc_RNA (1)...(19): siRNA sense strand
cuagggaacagaccagaaa

SEQ ID NO: 875036 - RNA, 19 nt, Homo sapiens
  misc_RNA (1)...(19): siRNA sense strand
aggaagccauugaaguuga

SEQ ID NO: 875037 - RNA, 19 nt, Homo sapiens
  misc_RNA (1)...(19): siRNA sense strand
gaggaagccauugaaguug

SEQ ID NO: 875038 - RNA, 19 nt, Homo sapiens
  misc_RNA (1)...(19): siRNA sense strand
acaaaaugguggucucuuu

SEQ ID NO: 875039 - RNA, 19 nt, Homo sapiens
  misc_RNA (1)...(19): siRNA sense strand
gcccgaguagugaggauua

SEQ ID NO: 875040 - RNA, 19 nt, Homo sapiens
  misc_RNA (1)...(19): siRNA sense strand
ccaaagaaagaccugauag

SEQ ID NO: 875041 - RNA, 19 nt, Homo sapiens
  misc_RNA (1)...(19): siRNA sense strand
gugcugugcugcaggaaca

SEQ ID NO: 875042 - RNA, 19 nt, Homo sapiens
  misc_RNA (1)...(19): siRNA sense strand
caaguuggaggcagaggaa

SEQ ID NO: 875043 - RNA, 19 nt, Homo sapiens
  misc_RNA (1)...(19): siRNA sense strand
auacaucacgagaaacuuu

SEQ ID NO: 875044 - RNA, 19 nt, Homo sapiens
  misc_RNA (1)...(19): siRNA sense strand
cgaguagugaggauuauug

SEQ ID NO: 875045 - RNA, 19 nt, Homo sapiens
  misc_RNA (1)...(19): siRNA sense strand
gcaggaacagaaucaagau

SEQ ID NO: 875046 - RNA, 19 nt, Homo sapiens
  misc_RNA (1)...(19): siRNA sense strand
aaugguggucucuuuauaa

SEQ ID NO: 875047 - RNA, 19 nt, Homo sapiens
  misc_RNA (1)...(19): siRNA sense strand
gaacuauaaaggucgauac

SEQ ID NO: 875048 - RNA, 19 nt, Homo sapiens
  misc_RNA (1)...(19): siRNA sense strand
aaacgcaaacgacagaaau

SEQ ID NO: 875049 - RNA, 19 nt, Homo sapiens
  misc_RNA (1)...(19): siRNA sense strand
cauugaaguugaucauucu

SEQ ID NO: 875050 - RNA, 19 nt, Homo sapiens
  misc_RNA (1)...(19): siRNA sense strand
uacaggaaccaaagaaaga

SEQ ID NO: 875051 - RNA, 19 nt, Homo sapiens
  misc_RNA (1)...(19): siRNA sense strand
gaucaaaggaagaggaaaa

SEQ ID NO: 875052 - RNA, 19 nt, Homo sapiens
  misc_RNA (1)...(19): siRNA sense strand
ggaagaggagaacacaagu

SEQ ID NO: 875053 - RNA, 19 nt, Homo sapiens
  misc_RNA (1)...(19): siRNA sense strand
caagagaaaguggcugaug

SEQ ID NO: 875054 - RNA, 19 nt, Homo sapiens
  misc_RNA (1)...(19): siRNA sense strand
ccagaaaugaacuauaaag

SEQ ID NO: 875055 - RNA, 19 nt, Homo sapiens
  misc_RNA (1)...(19): siRNA sense strand
gaacuagaugaauauaugc

SEQ ID NO: 875056 - RNA, 19 nt, Homo sapiens
  misc_RNA (1)...(19): siRNA sense strand
agucagaaaccaccuguug

SEQ ID NO: 875057 - RNA, 19 nt, Homo sapiens
  misc_RNA (1)...(19): siRNA sense strand
ugaaguugaucauucucau

SEQ ID NO: 875058 - RNA, 19 nt, Homo sapiens
  misc_RNA (1)...(19): siRNA sense strand
gcagaggaagccauugaag

SEQ ID NO: 875059 - RNA, 19 nt, Homo sapiens
  misc_RNA (1)...(19): siRNA sense strand
ggucggcgauauggaagau

SEQ ID NO: 875060 - RNA, 19 nt, Homo sapiens
  misc_RNA (1)...(19): siRNA sense strand
ucagcgaggaacaaauuaa

SEQ ID NO: 875061 - RNA, 19 nt, Homo sapiens
  misc_RNA (1)...(19): siRNA sense strand
agaaaguggcugaugaaau

SEQ ID NO: 875062 - RNA, 19 nt, Homo sapiens
  misc_RNA (1)...(19): siRNA sense strand
gacaauccgagaccuacaa

SEQ ID NO: 875063 - RNA, 19 nt, Homo sapiens
  misc_RNA (1)...(19): siRNA sense strand
ggccagagcagucagaaac

SEQ ID NO: 875064 - RNA, 19 nt, Homo sapiens
  misc_RNA (1)...(19): siRNA sense strand
gccuuggccucucuugaug

SEQ ID NO: 875065 - RNA, 19 nt, Homo sapiens
  misc_RNA (1)...(19): siRNA sense strand
aaaggucgauacgagauca

SEQ ID NO: 875066 - RNA, 19 nt, Homo sapiens
  misc_RNA (1)...(19): siRNA sense strand
aaugguagucgaagaagaa

SEQ ID NO: 875067 - RNA, 19 nt, Homo sapiens
  misc_RNA (1)...(19): siRNA sense strand
gagaauaacuggcgcaaug

SEQ ID NO: 875068 - RNA, 19 nt, Homo sapiens
  misc_RNA (1)...(19): siRNA sense strand
aaugggagcuggugaauga

SEQ ID NO: 875069 - RNA, 19 nt, Homo sapiens
  misc_RNA (1)...(19): siRNA sense strand
gcaaguacccucuggaugu

SEQ ID NO: 875070 - RNA, 19 nt, Homo sapiens
  misc_RNA (1)...(19): siRNA sense strand
gaugugauccucugcaauu

SEQ ID NO: 875071 - RNA, 19 nt, Homo sapiens
  misc_RNA (1)...(19): siRNA sense strand
ggagagcagugauggagau

SEQ ID NO: 875072 - RNA, 19 nt, Homo sapiens
  misc_RNA (1)...(19): siRNA sense strand
gcaauucuguagaguugau

SEQ ID NO: 875073 - RNA, 19 nt, Homo sapiens
  misc_RNA (1)...(19): siRNA sense strand
agaauaaugucuuccacuu

SEQ ID NO: 875074 - RNA, 19 nt, Homo sapiens
  misc_RNA (1)...(19): siRNA sense strand
agaaggaguucggcuauga

SEQ ID NO: 875075 - RNA, 19 nt, Homo sapiens
  misc_RNA (1)...(19): siRNA sense strand
gaauaaugucuuccacuug

SEQ ID NO: 875076 - RNA, 19 nt, Homo sapiens
  misc_RNA (1)...(19): siRNA sense strand
ggacauuuacgacgaugaa

SEQ ID NO: 875077 - RNA, 19 nt, Homo sapiens
  misc_RNA (1)...(19): siRNA sense strand
gacgagaacagugagaaua

SEQ ID NO: 875078 - RNA, 19 nt, Homo sapiens
  misc_RNA (1)...(19): siRNA sense strand
guaugacauuuacuacuug

SEQ ID NO: 875079 - RNA, 19 nt, Homo sapiens
  misc_RNA (1)...(19): siRNA sense strand
cagaagacgucggaggauu

SEQ ID NO: 875080 - RNA, 19 nt, Homo sapiens
  misc_RNA (1)...(19): siRNA sense strand
gcagaaggaguucggcuau

SEQ ID NO: 875081 - RNA, 19 nt, Homo sapiens
  misc_RNA (1)...(19): siRNA sense strand
gagcagugauggagaugag

SEQ ID NO: 875082 - RNA, 19 nt, Homo sapiens
  misc_RNA (1)...(19): siRNA sense strand
gggagcuggugaaugauga

SEQ ID NO: 875083 - RNA, 19 nt, Homo sapiens
  misc_RNA (1)...(19): siRNA sense strand
cugcaauucuguagaguug

SEQ ID NO: 875084 - RNA, 19 nt, Homo sapiens
  misc_RNA (1)...(19): siRNA sense strand
caaguacccucuggaugug

SEQ ID NO: 875085 - RNA, 19 nt, Homo sapiens
  misc_RNA (1)...(19): siRNA sense strand
gaagacgucggaggauuug

SEQ ID NO: 875086 - RNA, 19 nt, Homo sapiens
  misc_RNA (1)...(19): siRNA sense strand
cgugagcgauugacugugu

SEQ ID NO: 875087 - RNA, 19 nt, Homo sapiens
  misc_RNA (1)...(19): siRNA sense strand
cgaugaagaugacgagaac

SEQ ID NO: 875088 - RNA, 19 nt, Homo sapiens
  misc_RNA (1)...(19): siRNA sense strand
cagcggauguggagcaagu

SEQ ID NO: 875089 - RNA, 19 nt, Homo sapiens
  misc_RNA (1)...(19): siRNA sense strand
agaagacgucggaggauuu

SEQ ID NO: 875090 - RNA, 19 nt, Homo sapiens
  misc_RNA (1)...(19): siRNA sense strand
gagcaaguacccucuggau

SEQ ID NO: 875091 - RNA, 19 nt, Homo sapiens
  misc_RNA (1)...(19): siRNA sense strand
ucaagaaccagaggacauu

SEQ ID NO: 875092 - RNA, 19 nt, Homo sapiens
  misc_RNA (1)...(19): siRNA sense strand
acgagaacagugagaauaa

SEQ ID NO: 875093 - RNA, 19 nt, Homo sapiens
  misc_RNA (1)...(19): siRNA sense strand
cccacgaccuggauucaga

SEQ ID NO: 875094 - RNA, 19 nt, Homo sapiens
  misc_RNA (1)...(19): siRNA sense strand
guugauccgugagcgauug

SEQ ID NO: 875095 - RNA, 19 nt, Homo sapiens
  misc_RNA (1)...(19): siRNA sense strand
aagaaccagaggacauuua

SEQ ID NO: 875096 - RNA, 19 nt, Homo sapiens
  misc_RNA (1)...(19): siRNA sense strand
gaggauggaccaggaguca

SEQ ID NO: 875097 - RNA, 19 nt, Homo sapiens
  misc_RNA (1)...(19): siRNA sense strand
cagaaggaguucggcuaug

SEQ ID NO: 875098 - RNA, 19 nt, Homo sapiens
  misc_RNA (1)...(19): siRNA sense strand
gugauccucugcaauucug

SEQ ID NO: 875099 - RNA, 19 nt, Homo sapiens
  misc_RNA (1)...(19): siRNA sense strand
auaacuggcgcaaugagua

SEQ ID NO: 875100 - RNA, 19 nt, Homo sapiens
  misc_RNA (1)...(19): siRNA sense strand
caagaaccagaggacauuu

SEQ ID NO: 875101 - RNA, 19 nt, Homo sapiens
  misc_RNA (1)...(19): siRNA sense strand
gauccucugcaauucugua

SEQ ID NO: 875102 - RNA, 19 nt, Homo sapiens
  misc_RNA (1)...(19): siRNA sense strand
cagcguguccgccguaauc

SEQ ID NO: 875103 - RNA, 19 nt, Homo sapiens
  misc_RNA (1)...(19): siRNA sense strand
gcucuugugcucgcuugua

SEQ ID NO: 875104 - RNA, 19 nt, Homo sapiens
  misc_RNA (1)...(19): siRNA sense strand
gaggaggagagcagugaug

SEQ ID NO: 875105 - RNA, 19 nt, Homo sapiens
  misc_RNA (1)...(19): siRNA sense strand
cgagaacagugagaauaac

SEQ ID NO: 875106 - RNA, 19 nt, Homo sapiens
  misc_RNA (1)...(19): siRNA sense strand
caggcuggauugagaacau

SEQ ID NO: 875107 - RNA, 19 nt, Homo sapiens
  misc_RNA (1)...(19): siRNA sense strand
aagaugacgagaacaguga

SEQ ID NO: 875108 - RNA, 19 nt, Homo sapiens
  misc_RNA (1)...(19): siRNA sense strand
uuacgacgaugaagaugac

SEQ ID NO: 875109 - RNA, 19 nt, Homo sapiens
  misc_RNA (1)...(19): siRNA sense strand
gaaugggagcuggugaaug

SEQ ID NO: 875110 - RNA, 19 nt, Homo sapiens
  misc_RNA (1)...(19): siRNA sense strand
cagaggaggagagcaguga

SEQ ID NO: 875111 - RNA, 19 nt, Homo sapiens
  misc_RNA (1)...(19): siRNA sense strand
gaauaacuggcgcaaugag

SEQ ID NO: 875112 - RNA, 19 nt, Homo sapiens
  misc_RNA (1)...(19): siRNA sense strand
gagaacagugagaauaacu

SEQ ID NO: 875113 - RNA, 19 nt, Homo sapiens
  misc_RNA (1)...(19): siRNA sense strand
ggcggagaauaaugucuuc

SEQ ID NO: 875114 - RNA, 19 nt, Homo sapiens
  misc_RNA (1)...(19): siRNA sense strand
gacagcggauguggagcaa

SEQ ID NO: 875115 - RNA, 19 nt, Homo sapiens
  misc_RNA (1)...(19): siRNA sense strand
cgagucagcggcacagaag

SEQ ID NO: 875116 - RNA, 19 nt, Homo sapiens
  misc_RNA (1)...(19): siRNA sense strand
ggaggagagcagugaugga

SEQ ID NO: 875117 - RNA, 19 nt, Homo sapiens
  misc_RNA (1)...(19): siRNA sense strand
gacugugucugaggaugga

SEQ ID NO: 875118 - RNA, 19 nt, Homo sapiens
  misc_RNA (1)...(19): siRNA sense strand
gaggcucugcugacuacaa

SEQ ID NO: 875119 - RNA, 19 nt, Homo sapiens
  misc_RNA (1)...(19): siRNA sense strand
cucuugugcucgcuuguaa

SEQ ID NO: 875120 - RNA, 19 nt, Homo sapiens
  misc_RNA (1)...(19): siRNA sense strand
cauuuacgacgaugaagau

SEQ ID NO: 875121 - RNA, 19 nt, Homo sapiens
  misc_RNA (1)...(19): siRNA sense strand
agaauaacuggcgcaauga

SEQ ID NO: 875122 - RNA, 19 nt, Homo sapiens
  misc_RNA (1)...(19): siRNA sense strand
ucacaucucugcugaagaa

SEQ ID NO: 875123 - RNA, 19 nt, Homo sapiens
  misc_RNA (1)...(19): siRNA sense strand
gaucaaagacugcaugaag

SEQ ID NO: 875124 - RNA, 19 nt, Homo sapiens
  misc_RNA (1)...(19): siRNA sense strand
cuuaggagcugccuggauu

SEQ ID NO: 875125 - RNA, 19 nt, Homo sapiens
  misc_RNA (1)...(19): siRNA sense strand
caagaucgccguagacaag

SEQ ID NO: 875126 - RNA, 19 nt, Homo sapiens
  misc_RNA (1)...(19): siRNA sense strand
cugcagaucuuccggaaau

SEQ ID NO: 875127 - RNA, 19 nt, Homo sapiens
  misc_RNA (1)...(19): siRNA sense strand
agaggaacauguuugaguu

SEQ ID NO: 875128 - RNA, 19 nt, Homo sapiens
  misc_RNA (1)...(19): siRNA sense strand
gaagauggaguuccugaag

SEQ ID NO: 875129 - RNA, 19 nt, Homo sapiens
  misc_RNA (1)...(19): siRNA sense strand
ggagcugccuggauugaca

SEQ ID NO: 875130 - RNA, 19 nt, Homo sapiens
  misc_RNA (1)...(19): siRNA sense strand
cagaagauccgcaagacuu

SEQ ID NO: 875131 - RNA, 19 nt, Homo sapiens
  misc_RNA (1)...(19): siRNA sense strand
gcacccugaucaugaagga

SEQ ID NO: 875132 - RNA, 19 nt, Homo sapiens
  misc_RNA (1)...(19): siRNA sense strand
ccucccagaugaucaaaga

SEQ ID NO: 875133 - RNA, 19 nt, Homo sapiens
  misc_RNA (1)...(19): siRNA sense strand
ucaaagacugcaugaagaa

SEQ ID NO: 875134 - RNA, 19 nt, Homo sapiens
  misc_RNA (1)...(19): siRNA sense strand
gaccgacgcuucccugacu

SEQ ID NO: 875135 - RNA, 19 nt, Homo sapiens
  misc_RNA (1)...(19): siRNA sense strand
gcacaugggcuucaaugac

SEQ ID NO: 875136 - RNA, 19 nt, Homo sapiens
  misc_RNA (1)...(19): siRNA sense strand
ccaagaagauggaguuccu

SEQ ID NO: 875137 - RNA, 19 nt, Homo sapiens
  misc_RNA (1)...(19): siRNA sense strand
ccaaccugcucaucacaga

SEQ ID NO: 875138 - RNA, 19 nt, Homo sapiens
  misc_RNA (1)...(19): siRNA sense strand
gaaaagaacauggucauca

SEQ ID NO: 875139 - RNA, 19 nt, Homo sapiens
  misc_RNA (1)...(19): siRNA sense strand
gcagguggaguacauguca

SEQ ID NO: 875140 - RNA, 19 nt, Homo sapiens
  misc_RNA (1)...(19): siRNA sense strand
gaaugcacaugggcuucaa

SEQ ID NO: 875141 - RNA, 19 nt, Homo sapiens
  misc_RNA (1)...(19): siRNA sense strand
gcacggcacccugaucaug

SEQ ID NO: 875142 - RNA, 19 nt, Homo sapiens
  misc_RNA (1)...(19): siRNA sense strand
ucaagaugcagguggagua

SEQ ID NO: 875143 - RNA, 19 nt, Homo sapiens
  misc_RNA (1)...(19): siRNA sense strand
ggucuacacgggugauuau

SEQ ID NO: 875144 - RNA, 19 nt, Homo sapiens
  misc_RNA (1)...(19): siRNA sense strand
ccaucuugcuggaggacua

SEQ ID NO: 875145 - RNA, 19 nt, Homo sapiens
  misc_RNA (1)...(19): siRNA sense strand
ggagcuuccucacaucucu

SEQ ID NO: 875146 - RNA, 19 nt, Homo sapiens
  misc_RNA (1)...(19): siRNA sense strand
ugaaggugcccaucuacuu

SEQ ID NO: 875147 - RNA, 19 nt, Homo sapiens
  misc_RNA (1)...(19): siRNA sense strand
cuacacgggugauuauaac

SEQ ID NO: 875148 - RNA, 19 nt, Homo sapiens
  misc_RNA (1)...(19): siRNA sense strand
ccgagaaggccaaccacua

SEQ ID NO: 875149 - RNA, 19 nt, Homo sapiens
  misc_RNA (1)...(19): siRNA sense strand
gggcgaggccaacuucuuc

SEQ ID NO: 875150 - RNA, 19 nt, Homo sapiens
  misc_RNA (1)...(19): siRNA sense strand
caggaccgaugguuguguu

SEQ ID NO: 875151 - RNA, 19 nt, Homo sapiens
  misc_RNA (1)...(19): siRNA sense strand
uaaagugggcucagagucu

SEQ ID NO: 875152 - RNA, 19 nt, Homo sapiens
  misc_RNA (1)...(19): siRNA sense strand
ucuccuacaucacccagaa

SEQ ID NO: 875153 - RNA, 19 nt, Homo sapiens
  misc_RNA (1)...(19): siRNA sense strand
cagaggaacauguuugagu

SEQ ID NO: 875154 - RNA, 19 nt, Homo sapiens
  misc_RNA (1)...(19): siRNA sense strand
ggaggacuaccgcaagauc

SEQ ID NO: 875155 - RNA, 19 nt, Homo sapiens
  misc_RNA (1)...(19): siRNA sense strand
cagagcaagcccucaaaga

SEQ ID NO: 875156 - RNA, 19 nt, Homo sapiens
  misc_RNA (1)...(19): siRNA sense strand
uggaguuccugaagcagaa

SEQ ID NO: 875157 - RNA, 19 nt, Homo sapiens
  misc_RNA (1)...(19): siRNA sense strand
gugcagaggaacauguuug

SEQ ID NO: 875158 - RNA, 19 nt, Homo sapiens
  misc_RNA (1)...(19): siRNA sense strand
agaagauccgcaagacuuu

SEQ ID NO: 875159 - RNA, 19 nt, Homo sapiens
  misc_RNA (1)...(19): siRNA sense strand
cgagaaggccaaccacuac

SEQ ID NO: 875160 - RNA, 19 nt, Homo sapiens
  misc_RNA (1)...(19): siRNA sense strand
gggagcgcaugaaccugaa

SEQ ID NO: 875161 - RNA, 19 nt, Homo sapiens
  misc_RNA (1)...(19): siRNA sense strand
gcaagaucgccguagacaa

SEQ ID NO: 875162 - RNA, 19 nt, Homo sapiens
  misc_RNA (1)...(19): siRNA sense strand
aucaaagacugcaugaaga

SEQ ID NO: 875163 - RNA, 19 nt, Homo sapiens
  misc_RNA (1)...(19): siRNA sense strand
ccucacaucucugcugaag

SEQ ID NO: 875164 - RNA, 19 nt, Homo sapiens
  misc_RNA (1)...(19): siRNA sense strand
ucuacacgggugauuauaa

SEQ ID NO: 875165 - RNA, 19 nt, Homo sapiens
  misc_RNA (1)...(19): siRNA sense strand
ggcaggugcuggaggucaa

SEQ ID NO: 875166 - RNA, 19 nt, Homo sapiens
  misc_RNA (1)...(19): siRNA sense strand
cagacuuccuggacugugu

SEQ ID NO: 875167 - RNA, 19 nt, Homo sapiens
  misc_RNA (1)...(19): siRNA sense strand
gaaggccaaccacuacuac

SEQ ID NO: 875168 - RNA, 19 nt, Homo sapiens
  misc_RNA (1)...(19): siRNA sense strand
ggaaugcacaugggcuuca

SEQ ID NO: 875169 - RNA, 19 nt, Homo sapiens
  misc_RNA (1)...(19): siRNA sense strand
cacgggugauuauaacaug

SEQ ID NO: 875170 - RNA, 19 nt, Homo sapiens
  misc_RNA (1)...(19): siRNA sense strand
gaccgaugguuguguuugc

SEQ ID NO: 875171 - RNA, 19 nt, Homo sapiens
  misc_RNA (1)...(19): siRNA sense strand
ggaccgaugguuguguuug

SEQ ID NO: 875172 - RNA, 19 nt, Homo sapiens
  misc_RNA (1)...(19): siRNA sense strand
agauggaguuccugaagca

SEQ ID NO: 875173 - RNA, 19 nt, Homo sapiens
  misc_RNA (1)...(19): siRNA sense strand
ccugacuucuccuacauca

SEQ ID NO: 875174 - RNA, 19 nt, Homo sapiens
  misc_RNA (1)...(19): siRNA sense strand
agauuaaagugggcucaga

SEQ ID NO: 875175 - RNA, 19 nt, Homo sapiens
  misc_RNA (1)...(19): siRNA sense strand
gcugguguccucagagcaa

SEQ ID NO: 875176 - RNA, 19 nt, Homo sapiens
  misc_RNA (1)...(19): siRNA sense strand
ggacgccaagggcaucaug

SEQ ID NO: 875177 - RNA, 19 nt, Homo sapiens
  misc_RNA (1)...(19): siRNA sense strand
agcggaagcucgagaugga

SEQ ID NO: 875178 - RNA, 19 nt, Homo sapiens
  misc_RNA (1)...(19): siRNA sense strand
agaaggccaaccacuacua

SEQ ID NO: 875179 - RNA, 19 nt, Homo sapiens
  misc_RNA (1)...(19): siRNA sense strand
cugccuggauugacaagug

SEQ ID NO: 875180 - RNA, 19 nt, Homo sapiens
  misc_RNA (1)...(19): siRNA sense strand
gagcaccagcugcgcuuca

SEQ ID NO: 875181 - RNA, 19 nt, Homo sapiens
  misc_RNA (1)...(19): siRNA sense strand
agagcaagcccucaaagag

SEQ ID NO: 875182 - RNA, 19 nt, Homo sapiens
  misc_RNA (1)...(19): siRNA sense strand
agaugcagguggaguacau

SEQ ID NO: 875183 - RNA, 19 nt, Homo sapiens
  misc_RNA (1)...(19): siRNA sense strand
cuggaggacuaccgcaaga

SEQ ID NO: 875184 - RNA, 19 nt, Homo sapiens
  misc_RNA (1)...(19): siRNA sense strand
gcagaucuuccggaaaugg

SEQ ID NO: 875185 - RNA, 19 nt, Homo sapiens
  misc_RNA (1)...(19): siRNA sense strand
aaaagaacauggucaucau

SEQ ID NO: 875186 - RNA, 19 nt, Homo sapiens
  misc_RNA (1)...(19): siRNA sense strand
ccuggacugugugaucauu

SEQ ID NO: 875187 - RNA, 19 nt, Homo sapiens
  misc_RNA (1)...(19): siRNA sense strand
cacggcacccugaucauga

SEQ ID NO: 875188 - RNA, 19 nt, Homo sapiens
  misc_RNA (1)...(19): siRNA sense strand
gcgagauggugggcuacga

SEQ ID NO: 875189 - RNA, 19 nt, Homo sapiens
  misc_RNA (1)...(19): siRNA sense strand
ccacguacgccacgaccau

SEQ ID NO: 875190 - RNA, 19 nt, Homo sapiens
  misc_RNA (1)...(19): siRNA sense strand
uggacugugugaucauuag

SEQ ID NO: 875191 - RNA, 19 nt, Homo sapiens
  misc_RNA (1)...(19): siRNA sense strand
uggaguacaugucauucag

SEQ ID NO: 875192 - RNA, 19 nt, Homo sapiens
  misc_RNA (1)...(19): siRNA sense strand
gaucaaagacugcaugaag

SEQ ID NO: 875193 - RNA, 19 nt, Homo sapiens
  misc_RNA (1)...(19): siRNA sense strand
cuuaggagcugccuggauu

SEQ ID NO: 875194 - RNA, 19 nt, Homo sapiens
  misc_RNA (1)...(19): siRNA sense strand
caagaucgccguagacaag

SEQ ID NO: 875195 - RNA, 19 nt, Homo sapiens
  misc_RNA (1)...(19): siRNA sense strand
ggagcugccuggauugaca

SEQ ID NO: 875196 - RNA, 19 nt, Homo sapiens
  misc_RNA (1)...(19): siRNA sense strand
cagaagauccgcaagacuu

SEQ ID NO: 875197 - RNA, 19 nt, Homo sapiens
  misc_RNA (1)...(19): siRNA sense strand
ccucccagaugaucaaaga

SEQ ID NO: 875198 - RNA, 19 nt, Homo sapiens
  misc_RNA (1)...(19): siRNA sense strand
ucaaagacugcaugaagaa

SEQ ID NO: 875199 - RNA, 19 nt, Homo sapiens
  misc_RNA (1)...(19): siRNA sense strand
gaccgacgcuucccugacu

SEQ ID NO: 875200 - RNA, 19 nt, Homo sapiens
  misc_RNA (1)...(19): siRNA sense strand
gcacaugggcuucaaugac

SEQ ID NO: 875201 - RNA, 19 nt, Homo sapiens
  misc_RNA (1)...(19): siRNA sense strand
ccaaccugcucaucacaga

SEQ ID NO: 875202 - RNA, 19 nt, Homo sapiens
  misc_RNA (1)...(19): siRNA sense strand
gaaugcacaugggcuucaa

SEQ ID NO: 875203 - RNA, 19 nt, Homo sapiens
  misc_RNA (1)...(19): siRNA sense strand
ggucuacacgggugauuau

SEQ ID NO: 875204 - RNA, 19 nt, Homo sapiens
  misc_RNA (1)...(19): siRNA sense strand
ccaucuugcuggaggacua

SEQ ID NO: 875205 - RNA, 19 nt, Homo sapiens
  misc_RNA (1)...(19): siRNA sense strand
ugaaggugcccaucuacuu

SEQ ID NO: 875206 - RNA, 19 nt, Homo sapiens
  misc_RNA (1)...(19): siRNA sense strand
cuacacgggugauuauaac

SEQ ID NO: 875207 - RNA, 19 nt, Homo sapiens
  misc_RNA (1)...(19): siRNA sense strand
ccgagaaggccaaccacua

SEQ ID NO: 875208 - RNA, 19 nt, Homo sapiens
  misc_RNA (1)...(19): siRNA sense strand
gggcgaggccaacuucuuc

SEQ ID NO: 875209 - RNA, 19 nt, Homo sapiens
  misc_RNA (1)...(19): siRNA sense strand
uaaagugggcucagagucu

SEQ ID NO: 875210 - RNA, 19 nt, Homo sapiens
  misc_RNA (1)...(19): siRNA sense strand
ucuccuacaucacccagaa

SEQ ID NO: 875211 - RNA, 19 nt, Homo sapiens
  misc_RNA (1)...(19): siRNA sense strand
ggaggacuaccgcaagauc

SEQ ID NO: 875212 - RNA, 19 nt, Homo sapiens
  misc_RNA (1)...(19): siRNA sense strand
gugcagaggaacauguuug

SEQ ID NO: 875213 - RNA, 19 nt, Homo sapiens
  misc_RNA (1)...(19): siRNA sense strand
agaagauccgcaagacuuu

SEQ ID NO: 875214 - RNA, 19 nt, Homo sapiens
  misc_RNA (1)...(19): siRNA sense strand
cgagaaggccaaccacuac

SEQ ID NO: 875215 - RNA, 19 nt, Homo sapiens
  misc_RNA (1)...(19): siRNA sense strand
gggagcgcaugaaccugaa

SEQ ID NO: 875216 - RNA, 19 nt, Homo sapiens
  misc_RNA (1)...(19): siRNA sense strand
gcaagaucgccguagacaa

SEQ ID NO: 875217 - RNA, 19 nt, Homo sapiens
  misc_RNA (1)...(19): siRNA sense strand
aucaaagacugcaugaaga

SEQ ID NO: 875218 - RNA, 19 nt, Homo sapiens
  misc_RNA (1)...(19): siRNA sense strand
cagacuuccuggacugugu

SEQ ID NO: 875219 - RNA, 19 nt, Homo sapiens
  misc_RNA (1)...(19): siRNA sense strand
gaaggccaaccacuacuac

SEQ ID NO: 875220 - RNA, 19 nt, Homo sapiens
  misc_RNA (1)...(19): siRNA sense strand
ucuacacgggugauuauaa

SEQ ID NO: 875221 - RNA, 19 nt, Homo sapiens
  misc_RNA (1)...(19): siRNA sense strand
ggaaugcacaugggcuuca

SEQ ID NO: 875222 - RNA, 19 nt, Homo sapiens
  misc_RNA (1)...(19): siRNA sense strand
cacgggugauuauaacaug

SEQ ID NO: 875223 - RNA, 19 nt, Homo sapiens
  misc_RNA (1)...(19): siRNA sense strand
ccugacuucuccuacauca

SEQ ID NO: 875224 - RNA, 19 nt, Homo sapiens
  misc_RNA (1)...(19): siRNA sense strand
agauuaaagugggcucaga

SEQ ID NO: 875225 - RNA, 19 nt, Homo sapiens
  misc_RNA (1)...(19): siRNA sense strand
agaaggccaaccacuacua

SEQ ID NO: 875226 - RNA, 19 nt, Homo sapiens
  misc_RNA (1)...(19): siRNA sense strand
cuggaggacuaccgcaaga

SEQ ID NO: 875227 - RNA, 19 nt, Homo sapiens
  misc_RNA (1)...(19): siRNA sense strand
cugccuggauugacaagug

SEQ ID NO: 875228 - RNA, 19 nt, Homo sapiens
  misc_RNA (1)...(19): siRNA sense strand
ccuggacugugugaucauu

SEQ ID NO: 875229 - RNA, 19 nt, Homo sapiens
  misc_RNA (1)...(19): siRNA sense strand
gcgagauggugggcuacga

SEQ ID NO: 875230 - RNA, 19 nt, Homo sapiens
  misc_RNA (1)...(19): siRNA sense strand
ccacguacgccacgaccau

SEQ ID NO: 875231 - RNA, 19 nt, Homo sapiens
  misc_RNA (1)...(19): siRNA sense strand
uggacugugugaucauuag

SEQ ID NO: 875232 - RNA, 19 nt, Homo sapiens
  misc_RNA (1)...(19): siRNA sense strand
gagaggacuuugaacaaga

SEQ ID NO: 875233 - RNA, 19 nt, Homo sapiens
  misc_RNA (1)...(19): siRNA sense strand
gcagcucuguacuuuguuu

SEQ ID NO: 875234 - RNA, 19 nt, Homo sapiens
  misc_RNA (1)...(19): siRNA sense strand
gagccugaaucgcuacuau

SEQ ID NO: 875235 - RNA, 19 nt, Homo sapiens
  misc_RNA (1)...(19): siRNA sense strand
gccugaaucgcuacuauua

SEQ ID NO: 875236 - RNA, 19 nt, Homo sapiens
  misc_RNA (1)...(19): siRNA sense strand
ggacuuugaacaagaaugu

SEQ ID NO: 875237 - RNA, 19 nt, Homo sapiens
  misc_RNA (1)...(19): siRNA sense strand
ucagggagaucuggaugaa

SEQ ID NO: 875238 - RNA, 19 nt, Homo sapiens
  misc_RNA (1)...(19): siRNA sense strand
agggagaucuggaugaaug

SEQ ID NO: 875239 - RNA, 19 nt, Homo sapiens
  misc_RNA (1)...(19): siRNA sense strand
cgagaggacuuugaacaag

SEQ ID NO: 875240 - RNA, 19 nt, Homo sapiens
  misc_RNA (1)...(19): siRNA sense strand
agaggacuuugaacaagaa

SEQ ID NO: 875241 - RNA, 19 nt, Homo sapiens
  misc_RNA (1)...(19): siRNA sense strand
aaggaucucuugccacaca

SEQ ID NO: 875242 - RNA, 19 nt, Homo sapiens
  misc_RNA (1)...(19): siRNA sense strand
gcccagagcacguggagau

SEQ ID NO: 875243 - RNA, 19 nt, Homo sapiens
  misc_RNA (1)...(19): siRNA sense strand
ccuagcggccuauuccuuu

SEQ ID NO: 875244 - RNA, 19 nt, Homo sapiens
  misc_RNA (1)...(19): siRNA sense strand
ccuauuccuuugucucaga

SEQ ID NO: 875245 - RNA, 19 nt, Homo sapiens
  misc_RNA (1)...(19): siRNA sense strand
uggcugcucuggugauaag

SEQ ID NO: 875246 - RNA, 19 nt, Homo sapiens
  misc_RNA (1)...(19): siRNA sense strand
gcucuguacuuuguuucug

SEQ ID NO: 875247 - RNA, 19 nt, Homo sapiens
  misc_RNA (1)...(19): siRNA sense strand
ccuggcugcucuggugaua

SEQ ID NO: 875248 - RNA, 19 nt, Homo sapiens
  misc_RNA (1)...(19): siRNA sense strand
cuagcggccuauuccuuug

SEQ ID NO: 875249 - RNA, 19 nt, Homo sapiens
  misc_RNA (1)...(19): siRNA sense strand
ucgagaggacuuugaacaa

SEQ ID NO: 875250 - RNA, 19 nt, Homo sapiens
  misc_RNA (1)...(19): siRNA sense strand
gcacguggagauggcuuug

SEQ ID NO: 875251 - RNA, 19 nt, Homo sapiens
  misc_RNA (1)...(19): siRNA sense strand
ggccuauuccuuugucuca

SEQ ID NO: 875252 - RNA, 19 nt, Homo sapiens
  misc_RNA (1)...(19): siRNA sense strand
gcaaagaccauaagauuua

SEQ ID NO: 875253 - RNA, 19 nt, Homo sapiens
  misc_RNA (1)...(19): siRNA sense strand
gcacgaaguugauggcaaa

SEQ ID NO: 875254 - RNA, 19 nt, Homo sapiens
  misc_RNA (1)...(19): siRNA sense strand
gaaggaugcuguacagaag

SEQ ID NO: 875255 - RNA, 19 nt, Homo sapiens
  misc_RNA (1)...(19): siRNA sense strand
caagaucacucgcaaccaa

SEQ ID NO: 875256 - RNA, 19 nt, Homo sapiens
  misc_RNA (1)...(19): siRNA sense strand
ggaauucuauguacacuac

SEQ ID NO: 875257 - RNA, 19 nt, Homo sapiens
  misc_RNA (1)...(19): siRNA sense strand
aaagagaucuaccgcaaga

SEQ ID NO: 875258 - RNA, 19 nt, Homo sapiens
  misc_RNA (1)...(19): siRNA sense strand
ccucaucgcuuucaguuau

SEQ ID NO: 875259 - RNA, 19 nt, Homo sapiens
  misc_RNA (1)...(19): siRNA sense strand
gaaacaauguggccugcau

SEQ ID NO: 875260 - RNA, 19 nt, Homo sapiens
  misc_RNA (1)...(19): siRNA sense strand
ugaaguauguggacaagau

SEQ ID NO: 875261 - RNA, 19 nt, Homo sapiens
  misc_RNA (1)...(19): siRNA sense strand
cgaaauugaugccugguau

SEQ ID NO: 875262 - RNA, 19 nt, Homo sapiens
  misc_RNA (1)...(19): siRNA sense strand
gaagacuuaugcagagaug

SEQ ID NO: 875263 - RNA, 19 nt, Homo sapiens
  misc_RNA (1)...(19): siRNA sense strand
auaagacacuguacuuuga

SEQ ID NO: 875264 - RNA, 19 nt, Homo sapiens
  misc_RNA (1)...(19): siRNA sense strand
gauagcaccuggcauucug

SEQ ID NO: 875265 - RNA, 19 nt, Homo sapiens
  misc_RNA (1)...(19): siRNA sense strand
cauaagauuuacugucaga

SEQ ID NO: 875266 - RNA, 19 nt, Homo sapiens
  misc_RNA (1)...(19): siRNA sense strand
cagaagaacucagagaagu

SEQ ID NO: 875267 - RNA, 19 nt, Homo sapiens
  misc_RNA (1)...(19): siRNA sense strand
gagaggaauucuauguaca

SEQ ID NO: 875268 - RNA, 19 nt, Homo sapiens
  misc_RNA (1)...(19): siRNA sense strand
ugaaauaugagaagagcua

SEQ ID NO: 875269 - RNA, 19 nt, Homo sapiens
  misc_RNA (1)...(19): siRNA sense strand
ccacauuguuggcuacuuc

SEQ ID NO: 875270 - RNA, 19 nt, Homo sapiens
  misc_RNA (1)...(19): siRNA sense strand
ggcaaagaccauaagauuu

SEQ ID NO: 875271 - RNA, 19 nt, Homo sapiens
  misc_RNA (1)...(19): siRNA sense strand
gcgcaagcaugaugagauc

SEQ ID NO: 875272 - RNA, 19 nt, Homo sapiens
  misc_RNA (1)...(19): siRNA sense strand
cauaagacacuguacuuug

SEQ ID NO: 875273 - RNA, 19 nt, Homo sapiens
  misc_RNA (1)...(19): siRNA sense strand
uggcaaagaccauaagauu

SEQ ID NO: 875274 - RNA, 19 nt, Homo sapiens
  misc_RNA (1)...(19): siRNA sense strand
cgagaggaauucuauguac

SEQ ID NO: 875275 - RNA, 19 nt, Homo sapiens
  misc_RNA (1)...(19): siRNA sense strand
gaaauugaugccugguauu

SEQ ID NO: 875276 - RNA, 19 nt, Homo sapiens
  misc_RNA (1)...(19): siRNA sense strand
cggagaagccgcugucuga

SEQ ID NO: 875277 - RNA, 19 nt, Homo sapiens
  misc_RNA (1)...(19): siRNA sense strand
caacaucuccgugcacgaa

SEQ ID NO: 875278 - RNA, 19 nt, Homo sapiens
  misc_RNA (1)...(19): siRNA sense strand
gaucaaccaugugcagaag

SEQ ID NO: 875279 - RNA, 19 nt, Homo sapiens
  misc_RNA (1)...(19): siRNA sense strand
aagucaagcucuccaagaa

SEQ ID NO: 875280 - RNA, 19 nt, Homo sapiens
  misc_RNA (1)...(19): siRNA sense strand
uaagaaaccacccaucaca

SEQ ID NO: 875281 - RNA, 19 nt, Homo sapiens
  misc_RNA (1)...(19): siRNA sense strand
ucaauauggucaaguacug

SEQ ID NO: 875282 - RNA, 19 nt, Homo sapiens
  misc_RNA (1)...(19): siRNA sense strand
ugaaggaugcuguacagaa

SEQ ID NO: 875283 - RNA, 19 nt, Homo sapiens
  misc_RNA (1)...(19): siRNA sense strand
gcauucugcugaagugauc

SEQ ID NO: 875284 - RNA, 19 nt, Homo sapiens
  misc_RNA (1)...(19): siRNA sense strand
guacagaagaacucagaga

SEQ ID NO: 875285 - RNA, 19 nt, Homo sapiens
  misc_RNA (1)...(19): siRNA sense strand
gagcuaccgcuuccacuug

SEQ ID NO: 875286 - RNA, 19 nt, Homo sapiens
  misc_RNA (1)...(19): siRNA sense strand
uauaagaaaccacccauca

SEQ ID NO: 875287 - RNA, 19 nt, Homo sapiens
  misc_RNA (1)...(19): siRNA sense strand
ucagccagaugaccaguau

SEQ ID NO: 875288 - RNA, 19 nt, Homo sapiens
  misc_RNA (1)...(19): siRNA sense strand
ucaaggaccucagccagau

SEQ ID NO: 875289 - RNA, 19 nt, Homo sapiens
  misc_RNA (1)...(19): siRNA sense strand
caucgggaacuacgaaauu

SEQ ID NO: 875290 - RNA, 19 nt, Homo sapiens
  misc_RNA (1)...(19): siRNA sense strand
accauaagauuuacuguca

SEQ ID NO: 875291 - RNA, 19 nt, Homo sapiens
  misc_RNA (1)...(19): siRNA sense strand
gauccagucucgagugaac

SEQ ID NO: 875292 - RNA, 19 nt, Homo sapiens
  misc_RNA (1)...(19): siRNA sense strand
gaagaacucagagaaguac

SEQ ID NO: 875293 - RNA, 19 nt, Homo sapiens
  misc_RNA (1)...(19): siRNA sense strand
gucaagcucuccaagaagu

SEQ ID NO: 875294 - RNA, 19 nt, Homo sapiens
  misc_RNA (1)...(19): siRNA sense strand
ccacagcagccuuggagaa

SEQ ID NO: 875295 - RNA, 19 nt, Homo sapiens
  misc_RNA (1)...(19): siRNA sense strand
guacaugaaauaugagaag

SEQ ID NO: 875296 - RNA, 19 nt, Homo sapiens
  misc_RNA (1)...(19): siRNA sense strand
aaagugcccaguauaagaa

SEQ ID NO: 875297 - RNA, 19 nt, Homo sapiens
  misc_RNA (1)...(19): siRNA sense strand
gcgcugaccaagacaguga

SEQ ID NO: 875298 - RNA, 19 nt, Homo sapiens
  misc_RNA (1)...(19): siRNA sense strand
caagucaagcucuccaaga

SEQ ID NO: 875299 - RNA, 19 nt, Homo sapiens
  misc_RNA (1)...(19): siRNA sense strand
caucaucaguacccugcaa

SEQ ID NO: 875300 - RNA, 19 nt, Homo sapiens
  misc_RNA (1)...(19): siRNA sense strand
caaagaccauaagauuuac

SEQ ID NO: 875301 - RNA, 19 nt, Homo sapiens
  misc_RNA (1)...(19): siRNA sense strand
agaagaacucagagaagua

SEQ ID NO: 875302 - RNA, 19 nt, Homo sapiens
  misc_RNA (1)...(19): siRNA sense strand
gugauccagucucgaguga

SEQ ID NO: 875303 - RNA, 19 nt, Homo sapiens
  misc_RNA (1)...(19): siRNA sense strand
cgaaguugauggcaaagac

SEQ ID NO: 875304 - RNA, 19 nt, Homo sapiens
  misc_RNA (1)...(19): siRNA sense strand
gcacacuguccaucaagga

SEQ ID NO: 875305 - RNA, 19 nt, Homo sapiens
  misc_RNA (1)...(19): siRNA sense strand
gggccgagaggaauucuau

SEQ ID NO: 875306 - RNA, 19 nt, Homo sapiens
  misc_RNA (1)...(19): siRNA sense strand
cagaagacuuaugcagaga

SEQ ID NO: 875307 - RNA, 19 nt, Homo sapiens
  misc_RNA (1)...(19): siRNA sense strand
ccggauagcaccuggcauu

SEQ ID NO: 875308 - RNA, 19 nt, Homo sapiens
  misc_RNA (1)...(19): siRNA sense strand
ucaaaagugcccaguauaa

SEQ ID NO: 875309 - RNA, 19 nt, Homo sapiens
  misc_RNA (1)...(19): siRNA sense strand
gccagcacgugaucugugu

SEQ ID NO: 875310 - RNA, 19 nt, Homo sapiens
  misc_RNA (1)...(19): siRNA sense strand
ccauaagacacuguacuuu

SEQ ID NO: 875311 - RNA, 19 nt, Homo sapiens
  misc_RNA (1)...(19): siRNA sense strand
ccacaucgggaacuacgaa

SEQ ID NO: 875312 - RNA, 19 nt, Homo sapiens
  misc_RNA (1)...(19): siRNA sense strand
guacacuacgugggcuuua

SEQ ID NO: 875313 - RNA, 19 nt, Homo sapiens
  misc_RNA (1)...(19): siRNA sense strand
ccgagaggaauucuaugua

SEQ ID NO: 875314 - RNA, 19 nt, Homo sapiens
  misc_RNA (1)...(19): siRNA sense strand
acccugcaaucccucaaua

SEQ ID NO: 875315 - RNA, 19 nt, Homo sapiens
  misc_RNA (1)...(19): siRNA sense strand
acgaguggguagacaagaa

SEQ ID NO: 875316 - RNA, 19 nt, Homo sapiens
  misc_RNA (1)...(19): siRNA sense strand
uacacuacgugggcuuuaa

SEQ ID NO: 875317 - RNA, 19 nt, Homo sapiens
  misc_RNA (1)...(19): siRNA sense strand
ccugggugcugcuggagaa

SEQ ID NO: 875318 - RNA, 19 nt, Homo sapiens
  misc_RNA (1)...(19): siRNA sense strand
ugaccaagacagugaagga

SEQ ID NO: 875319 - RNA, 19 nt, Homo sapiens
  misc_RNA (1)...(19): siRNA sense strand
cccucaauauggucaagua

SEQ ID NO: 875320 - RNA, 19 nt, Homo sapiens
  misc_RNA (1)...(19): siRNA sense strand
ggugaaguauguggacaag

SEQ ID NO: 875321 - RNA, 19 nt, Homo sapiens
  misc_RNA (1)...(19): siRNA sense strand
ccucaaaagugcccaguau

SEQ ID NO: 875322 - RNA, 19 nt, Homo sapiens
  misc_RNA (1)...(19): siRNA sense strand
gaaguauguggacaagauc

SEQ ID NO: 875323 - RNA, 19 nt, Homo sapiens
  misc_RNA (1)...(19): siRNA sense strand
gaagggccagcacgugauc

SEQ ID NO: 875324 - RNA, 19 nt, Homo sapiens
  misc_RNA (1)...(19): siRNA sense strand
ggaagggccagcacgugau

SEQ ID NO: 875325 - RNA, 19 nt, Homo sapiens
  misc_RNA (1)...(19): siRNA sense strand
ggacgaguggguagacaag

SEQ ID NO: 875326 - RNA, 19 nt, Homo sapiens
  misc_RNA (1)...(19): siRNA sense strand
ggaagucacgguggagauc

SEQ ID NO: 875327 - RNA, 19 nt, Homo sapiens
  misc_RNA (1)...(19): siRNA sense strand
uacagaagaacucagagaa

SEQ ID NO: 875328 - RNA, 19 nt, Homo sapiens
  misc_RNA (1)...(19): siRNA sense strand
gccgagaggaauucuaugu

SEQ ID NO: 875329 - RNA, 19 nt, Homo sapiens
  misc_RNA (1)...(19): siRNA sense strand
caccuggcauucugcugaa

SEQ ID NO: 875330 - RNA, 19 nt, Homo sapiens
  misc_RNA (1)...(19): siRNA sense strand
gccucaaguacaugaaaua

SEQ ID NO: 875331 - RNA, 19 nt, Homo sapiens
  misc_RNA (1)...(19): siRNA sense strand
ugcaaucccucaauauggu

SEQ ID NO: 875332 - RNA, 19 nt, Homo sapiens
  misc_RNA (1)...(19): siRNA sense strand
gaaguuccucaucgcuuuc

SEQ ID NO: 875333 - RNA, 19 nt, Homo sapiens
  misc_RNA (1)...(19): siRNA sense strand
aggaugcuguacagaagaa

SEQ ID NO: 875334 - RNA, 19 nt, Homo sapiens
  misc_RNA (1)...(19): siRNA sense strand
uggagaaccugcgggacuu

SEQ ID NO: 875335 - RNA, 19 nt, Homo sapiens
  misc_RNA (1)...(19): siRNA sense strand
cgaagacuaugggaaacag

SEQ ID NO: 875336 - RNA, 19 nt, Homo sapiens
  misc_RNA (1)...(19): siRNA sense strand
caaaagcgcaagcaugaug

SEQ ID NO: 875337 - RNA, 19 nt, Homo sapiens
  misc_RNA (1)...(19): siRNA sense strand
gaggaauucuauguacacu

SEQ ID NO: 875338 - RNA, 19 nt, Homo sapiens
  misc_RNA (1)...(19): siRNA sense strand
ggacuccgucugccucaag

SEQ ID NO: 875339 - RNA, 19 nt, Homo sapiens
  misc_RNA (1)...(19): siRNA sense strand
agaaaccacccaucacagu

SEQ ID NO: 875340 - RNA, 19 nt, Homo sapiens
  misc_RNA (1)...(19): siRNA sense strand
ggauagcaccuggcauucu

SEQ ID NO: 875341 - RNA, 19 nt, Homo sapiens
  misc_RNA (1)...(19): siRNA sense strand
ucaaccaugugcagaagac

SEQ ID NO: 875342 - RNA, 19 nt, Homo sapiens
  misc_RNA (1)...(19): siRNA sense strand
caagcucuccaagaaguga

SEQ ID NO: 875343 - RNA, 19 nt, Homo sapiens
  misc_RNA (1)...(19): siRNA sense strand
accaugugcagaagacuua

SEQ ID NO: 875344 - RNA, 19 nt, Homo sapiens
  misc_RNA (1)...(19): siRNA sense strand
agacuuaugcagagaugga

SEQ ID NO: 875345 - RNA, 19 nt, Homo sapiens
  misc_RNA (1)...(19): siRNA sense strand
ccugcaaucccucaauaug

SEQ ID NO: 875346 - RNA, 19 nt, Homo sapiens
  misc_RNA (1)...(19): siRNA sense strand
cguggagccguucgucuuu

SEQ ID NO: 875347 - RNA, 19 nt, Homo sapiens
  misc_RNA (1)...(19): siRNA sense strand
ccucaaguacaugaaauau

SEQ ID NO: 875348 - RNA, 19 nt, Homo sapiens
  misc_RNA (1)...(19): siRNA sense strand
ucaguuaugagcucuccaa

SEQ ID NO: 875349 - RNA, 19 nt, Homo sapiens
  misc_RNA (1)...(19): siRNA sense strand
ggacuucgaccgcuucauu

SEQ ID NO: 875350 - RNA, 19 nt, Homo sapiens
  misc_RNA (1)...(19): siRNA sense strand
gauacgugauggugacaga

SEQ ID NO: 875351 - RNA, 19 nt, Homo sapiens
  misc_RNA (1)...(19): siRNA sense strand
ugacagaagagaagaaggu

SEQ ID NO: 875352 - RNA, 19 nt, Homo sapiens
  misc_RNA (1)...(19): siRNA sense strand
caaagugcguggggccuua

SEQ ID NO: 875353 - RNA, 19 nt, Homo sapiens
  misc_RNA (1)...(19): siRNA sense strand
gauggugacagaagagaag

SEQ ID NO: 875354 - RNA, 19 nt, Homo sapiens
  misc_RNA (1)...(19): siRNA sense strand
uggagccacugccaacuuc

SEQ ID NO: 875355 - RNA, 19 nt, Homo sapiens
  misc_RNA (1)...(19): siRNA sense strand
ggacucgaagugucguuuc

SEQ ID NO: 875356 - RNA, 19 nt, Homo sapiens
  misc_RNA (1)...(19): siRNA sense strand
gaaagaaccugcuagaaca

SEQ ID NO: 875357 - RNA, 19 nt, Homo sapiens
  misc_RNA (1)...(19): siRNA sense strand
ggucauagcagauuucuaa

SEQ ID NO: 875358 - RNA, 19 nt, Homo sapiens
  misc_RNA (1)...(19): siRNA sense strand
aaagagagcugacagaauc

SEQ ID NO: 875359 - RNA, 19 nt, Homo sapiens
  misc_RNA (1)...(19): siRNA sense strand
caaacucagugucuuuaaa

SEQ ID NO: 875360 - RNA, 19 nt, Homo sapiens
  misc_RNA (1)...(19): siRNA sense strand
ggaaagugcucagagacaa

SEQ ID NO: 875361 - RNA, 19 nt, Homo sapiens
  misc_RNA (1)...(19): siRNA sense strand
ucacagcacucgcucaaga

SEQ ID NO: 875362 - RNA, 19 nt, Homo sapiens
  misc_RNA (1)...(19): siRNA sense strand
gaaaccaaacucuagauga

SEQ ID NO: 875363 - RNA, 19 nt, Homo sapiens
  misc_RNA (1)...(19): siRNA sense strand
gucaguagguuucuaaaga

SEQ ID NO: 875364 - RNA, 19 nt, Homo sapiens
  misc_RNA (1)...(19): siRNA sense strand
gaaucaagcccgugaacuu

SEQ ID NO: 875365 - RNA, 19 nt, Homo sapiens
  misc_RNA (1)...(19): siRNA sense strand
acagaacacuggacgcuuu

SEQ ID NO: 875366 - RNA, 19 nt, Homo sapiens
  misc_RNA (1)...(19): siRNA sense strand
caguagaaaucuuaccaaa

SEQ ID NO: 875367 - RNA, 19 nt, Homo sapiens
  misc_RNA (1)...(19): siRNA sense strand
ugacgaagaagaaaugaaa

SEQ ID NO: 875368 - RNA, 19 nt, Homo sapiens
  misc_RNA (1)...(19): siRNA sense strand
gaacucgcgucccagaaca

SEQ ID NO: 875369 - RNA, 19 nt, Homo sapiens
  misc_RNA (1)...(19): siRNA sense strand
agacagaccuuccacaaac

SEQ ID NO: 875370 - RNA, 19 nt, Homo sapiens
  misc_RNA (1)...(19): siRNA sense strand
ggagugaggcugagacugu

SEQ ID NO: 875371 - RNA, 19 nt, Homo sapiens
  misc_RNA (1)...(19): siRNA sense strand
gaagccaaagaguacauua

SEQ ID NO: 875372 - RNA, 19 nt, Homo sapiens
  misc_RNA (1)...(19): siRNA sense strand
ggaccaagguggccagcau

SEQ ID NO: 875373 - RNA, 19 nt, Homo sapiens
  misc_RNA (1)...(19): siRNA sense strand
gaaggucaguagguuucua

SEQ ID NO: 875374 - RNA, 19 nt, Homo sapiens
  misc_RNA (1)...(19): siRNA sense strand
cgacacccaucgccaauca

SEQ ID NO: 875375 - RNA, 19 nt, Homo sapiens
  misc_RNA (1)...(19): siRNA sense strand
gcaaagccuucucagacau

SEQ ID NO: 875376 - RNA, 19 nt, Homo sapiens
  misc_RNA (1)...(19): siRNA sense strand
caacugagagcauuuacug

SEQ ID NO: 875377 - RNA, 19 nt, Homo sapiens
  misc_RNA (1)...(19): siRNA sense strand
aaaccaaacucuagaugag

SEQ ID NO: 875378 - RNA, 19 nt, Homo sapiens
  misc_RNA (1)...(19): siRNA sense strand
ggaggaagccaaagaguac

SEQ ID NO: 875379 - RNA, 19 nt, Homo sapiens
  misc_RNA (1)...(19): siRNA sense strand
gaaagugcucagagacaaa

SEQ ID NO: 875380 - RNA, 19 nt, Homo sapiens
  misc_RNA (1)...(19): siRNA sense strand
gaaaacauauccccugaag

SEQ ID NO: 875381 - RNA, 19 nt, Homo sapiens
  misc_RNA (1)...(19): siRNA sense strand
cacggaaucugacucaaug

SEQ ID NO: 875382 - RNA, 19 nt, Homo sapiens
  misc_RNA (1)...(19): siRNA sense strand
ggacgagccagucucagaa

SEQ ID NO: 875383 - RNA, 19 nt, Homo sapiens
  misc_RNA (1)...(19): siRNA sense strand
cgaagaagaaaugaaagua

SEQ ID NO: 875384 - RNA, 19 nt, Homo sapiens
  misc_RNA (1)...(19): siRNA sense strand
ucagugagaacuccgauuu

SEQ ID NO: 875385 - RNA, 19 nt, Homo sapiens
  misc_RNA (1)...(19): siRNA sense strand
uggaggaggugaacaagga

SEQ ID NO: 875386 - RNA, 19 nt, Homo sapiens
  misc_RNA (1)...(19): siRNA sense strand
ucagugauguuuccuugga

SEQ ID NO: 875387 - RNA, 19 nt, Homo sapiens
  misc_RNA (1)...(19): siRNA sense strand
gaacuccgauuuggaacag

SEQ ID NO: 875388 - RNA, 19 nt, Homo sapiens
  misc_RNA (1)...(19): siRNA sense strand
gcaggcacgugacaagagu

SEQ ID NO: 875389 - RNA, 19 nt, Homo sapiens
  misc_RNA (1)...(19): siRNA sense strand
ggaagcugcagaggaauuu

SEQ ID NO: 875390 - RNA, 19 nt, Homo sapiens
  misc_RNA (1)...(19): siRNA sense strand
gcaugcagccaccaucuga

SEQ ID NO: 875391 - RNA, 19 nt, Homo sapiens
  misc_RNA (1)...(19): siRNA sense strand
agaggaaagugcucagaga

SEQ ID NO: 875392 - RNA, 19 nt, Homo sapiens
  misc_RNA (1)...(19): siRNA sense strand
gaaacacuuacuccugaaa

SEQ ID NO: 875393 - RNA, 19 nt, Homo sapiens
  misc_RNA (1)...(19): siRNA sense strand
ugagaacuccgauuuggaa

SEQ ID NO: 875394 - RNA, 19 nt, Homo sapiens
  misc_RNA (1)...(19): siRNA sense strand
caaagagagcugacagaau

SEQ ID NO: 875395 - RNA, 19 nt, Homo sapiens
  misc_RNA (1)...(19): siRNA sense strand
cagcuuauucggaggauuu

SEQ ID NO: 875396 - RNA, 19 nt, Homo sapiens
  misc_RNA (1)...(19): siRNA sense strand
cuuggaagauucaacaaug

SEQ ID NO: 875397 - RNA, 19 nt, Homo sapiens
  misc_RNA (1)...(19): siRNA sense strand
gaacuuccugucaccgaaa

SEQ ID NO: 875398 - RNA, 19 nt, Homo sapiens
  misc_RNA (1)...(19): siRNA sense strand
agacaaaacuucccagaau

SEQ ID NO: 875399 - RNA, 19 nt, Homo sapiens
  misc_RNA (1)...(19): siRNA sense strand
ccaaagagagcugacagaa

SEQ ID NO: 875400 - RNA, 19 nt, Homo sapiens
  misc_RNA (1)...(19): siRNA sense strand
uggaagaaaucagaaacuu

SEQ ID NO: 875401 - RNA, 19 nt, Homo sapiens
  misc_RNA (1)...(19): siRNA sense strand
aaacagaaagaaccugcua

SEQ ID NO: 875402 - RNA, 19 nt, Homo sapiens
  misc_RNA (1)...(19): siRNA sense strand
gaaccugcuagaacauuug

SEQ ID NO: 875403 - RNA, 19 nt, Homo sapiens
  misc_RNA (1)...(19): siRNA sense strand
gcagacagaacccuucaca

SEQ ID NO: 875404 - RNA, 19 nt, Homo sapiens
  misc_RNA (1)...(19): siRNA sense strand
ggaagaagaaagaaaacua

SEQ ID NO: 875405 - RNA, 19 nt, Homo sapiens
  misc_RNA (1)...(19): siRNA sense strand
gaaacuuccagaucaguag

SEQ ID NO: 875406 - RNA, 19 nt, Homo sapiens
  misc_RNA (1)...(19): siRNA sense strand
gacagaccuuccacaaaca

SEQ ID NO: 875407 - RNA, 19 nt, Homo sapiens
  misc_RNA (1)...(19): siRNA sense strand
agaaccugcuagaacauuu

SEQ ID NO: 875408 - RNA, 19 nt, Homo sapiens
  misc_RNA (1)...(19): siRNA sense strand
agaaagaaccugcuagaac

SEQ ID NO: 875409 - RNA, 19 nt, Homo sapiens
  misc_RNA (1)...(19): siRNA sense strand
ggaagauucaacaauggaa

SEQ ID NO: 875410 - RNA, 19 nt, Homo sapiens
  misc_RNA (1)...(19): siRNA sense strand
agacagugacgaagaagaa

SEQ ID NO: 875411 - RNA, 19 nt, Homo sapiens
  misc_RNA (1)...(19): siRNA sense strand
gaagaggaaagugcucaga

SEQ ID NO: 875412 - RNA, 19 nt, Homo sapiens
  misc_RNA (1)...(19): siRNA sense strand
aaagaaaccaaacucuaga

SEQ ID NO: 875413 - RNA, 19 nt, Homo sapiens
  misc_RNA (1)...(19): siRNA sense strand
acugagagcauuuacugua

SEQ ID NO: 875414 - RNA, 19 nt, Homo sapiens
  misc_RNA (1)...(19): siRNA sense strand
gccaaugccgcacucauga

SEQ ID NO: 875415 - RNA, 19 nt, Homo sapiens
  misc_RNA (1)...(19): siRNA sense strand
cgcaaagccuucucagaca

SEQ ID NO: 875416 - RNA, 19 nt, Homo sapiens
  misc_RNA (1)...(19): siRNA sense strand
gaacaggaagaggaaagug

SEQ ID NO: 875417 - RNA, 19 nt, Homo sapiens
  misc_RNA (1)...(19): siRNA sense strand
gcgaggaagaagaaagaaa

SEQ ID NO: 875418 - RNA, 19 nt, Homo sapiens
  misc_RNA (1)...(19): siRNA sense strand
cuggaaacccggaucauga

SEQ ID NO: 875419 - RNA, 19 nt, Homo sapiens
  misc_RNA (1)...(19): siRNA sense strand
gccaaagaguacauuaggu

SEQ ID NO: 875420 - RNA, 19 nt, Homo sapiens
  misc_RNA (1)...(19): siRNA sense strand
caauggaagaaaucagaaa

SEQ ID NO: 875421 - RNA, 19 nt, Homo sapiens
  misc_RNA (1)...(19): siRNA sense strand
cagcgaggaagaagaaaga

SEQ ID NO: 875422 - RNA, 19 nt, Homo sapiens
  misc_RNA (1)...(19): siRNA sense strand
gcgaaggucaguagguuuc

SEQ ID NO: 875423 - RNA, 19 nt, Homo sapiens
  misc_RNA (1)...(19): siRNA sense strand
gaaacccggaucaugaauc

SEQ ID NO: 875424 - RNA, 19 nt, Homo sapiens
  misc_RNA (1)...(19): siRNA sense strand
uggaggaagccaaagagua

SEQ ID NO: 875425 - RNA, 19 nt, Homo sapiens
  misc_RNA (1)...(19): siRNA sense strand
agaaacacuuacuccugaa

SEQ ID NO: 875426 - RNA, 19 nt, Homo sapiens
  misc_RNA (1)...(19): siRNA sense strand
aaacagccgagucuaggaa

SEQ ID NO: 875427 - RNA, 19 nt, Homo sapiens
  misc_RNA (1)...(19): siRNA sense strand
caaccgcccauuccaagga

SEQ ID NO: 875428 - RNA, 19 nt, Homo sapiens
  misc_RNA (1)...(19): siRNA sense strand
cgucagcgaggaagaagaa

SEQ ID NO: 875429 - RNA, 19 nt, Homo sapiens
  misc_RNA (1)...(19): siRNA sense strand
augaaaguauugcuaggaa

SEQ ID NO: 875430 - RNA, 19 nt, Homo sapiens
  misc_RNA (1)...(19): siRNA sense strand
acagaaagaaccugcuaga

SEQ ID NO: 875431 - RNA, 19 nt, Homo sapiens
  misc_RNA (1)...(19): siRNA sense strand
caucgccaaucauguuauc

SEQ ID NO: 875432 - RNA, 19 nt, Homo sapiens
  misc_RNA (1)...(19): siRNA sense strand
gaauccucuucaaguguga

SEQ ID NO: 875433 - RNA, 19 nt, Homo sapiens
  misc_RNA (1)...(19): siRNA sense strand
aaucagaaacuuccagauc

SEQ ID NO: 875434 - RNA, 19 nt, Homo sapiens
  misc_RNA (1)...(19): siRNA sense strand
uaacgucagcgaggaagaa

SEQ ID NO: 875435 - RNA, 19 nt, Homo sapiens
  misc_RNA (1)...(19): siRNA sense strand
accaaacucuagaugagaa

SEQ ID NO: 875436 - RNA, 19 nt, Homo sapiens
  misc_RNA (1)...(19): siRNA sense strand
cagaaagaaccugcuagaa

SEQ ID NO: 875437 - RNA, 19 nt, Homo sapiens
  misc_RNA (1)...(19): siRNA sense strand
aucagaaacuuccagauca

SEQ ID NO: 875438 - RNA, 19 nt, Homo sapiens
  misc_RNA (1)...(19): siRNA sense strand
guacauuaggugccacaga

SEQ ID NO: 875439 - RNA, 19 nt, Homo sapiens
  misc_RNA (1)...(19): siRNA sense strand
ucaaacucagugucuuuaa

SEQ ID NO: 875440 - RNA, 19 nt, Homo sapiens
  misc_RNA (1)...(19): siRNA sense strand
gaagaaaugaaaguauugc

SEQ ID NO: 875441 - RNA, 19 nt, Homo sapiens
  misc_RNA (1)...(19): siRNA sense strand
gaacacuggacgcuuuguc

SEQ ID NO: 875442 - RNA, 19 nt, Homo sapiens
  misc_RNA (1)...(19): siRNA sense strand
ucagaaacuuccagaucag

SEQ ID NO: 875443 - RNA, 19 nt, Homo sapiens
  misc_RNA (1)...(19): siRNA sense strand
aaacucagugucuuuaaag

SEQ ID NO: 875444 - RNA, 19 nt, Homo sapiens
  misc_RNA (1)...(19): siRNA sense strand
ggaaacccggaucaugaau

SEQ ID NO: 875445 - RNA, 19 nt, Homo sapiens
  misc_RNA (1)...(19): siRNA sense strand
ggaagccaaagaguacauu

SEQ ID NO: 875446 - RNA, 19 nt, Homo sapiens
  misc_RNA (1)...(19): siRNA sense strand
gggcaugucaagcuugugu

SEQ ID NO: 875447 - RNA, 19 nt, Homo sapiens
  misc_RNA (1)...(19): siRNA sense strand
uccagacagugacgaagaa

SEQ ID NO: 875448 - RNA, 19 nt, Homo sapiens
  misc_RNA (1)...(19): siRNA sense strand
agaaacuuccagaucagua

SEQ ID NO: 875449 - RNA, 19 nt, Homo sapiens
  misc_RNA (1)...(19): siRNA sense strand
aaacccggaucaugaaucg

SEQ ID NO: 875450 - RNA, 19 nt, Homo sapiens
  misc_RNA (1)...(19): siRNA sense strand
gcuggaaacccggaucaug

SEQ ID NO: 875451 - RNA, 19 nt, Homo sapiens
  misc_RNA (1)...(19): siRNA sense strand
ccacaaacagccgagucua

SEQ ID NO: 875452 - RNA, 19 nt, Homo sapiens
  misc_RNA (1)...(19): siRNA sense strand
ggaacucuccagcgcaaag

SEQ ID NO: 875453 - RNA, 19 nt, Homo sapiens
  misc_RNA (1)...(19): siRNA sense strand
acgcgaaggucaguagguu

SEQ ID NO: 875454 - RNA, 19 nt, Homo sapiens
  misc_RNA (1)...(19): siRNA sense strand
ugacacggaaucugacuca

SEQ ID NO: 875455 - RNA, 19 nt, Homo sapiens
  misc_RNA (1)...(19): siRNA sense strand
uuuggugacuucagugaug

SEQ ID NO: 875456 - RNA, 19 nt, Homo sapiens
  misc_RNA (1)...(19): siRNA sense strand
gcaccgacaccgcccaaau

SEQ ID NO: 875457 - RNA, 19 nt, Homo sapiens
  misc_RNA (1)...(19): siRNA sense strand
ggaauacuuggaaccuuga

SEQ ID NO: 875458 - RNA, 19 nt, Homo sapiens
  misc_RNA (1)...(19): siRNA sense strand
gaaccuugacaccgcugua

SEQ ID NO: 875459 - RNA, 19 nt, Homo sapiens
  misc_RNA (1)...(19): siRNA sense strand
gcccugcacccuacguaaa

SEQ ID NO: 875460 - RNA, 19 nt, Homo sapiens
  misc_RNA (1)...(19): siRNA sense strand
ccuccgcauuccgacauua

SEQ ID NO: 875461 - RNA, 19 nt, Homo sapiens
  misc_RNA (1)...(19): siRNA sense strand
gaagagagaucagguguaa

SEQ ID NO: 875462 - RNA, 19 nt, Homo sapiens
  misc_RNA (1)...(19): siRNA sense strand
cuaaugagcugguugauaa

SEQ ID NO: 875463 - RNA, 19 nt, Homo sapiens
  misc_RNA (1)...(19): siRNA sense strand
ggucagaggucaucacuuu

SEQ ID NO: 875464 - RNA, 19 nt, Homo sapiens
  misc_RNA (1)...(19): siRNA sense strand
gaaaagaacucugggaauu

SEQ ID NO: 875465 - RNA, 19 nt, Homo sapiens
  misc_RNA (1)...(19): siRNA sense strand
gguauaaacugguccauca

SEQ ID NO: 875466 - RNA, 19 nt, Homo sapiens
  misc_RNA (1)...(19): siRNA sense strand
gaugugaaguagaugauaa

SEQ ID NO: 875467 - RNA, 19 nt, Homo sapiens
  misc_RNA (1)...(19): siRNA sense strand
gaaagaauguuagaguuca

SEQ ID NO: 875468 - RNA, 19 nt, Homo sapiens
  misc_RNA (1)...(19): siRNA sense strand
cauccaagcuaccuuauau

SEQ ID NO: 875469 - RNA, 19 nt, Homo sapiens
  misc_RNA (1)...(19): siRNA sense strand
ugacagacaucgugaagug

SEQ ID NO: 875470 - RNA, 19 nt, Homo sapiens
  misc_RNA (1)...(19): siRNA sense strand
acacgaauguccagaaaga

SEQ ID NO: 875471 - RNA, 19 nt, Homo sapiens
  misc_RNA (1)...(19): siRNA sense strand
ggaagaugaugacaaugau

SEQ ID NO: 875472 - RNA, 19 nt, Homo sapiens
  misc_RNA (1)...(19): siRNA sense strand
ggaggaagagcaugaagaa

SEQ ID NO: 875473 - RNA, 19 nt, Homo sapiens
  misc_RNA (1)...(19): siRNA sense strand
caaacguggucauuuauca

SEQ ID NO: 875474 - RNA, 19 nt, Homo sapiens
  misc_RNA (1)...(19): siRNA sense strand
cuucuucucuucaaucuaa

SEQ ID NO: 875475 - RNA, 19 nt, Homo sapiens
  misc_RNA (1)...(19): siRNA sense strand
gggaagaugaugacaauga

SEQ ID NO: 875476 - RNA, 19 nt, Homo sapiens
  misc_RNA (1)...(19): siRNA sense strand
ggaaagaauguuagaguuc

SEQ ID NO: 875477 - RNA, 19 nt, Homo sapiens
  misc_RNA (1)...(19): siRNA sense strand
gaagaugaugacaaugaua

SEQ ID NO: 875478 - RNA, 19 nt, Homo sapiens
  misc_RNA (1)...(19): siRNA sense strand
gccuaaaucugaagagaga

SEQ ID NO: 875479 - RNA, 19 nt, Homo sapiens
  misc_RNA (1)...(19): siRNA sense strand
gaagagagcaccauuucag

SEQ ID NO: 875480 - RNA, 19 nt, Homo sapiens
  misc_RNA (1)...(19): siRNA sense strand
gcuacuaugaugacaaaua

SEQ ID NO: 875481 - RNA, 19 nt, Homo sapiens
  misc_RNA (1)...(19): siRNA sense strand
gaaaugcaagagugauauu

SEQ ID NO: 875482 - RNA, 19 nt, Homo sapiens
  misc_RNA (1)...(19): siRNA sense strand
ugaaggagaagaugguaua

SEQ ID NO: 875483 - RNA, 19 nt, Homo sapiens
  misc_RNA (1)...(19): siRNA sense strand
gguggaauuucaacucuau

SEQ ID NO: 875484 - RNA, 19 nt, Homo sapiens
  misc_RNA (1)...(19): siRNA sense strand
gaaauucaggagagagaaa

SEQ ID NO: 875485 - RNA, 19 nt, Homo sapiens
  misc_RNA (1)...(19): siRNA sense strand
gagaggucaugauuauaga

SEQ ID NO: 875486 - RNA, 19 nt, Homo sapiens
  misc_RNA (1)...(19): siRNA sense strand
guaguaaaccaaaucagaa

SEQ ID NO: 875487 - RNA, 19 nt, Homo sapiens
  misc_RNA (1)...(19): siRNA sense strand
ggacccagcgguacuauuc

SEQ ID NO: 875488 - RNA, 19 nt, Homo sapiens
  misc_RNA (1)...(19): siRNA sense strand
gagaagaugguauaaacug

SEQ ID NO: 875489 - RNA, 19 nt, Homo sapiens
  misc_RNA (1)...(19): siRNA sense strand
caucagccuuagcauauug

SEQ ID NO: 875490 - RNA, 19 nt, Homo sapiens
  misc_RNA (1)...(19): siRNA sense strand
gaccaucagccuuagcaua

SEQ ID NO: 875491 - RNA, 19 nt, Homo sapiens
  misc_RNA (1)...(19): siRNA sense strand
gaacugaguguugauagug

SEQ ID NO: 875492 - RNA, 19 nt, Homo sapiens
  misc_RNA (1)...(19): siRNA sense strand
ucaacucuauagccaaauu

SEQ ID NO: 875493 - RNA, 19 nt, Homo sapiens
  misc_RNA (1)...(19): siRNA sense strand
ugagaagccuaaaucugaa

SEQ ID NO: 875494 - RNA, 19 nt, Homo sapiens
  misc_RNA (1)...(19): siRNA sense strand
gcaagagugauauugagaa

SEQ ID NO: 875495 - RNA, 19 nt, Homo sapiens
  misc_RNA (1)...(19): siRNA sense strand
cuaaucguccuuucagaua

SEQ ID NO: 875496 - RNA, 19 nt, Homo sapiens
  misc_RNA (1)...(19): siRNA sense strand
caacagguggccucaagaa

SEQ ID NO: 875497 - RNA, 19 nt, Homo sapiens
  misc_RNA (1)...(19): siRNA sense strand
gagaggugcugggaagaug

SEQ ID NO: 875498 - RNA, 19 nt, Homo sapiens
  misc_RNA (1)...(19): siRNA sense strand
cuagugaacugaguguuga

SEQ ID NO: 875499 - RNA, 19 nt, Homo sapiens
  misc_RNA (1)...(19): siRNA sense strand
caagagugauauugagaag

SEQ ID NO: 875500 - RNA, 19 nt, Homo sapiens
  misc_RNA (1)...(19): siRNA sense strand
auagugagguggaauuuca

SEQ ID NO: 875501 - RNA, 19 nt, Homo sapiens
  misc_RNA (1)...(19): siRNA sense strand
gcacaggaaggcugacaga

SEQ ID NO: 875502 - RNA, 19 nt, Homo sapiens
  misc_RNA (1)...(19): siRNA sense strand
uaaacagugugaccgaugu

SEQ ID NO: 875503 - RNA, 19 nt, Homo sapiens
  misc_RNA (1)...(19): siRNA sense strand
guaaaccaaaucagaagaa

SEQ ID NO: 875504 - RNA, 19 nt, Homo sapiens
  misc_RNA (1)...(19): siRNA sense strand
caggaaggcugacagacau

SEQ ID NO: 875505 - RNA, 19 nt, Homo sapiens
  misc_RNA (1)...(19): siRNA sense strand
uauagaagcauacgaagau

SEQ ID NO: 875506 - RNA, 19 nt, Homo sapiens
  misc_RNA (1)...(19): siRNA sense strand
gaaggagaagaugguauaa

SEQ ID NO: 875507 - RNA, 19 nt, Homo sapiens
  misc_RNA (1)...(19): siRNA sense strand
gaggaagagagcaccauuu

SEQ ID NO: 875508 - RNA, 19 nt, Homo sapiens
  misc_RNA (1)...(19): siRNA sense strand
uugagaagccuaaaucuga

SEQ ID NO: 875509 - RNA, 19 nt, Homo sapiens
  misc_RNA (1)...(19): siRNA sense strand
ccauucaucugcuacuaug

SEQ ID NO: 875510 - RNA, 19 nt, Homo sapiens
  misc_RNA (1)...(19): siRNA sense strand
cgagaggucaugauuauag

SEQ ID NO: 875511 - RNA, 19 nt, Homo sapiens
  misc_RNA (1)...(19): siRNA sense strand
uccgagaggucaugauuau

SEQ ID NO: 875512 - RNA, 19 nt, Homo sapiens
  misc_RNA (1)...(19): siRNA sense strand
gaagcuaaucguccuuuca

SEQ ID NO: 875513 - RNA, 19 nt, Homo sapiens
  misc_RNA (1)...(19): siRNA sense strand
acagaugcuugcacagaaa

SEQ ID NO: 875514 - RNA, 19 nt, Homo sapiens
  misc_RNA (1)...(19): siRNA sense strand
gagguggaauuucaacucu

SEQ ID NO: 875515 - RNA, 19 nt, Homo sapiens
  misc_RNA (1)...(19): siRNA sense strand
guacuauucagccaacaaa

SEQ ID NO: 875516 - RNA, 19 nt, Homo sapiens
  misc_RNA (1)...(19): siRNA sense strand
ugagcugguugauaagaaa

SEQ ID NO: 875517 - RNA, 19 nt, Homo sapiens
  misc_RNA (1)...(19): siRNA sense strand
caaaucagaagaagcuaau

SEQ ID NO: 875518 - RNA, 19 nt, Homo sapiens
  misc_RNA (1)...(19): siRNA sense strand
aggaaagaauguuagaguu

SEQ ID NO: 875519 - RNA, 19 nt, Homo sapiens
  misc_RNA (1)...(19): siRNA sense strand
gaaaaugcccauggucuuu

SEQ ID NO: 875520 - RNA, 19 nt, Homo sapiens
  misc_RNA (1)...(19): siRNA sense strand
ccaagcuaccuuauauaaa

SEQ ID NO: 875521 - RNA, 19 nt, Homo sapiens
  misc_RNA (1)...(19): siRNA sense strand
uacagaugcuugcacagaa

SEQ ID NO: 875522 - RNA, 19 nt, Homo sapiens
  misc_RNA (1)...(19): siRNA sense strand
uaaccgaacaccuggaaga

SEQ ID NO: 875523 - RNA, 19 nt, Homo sapiens
  misc_RNA (1)...(19): siRNA sense strand
ugaaaacucuguuacugaa

SEQ ID NO: 875524 - RNA, 19 nt, Homo sapiens
  misc_RNA (1)...(19): siRNA sense strand
gauuauagaggucaguuca

SEQ ID NO: 875525 - RNA, 19 nt, Homo sapiens
  misc_RNA (1)...(19): siRNA sense strand
ggaagagcaugaagaaaag

SEQ ID NO: 875526 - RNA, 19 nt, Homo sapiens
  misc_RNA (1)...(19): siRNA sense strand
cugcuacuaugaugacaaa

SEQ ID NO: 875527 - RNA, 19 nt, Homo sapiens
  misc_RNA (1)...(19): siRNA sense strand
gauguuggaccacucaugu

SEQ ID NO: 875528 - RNA, 19 nt, Homo sapiens
  misc_RNA (1)...(19): siRNA sense strand
gacaaacguggucauuuau

SEQ ID NO: 875529 - RNA, 19 nt, Homo sapiens
  misc_RNA (1)...(19): siRNA sense strand
gagcaccauuucagaaggu

SEQ ID NO: 875530 - RNA, 19 nt, Homo sapiens
  misc_RNA (1)...(19): siRNA sense strand
ggaagagagcaccauuuca

SEQ ID NO: 875531 - RNA, 19 nt, Homo sapiens
  misc_RNA (1)...(19): siRNA sense strand
ccaaaucagaagaagcuaa

SEQ ID NO: 875532 - RNA, 19 nt, Homo sapiens
  misc_RNA (1)...(19): siRNA sense strand
uuucaacucuauagccaaa

SEQ ID NO: 875533 - RNA, 19 nt, Homo sapiens
  misc_RNA (1)...(19): siRNA sense strand
gacuauagaagcauacgaa

SEQ ID NO: 875534 - RNA, 19 nt, Homo sapiens
  misc_RNA (1)...(19): siRNA sense strand
gaauagaaacugggagaag

SEQ ID NO: 875535 - RNA, 19 nt, Homo sapiens
  misc_RNA (1)...(19): siRNA sense strand
uccaagcuaccuuauauaa

SEQ ID NO: 875536 - RNA, 19 nt, Homo sapiens
  misc_RNA (1)...(19): siRNA sense strand
aggagaagaugguauaaac

SEQ ID NO: 875537 - RNA, 19 nt, Homo sapiens
  misc_RNA (1)...(19): siRNA sense strand
cccauggucuuucuucuuc

SEQ ID NO: 875538 - RNA, 19 nt, Homo sapiens
  misc_RNA (1)...(19): siRNA sense strand
guaaaggaaagaauguuag

SEQ ID NO: 875539 - RNA, 19 nt, Homo sapiens
  misc_RNA (1)...(19): siRNA sense strand
gauguaaaggaaagaaugu

SEQ ID NO: 875540 - RNA, 19 nt, Homo sapiens
  misc_RNA (1)...(19): siRNA sense strand
uccaguaucuccauucauc

SEQ ID NO: 875541 - RNA, 19 nt, Homo sapiens
  misc_RNA (1)...(19): siRNA sense strand
ggacaucuccuguauuccu

SEQ ID NO: 875542 - RNA, 19 nt, Homo sapiens
  misc_RNA (1)...(19): siRNA sense strand
agacauugaggcccagaua

SEQ ID NO: 875543 - RNA, 19 nt, Homo sapiens
  misc_RNA (1)...(19): siRNA sense strand
agagagaucagguguaauc

SEQ ID NO: 875544 - RNA, 19 nt, Homo sapiens
  misc_RNA (1)...(19): siRNA sense strand
ugagucaucuagugaacug

SEQ ID NO: 875545 - RNA, 19 nt, Homo sapiens
  misc_RNA (1)...(19): siRNA sense strand
aagaaaugcaagagugaua

SEQ ID NO: 875546 - RNA, 19 nt, Homo sapiens
  misc_RNA (1)...(19): siRNA sense strand
cugggaagaugaugacaau

SEQ ID NO: 875547 - RNA, 19 nt, Homo sapiens
  misc_RNA (1)...(19): siRNA sense strand
uuggaccacucaugucuuu

SEQ ID NO: 875548 - RNA, 19 nt, Homo sapiens
  misc_RNA (1)...(19): siRNA sense strand
aggcccagauagcuaauaa

SEQ ID NO: 875549 - RNA, 19 nt, Homo sapiens
  misc_RNA (1)...(19): siRNA sense strand
agaaggugauaauguggaa

SEQ ID NO: 875550 - RNA, 19 nt, Homo sapiens
  misc_RNA (1)...(19): siRNA sense strand
cagaaagagaaguguauga

SEQ ID NO: 875551 - RNA, 19 nt, Homo sapiens
  misc_RNA (1)...(19): siRNA sense strand
gcuaaucguccuuucagau

SEQ ID NO: 875552 - RNA, 19 nt, Homo sapiens
  misc_RNA (1)...(19): siRNA sense strand
gugaaguggaugaggauuu

SEQ ID NO: 875553 - RNA, 19 nt, Homo sapiens
  misc_RNA (1)...(19): siRNA sense strand
ggaugugaaguagaugaua

SEQ ID NO: 875554 - RNA, 19 nt, Homo sapiens
  misc_RNA (1)...(19): siRNA sense strand
ggucuuucuucuucucuuc

SEQ ID NO: 875555 - RNA, 19 nt, Homo sapiens
  misc_RNA (1)...(19): siRNA sense strand
gagagcaccauuucagaag

SEQ ID NO: 875556 - RNA, 19 nt, Homo sapiens
  misc_RNA (1)...(19): siRNA sense strand
gaagaacaagaauagaaac

SEQ ID NO: 875557 - RNA, 19 nt, Homo sapiens
  misc_RNA (1)...(19): siRNA sense strand
guaugacccgucuccagua

SEQ ID NO: 875558 - RNA, 19 nt, Homo sapiens
  misc_RNA (1)...(19): siRNA sense strand
ugaacugaguguugauagu

SEQ ID NO: 875559 - RNA, 19 nt, Homo sapiens
  misc_RNA (1)...(19): siRNA sense strand
caucagugacaaagacauu

SEQ ID NO: 875560 - RNA, 19 nt, Homo sapiens
  misc_RNA (1)...(19): siRNA sense strand
gaaguagaugauaaagaug

SEQ ID NO: 875561 - RNA, 19 nt, Homo sapiens
  misc_RNA (1)...(19): siRNA sense strand
gaaaggaggugcuuacacu

SEQ ID NO: 875562 - RNA, 19 nt, Homo sapiens
  misc_RNA (1)...(19): siRNA sense strand
gaagugaauuugaacaaca

SEQ ID NO: 875563 - RNA, 19 nt, Homo sapiens
  misc_RNA (1)...(19): siRNA sense strand
caacuggccucauguucuu

SEQ ID NO: 875564 - RNA, 19 nt, Homo sapiens
  misc_RNA (1)...(19): siRNA sense strand
guacccaucuaccugcuuu

SEQ ID NO: 875565 - RNA, 19 nt, Homo sapiens
  misc_RNA (1)...(19): siRNA sense strand
gcugggcccuuguguaaau

SEQ ID NO: 875566 - RNA, 19 nt, Homo sapiens
  misc_RNA (1)...(19): siRNA sense strand
ccuuugaauuggagauuua

SEQ ID NO: 875567 - RNA, 19 nt, Homo sapiens
  misc_RNA (1)...(19): siRNA sense strand
gcaaggagagccugagcaa

SEQ ID NO: 875568 - RNA, 19 nt, Homo sapiens
  misc_RNA (1)...(19): siRNA sense strand
ggaggugggcuuuaaguuc

SEQ ID NO: 875569 - RNA, 19 nt, Homo sapiens
  misc_RNA (1)...(19): siRNA sense strand
ccaucuaccugcuuuggaa

SEQ ID NO: 875570 - RNA, 19 nt, Homo sapiens
  misc_RNA (1)...(19): siRNA sense strand
ggaagcuggucauccuguu

SEQ ID NO: 875571 - RNA, 19 nt, Homo sapiens
  misc_RNA (1)...(19): siRNA sense strand
ggguggaggugggcuuuaa

SEQ ID NO: 875572 - RNA, 19 nt, Homo sapiens
  misc_RNA (1)...(19): siRNA sense strand
ccaccaagaccgucaucua

SEQ ID NO: 875573 - RNA, 19 nt, Homo sapiens
  misc_RNA (1)...(19): siRNA sense strand
ggacaccagacucucauga

SEQ ID NO: 875574 - RNA, 19 nt, Homo sapiens
  misc_RNA (1)...(19): siRNA sense strand
aaggagagccugagcaaga

SEQ ID NO: 875575 - RNA, 19 nt, Homo sapiens
  misc_RNA (1)...(19): siRNA sense strand
ccggugggcucuucucuca

SEQ ID NO: 875576 - RNA, 19 nt, Homo sapiens
  misc_RNA (1)...(19): siRNA sense strand
uggcugggcccuuguguaa

SEQ ID NO: 875577 - RNA, 19 nt, Homo sapiens
  misc_RNA (1)...(19): siRNA sense strand
gcuuuaaguucgccaccaa

SEQ ID NO: 875578 - RNA, 19 nt, Homo sapiens
  misc_RNA (1)...(19): siRNA sense strand
ucucucaacuggccucaug

SEQ ID NO: 875579 - RNA, 19 nt, Homo sapiens
  misc_RNA (1)...(19): siRNA sense strand
gugcugccuuccucucuug

SEQ ID NO: 875580 - RNA, 19 nt, Homo sapiens
  misc_RNA (1)...(19): siRNA sense strand
ggugggcucuucucucaac

SEQ ID NO: 875581 - RNA, 19 nt, Homo sapiens
  misc_RNA (1)...(19): siRNA sense strand
cgaagugaauuugaacaac

SEQ ID NO: 875582 - RNA, 19 nt, Homo sapiens
  misc_RNA (1)...(19): siRNA sense strand
gaagcuggucauccuguuc

SEQ ID NO: 875583 - RNA, 19 nt, Homo sapiens
  misc_RNA (1)...(19): siRNA sense strand
ggccaucucagacccauuc

SEQ ID NO: 875584 - RNA, 19 nt, Homo sapiens
  misc_RNA (1)...(19): siRNA sense strand
ccaagaccgucaucuaccu

SEQ ID NO: 875585 - RNA, 19 nt, Homo sapiens
  misc_RNA (1)...(19): siRNA sense strand
gaauuggagauuuacuaca

SEQ ID NO: 875586 - RNA, 19 nt, Homo sapiens
  misc_RNA (1)...(19): siRNA sense strand
aggagagccugagcaagaa

SEQ ID NO: 875587 - RNA, 19 nt, Homo sapiens
  misc_RNA (1)...(19): siRNA sense strand
caucucagacccauucuac

SEQ ID NO: 875588 - RNA, 19 nt, Homo sapiens
  misc_RNA (1)...(19): siRNA sense strand
ggaaaggaggugcuuacac

SEQ ID NO: 875589 - RNA, 19 nt, Homo sapiens
  misc_RNA (1)...(19): siRNA sense strand
guguaaauaucugcuggau

SEQ ID NO: 875590 - RNA, 19 nt, Homo sapiens
  misc_RNA (1)...(19): siRNA sense strand
caccaagaccgucaucuac

SEQ ID NO: 875591 - RNA, 19 nt, Homo sapiens
  misc_RNA (1)...(19): siRNA sense strand
caugaugcaucuccccuuu

SEQ ID NO: 875592 - RNA, 19 nt, Homo sapiens
  misc_RNA (1)...(19): siRNA sense strand
ggagauuuacuacauucag

SEQ ID NO: 875593 - RNA, 19 nt, Homo sapiens
  misc_RNA (1)...(19): siRNA sense strand
gcccuuguguaaauaucug

SEQ ID NO: 875594 - RNA, 19 nt, Homo sapiens
  misc_RNA (1)...(19): siRNA sense strand
uggucauccuguucucaua

SEQ ID NO: 875595 - RNA, 19 nt, Homo sapiens
  misc_RNA (1)...(19): siRNA sense strand
ucaacuggccucauguucu

SEQ ID NO: 875596 - RNA, 19 nt, Homo sapiens
  misc_RNA (1)...(19): siRNA sense strand
ccgaagugaauuugaacaa

SEQ ID NO: 875597 - RNA, 19 nt, Homo sapiens
  misc_RNA (1)...(19): siRNA sense strand
ugaauuggagauuuacuac

SEQ ID NO: 875598 - RNA, 19 nt, Homo sapiens
  misc_RNA (1)...(19): siRNA sense strand
uuggagauuuacuacauuc

SEQ ID NO: 875599 - RNA, 19 nt, Homo sapiens
  misc_RNA (1)...(19): siRNA sense strand
gcagaaagcuggacagaca

SEQ ID NO: 875600 - RNA, 19 nt, Homo sapiens
  misc_RNA (1)...(19): siRNA sense strand
ccaagaagcugauugauuc

SEQ ID NO: 875601 - RNA, 19 nt, Homo sapiens
  misc_RNA (1)...(19): siRNA sense strand
ggaagaagcccaaggauga

SEQ ID NO: 875602 - RNA, 19 nt, Homo sapiens
  misc_RNA (1)...(19): siRNA sense strand
gaaacaucaugguguauaa

SEQ ID NO: 875603 - RNA, 19 nt, Homo sapiens
  misc_RNA (1)...(19): siRNA sense strand
caagaaacaucauggugua

SEQ ID NO: 875604 - RNA, 19 nt, Homo sapiens
  misc_RNA (1)...(19): siRNA sense strand
gaaaacaucugaacaaguu

SEQ ID NO: 875605 - RNA, 19 nt, Homo sapiens
  misc_RNA (1)...(19): siRNA sense strand
ucacaaagcuaugguguuu

SEQ ID NO: 875606 - RNA, 19 nt, Homo sapiens
  misc_RNA (1)...(19): siRNA sense strand
gaucacaaauggcaagaaa

SEQ ID NO: 875607 - RNA, 19 nt, Homo sapiens
  misc_RNA (1)...(19): siRNA sense strand
gaaguugaguaccauguaa

SEQ ID NO: 875608 - RNA, 19 nt, Homo sapiens
  misc_RNA (1)...(19): siRNA sense strand
agaaauaucugguacuuug

SEQ ID NO: 875609 - RNA, 19 nt, Homo sapiens
  misc_RNA (1)...(19): siRNA sense strand
gaagcugauugauucuuua

SEQ ID NO: 875610 - RNA, 19 nt, Homo sapiens
  misc_RNA (1)...(19): siRNA sense strand
gaacuaagaaguacguauu

SEQ ID NO: 875611 - RNA, 19 nt, Homo sapiens
  misc_RNA (1)...(19): siRNA sense strand
gaaaggaauucuucgaaca

SEQ ID NO: 875612 - RNA, 19 nt, Homo sapiens
  misc_RNA (1)...(19): siRNA sense strand
uaaaugauaucacgccaaa

SEQ ID NO: 875613 - RNA, 19 nt, Homo sapiens
  misc_RNA (1)...(19): siRNA sense strand
caacuaaacccugaagaua

SEQ ID NO: 875614 - RNA, 19 nt, Homo sapiens
  misc_RNA (1)...(19): siRNA sense strand
gagaugcuguucaguuaaa

SEQ ID NO: 875615 - RNA, 19 nt, Homo sapiens
  misc_RNA (1)...(19): siRNA sense strand
ucacaaauggcaagaaaua

SEQ ID NO: 875616 - RNA, 19 nt, Homo sapiens
  misc_RNA (1)...(19): siRNA sense strand
aagagaugcuguucaguua

SEQ ID NO: 875617 - RNA, 19 nt, Homo sapiens
  misc_RNA (1)...(19): siRNA sense strand
ugaagaaucuggaaguguu

SEQ ID NO: 875618 - RNA, 19 nt, Homo sapiens
  misc_RNA (1)...(19): siRNA sense strand
auaaagaggugaucauaga

SEQ ID NO: 875619 - RNA, 19 nt, Homo sapiens
  misc_RNA (1)...(19): siRNA sense strand
caagaaauaucugguacuu

SEQ ID NO: 875620 - RNA, 19 nt, Homo sapiens
  misc_RNA (1)...(19): siRNA sense strand
gcaagcauauugaugaagu

SEQ ID NO: 875621 - RNA, 19 nt, Homo sapiens
  misc_RNA (1)...(19): siRNA sense strand
guaaggccaucgauuguug

SEQ ID NO: 875622 - RNA, 19 nt, Homo sapiens
  misc_RNA (1)...(19): siRNA sense strand
gauggaugauggccuagua

SEQ ID NO: 875623 - RNA, 19 nt, Homo sapiens
  misc_RNA (1)...(19): siRNA sense strand
gagacagaccuaauacaua

SEQ ID NO: 875624 - RNA, 19 nt, Homo sapiens
  misc_RNA (1)...(19): siRNA sense strand
agaaguacguauugaauga

SEQ ID NO: 875625 - RNA, 19 nt, Homo sapiens
  misc_RNA (1)...(19): siRNA sense strand
gcauaugccuacuguaauc

SEQ ID NO: 875626 - RNA, 19 nt, Homo sapiens
  misc_RNA (1)...(19): siRNA sense strand
cagcauaugccuacuguaa

SEQ ID NO: 875627 - RNA, 19 nt, Homo sapiens
  misc_RNA (1)...(19): siRNA sense strand
cagcauuccuguaugauau

SEQ ID NO: 875628 - RNA, 19 nt, Homo sapiens
  misc_RNA (1)...(19): siRNA sense strand
caggauggauugauaacuu

SEQ ID NO: 875629 - RNA, 19 nt, Homo sapiens
  misc_RNA (1)...(19): siRNA sense strand
gcaguuacauugggcagaa

SEQ ID NO: 875630 - RNA, 19 nt, Homo sapiens
  misc_RNA (1)...(19): siRNA sense strand
gcuguucaguuaaauguga

SEQ ID NO: 875631 - RNA, 19 nt, Homo sapiens
  misc_RNA (1)...(19): siRNA sense strand
ggaauauacguuaugguuu

SEQ ID NO: 875632 - RNA, 19 nt, Homo sapiens
  misc_RNA (1)...(19): siRNA sense strand
gaacaaguugcggaauaua

SEQ ID NO: 875633 - RNA, 19 nt, Homo sapiens
  misc_RNA (1)...(19): siRNA sense strand
acuaaacccugaagauaaa

SEQ ID NO: 875634 - RNA, 19 nt, Homo sapiens
  misc_RNA (1)...(19): siRNA sense strand
ggcagaauauguuguacaa

SEQ ID NO: 875635 - RNA, 19 nt, Homo sapiens
  misc_RNA (1)...(19): siRNA sense strand
agacagaccuaauacauac

SEQ ID NO: 875636 - RNA, 19 nt, Homo sapiens
  misc_RNA (1)...(19): siRNA sense strand
gcauauugaugaaguaguc

SEQ ID NO: 875637 - RNA, 19 nt, Homo sapiens
  misc_RNA (1)...(19): siRNA sense strand
guuaauagaccaagaaaca

SEQ ID NO: 875638 - RNA, 19 nt, Homo sapiens
  misc_RNA (1)...(19): siRNA sense strand
gaugauggccuaguaaaug

SEQ ID NO: 875639 - RNA, 19 nt, Homo sapiens
  misc_RNA (1)...(19): siRNA sense strand
gcagcuacaguaagguuua

SEQ ID NO: 875640 - RNA, 19 nt, Homo sapiens
  misc_RNA (1)...(19): siRNA sense strand
caaaagcauuggcagaaua

SEQ ID NO: 875641 - RNA, 19 nt, Homo sapiens
  misc_RNA (1)...(19): siRNA sense strand
gcuaugguguuucuugaau

SEQ ID NO: 875642 - RNA, 19 nt, Homo sapiens
  misc_RNA (1)...(19): siRNA sense strand
cugaacaaguugcggaaua

SEQ ID NO: 875643 - RNA, 19 nt, Homo sapiens
  misc_RNA (1)...(19): siRNA sense strand
uaagagaugcuguucaguu

SEQ ID NO: 875644 - RNA, 19 nt, Homo sapiens
  misc_RNA (1)...(19): siRNA sense strand
ggagacagaccuaauacau

SEQ ID NO: 875645 - RNA, 19 nt, Homo sapiens
  misc_RNA (1)...(19): siRNA sense strand
cguauugaaugaagaaaug

SEQ ID NO: 875646 - RNA, 19 nt, Homo sapiens
  misc_RNA (1)...(19): siRNA sense strand
aaucuaaccuccaaucauc

SEQ ID NO: 875647 - RNA, 19 nt, Homo sapiens
  misc_RNA (1)...(19): siRNA sense strand
gaacaauacgugccuccaa

SEQ ID NO: 875648 - RNA, 19 nt, Homo sapiens
  misc_RNA (1)...(19): siRNA sense strand
caaguggucucuuuauugc

SEQ ID NO: 875649 - RNA, 19 nt, Homo sapiens
  misc_RNA (1)...(19): siRNA sense strand
ccaaguggucucuuuauug

SEQ ID NO: 875650 - RNA, 19 nt, Homo sapiens
  misc_RNA (1)...(19): siRNA sense strand
gaaguguucaugcauguau

SEQ ID NO: 875651 - RNA, 19 nt, Homo sapiens
  misc_RNA (1)...(19): siRNA sense strand
caacaaugcccuugcagau

SEQ ID NO: 875652 - RNA, 19 nt, Homo sapiens
  misc_RNA (1)...(19): siRNA sense strand
caagcauauugaugaagua

SEQ ID NO: 875653 - RNA, 19 nt, Homo sapiens
  misc_RNA (1)...(19): siRNA sense strand
gaacucacccaaccuaaac

SEQ ID NO: 875654 - RNA, 19 nt, Homo sapiens
  misc_RNA (1)...(19): siRNA sense strand
ugaacaaguugcggaauau

SEQ ID NO: 875655 - RNA, 19 nt, Homo sapiens
  misc_RNA (1)...(19): siRNA sense strand
gcacaacaaaugaagaauc

SEQ ID NO: 875656 - RNA, 19 nt, Homo sapiens
  misc_RNA (1)...(19): siRNA sense strand
cuaaauguggcaauuguaa

SEQ ID NO: 875657 - RNA, 19 nt, Homo sapiens
  misc_RNA (1)...(19): siRNA sense strand
ggaguuaauagaccaagaa

SEQ ID NO: 875658 - RNA, 19 nt, Homo sapiens
  misc_RNA (1)...(19): siRNA sense strand
guucaugcauguaucaaca

SEQ ID NO: 875659 - RNA, 19 nt, Homo sapiens
  misc_RNA (1)...(19): siRNA sense strand
cacaacaaaugaagaaucu

SEQ ID NO: 875660 - RNA, 19 nt, Homo sapiens
  misc_RNA (1)...(19): siRNA sense strand
gcugauugauucuuuagag

SEQ ID NO: 875661 - RNA, 19 nt, Homo sapiens
  misc_RNA (1)...(19): siRNA sense strand
ggauugcuguaagccauaa

SEQ ID NO: 875662 - RNA, 19 nt, Homo sapiens
  misc_RNA (1)...(19): siRNA sense strand
cauguaauuuccacuuuca

SEQ ID NO: 875663 - RNA, 19 nt, Homo sapiens
  misc_RNA (1)...(19): siRNA sense strand
gggaaaggaauucuucgaa

SEQ ID NO: 875664 - RNA, 19 nt, Homo sapiens
  misc_RNA (1)...(19): siRNA sense strand
gcagggaaaggaauucuuc

SEQ ID NO: 875665 - RNA, 19 nt, Homo sapiens
  misc_RNA (1)...(19): siRNA sense strand
gauaaagaggugaucauag

SEQ ID NO: 875666 - RNA, 19 nt, Homo sapiens
  misc_RNA (1)...(19): siRNA sense strand
cugagaaugucaauauguu

SEQ ID NO: 875667 - RNA, 19 nt, Homo sapiens
  misc_RNA (1)...(19): siRNA sense strand
ggaauucuucgaacaauac

SEQ ID NO: 875668 - RNA, 19 nt, Homo sapiens
  misc_RNA (1)...(19): siRNA sense strand
gcauguaucaacagcauau

SEQ ID NO: 875669 - RNA, 19 nt, Homo sapiens
  misc_RNA (1)...(19): siRNA sense strand
gcaacgcgacagcuuauuc

SEQ ID NO: 875670 - RNA, 19 nt, Homo sapiens
  misc_RNA (1)...(19): siRNA sense strand
gcugaggucuuguccuaag

SEQ ID NO: 875671 - RNA, 19 nt, Homo sapiens
  misc_RNA (1)...(19): siRNA sense strand
acaaagcuaugguguuucu

SEQ ID NO: 875672 - RNA, 19 nt, Homo sapiens
  misc_RNA (1)...(19): siRNA sense strand
uaacucgucuucacaaagc

SEQ ID NO: 875673 - RNA, 19 nt, Homo sapiens
  misc_RNA (1)...(19): siRNA sense strand
guccuaaggugaauucagu

SEQ ID NO: 875674 - RNA, 19 nt, Homo sapiens
  misc_RNA (1)...(19): siRNA sense strand
gaagauaaagaggugauca

SEQ ID NO: 875675 - RNA, 19 nt, Homo sapiens
  misc_RNA (1)...(19): siRNA sense strand
cggaauauacguuaugguu

SEQ ID NO: 875676 - RNA, 19 nt, Homo sapiens
  misc_RNA (1)...(19): siRNA sense strand
uugcugaggucuuguccua

SEQ ID NO: 875677 - RNA, 19 nt, Homo sapiens
  misc_RNA (1)...(19): siRNA sense strand
auacgugccuccaacaaug

SEQ ID NO: 875678 - RNA, 19 nt, Homo sapiens
  misc_RNA (1)...(19): siRNA sense strand
ggauggauugauaacuuua

SEQ ID NO: 875679 - RNA, 19 nt, Homo sapiens
  misc_RNA (1)...(19): siRNA sense strand
ucacaggagcuaccgguuu

SEQ ID NO: 875680 - RNA, 19 nt, Homo sapiens
  misc_RNA (1)...(19): siRNA sense strand
acauugggcagaauauaua

SEQ ID NO: 875681 - RNA, 19 nt, Homo sapiens
  misc_RNA (1)...(19): siRNA sense strand
gauaucuaccucaggauga

SEQ ID NO: 875682 - RNA, 19 nt, Homo sapiens
  misc_RNA (1)...(19): siRNA sense strand
acaaugcccuugcagaucu

SEQ ID NO: 875683 - RNA, 19 nt, Homo sapiens
  misc_RNA (1)...(19): siRNA sense strand
cagcuacaguaagguuuaa

SEQ ID NO: 875684 - RNA, 19 nt, Homo sapiens
  misc_RNA (1)...(19): siRNA sense strand
gggcagaauauauagagaa

SEQ ID NO: 875685 - RNA, 19 nt, Homo sapiens
  misc_RNA (1)...(19): siRNA sense strand
cuaugguguuucuugaaua

SEQ ID NO: 875686 - RNA, 19 nt, Homo sapiens
  misc_RNA (1)...(19): siRNA sense strand
guaauuuccacuuucaaga

SEQ ID NO: 875687 - RNA, 19 nt, Homo sapiens
  misc_RNA (1)...(19): siRNA sense strand
guacaacaggcagcacuaa

SEQ ID NO: 875688 - RNA, 19 nt, Homo sapiens
  misc_RNA (1)...(19): siRNA sense strand
ggauugauaacuuuaaugg

SEQ ID NO: 875689 - RNA, 19 nt, Homo sapiens
  misc_RNA (1)...(19): siRNA sense strand
uguaaucgcaagcauauug

SEQ ID NO: 875690 - RNA, 19 nt, Homo sapiens
  misc_RNA (1)...(19): siRNA sense strand
guacguauugaaugaagaa

SEQ ID NO: 875691 - RNA, 19 nt, Homo sapiens
  misc_RNA (1)...(19): siRNA sense strand
ucagacggcccaauguaaa

SEQ ID NO: 875692 - RNA, 19 nt, Homo sapiens
  misc_RNA (1)...(19): siRNA sense strand
gauggccuaguaaaugaua

SEQ ID NO: 875693 - RNA, 19 nt, Homo sapiens
  misc_RNA (1)...(19): siRNA sense strand
caaauggcaagaaauaucu

SEQ ID NO: 875694 - RNA, 19 nt, Homo sapiens
  misc_RNA (1)...(19): siRNA sense strand
gcaaucaacagcgaacuca

SEQ ID NO: 875695 - RNA, 19 nt, Homo sapiens
  misc_RNA (1)...(19): siRNA sense strand
guaaaucuaaccuccaauc

SEQ ID NO: 875696 - RNA, 19 nt, Homo sapiens
  misc_RNA (1)...(19): siRNA sense strand
agaaacaucaugguguaua

SEQ ID NO: 875697 - RNA, 19 nt, Homo sapiens
  misc_RNA (1)...(19): siRNA sense strand
ggucuuguccuaaggugaa

SEQ ID NO: 875698 - RNA, 19 nt, Homo sapiens
  misc_RNA (1)...(19): siRNA sense strand
guuagucuguguuacaagu

SEQ ID NO: 875699 - RNA, 19 nt, Homo sapiens
  misc_RNA (1)...(19): siRNA sense strand
gaagaaggaucguuuauga

SEQ ID NO: 875700 - RNA, 19 nt, Homo sapiens
  misc_RNA (1)...(19): siRNA sense strand
gaaauucucuguccagguu

SEQ ID NO: 875701 - RNA, 19 nt, Homo sapiens
  misc_RNA (1)...(19): siRNA sense strand
gcagcaacaucuucaauaa

SEQ ID NO: 875702 - RNA, 19 nt, Homo sapiens
  misc_RNA (1)...(19): siRNA sense strand
gaacaugccuccacagucu

SEQ ID NO: 875703 - RNA, 19 nt, Homo sapiens
  misc_RNA (1)...(19): siRNA sense strand
gaaccaaucaacagaauuu

SEQ ID NO: 875704 - RNA, 19 nt, Homo sapiens
  misc_RNA (1)...(19): siRNA sense strand
gaugguaucugaaauaagu

SEQ ID NO: 875705 - RNA, 19 nt, Homo sapiens
  misc_RNA (1)...(19): siRNA sense strand
gagcugaaguuaauggaaa

SEQ ID NO: 875706 - RNA, 19 nt, Homo sapiens
  misc_RNA (1)...(19): siRNA sense strand
guaaccaccugaccaaauu

SEQ ID NO: 875707 - RNA, 19 nt, Homo sapiens
  misc_RNA (1)...(19): siRNA sense strand
gaauugaaagcccuaaaua

SEQ ID NO: 875708 - RNA, 19 nt, Homo sapiens
  misc_RNA (1)...(19): siRNA sense strand
caauacaccuuggauuuaa

SEQ ID NO: 875709 - RNA, 19 nt, Homo sapiens
  misc_RNA (1)...(19): siRNA sense strand
gcgcaacauugaaagcuua

SEQ ID NO: 875710 - RNA, 19 nt, Homo sapiens
  misc_RNA (1)...(19): siRNA sense strand
gcuaauaaauugugaagca

SEQ ID NO: 875711 - RNA, 19 nt, Homo sapiens
  misc_RNA (1)...(19): siRNA sense strand
ugaaagcccuaaauaguga

SEQ ID NO: 875712 - RNA, 19 nt, Homo sapiens
  misc_RNA (1)...(19): siRNA sense strand
ugagauaggugcauuuaau

SEQ ID NO: 875713 - RNA, 19 nt, Homo sapiens
  misc_RNA (1)...(19): siRNA sense strand
caccuuggauuuaacaaua

SEQ ID NO: 875714 - RNA, 19 nt, Homo sapiens
  misc_RNA (1)...(19): siRNA sense strand
gccacugucuguucuaaua

SEQ ID NO: 875715 - RNA, 19 nt, Homo sapiens
  misc_RNA (1)...(19): siRNA sense strand
ugacgaugcuucacacaaa

SEQ ID NO: 875716 - RNA, 19 nt, Homo sapiens
  misc_RNA (1)...(19): siRNA sense strand
ggccugcaauugugacuua

SEQ ID NO: 875717 - RNA, 19 nt, Homo sapiens
  misc_RNA (1)...(19): siRNA sense strand
ccaggaaccuuuaauccaa

SEQ ID NO: 875718 - RNA, 19 nt, Homo sapiens
  misc_RNA (1)...(19): siRNA sense strand
gaaccugacuauuuagaag

SEQ ID NO: 875719 - RNA, 19 nt, Homo sapiens
  misc_RNA (1)...(19): siRNA sense strand
agauugaccuugaggauaa

SEQ ID NO: 875720 - RNA, 19 nt, Homo sapiens
  misc_RNA (1)...(19): siRNA sense strand
uuacaaacauugccuuaug

SEQ ID NO: 875721 - RNA, 19 nt, Homo sapiens
  misc_RNA (1)...(19): siRNA sense strand
acgaagagcugaaguuaau

SEQ ID NO: 875722 - RNA, 19 nt, Homo sapiens
  misc_RNA (1)...(19): siRNA sense strand
gaacacauuggccgaauau

SEQ ID NO: 875723 - RNA, 19 nt, Homo sapiens
  misc_RNA (1)...(19): siRNA sense strand
caaauacggcugauacuau

SEQ ID NO: 875724 - RNA, 19 nt, Homo sapiens
  misc_RNA (1)...(19): siRNA sense strand
ggaccuuacugcccuauuc

SEQ ID NO: 875725 - RNA, 19 nt, Homo sapiens
  misc_RNA (1)...(19): siRNA sense strand
caucaggacuucuaauaca

SEQ ID NO: 875726 - RNA, 19 nt, Homo sapiens
  misc_RNA (1)...(19): siRNA sense strand
gaagucugaucuaguggaa

SEQ ID NO: 875727 - RNA, 19 nt, Homo sapiens
  misc_RNA (1)...(19): siRNA sense strand
gcaagcagauaacaauuuu

SEQ ID NO: 875728 - RNA, 19 nt, Homo sapiens
  misc_RNA (1)...(19): siRNA sense strand
caaaugggccugcaauugu

SEQ ID NO: 875729 - RNA, 19 nt, Homo sapiens
  misc_RNA (1)...(19): siRNA sense strand
uaacccagauugaccuuga

SEQ ID NO: 875730 - RNA, 19 nt, Homo sapiens
  misc_RNA (1)...(19): siRNA sense strand
acaaguagaugagcaaaug

SEQ ID NO: 875731 - RNA, 19 nt, Homo sapiens
  misc_RNA (1)...(19): siRNA sense strand
ucaauacaccuuggauuua

SEQ ID NO: 875732 - RNA, 19 nt, Homo sapiens
  misc_RNA (1)...(19): siRNA sense strand
gauagugguucuuguucuu

SEQ ID NO: 875733 - RNA, 19 nt, Homo sapiens
  misc_RNA (1)...(19): siRNA sense strand
gaaccuaacgagauuacaa

SEQ ID NO: 875734 - RNA, 19 nt, Homo sapiens
  misc_RNA (1)...(19): siRNA sense strand
agucugaucuaguggaaua

SEQ ID NO: 875735 - RNA, 19 nt, Homo sapiens
  misc_RNA (1)...(19): siRNA sense strand
aauauuggaucuucaguug

SEQ ID NO: 875736 - RNA, 19 nt, Homo sapiens
  misc_RNA (1)...(19): siRNA sense strand
ccacgaagagcugaaguua

SEQ ID NO: 875737 - RNA, 19 nt, Homo sapiens
  misc_RNA (1)...(19): siRNA sense strand
cuauagaaguccauccuuu

SEQ ID NO: 875738 - RNA, 19 nt, Homo sapiens
  misc_RNA (1)...(19): siRNA sense strand
gugauucucuuugcaauug

SEQ ID NO: 875739 - RNA, 19 nt, Homo sapiens
  misc_RNA (1)...(19): siRNA sense strand
aaagauggcacaaugcuaa

SEQ ID NO: 875740 - RNA, 19 nt, Homo sapiens
  misc_RNA (1)...(19): siRNA sense strand
ucacgaccuuuccaacuaa

SEQ ID NO: 875741 - RNA, 19 nt, Homo sapiens
  misc_RNA (1)...(19): siRNA sense strand
uaaaggaaguauacucagu

SEQ ID NO: 875742 - RNA, 19 nt, Homo sapiens
  misc_RNA (1)...(19): siRNA sense strand
caacaaauacggcugauac

SEQ ID NO: 875743 - RNA, 19 nt, Homo sapiens
  misc_RNA (1)...(19): siRNA sense strand
gcaacaucuucaauaaaug

SEQ ID NO: 875744 - RNA, 19 nt, Homo sapiens
  misc_RNA (1)...(19): siRNA sense strand
gaagaagagaggaaugaga

SEQ ID NO: 875745 - RNA, 19 nt, Homo sapiens
  misc_RNA (1)...(19): siRNA sense strand
cgaacacauuggccgaaua

SEQ ID NO: 875746 - RNA, 19 nt, Homo sapiens
  misc_RNA (1)...(19): siRNA sense strand
gcaagaacacagugacaga

SEQ ID NO: 875747 - RNA, 19 nt, Homo sapiens
  misc_RNA (1)...(19): siRNA sense strand
ugcugaaccugacuauuua

SEQ ID NO: 875748 - RNA, 19 nt, Homo sapiens
  misc_RNA (1)...(19): siRNA sense strand
gaaaaucauucaccacuca

SEQ ID NO: 875749 - RNA, 19 nt, Homo sapiens
  misc_RNA (1)...(19): siRNA sense strand
gcuguggauucaucucuuu

SEQ ID NO: 875750 - RNA, 19 nt, Homo sapiens
  misc_RNA (1)...(19): siRNA sense strand
ccacucacagggucaaaua

SEQ ID NO: 875751 - RNA, 19 nt, Homo sapiens
  misc_RNA (1)...(19): siRNA sense strand
ggaauugaaagcccuaaau

SEQ ID NO: 875752 - RNA, 19 nt, Homo sapiens
  misc_RNA (1)...(19): siRNA sense strand
gggaaucacagaauaccua

SEQ ID NO: 875753 - RNA, 19 nt, Homo sapiens
  misc_RNA (1)...(19): siRNA sense strand
gauggcacaaugcuaauaa

SEQ ID NO: 875754 - RNA, 19 nt, Homo sapiens
  misc_RNA (1)...(19): siRNA sense strand
gaaacaaguagaugagcaa

SEQ ID NO: 875755 - RNA, 19 nt, Homo sapiens
  misc_RNA (1)...(19): siRNA sense strand
aaugaagucugaucuagug

SEQ ID NO: 875756 - RNA, 19 nt, Homo sapiens
  misc_RNA (1)...(19): siRNA sense strand
guucaugucuauagaaguc

SEQ ID NO: 875757 - RNA, 19 nt, Homo sapiens
  misc_RNA (1)...(19): siRNA sense strand
ucaguagacuaaagaagga

SEQ ID NO: 875758 - RNA, 19 nt, Homo sapiens
  misc_RNA (1)...(19): siRNA sense strand
caaaacaucuccaaagaag

SEQ ID NO: 875759 - RNA, 19 nt, Homo sapiens
  misc_RNA (1)...(19): siRNA sense strand
ggauucaucucuuuuauuc

SEQ ID NO: 875760 - RNA, 19 nt, Homo sapiens
  misc_RNA (1)...(19): siRNA sense strand
uuacaaagccauccacuca

SEQ ID NO: 875761 - RNA, 19 nt, Homo sapiens
  misc_RNA (1)...(19): siRNA sense strand
gaaauaagugugccaccau

SEQ ID NO: 875762 - RNA, 19 nt, Homo sapiens
  misc_RNA (1)...(19): siRNA sense strand
ggaaucacagaauaccuaa

SEQ ID NO: 875763 - RNA, 19 nt, Homo sapiens
  misc_RNA (1)...(19): siRNA sense strand
aaagggaacuucagcaacu

SEQ ID NO: 875764 - RNA, 19 nt, Homo sapiens
  misc_RNA (1)...(19): siRNA sense strand
gaugccagcucauuguaca

SEQ ID NO: 875765 - RNA, 19 nt, Homo sapiens
  misc_RNA (1)...(19): siRNA sense strand
gaaagaaggaagugaugca

SEQ ID NO: 875766 - RNA, 19 nt, Homo sapiens
  misc_RNA (1)...(19): siRNA sense strand
ggucaccacuccugcaaca

SEQ ID NO: 875767 - RNA, 19 nt, Homo sapiens
  misc_RNA (1)...(19): siRNA sense strand
acacagacuaguuaccuua

SEQ ID NO: 875768 - RNA, 19 nt, Homo sapiens
  misc_RNA (1)...(19): siRNA sense strand
gaauauuggaucuucaguu

SEQ ID NO: 875769 - RNA, 19 nt, Homo sapiens
  misc_RNA (1)...(19): siRNA sense strand
ccacucaucacacuacuga

SEQ ID NO: 875770 - RNA, 19 nt, Homo sapiens
  misc_RNA (1)...(19): siRNA sense strand
aauccaaugccuaaacuua

SEQ ID NO: 875771 - RNA, 19 nt, Homo sapiens
  misc_RNA (1)...(19): siRNA sense strand
caacuaagaccacguccau

SEQ ID NO: 875772 - RNA, 19 nt, Homo sapiens
  misc_RNA (1)...(19): siRNA sense strand
aaacuugguuggagaacau

SEQ ID NO: 875773 - RNA, 19 nt, Homo sapiens
  misc_RNA (1)...(19): siRNA sense strand
uaacaaccuccuccaaguu

SEQ ID NO: 875774 - RNA, 19 nt, Homo sapiens
  misc_RNA (1)...(19): siRNA sense strand
uuaugaaccuaacgagauu

SEQ ID NO: 875775 - RNA, 19 nt, Homo sapiens
  misc_RNA (1)...(19): siRNA sense strand
auugaaagcuuaucagauc

SEQ ID NO: 875776 - RNA, 19 nt, Homo sapiens
  misc_RNA (1)...(19): siRNA sense strand
ggcagcaacaucuucaaua

SEQ ID NO: 875777 - RNA, 19 nt, Homo sapiens
  misc_RNA (1)...(19): siRNA sense strand
acacauuggccgaauauug

SEQ ID NO: 875778 - RNA, 19 nt, Homo sapiens
  misc_RNA (1)...(19): siRNA sense strand
gagaaagaaggaagugaug

SEQ ID NO: 875779 - RNA, 19 nt, Homo sapiens
  misc_RNA (1)...(19): siRNA sense strand
cugcagcaauggauacaaa

SEQ ID NO: 875780 - RNA, 19 nt, Homo sapiens
  misc_RNA (1)...(19): siRNA sense strand
uccaaugccuaaacuuaaa

SEQ ID NO: 875781 - RNA, 19 nt, Homo sapiens
  misc_RNA (1)...(19): siRNA sense strand
caacauugaaagcuuauca

SEQ ID NO: 875782 - RNA, 19 nt, Homo sapiens
  misc_RNA (1)...(19): siRNA sense strand
ggcacaaugcuaauaaauu

SEQ ID NO: 875783 - RNA, 19 nt, Homo sapiens
  misc_RNA (1)...(19): siRNA sense strand
caacaaaugggccugcaau

SEQ ID NO: 875784 - RNA, 19 nt, Homo sapiens
  misc_RNA (1)...(19): siRNA sense strand
gggcuuaccaaugcuauuu

SEQ ID NO: 875785 - RNA, 19 nt, Homo sapiens
  misc_RNA (1)...(19): siRNA sense strand
caacugggaaucacagaau

SEQ ID NO: 875786 - RNA, 19 nt, Homo sapiens
  misc_RNA (1)...(19): siRNA sense strand
gcaaaugagagacaacagu

SEQ ID NO: 875787 - RNA, 19 nt, Homo sapiens
  misc_RNA (1)...(19): siRNA sense strand
guucuaauauugggacuuc

SEQ ID NO: 875788 - RNA, 19 nt, Homo sapiens
  misc_RNA (1)...(19): siRNA sense strand
agaacacagugacagauga

SEQ ID NO: 875789 - RNA, 19 nt, Homo sapiens
  misc_RNA (1)...(19): siRNA sense strand
ccaucuaccuguaaguaau

SEQ ID NO: 875790 - RNA, 19 nt, Homo sapiens
  misc_RNA (1)...(19): siRNA sense strand
gacuaaagaaggaaucuau

SEQ ID NO: 875791 - RNA, 19 nt, Homo sapiens
  misc_RNA (1)...(19): siRNA sense strand
ccuccacagucuauaauug

SEQ ID NO: 875792 - RNA, 19 nt, Homo sapiens
  misc_RNA (1)...(19): siRNA sense strand
gaaccaagugccuuuagca

SEQ ID NO: 875793 - RNA, 19 nt, Homo sapiens
  misc_RNA (1)...(19): siRNA sense strand
uggaauauuucacuuugga

SEQ ID NO: 875794 - RNA, 19 nt, Homo sapiens
  misc_RNA (1)...(19): siRNA sense strand
caagaugccagcucauugu

SEQ ID NO: 875795 - RNA, 19 nt, Homo sapiens
  misc_RNA (1)...(19): siRNA sense strand
uauugggacuucugauuau

SEQ ID NO: 875796 - RNA, 19 nt, Homo sapiens
  misc_RNA (1)...(19): siRNA sense strand
ggauagugguucuuguucu

SEQ ID NO: 875797 - RNA, 19 nt, Homo sapiens
  misc_RNA (1)...(19): siRNA sense strand
cagggucaaauaugaaaua

SEQ ID NO: 875798 - RNA, 19 nt, Homo sapiens
  misc_RNA (1)...(19): siRNA sense strand
agagaggaaugagaaagaa

SEQ ID NO: 875799 - RNA, 19 nt, Homo sapiens
  misc_RNA (1)...(19): siRNA sense strand
gaagagggcuuugguuuga

SEQ ID NO: 875800 - RNA, 19 nt, Homo sapiens
  misc_RNA (1)...(19): siRNA sense strand
gauagagccucacuucuuu

SEQ ID NO: 875801 - RNA, 19 nt, Homo sapiens
  misc_RNA (1)...(19): siRNA sense strand
ggagacagcgcuauugaua

SEQ ID NO: 875802 - RNA, 19 nt, Homo sapiens
  misc_RNA (1)...(19): siRNA sense strand
gaagauuacuuuccugauc

SEQ ID NO: 875803 - RNA, 19 nt, Homo sapiens
  misc_RNA (1)...(19): siRNA sense strand
gcuaaugacuguugaaucu

SEQ ID NO: 875804 - RNA, 19 nt, Homo sapiens
  misc_RNA (1)...(19): siRNA sense strand
aaacacagcucgacaguac

SEQ ID NO: 875805 - RNA, 19 nt, Homo sapiens
  misc_RNA (1)...(19): siRNA sense strand
aaacaacuauugaggaaga

SEQ ID NO: 875806 - RNA, 19 nt, Homo sapiens
  misc_RNA (1)...(19): siRNA sense strand
gaaagucucaaucaagaaa

SEQ ID NO: 875807 - RNA, 19 nt, Homo sapiens
  misc_RNA (1)...(19): siRNA sense strand
guuacaaccuggaagauga

SEQ ID NO: 875808 - RNA, 19 nt, Homo sapiens
  misc_RNA (1)...(19): siRNA sense strand
aagaagaacugaaagaaca

SEQ ID NO: 875809 - RNA, 19 nt, Homo sapiens
  misc_RNA (1)...(19): siRNA sense strand
gcacuggccuuucauuugc

SEQ ID NO: 875810 - RNA, 19 nt, Homo sapiens
  misc_RNA (1)...(19): siRNA sense strand
ggagagcagauuuacauuu

SEQ ID NO: 875811 - RNA, 19 nt, Homo sapiens
  misc_RNA (1)...(19): siRNA sense strand
ugacacuccucucuacuuu

SEQ ID NO: 875812 - RNA, 19 nt, Homo sapiens
  misc_RNA (1)...(19): siRNA sense strand
gaaaauugcuaaugacugu

SEQ ID NO: 875813 - RNA, 19 nt, Homo sapiens
  misc_RNA (1)...(19): siRNA sense strand
gagagcagauuuacauuuu

SEQ ID NO: 875814 - RNA, 19 nt, Homo sapiens
  misc_RNA (1)...(19): siRNA sense strand
ccaacaaacuacccuugaa

SEQ ID NO: 875815 - RNA, 19 nt, Homo sapiens
  misc_RNA (1)...(19): siRNA sense strand
gguaagaagagucgaguaa

SEQ ID NO: 875816 - RNA, 19 nt, Homo sapiens
  misc_RNA (1)...(19): siRNA sense strand
ggacaacgaggucaaacuu

SEQ ID NO: 875817 - RNA, 19 nt, Homo sapiens
  misc_RNA (1)...(19): siRNA sense strand
gaaggauucuuucacuuac

SEQ ID NO: 875818 - RNA, 19 nt, Homo sapiens
  misc_RNA (1)...(19): siRNA sense strand
ccaaauaugaagagaguaa

SEQ ID NO: 875819 - RNA, 19 nt, Homo sapiens
  misc_RNA (1)...(19): siRNA sense strand
uaucaaggcagaagaauug

SEQ ID NO: 875820 - RNA, 19 nt, Homo sapiens
  misc_RNA (1)...(19): siRNA sense strand
gaagaugaccgcugugagu

SEQ ID NO: 875821 - RNA, 19 nt, Homo sapiens
  misc_RNA (1)...(19): siRNA sense strand
caaggcagaagaauuguuu

SEQ ID NO: 875822 - RNA, 19 nt, Homo sapiens
  misc_RNA (1)...(19): siRNA sense strand
ccacacaagcuauacauga

SEQ ID NO: 875823 - RNA, 19 nt, Homo sapiens
  misc_RNA (1)...(19): siRNA sense strand
ccacgaaaauugcuaauga

SEQ ID NO: 875824 - RNA, 19 nt, Homo sapiens
  misc_RNA (1)...(19): siRNA sense strand
gaaaugggccucugaaaau

SEQ ID NO: 875825 - RNA, 19 nt, Homo sapiens
  misc_RNA (1)...(19): siRNA sense strand
aggcuccgcuucccaaaua

SEQ ID NO: 875826 - RNA, 19 nt, Homo sapiens
  misc_RNA (1)...(19): siRNA sense strand
cagcaacugugucaccaaa

SEQ ID NO: 875827 - RNA, 19 nt, Homo sapiens
  misc_RNA (1)...(19): siRNA sense strand
gggcuucugucgaggguuu

SEQ ID NO: 875828 - RNA, 19 nt, Homo sapiens
  misc_RNA (1)...(19): siRNA sense strand
caaaggaaaucuugaaccu

SEQ ID NO: 875829 - RNA, 19 nt, Homo sapiens
  misc_RNA (1)...(19): siRNA sense strand
ggaauacuaucgccaacag

SEQ ID NO: 875830 - RNA, 19 nt, Homo sapiens
  misc_RNA (1)...(19): siRNA sense strand
acacuccucucuacuuuga

SEQ ID NO: 875831 - RNA, 19 nt, Homo sapiens
  misc_RNA (1)...(19): siRNA sense strand
gaaaagagugggaagagua

SEQ ID NO: 875832 - RNA, 19 nt, Homo sapiens
  misc_RNA (1)...(19): siRNA sense strand
ggcagucucuucuguuaug

SEQ ID NO: 875833 - RNA, 19 nt, Homo sapiens
  misc_RNA (1)...(19): siRNA sense strand
uuacuuuccugaucuaaug

SEQ ID NO: 875834 - RNA, 19 nt, Homo sapiens
  misc_RNA (1)...(19): siRNA sense strand
agauaaauccgucuugaaa

SEQ ID NO: 875835 - RNA, 19 nt, Homo sapiens
  misc_RNA (1)...(19): siRNA sense strand
uggcagcccuauauucaaa

SEQ ID NO: 875836 - RNA, 19 nt, Homo sapiens
  misc_RNA (1)...(19): siRNA sense strand
ggaagaguaugugcagauc

SEQ ID NO: 875837 - RNA, 19 nt, Homo sapiens
  misc_RNA (1)...(19): siRNA sense strand
uaagaagagucgaguaaaa

SEQ ID NO: 875838 - RNA, 19 nt, Homo sapiens
  misc_RNA (1)...(19): siRNA sense strand
gcaaagcaaaggccacaga

SEQ ID NO: 875839 - RNA, 19 nt, Homo sapiens
  misc_RNA (1)...(19): siRNA sense strand
aaaccacgaucuuucuguu

SEQ ID NO: 875840 - RNA, 19 nt, Homo sapiens
  misc_RNA (1)...(19): siRNA sense strand
gaagaagaacugaaagaac

SEQ ID NO: 875841 - RNA, 19 nt, Homo sapiens
  misc_RNA (1)...(19): siRNA sense strand
gcccaucucugcucagcuu

SEQ ID NO: 875842 - RNA, 19 nt, Homo sapiens
  misc_RNA (1)...(19): siRNA sense strand
gcaacugugucaccaaagg

SEQ ID NO: 875843 - RNA, 19 nt, Homo sapiens
  misc_RNA (1)...(19): siRNA sense strand
ugggcagucucuucuguua

SEQ ID NO: 875844 - RNA, 19 nt, Homo sapiens
  misc_RNA (1)...(19): siRNA sense strand
caacuauugaggaagauaa

SEQ ID NO: 875845 - RNA, 19 nt, Homo sapiens
  misc_RNA (1)...(19): siRNA sense strand
guguggcucugcaggauuu

SEQ ID NO: 875846 - RNA, 19 nt, Homo sapiens
  misc_RNA (1)...(19): siRNA sense strand
gcgcuuaggugagaaagag

SEQ ID NO: 875847 - RNA, 19 nt, Homo sapiens
  misc_RNA (1)...(19): siRNA sense strand
gggcuggagagcagauuua

SEQ ID NO: 875848 - RNA, 19 nt, Homo sapiens
  misc_RNA (1)...(19): siRNA sense strand
aaacaucgcacuggccuuu

SEQ ID NO: 875849 - RNA, 19 nt, Homo sapiens
  misc_RNA (1)...(19): siRNA sense strand
gagccucacuucuuuuaaa

SEQ ID NO: 875850 - RNA, 19 nt, Homo sapiens
  misc_RNA (1)...(19): siRNA sense strand
guaagaagagucgaguaaa

SEQ ID NO: 875851 - RNA, 19 nt, Homo sapiens
  misc_RNA (1)...(19): siRNA sense strand
gaucacuacugguuacaac

SEQ ID NO: 875852 - RNA, 19 nt, Homo sapiens
  misc_RNA (1)...(19): siRNA sense strand
aagaagagggcuuugguuu

SEQ ID NO: 875853 - RNA, 19 nt, Homo sapiens
  misc_RNA (1)...(19): siRNA sense strand
augaaagucucaaucaaga

SEQ ID NO: 875854 - RNA, 19 nt, Homo sapiens
  misc_RNA (1)...(19): siRNA sense strand
aaauugcgcuuaggugaga

SEQ ID NO: 875855 - RNA, 19 nt, Homo sapiens
  misc_RNA (1)...(19): siRNA sense strand
gacagacucuacgccauga

SEQ ID NO: 875856 - RNA, 19 nt, Homo sapiens
  misc_RNA (1)...(19): siRNA sense strand
guacgccuacuucuauaaa

SEQ ID NO: 875857 - RNA, 19 nt, Homo sapiens
  misc_RNA (1)...(19): siRNA sense strand
gaauaugacacuccucucu

SEQ ID NO: 875858 - RNA, 19 nt, Homo sapiens
  misc_RNA (1)...(19): siRNA sense strand
ucuugaaccugaccaguga

SEQ ID NO: 875859 - RNA, 19 nt, Homo sapiens
  misc_RNA (1)...(19): siRNA sense strand
ugaagaagaacugaaagaa

SEQ ID NO: 875860 - RNA, 19 nt, Homo sapiens
  misc_RNA (1)...(19): siRNA sense strand
gaagaugaaguucgguauc

SEQ ID NO: 875861 - RNA, 19 nt, Homo sapiens
  misc_RNA (1)...(19): siRNA sense strand
cuguaugacugaagaagaa

SEQ ID NO: 875862 - RNA, 19 nt, Homo sapiens
  misc_RNA (1)...(19): siRNA sense strand
caauaacucacacgacaga

SEQ ID NO: 875863 - RNA, 19 nt, Homo sapiens
  misc_RNA (1)...(19): siRNA sense strand
ccaacggccugaucacuac

SEQ ID NO: 875864 - RNA, 19 nt, Homo sapiens
  misc_RNA (1)...(19): siRNA sense strand
cacacaagcuauacaugau

SEQ ID NO: 875865 - RNA, 19 nt, Homo sapiens
  misc_RNA (1)...(19): siRNA sense strand
ccaaaggaucuucuucaga

SEQ ID NO: 875866 - RNA, 19 nt, Homo sapiens
  misc_RNA (1)...(19): siRNA sense strand
gcccuuauauucucaagac

SEQ ID NO: 875867 - RNA, 19 nt, Homo sapiens
  misc_RNA (1)...(19): siRNA sense strand
agauagagccucacuucuu

SEQ ID NO: 875868 - RNA, 19 nt, Homo sapiens
  misc_RNA (1)...(19): siRNA sense strand
caacgcagaguuugugauc

SEQ ID NO: 875869 - RNA, 19 nt, Homo sapiens
  misc_RNA (1)...(19): siRNA sense strand
caacaaacuacccuugaag

SEQ ID NO: 875870 - RNA, 19 nt, Homo sapiens
  misc_RNA (1)...(19): siRNA sense strand
cugcuggaguuaaggagua

SEQ ID NO: 875871 - RNA, 19 nt, Homo sapiens
  misc_RNA (1)...(19): siRNA sense strand
caaagcaaaggccacagaa

SEQ ID NO: 875872 - RNA, 19 nt, Homo sapiens
  misc_RNA (1)...(19): siRNA sense strand
gaacaucagagaggcaauc

SEQ ID NO: 875873 - RNA, 19 nt, Homo sapiens
  misc_RNA (1)...(19): siRNA sense strand
gacaacgaggucaaacuuu

SEQ ID NO: 875874 - RNA, 19 nt, Homo sapiens
  misc_RNA (1)...(19): siRNA sense strand
gacugaagaagaacugaaa

SEQ ID NO: 875875 - RNA, 19 nt, Homo sapiens
  misc_RNA (1)...(19): siRNA sense strand
gccaacagauggaggaaaa

SEQ ID NO: 875876 - RNA, 19 nt, Homo sapiens
  misc_RNA (1)...(19): siRNA sense strand
ggugggcagucucuucugu

SEQ ID NO: 875877 - RNA, 19 nt, Homo sapiens
  misc_RNA (1)...(19): siRNA sense strand
gccaaaggaucuucuucag

SEQ ID NO: 875878 - RNA, 19 nt, Homo sapiens
  misc_RNA (1)...(19): siRNA sense strand
guaaagagugcagcuguca

SEQ ID NO: 875879 - RNA, 19 nt, Homo sapiens
  misc_RNA (1)...(19): siRNA sense strand
aaacuuuggacauuucuug

SEQ ID NO: 875880 - RNA, 19 nt, Homo sapiens
  misc_RNA (1)...(19): siRNA sense strand
uuccugaucuaaugaaaug

SEQ ID NO: 875881 - RNA, 19 nt, Homo sapiens
  misc_RNA (1)...(19): siRNA sense strand
gcagucucuucuguuauga

SEQ ID NO: 875882 - RNA, 19 nt, Homo sapiens
  misc_RNA (1)...(19): siRNA sense strand
agaguaaccuugggcuguu

SEQ ID NO: 875883 - RNA, 19 nt, Homo sapiens
  misc_RNA (1)...(19): siRNA sense strand
ucccaaauaugaagagagu

SEQ ID NO: 875884 - RNA, 19 nt, Homo sapiens
  misc_RNA (1)...(19): siRNA sense strand
cugauuccuuuaugggaua

SEQ ID NO: 875885 - RNA, 19 nt, Homo sapiens
  misc_RNA (1)...(19): siRNA sense strand
caugaaggccgaggucuug

SEQ ID NO: 875886 - RNA, 19 nt, Homo sapiens
  misc_RNA (1)...(19): siRNA sense strand
cuccgaguauucuguauga

SEQ ID NO: 875887 - RNA, 19 nt, Homo sapiens
  misc_RNA (1)...(19): siRNA sense strand
ggacucugguugagaaaau

SEQ ID NO: 875888 - RNA, 19 nt, Homo sapiens
  misc_RNA (1)...(19): siRNA sense strand
ucagagaggcaaucagcaa

SEQ ID NO: 875889 - RNA, 19 nt, Homo sapiens
  misc_RNA (1)...(19): siRNA sense strand
gggaagaguaugugcagau

SEQ ID NO: 875890 - RNA, 19 nt, Homo sapiens
  misc_RNA (1)...(19): siRNA sense strand
gccaucaaauugcgcuuag

SEQ ID NO: 875891 - RNA, 19 nt, Homo sapiens
  misc_RNA (1)...(19): siRNA sense strand
agaagagggcuuugguuug

SEQ ID NO: 875892 - RNA, 19 nt, Homo sapiens
  misc_RNA (1)...(19): siRNA sense strand
ggccugaucacuacugguu

SEQ ID NO: 875893 - RNA, 19 nt, Homo sapiens
  misc_RNA (1)...(19): siRNA sense strand
gccaacaaacuacccuuga

SEQ ID NO: 875894 - RNA, 19 nt, Homo sapiens
  misc_RNA (1)...(19): siRNA sense strand
uaucuucaguccacacaag

SEQ ID NO: 875895 - RNA, 19 nt, Homo sapiens
  misc_RNA (1)...(19): siRNA sense strand
gcacugcuggaguuaagga

SEQ ID NO: 875896 - RNA, 19 nt, Homo sapiens
  misc_RNA (1)...(19): siRNA sense strand
gaguaaccuugggcuguug

SEQ ID NO: 875897 - RNA, 19 nt, Homo sapiens
  misc_RNA (1)...(19): siRNA sense strand
gaaaugguuaacuucaaag

SEQ ID NO: 875898 - RNA, 19 nt, Homo sapiens
  misc_RNA (1)...(19): siRNA sense strand
gaaaaugaaagucucaauc

SEQ ID NO: 875899 - RNA, 19 nt, Homo sapiens
  misc_RNA (1)...(19): siRNA sense strand
guagcaggcuuguuaaaua

SEQ ID NO: 875900 - RNA, 19 nt, Homo sapiens
  misc_RNA (1)...(19): siRNA sense strand
gaacuaaaccagacuguaa

SEQ ID NO: 875901 - RNA, 19 nt, Homo sapiens
  misc_RNA (1)...(19): siRNA sense strand
caacaagugucccuuaauu

SEQ ID NO: 875902 - RNA, 19 nt, Homo sapiens
  misc_RNA (1)...(19): siRNA sense strand
ccaaugaacugguuguaaa

SEQ ID NO: 875903 - RNA, 19 nt, Homo sapiens
  misc_RNA (1)...(19): siRNA sense strand
gagauaagaucagaaacaa

SEQ ID NO: 875904 - RNA, 19 nt, Homo sapiens
  misc_RNA (1)...(19): siRNA sense strand
ucaagaacaugcaaauuug

SEQ ID NO: 875905 - RNA, 19 nt, Homo sapiens
  misc_RNA (1)...(19): siRNA sense strand
ccaaggagaugcuaaguag

SEQ ID NO: 875906 - RNA, 19 nt, Homo sapiens
  misc_RNA (1)...(19): siRNA sense strand
gaaggcaucuaaucuacug

SEQ ID NO: 875907 - RNA, 19 nt, Homo sapiens
  misc_RNA (1)...(19): siRNA sense strand
gaaaggagcaggauguauc

SEQ ID NO: 875908 - RNA, 19 nt, Homo sapiens
  misc_RNA (1)...(19): siRNA sense strand
aaaccagacuguaaacauu

SEQ ID NO: 875909 - RNA, 19 nt, Homo sapiens
  misc_RNA (1)...(19): siRNA sense strand
gaucacugcugccaaggaa

SEQ ID NO: 875910 - RNA, 19 nt, Homo sapiens
  misc_RNA (1)...(19): siRNA sense strand
ggauucagauuucccaguu

SEQ ID NO: 875911 - RNA, 19 nt, Homo sapiens
  misc_RNA (1)...(19): siRNA sense strand
uaaagugaguuacacauca

SEQ ID NO: 875912 - RNA, 19 nt, Homo sapiens
  misc_RNA (1)...(19): siRNA sense strand
gaacuuucuuguaccaaug

SEQ ID NO: 875913 - RNA, 19 nt, Homo sapiens
  misc_RNA (1)...(19): siRNA sense strand
caagaugucugguugugau

SEQ ID NO: 875914 - RNA, 19 nt, Homo sapiens
  misc_RNA (1)...(19): siRNA sense strand
gcagaugucauugcugaua

SEQ ID NO: 875915 - RNA, 19 nt, Homo sapiens
  misc_RNA (1)...(19): siRNA sense strand
gaacaacuggucaggauuc

SEQ ID NO: 875916 - RNA, 19 nt, Homo sapiens
  misc_RNA (1)...(19): siRNA sense strand
guaaguauaacaucucuga

SEQ ID NO: 875917 - RNA, 19 nt, Homo sapiens
  misc_RNA (1)...(19): siRNA sense strand
aaacguaugcagaucuuua

SEQ ID NO: 875918 - RNA, 19 nt, Homo sapiens
  misc_RNA (1)...(19): siRNA sense strand
gcagcuggcuuuccucaag

SEQ ID NO: 875919 - RNA, 19 nt, Homo sapiens
  misc_RNA (1)...(19): siRNA sense strand
caaaguagaaagugaaugu

SEQ ID NO: 875920 - RNA, 19 nt, Homo sapiens
  misc_RNA (1)...(19): siRNA sense strand
ggagauaagaucagaaaca

SEQ ID NO: 875921 - RNA, 19 nt, Homo sapiens
  misc_RNA (1)...(19): siRNA sense strand
ugucauugcugauauacaa

SEQ ID NO: 875922 - RNA, 19 nt, Homo sapiens
  misc_RNA (1)...(19): siRNA sense strand
aguaauaacucacuaccuu

SEQ ID NO: 875923 - RNA, 19 nt, Homo sapiens
  misc_RNA (1)...(19): siRNA sense strand
uaacaucucugaucaugcu

SEQ ID NO: 875924 - RNA, 19 nt, Homo sapiens
  misc_RNA (1)...(19): siRNA sense strand
gaacuugaugggaaagaaa

SEQ ID NO: 875925 - RNA, 19 nt, Homo sapiens
  misc_RNA (1)...(19): siRNA sense strand
caaacugucccaccuuaaa

SEQ ID NO: 875926 - RNA, 19 nt, Homo sapiens
  misc_RNA (1)...(19): siRNA sense strand
guagaaagugaauguguuu

SEQ ID NO: 875927 - RNA, 19 nt, Homo sapiens
  misc_RNA (1)...(19): siRNA sense strand
gcacauacaggaacaacug

SEQ ID NO: 875928 - RNA, 19 nt, Homo sapiens
  misc_RNA (1)...(19): siRNA sense strand
aaaagcagcuguaaaguga

SEQ ID NO: 875929 - RNA, 19 nt, Homo sapiens
  misc_RNA (1)...(19): siRNA sense strand
gaacaaaagcucuacauuc

SEQ ID NO: 875930 - RNA, 19 nt, Homo sapiens
  misc_RNA (1)...(19): siRNA sense strand
gcagaucaugaaccaaaua

SEQ ID NO: 875931 - RNA, 19 nt, Homo sapiens
  misc_RNA (1)...(19): siRNA sense strand
gauucagauuucccaguua

SEQ ID NO: 875932 - RNA, 19 nt, Homo sapiens
  misc_RNA (1)...(19): siRNA sense strand
aaugguagcaggcuuguua

SEQ ID NO: 875933 - RNA, 19 nt, Homo sapiens
  misc_RNA (1)...(19): siRNA sense strand
ggaacuugaugggaaagaa

SEQ ID NO: 875934 - RNA, 19 nt, Homo sapiens
  misc_RNA (1)...(19): siRNA sense strand
uauaacaucucugaucaug

SEQ ID NO: 875935 - RNA, 19 nt, Homo sapiens
  misc_RNA (1)...(19): siRNA sense strand
aggcugcgcucaaauaaga

SEQ ID NO: 875936 - RNA, 19 nt, Homo sapiens
  misc_RNA (1)...(19): siRNA sense strand
ggguagagcagaugucauu

SEQ ID NO: 875937 - RNA, 19 nt, Homo sapiens
  misc_RNA (1)...(19): siRNA sense strand
aggaagggcuggaaggaaa

SEQ ID NO: 875938 - RNA, 19 nt, Homo sapiens
  misc_RNA (1)...(19): siRNA sense strand
ucaaguggucucugucaua

SEQ ID NO: 875939 - RNA, 19 nt, Homo sapiens
  misc_RNA (1)...(19): siRNA sense strand
gcuaaguagugaccagaga

SEQ ID NO: 875940 - RNA, 19 nt, Homo sapiens
  misc_RNA (1)...(19): siRNA sense strand
caaguggucucugucauag

SEQ ID NO: 875941 - RNA, 19 nt, Homo sapiens
  misc_RNA (1)...(19): siRNA sense strand
agagaugccuuuagcaaca

SEQ ID NO: 875942 - RNA, 19 nt, Homo sapiens
  misc_RNA (1)...(19): siRNA sense strand
gagguaaaccacaaccaaa

SEQ ID NO: 875943 - RNA, 19 nt, Homo sapiens
  misc_RNA (1)...(19): siRNA sense strand
cagaccagaugaaugcaaa

SEQ ID NO: 875944 - RNA, 19 nt, Homo sapiens
  misc_RNA (1)...(19): siRNA sense strand
caucucugaucaugcuaua

SEQ ID NO: 875945 - RNA, 19 nt, Homo sapiens
  misc_RNA (1)...(19): siRNA sense strand
ggagguaaaccacaaccaa

SEQ ID NO: 875946 - RNA, 19 nt, Homo sapiens
  misc_RNA (1)...(19): siRNA sense strand
caacuggucaggauucaga

SEQ ID NO: 875947 - RNA, 19 nt, Homo sapiens
  misc_RNA (1)...(19): siRNA sense strand
ggacuguaguaauaagcuu

SEQ ID NO: 875948 - RNA, 19 nt, Homo sapiens
  misc_RNA (1)...(19): siRNA sense strand
caguaagccuagagagaaa

SEQ ID NO: 875949 - RNA, 19 nt, Homo sapiens
  misc_RNA (1)...(19): siRNA sense strand
uagcaggcuuguuaaauag

SEQ ID NO: 875950 - RNA, 19 nt, Homo sapiens
  misc_RNA (1)...(19): siRNA sense strand
ccaguaagccuagagagaa

SEQ ID NO: 875951 - RNA, 19 nt, Homo sapiens
  misc_RNA (1)...(19): siRNA sense strand
cucaagaacaugcaaauuu

SEQ ID NO: 875952 - RNA, 19 nt, Homo sapiens
  misc_RNA (1)...(19): siRNA sense strand
gaacuggaugcugcacaua

SEQ ID NO: 875953 - RNA, 19 nt, Homo sapiens
  misc_RNA (1)...(19): siRNA sense strand
uugaaacacucgaucagaa

SEQ ID NO: 875954 - RNA, 19 nt, Homo sapiens
  misc_RNA (1)...(19): siRNA sense strand
aaacagaccagaugaaugc

SEQ ID NO: 875955 - RNA, 19 nt, Homo sapiens
  misc_RNA (1)...(19): siRNA sense strand
gaaaacguaugcagaucuu

SEQ ID NO: 875956 - RNA, 19 nt, Homo sapiens
  misc_RNA (1)...(19): siRNA sense strand
gcaagagaaacuggcauuu

SEQ ID NO: 875957 - RNA, 19 nt, Homo sapiens
  misc_RNA (1)...(19): siRNA sense strand
gcaggcuuguuaaauagug

SEQ ID NO: 875958 - RNA, 19 nt, Homo sapiens
  misc_RNA (1)...(19): siRNA sense strand
cagaugucauugcugauau

SEQ ID NO: 875959 - RNA, 19 nt, Homo sapiens
  misc_RNA (1)...(19): siRNA sense strand
gcauuuaaacaaagagaug

SEQ ID NO: 875960 - RNA, 19 nt, Homo sapiens
  misc_RNA (1)...(19): siRNA sense strand
gugaaggcaucuaaucuac

SEQ ID NO: 875961 - RNA, 19 nt, Homo sapiens
  misc_RNA (1)...(19): siRNA sense strand
guuauguucuccaguuuua

SEQ ID NO: 875962 - RNA, 19 nt, Homo sapiens
  misc_RNA (1)...(19): siRNA sense strand
aguauaacaucucugauca

SEQ ID NO: 875963 - RNA, 19 nt, Homo sapiens
  misc_RNA (1)...(19): siRNA sense strand
gcagcuguaaagugaguua

SEQ ID NO: 875964 - RNA, 19 nt, Homo sapiens
  misc_RNA (1)...(19): siRNA sense strand
agaugucauugcugauaua

SEQ ID NO: 875965 - RNA, 19 nt, Homo sapiens
  misc_RNA (1)...(19): siRNA sense strand
ccacagaagguaugguaga

SEQ ID NO: 875966 - RNA, 19 nt, Homo sapiens
  misc_RNA (1)...(19): siRNA sense strand
gagccaucacccuccauua

SEQ ID NO: 875967 - RNA, 19 nt, Homo sapiens
  misc_RNA (1)...(19): siRNA sense strand
caggagauaagaucagaaa

SEQ ID NO: 875968 - RNA, 19 nt, Homo sapiens
  misc_RNA (1)...(19): siRNA sense strand
ggauaucucuagcugucau

SEQ ID NO: 875969 - RNA, 19 nt, Homo sapiens
  misc_RNA (1)...(19): siRNA sense strand
uacaaaccauucccauuca

SEQ ID NO: 875970 - RNA, 19 nt, Homo sapiens
  misc_RNA (1)...(19): siRNA sense strand
gcugauauacaaaccauuc

SEQ ID NO: 875971 - RNA, 19 nt, Homo sapiens
  misc_RNA (1)...(19): siRNA sense strand
cagaagguaugguagacau

SEQ ID NO: 875972 - RNA, 19 nt, Homo sapiens
  misc_RNA (1)...(19): siRNA sense strand
gccaaggagaugcuaagua

SEQ ID NO: 875973 - RNA, 19 nt, Homo sapiens
  misc_RNA (1)...(19): siRNA sense strand
gaucagaaacaaaauggua

SEQ ID NO: 875974 - RNA, 19 nt, Homo sapiens
  misc_RNA (1)...(19): siRNA sense strand
auacaaaccauucccauuc

SEQ ID NO: 875975 - RNA, 19 nt, Homo sapiens
  misc_RNA (1)...(19): siRNA sense strand
gaagaaaacguaugcagau

SEQ ID NO: 875976 - RNA, 19 nt, Homo sapiens
  misc_RNA (1)...(19): siRNA sense strand
ggaaaggagcaggauguau

SEQ ID NO: 875977 - RNA, 19 nt, Homo sapiens
  misc_RNA (1)...(19): siRNA sense strand
gcugucaucguguaagaaa

SEQ ID NO: 875978 - RNA, 19 nt, Homo sapiens
  misc_RNA (1)...(19): siRNA sense strand
uucaaacugucccaccuua

SEQ ID NO: 875979 - RNA, 19 nt, Homo sapiens
  misc_RNA (1)...(19): siRNA sense strand
ccauucccauucagacaaa

SEQ ID NO: 875980 - RNA, 19 nt, Homo sapiens
  misc_RNA (1)...(19): siRNA sense strand
aaucaacaagugucccuua

SEQ ID NO: 875981 - RNA, 19 nt, Homo sapiens
  misc_RNA (1)...(19): siRNA sense strand
aaaucagccugcaaguuga

SEQ ID NO: 875982 - RNA, 19 nt, Homo sapiens
  misc_RNA (1)...(19): siRNA sense strand
aguggucucugucauagaa

SEQ ID NO: 875983 - RNA, 19 nt, Homo sapiens
  misc_RNA (1)...(19): siRNA sense strand
aaaaggaaauggcugauuc

SEQ ID NO: 875984 - RNA, 19 nt, Homo sapiens
  misc_RNA (1)...(19): siRNA sense strand
cagaucaugaaccaaauaa

SEQ ID NO: 875985 - RNA, 19 nt, Homo sapiens
  misc_RNA (1)...(19): siRNA sense strand
ggaaaaguguccagacucu

SEQ ID NO: 875986 - RNA, 19 nt, Homo sapiens
  misc_RNA (1)...(19): siRNA sense strand
ugaacuuucuuguaccaau

SEQ ID NO: 875987 - RNA, 19 nt, Homo sapiens
  misc_RNA (1)...(19): siRNA sense strand
gaccagagagagacuguca

SEQ ID NO: 875988 - RNA, 19 nt, Homo sapiens
  misc_RNA (1)...(19): siRNA sense strand
aguagaaagugaauguguu

SEQ ID NO: 875989 - RNA, 19 nt, Homo sapiens
  misc_RNA (1)...(19): siRNA sense strand
uagcugucaucguguaaga

SEQ ID NO: 875990 - RNA, 19 nt, Homo sapiens
  misc_RNA (1)...(19): siRNA sense strand
ccaggcugcgcucaaauaa

SEQ ID NO: 875991 - RNA, 19 nt, Homo sapiens
  misc_RNA (1)...(19): siRNA sense strand
cgugaaggcaucuaaucua

SEQ ID NO: 875992 - RNA, 19 nt, Homo sapiens
  misc_RNA (1)...(19): siRNA sense strand
guaaacaaaguagaaagug

SEQ ID NO: 875993 - RNA, 19 nt, Homo sapiens
  misc_RNA (1)...(19): siRNA sense strand
ugaucaugcuauacaagaa

SEQ ID NO: 875994 - RNA, 19 nt, Homo sapiens
  misc_RNA (1)...(19): siRNA sense strand
ggaacaacuggucaggauu

SEQ ID NO: 875995 - RNA, 19 nt, Homo sapiens
  misc_RNA (1)...(19): siRNA sense strand
cuacugcauuuaaacaaag

SEQ ID NO: 875996 - RNA, 19 nt, Homo sapiens
  misc_RNA (1)...(19): siRNA sense strand
uaaaccagacuguaaacau

SEQ ID NO: 875997 - RNA, 19 nt, Homo sapiens
  misc_RNA (1)...(19): siRNA sense strand
uaauaagcuugcagaaggu

SEQ ID NO: 875998 - RNA, 19 nt, Homo sapiens
  misc_RNA (1)...(19): siRNA sense strand
aggaacaacuggucaggau

SEQ ID NO: 875999 - RNA, 19 nt, Homo sapiens
  misc_RNA (1)...(19): siRNA sense strand
ggaaggagcuguaaagaga

SEQ ID NO: 876000 - RNA, 19 nt, Homo sapiens
  misc_RNA (1)...(19): siRNA sense strand
gcacaaaguugcacucuca

SEQ ID NO: 876001 - RNA, 19 nt, Homo sapiens
  misc_RNA (1)...(19): siRNA sense strand
gaagaaacacuaaaccuuu

SEQ ID NO: 876002 - RNA, 19 nt, Homo sapiens
  misc_RNA (1)...(19): siRNA sense strand
acacuaugcuuacugaaua

SEQ ID NO: 876003 - RNA, 19 nt, Homo sapiens
  misc_RNA (1)...(19): siRNA sense strand
acaagcaacuucagcauuu

SEQ ID NO: 876004 - RNA, 19 nt, Homo sapiens
  misc_RNA (1)...(19): siRNA sense strand
ggagugauaugguccgauu

SEQ ID NO: 876005 - RNA, 19 nt, Homo sapiens
  misc_RNA (1)...(19): siRNA sense strand
gaugacaacacuaugcuua

SEQ ID NO: 876006 - RNA, 19 nt, Homo sapiens
  misc_RNA (1)...(19): siRNA sense strand
gcgaggagcugagaacaga

SEQ ID NO: 876007 - RNA, 19 nt, Homo sapiens
  misc_RNA (1)...(19): siRNA sense strand
gaauaucacccucuagguu

SEQ ID NO: 876008 - RNA, 19 nt, Homo sapiens
  misc_RNA (1)...(19): siRNA sense strand
ggaagaaacacuaaaccuu

SEQ ID NO: 876009 - RNA, 19 nt, Homo sapiens
  misc_RNA (1)...(19): siRNA sense strand
gagccagacucccucagaa

SEQ ID NO: 876010 - RNA, 19 nt, Homo sapiens
  misc_RNA (1)...(19): siRNA sense strand
gaugaauacucuacucuac

SEQ ID NO: 876011 - RNA, 19 nt, Homo sapiens
  misc_RNA (1)...(19): siRNA sense strand
gagcaacuguggcccuaug

SEQ ID NO: 876012 - RNA, 19 nt, Homo sapiens
  misc_RNA (1)...(19): siRNA sense strand
ggucuuggauacacuuaga

SEQ ID NO: 876013 - RNA, 19 nt, Homo sapiens
  misc_RNA (1)...(19): siRNA sense strand
gacuaugucagcaucauua

SEQ ID NO: 876014 - RNA, 19 nt, Homo sapiens
  misc_RNA (1)...(19): siRNA sense strand
gccuggagaugaaagauga

SEQ ID NO: 876015 - RNA, 19 nt, Homo sapiens
  misc_RNA (1)...(19): siRNA sense strand
ucccagacaucuccaguuu

SEQ ID NO: 876016 - RNA, 19 nt, Homo sapiens
  misc_RNA (1)...(19): siRNA sense strand
gaugagaagauugacauuu

SEQ ID NO: 876017 - RNA, 19 nt, Homo sapiens
  misc_RNA (1)...(19): siRNA sense strand
ccucuagguuccuugagua

SEQ ID NO: 876018 - RNA, 19 nt, Homo sapiens
  misc_RNA (1)...(19): siRNA sense strand
ugaguaaccuggaagaaac

SEQ ID NO: 876019 - RNA, 19 nt, Homo sapiens
  misc_RNA (1)...(19): siRNA sense strand
augagaagauugacauuug

SEQ ID NO: 876020 - RNA, 19 nt, Homo sapiens
  misc_RNA (1)...(19): siRNA sense strand
gcugagaacagaagugaga

SEQ ID NO: 876021 - RNA, 19 nt, Homo sapiens
  misc_RNA (1)...(19): siRNA sense strand
acaacacuaugcuuacuga

SEQ ID NO: 876022 - RNA, 19 nt, Homo sapiens
  misc_RNA (1)...(19): siRNA sense strand
cuucaucgcuccucgacaa

SEQ ID NO: 876023 - RNA, 19 nt, Homo sapiens
  misc_RNA (1)...(19): siRNA sense strand
gagcugagaacagaaguga

SEQ ID NO: 876024 - RNA, 19 nt, Homo sapiens
  misc_RNA (1)...(19): siRNA sense strand
cgauuccauuuguuugaua

SEQ ID NO: 876025 - RNA, 19 nt, Homo sapiens
  misc_RNA (1)...(19): siRNA sense strand
cauaugaugagaagauuga

SEQ ID NO: 876026 - RNA, 19 nt, Homo sapiens
  misc_RNA (1)...(19): siRNA sense strand
caugaugucucaggcaaga

SEQ ID NO: 876027 - RNA, 19 nt, Homo sapiens
  misc_RNA (1)...(19): siRNA sense strand
ucacgcugcuuggcuauug

SEQ ID NO: 876028 - RNA, 19 nt, Homo sapiens
  misc_RNA (1)...(19): siRNA sense strand
gagaggacgugccuuucca

SEQ ID NO: 876029 - RNA, 19 nt, Homo sapiens
  misc_RNA (1)...(19): siRNA sense strand
uauggucacuucaggauag

SEQ ID NO: 876030 - RNA, 19 nt, Homo sapiens
  misc_RNA (1)...(19): siRNA sense strand
gacugcagaugcugaaauc

SEQ ID NO: 876031 - RNA, 19 nt, Homo sapiens
  misc_RNA (1)...(19): siRNA sense strand
gguccgauuccauuuguuu

SEQ ID NO: 876032 - RNA, 19 nt, Homo sapiens
  misc_RNA (1)...(19): siRNA sense strand
gaucucaugcccucauaug

SEQ ID NO: 876033 - RNA, 19 nt, Homo sapiens
  misc_RNA (1)...(19): siRNA sense strand
ggacugcagaugcugaaau

SEQ ID NO: 876034 - RNA, 19 nt, Homo sapiens
  misc_RNA (1)...(19): siRNA sense strand
cccaguaucugcuaacaag

SEQ ID NO: 876035 - RNA, 19 nt, Homo sapiens
  misc_RNA (1)...(19): siRNA sense strand
ggacuaugucagcaucauu

SEQ ID NO: 876036 - RNA, 19 nt, Homo sapiens
  misc_RNA (1)...(19): siRNA sense strand
uaaccuggaagaaacacua

SEQ ID NO: 876037 - RNA, 19 nt, Homo sapiens
  misc_RNA (1)...(19): siRNA sense strand
ccagacaucuccaguuucc

SEQ ID NO: 876038 - RNA, 19 nt, Homo sapiens
  misc_RNA (1)...(19): siRNA sense strand
gcuccgggaugcuggugaa

SEQ ID NO: 876039 - RNA, 19 nt, Homo sapiens
  misc_RNA (1)...(19): siRNA sense strand
acuuagagaugccaugaug

SEQ ID NO: 876040 - RNA, 19 nt, Homo sapiens
  misc_RNA (1)...(19): siRNA sense strand
ugagaagauugacauuugg

SEQ ID NO: 876041 - RNA, 19 nt, Homo sapiens
  misc_RNA (1)...(19): siRNA sense strand
uaccagaaggucuuggaua

SEQ ID NO: 876042 - RNA, 19 nt, Homo sapiens
  misc_RNA (1)...(19): siRNA sense strand
caggauaggacagaugaaa

SEQ ID NO: 876043 - RNA, 19 nt, Homo sapiens
  misc_RNA (1)...(19): siRNA sense strand
gagaagauugacauuugga

SEQ ID NO: 876044 - RNA, 19 nt, Homo sapiens
  misc_RNA (1)...(19): siRNA sense strand
agagagucuuucugucuga

SEQ ID NO: 876045 - RNA, 19 nt, Homo sapiens
  misc_RNA (1)...(19): siRNA sense strand
gaaggucuuggauacacuu

SEQ ID NO: 876046 - RNA, 19 nt, Homo sapiens
  misc_RNA (1)...(19): siRNA sense strand
guggaaggagcacaaaguu

SEQ ID NO: 876047 - RNA, 19 nt, Homo sapiens
  misc_RNA (1)...(19): siRNA sense strand
ccagacucccucagaaaga

SEQ ID NO: 876048 - RNA, 19 nt, Homo sapiens
  misc_RNA (1)...(19): siRNA sense strand
ugaauacucuacucuaccu

SEQ ID NO: 876049 - RNA, 19 nt, Homo sapiens
  misc_RNA (1)...(19): siRNA sense strand
ugacaacacuaugcuuacu

SEQ ID NO: 876050 - RNA, 19 nt, Homo sapiens
  misc_RNA (1)...(19): siRNA sense strand
gugaggaugacaacacuau

SEQ ID NO: 876051 - RNA, 19 nt, Homo sapiens
  misc_RNA (1)...(19): siRNA sense strand
gggaaggagcuguaaagag

SEQ ID NO: 876052 - RNA, 19 nt, Homo sapiens
  misc_RNA (1)...(19): siRNA sense strand
agacaucuccaguuuccuu

SEQ ID NO: 876053 - RNA, 19 nt, Homo sapiens
  misc_RNA (1)...(19): siRNA sense strand
ccgggaugcuggugaagug

SEQ ID NO: 876054 - RNA, 19 nt, Homo sapiens
  misc_RNA (1)...(19): siRNA sense strand
ugaugaauacucuacucua

SEQ ID NO: 876055 - RNA, 19 nt, Homo sapiens
  misc_RNA (1)...(19): siRNA sense strand
gaaggagcacaaaguugca

SEQ ID NO: 876056 - RNA, 19 nt, Homo sapiens
  misc_RNA (1)...(19): siRNA sense strand
cagaaggucuuggauacac

SEQ ID NO: 876057 - RNA, 19 nt, Homo sapiens
  misc_RNA (1)...(19): siRNA sense strand
ggagcuggccauggacuau

SEQ ID NO: 876058 - RNA, 19 nt, Homo sapiens
  misc_RNA (1)...(19): siRNA sense strand
gaaaagcagccccagaaca

SEQ ID NO: 876059 - RNA, 19 nt, Homo sapiens
  misc_RNA (1)...(19): siRNA sense strand
uaacaagcaacuucagcau

SEQ ID NO: 876060 - RNA, 19 nt, Homo sapiens
  misc_RNA (1)...(19): siRNA sense strand
agauugacauuuggaagau

SEQ ID NO: 876061 - RNA, 19 nt, Homo sapiens
  misc_RNA (1)...(19): siRNA sense strand
aagauugacauuuggaaga

SEQ ID NO: 876062 - RNA, 19 nt, Homo sapiens
  misc_RNA (1)...(19): siRNA sense strand
gcuuggcuauugugaggau

SEQ ID NO: 876063 - RNA, 19 nt, Homo sapiens
  misc_RNA (1)...(19): siRNA sense strand
cacuaugcuuacugaauau

SEQ ID NO: 876064 - RNA, 19 nt, Homo sapiens
  misc_RNA (1)...(19): siRNA sense strand
gaggaugacaacacuaugc

SEQ ID NO: 876065 - RNA, 19 nt, Homo sapiens
  misc_RNA (1)...(19): siRNA sense strand
ggcaagagagaugcuguga

SEQ ID NO: 876066 - RNA, 19 nt, Homo sapiens
  misc_RNA (1)...(19): siRNA sense strand
accagaaggucuuggauac

SEQ ID NO: 876067 - RNA, 19 nt, Homo sapiens
  misc_RNA (1)...(19): siRNA sense strand
uacugaauaucacccucua

SEQ ID NO: 876068 - RNA, 19 nt, Homo sapiens
  misc_RNA (1)...(19): siRNA sense strand
ccaaggcacacauguuguc

SEQ ID NO: 876069 - RNA, 19 nt, Homo sapiens
  misc_RNA (1)...(19): siRNA sense strand
acacuuagagaugccauga

SEQ ID NO: 876070 - RNA, 19 nt, Homo sapiens
  misc_RNA (1)...(19): siRNA sense strand
caucuccaguuuccuucug

SEQ ID NO: 876071 - RNA, 19 nt, Homo sapiens
  misc_RNA (1)...(19): siRNA sense strand
gcaacuguggcccuaugga

SEQ ID NO: 876072 - RNA, 19 nt, Homo sapiens
  misc_RNA (1)...(19): siRNA sense strand
cuccaaggcacacauguug

SEQ ID NO: 876073 - RNA, 19 nt, Homo sapiens
  misc_RNA (1)...(19): siRNA sense strand
caagcaacuucagcauuuu

SEQ ID NO: 876074 - RNA, 19 nt, Homo sapiens
  misc_RNA (1)...(19): siRNA sense strand
uugaguaaccuggaagaaa

SEQ ID NO: 876075 - RNA, 19 nt, Homo sapiens
  misc_RNA (1)...(19): siRNA sense strand
ggaugacaacacuaugcuu

SEQ ID NO: 876076 - RNA, 19 nt, Homo sapiens
  misc_RNA (1)...(19): siRNA sense strand
gaggagcugagaacagaag

SEQ ID NO: 876077 - RNA, 19 nt, Homo sapiens
  misc_RNA (1)...(19): siRNA sense strand
ggagaggacgugccuuucc

SEQ ID NO: 876078 - RNA, 19 nt, Homo sapiens
  misc_RNA (1)...(19): siRNA sense strand
caaaguaccaaaaugugaa

SEQ ID NO: 876079 - RNA, 19 nt, Homo sapiens
  misc_RNA (1)...(19): siRNA sense strand
ggccaacucucucacauuu

SEQ ID NO: 876080 - RNA, 19 nt, Homo sapiens
  misc_RNA (1)...(19): siRNA sense strand
ugggaaaugucacaaauaa

SEQ ID NO: 876081 - RNA, 19 nt, Homo sapiens
  misc_RNA (1)...(19): siRNA sense strand
ccaacucucucacauuuua

SEQ ID NO: 876082 - RNA, 19 nt, Homo sapiens
  misc_RNA (1)...(19): siRNA sense strand
gaaacgauccccaugcauu

SEQ ID NO: 876083 - RNA, 19 nt, Homo sapiens
  misc_RNA (1)...(19): siRNA sense strand
aaaguggcguguacaaugg

SEQ ID NO: 876084 - RNA, 19 nt, Homo sapiens
  misc_RNA (1)...(19): siRNA sense strand
aaugggaaaugucacaaau

SEQ ID NO: 876085 - RNA, 19 nt, Homo sapiens
  misc_RNA (1)...(19): siRNA sense strand
gccugacucuguugaucua

SEQ ID NO: 876086 - RNA, 19 nt, Homo sapiens
  misc_RNA (1)...(19): siRNA sense strand
gagccugacucuguugauc

SEQ ID NO: 876087 - RNA, 19 nt, Homo sapiens
  misc_RNA (1)...(19): siRNA sense strand
gggaaaugucacaaauaaa

SEQ ID NO: 876088 - RNA, 19 nt, Homo sapiens
  misc_RNA (1)...(19): siRNA sense strand
caaugggaaaugucacaaa

SEQ ID NO: 876089 - RNA, 19 nt, Homo sapiens
  misc_RNA (1)...(19): siRNA sense strand
acacuacuuucugcuacaa

SEQ ID NO: 876090 - RNA, 19 nt, Homo sapiens
  misc_RNA (1)...(19): siRNA sense strand
ccagaaaguggccgguguu

SEQ ID NO: 876091 - RNA, 19 nt, Homo sapiens
  misc_RNA (1)...(19): siRNA sense strand
cccaugcauugcucuaaau

SEQ ID NO: 876092 - RNA, 19 nt, Homo sapiens
  misc_RNA (1)...(19): siRNA sense strand
cagaaaguggccgguguuu

SEQ ID NO: 876093 - RNA, 19 nt, Homo sapiens
  misc_RNA (1)...(19): siRNA sense strand
cguguacaaugggaaaugu

SEQ ID NO: 876094 - RNA, 19 nt, Homo sapiens
  misc_RNA (1)...(19): siRNA sense strand
ccacaggccucaugaagca

SEQ ID NO: 876095 - RNA, 19 nt, Homo sapiens
  misc_RNA (1)...(19): siRNA sense strand
cgcaagcacuuuagcagua

SEQ ID NO: 876096 - RNA, 19 nt, Homo sapiens
  misc_RNA (1)...(19): siRNA sense strand
ccacugugcuccuaacugu

SEQ ID NO: 876097 - RNA, 19 nt, Homo sapiens
  misc_RNA (1)...(19): siRNA sense strand
gcaaggaucaagccgacua

SEQ ID NO: 876098 - RNA, 19 nt, Homo sapiens
  misc_RNA (1)...(19): siRNA sense strand
gcaagcacuuuagcaguau

SEQ ID NO: 876099 - RNA, 19 nt, Homo sapiens
  misc_RNA (1)...(19): siRNA sense strand
agcaguaucuguuuacaug

SEQ ID NO: 876100 - RNA, 19 nt, Homo sapiens
  misc_RNA (1)...(19): siRNA sense strand
cuuuagcaguaucuguuua

SEQ ID NO: 876101 - RNA, 19 nt, Homo sapiens
  misc_RNA (1)...(19): siRNA sense strand
ucuaggcgcaagcacuuua

SEQ ID NO: 876102 - RNA, 19 nt, Homo sapiens
  misc_RNA (1)...(19): siRNA sense strand
gacagcagucuccgagcua

SEQ ID NO: 876103 - RNA, 19 nt, Homo sapiens
  misc_RNA (1)...(19): siRNA sense strand
gcacuuuagcaguaucugu

SEQ ID NO: 876104 - RNA, 19 nt, Homo sapiens
  misc_RNA (1)...(19): siRNA sense strand
gcaccacaggccucaugaa

SEQ ID NO: 876105 - RNA, 19 nt, Homo sapiens
  misc_RNA (1)...(19): siRNA sense strand
augaagcaguucccacaug

SEQ ID NO: 876106 - RNA, 19 nt, Homo sapiens
  misc_RNA (1)...(19): siRNA sense strand
ugucacugguucccacugu

SEQ ID NO: 876107 - RNA, 19 nt, Homo sapiens
  misc_RNA (1)...(19): siRNA sense strand
ggaaacugauccuucaugu

SEQ ID NO: 876108 - RNA, 19 nt, Homo sapiens
  misc_RNA (1)...(19): siRNA sense strand
gauccuucauguuucaaua

SEQ ID NO: 876109 - RNA, 19 nt, Homo sapiens
  misc_RNA (1)...(19): siRNA sense strand
uucaauagcuguuguuguu

SEQ ID NO: 876110 - RNA, 19 nt, Homo sapiens
  misc_RNA (1)...(19): siRNA sense strand
gaaacugauccuucauguu

SEQ ID NO: 876111 - RNA, 19 nt, Homo sapiens
  misc_RNA (1)...(19): siRNA sense strand
ccugacagcuuccaaagag

SEQ ID NO: 876112 - RNA, 19 nt, Homo sapiens
  misc_RNA (1)...(19): siRNA sense strand
ucccagagcuccgaggaaa

SEQ ID NO: 876113 - RNA, 19 nt, Homo sapiens
  misc_RNA (1)...(19): siRNA sense strand
caauagcuguuguuguuuu

SEQ ID NO: 876114 - RNA, 19 nt, Homo sapiens
  misc_RNA (1)...(19): siRNA sense strand
ggauggcggcugugacuca

SEQ ID NO: 876115 - RNA, 19 nt, Homo sapiens
  misc_RNA (1)...(19): siRNA sense strand
gggagaacagaaaugcaaa

SEQ ID NO: 876116 - RNA, 19 nt, Homo sapiens
  misc_RNA (1)...(19): siRNA sense strand
gcagggagaacagaaaugc

SEQ ID NO: 876117 - RNA, 19 nt, Homo sapiens
  misc_RNA (1)...(19): siRNA sense strand
ucaauagcuguuguuguuu

SEQ ID NO: 876118 - RNA, 19 nt, Homo sapiens
  misc_RNA (1)...(19): siRNA sense strand
acugauccuucauguuuca

SEQ ID NO: 876119 - RNA, 19 nt, Homo sapiens
  misc_RNA (1)...(19): siRNA sense strand
uuacugcccuucugaauuu

SEQ ID NO: 876120 - RNA, 19 nt, Homo sapiens
  misc_RNA (1)...(19): siRNA sense strand
gagcuuugauggccauaaa

SEQ ID NO: 876121 - RNA, 19 nt, Homo sapiens
  misc_RNA (1)...(19): siRNA sense strand
gccauaaacugggauauug

SEQ ID NO: 876122 - RNA, 19 nt, Homo sapiens
  misc_RNA (1)...(19): siRNA sense strand
gacaacugcuuccaucugu

SEQ ID NO: 876123 - RNA, 19 nt, Homo sapiens
  misc_RNA (1)...(19): siRNA sense strand
uuacugccauuucucuaaa

SEQ ID NO: 876124 - RNA, 19 nt, Homo sapiens
  misc_RNA (1)...(19): siRNA sense strand
uaucaaaguuacagaugca

SEQ ID NO: 876125 - RNA, 19 nt, Homo sapiens
  misc_RNA (1)...(19): siRNA sense strand
uuacagaugcauaggauug

SEQ ID NO: 876126 - RNA, 19 nt, Homo sapiens
  misc_RNA (1)...(19): siRNA sense strand
gaaccugguggucgaacaa

SEQ ID NO: 876127 - RNA, 19 nt, Homo sapiens
  misc_RNA (1)...(19): siRNA sense strand
gcagugcuguuggaagcuu

SEQ ID NO: 876128 - RNA, 19 nt, Homo sapiens
  misc_RNA (1)...(19): siRNA sense strand
uaagguacaaacaggcaua

SEQ ID NO: 876129 - RNA, 19 nt, Homo sapiens
  misc_RNA (1)...(19): siRNA sense strand
caaaguuacagaugcauag

SEQ ID NO: 876130 - RNA, 19 nt, Homo sapiens
  misc_RNA (1)...(19): siRNA sense strand
gguacaaacaggcauaaca

SEQ ID NO: 876131 - RNA, 19 nt, Homo sapiens
  misc_RNA (1)...(19): siRNA sense strand
guacaaacaggcauaacag

SEQ ID NO: 876132 - RNA, 19 nt, Homo sapiens
  misc_RNA (1)...(19): siRNA sense strand
ggccauaaacugggauauu

SEQ ID NO: 876133 - RNA, 19 nt, Homo sapiens
  misc_RNA (1)...(19): siRNA sense strand
ucaaaguuacagaugcaua

SEQ ID NO: 876134 - RNA, 19 nt, Homo sapiens
  misc_RNA (1)...(19): siRNA sense strand
guuacugccauuucucuaa

SEQ ID NO: 876135 - RNA, 19 nt, Homo sapiens
  misc_RNA (1)...(19): siRNA sense strand
aggcauaacagcagcagaa

SEQ ID NO: 876136 - RNA, 19 nt, Homo sapiens
  misc_RNA (1)...(19): siRNA sense strand
gggauauugcaguaaggua

SEQ ID NO: 876137 - RNA, 19 nt, Homo sapiens
  misc_RNA (1)...(19): siRNA sense strand
gauauugcaguaagguaca

SEQ ID NO: 876138 - RNA, 19 nt, Homo sapiens
  misc_RNA (1)...(19): siRNA sense strand
caacugcuuccaucugucu

SEQ ID NO: 876139 - RNA, 19 nt, Homo sapiens
  misc_RNA (1)...(19): siRNA sense strand
cauaacagcagcagaaccu

SEQ ID NO: 876140 - RNA, 19 nt, Homo sapiens
  misc_RNA (1)...(19): siRNA sense strand
aguuacagaugcauaggau

SEQ ID NO: 876141 - RNA, 19 nt, Homo sapiens
  misc_RNA (1)...(19): siRNA sense strand
gaaagaaaccaaacaagga

SEQ ID NO: 876142 - RNA, 19 nt, Homo sapiens
  misc_RNA (1)...(19): siRNA sense strand
gcagugagccuuuguuugu

SEQ ID NO: 876143 - RNA, 19 nt, Homo sapiens
  misc_RNA (1)...(19): siRNA sense strand
gcacagaugguaauguaga

SEQ ID NO: 876144 - RNA, 19 nt, Homo sapiens
  misc_RNA (1)...(19): siRNA sense strand
aggcacagaugguaaugua

SEQ ID NO: 876145 - RNA, 19 nt, Homo sapiens
  misc_RNA (1)...(19): siRNA sense strand
ggucacuccugcuggaugu

SEQ ID NO: 876146 - RNA, 19 nt, Homo sapiens
  misc_RNA (1)...(19): siRNA sense strand
ucagaaagaaaccaaacaa

SEQ ID NO: 876147 - RNA, 19 nt, Homo sapiens
  misc_RNA (1)...(19): siRNA sense strand
ggagcuuugugcggaauga

SEQ ID NO: 876148 - RNA, 19 nt, Homo sapiens
  misc_RNA (1)...(19): siRNA sense strand
gagccuuuguuuguucuga

SEQ ID NO: 876149 - RNA, 19 nt, Homo sapiens
  misc_RNA (1)...(19): siRNA sense strand
gcacauccuaggcacagau

SEQ ID NO: 876150 - RNA, 19 nt, Homo sapiens
  misc_RNA (1)...(19): siRNA sense strand
guuuggugguugccauuug

SEQ ID NO: 876151 - RNA, 19 nt, Homo sapiens
  misc_RNA (1)...(19): siRNA sense strand
cagugagccuuuguuuguu

SEQ ID NO: 876152 - RNA, 19 nt, Homo sapiens
  misc_RNA (1)...(19): siRNA sense strand
ggauucagaaagaaaccaa

SEQ ID NO: 876153 - RNA, 19 nt, Homo sapiens
  misc_RNA (1)...(19): siRNA sense strand
aaaccaaacaaggagcuuu

SEQ ID NO: 876154 - RNA, 19 nt, Homo sapiens
  misc_RNA (1)...(19): siRNA sense strand
cagaaagaaaccaaacaag

SEQ ID NO: 876155 - RNA, 19 nt, Homo sapiens
  misc_RNA (1)...(19): siRNA sense strand
uggcagugagccuuuguuu

SEQ ID NO: 876156 - RNA, 19 nt, Homo sapiens
  misc_RNA (1)...(19): siRNA sense strand
gaaaccaaacaaggagcuu

SEQ ID NO: 876157 - RNA, 19 nt, Homo sapiens
  misc_RNA (1)...(19): siRNA sense strand
ggcagugagccuuuguuug

SEQ ID NO: 876158 - RNA, 19 nt, Homo sapiens
  misc_RNA (1)...(19): siRNA sense strand
gcccugaacuauuuaucaa

SEQ ID NO: 876159 - RNA, 19 nt, Homo sapiens
  misc_RNA (1)...(19): siRNA sense strand
ugucaacucuccaugcuau

SEQ ID NO: 876160 - RNA, 19 nt, Homo sapiens
  misc_RNA (1)...(19): siRNA sense strand
ugauguacaugcccuucua

SEQ ID NO: 876161 - RNA, 19 nt, Homo sapiens
  misc_RNA (1)...(19): siRNA sense strand
guacaugcccuucuaucau

SEQ ID NO: 876162 - RNA, 19 nt, Homo sapiens
  misc_RNA (1)...(19): siRNA sense strand
ucaacucuccaugcuauuu

SEQ ID NO: 876163 - RNA, 19 nt, Homo sapiens
  misc_RNA (1)...(19): siRNA sense strand
cuacuuagagcucugucaa

SEQ ID NO: 876164 - RNA, 19 nt, Homo sapiens
  misc_RNA (1)...(19): siRNA sense strand
gauguacaugcccuucuau

SEQ ID NO: 876165 - RNA, 19 nt, Homo sapiens
  misc_RNA (1)...(19): siRNA sense strand
gaaaggagcaguacaaaga

SEQ ID NO: 876166 - RNA, 19 nt, Homo sapiens
  misc_RNA (1)...(19): siRNA sense strand
gaaggcagauauugcuaua

SEQ ID NO: 876167 - RNA, 19 nt, Homo sapiens
  misc_RNA (1)...(19): siRNA sense strand
gaaaucagauguuggaagu

SEQ ID NO: 876168 - RNA, 19 nt, Homo sapiens
  misc_RNA (1)...(19): siRNA sense strand
gaaagaggaucauaaagag

SEQ ID NO: 876169 - RNA, 19 nt, Homo sapiens
  misc_RNA (1)...(19): siRNA sense strand
gacaaagacuugaauguug

SEQ ID NO: 876170 - RNA, 19 nt, Homo sapiens
  misc_RNA (1)...(19): siRNA sense strand
ugaaaggucugauggauga

SEQ ID NO: 876171 - RNA, 19 nt, Homo sapiens
  misc_RNA (1)...(19): siRNA sense strand
caggaaauauguacaauga

SEQ ID NO: 876172 - RNA, 19 nt, Homo sapiens
  misc_RNA (1)...(19): siRNA sense strand
ggaagauccugcugugaaa

SEQ ID NO: 876173 - RNA, 19 nt, Homo sapiens
  misc_RNA (1)...(19): siRNA sense strand
aaacagaacgccuuugaua

SEQ ID NO: 876174 - RNA, 19 nt, Homo sapiens
  misc_RNA (1)...(19): siRNA sense strand
aagcugacauugaaucuua

SEQ ID NO: 876175 - RNA, 19 nt, Homo sapiens
  misc_RNA (1)...(19): siRNA sense strand
caacacugcucuccauuau

SEQ ID NO: 876176 - RNA, 19 nt, Homo sapiens
  misc_RNA (1)...(19): siRNA sense strand
gaaagaaguugaagcaaaa

SEQ ID NO: 876177 - RNA, 19 nt, Homo sapiens
  misc_RNA (1)...(19): siRNA sense strand
gcacagaacugcucuacac

SEQ ID NO: 876178 - RNA, 19 nt, Homo sapiens
  misc_RNA (1)...(19): siRNA sense strand
gaagaggcuugugccguua

SEQ ID NO: 876179 - RNA, 19 nt, Homo sapiens
  misc_RNA (1)...(19): siRNA sense strand
gauaaguucuguaagacaa

SEQ ID NO: 876180 - RNA, 19 nt, Homo sapiens
  misc_RNA (1)...(19): siRNA sense strand
agaaagaaguugaagcaaa

SEQ ID NO: 876181 - RNA, 19 nt, Homo sapiens
  misc_RNA (1)...(19): siRNA sense strand
gaacauggcgccaauccaa

SEQ ID NO: 876182 - RNA, 19 nt, Homo sapiens
  misc_RNA (1)...(19): siRNA sense strand
gagaagaauuagaaaggaa

SEQ ID NO: 876183 - RNA, 19 nt, Homo sapiens
  misc_RNA (1)...(19): siRNA sense strand
gcaacacugcucuccauua

SEQ ID NO: 876184 - RNA, 19 nt, Homo sapiens
  misc_RNA (1)...(19): siRNA sense strand
agaaagaccucgugcuaga

SEQ ID NO: 876185 - RNA, 19 nt, Homo sapiens
  misc_RNA (1)...(19): siRNA sense strand
gcagaagauuaugcuauuu

SEQ ID NO: 876186 - RNA, 19 nt, Homo sapiens
  misc_RNA (1)...(19): siRNA sense strand
gagaagggccuccugcaaa

SEQ ID NO: 876187 - RNA, 19 nt, Homo sapiens
  misc_RNA (1)...(19): siRNA sense strand
gcaaacacaggaaaugaaa

SEQ ID NO: 876188 - RNA, 19 nt, Homo sapiens
  misc_RNA (1)...(19): siRNA sense strand
aaacguauccucagcaauu

SEQ ID NO: 876189 - RNA, 19 nt, Homo sapiens
  misc_RNA (1)...(19): siRNA sense strand
gcaagaaaggcaugaaaga

SEQ ID NO: 876190 - RNA, 19 nt, Homo sapiens
  misc_RNA (1)...(19): siRNA sense strand
ucaaagacugcaagaaaua

SEQ ID NO: 876191 - RNA, 19 nt, Homo sapiens
  misc_RNA (1)...(19): siRNA sense strand
gaaacagaauagucaaugg

SEQ ID NO: 876192 - RNA, 19 nt, Homo sapiens
  misc_RNA (1)...(19): siRNA sense strand
ggagaaaucagauguugga

SEQ ID NO: 876193 - RNA, 19 nt, Homo sapiens
  misc_RNA (1)...(19): siRNA sense strand
cacuagagaugaaaucaaa

SEQ ID NO: 876194 - RNA, 19 nt, Homo sapiens
  misc_RNA (1)...(19): siRNA sense strand
cagauuaacccaacaaaga

SEQ ID NO: 876195 - RNA, 19 nt, Homo sapiens
  misc_RNA (1)...(19): siRNA sense strand
gagagcagaacaagccuua

SEQ ID NO: 876196 - RNA, 19 nt, Homo sapiens
  misc_RNA (1)...(19): siRNA sense strand
gacgagaugcagaagauua

SEQ ID NO: 876197 - RNA, 19 nt, Homo sapiens
  misc_RNA (1)...(19): siRNA sense strand
uagacuggcugcugcuaua

SEQ ID NO: 876198 - RNA, 19 nt, Homo sapiens
  misc_RNA (1)...(19): siRNA sense strand
gaggaaaugauaacagaaa

SEQ ID NO: 876199 - RNA, 19 nt, Homo sapiens
  misc_RNA (1)...(19): siRNA sense strand
cagaacugcucuacacuug

SEQ ID NO: 876200 - RNA, 19 nt, Homo sapiens
  misc_RNA (1)...(19): siRNA sense strand
aacaagagcuuaaugaucu

SEQ ID NO: 876201 - RNA, 19 nt, Homo sapiens
  misc_RNA (1)...(19): siRNA sense strand
aaagaaagaccucgugcua

SEQ ID NO: 876202 - RNA, 19 nt, Homo sapiens
  misc_RNA (1)...(19): siRNA sense strand
agaaagaggaucauaaaga

SEQ ID NO: 876203 - RNA, 19 nt, Homo sapiens
  misc_RNA (1)...(19): siRNA sense strand
gaaaggaaagagaaacaau

SEQ ID NO: 876204 - RNA, 19 nt, Homo sapiens
  misc_RNA (1)...(19): siRNA sense strand
aaucaaagacugcaagaaa

SEQ ID NO: 876205 - RNA, 19 nt, Homo sapiens
  misc_RNA (1)...(19): siRNA sense strand
ucagaaagaggaucauaaa

SEQ ID NO: 876206 - RNA, 19 nt, Homo sapiens
  misc_RNA (1)...(19): siRNA sense strand
gaaacagcauuccgguauc

SEQ ID NO: 876207 - RNA, 19 nt, Homo sapiens
  misc_RNA (1)...(19): siRNA sense strand
gaaugaguuucuuacugaa

SEQ ID NO: 876208 - RNA, 19 nt, Homo sapiens
  misc_RNA (1)...(19): siRNA sense strand
aaacaaaugcugcccuuga

SEQ ID NO: 876209 - RNA, 19 nt, Homo sapiens
  misc_RNA (1)...(19): siRNA sense strand
gcucaaugccgaacuguug

SEQ ID NO: 876210 - RNA, 19 nt, Homo sapiens
  misc_RNA (1)...(19): siRNA sense strand
gagaauacaaggcucaaug

SEQ ID NO: 876211 - RNA, 19 nt, Homo sapiens
  misc_RNA (1)...(19): siRNA sense strand
gcuauaauuugcaagaaag

SEQ ID NO: 876212 - RNA, 19 nt, Homo sapiens
  misc_RNA (1)...(19): siRNA sense strand
caagaaaggcaugaaagaa

SEQ ID NO: 876213 - RNA, 19 nt, Homo sapiens
  misc_RNA (1)...(19): siRNA sense strand
ggaaacagaauagucaaug

SEQ ID NO: 876214 - RNA, 19 nt, Homo sapiens
  misc_RNA (1)...(19): siRNA sense strand
caacaagagcuuaaugauc

SEQ ID NO: 876215 - RNA, 19 nt, Homo sapiens
  misc_RNA (1)...(19): siRNA sense strand
gcgccaauccaaacuuuaa

SEQ ID NO: 876216 - RNA, 19 nt, Homo sapiens
  misc_RNA (1)...(19): siRNA sense strand
gaagaaaugaaaggucuga

SEQ ID NO: 876217 - RNA, 19 nt, Homo sapiens
  misc_RNA (1)...(19): siRNA sense strand
gagcaagaaaggcaugaaa

SEQ ID NO: 876218 - RNA, 19 nt, Homo sapiens
  misc_RNA (1)...(19): siRNA sense strand
ugacaaagacuugaauguu

SEQ ID NO: 876219 - RNA, 19 nt, Homo sapiens
  misc_RNA (1)...(19): siRNA sense strand
gcagauauugcuauacuca

SEQ ID NO: 876220 - RNA, 19 nt, Homo sapiens
  misc_RNA (1)...(19): siRNA sense strand
agauguuucuguacaagua

SEQ ID NO: 876221 - RNA, 19 nt, Homo sapiens
  misc_RNA (1)...(19): siRNA sense strand
gacauugaaucuuaucagu

SEQ ID NO: 876222 - RNA, 19 nt, Homo sapiens
  misc_RNA (1)...(19): siRNA sense strand
acuggaagcugacauugaa

SEQ ID NO: 876223 - RNA, 19 nt, Homo sapiens
  misc_RNA (1)...(19): siRNA sense strand
ucaauauccuucuuaagca

SEQ ID NO: 876224 - RNA, 19 nt, Homo sapiens
  misc_RNA (1)...(19): siRNA sense strand
ggaaaugaaagagauguau

SEQ ID NO: 876225 - RNA, 19 nt, Homo sapiens
  misc_RNA (1)...(19): siRNA sense strand
caagaaauacuccaaaucg

SEQ ID NO: 876226 - RNA, 19 nt, Homo sapiens
  misc_RNA (1)...(19): siRNA sense strand
gcaagaaauacuccaaauc

SEQ ID NO: 876227 - RNA, 19 nt, Homo sapiens
  misc_RNA (1)...(19): siRNA sense strand
gaaaucaaagacugcaaga

SEQ ID NO: 876228 - RNA, 19 nt, Homo sapiens
  misc_RNA (1)...(19): siRNA sense strand
uaagaaagaaguugaagca

SEQ ID NO: 876229 - RNA, 19 nt, Homo sapiens
  misc_RNA (1)...(19): siRNA sense strand
caauauccuucuuaagcaa

SEQ ID NO: 876230 - RNA, 19 nt, Homo sapiens
  misc_RNA (1)...(19): siRNA sense strand
gaaaacagaacgccuuuga

SEQ ID NO: 876231 - RNA, 19 nt, Homo sapiens
  misc_RNA (1)...(19): siRNA sense strand
ugcagaagauuaugcuauu

SEQ ID NO: 876232 - RNA, 19 nt, Homo sapiens
  misc_RNA (1)...(19): siRNA sense strand
gcacuggacaaggacaaua

SEQ ID NO: 876233 - RNA, 19 nt, Homo sapiens
  misc_RNA (1)...(19): siRNA sense strand
gaaaaugcguggcuuguac

SEQ ID NO: 876234 - RNA, 19 nt, Homo sapiens
  misc_RNA (1)...(19): siRNA sense strand
gaaaugaaagagauguauc

SEQ ID NO: 876235 - RNA, 19 nt, Homo sapiens
  misc_RNA (1)...(19): siRNA sense strand
ccucagcaauuucccaaga

SEQ ID NO: 876236 - RNA, 19 nt, Homo sapiens
  misc_RNA (1)...(19): siRNA sense strand
agaaaggcaugaaagaagu

SEQ ID NO: 876237 - RNA, 19 nt, Homo sapiens
  misc_RNA (1)...(19): siRNA sense strand
gcaccucacuggcagaaaa

SEQ ID NO: 876238 - RNA, 19 nt, Homo sapiens
  misc_RNA (1)...(19): siRNA sense strand
aaacacaggaaaugaaaga

SEQ ID NO: 876239 - RNA, 19 nt, Homo sapiens
  misc_RNA (1)...(19): siRNA sense strand
aaacacagcagcaaacaca

SEQ ID NO: 876240 - RNA, 19 nt, Homo sapiens
  misc_RNA (1)...(19): siRNA sense strand
cauugaaucuuaucagucu

SEQ ID NO: 876241 - RNA, 19 nt, Homo sapiens
  misc_RNA (1)...(19): siRNA sense strand
gauaacagaaacagcauuc

SEQ ID NO: 876242 - RNA, 19 nt, Homo sapiens
  misc_RNA (1)...(19): siRNA sense strand
caugcuugcuguauacuau

SEQ ID NO: 876243 - RNA, 19 nt, Homo sapiens
  misc_RNA (1)...(19): siRNA sense strand
cagaagcuaaagugaauaa

SEQ ID NO: 876244 - RNA, 19 nt, Homo sapiens
  misc_RNA (1)...(19): siRNA sense strand
gucauuggcuuuagaaacu

SEQ ID NO: 876245 - RNA, 19 nt, Homo sapiens
  misc_RNA (1)...(19): siRNA sense strand
acacugcucuccauuaugc

SEQ ID NO: 876246 - RNA, 19 nt, Homo sapiens
  misc_RNA (1)...(19): siRNA sense strand
gaaagaccucgugcuagaa

SEQ ID NO: 876247 - RNA, 19 nt, Homo sapiens
  misc_RNA (1)...(19): siRNA sense strand
uagaagagaggauauguca

SEQ ID NO: 876248 - RNA, 19 nt, Homo sapiens
  misc_RNA (1)...(19): siRNA sense strand
guucugcuauuuccaaagu

SEQ ID NO: 876249 - RNA, 19 nt, Homo sapiens
  misc_RNA (1)...(19): siRNA sense strand
gccgaacuguugaaggaaa

SEQ ID NO: 876250 - RNA, 19 nt, Homo sapiens
  misc_RNA (1)...(19): siRNA sense strand
aaacagcauuccgguauca

SEQ ID NO: 876251 - RNA, 19 nt, Homo sapiens
  misc_RNA (1)...(19): siRNA sense strand
gaaaacguauccucagcaa

SEQ ID NO: 876252 - RNA, 19 nt, Homo sapiens
  misc_RNA (1)...(19): siRNA sense strand
aaaggaaacagaauaguca

SEQ ID NO: 876253 - RNA, 19 nt, Homo sapiens
  misc_RNA (1)...(19): siRNA sense strand
uacuaugacucaccaggua

SEQ ID NO: 876254 - RNA, 19 nt, Homo sapiens
  misc_RNA (1)...(19): siRNA sense strand
aaucagauguuggaaguuc

SEQ ID NO: 876255 - RNA, 19 nt, Homo sapiens
  misc_RNA (1)...(19): siRNA sense strand
gaaaguggaacuguguaga

SEQ ID NO: 876256 - RNA, 19 nt, Homo sapiens
  misc_RNA (1)...(19): siRNA sense strand
ugcagaagcuaaagugaau

SEQ ID NO: 876257 - RNA, 19 nt, Homo sapiens
  misc_RNA (1)...(19): siRNA sense strand
gaaaaugccagauugaugu

SEQ ID NO: 876258 - RNA, 19 nt, Homo sapiens
  misc_RNA (1)...(19): siRNA sense strand
agaaacagcauuccgguau

SEQ ID NO: 876259 - RNA, 19 nt, Homo sapiens
  misc_RNA (1)...(19): siRNA sense strand
gaauuagaaaggaaagaga

SEQ ID NO: 876260 - RNA, 19 nt, Homo sapiens
  misc_RNA (1)...(19): siRNA sense strand
aagaaagaauguacagaca

SEQ ID NO: 876261 - RNA, 19 nt, Homo sapiens
  misc_RNA (1)...(19): siRNA sense strand
gaggcuuuauugagaguga

SEQ ID NO: 876262 - RNA, 19 nt, Homo sapiens
  misc_RNA (1)...(19): siRNA sense strand
cacaggaaaugaaagagau

SEQ ID NO: 876263 - RNA, 19 nt, Homo sapiens
  misc_RNA (1)...(19): siRNA sense strand
aacaaaugcugcccuugaa

SEQ ID NO: 876264 - RNA, 19 nt, Homo sapiens
  misc_RNA (1)...(19): siRNA sense strand
gacaggaaauauguacaau

SEQ ID NO: 876265 - RNA, 19 nt, Homo sapiens
  misc_RNA (1)...(19): siRNA sense strand
gaucagaaguaaccaguuu

SEQ ID NO: 876266 - RNA, 19 nt, Homo sapiens
  misc_RNA (1)...(19): siRNA sense strand
agaaacagauccagaccua

SEQ ID NO: 876267 - RNA, 19 nt, Homo sapiens
  misc_RNA (1)...(19): siRNA sense strand
gaaguaaccaguuuaugga

SEQ ID NO: 876268 - RNA, 19 nt, Homo sapiens
  misc_RNA (1)...(19): siRNA sense strand
guuccaggaucagaaguaa

SEQ ID NO: 876269 - RNA, 19 nt, Homo sapiens
  misc_RNA (1)...(19): siRNA sense strand
gguucaagaugcagaaugg

SEQ ID NO: 876270 - RNA, 19 nt, Homo sapiens
  misc_RNA (1)...(19): siRNA sense strand
aaacagauccagaccuauc

SEQ ID NO: 876271 - RNA, 19 nt, Homo sapiens
  misc_RNA (1)...(19): siRNA sense strand
agaaguaaccaguuuaugg

SEQ ID NO: 876272 - RNA, 19 nt, Homo sapiens
  misc_RNA (1)...(19): siRNA sense strand
gauccagaccuaucaugug

SEQ ID NO: 876273 - RNA, 19 nt, Homo sapiens
  misc_RNA (1)...(19): siRNA sense strand
ccagaccuaucaugugaag

SEQ ID NO: 876274 - RNA, 19 nt, Homo sapiens
  misc_RNA (1)...(19): siRNA sense strand
auccagaccuaucauguga

SEQ ID NO: 876275 - RNA, 19 nt, Homo sapiens
  misc_RNA (1)...(19): siRNA sense strand
ccucccuucuuuaccauuu

SEQ ID NO: 876276 - RNA, 19 nt, Homo sapiens
  misc_RNA (1)...(19): siRNA sense strand
acacccuccucccuucuuu

SEQ ID NO: 876277 - RNA, 19 nt, Homo sapiens
  misc_RNA (1)...(19): siRNA sense strand
ucagaaguaaccaguuuau

SEQ ID NO: 876278 - RNA, 19 nt, Homo sapiens
  misc_RNA (1)...(19): siRNA sense strand
gaaguccacguuccaggau

SEQ ID NO: 876279 - RNA, 19 nt, Homo sapiens
  misc_RNA (1)...(19): siRNA sense strand
gcaccuuccaucugugaga

SEQ ID NO: 876280 - RNA, 19 nt, Homo sapiens
  misc_RNA (1)...(19): siRNA sense strand
gugugcaccuuccaucugu

SEQ ID NO: 876281 - RNA, 19 nt, Homo sapiens
  misc_RNA (1)...(19): siRNA sense strand
gagaggcacacuucagucu

SEQ ID NO: 876282 - RNA, 19 nt, Homo sapiens
  misc_RNA (1)...(19): siRNA sense strand
gagcuuacacgggaaaguc

SEQ ID NO: 876283 - RNA, 19 nt, Homo sapiens
  misc_RNA (1)...(19): siRNA sense strand
gaucccaacagaaacagau

SEQ ID NO: 876284 - RNA, 19 nt, Homo sapiens
  misc_RNA (1)...(19): siRNA sense strand
gaaacagauccagaccuau

SEQ ID NO: 876285 - RNA, 19 nt, Homo sapiens
  misc_RNA (1)...(19): siRNA sense strand
ccacguuccaggaucagaa

SEQ ID NO: 876286 - RNA, 19 nt, Homo sapiens
  misc_RNA (1)...(19): siRNA sense strand
caagugaacguggcagagu

SEQ ID NO: 876287 - RNA, 19 nt, Homo sapiens
  misc_RNA (1)...(19): siRNA sense strand
agaccuaucaugugaaguc

SEQ ID NO: 876288 - RNA, 19 nt, Homo sapiens
  misc_RNA (1)...(19): siRNA sense strand
acacuucagucuggguuca

SEQ ID NO: 876289 - RNA, 19 nt, Homo sapiens
  misc_RNA (1)...(19): siRNA sense strand
gugagaggcacacuucagu

SEQ ID NO: 876290 - RNA, 19 nt, Homo sapiens
  misc_RNA (1)...(19): siRNA sense strand
ccuccucccuucuuuacca

SEQ ID NO: 876291 - RNA, 19 nt, Homo sapiens
  misc_RNA (1)...(19): siRNA sense strand
ggccaaguuuccaccuauu

SEQ ID NO: 876292 - RNA, 19 nt, Homo sapiens
  misc_RNA (1)...(19): siRNA sense strand
ccucaagucaagcucuuua

SEQ ID NO: 876293 - RNA, 19 nt, Homo sapiens
  misc_RNA (1)...(19): siRNA sense strand
gaccaacuccugccucaca

SEQ ID NO: 876294 - RNA, 19 nt, Homo sapiens
  misc_RNA (1)...(19): siRNA sense strand
aaccuucccuggccaaguu

SEQ ID NO: 876295 - RNA, 19 nt, Homo sapiens
  misc_RNA (1)...(19): siRNA sense strand
gccaaguuuccaccuauuu

SEQ ID NO: 876296 - RNA, 19 nt, Homo sapiens
  misc_RNA (1)...(19): siRNA sense strand
uggccaaguuuccaccuau

SEQ ID NO: 876297 - RNA, 19 nt, Homo sapiens
  misc_RNA (1)...(19): siRNA sense strand
ccaaguuuccaccuauuuc

SEQ ID NO: 876298 - RNA, 19 nt, Homo sapiens
  misc_RNA (1)...(19): siRNA sense strand
gcucagcuccugcccaacu

SEQ ID NO: 876299 - RNA, 19 nt, Homo sapiens
  misc_RNA (1)...(19): siRNA sense strand
caacuccugccucacaaca

SEQ ID NO: 876300 - RNA, 19 nt, Homo sapiens
  misc_RNA (1)...(19): siRNA sense strand
caucaucuccaggcccaaa

SEQ ID NO: 876301 - RNA, 19 nt, Homo sapiens
  misc_RNA (1)...(19): siRNA sense strand
gaaaggguguuugacaaga

SEQ ID NO: 876302 - RNA, 19 nt, Homo sapiens
  misc_RNA (1)...(19): siRNA sense strand
ggaaagagaaggcgaagau

SEQ ID NO: 876303 - RNA, 19 nt, Homo sapiens
  misc_RNA (1)...(19): siRNA sense strand
gcagagagccagggcauuu

SEQ ID NO: 876304 - RNA, 19 nt, Homo sapiens
  misc_RNA (1)...(19): siRNA sense strand
gaacugcagccagauguuu

SEQ ID NO: 876305 - RNA, 19 nt, Homo sapiens
  misc_RNA (1)...(19): siRNA sense strand
aguccaagcugacaauauu

SEQ ID NO: 876306 - RNA, 19 nt, Homo sapiens
  misc_RNA (1)...(19): siRNA sense strand
gugaaaggguguuugacaa

SEQ ID NO: 876307 - RNA, 19 nt, Homo sapiens
  misc_RNA (1)...(19): siRNA sense strand
ugaccgagcucugcaaugu

SEQ ID NO: 876308 - RNA, 19 nt, Homo sapiens
  misc_RNA (1)...(19): siRNA sense strand
acaagaugauccagacaaa

SEQ ID NO: 876309 - RNA, 19 nt, Homo sapiens
  misc_RNA (1)...(19): siRNA sense strand
ucaaguggauggguccuuu

SEQ ID NO: 876310 - RNA, 19 nt, Homo sapiens
  misc_RNA (1)...(19): siRNA sense strand
gacuaucgcuacacagguu

SEQ ID NO: 876311 - RNA, 19 nt, Homo sapiens
  misc_RNA (1)...(19): siRNA sense strand
uagcuucucuggucuggaa

SEQ ID NO: 876312 - RNA, 19 nt, Homo sapiens
  misc_RNA (1)...(19): siRNA sense strand
gcaggaaccgcagguguuu

SEQ ID NO: 876313 - RNA, 19 nt, Homo sapiens
  misc_RNA (1)...(19): siRNA sense strand
cagcugcgauccucuaaag

SEQ ID NO: 876314 - RNA, 19 nt, Homo sapiens
  misc_RNA (1)...(19): siRNA sense strand
aguuaaagaccaagaguua

SEQ ID NO: 876315 - RNA, 19 nt, Homo sapiens
  misc_RNA (1)...(19): siRNA sense strand
gagagcagccagcagagaa

SEQ ID NO: 876316 - RNA, 19 nt, Homo sapiens
  misc_RNA (1)...(19): siRNA sense strand
gacaagaucaagagucgaa

SEQ ID NO: 876317 - RNA, 19 nt, Homo sapiens
  misc_RNA (1)...(19): siRNA sense strand
caauauaggaagccgguuu

SEQ ID NO: 876318 - RNA, 19 nt, Homo sapiens
  misc_RNA (1)...(19): siRNA sense strand
gcucagagacacaggauag

SEQ ID NO: 876319 - RNA, 19 nt, Homo sapiens
  misc_RNA (1)...(19): siRNA sense strand
gagaaggcgaagauggaua

SEQ ID NO: 876320 - RNA, 19 nt, Homo sapiens
  misc_RNA (1)...(19): siRNA sense strand
gagucgaaaugcccauaug

SEQ ID NO: 876321 - RNA, 19 nt, Homo sapiens
  misc_RNA (1)...(19): siRNA sense strand
ccagugacccgacacauag

SEQ ID NO: 876322 - RNA, 19 nt, Homo sapiens
  misc_RNA (1)...(19): siRNA sense strand
gcaucuguguggugaagga

SEQ ID NO: 876323 - RNA, 19 nt, Homo sapiens
  misc_RNA (1)...(19): siRNA sense strand
gcacgagacgagacgcaaa

SEQ ID NO: 876324 - RNA, 19 nt, Homo sapiens
  misc_RNA (1)...(19): siRNA sense strand
gaaagagaaggcgaagaug

SEQ ID NO: 876325 - RNA, 19 nt, Homo sapiens
  misc_RNA (1)...(19): siRNA sense strand
agagagagccggaggaagu

SEQ ID NO: 876326 - RNA, 19 nt, Homo sapiens
  misc_RNA (1)...(19): siRNA sense strand
aagaugauccagacaaaga

SEQ ID NO: 876327 - RNA, 19 nt, Homo sapiens
  misc_RNA (1)...(19): siRNA sense strand
gcuccaugcucgaucaagu

SEQ ID NO: 876328 - RNA, 19 nt, Homo sapiens
  misc_RNA (1)...(19): siRNA sense strand
ggaccuggaggacaucuuc

SEQ ID NO: 876329 - RNA, 19 nt, Homo sapiens
  misc_RNA (1)...(19): siRNA sense strand
ggagagacccagccaccau

SEQ ID NO: 876330 - RNA, 19 nt, Homo sapiens
  misc_RNA (1)...(19): siRNA sense strand
caagagagagccggaggaa

SEQ ID NO: 876331 - RNA, 19 nt, Homo sapiens
  misc_RNA (1)...(19): siRNA sense strand
aggcgaagauggauaugug

SEQ ID NO: 876332 - RNA, 19 nt, Homo sapiens
  misc_RNA (1)...(19): siRNA sense strand
ggccaugggacaagagaaa

SEQ ID NO: 876333 - RNA, 19 nt, Homo sapiens
  misc_RNA (1)...(19): siRNA sense strand
ucagugcguugaguauuau

SEQ ID NO: 876334 - RNA, 19 nt, Homo sapiens
  misc_RNA (1)...(19): siRNA sense strand
gaugaucagcucagagaca

SEQ ID NO: 876335 - RNA, 19 nt, Homo sapiens
  misc_RNA (1)...(19): siRNA sense strand
aaaagagggucaagagaga

SEQ ID NO: 876336 - RNA, 19 nt, Homo sapiens
  misc_RNA (1)...(19): siRNA sense strand
aggcagagguaaccagcaa

SEQ ID NO: 876337 - RNA, 19 nt, Homo sapiens
  misc_RNA (1)...(19): siRNA sense strand
aaaggguguuugacaagau

SEQ ID NO: 876338 - RNA, 19 nt, Homo sapiens
  misc_RNA (1)...(19): siRNA sense strand
ggaauccagacaucucuuc

SEQ ID NO: 876339 - RNA, 19 nt, Homo sapiens
  misc_RNA (1)...(19): siRNA sense strand
cagcagagaaagcggaaga

SEQ ID NO: 876340 - RNA, 19 nt, Homo sapiens
  misc_RNA (1)...(19): siRNA sense strand
cggcagaucccuccaaguc

SEQ ID NO: 876341 - RNA, 19 nt, Homo sapiens
  misc_RNA (1)...(19): siRNA sense strand
caagaacugcagccagaug

SEQ ID NO: 876342 - RNA, 19 nt, Homo sapiens
  misc_RNA (1)...(19): siRNA sense strand
gcagccagauguuuuauac

SEQ ID NO: 876343 - RNA, 19 nt, Homo sapiens
  misc_RNA (1)...(19): siRNA sense strand
ucucuucucuggccaagca

SEQ ID NO: 876344 - RNA, 19 nt, Homo sapiens
  misc_RNA (1)...(19): siRNA sense strand
gggaggagcgagacagcaa

SEQ ID NO: 876345 - RNA, 19 nt, Homo sapiens
  misc_RNA (1)...(19): siRNA sense strand
agaaggcgaagauggauau

SEQ ID NO: 876346 - RNA, 19 nt, Homo sapiens
  misc_RNA (1)...(19): siRNA sense strand
ugacgagcauguagcuucu

SEQ ID NO: 876347 - RNA, 19 nt, Homo sapiens
  misc_RNA (1)...(19): siRNA sense strand
ggagagcagccagcagaga

SEQ ID NO: 876348 - RNA, 19 nt, Homo sapiens
  misc_RNA (1)...(19): siRNA sense strand
ggaacugacgagcauguag

SEQ ID NO: 876349 - RNA, 19 nt, Homo sapiens
  misc_RNA (1)...(19): siRNA sense strand
agggugaaguggccaguga

SEQ ID NO: 876350 - RNA, 19 nt, Homo sapiens
  misc_RNA (1)...(19): siRNA sense strand
caagaucaagagucgaaau

SEQ ID NO: 876351 - RNA, 19 nt, Homo sapiens
  misc_RNA (1)...(19): siRNA sense strand
guacuucaacacccucugu

SEQ ID NO: 876352 - RNA, 19 nt, Homo sapiens
  misc_RNA (1)...(19): siRNA sense strand
ucuguguggugaaggauga

SEQ ID NO: 876353 - RNA, 19 nt, Homo sapiens
  misc_RNA (1)...(19): siRNA sense strand
ccaacggcagacccaguua

SEQ ID NO: 876354 - RNA, 19 nt, Homo sapiens
  misc_RNA (1)...(19): siRNA sense strand
uaaagaccaagaguuauag

SEQ ID NO: 876355 - RNA, 19 nt, Homo sapiens
  misc_RNA (1)...(19): siRNA sense strand
aggcagagaucccggaacu

SEQ ID NO: 876356 - RNA, 19 nt, Homo sapiens
  misc_RNA (1)...(19): siRNA sense strand
caugcucgaucaaguggau

SEQ ID NO: 876357 - RNA, 19 nt, Homo sapiens
  misc_RNA (1)...(19): siRNA sense strand
ucagcuccaugcucgauca

SEQ ID NO: 876358 - RNA, 19 nt, Homo sapiens
  misc_RNA (1)...(19): siRNA sense strand
gcagagaaagcggaagaag

SEQ ID NO: 876359 - RNA, 19 nt, Homo sapiens
  misc_RNA (1)...(19): siRNA sense strand
aagagaaggcgaagaugga

SEQ ID NO: 876360 - RNA, 19 nt, Homo sapiens
  misc_RNA (1)...(19): siRNA sense strand
uccagugacccgacacaua

SEQ ID NO: 876361 - RNA, 19 nt, Homo sapiens
  misc_RNA (1)...(19): siRNA sense strand
ugagcagccacauguguuu

SEQ ID NO: 876362 - RNA, 19 nt, Homo sapiens
  misc_RNA (1)...(19): siRNA sense strand
gguguuuggcacagaguuu

SEQ ID NO: 876363 - RNA, 19 nt, Homo sapiens
  misc_RNA (1)...(19): siRNA sense strand
gucgaaaugcccauaugaa

SEQ ID NO: 876364 - RNA, 19 nt, Homo sapiens
  misc_RNA (1)...(19): siRNA sense strand
caaguccaagcugacaaua

SEQ ID NO: 876365 - RNA, 19 nt, Homo sapiens
  misc_RNA (1)...(19): siRNA sense strand
caaguuaaagaccaagagu

SEQ ID NO: 876366 - RNA, 19 nt, Homo sapiens
  misc_RNA (1)...(19): siRNA sense strand
gcacuuuugucugcaagaa

SEQ ID NO: 876367 - RNA, 19 nt, Homo sapiens
  misc_RNA (1)...(19): siRNA sense strand
gccauggccuccuucucau

SEQ ID NO: 876368 - RNA, 19 nt, Homo sapiens
  misc_RNA (1)...(19): siRNA sense strand
gccaacggcagacccaguu

SEQ ID NO: 876369 - RNA, 19 nt, Homo sapiens
  misc_RNA (1)...(19): siRNA sense strand
ccaaguccaagcugacaau

SEQ ID NO: 876370 - RNA, 19 nt, Homo sapiens
  misc_RNA (1)...(19): siRNA sense strand
ggcuggaacugacgagcau

SEQ ID NO: 876371 - RNA, 19 nt, Homo sapiens
  misc_RNA (1)...(19): siRNA sense strand
ugaaaggguguuugacaag

SEQ ID NO: 876372 - RNA, 19 nt, Homo sapiens
  misc_RNA (1)...(19): siRNA sense strand
guuaaagaccaagaguuau

SEQ ID NO: 876373 - RNA, 19 nt, Homo sapiens
  misc_RNA (1)...(19): siRNA sense strand
cacaagaugauccagacaa

SEQ ID NO: 876374 - RNA, 19 nt, Homo sapiens
  misc_RNA (1)...(19): siRNA sense strand
cccauccggugaaggaaga

SEQ ID NO: 876375 - RNA, 19 nt, Homo sapiens
  misc_RNA (1)...(19): siRNA sense strand
ccacguggagcccaucauc

SEQ ID NO: 876376 - RNA, 19 nt, Homo sapiens
  misc_RNA (1)...(19): siRNA sense strand
gagagagccggaggaagug

SEQ ID NO: 876377 - RNA, 19 nt, Homo sapiens
  misc_RNA (1)...(19): siRNA sense strand
cguugaguauuauuacauc

SEQ ID NO: 876378 - RNA, 19 nt, Homo sapiens
  misc_RNA (1)...(19): siRNA sense strand
cacaccugcucgcugacua

SEQ ID NO: 876379 - RNA, 19 nt, Homo sapiens
  misc_RNA (1)...(19): siRNA sense strand
gagacacaggauagaguga

SEQ ID NO: 876380 - RNA, 19 nt, Homo sapiens
  misc_RNA (1)...(19): siRNA sense strand
gagagaucccuggcuggaa

SEQ ID NO: 876381 - RNA, 19 nt, Homo sapiens
  misc_RNA (1)...(19): siRNA sense strand
gcucugggguguacuucaa

SEQ ID NO: 876382 - RNA, 19 nt, Homo sapiens
  misc_RNA (1)...(19): siRNA sense strand
gcagcugcgauccucuaaa

SEQ ID NO: 876383 - RNA, 19 nt, Homo sapiens
  misc_RNA (1)...(19): siRNA sense strand
ucgaaaugcccauaugaag

SEQ ID NO: 876384 - RNA, 19 nt, Homo sapiens
  misc_RNA (1)...(19): siRNA sense strand
gcagagguaaccagcaaaa

SEQ ID NO: 876385 - RNA, 19 nt, Homo sapiens
  misc_RNA (1)...(19): siRNA sense strand
caacggcagacccaguuag

SEQ ID NO: 876386 - RNA, 19 nt, Homo sapiens
  misc_RNA (1)...(19): siRNA sense strand
guggaaaggacagaggaaa

SEQ ID NO: 876387 - RNA, 19 nt, Homo sapiens
  misc_RNA (1)...(19): siRNA sense strand
gacuucuacuugauacaca

SEQ ID NO: 876388 - RNA, 19 nt, Homo sapiens
  misc_RNA (1)...(19): siRNA sense strand
ggaguuggcuggaggauuu

SEQ ID NO: 876389 - RNA, 19 nt, Homo sapiens
  misc_RNA (1)...(19): siRNA sense strand
acuaauagcuggcaaauuu

SEQ ID NO: 876390 - RNA, 19 nt, Homo sapiens
  misc_RNA (1)...(19): siRNA sense strand
gagcauauaucauuacaga

SEQ ID NO: 876391 - RNA, 19 nt, Homo sapiens
  misc_RNA (1)...(19): siRNA sense strand
gaaagacucagaaaguuua

SEQ ID NO: 876392 - RNA, 19 nt, Homo sapiens
  misc_RNA (1)...(19): siRNA sense strand
gcaaauuucuguuccauca

SEQ ID NO: 876393 - RNA, 19 nt, Homo sapiens
  misc_RNA (1)...(19): siRNA sense strand
gcaaaugguuuaacuaugg

SEQ ID NO: 876394 - RNA, 19 nt, Homo sapiens
  misc_RNA (1)...(19): siRNA sense strand
gaaugacccuucuuugguu

SEQ ID NO: 876395 - RNA, 19 nt, Homo sapiens
  misc_RNA (1)...(19): siRNA sense strand
ucaaugagaucgucuacaa

SEQ ID NO: 876396 - RNA, 19 nt, Homo sapiens
  misc_RNA (1)...(19): siRNA sense strand
cagaagauauauacaguga

SEQ ID NO: 876397 - RNA, 19 nt, Homo sapiens
  misc_RNA (1)...(19): siRNA sense strand
gcacaauucucuuucucuu

SEQ ID NO: 876398 - RNA, 19 nt, Homo sapiens
  misc_RNA (1)...(19): siRNA sense strand
caugggagauguugaugua

SEQ ID NO: 876399 - RNA, 19 nt, Homo sapiens
  misc_RNA (1)...(19): siRNA sense strand
cuacaagucuucccaccua

SEQ ID NO: 876400 - RNA, 19 nt, Homo sapiens
  misc_RNA (1)...(19): siRNA sense strand
gauggucacugauaugaug

SEQ ID NO: 876401 - RNA, 19 nt, Homo sapiens
  misc_RNA (1)...(19): siRNA sense strand
caacagaagcugaucaaga

SEQ ID NO: 876402 - RNA, 19 nt, Homo sapiens
  misc_RNA (1)...(19): siRNA sense strand
ggagacauguucuuacaca

SEQ ID NO: 876403 - RNA, 19 nt, Homo sapiens
  misc_RNA (1)...(19): siRNA sense strand
caacacgauucuucuaaug

SEQ ID NO: 876404 - RNA, 19 nt, Homo sapiens
  misc_RNA (1)...(19): siRNA sense strand
uaaauacccuagaggaguu

SEQ ID NO: 876405 - RNA, 19 nt, Homo sapiens
  misc_RNA (1)...(19): siRNA sense strand
gaacaugggagcauauauc

SEQ ID NO: 876406 - RNA, 19 nt, Homo sapiens
  misc_RNA (1)...(19): siRNA sense strand
gcaagagcuuucuggaaga

SEQ ID NO: 876407 - RNA, 19 nt, Homo sapiens
  misc_RNA (1)...(19): siRNA sense strand
gaaauguuaggaucacuuu

SEQ ID NO: 876408 - RNA, 19 nt, Homo sapiens
  misc_RNA (1)...(19): siRNA sense strand
ggucguggaugacaauguu

SEQ ID NO: 876409 - RNA, 19 nt, Homo sapiens
  misc_RNA (1)...(19): siRNA sense strand
cagcuuggauggucacuga

SEQ ID NO: 876410 - RNA, 19 nt, Homo sapiens
  misc_RNA (1)...(19): siRNA sense strand
gugaaagacucagaaaguu

SEQ ID NO: 876411 - RNA, 19 nt, Homo sapiens
  misc_RNA (1)...(19): siRNA sense strand
ucacugauaugaugcuuca

SEQ ID NO: 876412 - RNA, 19 nt, Homo sapiens
  misc_RNA (1)...(19): siRNA sense strand
ggaauucccacauuucaug

SEQ ID NO: 876413 - RNA, 19 nt, Homo sapiens
  misc_RNA (1)...(19): siRNA sense strand
ucaagugucuggccuuugu

SEQ ID NO: 876414 - RNA, 19 nt, Homo sapiens
  misc_RNA (1)...(19): siRNA sense strand
acaauucucuuucucuuca

SEQ ID NO: 876415 - RNA, 19 nt, Homo sapiens
  misc_RNA (1)...(19): siRNA sense strand
uggaagaaaggaaauguua

SEQ ID NO: 876416 - RNA, 19 nt, Homo sapiens
  misc_RNA (1)...(19): siRNA sense strand
gcucacaguugaacgaauc

SEQ ID NO: 876417 - RNA, 19 nt, Homo sapiens
  misc_RNA (1)...(19): siRNA sense strand
gaucaagacccaacgacuu

SEQ ID NO: 876418 - RNA, 19 nt, Homo sapiens
  misc_RNA (1)...(19): siRNA sense strand
caugggagcauauaucauu

SEQ ID NO: 876419 - RNA, 19 nt, Homo sapiens
  misc_RNA (1)...(19): siRNA sense strand
guggaagaaccaaauauuu

SEQ ID NO: 876420 - RNA, 19 nt, Homo sapiens
  misc_RNA (1)...(19): siRNA sense strand
aaaguacaccuacgaacua

SEQ ID NO: 876421 - RNA, 19 nt, Homo sapiens
  misc_RNA (1)...(19): siRNA sense strand
cauggagaaucaagacaaa

SEQ ID NO: 876422 - RNA, 19 nt, Homo sapiens
  misc_RNA (1)...(19): siRNA sense strand
ugaaagacucagaaaguuu

SEQ ID NO: 876423 - RNA, 19 nt, Homo sapiens
  misc_RNA (1)...(19): siRNA sense strand
acaaauaaauacccuagag

SEQ ID NO: 876424 - RNA, 19 nt, Homo sapiens
  misc_RNA (1)...(19): siRNA sense strand
cacccaggcuucaguagaa

SEQ ID NO: 876425 - RNA, 19 nt, Homo sapiens
  misc_RNA (1)...(19): siRNA sense strand
ucacauaacaggcaaaugg

SEQ ID NO: 876426 - RNA, 19 nt, Homo sapiens
  misc_RNA (1)...(19): siRNA sense strand
gugcuucuauggcuacuug

SEQ ID NO: 876427 - RNA, 19 nt, Homo sapiens
  misc_RNA (1)...(19): siRNA sense strand
ggagguccaaucacacuaa

SEQ ID NO: 876428 - RNA, 19 nt, Homo sapiens
  misc_RNA (1)...(19): siRNA sense strand
gggagauguugauguaaau

SEQ ID NO: 876429 - RNA, 19 nt, Homo sapiens
  misc_RNA (1)...(19): siRNA sense strand
gaagaaaggaaauguuagg

SEQ ID NO: 876430 - RNA, 19 nt, Homo sapiens
  misc_RNA (1)...(19): siRNA sense strand
caaaugguuuaacuaugga

SEQ ID NO: 876431 - RNA, 19 nt, Homo sapiens
  misc_RNA (1)...(19): siRNA sense strand
ggcagaagauauauacagu

SEQ ID NO: 876432 - RNA, 19 nt, Homo sapiens
  misc_RNA (1)...(19): siRNA sense strand
ucacauauacaacacgauu

SEQ ID NO: 876433 - RNA, 19 nt, Homo sapiens
  misc_RNA (1)...(19): siRNA sense strand
ggucugacuucaaugagau

SEQ ID NO: 876434 - RNA, 19 nt, Homo sapiens
  misc_RNA (1)...(19): siRNA sense strand
gaaaagaaaaucuccauca

SEQ ID NO: 876435 - RNA, 19 nt, Homo sapiens
  misc_RNA (1)...(19): siRNA sense strand
ggcaaaugguuuaacuaug

SEQ ID NO: 876436 - RNA, 19 nt, Homo sapiens
  misc_RNA (1)...(19): siRNA sense strand
cauaacaggcaaaugguuu

SEQ ID NO: 876437 - RNA, 19 nt, Homo sapiens
  misc_RNA (1)...(19): siRNA sense strand
ugggagauguugauguaaa

SEQ ID NO: 876438 - RNA, 19 nt, Homo sapiens
  misc_RNA (1)...(19): siRNA sense strand
gaacagaaccaagcuaucc

SEQ ID NO: 876439 - RNA, 19 nt, Homo sapiens
  misc_RNA (1)...(19): siRNA sense strand
caucagaacauagcaaaga

SEQ ID NO: 876440 - RNA, 19 nt, Homo sapiens
  misc_RNA (1)...(19): siRNA sense strand
acacuaacccucggacuaa

SEQ ID NO: 876441 - RNA, 19 nt, Homo sapiens
  misc_RNA (1)...(19): siRNA sense strand
gcauauaucauuacagacu

SEQ ID NO: 876442 - RNA, 19 nt, Homo sapiens
  misc_RNA (1)...(19): siRNA sense strand
gcaaagacaugggaaucac

SEQ ID NO: 876443 - RNA, 19 nt, Homo sapiens
  misc_RNA (1)...(19): siRNA sense strand
ugagggagacauguucuua

SEQ ID NO: 876444 - RNA, 19 nt, Homo sapiens
  misc_RNA (1)...(19): siRNA sense strand
ggucaguugcuccgauuaa

SEQ ID NO: 876445 - RNA, 19 nt, Homo sapiens
  misc_RNA (1)...(19): siRNA sense strand
gcaugauuguggcuuacuu

SEQ ID NO: 876446 - RNA, 19 nt, Homo sapiens
  misc_RNA (1)...(19): siRNA sense strand
acaauguucuucagcacaa

SEQ ID NO: 876447 - RNA, 19 nt, Homo sapiens
  misc_RNA (1)...(19): siRNA sense strand
aagaaaaucuccaucagaa

SEQ ID NO: 876448 - RNA, 19 nt, Homo sapiens
  misc_RNA (1)...(19): siRNA sense strand
ucacaugcaguucaagauu

SEQ ID NO: 876449 - RNA, 19 nt, Homo sapiens
  misc_RNA (1)...(19): siRNA sense strand
acacgauucuucuaaugga

SEQ ID NO: 876450 - RNA, 19 nt, Homo sapiens
  misc_RNA (1)...(19): siRNA sense strand
gacaaacccuauccugacu

SEQ ID NO: 876451 - RNA, 19 nt, Homo sapiens
  misc_RNA (1)...(19): siRNA sense strand
gagaucgucuacaagucuu

SEQ ID NO: 876452 - RNA, 19 nt, Homo sapiens
  misc_RNA (1)...(19): siRNA sense strand
gcauggagaaucaagacaa

SEQ ID NO: 876453 - RNA, 19 nt, Homo sapiens
  misc_RNA (1)...(19): siRNA sense strand
gguuuggauucuuuauuug

SEQ ID NO: 876454 - RNA, 19 nt, Homo sapiens
  misc_RNA (1)...(19): siRNA sense strand
gaggacccaguuucucaua

SEQ ID NO: 876455 - RNA, 19 nt, Homo sapiens
  misc_RNA (1)...(19): siRNA sense strand
ggaaauguuaggaucacuu

SEQ ID NO: 876456 - RNA, 19 nt, Homo sapiens
  misc_RNA (1)...(19): siRNA sense strand
acaacacgauucuucuaau

SEQ ID NO: 876457 - RNA, 19 nt, Homo sapiens
  misc_RNA (1)...(19): siRNA sense strand
ggaagaaaggaaauguuag

SEQ ID NO: 876458 - RNA, 19 nt, Homo sapiens
  misc_RNA (1)...(19): siRNA sense strand
uauaugggcauccgaaaug

SEQ ID NO: 876459 - RNA, 19 nt, Homo sapiens
  misc_RNA (1)...(19): siRNA sense strand
gggagcauauaucauuaca

SEQ ID NO: 876460 - RNA, 19 nt, Homo sapiens
  misc_RNA (1)...(19): siRNA sense strand
ggacuaauagcuggcaaau

SEQ ID NO: 876461 - RNA, 19 nt, Homo sapiens
  misc_RNA (1)...(19): siRNA sense strand
aacagaagcugaucaagac

SEQ ID NO: 876462 - RNA, 19 nt, Homo sapiens
  misc_RNA (1)...(19): siRNA sense strand
cacaugcaguucaagauuc

SEQ ID NO: 876463 - RNA, 19 nt, Homo sapiens
  misc_RNA (1)...(19): siRNA sense strand
ucuuugaccuucuuauugu

SEQ ID NO: 876464 - RNA, 19 nt, Homo sapiens
  misc_RNA (1)...(19): siRNA sense strand
agacuuucguuacuauuuc

SEQ ID NO: 876465 - RNA, 19 nt, Homo sapiens
  misc_RNA (1)...(19): siRNA sense strand
gaugaaguuuccagagcau

SEQ ID NO: 876466 - RNA, 19 nt, Homo sapiens
  misc_RNA (1)...(19): siRNA sense strand
gauagccuuugugugguuu

SEQ ID NO: 876467 - RNA, 19 nt, Homo sapiens
  misc_RNA (1)...(19): siRNA sense strand
uuacacagcagguucauag

SEQ ID NO: 876468 - RNA, 19 nt, Homo sapiens
  misc_RNA (1)...(19): siRNA sense strand
auguaaaucucccugguuu

SEQ ID NO: 876469 - RNA, 19 nt, Homo sapiens
  misc_RNA (1)...(19): siRNA sense strand
gauguaaaucucccugguu

SEQ ID NO: 876470 - RNA, 19 nt, Homo sapiens
  misc_RNA (1)...(19): siRNA sense strand
ucuaauggaugggaacaug

SEQ ID NO: 876471 - RNA, 19 nt, Homo sapiens
  misc_RNA (1)...(19): siRNA sense strand
ugaaugacccuucuuuggu

SEQ ID NO: 876472 - RNA, 19 nt, Homo sapiens
  misc_RNA (1)...(19): siRNA sense strand
gaaaaucuccaucagaaca

SEQ ID NO: 876473 - RNA, 19 nt, Homo sapiens
  misc_RNA (1)...(19): siRNA sense strand
gggaacaugggagcauaua

SEQ ID NO: 876474 - RNA, 19 nt, Homo sapiens
  misc_RNA (1)...(19): siRNA sense strand
uagaagaccccuugaauga

SEQ ID NO: 876475 - RNA, 19 nt, Homo sapiens
  misc_RNA (1)...(19): siRNA sense strand
cauaggagccagucuugau

SEQ ID NO: 876476 - RNA, 19 nt, Homo sapiens
  misc_RNA (1)...(19): siRNA sense strand
cagcaagagcuuucuggaa

SEQ ID NO: 876477 - RNA, 19 nt, Homo sapiens
  misc_RNA (1)...(19): siRNA sense strand
caugaaauuagcugcagua

SEQ ID NO: 876478 - RNA, 19 nt, Homo sapiens
  misc_RNA (1)...(19): siRNA sense strand
gucaguugcuccgauuaaa

SEQ ID NO: 876479 - RNA, 19 nt, Homo sapiens
  misc_RNA (1)...(19): siRNA sense strand
ucccuggucucgcaugauu

SEQ ID NO: 876480 - RNA, 19 nt, Homo sapiens
  misc_RNA (1)...(19): siRNA sense strand
aaaucuccaucagaacaua

SEQ ID NO: 876481 - RNA, 19 nt, Homo sapiens
  misc_RNA (1)...(19): siRNA sense strand
uaacaggcaaaugguuuaa

SEQ ID NO: 876482 - RNA, 19 nt, Homo sapiens
  misc_RNA (1)...(19): siRNA sense strand
gcuuggauggucacugaua

SEQ ID NO: 876483 - RNA, 19 nt, Homo sapiens
  misc_RNA (1)...(19): siRNA sense strand
ggacccaguuucucauagc

SEQ ID NO: 876484 - RNA, 19 nt, Homo sapiens
  misc_RNA (1)...(19): siRNA sense strand
aaacuuacacucgcaugaa

SEQ ID NO: 876485 - RNA, 19 nt, Homo sapiens
  misc_RNA (1)...(19): siRNA sense strand
ugauagccuuugugugguu

SEQ ID NO: 876486 - RNA, 19 nt, Homo sapiens
  misc_RNA (1)...(19): siRNA sense strand
aaacacccaggcuucagua

SEQ ID NO: 876487 - RNA, 19 nt, Homo sapiens
  misc_RNA (1)...(19): siRNA sense strand
ugugugguuuggauucuuu

SEQ ID NO: 876488 - RNA, 19 nt, Homo sapiens
  misc_RNA (1)...(19): siRNA sense strand
uaacaagaaucgccuuuaa

SEQ ID NO: 876489 - RNA, 19 nt, Homo sapiens
  misc_RNA (1)...(19): siRNA sense strand
gaagauaccagaucaugaa

SEQ ID NO: 876490 - RNA, 19 nt, Homo sapiens
  misc_RNA (1)...(19): siRNA sense strand
caacggaccuggacguaga

SEQ ID NO: 876491 - RNA, 19 nt, Homo sapiens
  misc_RNA (1)...(19): siRNA sense strand
ggacguaagcgggacauua

SEQ ID NO: 876492 - RNA, 19 nt, Homo sapiens
  misc_RNA (1)...(19): siRNA sense strand
gauaccagaucaugaagga

SEQ ID NO: 876493 - RNA, 19 nt, Homo sapiens
  misc_RNA (1)...(19): siRNA sense strand
ggacguguaucugguagaa

SEQ ID NO: 876494 - RNA, 19 nt, Homo sapiens
  misc_RNA (1)...(19): siRNA sense strand
acaacaacgucgaucauuu

SEQ ID NO: 876495 - RNA, 19 nt, Homo sapiens
  misc_RNA (1)...(19): siRNA sense strand
caacaacgucgaucauuug

SEQ ID NO: 876496 - RNA, 19 nt, Homo sapiens
  misc_RNA (1)...(19): siRNA sense strand
gaagucaucugagcacauc

SEQ ID NO: 876497 - RNA, 19 nt, Homo sapiens
  misc_RNA (1)...(19): siRNA sense strand
ggacaagaaagaucuaugu

SEQ ID NO: 876498 - RNA, 19 nt, Homo sapiens
  misc_RNA (1)...(19): siRNA sense strand
gacguaagcgggacauuaa

SEQ ID NO: 876499 - RNA, 19 nt, Homo sapiens
  misc_RNA (1)...(19): siRNA sense strand
ggaagauaccagaucauga

SEQ ID NO: 876500 - RNA, 19 nt, Homo sapiens
  misc_RNA (1)...(19): siRNA sense strand
caucuuagggccucuauga

SEQ ID NO: 876501 - RNA, 19 nt, Homo sapiens
  misc_RNA (1)...(19): siRNA sense strand
gcaaguggguggauaugcu

SEQ ID NO: 876502 - RNA, 19 nt, Homo sapiens
  misc_RNA (1)...(19): siRNA sense strand
gaaacuaacaagaaagaag

SEQ ID NO: 876503 - RNA, 19 nt, Homo sapiens
  misc_RNA (1)...(19): siRNA sense strand
cagaagcgccucacgaaga

SEQ ID NO: 876504 - RNA, 19 nt, Homo sapiens
  misc_RNA (1)...(19): siRNA sense strand
ggacauuaaggaagcauau

SEQ ID NO: 876505 - RNA, 19 nt, Homo sapiens
  misc_RNA (1)...(19): siRNA sense strand
gagcgagaggacaucauua

SEQ ID NO: 876506 - RNA, 19 nt, Homo sapiens
  misc_RNA (1)...(19): siRNA sense strand
gcccuugguuccgccauua

SEQ ID NO: 876507 - RNA, 19 nt, Homo sapiens
  misc_RNA (1)...(19): siRNA sense strand
gauaacaagaaucgccuuu

SEQ ID NO: 876508 - RNA, 19 nt, Homo sapiens
  misc_RNA (1)...(19): siRNA sense strand
acaagggaaugcccaugaa

SEQ ID NO: 876509 - RNA, 19 nt, Homo sapiens
  misc_RNA (1)...(19): siRNA sense strand
cugaggaaaugaaguugaa

SEQ ID NO: 876510 - RNA, 19 nt, Homo sapiens
  misc_RNA (1)...(19): siRNA sense strand
ccugaacacugaggaaaug

SEQ ID NO: 876511 - RNA, 19 nt, Homo sapiens
  misc_RNA (1)...(19): siRNA sense strand
gaagaaacuaacaagaaag

SEQ ID NO: 876512 - RNA, 19 nt, Homo sapiens
  misc_RNA (1)...(19): siRNA sense strand
gcgcugaugccgauaacaa

SEQ ID NO: 876513 - RNA, 19 nt, Homo sapiens
  misc_RNA (1)...(19): siRNA sense strand
gaacacugaggaaaugaag

SEQ ID NO: 876514 - RNA, 19 nt, Homo sapiens
  misc_RNA (1)...(19): siRNA sense strand
cuuagggccucuaugaaga

SEQ ID NO: 876515 - RNA, 19 nt, Homo sapiens
  misc_RNA (1)...(19): siRNA sense strand
cuucagagcuagggacgaa

SEQ ID NO: 876516 - RNA, 19 nt, Homo sapiens
  misc_RNA (1)...(19): siRNA sense strand
caacaacaacgucgaucau

SEQ ID NO: 876517 - RNA, 19 nt, Homo sapiens
  misc_RNA (1)...(19): siRNA sense strand
uuucgaagcuacaacaaca

SEQ ID NO: 876518 - RNA, 19 nt, Homo sapiens
  misc_RNA (1)...(19): siRNA sense strand
cauuaugauuucagacaga

SEQ ID NO: 876519 - RNA, 19 nt, Homo sapiens
  misc_RNA (1)...(19): siRNA sense strand
cagcagaaagcucauagau

SEQ ID NO: 876520 - RNA, 19 nt, Homo sapiens
  misc_RNA (1)...(19): siRNA sense strand
ccaacaggagcauguggua

SEQ ID NO: 876521 - RNA, 19 nt, Homo sapiens
  misc_RNA (1)...(19): siRNA sense strand
acacugaggaaaugaaguu

SEQ ID NO: 876522 - RNA, 19 nt, Homo sapiens
  misc_RNA (1)...(19): siRNA sense strand
gagacugggagaaauacaa

SEQ ID NO: 876523 - RNA, 19 nt, Homo sapiens
  misc_RNA (1)...(19): siRNA sense strand
gacauuaaggaagcauaua

SEQ ID NO: 876524 - RNA, 19 nt, Homo sapiens
  misc_RNA (1)...(19): siRNA sense strand
guuccgccauuaugauuuc

SEQ ID NO: 876525 - RNA, 19 nt, Homo sapiens
  misc_RNA (1)...(19): siRNA sense strand
ugaaggagaagggcaagaa

SEQ ID NO: 876526 - RNA, 19 nt, Homo sapiens
  misc_RNA (1)...(19): siRNA sense strand
ggagaagggcaagaaguca

SEQ ID NO: 876527 - RNA, 19 nt, Homo sapiens
  misc_RNA (1)...(19): siRNA sense strand
ggcgggagaucagccgaaa

SEQ ID NO: 876528 - RNA, 19 nt, Homo sapiens
  misc_RNA (1)...(19): siRNA sense strand
cuuggaaaguucucaguuc

SEQ ID NO: 876529 - RNA, 19 nt, Homo sapiens
  misc_RNA (1)...(19): siRNA sense strand
gcgagaggacaucauuaug

SEQ ID NO: 876530 - RNA, 19 nt, Homo sapiens
  misc_RNA (1)...(19): siRNA sense strand
gaaccaagcagcgggaacu

SEQ ID NO: 876531 - RNA, 19 nt, Homo sapiens
  misc_RNA (1)...(19): siRNA sense strand
guaagcgggacauuaagga

SEQ ID NO: 876532 - RNA, 19 nt, Homo sapiens
  misc_RNA (1)...(19): siRNA sense strand
gcugggagacugggagaaa

SEQ ID NO: 876533 - RNA, 19 nt, Homo sapiens
  misc_RNA (1)...(19): siRNA sense strand
cgggagaucagccgaaaga

SEQ ID NO: 876534 - RNA, 19 nt, Homo sapiens
  misc_RNA (1)...(19): siRNA sense strand
gaaggagaagggcaagaag

SEQ ID NO: 876535 - RNA, 19 nt, Homo sapiens
  misc_RNA (1)...(19): siRNA sense strand
gcaguuggugggcacaaga

SEQ ID NO: 876536 - RNA, 19 nt, Homo sapiens
  misc_RNA (1)...(19): siRNA sense strand
gacaagaaagaucuaugug

SEQ ID NO: 876537 - RNA, 19 nt, Homo sapiens
  misc_RNA (1)...(19): siRNA sense strand
ggcaucaggacaagaaaga

SEQ ID NO: 876538 - RNA, 19 nt, Homo sapiens
  misc_RNA (1)...(19): siRNA sense strand
aagagcaaguggguggaua

SEQ ID NO: 876539 - RNA, 19 nt, Homo sapiens
  misc_RNA (1)...(19): siRNA sense strand
gcgggaagacccucugcaa

SEQ ID NO: 876540 - RNA, 19 nt, Homo sapiens
  misc_RNA (1)...(19): siRNA sense strand
gggccucuaugaagaaacu

SEQ ID NO: 876541 - RNA, 19 nt, Homo sapiens
  misc_RNA (1)...(19): siRNA sense strand
gaagcuacaacaacaacgu

SEQ ID NO: 876542 - RNA, 19 nt, Homo sapiens
  misc_RNA (1)...(19): siRNA sense strand
ugggagacugggagaaaua

SEQ ID NO: 876543 - RNA, 19 nt, Homo sapiens
  misc_RNA (1)...(19): siRNA sense strand
gcugaugccgauaacaaga

SEQ ID NO: 876544 - RNA, 19 nt, Homo sapiens
  misc_RNA (1)...(19): siRNA sense strand
agacugggagaaauacaaa

SEQ ID NO: 876545 - RNA, 19 nt, Homo sapiens
  misc_RNA (1)...(19): siRNA sense strand
gagaagggcaagaagucau

SEQ ID NO: 876546 - RNA, 19 nt, Homo sapiens
  misc_RNA (1)...(19): siRNA sense strand
ucauagaucgagcguacaa

SEQ ID NO: 876547 - RNA, 19 nt, Homo sapiens
  misc_RNA (1)...(19): siRNA sense strand
uacaagggaaugcccauga

SEQ ID NO: 876548 - RNA, 19 nt, Homo sapiens
  misc_RNA (1)...(19): siRNA sense strand
gcagcagaaagcucauaga

SEQ ID NO: 876549 - RNA, 19 nt, Homo sapiens
  misc_RNA (1)...(19): siRNA sense strand
auaacaagaaucgccuuua

SEQ ID NO: 876550 - RNA, 19 nt, Homo sapiens
  misc_RNA (1)...(19): siRNA sense strand
cccggaagauaccagauca

SEQ ID NO: 876551 - RNA, 19 nt, Homo sapiens
  misc_RNA (1)...(19): siRNA sense strand
gagcaaguggguggauaug

SEQ ID NO: 876552 - RNA, 19 nt, Homo sapiens
  misc_RNA (1)...(19): siRNA sense strand
uggcauaugaggaguacaa

SEQ ID NO: 876553 - RNA, 19 nt, Homo sapiens
  misc_RNA (1)...(19): siRNA sense strand
cggaagauaccagaucaug

SEQ ID NO: 876554 - RNA, 19 nt, Homo sapiens
  misc_RNA (1)...(19): siRNA sense strand
gccauuaugauuucagaca

SEQ ID NO: 876555 - RNA, 19 nt, Homo sapiens
  misc_RNA (1)...(19): siRNA sense strand
ucauccggauauugauuga

SEQ ID NO: 876556 - RNA, 19 nt, Homo sapiens
  misc_RNA (1)...(19): siRNA sense strand
caucaggacaagaaagauc

SEQ ID NO: 876557 - RNA, 19 nt, Homo sapiens
  misc_RNA (1)...(19): siRNA sense strand
uaagcgggacauuaaggaa

SEQ ID NO: 876558 - RNA, 19 nt, Homo sapiens
  misc_RNA (1)...(19): siRNA sense strand
agagcgagaggacaucauu

SEQ ID NO: 876559 - RNA, 19 nt, Homo sapiens
  misc_RNA (1)...(19): siRNA sense strand
ccacauccuccuggcauau

SEQ ID NO: 876560 - RNA, 19 nt, Homo sapiens
  misc_RNA (1)...(19): siRNA sense strand
ugaugccgauaacaagaau

SEQ ID NO: 876561 - RNA, 19 nt, Homo sapiens
  misc_RNA (1)...(19): siRNA sense strand
agaagcgccucacgaagac

SEQ ID NO: 876562 - RNA, 19 nt, Homo sapiens
  misc_RNA (1)...(19): siRNA sense strand
ggcccuugguuccgccauu

SEQ ID NO: 876563 - RNA, 19 nt, Homo sapiens
  misc_RNA (1)...(19): siRNA sense strand
ccagggaugaggacacugu

SEQ ID NO: 876564 - RNA, 19 nt, Homo sapiens
  misc_RNA (1)...(19): siRNA sense strand
ugccucauccggauauuga

SEQ ID NO: 876565 - RNA, 19 nt, Homo sapiens
  misc_RNA (1)...(19): siRNA sense strand
ccgccauuaugauuucaga

SEQ ID NO: 876566 - RNA, 19 nt, Homo sapiens
  misc_RNA (1)...(19): siRNA sense strand
ccacgggcaccucguucuu

SEQ ID NO: 876567 - RNA, 19 nt, Homo sapiens
  misc_RNA (1)...(19): siRNA sense strand
gcgggaggcgaagcaaauu

SEQ ID NO: 876568 - RNA, 19 nt, Homo sapiens
  misc_RNA (1)...(19): siRNA sense strand
gagaagaugucccguguga

SEQ ID NO: 876569 - RNA, 19 nt, Homo sapiens
  misc_RNA (1)...(19): siRNA sense strand
ggacacagcugagcguuau

SEQ ID NO: 876570 - RNA, 19 nt, Homo sapiens
  misc_RNA (1)...(19): siRNA sense strand
gaacacaagcgcacgguaa

SEQ ID NO: 876571 - RNA, 19 nt, Homo sapiens
  misc_RNA (1)...(19): siRNA sense strand
ccaaggagaugcacugugu

SEQ ID NO: 876572 - RNA, 19 nt, Homo sapiens
  misc_RNA (1)...(19): siRNA sense strand
cgacguaccugccgacuac

SEQ ID NO: 876573 - RNA, 19 nt, Homo sapiens
  misc_RNA (1)...(19): siRNA sense strand
gugaaggucugggacauga

SEQ ID NO: 876574 - RNA, 19 nt, Homo sapiens
  misc_RNA (1)...(19): siRNA sense strand
gcgacaugcugcacuucua

SEQ ID NO: 876575 - RNA, 19 nt, Homo sapiens
  misc_RNA (1)...(19): siRNA sense strand
gcgacaagauggugaaggu

SEQ ID NO: 876576 - RNA, 19 nt, Homo sapiens
  misc_RNA (1)...(19): siRNA sense strand
caaugaggauaacgaggaa

SEQ ID NO: 876577 - RNA, 19 nt, Homo sapiens
  misc_RNA (1)...(19): siRNA sense strand
cgugccagcugccauguuu

SEQ ID NO: 876578 - RNA, 19 nt, Homo sapiens
  misc_RNA (1)...(19): siRNA sense strand
caggagcacugguacacuu

SEQ ID NO: 876579 - RNA, 19 nt, Homo sapiens
  misc_RNA (1)...(19): siRNA sense strand
gcuuugaccuccgcagaaa

SEQ ID NO: 876580 - RNA, 19 nt, Homo sapiens
  misc_RNA (1)...(19): siRNA sense strand
gcaaccagguggcgcaaac

SEQ ID NO: 876581 - RNA, 19 nt, Homo sapiens
  misc_RNA (1)...(19): siRNA sense strand
ggcaccagauggaugagaa

SEQ ID NO: 876582 - RNA, 19 nt, Homo sapiens
  misc_RNA (1)...(19): siRNA sense strand
ggaaggcagcucccacugu

SEQ ID NO: 876583 - RNA, 19 nt, Homo sapiens
  misc_RNA (1)...(19): siRNA sense strand
ccaacgagguggucaagcu

SEQ ID NO: 876584 - RNA, 19 nt, Homo sapiens
  misc_RNA (1)...(19): siRNA sense strand
caccuucgccuccaccuuu

SEQ ID NO: 876585 - RNA, 19 nt, Homo sapiens
  misc_RNA (1)...(19): siRNA sense strand
caagcgcacgguaaacaaa

SEQ ID NO: 876586 - RNA, 19 nt, Homo sapiens
  misc_RNA (1)...(19): siRNA sense strand
ccaccacccugcacgucaa

SEQ ID NO: 876587 - RNA, 19 nt, Homo sapiens
  misc_RNA (1)...(19): siRNA sense strand
ccgagcaccugcaggacaa

SEQ ID NO: 876588 - RNA, 19 nt, Homo sapiens
  misc_RNA (1)...(19): siRNA sense strand
ccacagcagccaccaaugg

SEQ ID NO: 876589 - RNA, 19 nt, Homo sapiens
  misc_RNA (1)...(19): siRNA sense strand
ggaccaugcugcggaucau

SEQ ID NO: 876590 - RNA, 19 nt, Homo sapiens
  misc_RNA (1)...(19): siRNA sense strand
gugaggaggacgagcugua

SEQ ID NO: 876591 - RNA, 19 nt, Homo sapiens
  misc_RNA (1)...(19): siRNA sense strand
gccaaugccaucagugugu

SEQ ID NO: 876592 - RNA, 19 nt, Homo sapiens
  misc_RNA (1)...(19): siRNA sense strand
uaaacaaagucugcuucca

SEQ ID NO: 876593 - RNA, 19 nt, Homo sapiens
  misc_RNA (1)...(19): siRNA sense strand
gugaacgggugcgcaagga

SEQ ID NO: 876594 - RNA, 19 nt, Homo sapiens
  misc_RNA (1)...(19): siRNA sense strand
cggccacacucaucaccaa

SEQ ID NO: 876595 - RNA, 19 nt, Homo sapiens
  misc_RNA (1)...(19): siRNA sense strand
ggacgugcaguucaguauc

SEQ ID NO: 876596 - RNA, 19 nt, Homo sapiens
  misc_RNA (1)...(19): siRNA sense strand
ccagugcccucagugucuu

SEQ ID NO: 876597 - RNA, 19 nt, Homo sapiens
  misc_RNA (1)...(19): siRNA sense strand
ggccacagcagccaccaau

SEQ ID NO: 876598 - RNA, 19 nt, Homo sapiens
  misc_RNA (1)...(19): siRNA sense strand
ggcaggccguagcaucuuc

SEQ ID NO: 876599 - RNA, 19 nt, Homo sapiens
  misc_RNA (1)...(19): siRNA sense strand
gggacgugcaguucaguau

SEQ ID NO: 876600 - RNA, 19 nt, Homo sapiens
  misc_RNA (1)...(19): siRNA sense strand
cugguacacuuccuacauc

SEQ ID NO: 876601 - RNA, 19 nt, Homo sapiens
  misc_RNA (1)...(19): siRNA sense strand
gacgugcaguucaguaucc

SEQ ID NO: 876602 - RNA, 19 nt, Homo sapiens
  misc_RNA (1)...(19): siRNA sense strand
ugcagcacaucaugaagug

SEQ ID NO: 876603 - RNA, 19 nt, Homo sapiens
  misc_RNA (1)...(19): siRNA sense strand
ccuucucgcuccugucugu

SEQ ID NO: 876604 - RNA, 19 nt, Homo sapiens
  misc_RNA (1)...(19): siRNA sense strand
ccugcugggugacguggaa

SEQ ID NO: 876605 - RNA, 19 nt, Homo sapiens
  misc_RNA (1)...(19): siRNA sense strand
gcucaguggcucccaggau

SEQ ID NO: 876606 - RNA, 19 nt, Homo sapiens
  misc_RNA (1)...(19): siRNA sense strand
ggauuucuguuucccuuua

SEQ ID NO: 876607 - RNA, 19 nt, Homo sapiens
  misc_RNA (1)...(19): siRNA sense strand
ggaucuugcucauguauuu

SEQ ID NO: 876608 - RNA, 19 nt, Homo sapiens
  misc_RNA (1)...(19): siRNA sense strand
ggaccugccucuaaaauaa

SEQ ID NO: 876609 - RNA, 19 nt, Homo sapiens
  misc_RNA (1)...(19): siRNA sense strand
gcauccaaguucauaauug

SEQ ID NO: 876610 - RNA, 19 nt, Homo sapiens
  misc_RNA (1)...(19): siRNA sense strand
gcucuaggcauaccacaua

SEQ ID NO: 876611 - RNA, 19 nt, Homo sapiens
  misc_RNA (1)...(19): siRNA sense strand
gaacaacacugauuuucug

SEQ ID NO: 876612 - RNA, 19 nt, Homo sapiens
  misc_RNA (1)...(19): siRNA sense strand
uuacggaucuugcucaugu

SEQ ID NO: 876613 - RNA, 19 nt, Homo sapiens
  misc_RNA (1)...(19): siRNA sense strand
gaguuuaccuacagucuca

SEQ ID NO: 876614 - RNA, 19 nt, Homo sapiens
  misc_RNA (1)...(19): siRNA sense strand
cauccaaguucauaauugu

SEQ ID NO: 876615 - RNA, 19 nt, Homo sapiens
  misc_RNA (1)...(19): siRNA sense strand
ggacaaauaaaggcagauu

SEQ ID NO: 876616 - RNA, 19 nt, Homo sapiens
  misc_RNA (1)...(19): siRNA sense strand
ggacaaguugggaggcuaa

SEQ ID NO: 876617 - RNA, 19 nt, Homo sapiens
  misc_RNA (1)...(19): siRNA sense strand
cuaggcauaccacauaaua

SEQ ID NO: 876618 - RNA, 19 nt, Homo sapiens
  misc_RNA (1)...(19): siRNA sense strand
gcaaugaaagagcuuaucu

SEQ ID NO: 876619 - RNA, 19 nt, Homo sapiens
  misc_RNA (1)...(19): siRNA sense strand
cauaauacccaagcacauu

SEQ ID NO: 876620 - RNA, 19 nt, Homo sapiens
  misc_RNA (1)...(19): siRNA sense strand
ggacgaguuuaccuacagu

SEQ ID NO: 876621 - RNA, 19 nt, Homo sapiens
  misc_RNA (1)...(19): siRNA sense strand
caacacugauuuucugaug

SEQ ID NO: 876622 - RNA, 19 nt, Homo sapiens
  misc_RNA (1)...(19): siRNA sense strand
ccuacagucucaccaagca

SEQ ID NO: 876623 - RNA, 19 nt, Homo sapiens
  misc_RNA (1)...(19): siRNA sense strand
auaauacccaagcacauuu

SEQ ID NO: 876624 - RNA, 19 nt, Homo sapiens
  misc_RNA (1)...(19): siRNA sense strand
uuccauggauuucuguuuc

SEQ ID NO: 876625 - RNA, 19 nt, Homo sapiens
  misc_RNA (1)...(19): siRNA sense strand
guaacuggacaaauaaagg

SEQ ID NO: 876626 - RNA, 19 nt, Homo sapiens
  misc_RNA (1)...(19): siRNA sense strand
ucuguuucccuuuagauuu

SEQ ID NO: 876627 - RNA, 19 nt, Homo sapiens
  misc_RNA (1)...(19): siRNA sense strand
gauuucuguuucccuuuag

SEQ ID NO: 876628 - RNA, 19 nt, Homo sapiens
  misc_RNA (1)...(19): siRNA sense strand
gaugaacaacacugauuuu

SEQ ID NO: 876629 - RNA, 19 nt, Homo sapiens
  misc_RNA (1)...(19): siRNA sense strand
acacugauuuucugauguu

SEQ ID NO: 876630 - RNA, 19 nt, Homo sapiens
  misc_RNA (1)...(19): siRNA sense strand
aaaggcagauuuuaaaagg

SEQ ID NO: 876631 - RNA, 19 nt, Homo sapiens
  misc_RNA (1)...(19): siRNA sense strand
gaacgaaucuagacaaacu

SEQ ID NO: 876632 - RNA, 19 nt, Homo sapiens
  misc_RNA (1)...(19): siRNA sense strand
gcagagaaaugaaucuaga

SEQ ID NO: 876633 - RNA, 19 nt, Homo sapiens
  misc_RNA (1)...(19): siRNA sense strand
gaaggaauaccuaaagaaa

SEQ ID NO: 876634 - RNA, 19 nt, Homo sapiens
  misc_RNA (1)...(19): siRNA sense strand
caagaugccuaaagacaaa

SEQ ID NO: 876635 - RNA, 19 nt, Homo sapiens
  misc_RNA (1)...(19): siRNA sense strand
gaccagcucucuauucuga

SEQ ID NO: 876636 - RNA, 19 nt, Homo sapiens
  misc_RNA (1)...(19): siRNA sense strand
ggagagaaauuggugguuu

SEQ ID NO: 876637 - RNA, 19 nt, Homo sapiens
  misc_RNA (1)...(19): siRNA sense strand
ggacccaacuugccagaaa

SEQ ID NO: 876638 - RNA, 19 nt, Homo sapiens
  misc_RNA (1)...(19): siRNA sense strand
ccaauggccucaacaauca

SEQ ID NO: 876639 - RNA, 19 nt, Homo sapiens
  misc_RNA (1)...(19): siRNA sense strand
acacagaaaugaaacagaa

SEQ ID NO: 876640 - RNA, 19 nt, Homo sapiens
  misc_RNA (1)...(19): siRNA sense strand
ggaauuaaagagcguuaua

SEQ ID NO: 876641 - RNA, 19 nt, Homo sapiens
  misc_RNA (1)...(19): siRNA sense strand
gaaaggagcagcagaaacu

SEQ ID NO: 876642 - RNA, 19 nt, Homo sapiens
  misc_RNA (1)...(19): siRNA sense strand
ugaacuaaaugcucucaaa

SEQ ID NO: 876643 - RNA, 19 nt, Homo sapiens
  misc_RNA (1)...(19): siRNA sense strand
uggcaaagaugauaagaga

SEQ ID NO: 876644 - RNA, 19 nt, Homo sapiens
  misc_RNA (1)...(19): siRNA sense strand
gaacaggucaucauugaag

SEQ ID NO: 876645 - RNA, 19 nt, Homo sapiens
  misc_RNA (1)...(19): siRNA sense strand
cauugaagaucguauagaa

SEQ ID NO: 876646 - RNA, 19 nt, Homo sapiens
  misc_RNA (1)...(19): siRNA sense strand
gaagaagaaggaauaccua

SEQ ID NO: 876647 - RNA, 19 nt, Homo sapiens
  misc_RNA (1)...(19): siRNA sense strand
caggaucucuuggaauuaa

SEQ ID NO: 876648 - RNA, 19 nt, Homo sapiens
  misc_RNA (1)...(19): siRNA sense strand
gaaauacgauaaggacaca

SEQ ID NO: 876649 - RNA, 19 nt, Homo sapiens
  misc_RNA (1)...(19): siRNA sense strand
gagaaucgcuacaugaaaa

SEQ ID NO: 876650 - RNA, 19 nt, Homo sapiens
  misc_RNA (1)...(19): siRNA sense strand
gaagaaggaauaccuaaag

SEQ ID NO: 876651 - RNA, 19 nt, Homo sapiens
  misc_RNA (1)...(19): siRNA sense strand
agaaaugaaucuagaagga

SEQ ID NO: 876652 - RNA, 19 nt, Homo sapiens
  misc_RNA (1)...(19): siRNA sense strand
gagauugaaauguuccuua

SEQ ID NO: 876653 - RNA, 19 nt, Homo sapiens
  misc_RNA (1)...(19): siRNA sense strand
ggaagaagacagccuggaa

SEQ ID NO: 876654 - RNA, 19 nt, Homo sapiens
  misc_RNA (1)...(19): siRNA sense strand
cacaaaggccagugacuua

SEQ ID NO: 876655 - RNA, 19 nt, Homo sapiens
  misc_RNA (1)...(19): siRNA sense strand
gauaaggacacagaaauga

SEQ ID NO: 876656 - RNA, 19 nt, Homo sapiens
  misc_RNA (1)...(19): siRNA sense strand
acucaaaccuuccuccaaa

SEQ ID NO: 876657 - RNA, 19 nt, Homo sapiens
  misc_RNA (1)...(19): siRNA sense strand
ccacagaccagcucucuau

SEQ ID NO: 876658 - RNA, 19 nt, Homo sapiens
  misc_RNA (1)...(19): siRNA sense strand
caaagaugauaagagagua

SEQ ID NO: 876659 - RNA, 19 nt, Homo sapiens
  misc_RNA (1)...(19): siRNA sense strand
gcaaagaugauaagagagu

SEQ ID NO: 876660 - RNA, 19 nt, Homo sapiens
  misc_RNA (1)...(19): siRNA sense strand
cagaaugaguauauugcua

SEQ ID NO: 876661 - RNA, 19 nt, Homo sapiens
  misc_RNA (1)...(19): siRNA sense strand
gaaaugaaucuagaaggaa

SEQ ID NO: 876662 - RNA, 19 nt, Homo sapiens
  misc_RNA (1)...(19): siRNA sense strand
aacaggaucucuuggaauu

SEQ ID NO: 876663 - RNA, 19 nt, Homo sapiens
  misc_RNA (1)...(19): siRNA sense strand
uuaaggaguugcaagauuc

SEQ ID NO: 876664 - RNA, 19 nt, Homo sapiens
  misc_RNA (1)...(19): siRNA sense strand
ggauggagaaauacgauaa

SEQ ID NO: 876665 - RNA, 19 nt, Homo sapiens
  misc_RNA (1)...(19): siRNA sense strand
cguagaagaagaaggaaua

SEQ ID NO: 876666 - RNA, 19 nt, Homo sapiens
  misc_RNA (1)...(19): siRNA sense strand
gaaaugaaacagaaugaac

SEQ ID NO: 876667 - RNA, 19 nt, Homo sapiens
  misc_RNA (1)...(19): siRNA sense strand
ggacucauacagagauuga

SEQ ID NO: 876668 - RNA, 19 nt, Homo sapiens
  misc_RNA (1)...(19): siRNA sense strand
ugcaagagaugaaggcaaa

SEQ ID NO: 876669 - RNA, 19 nt, Homo sapiens
  misc_RNA (1)...(19): siRNA sense strand
cagauaccauuaaggaguu

SEQ ID NO: 876670 - RNA, 19 nt, Homo sapiens
  misc_RNA (1)...(19): siRNA sense strand
gcaggaucuugucuucaaa

SEQ ID NO: 876671 - RNA, 19 nt, Homo sapiens
  misc_RNA (1)...(19): siRNA sense strand
gaaacagacauagaaauca

SEQ ID NO: 876672 - RNA, 19 nt, Homo sapiens
  misc_RNA (1)...(19): siRNA sense strand
aggaauaccuaaagaaaca

SEQ ID NO: 876673 - RNA, 19 nt, Homo sapiens
  misc_RNA (1)...(19): siRNA sense strand
uggaagagauugagaaacu

SEQ ID NO: 876674 - RNA, 19 nt, Homo sapiens
  misc_RNA (1)...(19): siRNA sense strand
caacuugccagaaaucaga

SEQ ID NO: 876675 - RNA, 19 nt, Homo sapiens
  misc_RNA (1)...(19): siRNA sense strand
ggagaaucgcuacaugaaa

SEQ ID NO: 876676 - RNA, 19 nt, Homo sapiens
  misc_RNA (1)...(19): siRNA sense strand
gauaagagaguaugaacag

SEQ ID NO: 876677 - RNA, 19 nt, Homo sapiens
  misc_RNA (1)...(19): siRNA sense strand
gaacuaaaugcucucaaag

SEQ ID NO: 876678 - RNA, 19 nt, Homo sapiens
  misc_RNA (1)...(19): siRNA sense strand
uaaggacacagaaaugaaa

SEQ ID NO: 876679 - RNA, 19 nt, Homo sapiens
  misc_RNA (1)...(19): siRNA sense strand
aagaaggaauaccuaaaga

SEQ ID NO: 876680 - RNA, 19 nt, Homo sapiens
  misc_RNA (1)...(19): siRNA sense strand
gauaagaggagaggcaaga

SEQ ID NO: 876681 - RNA, 19 nt, Homo sapiens
  misc_RNA (1)...(19): siRNA sense strand
caaaguugauagcaaggau

SEQ ID NO: 876682 - RNA, 19 nt, Homo sapiens
  misc_RNA (1)...(19): siRNA sense strand
uaaagagcguuauaaagcu

SEQ ID NO: 876683 - RNA, 19 nt, Homo sapiens
  misc_RNA (1)...(19): siRNA sense strand
ggagcaagaagaagguaaa

SEQ ID NO: 876684 - RNA, 19 nt, Homo sapiens
  misc_RNA (1)...(19): siRNA sense strand
ugacuuagcacaccuucaa

SEQ ID NO: 876685 - RNA, 19 nt, Homo sapiens
  misc_RNA (1)...(19): siRNA sense strand
gaagggagacagagcaucu

SEQ ID NO: 876686 - RNA, 19 nt, Homo sapiens
  misc_RNA (1)...(19): siRNA sense strand
guuucaagaugccuaaaga

SEQ ID NO: 876687 - RNA, 19 nt, Homo sapiens
  misc_RNA (1)...(19): siRNA sense strand
gcacuaugauacggagaga

SEQ ID NO: 876688 - RNA, 19 nt, Homo sapiens
  misc_RNA (1)...(19): siRNA sense strand
gaagacagccuggaagacu

SEQ ID NO: 876689 - RNA, 19 nt, Homo sapiens
  misc_RNA (1)...(19): siRNA sense strand
guauauugcuaaccucaag

SEQ ID NO: 876690 - RNA, 19 nt, Homo sapiens
  misc_RNA (1)...(19): siRNA sense strand
gcaaagagagggaaaacaa

SEQ ID NO: 876691 - RNA, 19 nt, Homo sapiens
  misc_RNA (1)...(19): siRNA sense strand
cagaccagcucucuauucu

SEQ ID NO: 876692 - RNA, 19 nt, Homo sapiens
  misc_RNA (1)...(19): siRNA sense strand
aaagguaaaggcaaggaua

SEQ ID NO: 876693 - RNA, 19 nt, Homo sapiens
  misc_RNA (1)...(19): siRNA sense strand
cuaaagaaacagacauaga

SEQ ID NO: 876694 - RNA, 19 nt, Homo sapiens
  misc_RNA (1)...(19): siRNA sense strand
uuacaacagucuccugcaa

SEQ ID NO: 876695 - RNA, 19 nt, Homo sapiens
  misc_RNA (1)...(19): siRNA sense strand
ccgguucgcuguggaguuu

SEQ ID NO: 876696 - RNA, 19 nt, Homo sapiens
  misc_RNA (1)...(19): siRNA sense strand
cuacggagacacugaagaa

SEQ ID NO: 876697 - RNA, 19 nt, Homo sapiens
  misc_RNA (1)...(19): siRNA sense strand
caucauugaagaucguaua

SEQ ID NO: 876698 - RNA, 19 nt, Homo sapiens
  misc_RNA (1)...(19): siRNA sense strand
auagaaaucaucccagaaa

SEQ ID NO: 876699 - RNA, 19 nt, Homo sapiens
  misc_RNA (1)...(19): siRNA sense strand
uuaaagagcguuauaaagc

SEQ ID NO: 876700 - RNA, 19 nt, Homo sapiens
  misc_RNA (1)...(19): siRNA sense strand
ucagauugauaggcaguuu

SEQ ID NO: 876701 - RNA, 19 nt, Homo sapiens
  misc_RNA (1)...(19): siRNA sense strand
gaaaucaucccagaaaucc

SEQ ID NO: 876702 - RNA, 19 nt, Homo sapiens
  misc_RNA (1)...(19): siRNA sense strand
uagaaaucaucccagaaau

SEQ ID NO: 876703 - RNA, 19 nt, Homo sapiens
  misc_RNA (1)...(19): siRNA sense strand
ggagaggcaagaagaagug

SEQ ID NO: 876704 - RNA, 19 nt, Homo sapiens
  misc_RNA (1)...(19): siRNA sense strand
ccacaaaggccagugacuu

SEQ ID NO: 876705 - RNA, 19 nt, Homo sapiens
  misc_RNA (1)...(19): siRNA sense strand
gcgaugugauugcagauac

SEQ ID NO: 876706 - RNA, 19 nt, Homo sapiens
  misc_RNA (1)...(19): siRNA sense strand
agaaacagacauagaaauc

SEQ ID NO: 876707 - RNA, 19 nt, Homo sapiens
  misc_RNA (1)...(19): siRNA sense strand
gguaaaggcaaggauaaga

SEQ ID NO: 876708 - RNA, 19 nt, Homo sapiens
  misc_RNA (1)...(19): siRNA sense strand
ggaauggcaauuugaaguc

SEQ ID NO: 876709 - RNA, 19 nt, Homo sapiens
  misc_RNA (1)...(19): siRNA sense strand
gaaucuagaaggaacgaau

SEQ ID NO: 876710 - RNA, 19 nt, Homo sapiens
  misc_RNA (1)...(19): siRNA sense strand
ucaagaugccuaaagacaa

SEQ ID NO: 876711 - RNA, 19 nt, Homo sapiens
  misc_RNA (1)...(19): siRNA sense strand
gaugauaagagaguaugaa

SEQ ID NO: 876712 - RNA, 19 nt, Homo sapiens
  misc_RNA (1)...(19): siRNA sense strand
uucaagaccuggcaaagau

SEQ ID NO: 876713 - RNA, 19 nt, Homo sapiens
  misc_RNA (1)...(19): siRNA sense strand
ugcaggaucuugucuucaa

SEQ ID NO: 876714 - RNA, 19 nt, Homo sapiens
  misc_RNA (1)...(19): siRNA sense strand
gguucgcuguggaguuuaa

SEQ ID NO: 876715 - RNA, 19 nt, Homo sapiens
  misc_RNA (1)...(19): siRNA sense strand
gacccaacuugccagaaau

SEQ ID NO: 876716 - RNA, 19 nt, Homo sapiens
  misc_RNA (1)...(19): siRNA sense strand
gaaggaacgaaucuagaca

SEQ ID NO: 876717 - RNA, 19 nt, Homo sapiens
  misc_RNA (1)...(19): siRNA sense strand
gauugcagauaccauuaag

SEQ ID NO: 876718 - RNA, 19 nt, Homo sapiens
  misc_RNA (1)...(19): siRNA sense strand
ggaagagauugagaaacuc

SEQ ID NO: 876719 - RNA, 19 nt, Homo sapiens
  misc_RNA (1)...(19): siRNA sense strand
gguggaagagauugagaaa

SEQ ID NO: 876720 - RNA, 19 nt, Homo sapiens
  misc_RNA (1)...(19): siRNA sense strand
auuaaggaguugcaagauu

SEQ ID NO: 876721 - RNA, 19 nt, Homo sapiens
  misc_RNA (1)...(19): siRNA sense strand
aggaacgaaucuagacaaa

SEQ ID NO: 876722 - RNA, 19 nt, Homo sapiens
  misc_RNA (1)...(19): siRNA sense strand
aagacaaaguugauagcaa

SEQ ID NO: 876723 - RNA, 19 nt, Homo sapiens
  misc_RNA (1)...(19): siRNA sense strand
gcaagaagaagguaaaaca

SEQ ID NO: 876724 - RNA, 19 nt, Homo sapiens
  misc_RNA (1)...(19): siRNA sense strand
cagaaaugaaacagaauga

SEQ ID NO: 876725 - RNA, 19 nt, Homo sapiens
  misc_RNA (1)...(19): siRNA sense strand
gaaugaguauauugcuaac

SEQ ID NO: 876726 - RNA, 19 nt, Homo sapiens
  misc_RNA (1)...(19): siRNA sense strand
ugaggaaggacccaacuug

SEQ ID NO: 876727 - RNA, 19 nt, Homo sapiens
  misc_RNA (1)...(19): siRNA sense strand
gagaaacucaggaugaaaa

SEQ ID NO: 876728 - RNA, 19 nt, Homo sapiens
  misc_RNA (1)...(19): siRNA sense strand
caagaccuggcaaagauga

SEQ ID NO: 876729 - RNA, 19 nt, Homo sapiens
  misc_RNA (1)...(19): siRNA sense strand
agaaaucccggaaacucua

SEQ ID NO: 876730 - RNA, 19 nt, Homo sapiens
  misc_RNA (1)...(19): siRNA sense strand
cgauaaggacacagaaaug

SEQ ID NO: 876731 - RNA, 19 nt, Homo sapiens
  misc_RNA (1)...(19): siRNA sense strand
ggaugaagauguuaaaguu

SEQ ID NO: 876732 - RNA, 19 nt, Homo sapiens
  misc_RNA (1)...(19): siRNA sense strand
ucagaaaccucaaacagaa

SEQ ID NO: 876733 - RNA, 19 nt, Homo sapiens
  misc_RNA (1)...(19): siRNA sense strand
gcaaagaccucauaaaauc

SEQ ID NO: 876734 - RNA, 19 nt, Homo sapiens
  misc_RNA (1)...(19): siRNA sense strand
cggcuuggcucuugacaua

SEQ ID NO: 876735 - RNA, 19 nt, Homo sapiens
  misc_RNA (1)...(19): siRNA sense strand
gagaugaacauucuagaaa

SEQ ID NO: 876736 - RNA, 19 nt, Homo sapiens
  misc_RNA (1)...(19): siRNA sense strand
agaaaugucuuguaacuca

SEQ ID NO: 876737 - RNA, 19 nt, Homo sapiens
  misc_RNA (1)...(19): siRNA sense strand
ggaagaacacguuggcuuu

SEQ ID NO: 876738 - RNA, 19 nt, Homo sapiens
  misc_RNA (1)...(19): siRNA sense strand
ugaggaggcugagaaagua

SEQ ID NO: 876739 - RNA, 19 nt, Homo sapiens
  misc_RNA (1)...(19): siRNA sense strand
ugacguggaugaaauugaa

SEQ ID NO: 876740 - RNA, 19 nt, Homo sapiens
  misc_RNA (1)...(19): siRNA sense strand
gccaucacuuguucaaaua

SEQ ID NO: 876741 - RNA, 19 nt, Homo sapiens
  misc_RNA (1)...(19): siRNA sense strand
gagcaccuuucacucagua

SEQ ID NO: 876742 - RNA, 19 nt, Homo sapiens
  misc_RNA (1)...(19): siRNA sense strand
gaugaacauucuagaaauc

SEQ ID NO: 876743 - RNA, 19 nt, Homo sapiens
  misc_RNA (1)...(19): siRNA sense strand
gaggagcucaggcaauaua

SEQ ID NO: 876744 - RNA, 19 nt, Homo sapiens
  misc_RNA (1)...(19): siRNA sense strand
ggaacugccugacuuaugc

SEQ ID NO: 876745 - RNA, 19 nt, Homo sapiens
  misc_RNA (1)...(19): siRNA sense strand
caacuuacuuucaacuaca

SEQ ID NO: 876746 - RNA, 19 nt, Homo sapiens
  misc_RNA (1)...(19): siRNA sense strand
gaacaccagaaucacauuu

SEQ ID NO: 876747 - RNA, 19 nt, Homo sapiens
  misc_RNA (1)...(19): siRNA sense strand
ugacaugucugccucauac

SEQ ID NO: 876748 - RNA, 19 nt, Homo sapiens
  misc_RNA (1)...(19): siRNA sense strand
gcagaaggcugaagaaaag

SEQ ID NO: 876749 - RNA, 19 nt, Homo sapiens
  misc_RNA (1)...(19): siRNA sense strand
acaaacagcaguucagaaa

SEQ ID NO: 876750 - RNA, 19 nt, Homo sapiens
  misc_RNA (1)...(19): siRNA sense strand
caagucgacucaacucuca

SEQ ID NO: 876751 - RNA, 19 nt, Homo sapiens
  misc_RNA (1)...(19): siRNA sense strand
ugagaaaguacaggaauua

SEQ ID NO: 876752 - RNA, 19 nt, Homo sapiens
  misc_RNA (1)...(19): siRNA sense strand
uggcuuggcucuugacuug

SEQ ID NO: 876753 - RNA, 19 nt, Homo sapiens
  misc_RNA (1)...(19): siRNA sense strand
gaaaugucuuguaacucaa

SEQ ID NO: 876754 - RNA, 19 nt, Homo sapiens
  misc_RNA (1)...(19): siRNA sense strand
ugaaagugaucaugagcaa

SEQ ID NO: 876755 - RNA, 19 nt, Homo sapiens
  misc_RNA (1)...(19): siRNA sense strand
gcacagcaccucguccaaa

SEQ ID NO: 876756 - RNA, 19 nt, Homo sapiens
  misc_RNA (1)...(19): siRNA sense strand
ucaacuacaugccucauuc

SEQ ID NO: 876757 - RNA, 19 nt, Homo sapiens
  misc_RNA (1)...(19): siRNA sense strand
gauagauguuauucgacua

SEQ ID NO: 876758 - RNA, 19 nt, Homo sapiens
  misc_RNA (1)...(19): siRNA sense strand
ggacucacuggauagauuu

SEQ ID NO: 876759 - RNA, 19 nt, Homo sapiens
  misc_RNA (1)...(19): siRNA sense strand
gcucuugacuuggacagaa

SEQ ID NO: 876760 - RNA, 19 nt, Homo sapiens
  misc_RNA (1)...(19): siRNA sense strand
aacgagagcugacccaguu

SEQ ID NO: 876761 - RNA, 19 nt, Homo sapiens
  misc_RNA (1)...(19): siRNA sense strand
uugcaggacucacuggaua

SEQ ID NO: 876762 - RNA, 19 nt, Homo sapiens
  misc_RNA (1)...(19): siRNA sense strand
ccgaggcccugauguagaa

SEQ ID NO: 876763 - RNA, 19 nt, Homo sapiens
  misc_RNA (1)...(19): siRNA sense strand
uugcaggacucacuggaua

SEQ ID NO: 876764 - RNA, 19 nt, Homo sapiens
  misc_RNA (1)...(19): siRNA sense strand
uugcaggacucacuggaua

SEQ ID NO: 876765 - RNA, 19 nt, Homo sapiens
  misc_RNA (1)...(19): siRNA sense strand
gaaggugauuggacucucu

SEQ ID NO: 876766 - RNA, 19 nt, Homo sapiens
  misc_RNA (1)...(19): siRNA sense strand
acagaaaugucuuguaacu

SEQ ID NO: 876767 - RNA, 19 nt, Homo sapiens
  misc_RNA (1)...(19): siRNA sense strand
ucaacgaggugcugaugga

SEQ ID NO: 876768 - RNA, 19 nt, Homo sapiens
  misc_RNA (1)...(19): siRNA sense strand
gaaucacauuugaggaaga

SEQ ID NO: 876769 - RNA, 19 nt, Homo sapiens
  misc_RNA (1)...(19): siRNA sense strand
cgaugaggaugaagauguu

SEQ ID NO: 876770 - RNA, 19 nt, Homo sapiens
  misc_RNA (1)...(19): siRNA sense strand
gaaguugcuuuuacucauu

SEQ ID NO: 876771 - RNA, 19 nt, Homo sapiens
  misc_RNA (1)...(19): siRNA sense strand
acaccagaaucacauuuga

SEQ ID NO: 876772 - RNA, 19 nt, Homo sapiens
  misc_RNA (1)...(19): siRNA sense strand
gggagcugcuggaugagaa

SEQ ID NO: 876773 - RNA, 19 nt, Homo sapiens
  misc_RNA (1)...(19): siRNA sense strand
ggaaucugcaggagucuga

SEQ ID NO: 876774 - RNA, 19 nt, Homo sapiens
  misc_RNA (1)...(19): siRNA sense strand
caaacagaaaugucuugua

SEQ ID NO: 876775 - RNA, 19 nt, Homo sapiens
  misc_RNA (1)...(19): siRNA sense strand
gaugguauucgacuccuuu

SEQ ID NO: 876776 - RNA, 19 nt, Homo sapiens
  misc_RNA (1)...(19): siRNA sense strand
ggaccaagaagaggaagaa

SEQ ID NO: 876777 - RNA, 19 nt, Homo sapiens
  misc_RNA (1)...(19): siRNA sense strand
aauauaaaguccugguuca

SEQ ID NO: 876778 - RNA, 19 nt, Homo sapiens
  misc_RNA (1)...(19): siRNA sense strand
ggagucauauucccacacu

SEQ ID NO: 876779 - RNA, 19 nt, Homo sapiens
  misc_RNA (1)...(19): siRNA sense strand
gaagugccuuuuacucauu

SEQ ID NO: 876780 - RNA, 19 nt, Homo sapiens
  misc_RNA (1)...(19): siRNA sense strand
cagaaucacauuugaggaa

SEQ ID NO: 876781 - RNA, 19 nt, Homo sapiens
  misc_RNA (1)...(19): siRNA sense strand
gcagagaugaacauucuag

SEQ ID NO: 876782 - RNA, 19 nt, Homo sapiens
  misc_RNA (1)...(19): siRNA sense strand
ccagaugggagucauauuc

SEQ ID NO: 876783 - RNA, 19 nt, Homo sapiens
  misc_RNA (1)...(19): siRNA sense strand
caccuuggcuuggcucuug

SEQ ID NO: 876784 - RNA, 19 nt, Homo sapiens
  misc_RNA (1)...(19): siRNA sense strand
aaagugaucaugagcaaga

SEQ ID NO: 876785 - RNA, 19 nt, Homo sapiens
  misc_RNA (1)...(19): siRNA sense strand
gcccugauguagaaacuuc

SEQ ID NO: 876786 - RNA, 19 nt, Homo sapiens
  misc_RNA (1)...(19): siRNA sense strand
aggcagagaugaacauucu

SEQ ID NO: 876787 - RNA, 19 nt, Homo sapiens
  misc_RNA (1)...(19): siRNA sense strand
ugacuuggacagaaugaaa

SEQ ID NO: 876788 - RNA, 19 nt, Homo sapiens
  misc_RNA (1)...(19): siRNA sense strand
ugccaucacuuguucaaau

SEQ ID NO: 876789 - RNA, 19 nt, Homo sapiens
  misc_RNA (1)...(19): siRNA sense strand
gaugaagauguuaaaguug

SEQ ID NO: 876790 - RNA, 19 nt, Homo sapiens
  misc_RNA (1)...(19): siRNA sense strand
gauguuauucgacuacuuc

SEQ ID NO: 876791 - RNA, 19 nt, Homo sapiens
  misc_RNA (1)...(19): siRNA sense strand
gagcucaggcaauauaaag

SEQ ID NO: 876792 - RNA, 19 nt, Homo sapiens
  misc_RNA (1)...(19): siRNA sense strand
ccacaaacgucagcauggu

SEQ ID NO: 876793 - RNA, 19 nt, Homo sapiens
  misc_RNA (1)...(19): siRNA sense strand
cugagaaaguacaggaauu

SEQ ID NO: 876794 - RNA, 19 nt, Homo sapiens
  misc_RNA (1)...(19): siRNA sense strand
ugacguggacaauagguuu

SEQ ID NO: 876795 - RNA, 19 nt, Homo sapiens
  misc_RNA (1)...(19): siRNA sense strand
cuggauagauguuauucga

SEQ ID NO: 876796 - RNA, 19 nt, Homo sapiens
  misc_RNA (1)...(19): siRNA sense strand
ggaagaccaagucgacuca

SEQ ID NO: 876797 - RNA, 19 nt, Homo sapiens
  misc_RNA (1)...(19): siRNA sense strand
aaucuaugcugagggauga

SEQ ID NO: 876798 - RNA, 19 nt, Homo sapiens
  misc_RNA (1)...(19): siRNA sense strand
gccagugucucccaggaau

SEQ ID NO: 876799 - RNA, 19 nt, Homo sapiens
  misc_RNA (1)...(19): siRNA sense strand
caacucucauugacucauc

SEQ ID NO: 876800 - RNA, 19 nt, Homo sapiens
  misc_RNA (1)...(19): siRNA sense strand
gaaggcagagaugaacauu

SEQ ID NO: 876801 - RNA, 19 nt, Homo sapiens
  misc_RNA (1)...(19): siRNA sense strand
gcaauauaaaguccugguu

SEQ ID NO: 876802 - RNA, 19 nt, Homo sapiens
  misc_RNA (1)...(19): siRNA sense strand
ucaacuuacuuucaacuac

SEQ ID NO: 876803 - RNA, 19 nt, Homo sapiens
  misc_RNA (1)...(19): siRNA sense strand
gcuuggcucuugacuugga

SEQ ID NO: 876804 - RNA, 19 nt, Homo sapiens
  misc_RNA (1)...(19): siRNA sense strand
ggaccaagaggccacaagu

SEQ ID NO: 876805 - RNA, 19 nt, Homo sapiens
  misc_RNA (1)...(19): siRNA sense strand
ugacauaggcagacauugg

SEQ ID NO: 876806 - RNA, 19 nt, Homo sapiens
  misc_RNA (1)...(19): siRNA sense strand
gagaaaguacaggaauuau

SEQ ID NO: 876807 - RNA, 19 nt, Homo sapiens
  misc_RNA (1)...(19): siRNA sense strand
aaacagcaguucagaaacc

SEQ ID NO: 876808 - RNA, 19 nt, Homo sapiens
  misc_RNA (1)...(19): siRNA sense strand
auucgacuccuuucaguua

SEQ ID NO: 876809 - RNA, 19 nt, Homo sapiens
  misc_RNA (1)...(19): siRNA sense strand
guauucgacuccuuucagu

SEQ ID NO: 876810 - RNA, 19 nt, Homo sapiens
  misc_RNA (1)...(19): siRNA sense strand
cuggauagaugguauucga

SEQ ID NO: 876811 - RNA, 19 nt, Homo sapiens
  misc_RNA (1)...(19): siRNA sense strand
gcaguucagaaaccucaaa

SEQ ID NO: 876812 - RNA, 19 nt, Homo sapiens
  misc_RNA (1)...(19): siRNA sense strand
agucauauucccacacuaa

SEQ ID NO: 876813 - RNA, 19 nt, Homo sapiens
  misc_RNA (1)...(19): siRNA sense strand
aggacucacuggauagauu

SEQ ID NO: 876814 - RNA, 19 nt, Homo sapiens
  misc_RNA (1)...(19): siRNA sense strand
ggagcucaggcaauauaaa

SEQ ID NO: 876815 - RNA, 19 nt, Homo sapiens
  misc_RNA (1)...(19): siRNA sense strand
agacugcaaagaccucaua

SEQ ID NO: 876816 - RNA, 19 nt, Homo sapiens
  misc_RNA (1)...(19): siRNA sense strand
caggagcaccuuucacuca

SEQ ID NO: 876817 - RNA, 19 nt, Homo sapiens
  misc_RNA (1)...(19): siRNA sense strand
ugagaaagagccugaaguc

SEQ ID NO: 876818 - RNA, 19 nt, Homo sapiens
  misc_RNA (1)...(19): siRNA sense strand
gacgggaccuccgagaaca

SEQ ID NO: 876819 - RNA, 19 nt, Homo sapiens
  misc_RNA (1)...(19): siRNA sense strand
cuacuucaacuuacuuuca

SEQ ID NO: 876820 - RNA, 19 nt, Homo sapiens
  misc_RNA (1)...(19): siRNA sense strand
cagaacugccugauucaug

SEQ ID NO: 876821 - RNA, 19 nt, Homo sapiens
  misc_RNA (1)...(19): siRNA sense strand
auccagaacugccugauuc

SEQ ID NO: 876822 - RNA, 19 nt, Homo sapiens
  misc_RNA (1)...(19): siRNA sense strand
uaguagagccugaggacuu

SEQ ID NO: 876823 - RNA, 19 nt, Homo sapiens
  misc_RNA (1)...(19): siRNA sense strand
ggaacaccagaaucacauu

SEQ ID NO: 876824 - RNA, 19 nt, Homo sapiens
  misc_RNA (1)...(19): siRNA sense strand
cgagagcugacccaguuaa

SEQ ID NO: 876825 - RNA, 19 nt, Homo sapiens
  misc_RNA (1)...(19): siRNA sense strand
ggacucacuggauagaugu

SEQ ID NO: 876826 - RNA, 19 nt, Homo sapiens
  misc_RNA (1)...(19): siRNA sense strand
gugagaaggcagagaugaa

SEQ ID NO: 876827 - RNA, 19 nt, Homo sapiens
  misc_RNA (1)...(19): siRNA sense strand
cccauucggugcaccaaga

SEQ ID NO: 876828 - RNA, 19 nt, Homo sapiens
  misc_RNA (1)...(19): siRNA sense strand
caaaagcucagcccagaaa

SEQ ID NO: 876829 - RNA, 19 nt, Homo sapiens
  misc_RNA (1)...(19): siRNA sense strand
ccaagaagaggaagaagac

SEQ ID NO: 876830 - RNA, 19 nt, Homo sapiens
  misc_RNA (1)...(19): siRNA sense strand
ggaaguugcuuuuacucau

SEQ ID NO: 876831 - RNA, 19 nt, Homo sapiens
  misc_RNA (1)...(19): siRNA sense strand
ggaggaagaugaagaagaa

SEQ ID NO: 876832 - RNA, 19 nt, Homo sapiens
  misc_RNA (1)...(19): siRNA sense strand
gggaugaguuccuugauuu

SEQ ID NO: 876833 - RNA, 19 nt, Homo sapiens
  misc_RNA (1)...(19): siRNA sense strand
gcacguuuccugucucuua

SEQ ID NO: 876834 - RNA, 19 nt, Homo sapiens
  misc_RNA (1)...(19): siRNA sense strand
guagugcugucuuguauug

SEQ ID NO: 876835 - RNA, 19 nt, Homo sapiens
  misc_RNA (1)...(19): siRNA sense strand
gcucgaaccugccaugugu

SEQ ID NO: 876836 - RNA, 19 nt, Homo sapiens
  misc_RNA (1)...(19): siRNA sense strand
ccgcagaggugaccaguga

SEQ ID NO: 876837 - RNA, 19 nt, Homo sapiens
  misc_RNA (1)...(19): siRNA sense strand
ggauuuaacuccggguuug

SEQ ID NO: 876838 - RNA, 19 nt, Homo sapiens
  misc_RNA (1)...(19): siRNA sense strand
ggaagaggaggaagaugaa

SEQ ID NO: 876839 - RNA, 19 nt, Homo sapiens
  misc_RNA (1)...(19): siRNA sense strand
guacugcaaugccuucauc

SEQ ID NO: 876840 - RNA, 19 nt, Homo sapiens
  misc_RNA (1)...(19): siRNA sense strand
gcccaagccugaccugguu

SEQ ID NO: 876841 - RNA, 19 nt, Homo sapiens
  misc_RNA (1)...(19): siRNA sense strand
gaaccugccauguguguca

SEQ ID NO: 876842 - RNA, 19 nt, Homo sapiens
  misc_RNA (1)...(19): siRNA sense strand
ugaccugguuauuggauuu

SEQ ID NO: 876843 - RNA, 19 nt, Homo sapiens
  misc_RNA (1)...(19): siRNA sense strand
aaggcuaggugugaaguua

SEQ ID NO: 876844 - RNA, 19 nt, Homo sapiens
  misc_RNA (1)...(19): siRNA sense strand
gcagaggugaccagugaaa

SEQ ID NO: 876845 - RNA, 19 nt, Homo sapiens
  misc_RNA (1)...(19): siRNA sense strand
guguagugcugucuuguau

SEQ ID NO: 876846 - RNA, 19 nt, Homo sapiens
  misc_RNA (1)...(19): siRNA sense strand
ccuaugcucuccucuguca

SEQ ID NO: 876847 - RNA, 19 nt, Homo sapiens
  misc_RNA (1)...(19): siRNA sense strand
agacgggacugcccugaug

SEQ ID NO: 876848 - RNA, 19 nt, Homo sapiens
  misc_RNA (1)...(19): siRNA sense strand
cgggaugaguuccuugauu

SEQ ID NO: 876849 - RNA, 19 nt, Homo sapiens
  misc_RNA (1)...(19): siRNA sense strand
acaacugcauguccuggua

SEQ ID NO: 876850 - RNA, 19 nt, Homo sapiens
  misc_RNA (1)...(19): siRNA sense strand
ggcaggagguggcaaggau

SEQ ID NO: 876851 - RNA, 19 nt, Homo sapiens
  misc_RNA (1)...(19): siRNA sense strand
ggaagggacagaggaguga

SEQ ID NO: 876852 - RNA, 19 nt, Homo sapiens
  misc_RNA (1)...(19): siRNA sense strand
gggccucacucguggcuau

SEQ ID NO: 876853 - RNA, 19 nt, Homo sapiens
  misc_RNA (1)...(19): siRNA sense strand
gaagcgaagcugacaccuu

SEQ ID NO: 876854 - RNA, 19 nt, Homo sapiens
  misc_RNA (1)...(19): siRNA sense strand
ggccuaugcucuccucugu

SEQ ID NO: 876855 - RNA, 19 nt, Homo sapiens
  misc_RNA (1)...(19): siRNA sense strand
gggcauugaucugcuagug

SEQ ID NO: 876856 - RNA, 19 nt, Homo sapiens
  misc_RNA (1)...(19): siRNA sense strand
gaacuggcaacccuaccuu

SEQ ID NO: 876857 - RNA, 19 nt, Homo sapiens
  misc_RNA (1)...(19): siRNA sense strand
gaaacaagaccccagaaga

SEQ ID NO: 876858 - RNA, 19 nt, Homo sapiens
  misc_RNA (1)...(19): siRNA sense strand
gcaaugccuucaucuucca

SEQ ID NO: 876859 - RNA, 19 nt, Homo sapiens
  misc_RNA (1)...(19): siRNA sense strand
gaaagcgacgagcagcauu

SEQ ID NO: 876860 - RNA, 19 nt, Homo sapiens
  misc_RNA (1)...(19): siRNA sense strand
ccaguguagugcugucuug

SEQ ID NO: 876861 - RNA, 19 nt, Homo sapiens
  misc_RNA (1)...(19): siRNA sense strand
gagaggacaggguggagaa

SEQ ID NO: 876862 - RNA, 19 nt, Homo sapiens
  misc_RNA (1)...(19): siRNA sense strand
cggccaggcuucaccuuug

SEQ ID NO: 876863 - RNA, 19 nt, Homo sapiens
  misc_RNA (1)...(19): siRNA sense strand
ggcagagcguggagcugua

SEQ ID NO: 876864 - RNA, 19 nt, Homo sapiens
  misc_RNA (1)...(19): siRNA sense strand
gguuugcucucaaggauac

SEQ ID NO: 876865 - RNA, 19 nt, Homo sapiens
  misc_RNA (1)...(19): siRNA sense strand
gaagaugaagaagaagaga

SEQ ID NO: 876866 - RNA, 19 nt, Homo sapiens
  misc_RNA (1)...(19): siRNA sense strand
ggaggaagaggaggaagau

SEQ ID NO: 876867 - RNA, 19 nt, Homo sapiens
  misc_RNA (1)...(19): siRNA sense strand
ggaagaugaagaagaagag

SEQ ID NO: 876868 - RNA, 19 nt, Homo sapiens
  misc_RNA (1)...(19): siRNA sense strand
ggacaggguggagaacgaa

SEQ ID NO: 876869 - RNA, 19 nt, Homo sapiens
  misc_RNA (1)...(19): siRNA sense strand
ugaagaagaagagaagaga

SEQ ID NO: 876870 - RNA, 19 nt, Homo sapiens
  misc_RNA (1)...(19): siRNA sense strand
aggaagaggaggaagauga

SEQ ID NO: 876871 - RNA, 19 nt, Homo sapiens
  misc_RNA (1)...(19): siRNA sense strand
gcucuggcacuaaggagaa

SEQ ID NO: 876872 - RNA, 19 nt, Homo sapiens
  misc_RNA (1)...(19): siRNA sense strand
ggacccagcucagcaugcu

SEQ ID NO: 876873 - RNA, 19 nt, Homo sapiens
  misc_RNA (1)...(19): siRNA sense strand
ggcaccaucuugggcauug

SEQ ID NO: 876874 - RNA, 19 nt, Homo sapiens
  misc_RNA (1)...(19): siRNA sense strand
gaugaguuccuugauuuca

SEQ ID NO: 876875 - RNA, 19 nt, Homo sapiens
  misc_RNA (1)...(19): siRNA sense strand
aagaagaagagaagagaga

SEQ ID NO: 876876 - RNA, 19 nt, Homo sapiens
  misc_RNA (1)...(19): siRNA sense strand
cccuggagcugcaguuugu

SEQ ID NO: 876877 - RNA, 19 nt, Homo sapiens
  misc_RNA (1)...(19): siRNA sense strand
gcaccaucuugggcauuga

SEQ ID NO: 876878 - RNA, 19 nt, Homo sapiens
  misc_RNA (1)...(19): siRNA sense strand
gcccagaugaugugaguca

SEQ ID NO: 876879 - RNA, 19 nt, Homo sapiens
  misc_RNA (1)...(19): siRNA sense strand
gaccugguuauuggauuua

SEQ ID NO: 876880 - RNA, 19 nt, Homo sapiens
  misc_RNA (1)...(19): siRNA sense strand
ucacaggcacagcuuugaa

SEQ ID NO: 876881 - RNA, 19 nt, Homo sapiens
  misc_RNA (1)...(19): siRNA sense strand
aaagcgacgagcagcauuu

SEQ ID NO: 876882 - RNA, 19 nt, Homo sapiens
  misc_RNA (1)...(19): siRNA sense strand
gugcccagaugaugugagu

SEQ ID NO: 876883 - RNA, 19 nt, Homo sapiens
  misc_RNA (1)...(19): siRNA sense strand
gguggagaacgaaacaaga

SEQ ID NO: 876884 - RNA, 19 nt, Homo sapiens
  misc_RNA (1)...(19): siRNA sense strand
ggaugaguuccuugauuuc

SEQ ID NO: 876885 - RNA, 19 nt, Homo sapiens
  misc_RNA (1)...(19): siRNA sense strand
agaggaggaagaugaagaa

SEQ ID NO: 876886 - RNA, 19 nt, Homo sapiens
  misc_RNA (1)...(19): siRNA sense strand
cgaguacagcugugugaug

SEQ ID NO: 876887 - RNA, 19 nt, Homo sapiens
  misc_RNA (1)...(19): siRNA sense strand
ucccugagcucaacaucca

SEQ ID NO: 876888 - RNA, 19 nt, Homo sapiens
  misc_RNA (1)...(19): siRNA sense strand
ggaggaggaagaggaggaa

SEQ ID NO: 876889 - RNA, 19 nt, Homo sapiens
  misc_RNA (1)...(19): siRNA sense strand
cggguuugcucucaaggau

SEQ ID NO: 876890 - RNA, 19 nt, Homo sapiens
  misc_RNA (1)...(19): siRNA sense strand
gaccugagccccuacauca

SEQ ID NO: 876891 - RNA, 19 nt, Homo sapiens
  misc_RNA (1)...(19): siRNA sense strand
uccugucucuuacuuguga

SEQ ID NO: 876892 - RNA, 19 nt, Homo sapiens
  misc_RNA (1)...(19): siRNA sense strand
cugcaaugccuucaucuuc

SEQ ID NO: 876893 - RNA, 19 nt, Homo sapiens
  misc_RNA (1)...(19): siRNA sense strand
agccugaccugguuauugg

SEQ ID NO: 876894 - RNA, 19 nt, Homo sapiens
  misc_RNA (1)...(19): siRNA sense strand
auacguggcugaggucucu

SEQ ID NO: 876895 - RNA, 19 nt, Homo sapiens
  misc_RNA (1)...(19): siRNA sense strand
ucaccgagagcagcgagua

SEQ ID NO: 876896 - RNA, 19 nt, Homo sapiens
  misc_RNA (1)...(19): siRNA sense strand
ggugugaaguuagccaaaa

SEQ ID NO: 876897 - RNA, 19 nt, Homo sapiens
  misc_RNA (1)...(19): siRNA sense strand
ugauuucacugcccuucuc

SEQ ID NO: 876898 - RNA, 19 nt, Homo sapiens
  misc_RNA (1)...(19): siRNA sense strand
cggcugguuccgaaaguuu

SEQ ID NO: 876899 - RNA, 19 nt, Homo sapiens
  misc_RNA (1)...(19): siRNA sense strand
ggaauuagcagcccauuua

SEQ ID NO: 876900 - RNA, 19 nt, Homo sapiens
  misc_RNA (1)...(19): siRNA sense strand
ggacuuaauugccaucaua

SEQ ID NO: 876901 - RNA, 19 nt, Homo sapiens
  misc_RNA (1)...(19): siRNA sense strand
ggacaaggccagacaauuu

SEQ ID NO: 876902 - RNA, 19 nt, Homo sapiens
  misc_RNA (1)...(19): siRNA sense strand
cagcaggccugacuuagua

SEQ ID NO: 876903 - RNA, 19 nt, Homo sapiens
  misc_RNA (1)...(19): siRNA sense strand
ccagcaggcucaaccauua

SEQ ID NO: 876904 - RNA, 19 nt, Homo sapiens
  misc_RNA (1)...(19): siRNA sense strand
gacaaguacugccucuuua

SEQ ID NO: 876905 - RNA, 19 nt, Homo sapiens
  misc_RNA (1)...(19): siRNA sense strand
uagaagaucugcagcuaaa

SEQ ID NO: 876906 - RNA, 19 nt, Homo sapiens
  misc_RNA (1)...(19): siRNA sense strand
gaucccaaaucucaaagua

SEQ ID NO: 876907 - RNA, 19 nt, Homo sapiens
  misc_RNA (1)...(19): siRNA sense strand
ggccuuaucuucuuaucua

SEQ ID NO: 876908 - RNA, 19 nt, Homo sapiens
  misc_RNA (1)...(19): siRNA sense strand
ggagagaggcccagccaua

SEQ ID NO: 876909 - RNA, 19 nt, Homo sapiens
  misc_RNA (1)...(19): siRNA sense strand
ggaagaauccuaccugguu

SEQ ID NO: 876910 - RNA, 19 nt, Homo sapiens
  misc_RNA (1)...(19): siRNA sense strand
gagguucgguugcaucuug

SEQ ID NO: 876911 - RNA, 19 nt, Homo sapiens
  misc_RNA (1)...(19): siRNA sense strand
caaaguaucgugaaagaga

SEQ ID NO: 876912 - RNA, 19 nt, Homo sapiens
  misc_RNA (1)...(19): siRNA sense strand
gcuagaagaucugcagcua

SEQ ID NO: 876913 - RNA, 19 nt, Homo sapiens
  misc_RNA (1)...(19): siRNA sense strand
ugaaagcacucagaaugaa

SEQ ID NO: 876914 - RNA, 19 nt, Homo sapiens
  misc_RNA (1)...(19): siRNA sense strand
gagagaagccaacgcaguu

SEQ ID NO: 876915 - RNA, 19 nt, Homo sapiens
  misc_RNA (1)...(19): siRNA sense strand
ggccaagacugacuucuca

SEQ ID NO: 876916 - RNA, 19 nt, Homo sapiens
  misc_RNA (1)...(19): siRNA sense strand
gaggagccaucguaggauu

SEQ ID NO: 876917 - RNA, 19 nt, Homo sapiens
  misc_RNA (1)...(19): siRNA sense strand
gcacacagaguuauagcuu

SEQ ID NO: 876918 - RNA, 19 nt, Homo sapiens
  misc_RNA (1)...(19): siRNA sense strand
gagaggagccaucguagga

SEQ ID NO: 876919 - RNA, 19 nt, Homo sapiens
  misc_RNA (1)...(19): siRNA sense strand
ccaaacagcacacagaguu

SEQ ID NO: 876920 - RNA, 19 nt, Homo sapiens
  misc_RNA (1)...(19): siRNA sense strand
gagaggagccaucgcaguu

SEQ ID NO: 876921 - RNA, 19 nt, Homo sapiens
  misc_RNA (1)...(19): siRNA sense strand
ggacaguaguagcagauca

SEQ ID NO: 876922 - RNA, 19 nt, Homo sapiens
  misc_RNA (1)...(19): siRNA sense strand
gaaagcacucagaaugaaa

SEQ ID NO: 876923 - RNA, 19 nt, Homo sapiens
  misc_RNA (1)...(19): siRNA sense strand
gaauuagcagcccauuuaa

SEQ ID NO: 876924 - RNA, 19 nt, Homo sapiens
  misc_RNA (1)...(19): siRNA sense strand
gcccacagauucccaaagu

SEQ ID NO: 876925 - RNA, 19 nt, Homo sapiens
  misc_RNA (1)...(19): siRNA sense strand
caaacagcacacagaguua

SEQ ID NO: 876926 - RNA, 19 nt, Homo sapiens
  misc_RNA (1)...(19): siRNA sense strand
gaagaggauuggagcaacu

SEQ ID NO: 876927 - RNA, 19 nt, Homo sapiens
  misc_RNA (1)...(19): siRNA sense strand
gagaggagaggacacaguu

SEQ ID NO: 876928 - RNA, 19 nt, Homo sapiens
  misc_RNA (1)...(19): siRNA sense strand
gccugaagcuacucgauga

SEQ ID NO: 876929 - RNA, 19 nt, Homo sapiens
  misc_RNA (1)...(19): siRNA sense strand
caaguacugccucuuuaaa

SEQ ID NO: 876930 - RNA, 19 nt, Homo sapiens
  misc_RNA (1)...(19): siRNA sense strand
cauaguuugucuagagauu

SEQ ID NO: 876931 - RNA, 19 nt, Homo sapiens
  misc_RNA (1)...(19): siRNA sense strand
agacaaguacugccucuuu

SEQ ID NO: 876932 - RNA, 19 nt, Homo sapiens
  misc_RNA (1)...(19): siRNA sense strand
gacaaggccagacaauuug

SEQ ID NO: 876933 - RNA, 19 nt, Homo sapiens
  misc_RNA (1)...(19): siRNA sense strand
ugaaggccauggugagguu

SEQ ID NO: 876934 - RNA, 19 nt, Homo sapiens
  misc_RNA (1)...(19): siRNA sense strand
gucuagagauuucaagaau

SEQ ID NO: 876935 - RNA, 19 nt, Homo sapiens
  misc_RNA (1)...(19): siRNA sense strand
ucacacacaaggagcauaa

SEQ ID NO: 876936 - RNA, 19 nt, Homo sapiens
  misc_RNA (1)...(19): siRNA sense strand
aagacaaacucacacacaa

SEQ ID NO: 876937 - RNA, 19 nt, Homo sapiens
  misc_RNA (1)...(19): siRNA sense strand
gagaggcccagccauaguu

SEQ ID NO: 876938 - RNA, 19 nt, Homo sapiens
  misc_RNA (1)...(19): siRNA sense strand
caucgcaguuccugugaga

SEQ ID NO: 876939 - RNA, 19 nt, Homo sapiens
  misc_RNA (1)...(19): siRNA sense strand
ucacagucccucagagaaa

SEQ ID NO: 876940 - RNA, 19 nt, Homo sapiens
  misc_RNA (1)...(19): siRNA sense strand
cacaauagauuugcagucu

SEQ ID NO: 876941 - RNA, 19 nt, Homo sapiens
  misc_RNA (1)...(19): siRNA sense strand
ggagagaagacaucacagu

SEQ ID NO: 876942 - RNA, 19 nt, Homo sapiens
  misc_RNA (1)...(19): siRNA sense strand
agaaucaccaagcgacuua

SEQ ID NO: 876943 - RNA, 19 nt, Homo sapiens
  misc_RNA (1)...(19): siRNA sense strand
gggcuaaagugagaaccaa

SEQ ID NO: 876944 - RNA, 19 nt, Homo sapiens
  misc_RNA (1)...(19): siRNA sense strand
guucacaaccuaccagaga

SEQ ID NO: 876945 - RNA, 19 nt, Homo sapiens
  misc_RNA (1)...(19): siRNA sense strand
ucccaaaucucaaaguauc

SEQ ID NO: 876946 - RNA, 19 nt, Homo sapiens
  misc_RNA (1)...(19): siRNA sense strand
gaagucacagucccucaga

SEQ ID NO: 876947 - RNA, 19 nt, Homo sapiens
  misc_RNA (1)...(19): siRNA sense strand
caucacagucccucuaaga

SEQ ID NO: 876948 - RNA, 19 nt, Homo sapiens
  misc_RNA (1)...(19): siRNA sense strand
ccaggagucuaagaacuug

SEQ ID NO: 876949 - RNA, 19 nt, Homo sapiens
  misc_RNA (1)...(19): siRNA sense strand
gagcaacucagacaaguac

SEQ ID NO: 876950 - RNA, 19 nt, Homo sapiens
  misc_RNA (1)...(19): siRNA sense strand
ggagcaacucagacaagua

SEQ ID NO: 876951 - RNA, 19 nt, Homo sapiens
  misc_RNA (1)...(19): siRNA sense strand
gagaguccuucuagggaau

SEQ ID NO: 876952 - RNA, 19 nt, Homo sapiens
  misc_RNA (1)...(19): siRNA sense strand
ucaccaagcgacuuagaaa

SEQ ID NO: 876953 - RNA, 19 nt, Homo sapiens
  misc_RNA (1)...(19): siRNA sense strand
gaguccuacuuccacaaua

SEQ ID NO: 876954 - RNA, 19 nt, Homo sapiens
  misc_RNA (1)...(19): siRNA sense strand
caucacaaaggaaagcuaa

SEQ ID NO: 876955 - RNA, 19 nt, Homo sapiens
  misc_RNA (1)...(19): siRNA sense strand
ccaccucagucccuuggaa

SEQ ID NO: 876956 - RNA, 19 nt, Homo sapiens
  misc_RNA (1)...(19): siRNA sense strand
caucguaggauuucugaga

SEQ ID NO: 876957 - RNA, 19 nt, Homo sapiens
  misc_RNA (1)...(19): siRNA sense strand
gaucucacagguccuuuga

SEQ ID NO: 876958 - RNA, 19 nt, Homo sapiens
  misc_RNA (1)...(19): siRNA sense strand
gcaguuccuuggagagaag

SEQ ID NO: 876959 - RNA, 19 nt, Homo sapiens
  misc_RNA (1)...(19): siRNA sense strand
gcuaaaaucuauacucaag

SEQ ID NO: 876960 - RNA, 19 nt, Homo sapiens
  misc_RNA (1)...(19): siRNA sense strand
cgaugugccuccaccucua

SEQ ID NO: 876961 - RNA, 19 nt, Homo sapiens
  misc_RNA (1)...(19): siRNA sense strand
uuaaggagggacucaagua

SEQ ID NO: 876962 - RNA, 19 nt, Homo sapiens
  misc_RNA (1)...(19): siRNA sense strand
aguaguagcagaucaaaga

SEQ ID NO: 876963 - RNA, 19 nt, Homo sapiens
  misc_RNA (1)...(19): siRNA sense strand
gguauugcuuuccaaacug

SEQ ID NO: 876964 - RNA, 19 nt, Homo sapiens
  misc_RNA (1)...(19): siRNA sense strand
gagcaccugggcacuauga

SEQ ID NO: 876965 - RNA, 19 nt, Homo sapiens
  misc_RNA (1)...(19): siRNA sense strand
ucugagagaacccgucaua

SEQ ID NO: 876966 - RNA, 19 nt, Homo sapiens
  misc_RNA (1)...(19): siRNA sense strand
cuucaggucuaguccuaaa

SEQ ID NO: 876967 - RNA, 19 nt, Homo sapiens
  misc_RNA (1)...(19): siRNA sense strand
ggccgauguucaggacuua

SEQ ID NO: 876968 - RNA, 19 nt, Homo sapiens
  misc_RNA (1)...(19): siRNA sense strand
gccauaguuugucuagaga

SEQ ID NO: 876969 - RNA, 19 nt, Homo sapiens
  misc_RNA (1)...(19): siRNA sense strand
cacagucccucugagauga

SEQ ID NO: 876970 - RNA, 19 nt, Homo sapiens
  misc_RNA (1)...(19): siRNA sense strand
ugagagaacccgucacagu

SEQ ID NO: 876971 - RNA, 19 nt, Homo sapiens
  misc_RNA (1)...(19): siRNA sense strand
gacaucacagucccucuaa

SEQ ID NO: 876972 - RNA, 19 nt, Homo sapiens
  misc_RNA (1)...(19): siRNA sense strand
acacagaguuauagcuucu

SEQ ID NO: 876973 - RNA, 19 nt, Homo sapiens
  misc_RNA (1)...(19): siRNA sense strand
aaagaccucugauucaaaa

SEQ ID NO: 876974 - RNA, 19 nt, Homo sapiens
  misc_RNA (1)...(19): siRNA sense strand
cuacuuccacaauagauuu

SEQ ID NO: 876975 - RNA, 19 nt, Homo sapiens
  misc_RNA (1)...(19): siRNA sense strand
cucaaaguaucgugaaaga

SEQ ID NO: 876976 - RNA, 19 nt, Homo sapiens
  misc_RNA (1)...(19): siRNA sense strand
ggcuuuaggcugagaauug

SEQ ID NO: 876977 - RNA, 19 nt, Homo sapiens
  misc_RNA (1)...(19): siRNA sense strand
gcagcaggccugacuuagu

SEQ ID NO: 876978 - RNA, 19 nt, Homo sapiens
  misc_RNA (1)...(19): siRNA sense strand
caacagccaagaagagcuu

SEQ ID NO: 876979 - RNA, 19 nt, Homo sapiens
  misc_RNA (1)...(19): siRNA sense strand
uaagcaggaggacauauug

SEQ ID NO: 876980 - RNA, 19 nt, Homo sapiens
  misc_RNA (1)...(19): siRNA sense strand
ugccagggacuauugcuua

SEQ ID NO: 876981 - RNA, 19 nt, Homo sapiens
  misc_RNA (1)...(19): siRNA sense strand
uagagcaccugggcacuau

SEQ ID NO: 876982 - RNA, 19 nt, Homo sapiens
  misc_RNA (1)...(19): siRNA sense strand
gagagaggcccagccauag

SEQ ID NO: 876983 - RNA, 19 nt, Homo sapiens
  misc_RNA (1)...(19): siRNA sense strand
cuaaagcgggcauuccaaa

SEQ ID NO: 876984 - RNA, 19 nt, Homo sapiens
  misc_RNA (1)...(19): siRNA sense strand
acaaguacugccucuuuaa

SEQ ID NO: 876985 - RNA, 19 nt, Homo sapiens
  misc_RNA (1)...(19): siRNA sense strand
auacggagaagcccuauau

SEQ ID NO: 876986 - RNA, 19 nt, Homo sapiens
  misc_RNA (1)...(19): siRNA sense strand
ggacucaaguacaguuucc

SEQ ID NO: 876987 - RNA, 19 nt, Homo sapiens
  misc_RNA (1)...(19): siRNA sense strand
ucacagucccucagagaga

SEQ ID NO: 876988 - RNA, 19 nt, Homo sapiens
  misc_RNA (1)...(19): siRNA sense strand
gcagcccauuuaagaagga

SEQ ID NO: 876989 - RNA, 19 nt, Homo sapiens
  misc_RNA (1)...(19): siRNA sense strand
aaacaguagaaccacaaua

SEQ ID NO: 876990 - RNA, 19 nt, Homo sapiens
  misc_RNA (1)...(19): siRNA sense strand
gauguucaggacuuaauug

SEQ ID NO: 876991 - RNA, 19 nt, Homo sapiens
  misc_RNA (1)...(19): siRNA sense strand
gcaccugggcacuaugaau

SEQ ID NO: 876992 - RNA, 19 nt, Homo sapiens
  misc_RNA (1)...(19): siRNA sense strand
ucacagucccucugagaug

SEQ ID NO: 876993 - RNA, 19 nt, Homo sapiens
  misc_RNA (1)...(19): siRNA sense strand
gagagaacccgucauaacc

SEQ ID NO: 876994 - RNA, 19 nt, Homo sapiens
  misc_RNA (1)...(19): siRNA sense strand
caccugggcacuaugaauu

SEQ ID NO: 876995 - RNA, 19 nt, Homo sapiens
  misc_RNA (1)...(19): siRNA sense strand
caucacagucccucagaga

SEQ ID NO: 876996 - RNA, 19 nt, Homo sapiens
  misc_RNA (1)...(19): siRNA sense strand
ggagaggagccgucacagu

SEQ ID NO: 876997 - RNA, 19 nt, Homo sapiens
  misc_RNA (1)...(19): siRNA sense strand
caucacagucccucugaga

SEQ ID NO: 876998 - RNA, 19 nt, Homo sapiens
  misc_RNA (1)...(19): siRNA sense strand
caucacagucccucugaga

SEQ ID NO: 876999 - RNA, 19 nt, Homo sapiens
  misc_RNA (1)...(19): siRNA sense strand
gaaaguggcucuguucaaa

SEQ ID NO: 877000 - RNA, 19 nt, Homo sapiens
  misc_RNA (1)...(19): siRNA sense strand
agaaauaccuuguaacuug

SEQ ID NO: 877001 - RNA, 19 nt, Homo sapiens
  misc_RNA (1)...(19): siRNA sense strand
ugaagaagcugaauuugaa

SEQ ID NO: 877002 - RNA, 19 nt, Homo sapiens
  misc_RNA (1)...(19): siRNA sense strand
gaaauaccuuguaacuuga

SEQ ID NO: 877003 - RNA, 19 nt, Homo sapiens
  misc_RNA (1)...(19): siRNA sense strand
gaaugggaaugcaaucuuu

SEQ ID NO: 877004 - RNA, 19 nt, Homo sapiens
  misc_RNA (1)...(19): siRNA sense strand
guaacuugauugccaaaua

SEQ ID NO: 877005 - RNA, 19 nt, Homo sapiens
  misc_RNA (1)...(19): siRNA sense strand
gcuagaggaugaagucuuu

SEQ ID NO: 877006 - RNA, 19 nt, Homo sapiens
  misc_RNA (1)...(19): siRNA sense strand
gaaggugguuauacaaaug

SEQ ID NO: 877007 - RNA, 19 nt, Homo sapiens
  misc_RNA (1)...(19): siRNA sense strand
gaagaggacuacugguuuc

SEQ ID NO: 877008 - RNA, 19 nt, Homo sapiens
  misc_RNA (1)...(19): siRNA sense strand
gaaaauggcuucuucaaag

SEQ ID NO: 877009 - RNA, 19 nt, Homo sapiens
  misc_RNA (1)...(19): siRNA sense strand
acaaaugccuucccugaaa

SEQ ID NO: 877010 - RNA, 19 nt, Homo sapiens
  misc_RNA (1)...(19): siRNA sense strand
gagccaagaugaugagaug

SEQ ID NO: 877011 - RNA, 19 nt, Homo sapiens
  misc_RNA (1)...(19): siRNA sense strand
gugaagaauugguggauuu

SEQ ID NO: 877012 - RNA, 19 nt, Homo sapiens
  misc_RNA (1)...(19): siRNA sense strand
gcagauugguccgugcuua

SEQ ID NO: 877013 - RNA, 19 nt, Homo sapiens
  misc_RNA (1)...(19): siRNA sense strand
ggccagaaauaccuuguaa

SEQ ID NO: 877014 - RNA, 19 nt, Homo sapiens
  misc_RNA (1)...(19): siRNA sense strand
gaaggagauuugcaagaug

SEQ ID NO: 877015 - RNA, 19 nt, Homo sapiens
  misc_RNA (1)...(19): siRNA sense strand
guaacccucuguaacauga

SEQ ID NO: 877016 - RNA, 19 nt, Homo sapiens
  misc_RNA (1)...(19): siRNA sense strand
gaugaagucuuugccgauu

SEQ ID NO: 877017 - RNA, 19 nt, Homo sapiens
  misc_RNA (1)...(19): siRNA sense strand
ccgauuaccuuucuucugu

SEQ ID NO: 877018 - RNA, 19 nt, Homo sapiens
  misc_RNA (1)...(19): siRNA sense strand
gaguucaucaguuucauua

SEQ ID NO: 877019 - RNA, 19 nt, Homo sapiens
  misc_RNA (1)...(19): siRNA sense strand
gucaggaguucaucaguuu

SEQ ID NO: 877020 - RNA, 19 nt, Homo sapiens
  misc_RNA (1)...(19): siRNA sense strand
ggagacauguccucaagag

SEQ ID NO: 877021 - RNA, 19 nt, Homo sapiens
  misc_RNA (1)...(19): siRNA sense strand
gagaacauccugagcauag

SEQ ID NO: 877022 - RNA, 19 nt, Homo sapiens
  misc_RNA (1)...(19): siRNA sense strand
gagcuuguggccagaaaua

SEQ ID NO: 877023 - RNA, 19 nt, Homo sapiens
  misc_RNA (1)...(19): siRNA sense strand
gagaaggugguuauacaaa

SEQ ID NO: 877024 - RNA, 19 nt, Homo sapiens
  misc_RNA (1)...(19): siRNA sense strand
uaacuugauugccaaauac

SEQ ID NO: 877025 - RNA, 19 nt, Homo sapiens
  misc_RNA (1)...(19): siRNA sense strand
gaagcugaauuugaaagug

SEQ ID NO: 877026 - RNA, 19 nt, Homo sapiens
  misc_RNA (1)...(19): siRNA sense strand
gaaggagccaagaugauga

SEQ ID NO: 877027 - RNA, 19 nt, Homo sapiens
  misc_RNA (1)...(19): siRNA sense strand
gucaaucacuccuccaaga

SEQ ID NO: 877028 - RNA, 19 nt, Homo sapiens
  misc_RNA (1)...(19): siRNA sense strand
gcaggaaagccaagaggaa

SEQ ID NO: 877029 - RNA, 19 nt, Homo sapiens
  misc_RNA (1)...(19): siRNA sense strand
gccauggucugaugcaaga

SEQ ID NO: 877030 - RNA, 19 nt, Homo sapiens
  misc_RNA (1)...(19): siRNA sense strand
gaacaugagcaucaagaag

SEQ ID NO: 877031 - RNA, 19 nt, Homo sapiens
  misc_RNA (1)...(19): siRNA sense strand
cagugcaggugaagaauug

SEQ ID NO: 877032 - RNA, 19 nt, Homo sapiens
  misc_RNA (1)...(19): siRNA sense strand
uaggaaggacuuuggguua

SEQ ID NO: 877033 - RNA, 19 nt, Homo sapiens
  misc_RNA (1)...(19): siRNA sense strand
agaaggagauuugcaagau

SEQ ID NO: 877034 - RNA, 19 nt, Homo sapiens
  misc_RNA (1)...(19): siRNA sense strand
ggauguggcgcuucuauuc

SEQ ID NO: 877035 - RNA, 19 nt, Homo sapiens
  misc_RNA (1)...(19): siRNA sense strand
ugaagaggacuacugguuu

SEQ ID NO: 877036 - RNA, 19 nt, Homo sapiens
  misc_RNA (1)...(19): siRNA sense strand
gaagaagcugaauuugaaa

SEQ ID NO: 877037 - RNA, 19 nt, Homo sapiens
  misc_RNA (1)...(19): siRNA sense strand
aagagaaggugguuauaca

SEQ ID NO: 877038 - RNA, 19 nt, Homo sapiens
  misc_RNA (1)...(19): siRNA sense strand
uuauugaccugguuggaaa

SEQ ID NO: 877039 - RNA, 19 nt, Homo sapiens
  misc_RNA (1)...(19): siRNA sense strand
uaugaugaguuucuagaug

SEQ ID NO: 877040 - RNA, 19 nt, Homo sapiens
  misc_RNA (1)...(19): siRNA sense strand
ccuccaagaugacaauuca

SEQ ID NO: 877041 - RNA, 19 nt, Homo sapiens
  misc_RNA (1)...(19): siRNA sense strand
guucaucaguuucauuaag

SEQ ID NO: 877042 - RNA, 19 nt, Homo sapiens
  misc_RNA (1)...(19): siRNA sense strand
agacauguccucaagagaa

SEQ ID NO: 877043 - RNA, 19 nt, Homo sapiens
  misc_RNA (1)...(19): siRNA sense strand
cagaaacgguacucaagca

SEQ ID NO: 877044 - RNA, 19 nt, Homo sapiens
  misc_RNA (1)...(19): siRNA sense strand
ggaaaaggauaugcauuau

SEQ ID NO: 877045 - RNA, 19 nt, Homo sapiens
  misc_RNA (1)...(19): siRNA sense strand
agaaggugguuauacaaau

SEQ ID NO: 877046 - RNA, 19 nt, Homo sapiens
  misc_RNA (1)...(19): siRNA sense strand
ggucagacaccauuuuaua

SEQ ID NO: 877047 - RNA, 19 nt, Homo sapiens
  misc_RNA (1)...(19): siRNA sense strand
gagauaauugguucuacaa

SEQ ID NO: 877048 - RNA, 19 nt, Homo sapiens
  misc_RNA (1)...(19): siRNA sense strand
gguccgugcuuaccacuca

SEQ ID NO: 877049 - RNA, 19 nt, Homo sapiens
  misc_RNA (1)...(19): siRNA sense strand
ugagauaauugguucuaca

SEQ ID NO: 877050 - RNA, 19 nt, Homo sapiens
  misc_RNA (1)...(19): siRNA sense strand
gagauggaccuggaaguga

SEQ ID NO: 877051 - RNA, 19 nt, Homo sapiens
  misc_RNA (1)...(19): siRNA sense strand
ccagaaggagccaagauga

SEQ ID NO: 877052 - RNA, 19 nt, Homo sapiens
  misc_RNA (1)...(19): siRNA sense strand
ucaaaggaaacaagaauca

SEQ ID NO: 877053 - RNA, 19 nt, Homo sapiens
  misc_RNA (1)...(19): siRNA sense strand
ccaagaugaugagauggaa

SEQ ID NO: 877054 - RNA, 19 nt, Homo sapiens
  misc_RNA (1)...(19): siRNA sense strand
ugucaggaguucaucaguu

SEQ ID NO: 877055 - RNA, 19 nt, Homo sapiens
  misc_RNA (1)...(19): siRNA sense strand
ggugaagaauugguggauu

SEQ ID NO: 877056 - RNA, 19 nt, Homo sapiens
  misc_RNA (1)...(19): siRNA sense strand
gcagugcaggugaagaauu

SEQ ID NO: 877057 - RNA, 19 nt, Homo sapiens
  misc_RNA (1)...(19): siRNA sense strand
uaauucugcuagaggauga

SEQ ID NO: 877058 - RNA, 19 nt, Homo sapiens
  misc_RNA (1)...(19): siRNA sense strand
augaugaguuucuagauga

SEQ ID NO: 877059 - RNA, 19 nt, Homo sapiens
  misc_RNA (1)...(19): siRNA sense strand
acucaaaucccaaaccauu

SEQ ID NO: 877060 - RNA, 19 nt, Homo sapiens
  misc_RNA (1)...(19): siRNA sense strand
ccacucaaaucccaaacca

SEQ ID NO: 877061 - RNA, 19 nt, Homo sapiens
  misc_RNA (1)...(19): siRNA sense strand
aaucacuccuccaagauga

SEQ ID NO: 877062 - RNA, 19 nt, Homo sapiens
  misc_RNA (1)...(19): siRNA sense strand
gaacauccugagcauagau

SEQ ID NO: 877063 - RNA, 19 nt, Homo sapiens
  misc_RNA (1)...(19): siRNA sense strand
ccagaaauaccuuguaacu

SEQ ID NO: 877064 - RNA, 19 nt, Homo sapiens
  misc_RNA (1)...(19): siRNA sense strand
gacauguccucaagagaag

SEQ ID NO: 877065 - RNA, 19 nt, Homo sapiens
  misc_RNA (1)...(19): siRNA sense strand
cgauuaccuuucuucugua

SEQ ID NO: 877066 - RNA, 19 nt, Homo sapiens
  misc_RNA (1)...(19): siRNA sense strand
cugaagaagcugaauuuga

SEQ ID NO: 877067 - RNA, 19 nt, Homo sapiens
  misc_RNA (1)...(19): siRNA sense strand
caagagccaccuccacaug

SEQ ID NO: 877068 - RNA, 19 nt, Homo sapiens
  misc_RNA (1)...(19): siRNA sense strand
gauccuugcugagaacauc

SEQ ID NO: 877069 - RNA, 19 nt, Homo sapiens
  misc_RNA (1)...(19): siRNA sense strand
gacuacugguuucuccuuu

SEQ ID NO: 877070 - RNA, 19 nt, Homo sapiens
  misc_RNA (1)...(19): siRNA sense strand
cagaaggccaucaagcaaa

SEQ ID NO: 877071 - RNA, 19 nt, Homo sapiens
  misc_RNA (1)...(19): siRNA sense strand
caagccagaugcuauuggu

SEQ ID NO: 877072 - RNA, 19 nt, Homo sapiens
  misc_RNA (1)...(19): siRNA sense strand
ggaguucaucaguuucauu

SEQ ID NO: 877073 - RNA, 19 nt, Homo sapiens
  misc_RNA (1)...(19): siRNA sense strand
ggacuacugguuucuccuu

SEQ ID NO: 877074 - RNA, 19 nt, Homo sapiens
  misc_RNA (1)...(19): siRNA sense strand
ucccugguaugaugaguuu

SEQ ID NO: 877075 - RNA, 19 nt, Homo sapiens
  misc_RNA (1)...(19): siRNA sense strand
gaugcucagucccugguau

SEQ ID NO: 877076 - RNA, 19 nt, Homo sapiens
  misc_RNA (1)...(19): siRNA sense strand
caucuggcaucccaaccaa

SEQ ID NO: 877077 - RNA, 19 nt, Homo sapiens
  misc_RNA (1)...(19): siRNA sense strand
uccauuacauucucuguca

SEQ ID NO: 877078 - RNA, 19 nt, Homo sapiens
  misc_RNA (1)...(19): siRNA sense strand
ucuguaacaugaacaucaa

SEQ ID NO: 877079 - RNA, 19 nt, Homo sapiens
  misc_RNA (1)...(19): siRNA sense strand
gguaugaugaguuucuaga

SEQ ID NO: 877080 - RNA, 19 nt, Homo sapiens
  misc_RNA (1)...(19): siRNA sense strand
caaaugccuucccugaaaa

SEQ ID NO: 877081 - RNA, 19 nt, Homo sapiens
  misc_RNA (1)...(19): siRNA sense strand
gugguaacccucuguaaca

SEQ ID NO: 877082 - RNA, 19 nt, Homo sapiens
  misc_RNA (1)...(19): siRNA sense strand
ccaaagcccagaaggagau

SEQ ID NO: 877083 - RNA, 19 nt, Homo sapiens
  misc_RNA (1)...(19): siRNA sense strand
ucaaaucccaaaccauuca

SEQ ID NO: 877084 - RNA, 19 nt, Homo sapiens
  misc_RNA (1)...(19): siRNA sense strand
ugccaaauacaaaggguua

SEQ ID NO: 877085 - RNA, 19 nt, Homo sapiens
  misc_RNA (1)...(19): siRNA sense strand
ucugcgagcucuaccugaa

SEQ ID NO: 877086 - RNA, 19 nt, Homo sapiens
  misc_RNA (1)...(19): siRNA sense strand
ucagaaggccaucaagcaa

SEQ ID NO: 877087 - RNA, 19 nt, Homo sapiens
  misc_RNA (1)...(19): siRNA sense strand
gccagaugcuauugguaug

SEQ ID NO: 877088 - RNA, 19 nt, Homo sapiens
  misc_RNA (1)...(19): siRNA sense strand
ggaagugagagacuacuac

SEQ ID NO: 877089 - RNA, 19 nt, Homo sapiens
  misc_RNA (1)...(19): siRNA sense strand
agaaggccaucaagcaaag

SEQ ID NO: 877090 - RNA, 19 nt, Homo sapiens
  misc_RNA (1)...(19): siRNA sense strand
caagaugacaauucagaag

SEQ ID NO: 877091 - RNA, 19 nt, Homo sapiens
  misc_RNA (1)...(19): siRNA sense strand
uggaaaaggauaugcauua

SEQ ID NO: 877092 - RNA, 19 nt, Homo sapiens
  misc_RNA (1)...(19): siRNA sense strand
ggaaagccaagaggaagau

SEQ ID NO: 877093 - RNA, 19 nt, Homo sapiens
  misc_RNA (1)...(19): siRNA sense strand
gcuuauacagcguuugcua

SEQ ID NO: 877094 - RNA, 19 nt, Homo sapiens
  misc_RNA (1)...(19): siRNA sense strand
caagagaaggugguuauac

SEQ ID NO: 877095 - RNA, 19 nt, Homo sapiens
  misc_RNA (1)...(19): siRNA sense strand
uguucaaacuccagagcua

SEQ ID NO: 877096 - RNA, 19 nt, Homo sapiens
  misc_RNA (1)...(19): siRNA sense strand
ugaugaguuucuagaugaa

SEQ ID NO: 877097 - RNA, 19 nt, Homo sapiens
  misc_RNA (1)...(19): siRNA sense strand
ccaagaugacaauucagaa

SEQ ID NO: 877098 - RNA, 19 nt, Homo sapiens
  misc_RNA (1)...(19): siRNA sense strand
gaccauggccaaggaggaa

SEQ ID NO: 877099 - RNA, 19 nt, Homo sapiens
  misc_RNA (1)...(19): siRNA sense strand
gcacugagcugaaguugaa

SEQ ID NO: 877100 - RNA, 19 nt, Homo sapiens
  misc_RNA (1)...(19): siRNA sense strand
ggauagcacugugaagguu

SEQ ID NO: 877101 - RNA, 19 nt, Homo sapiens
  misc_RNA (1)...(19): siRNA sense strand
gggcacacguucuguagga

SEQ ID NO: 877102 - RNA, 19 nt, Homo sapiens
  misc_RNA (1)...(19): siRNA sense strand
gcgggacgcauccauguua

SEQ ID NO: 877103 - RNA, 19 nt, Homo sapiens
  misc_RNA (1)...(19): siRNA sense strand
acgcauccauguuaaauga

SEQ ID NO: 877104 - RNA, 19 nt, Homo sapiens
  misc_RNA (1)...(19): siRNA sense strand
gcccagagcuaccuguaca

SEQ ID NO: 877105 - RNA, 19 nt, Homo sapiens
  misc_RNA (1)...(19): siRNA sense strand
ccauugcugugacaaauca

SEQ ID NO: 877106 - RNA, 19 nt, Homo sapiens
  misc_RNA (1)...(19): siRNA sense strand
agacccaccuggagacuug

SEQ ID NO: 877107 - RNA, 19 nt, Homo sapiens
  misc_RNA (1)...(19): siRNA sense strand
gagaugcgccuugaaguca

SEQ ID NO: 877108 - RNA, 19 nt, Homo sapiens
  misc_RNA (1)...(19): siRNA sense strand
gacgagcugucccacauca

SEQ ID NO: 877109 - RNA, 19 nt, Homo sapiens
  misc_RNA (1)...(19): siRNA sense strand
ggacgcauccauguuaaau

SEQ ID NO: 877110 - RNA, 19 nt, Homo sapiens
  misc_RNA (1)...(19): siRNA sense strand
ggagaagaucgaccagcua

SEQ ID NO: 877111 - RNA, 19 nt, Homo sapiens
  misc_RNA (1)...(19): siRNA sense strand
gaagaucgaccagcuagag

SEQ ID NO: 877112 - RNA, 19 nt, Homo sapiens
  misc_RNA (1)...(19): siRNA sense strand
gcacgcuggucuccucaca

SEQ ID NO: 877113 - RNA, 19 nt, Homo sapiens
  misc_RNA (1)...(19): siRNA sense strand
ggagaugcgccuugaaguc

SEQ ID NO: 877114 - RNA, 19 nt, Homo sapiens
  misc_RNA (1)...(19): siRNA sense strand
gagggcagcugugacuaca

SEQ ID NO: 877115 - RNA, 19 nt, Homo sapiens
  misc_RNA (1)...(19): siRNA sense strand
ucgggaaccaggacacuua

SEQ ID NO: 877116 - RNA, 19 nt, Homo sapiens
  misc_RNA (1)...(19): siRNA sense strand
ucgagggccugaaggaguu

SEQ ID NO: 877117 - RNA, 19 nt, Homo sapiens
  misc_RNA (1)...(19): siRNA sense strand
ucucugcgcuccacauucu

SEQ ID NO: 877118 - RNA, 19 nt, Homo sapiens
  misc_RNA (1)...(19): siRNA sense strand
gauagcacugugaagguuu

SEQ ID NO: 877119 - RNA, 19 nt, Homo sapiens
  misc_RNA (1)...(19): siRNA sense strand
ggcagcgucuacuccauug

SEQ ID NO: 877120 - RNA, 19 nt, Homo sapiens
  misc_RNA (1)...(19): siRNA sense strand
uguaggagaugcgccuuga

SEQ ID NO: 877121 - RNA, 19 nt, Homo sapiens
  misc_RNA (1)...(19): siRNA sense strand
guggacaacgucaaacuga

SEQ ID NO: 877122 - RNA, 19 nt, Homo sapiens
  misc_RNA (1)...(19): siRNA sense strand
ugaccgugguggugaacaa

SEQ ID NO: 877123 - RNA, 19 nt, Homo sapiens
  misc_RNA (1)...(19): siRNA sense strand
gaagguuuggacuugcuaa

SEQ ID NO: 877124 - RNA, 19 nt, Homo sapiens
  misc_RNA (1)...(19): siRNA sense strand
ucacacaacgugcucuuca

SEQ ID NO: 877125 - RNA, 19 nt, Homo sapiens
  misc_RNA (1)...(19): siRNA sense strand
ggaaccaggacacuuacga

SEQ ID NO: 877126 - RNA, 19 nt, Homo sapiens
  misc_RNA (1)...(19): siRNA sense strand
gaugcgccuugaagucaga

SEQ ID NO: 877127 - RNA, 19 nt, Homo sapiens
  misc_RNA (1)...(19): siRNA sense strand
cgggacgcauccauguuaa

SEQ ID NO: 877128 - RNA, 19 nt, Homo sapiens
  misc_RNA (1)...(19): siRNA sense strand
cggugaagcugugcuguca

SEQ ID NO: 877129 - RNA, 19 nt, Homo sapiens
  misc_RNA (1)...(19): siRNA sense strand
gcuccuaccagacaaucaa

SEQ ID NO: 877130 - RNA, 19 nt, Homo sapiens
  misc_RNA (1)...(19): siRNA sense strand
cuacgacccucagcagauc

SEQ ID NO: 877131 - RNA, 19 nt, Homo sapiens
  misc_RNA (1)...(19): siRNA sense strand
caaucaagaucugggacau

SEQ ID NO: 877132 - RNA, 19 nt, Homo sapiens
  misc_RNA (1)...(19): siRNA sense strand
gaguauggacaacaugauc

SEQ ID NO: 877133 - RNA, 19 nt, Homo sapiens
  misc_RNA (1)...(19): siRNA sense strand
cucagcagaucuucaagug

SEQ ID NO: 877134 - RNA, 19 nt, Homo sapiens
  misc_RNA (1)...(19): siRNA sense strand
ggaguauggacaacaugau

SEQ ID NO: 877135 - RNA, 19 nt, Homo sapiens
  misc_RNA (1)...(19): siRNA sense strand
gcagaucuucaagugcaaa

SEQ ID NO: 877136 - RNA, 19 nt, Homo sapiens
  misc_RNA (1)...(19): siRNA sense strand
ccugugcggugucccaaca

SEQ ID NO: 877137 - RNA, 19 nt, Homo sapiens
  misc_RNA (1)...(19): siRNA sense strand
acgcuggucuccucacaca

SEQ ID NO: 877138 - RNA, 19 nt, Homo sapiens
  misc_RNA (1)...(19): siRNA sense strand
gaucgaccagcuagagaag

SEQ ID NO: 877139 - RNA, 19 nt, Homo sapiens
  misc_RNA (1)...(19): siRNA sense strand
cugugaagguuuggacuug

SEQ ID NO: 877140 - RNA, 19 nt, Homo sapiens
  misc_RNA (1)...(19): siRNA sense strand
cagcggcuccuaccagaca

SEQ ID NO: 877141 - RNA, 19 nt, Homo sapiens
  misc_RNA (1)...(19): siRNA sense strand
gggacgcauccauguuaaa

SEQ ID NO: 877142 - RNA, 19 nt, Homo sapiens
  misc_RNA (1)...(19): siRNA sense strand
accaaagucuucagugcau

SEQ ID NO: 877143 - RNA, 19 nt, Homo sapiens
  misc_RNA (1)...(19): siRNA sense strand
ucgcauagcugcuggcuua

SEQ ID NO: 877144 - RNA, 19 nt, Homo sapiens
  misc_RNA (1)...(19): siRNA sense strand
gaaaggaaucuacuugaaa

SEQ ID NO: 877145 - RNA, 19 nt, Homo sapiens
  misc_RNA (1)...(19): siRNA sense strand
cgacgcaucuugaauguga

SEQ ID NO: 877146 - RNA, 19 nt, Homo sapiens
  misc_RNA (1)...(19): siRNA sense strand
gaauacaggugauuuggau

SEQ ID NO: 877147 - RNA, 19 nt, Homo sapiens
  misc_RNA (1)...(19): siRNA sense strand
ugugaaaccuguaccauaa

SEQ ID NO: 877148 - RNA, 19 nt, Homo sapiens
  misc_RNA (1)...(19): siRNA sense strand
agacuuaacuuacagaugu

SEQ ID NO: 877149 - RNA, 19 nt, Homo sapiens
  misc_RNA (1)...(19): siRNA sense strand
ggacugacuggucuuguua

SEQ ID NO: 877150 - RNA, 19 nt, Homo sapiens
  misc_RNA (1)...(19): siRNA sense strand
aagggaacaucuuaaguua

SEQ ID NO: 877151 - RNA, 19 nt, Homo sapiens
  misc_RNA (1)...(19): siRNA sense strand
cagcauaccuugggucuga

SEQ ID NO: 877152 - RNA, 19 nt, Homo sapiens
  misc_RNA (1)...(19): siRNA sense strand
caucuuaaguuacuggauu

SEQ ID NO: 877153 - RNA, 19 nt, Homo sapiens
  misc_RNA (1)...(19): siRNA sense strand
acacaaagggaacaucuua

SEQ ID NO: 877154 - RNA, 19 nt, Homo sapiens
  misc_RNA (1)...(19): siRNA sense strand
gcagaaaggaaucuacuug

SEQ ID NO: 877155 - RNA, 19 nt, Homo sapiens
  misc_RNA (1)...(19): siRNA sense strand
agaaaggaaucuacuugaa

SEQ ID NO: 877156 - RNA, 19 nt, Homo sapiens
  misc_RNA (1)...(19): siRNA sense strand
gggaacaucuuaaguuacu

SEQ ID NO: 877157 - RNA, 19 nt, Homo sapiens
  misc_RNA (1)...(19): siRNA sense strand
gaaaauggaucgguuuaug

SEQ ID NO: 877158 - RNA, 19 nt, Homo sapiens
  misc_RNA (1)...(19): siRNA sense strand
gacaaaggcucgcauagcu

SEQ ID NO: 877159 - RNA, 19 nt, Homo sapiens
  misc_RNA (1)...(19): siRNA sense strand
guaucaaucagcucuguua

SEQ ID NO: 877160 - RNA, 19 nt, Homo sapiens
  misc_RNA (1)...(19): siRNA sense strand
ugacuggucuuguuauugg

SEQ ID NO: 877161 - RNA, 19 nt, Homo sapiens
  misc_RNA (1)...(19): siRNA sense strand
caacagacuuaacuuacag

SEQ ID NO: 877162 - RNA, 19 nt, Homo sapiens
  misc_RNA (1)...(19): siRNA sense strand
gcagggauaccuuuucuua

SEQ ID NO: 877163 - RNA, 19 nt, Homo sapiens
  misc_RNA (1)...(19): siRNA sense strand
aaagggaacaucuuaaguu

SEQ ID NO: 877164 - RNA, 19 nt, Homo sapiens
  misc_RNA (1)...(19): siRNA sense strand
caggugauuuggauuguga

SEQ ID NO: 877165 - RNA, 19 nt, Homo sapiens
  misc_RNA (1)...(19): siRNA sense strand
gauuaaaugcugcucuuug

SEQ ID NO: 877166 - RNA, 19 nt, Homo sapiens
  misc_RNA (1)...(19): siRNA sense strand
gguggucuauacccuguuu

SEQ ID NO: 877167 - RNA, 19 nt, Homo sapiens
  misc_RNA (1)...(19): siRNA sense strand
gcugcuggcuuaccaaugg

SEQ ID NO: 877168 - RNA, 19 nt, Homo sapiens
  misc_RNA (1)...(19): siRNA sense strand
gaaccuggcaaagaaauuc

SEQ ID NO: 877169 - RNA, 19 nt, Homo sapiens
  misc_RNA (1)...(19): siRNA sense strand
acaacagacuuaacuuaca

SEQ ID NO: 877170 - RNA, 19 nt, Homo sapiens
  misc_RNA (1)...(19): siRNA sense strand
ucaaucagcucuguuacca

SEQ ID NO: 877171 - RNA, 19 nt, Homo sapiens
  misc_RNA (1)...(19): siRNA sense strand
ccuugggucugaacaauau

SEQ ID NO: 877172 - RNA, 19 nt, Homo sapiens
  misc_RNA (1)...(19): siRNA sense strand
cagaaaggaaucuacuuga

SEQ ID NO: 877173 - RNA, 19 nt, Homo sapiens
  misc_RNA (1)...(19): siRNA sense strand
ugaaaccuguaccauaaca

SEQ ID NO: 877174 - RNA, 19 nt, Homo sapiens
  misc_RNA (1)...(19): siRNA sense strand
uuucuuggcuauaccugua

SEQ ID NO: 877175 - RNA, 19 nt, Homo sapiens
  misc_RNA (1)...(19): siRNA sense strand
gaacuucuaagccugucuu

SEQ ID NO: 877176 - RNA, 19 nt, Homo sapiens
  misc_RNA (1)...(19): siRNA sense strand
ggcuauaccuguaaauggu

SEQ ID NO: 877177 - RNA, 19 nt, Homo sapiens
  misc_RNA (1)...(19): siRNA sense strand
caaagggaacaucuuaagu

SEQ ID NO: 877178 - RNA, 19 nt, Homo sapiens
  misc_RNA (1)...(19): siRNA sense strand
uaucugaaccuggcaaaga

SEQ ID NO: 877179 - RNA, 19 nt, Homo sapiens
  misc_RNA (1)...(19): siRNA sense strand
aaauggaucgguuuauguu

SEQ ID NO: 877180 - RNA, 19 nt, Homo sapiens
  misc_RNA (1)...(19): siRNA sense strand
auuaaaugcugcucuuugu

SEQ ID NO: 877181 - RNA, 19 nt, Homo sapiens
  misc_RNA (1)...(19): siRNA sense strand
uggcaaagaaauucacuga

SEQ ID NO: 877182 - RNA, 19 nt, Homo sapiens
  misc_RNA (1)...(19): siRNA sense strand
ggaaucuacuugaaaaugg

SEQ ID NO: 877183 - RNA, 19 nt, Homo sapiens
  misc_RNA (1)...(19): siRNA sense strand
uggauuaaaugcugcucuu

SEQ ID NO: 877184 - RNA, 19 nt, Homo sapiens
  misc_RNA (1)...(19): siRNA sense strand
guuacuggauuagaacuuc

SEQ ID NO: 877185 - RNA, 19 nt, Homo sapiens
  misc_RNA (1)...(19): siRNA sense strand
gacuuaacuuacagauguu

SEQ ID NO: 877186 - RNA, 19 nt, Homo sapiens
  misc_RNA (1)...(19): siRNA sense strand
ggucugaacaauauaaacu

SEQ ID NO: 877187 - RNA, 19 nt, Homo sapiens
  misc_RNA (1)...(19): siRNA sense strand
ggauuaaaugcugcucuuu

SEQ ID NO: 877188 - RNA, 19 nt, Homo sapiens
  misc_RNA (1)...(19): siRNA sense strand
uggacugacuggucuuguu

SEQ ID NO: 877189 - RNA, 19 nt, Homo sapiens
  misc_RNA (1)...(19): siRNA sense strand
uguaaaugguggucuagca

SEQ ID NO: 877190 - RNA, 19 nt, Homo sapiens
  misc_RNA (1)...(19): siRNA sense strand
caucuugaaugugacaaag

SEQ ID NO: 877191 - RNA, 19 nt, Homo sapiens
  misc_RNA (1)...(19): siRNA sense strand
cacaaagggaacaucuuaa

SEQ ID NO: 877192 - RNA, 19 nt, Homo sapiens
  misc_RNA (1)...(19): siRNA sense strand
ccucauagcaaacagucuu

SEQ ID NO: 877193 - RNA, 19 nt, Homo sapiens
  misc_RNA (1)...(19): siRNA sense strand
acaaagggaacaucuuaag

SEQ ID NO: 877194 - RNA, 19 nt, Homo sapiens
  misc_RNA (1)...(19): siRNA sense strand
cauagcugcuggcuuacca

SEQ ID NO: 877195 - RNA, 19 nt, Homo sapiens
  misc_RNA (1)...(19): siRNA sense strand
gaagcagaaaggaaucuac

SEQ ID NO: 877196 - RNA, 19 nt, Homo sapiens
  misc_RNA (1)...(19): siRNA sense strand
caauggcagggauaccuuu

SEQ ID NO: 877197 - RNA, 19 nt, Homo sapiens
  misc_RNA (1)...(19): siRNA sense strand
gaaucuacuugaaaaugga

SEQ ID NO: 877198 - RNA, 19 nt, Homo sapiens
  misc_RNA (1)...(19): siRNA sense strand
ccacacaaagggaacaucu

SEQ ID NO: 877199 - RNA, 19 nt, Homo sapiens
  misc_RNA (1)...(19): siRNA sense strand
gcagccagguaucaaucag

SEQ ID NO: 877200 - RNA, 19 nt, Homo sapiens
  misc_RNA (1)...(19): siRNA sense strand
ucuauacccuguuuucuug

SEQ ID NO: 877201 - RNA, 19 nt, Homo sapiens
  misc_RNA (1)...(19): siRNA sense strand
auacaggugauuuggauug

SEQ ID NO: 877202 - RNA, 19 nt, Homo sapiens
  misc_RNA (1)...(19): siRNA sense strand
gcaucuugaaugugacaaa

SEQ ID NO: 877203 - RNA, 19 nt, Homo sapiens
  misc_RNA (1)...(19): siRNA sense strand
acugacuggucuuguuauu

SEQ ID NO: 877204 - RNA, 19 nt, Homo sapiens
  misc_RNA (1)...(19): siRNA sense strand
uaccuugggucugaacaau

SEQ ID NO: 877205 - RNA, 19 nt, Homo sapiens
  misc_RNA (1)...(19): siRNA sense strand
ucagcucuguuaccacaca

SEQ ID NO: 877206 - RNA, 19 nt, Homo sapiens
  misc_RNA (1)...(19): siRNA sense strand
ugaauacaggugauuugga

SEQ ID NO: 877207 - RNA, 19 nt, Homo sapiens
  misc_RNA (1)...(19): siRNA sense strand
uugugaaaccuguaccaua

SEQ ID NO: 877208 - RNA, 19 nt, Homo sapiens
  misc_RNA (1)...(19): siRNA sense strand
gggauaccuuuucuuacaa

SEQ ID NO: 877209 - RNA, 19 nt, Homo sapiens
  misc_RNA (1)...(19): siRNA sense strand
uguuauugguggucuauac

SEQ ID NO: 877210 - RNA, 19 nt, Homo sapiens
  misc_RNA (1)...(19): siRNA sense strand
ugauuuggauugugaaacc

SEQ ID NO: 877211 - RNA, 19 nt, Homo sapiens
  misc_RNA (1)...(19): siRNA sense strand
uaacuaagcagcacaauaa

SEQ ID NO: 877212 - RNA, 19 nt, Homo sapiens
  misc_RNA (1)...(19): siRNA sense strand
uaaccgacuuagcgaauuc

SEQ ID NO: 877213 - RNA, 19 nt, Homo sapiens
  misc_RNA (1)...(19): siRNA sense strand
cuaccuaccuaaggagaaa

SEQ ID NO: 877214 - RNA, 19 nt, Homo sapiens
  misc_RNA (1)...(19): siRNA sense strand
caaacacccuacacaacca

SEQ ID NO: 877215 - RNA, 19 nt, Homo sapiens
  misc_RNA (1)...(19): siRNA sense strand
ccauacuccugucuaccua

SEQ ID NO: 877216 - RNA, 19 nt, Homo sapiens
  misc_RNA (1)...(19): siRNA sense strand
gcagcacaauaaccgacuu

SEQ ID NO: 877217 - RNA, 19 nt, Homo sapiens
  misc_RNA (1)...(19): siRNA sense strand
cagcacaauaaccgacuua

SEQ ID NO: 877218 - RNA, 19 nt, Homo sapiens
  misc_RNA (1)...(19): siRNA sense strand
cagcagugcccacauccaa

SEQ ID NO: 877219 - RNA, 19 nt, Homo sapiens
  misc_RNA (1)...(19): siRNA sense strand
auaacuaagcagcacaaua

SEQ ID NO: 877220 - RNA, 19 nt, Homo sapiens
  misc_RNA (1)...(19): siRNA sense strand
gcacaauaaccgacuuagc

SEQ ID NO: 877221 - RNA, 19 nt, Homo sapiens
  misc_RNA (1)...(19): siRNA sense strand
gcagugcccacauccaaac

SEQ ID NO: 877222 - RNA, 19 nt, Homo sapiens
  misc_RNA (1)...(19): siRNA sense strand
cauccaaacacccuacaca

SEQ ID NO: 877223 - RNA, 19 nt, Homo sapiens
  misc_RNA (1)...(19): siRNA sense strand
auaaccgacuuagcgaauu

SEQ ID NO: 877224 - RNA, 19 nt, Homo sapiens
  misc_RNA (1)...(19): siRNA sense strand
gcaugcacacgcacacaca

SEQ ID NO: 877225 - RNA, 19 nt, Homo sapiens
  misc_RNA (1)...(19): siRNA sense strand
acuccugucuaccuaccua

SEQ ID NO: 877226 - RNA, 19 nt, Homo sapiens
  misc_RNA (1)...(19): siRNA sense strand
guacuuaaaugaagaugug

SEQ ID NO: 877227 - RNA, 19 nt, Homo sapiens
  misc_RNA (1)...(19): siRNA sense strand
ggaaguaagggaagaaauu

SEQ ID NO: 877228 - RNA, 19 nt, Homo sapiens
  misc_RNA (1)...(19): siRNA sense strand
aaagaaagauugcccugaa

SEQ ID NO: 877229 - RNA, 19 nt, Homo sapiens
  misc_RNA (1)...(19): siRNA sense strand
gggaaugagugcagacuau

SEQ ID NO: 877230 - RNA, 19 nt, Homo sapiens
  misc_RNA (1)...(19): siRNA sense strand
gaaauugcaguugcuuuaa

SEQ ID NO: 877231 - RNA, 19 nt, Homo sapiens
  misc_RNA (1)...(19): siRNA sense strand
gaaguaagggaagaaauug

SEQ ID NO: 877232 - RNA, 19 nt, Homo sapiens
  misc_RNA (1)...(19): siRNA sense strand
gaaauaaccaaguguaagg

SEQ ID NO: 877233 - RNA, 19 nt, Homo sapiens
  misc_RNA (1)...(19): siRNA sense strand
agaaauugcaguugcuuua

SEQ ID NO: 877234 - RNA, 19 nt, Homo sapiens
  misc_RNA (1)...(19): siRNA sense strand
gaguuaguaccacauauaa

SEQ ID NO: 877235 - RNA, 19 nt, Homo sapiens
  misc_RNA (1)...(19): siRNA sense strand
ucacaaugggcaaauuaua

SEQ ID NO: 877236 - RNA, 19 nt, Homo sapiens
  misc_RNA (1)...(19): siRNA sense strand
cgaguuaguaccacauaua

SEQ ID NO: 877237 - RNA, 19 nt, Homo sapiens
  misc_RNA (1)...(19): siRNA sense strand
gcaccugucuagaucuugu

SEQ ID NO: 877238 - RNA, 19 nt, Homo sapiens
  misc_RNA (1)...(19): siRNA sense strand
guucacaaugggcaaauua

SEQ ID NO: 877239 - RNA, 19 nt, Homo sapiens
  misc_RNA (1)...(19): siRNA sense strand
ggaagaaauugcaguugcu

SEQ ID NO: 877240 - RNA, 19 nt, Homo sapiens
  misc_RNA (1)...(19): siRNA sense strand
gaaugagugcagacuauga

SEQ ID NO: 877241 - RNA, 19 nt, Homo sapiens
  misc_RNA (1)...(19): siRNA sense strand
caaauuauagcaacagaca

SEQ ID NO: 877242 - RNA, 19 nt, Homo sapiens
  misc_RNA (1)...(19): siRNA sense strand
gagcgaauggucacaguug

SEQ ID NO: 877243 - RNA, 19 nt, Homo sapiens
  misc_RNA (1)...(19): siRNA sense strand
ccacagagcacgaaauaac

SEQ ID NO: 877244 - RNA, 19 nt, Homo sapiens
  misc_RNA (1)...(19): siRNA sense strand
uaaacaacuugaagccaau

SEQ ID NO: 877245 - RNA, 19 nt, Homo sapiens
  misc_RNA (1)...(19): siRNA sense strand
gaaagauugcccugaaagu

SEQ ID NO: 877246 - RNA, 19 nt, Homo sapiens
  misc_RNA (1)...(19): siRNA sense strand
gaauaccuaagacagaauu

SEQ ID NO: 877247 - RNA, 19 nt, Homo sapiens
  misc_RNA (1)...(19): siRNA sense strand
uaaaugaagaugugaaugg

SEQ ID NO: 877248 - RNA, 19 nt, Homo sapiens
  misc_RNA (1)...(19): siRNA sense strand
aagaaagauugcccugaaa

SEQ ID NO: 877249 - RNA, 19 nt, Homo sapiens
  misc_RNA (1)...(19): siRNA sense strand
gguggcgguugcaaacuuu

SEQ ID NO: 877250 - RNA, 19 nt, Homo sapiens
  misc_RNA (1)...(19): siRNA sense strand
guccacagagcacgaaaua

SEQ ID NO: 877251 - RNA, 19 nt, Homo sapiens
  misc_RNA (1)...(19): siRNA sense strand
ugcaguugcuuuaaagaaa

SEQ ID NO: 877252 - RNA, 19 nt, Homo sapiens
  misc_RNA (1)...(19): siRNA sense strand
caacagacagugaggaagu

SEQ ID NO: 877253 - RNA, 19 nt, Homo sapiens
  misc_RNA (1)...(19): siRNA sense strand
uaaccaaguguaaggcuaa

SEQ ID NO: 877254 - RNA, 19 nt, Homo sapiens
  misc_RNA (1)...(19): siRNA sense strand
uggaauaccuaagacagaa

SEQ ID NO: 877255 - RNA, 19 nt, Homo sapiens
  misc_RNA (1)...(19): siRNA sense strand
gagugcagacuaugaagaa

SEQ ID NO: 877256 - RNA, 19 nt, Homo sapiens
  misc_RNA (1)...(19): siRNA sense strand
aaaaugcaaugguguguuu

SEQ ID NO: 877257 - RNA, 19 nt, Homo sapiens
  misc_RNA (1)...(19): siRNA sense strand
ucacagaugguucacaaug

SEQ ID NO: 877258 - RNA, 19 nt, Homo sapiens
  misc_RNA (1)...(19): siRNA sense strand
aaagacaagcggcaaagaa

SEQ ID NO: 877259 - RNA, 19 nt, Homo sapiens
  misc_RNA (1)...(19): siRNA sense strand
ugcagacuaugaagaaauu

SEQ ID NO: 877260 - RNA, 19 nt, Homo sapiens
  misc_RNA (1)...(19): siRNA sense strand
gucauggaauugcagauug

SEQ ID NO: 877261 - RNA, 19 nt, Homo sapiens
  misc_RNA (1)...(19): siRNA sense strand
aaaugaagaugugaaugga

SEQ ID NO: 877262 - RNA, 19 nt, Homo sapiens
  misc_RNA (1)...(19): siRNA sense strand
augaagaugugaauggauu

SEQ ID NO: 877263 - RNA, 19 nt, Homo sapiens
  misc_RNA (1)...(19): siRNA sense strand
caaguguaaggcuaaagua

SEQ ID NO: 877264 - RNA, 19 nt, Homo sapiens
  misc_RNA (1)...(19): siRNA sense strand
gggcaccugucuagaucuu

SEQ ID NO: 877265 - RNA, 19 nt, Homo sapiens
  misc_RNA (1)...(19): siRNA sense strand
agacaugggcacugggaua

SEQ ID NO: 877266 - RNA, 19 nt, Homo sapiens
  misc_RNA (1)...(19): siRNA sense strand
gcacugggauauguuacag

SEQ ID NO: 877267 - RNA, 19 nt, Homo sapiens
  misc_RNA (1)...(19): siRNA sense strand
gaagaaauugcaguugcuu

SEQ ID NO: 877268 - RNA, 19 nt, Homo sapiens
  misc_RNA (1)...(19): siRNA sense strand
uaagacagaauucacagau

SEQ ID NO: 877269 - RNA, 19 nt, Homo sapiens
  misc_RNA (1)...(19): siRNA sense strand
guggcucuguggaacauuu

SEQ ID NO: 877270 - RNA, 19 nt, Homo sapiens
  misc_RNA (1)...(19): siRNA sense strand
gaucuuguccugauaaucc

SEQ ID NO: 877271 - RNA, 19 nt, Homo sapiens
  misc_RNA (1)...(19): siRNA sense strand
ggucauggaauugcagauu

SEQ ID NO: 877272 - RNA, 19 nt, Homo sapiens
  misc_RNA (1)...(19): siRNA sense strand
uaccacauauaacaagaga

SEQ ID NO: 877273 - RNA, 19 nt, Homo sapiens
  misc_RNA (1)...(19): siRNA sense strand
ggcaaauuauagcaacaga

SEQ ID NO: 877274 - RNA, 19 nt, Homo sapiens
  misc_RNA (1)...(19): siRNA sense strand
ccaaagcguaaacaacuug

SEQ ID NO: 877275 - RNA, 19 nt, Homo sapiens
  misc_RNA (1)...(19): siRNA sense strand
aagacaagcggcaaagaaa

SEQ ID NO: 877276 - RNA, 19 nt, Homo sapiens
  misc_RNA (1)...(19): siRNA sense strand
cgggaaggaagaagauuaa

SEQ ID NO: 877277 - RNA, 19 nt, Homo sapiens
  misc_RNA (1)...(19): siRNA sense strand
gaagaaauuuuggauguac

SEQ ID NO: 877278 - RNA, 19 nt, Homo sapiens
  misc_RNA (1)...(19): siRNA sense strand
caugggcacugggauaugu

SEQ ID NO: 877279 - RNA, 19 nt, Homo sapiens
  misc_RNA (1)...(19): siRNA sense strand
uagaaaaccuggucaugga

SEQ ID NO: 877280 - RNA, 19 nt, Homo sapiens
  misc_RNA (1)...(19): siRNA sense strand
ggaaggaagaagauuaaaa

SEQ ID NO: 877281 - RNA, 19 nt, Homo sapiens
  misc_RNA (1)...(19): siRNA sense strand
gcacgaaauaaccaagugu

SEQ ID NO: 877282 - RNA, 19 nt, Homo sapiens
  misc_RNA (1)...(19): siRNA sense strand
cacaaugggcaaauuauag

SEQ ID NO: 877283 - RNA, 19 nt, Homo sapiens
  misc_RNA (1)...(19): siRNA sense strand
ggaaugagugcagacuaug

SEQ ID NO: 877284 - RNA, 19 nt, Homo sapiens
  misc_RNA (1)...(19): siRNA sense strand
aaaggacucuaugcugaug

SEQ ID NO: 877285 - RNA, 19 nt, Homo sapiens
  misc_RNA (1)...(19): siRNA sense strand
ucuagaucuuguccugaua

SEQ ID NO: 877286 - RNA, 19 nt, Homo sapiens
  misc_RNA (1)...(19): siRNA sense strand
caaaggacucuaugcugau

SEQ ID NO: 877287 - RNA, 19 nt, Homo sapiens
  misc_RNA (1)...(19): siRNA sense strand
guggaacauuuaaagaaag

SEQ ID NO: 877288 - RNA, 19 nt, Homo sapiens
  misc_RNA (1)...(19): siRNA sense strand
auucacagaugguucacaa

SEQ ID NO: 877289 - RNA, 19 nt, Homo sapiens
  misc_RNA (1)...(19): siRNA sense strand
cgaaauaaccaaguguaag

SEQ ID NO: 877290 - RNA, 19 nt, Homo sapiens
  misc_RNA (1)...(19): siRNA sense strand
cacagaugguucacaaugg

SEQ ID NO: 877291 - RNA, 19 nt, Homo sapiens
  misc_RNA (1)...(19): siRNA sense strand
aacagacagugaggaagua

SEQ ID NO: 877292 - RNA, 19 nt, Homo sapiens
  misc_RNA (1)...(19): siRNA sense strand
cuagaucuuguccugauaa

SEQ ID NO: 877293 - RNA, 19 nt, Homo sapiens
  misc_RNA (1)...(19): siRNA sense strand
gucuagaucuuguccugau

SEQ ID NO: 877294 - RNA, 19 nt, Homo sapiens
  misc_RNA (1)...(19): siRNA sense strand
gcucuuggcgaauuuccuu

SEQ ID NO: 877295 - RNA, 19 nt, Homo sapiens
  misc_RNA (1)...(19): siRNA sense strand
uaaaguagacccggcucuu

SEQ ID NO: 877296 - RNA, 19 nt, Homo sapiens
  misc_RNA (1)...(19): siRNA sense strand
gacaugggcacugggauau

SEQ ID NO: 877297 - RNA, 19 nt, Homo sapiens
  misc_RNA (1)...(19): siRNA sense strand
gaggaaguaagggaagaaa

SEQ ID NO: 877298 - RNA, 19 nt, Homo sapiens
  misc_RNA (1)...(19): siRNA sense strand
aagacagaauucacagaug

SEQ ID NO: 877299 - RNA, 19 nt, Homo sapiens
  misc_RNA (1)...(19): siRNA sense strand
gugaggaaguaagggaaga

SEQ ID NO: 877300 - RNA, 19 nt, Homo sapiens
  misc_RNA (1)...(19): siRNA sense strand
cacgaaauaaccaagugua

SEQ ID NO: 877301 - RNA, 19 nt, Homo sapiens
  misc_RNA (1)...(19): siRNA sense strand
guguaaggcuaaaguagac

SEQ ID NO: 877302 - RNA, 19 nt, Homo sapiens
  misc_RNA (1)...(19): siRNA sense strand
ccaaguguaaggcuaaagu

SEQ ID NO: 877303 - RNA, 19 nt, Homo sapiens
  misc_RNA (1)...(19): siRNA sense strand
aagauugcccugaaaguca

SEQ ID NO: 877304 - RNA, 19 nt, Homo sapiens
  misc_RNA (1)...(19): siRNA sense strand
uaccaaagcguaaacaacu

SEQ ID NO: 877305 - RNA, 19 nt, Homo sapiens
  misc_RNA (1)...(19): siRNA sense strand
gguucacaaugggcaaauu

SEQ ID NO: 877306 - RNA, 19 nt, Homo sapiens
  misc_RNA (1)...(19): siRNA sense strand
ggaauaccuaagacagaau

SEQ ID NO: 877307 - RNA, 19 nt, Homo sapiens
  misc_RNA (1)...(19): siRNA sense strand
acgggaaggaagaagauua

SEQ ID NO: 877308 - RNA, 19 nt, Homo sapiens
  misc_RNA (1)...(19): siRNA sense strand
gugcagacuaugaagaaau

SEQ ID NO: 877309 - RNA, 19 nt, Homo sapiens
  misc_RNA (1)...(19): siRNA sense strand
aaaguagacccggcucuug

SEQ ID NO: 877310 - RNA, 19 nt, Homo sapiens
  misc_RNA (1)...(19): siRNA sense strand
aaacaacuugaagccaaua

SEQ ID NO: 877311 - RNA, 19 nt, Homo sapiens
  misc_RNA (1)...(19): siRNA sense strand
acgaaauaaccaaguguaa

SEQ ID NO: 877312 - RNA, 19 nt, Homo sapiens
  misc_RNA (1)...(19): siRNA sense strand
agaauucacagaugguuca

SEQ ID NO: 877313 - RNA, 19 nt, Homo sapiens
  misc_RNA (1)...(19): siRNA sense strand
gcucuguggaacauuuaaa

SEQ ID NO: 877314 - RNA, 19 nt, Homo sapiens
  misc_RNA (1)...(19): siRNA sense strand
gagcacgaaauaaccaagu

SEQ ID NO: 877315 - RNA, 19 nt, Homo sapiens
  misc_RNA (1)...(19): siRNA sense strand
caaagcguaaacaacuuga

SEQ ID NO: 877316 - RNA, 19 nt, Homo sapiens
  misc_RNA (1)...(19): siRNA sense strand
cagagcgaauggucacagu

SEQ ID NO: 877317 - RNA, 19 nt, Homo sapiens
  misc_RNA (1)...(19): siRNA sense strand
gaugguggcgguugcaaac

SEQ ID NO: 877318 - RNA, 19 nt, Homo sapiens
  misc_RNA (1)...(19): siRNA sense strand
gaaauggggcaccugucua

SEQ ID NO: 877319 - RNA, 19 nt, Homo sapiens
  misc_RNA (1)...(19): siRNA sense strand
gacagucgacgggaaggaa

SEQ ID NO: 877320 - RNA, 19 nt, Homo sapiens
  misc_RNA (1)...(19): siRNA sense strand
aaagauugcccugaaaguc

SEQ ID NO: 877321 - RNA, 19 nt, Homo sapiens
  misc_RNA (1)...(19): siRNA sense strand
ccgaguuaguaccacauau

SEQ ID NO: 877322 - RNA, 19 nt, Homo sapiens
  misc_RNA (1)...(19): siRNA sense strand
gggaaggaagaagauuaaa

SEQ ID NO: 877323 - RNA, 19 nt, Homo sapiens
  misc_RNA (1)...(19): siRNA sense strand
cgacgggaaggaagaagau

SEQ ID NO: 877324 - RNA, 19 nt, Homo sapiens
  misc_RNA (1)...(19): siRNA sense strand
uagaucuuguccugauaau

SEQ ID NO: 877325 - RNA, 19 nt, Homo sapiens
  misc_RNA (1)...(19): siRNA sense strand
guuggucgcugggcaaagg

SEQ ID NO: 877326 - RNA, 19 nt, Homo sapiens
  misc_RNA (1)...(19): siRNA sense strand
gcacaugcauugagacaca

SEQ ID NO: 877327 - RNA, 19 nt, Homo sapiens
  misc_RNA (1)...(19): siRNA sense strand
gaauguagcgauagauauu

SEQ ID NO: 877328 - RNA, 19 nt, Homo sapiens
  misc_RNA (1)...(19): siRNA sense strand
acacgugaauguagcgaua

SEQ ID NO: 877329 - RNA, 19 nt, Homo sapiens
  misc_RNA (1)...(19): siRNA sense strand
ccaggaacacgcagacaua

SEQ ID NO: 877330 - RNA, 19 nt, Homo sapiens
  misc_RNA (1)...(19): siRNA sense strand
gugaauguagcgauagaua

SEQ ID NO: 877331 - RNA, 19 nt, Homo sapiens
  misc_RNA (1)...(19): siRNA sense strand
gacaccaggucacggagaa

SEQ ID NO: 877332 - RNA, 19 nt, Homo sapiens
  misc_RNA (1)...(19): siRNA sense strand
cagcgcacaugcauugaga

SEQ ID NO: 877333 - RNA, 19 nt, Homo sapiens
  misc_RNA (1)...(19): siRNA sense strand
cgauagauauuuggacauc

SEQ ID NO: 877334 - RNA, 19 nt, Homo sapiens
  misc_RNA (1)...(19): siRNA sense strand
ggaacacgcagacauaugc

SEQ ID NO: 877335 - RNA, 19 nt, Homo sapiens
  misc_RNA (1)...(19): siRNA sense strand
ccacuugucaccuaccuau

SEQ ID NO: 877336 - RNA, 19 nt, Homo sapiens
  misc_RNA (1)...(19): siRNA sense strand
gauagauauuuggacauca

SEQ ID NO: 877337 - RNA, 19 nt, Homo sapiens
  misc_RNA (1)...(19): siRNA sense strand
gcauugagacacacgauac

SEQ ID NO: 877338 - RNA, 19 nt, Homo sapiens
  misc_RNA (1)...(19): siRNA sense strand
ucacggagaaacacaaaca

SEQ ID NO: 877339 - RNA, 19 nt, Homo sapiens
  misc_RNA (1)...(19): siRNA sense strand
ggucacggagaaacacaaa

SEQ ID NO: 877340 - RNA, 19 nt, Homo sapiens
  misc_RNA (1)...(19): siRNA sense strand
ugaauguagcgauagauau

SEQ ID NO: 877341 - RNA, 19 nt, Homo sapiens
  misc_RNA (1)...(19): siRNA sense strand
ucaccuaccuauccccuuu

SEQ ID NO: 877342 - RNA, 19 nt, Homo sapiens
  misc_RNA (1)...(19): siRNA sense strand
acgcagcgcacaugcauug

SEQ ID NO: 877343 - RNA, 19 nt, Homo sapiens
  misc_RNA (1)...(19): siRNA sense strand
cacaaacaccacccaggaa

SEQ ID NO: 877344 - RNA, 19 nt, Homo sapiens
  misc_RNA (1)...(19): siRNA sense strand
caaacaccacccaggaaca

SEQ ID NO: 877345 - RNA, 19 nt, Homo sapiens
  misc_RNA (1)...(19): siRNA sense strand
cacaacacuugaggccaaa

SEQ ID NO: 877346 - RNA, 19 nt, Homo sapiens
  misc_RNA (1)...(19): siRNA sense strand
gcgcacaugcauugagaca

SEQ ID NO: 877347 - RNA, 19 nt, Homo sapiens
  misc_RNA (1)...(19): siRNA sense strand
gagaagcuaccgagacuug

SEQ ID NO: 877348 - RNA, 19 nt, Homo sapiens
  misc_RNA (1)...(19): siRNA sense strand
ggaguccagugaagaggaa

SEQ ID NO: 877349 - RNA, 19 nt, Homo sapiens
  misc_RNA (1)...(19): siRNA sense strand
gaugagaaguuggaaagag

SEQ ID NO: 877350 - RNA, 19 nt, Homo sapiens
  misc_RNA (1)...(19): siRNA sense strand
gaaaggcaucggagcaaga

SEQ ID NO: 877351 - RNA, 19 nt, Homo sapiens
  misc_RNA (1)...(19): siRNA sense strand
cuaagaagagccacaagaa

SEQ ID NO: 877352 - RNA, 19 nt, Homo sapiens
  misc_RNA (1)...(19): siRNA sense strand
aagaagagccacaagaaga

SEQ ID NO: 877353 - RNA, 19 nt, Homo sapiens
  misc_RNA (1)...(19): siRNA sense strand
ggucaucaccguagucaca

SEQ ID NO: 877354 - RNA, 19 nt, Homo sapiens
  misc_RNA (1)...(19): siRNA sense strand
gagaaaggcaucggagcaa

SEQ ID NO: 877355 - RNA, 19 nt, Homo sapiens
  misc_RNA (1)...(19): siRNA sense strand
agaggaggaugagaaguug

SEQ ID NO: 877356 - RNA, 19 nt, Homo sapiens
  misc_RNA (1)...(19): siRNA sense strand
aagaagaggaggaugagaa

SEQ ID NO: 877357 - RNA, 19 nt, Homo sapiens
  misc_RNA (1)...(19): siRNA sense strand
gaagcuaccgagacuugga

SEQ ID NO: 877358 - RNA, 19 nt, Homo sapiens
  misc_RNA (1)...(19): siRNA sense strand
aagaggaggaugagaaguu

SEQ ID NO: 877359 - RNA, 19 nt, Homo sapiens
  misc_RNA (1)...(19): siRNA sense strand
cggagaagcuaccgagacu

SEQ ID NO: 877360 - RNA, 19 nt, Homo sapiens
  misc_RNA (1)...(19): siRNA sense strand
ccagugaagaggaagaaga

SEQ ID NO: 877361 - RNA, 19 nt, Homo sapiens
  misc_RNA (1)...(19): siRNA sense strand
ccggagagggaaugaguaa

SEQ ID NO: 877362 - RNA, 19 nt, Homo sapiens
  misc_RNA (1)...(19): siRNA sense strand
uaagaagagccacaagaag

SEQ ID NO: 877363 - RNA, 19 nt, Homo sapiens
  misc_RNA (1)...(19): siRNA sense strand
cacaggagccacucaaagu

SEQ ID NO: 877364 - RNA, 19 nt, Homo sapiens
  misc_RNA (1)...(19): siRNA sense strand
gaagaagaggaggaugaga

SEQ ID NO: 877365 - RNA, 19 nt, Homo sapiens
  misc_RNA (1)...(19): siRNA sense strand
ggaagaagaggaggaugag

SEQ ID NO: 877366 - RNA, 19 nt, Homo sapiens
  misc_RNA (1)...(19): siRNA sense strand
caucggagcaagaguccaa

SEQ ID NO: 877367 - RNA, 19 nt, Homo sapiens
  misc_RNA (1)...(19): siRNA sense strand
gacacaggagccacucaaa

SEQ ID NO: 877368 - RNA, 19 nt, Homo sapiens
  misc_RNA (1)...(19): siRNA sense strand
gaggaugagaaguuggaaa

SEQ ID NO: 877369 - RNA, 19 nt, Homo sapiens
  misc_RNA (1)...(19): siRNA sense strand
gaagagccggagagggaau

SEQ ID NO: 877370 - RNA, 19 nt, Homo sapiens
  misc_RNA (1)...(19): siRNA sense strand
ucuaagaagagccacaaga

SEQ ID NO: 877371 - RNA, 19 nt, Homo sapiens
  misc_RNA (1)...(19): siRNA sense strand
cggcacagaucccguucca

SEQ ID NO: 877372 - RNA, 19 nt, Homo sapiens
  misc_RNA (1)...(19): siRNA sense strand
ggucuaagaagagccacaa

SEQ ID NO: 877373 - RNA, 19 nt, Homo sapiens
  misc_RNA (1)...(19): siRNA sense strand
aggaagaagaggaggauga

SEQ ID NO: 877374 - RNA, 19 nt, Homo sapiens
  misc_RNA (1)...(19): siRNA sense strand
ggaugagaaguuggaaaga

SEQ ID NO: 877375 - RNA, 19 nt, Homo sapiens
  misc_RNA (1)...(19): siRNA sense strand
augagaaguuggaaagagu

SEQ ID NO: 877376 - RNA, 19 nt, Homo sapiens
  misc_RNA (1)...(19): siRNA sense strand
gaggagugcuuuggacuua

SEQ ID NO: 877377 - RNA, 19 nt, Homo sapiens
  misc_RNA (1)...(19): siRNA sense strand
gaaacgcuauguauuagag

SEQ ID NO: 877378 - RNA, 19 nt, Homo sapiens
  misc_RNA (1)...(19): siRNA sense strand
cgauaaagccauggaguua

SEQ ID NO: 877379 - RNA, 19 nt, Homo sapiens
  misc_RNA (1)...(19): siRNA sense strand
gcaccaacccucaauaucu

SEQ ID NO: 877380 - RNA, 19 nt, Homo sapiens
  misc_RNA (1)...(19): siRNA sense strand
gaaucuaugaguccaagua

SEQ ID NO: 877381 - RNA, 19 nt, Homo sapiens
  misc_RNA (1)...(19): siRNA sense strand
gagaagcuaccgagacuug

SEQ ID NO: 877382 - RNA, 19 nt, Homo sapiens
  misc_RNA (1)...(19): siRNA sense strand
gauaaagccauggaguuaa

SEQ ID NO: 877383 - RNA, 19 nt, Homo sapiens
  misc_RNA (1)...(19): siRNA sense strand
ggaguccagugaagaggaa

SEQ ID NO: 877384 - RNA, 19 nt, Homo sapiens
  misc_RNA (1)...(19): siRNA sense strand
cucaauaucugguggagaa

SEQ ID NO: 877385 - RNA, 19 nt, Homo sapiens
  misc_RNA (1)...(19): siRNA sense strand
gaugagaaguuggaaagag

SEQ ID NO: 877386 - RNA, 19 nt, Homo sapiens
  misc_RNA (1)...(19): siRNA sense strand
gaaaggcaucggagcaaga

SEQ ID NO: 877387 - RNA, 19 nt, Homo sapiens
  misc_RNA (1)...(19): siRNA sense strand
gaagaggacauggaugaug

SEQ ID NO: 877388 - RNA, 19 nt, Homo sapiens
  misc_RNA (1)...(19): siRNA sense strand
ggacuuacagcugaacuug

SEQ ID NO: 877389 - RNA, 19 nt, Homo sapiens
  misc_RNA (1)...(19): siRNA sense strand
cuaagaagagccacaagaa

SEQ ID NO: 877390 - RNA, 19 nt, Homo sapiens
  misc_RNA (1)...(19): siRNA sense strand
aagaagagccacaagaaga

SEQ ID NO: 877391 - RNA, 19 nt, Homo sapiens
  misc_RNA (1)...(19): siRNA sense strand
ggagugcuuuggacuuaca

SEQ ID NO: 877392 - RNA, 19 nt, Homo sapiens
  misc_RNA (1)...(19): siRNA sense strand
ggucaucaccguagucaca

SEQ ID NO: 877393 - RNA, 19 nt, Homo sapiens
  misc_RNA (1)...(19): siRNA sense strand
agaggaagcugagcaacug

SEQ ID NO: 877394 - RNA, 19 nt, Homo sapiens
  misc_RNA (1)...(19): siRNA sense strand
caccaacccucaauaucug

SEQ ID NO: 877395 - RNA, 19 nt, Homo sapiens
  misc_RNA (1)...(19): siRNA sense strand
gaacuuguagucgauaaag

SEQ ID NO: 877396 - RNA, 19 nt, Homo sapiens
  misc_RNA (1)...(19): siRNA sense strand
uggaagaggacauggauga

SEQ ID NO: 877397 - RNA, 19 nt, Homo sapiens
  misc_RNA (1)...(19): siRNA sense strand
gagaaaggcaucggagcaa

SEQ ID NO: 877398 - RNA, 19 nt, Homo sapiens
  misc_RNA (1)...(19): siRNA sense strand
agaggaggaugagaaguug

SEQ ID NO: 877399 - RNA, 19 nt, Homo sapiens
  misc_RNA (1)...(19): siRNA sense strand
aagaagaggaggaugagaa

SEQ ID NO: 877400 - RNA, 19 nt, Homo sapiens
  misc_RNA (1)...(19): siRNA sense strand
gaagcuaccgagacuugga

SEQ ID NO: 877401 - RNA, 19 nt, Homo sapiens
  misc_RNA (1)...(19): siRNA sense strand
auaaagccauggaguuaag

SEQ ID NO: 877402 - RNA, 19 nt, Homo sapiens
  misc_RNA (1)...(19): siRNA sense strand
aagaggaggaugagaaguu

SEQ ID NO: 877403 - RNA, 19 nt, Homo sapiens
  misc_RNA (1)...(19): siRNA sense strand
cggagaagcuaccgagacu

SEQ ID NO: 877404 - RNA, 19 nt, Homo sapiens
  misc_RNA (1)...(19): siRNA sense strand
ccagugaagaggaagaaga

SEQ ID NO: 877405 - RNA, 19 nt, Homo sapiens
  misc_RNA (1)...(19): siRNA sense strand
ccggagagggaaugaguaa

SEQ ID NO: 877406 - RNA, 19 nt, Homo sapiens
  misc_RNA (1)...(19): siRNA sense strand
uaagaagagccacaagaag

SEQ ID NO: 877407 - RNA, 19 nt, Homo sapiens
  misc_RNA (1)...(19): siRNA sense strand
cacaggagccacucaaagu

SEQ ID NO: 877408 - RNA, 19 nt, Homo sapiens
  misc_RNA (1)...(19): siRNA sense strand
ggaagaagaggaggaugag

SEQ ID NO: 877409 - RNA, 19 nt, Homo sapiens
  misc_RNA (1)...(19): siRNA sense strand
caucggagcaagaguccaa

SEQ ID NO: 877410 - RNA, 19 nt, Homo sapiens
  misc_RNA (1)...(19): siRNA sense strand
gaagaagaggaggaugaga

SEQ ID NO: 877411 - RNA, 19 nt, Homo sapiens
  misc_RNA (1)...(19): siRNA sense strand
guggagaagaucauucgaa

SEQ ID NO: 877412 - RNA, 19 nt, Homo sapiens
  misc_RNA (1)...(19): siRNA sense strand
gaggaugagaaguuggaaa

SEQ ID NO: 877413 - RNA, 19 nt, Homo sapiens
  misc_RNA (1)...(19): siRNA sense strand
gacacaggagccacucaaa

SEQ ID NO: 877414 - RNA, 19 nt, Homo sapiens
  misc_RNA (1)...(19): siRNA sense strand
ggaagaggacauggaugau

SEQ ID NO: 877415 - RNA, 19 nt, Homo sapiens
  misc_RNA (1)...(19): siRNA sense strand
gaagagccggagagggaau

SEQ ID NO: 877416 - RNA, 19 nt, Homo sapiens
  misc_RNA (1)...(19): siRNA sense strand
ucgauaaagccauggaguu

SEQ ID NO: 877417 - RNA, 19 nt, Homo sapiens
  misc_RNA (1)...(19): siRNA sense strand
ucuaagaagagccacaaga

SEQ ID NO: 877418 - RNA, 19 nt, Homo sapiens
  misc_RNA (1)...(19): siRNA sense strand
gaguuagugcucuggaaga

SEQ ID NO: 877419 - RNA, 19 nt, Homo sapiens
  misc_RNA (1)...(19): siRNA sense strand
cggcacagaucccguucca

SEQ ID NO: 877420 - RNA, 19 nt, Homo sapiens
  misc_RNA (1)...(19): siRNA sense strand
ggucuaagaagagccacaa

SEQ ID NO: 877421 - RNA, 19 nt, Homo sapiens
  misc_RNA (1)...(19): siRNA sense strand
cugaacuuguagucgauaa

SEQ ID NO: 877422 - RNA, 19 nt, Homo sapiens
  misc_RNA (1)...(19): siRNA sense strand
aggaagaagaggaggauga

SEQ ID NO: 877423 - RNA, 19 nt, Homo sapiens
  misc_RNA (1)...(19): siRNA sense strand
ggaugagaaguuggaaaga

SEQ ID NO: 877424 - RNA, 19 nt, Homo sapiens
  misc_RNA (1)...(19): siRNA sense strand
ucgaguuagugcucuggaa

SEQ ID NO: 877425 - RNA, 19 nt, Homo sapiens
  misc_RNA (1)...(19): siRNA sense strand
augagaaguuggaaagagu

SEQ ID NO: 877426 - RNA, 19 nt, Homo sapiens
  misc_RNA (1)...(19): siRNA sense strand
gcaaggagaucauuauuga

SEQ ID NO: 877427 - RNA, 19 nt, Homo sapiens
  misc_RNA (1)...(19): siRNA sense strand
ccuuugagcuggucuauga

SEQ ID NO: 877428 - RNA, 19 nt, Homo sapiens
  misc_RNA (1)...(19): siRNA sense strand
gccaggagcugaccgaugu

SEQ ID NO: 877429 - RNA, 19 nt, Homo sapiens
  misc_RNA (1)...(19): siRNA sense strand
gcccaccgcugucaacaug

SEQ ID NO: 877430 - RNA, 19 nt, Homo sapiens
  misc_RNA (1)...(19): siRNA sense strand
ggagaucauuauugaagag

SEQ ID NO: 877431 - RNA, 19 nt, Homo sapiens
  misc_RNA (1)...(19): siRNA sense strand
ggauggaacccuagaugga

SEQ ID NO: 877432 - RNA, 19 nt, Homo sapiens
  misc_RNA (1)...(19): siRNA sense strand
cgaccuggcugauguugca

SEQ ID NO: 877433 - RNA, 19 nt, Homo sapiens
  misc_RNA (1)...(19): siRNA sense strand
ggagcugaccgauguuaau

SEQ ID NO: 877434 - RNA, 19 nt, Homo sapiens
  misc_RNA (1)...(19): siRNA sense strand
ggcaaggagaucauuauug

SEQ ID NO: 877435 - RNA, 19 nt, Homo sapiens
  misc_RNA (1)...(19): siRNA sense strand
ccuaccagcuggccauugu

SEQ ID NO: 877436 - RNA, 19 nt, Homo sapiens
  misc_RNA (1)...(19): siRNA sense strand
gcaccugggauuggaguuu

SEQ ID NO: 877437 - RNA, 19 nt, Homo sapiens
  misc_RNA (1)...(19): siRNA sense strand
gagcugaccgauguuaaug

SEQ ID NO: 877438 - RNA, 19 nt, Homo sapiens
  misc_RNA (1)...(19): siRNA sense strand
ggaauccugccuucgaugu

SEQ ID NO: 877439 - RNA, 19 nt, Homo sapiens
  misc_RNA (1)...(19): siRNA sense strand
gauugcagcaccugggauu

SEQ ID NO: 877440 - RNA, 19 nt, Homo sapiens
  misc_RNA (1)...(19): siRNA sense strand
caucacugguggcaucauc

SEQ ID NO: 877441 - RNA, 19 nt, Homo sapiens
  misc_RNA (1)...(19): siRNA sense strand
caccugggauuggaguuug

SEQ ID NO: 877442 - RNA, 19 nt, Homo sapiens
  misc_RNA (1)...(19): siRNA sense strand
uaaccaccaccaucucuuc

SEQ ID NO: 877443 - RNA, 19 nt, Homo sapiens
  misc_RNA (1)...(19): siRNA sense strand
caaggagaucauuauugaa

SEQ ID NO: 877444 - RNA, 19 nt, Homo sapiens
  misc_RNA (1)...(19): siRNA sense strand
gagcauugggaagagcaua

SEQ ID NO: 877445 - RNA, 19 nt, Homo sapiens
  misc_RNA (1)...(19): siRNA sense strand
cggcaaggagaucauuauu

SEQ ID NO: 877446 - RNA, 19 nt, Homo sapiens
  misc_RNA (1)...(19): siRNA sense strand
aaggagaucauuauugaag

SEQ ID NO: 877447 - RNA, 19 nt, Homo sapiens
  misc_RNA (1)...(19): siRNA sense strand
caggagcugaccgauguua

SEQ ID NO: 877448 - RNA, 19 nt, Homo sapiens
  misc_RNA (1)...(19): siRNA sense strand
gacgugaaacggagcuaug

SEQ ID NO: 877449 - RNA, 19 nt, Homo sapiens
  misc_RNA (1)...(19): siRNA sense strand
aggagaucauuauugaaga

SEQ ID NO: 877450 - RNA, 19 nt, Homo sapiens
  misc_RNA (1)...(19): siRNA sense strand
gcuggucuaugagcagauc

SEQ ID NO: 877451 - RNA, 19 nt, Homo sapiens
  misc_RNA (1)...(19): siRNA sense strand
ggacaugaguguucuguuc

SEQ ID NO: 877452 - RNA, 19 nt, Homo sapiens
  misc_RNA (1)...(19): siRNA sense strand
gaaugcuggucaagauuua

SEQ ID NO: 877453 - RNA, 19 nt, Homo sapiens
  misc_RNA (1)...(19): siRNA sense strand
gcucuuccauguucucuuu

SEQ ID NO: 877454 - RNA, 19 nt, Homo sapiens
  misc_RNA (1)...(19): siRNA sense strand
ucacagggcuuccagaauc

SEQ ID NO: 877455 - RNA, 19 nt, Homo sapiens
  misc_RNA (1)...(19): siRNA sense strand
gauuucaccuccucaaaga

SEQ ID NO: 877456 - RNA, 19 nt, Homo sapiens
  misc_RNA (1)...(19): siRNA sense strand
ugagaaugcuggucaagau

SEQ ID NO: 877457 - RNA, 19 nt, Homo sapiens
  misc_RNA (1)...(19): siRNA sense strand
ggucaagauuuaccuuuua

SEQ ID NO: 877458 - RNA, 19 nt, Homo sapiens
  misc_RNA (1)...(19): siRNA sense strand
ggaauacauccaacccuuu

SEQ ID NO: 877459 - RNA, 19 nt, Homo sapiens
  misc_RNA (1)...(19): siRNA sense strand
cuaaagcuuuccuugagaa

SEQ ID NO: 877460 - RNA, 19 nt, Homo sapiens
  misc_RNA (1)...(19): siRNA sense strand
gaaggagaccugccuaguc

SEQ ID NO: 877461 - RNA, 19 nt, Homo sapiens
  misc_RNA (1)...(19): siRNA sense strand
aaggagaccugccuaguca

SEQ ID NO: 877462 - RNA, 19 nt, Homo sapiens
  misc_RNA (1)...(19): siRNA sense strand
gaauacauccaacccuuuc

SEQ ID NO: 877463 - RNA, 19 nt, Homo sapiens
  misc_RNA (1)...(19): siRNA sense strand
ucacagaggacaugagugu

SEQ ID NO: 877464 - RNA, 19 nt, Homo sapiens
  misc_RNA (1)...(19): siRNA sense strand
gagaaugcuggucaagauu

SEQ ID NO: 877465 - RNA, 19 nt, Homo sapiens
  misc_RNA (1)...(19): siRNA sense strand
gacucuauccuuccaguuu

SEQ ID NO: 877466 - RNA, 19 nt, Homo sapiens
  misc_RNA (1)...(19): siRNA sense strand
gaucacagaggacaugagu

SEQ ID NO: 877467 - RNA, 19 nt, Homo sapiens
  misc_RNA (1)...(19): siRNA sense strand
ggucacagggcuuccagaa

SEQ ID NO: 877468 - RNA, 19 nt, Homo sapiens
  misc_RNA (1)...(19): siRNA sense strand
ucuaaagcuuuccuugaga

SEQ ID NO: 877469 - RNA, 19 nt, Homo sapiens
  misc_RNA (1)...(19): siRNA sense strand
agaaugcuggucaagauuu

SEQ ID NO: 877470 - RNA, 19 nt, Homo sapiens
  misc_RNA (1)...(19): siRNA sense strand
gguuuucgguucuggaaua

SEQ ID NO: 877471 - RNA, 19 nt, Homo sapiens
  misc_RNA (1)...(19): siRNA sense strand
gcagggauggucacacagu

SEQ ID NO: 877472 - RNA, 19 nt, Homo sapiens
  misc_RNA (1)...(19): siRNA sense strand
ugcuugagcuccaggauca

SEQ ID NO: 877473 - RNA, 19 nt, Homo sapiens
  misc_RNA (1)...(19): siRNA sense strand
cauguucucuuugcacaag

SEQ ID NO: 877474 - RNA, 19 nt, Homo sapiens
  misc_RNA (1)...(19): siRNA sense strand
ggagaccugccuagucaca

SEQ ID NO: 877475 - RNA, 19 nt, Homo sapiens
  misc_RNA (1)...(19): siRNA sense strand
aggcagggauggucacaca

SEQ ID NO: 877476 - RNA, 19 nt, Homo sapiens
  misc_RNA (1)...(19): siRNA sense strand
cacaagcgacucuauccuu

SEQ ID NO: 877477 - RNA, 19 nt, Homo sapiens
  misc_RNA (1)...(19): siRNA sense strand
acagaggacaugaguguuc

SEQ ID NO: 877478 - RNA, 19 nt, Homo sapiens
  misc_RNA (1)...(19): siRNA sense strand
aagcuuuccuugagaaugc

SEQ ID NO: 877479 - RNA, 19 nt, Homo sapiens
  misc_RNA (1)...(19): siRNA sense strand
ccucccagcucacaauagg

SEQ ID NO: 877480 - RNA, 19 nt, Homo sapiens
  misc_RNA (1)...(19): siRNA sense strand
cagaggacaugaguguucu

SEQ ID NO: 877481 - RNA, 19 nt, Homo sapiens
  misc_RNA (1)...(19): siRNA sense strand
gucacacaguggccucuug

SEQ ID NO: 877482 - RNA, 19 nt, Homo sapiens
  misc_RNA (1)...(19): siRNA sense strand
gaugauuucaccuccucaa

SEQ ID NO: 877483 - RNA, 19 nt, Homo sapiens
  misc_RNA (1)...(19): siRNA sense strand
ggaggagcugucagaagga

SEQ ID NO: 877484 - RNA, 19 nt, Homo sapiens
  misc_RNA (1)...(19): siRNA sense strand
uuucuaaagcuuuccuuga

SEQ ID NO: 877485 - RNA, 19 nt, Homo sapiens
  misc_RNA (1)...(19): siRNA sense strand
acucuauccuuccaguuuc

SEQ ID NO: 877486 - RNA, 19 nt, Homo sapiens
  misc_RNA (1)...(19): siRNA sense strand
ggaagaagcccacauugga

SEQ ID NO: 877487 - RNA, 19 nt, Homo sapiens
  misc_RNA (1)...(19): siRNA sense strand
gcacuuaggaccuucuuga

SEQ ID NO: 877488 - RNA, 19 nt, Homo sapiens
  misc_RNA (1)...(19): siRNA sense strand
acagaucacuuucucuuug

SEQ ID NO: 877489 - RNA, 19 nt, Homo sapiens
  misc_RNA (1)...(19): siRNA sense strand
guacagaucacuuucucuu

SEQ ID NO: 877490 - RNA, 19 nt, Homo sapiens
  misc_RNA (1)...(19): siRNA sense strand
gcucaguucucuucugucu

SEQ ID NO: 877491 - RNA, 19 nt, Homo sapiens
  misc_RNA (1)...(19): siRNA sense strand
cuuaggaccuucuugauag

SEQ ID NO: 877492 - RNA, 19 nt, Homo sapiens
  misc_RNA (1)...(19): siRNA sense strand
uccagcagcuauauuggua

SEQ ID NO: 877493 - RNA, 19 nt, Homo sapiens
  misc_RNA (1)...(19): siRNA sense strand
ggugggaacucugcugugu

SEQ ID NO: 877494 - RNA, 19 nt, Homo sapiens
  misc_RNA (1)...(19): siRNA sense strand
acacggagcagaugagaga

SEQ ID NO: 877495 - RNA, 19 nt, Homo sapiens
  misc_RNA (1)...(19): siRNA sense strand
gaacacggagcagaugaga

SEQ ID NO: 877496 - RNA, 19 nt, Homo sapiens
  misc_RNA (1)...(19): siRNA sense strand
gguaugcacuuaggaccuu

SEQ ID NO: 877497 - RNA, 19 nt, Homo sapiens
  misc_RNA (1)...(19): siRNA sense strand
ugagagcccugccaugucu

SEQ ID NO: 877498 - RNA, 19 nt, Homo sapiens
  misc_RNA (1)...(19): siRNA sense strand
gagguguacagaucacuuu

SEQ ID NO: 877499 - RNA, 19 nt, Homo sapiens
  misc_RNA (1)...(19): siRNA sense strand
cagaucacuuucucuuugu

SEQ ID NO: 877500 - RNA, 19 nt, Homo sapiens
  misc_RNA (1)...(19): siRNA sense strand
gugcucaguucucuucugu

SEQ ID NO: 877501 - RNA, 19 nt, Homo sapiens
  misc_RNA (1)...(19): siRNA sense strand
gaagcagggugggaacucu

SEQ ID NO: 877502 - RNA, 19 nt, Homo sapiens
  misc_RNA (1)...(19): siRNA sense strand
aaugggagguguacagauc

SEQ ID NO: 877503 - RNA, 19 nt, Homo sapiens
  misc_RNA (1)...(19): siRNA sense strand
gcagcuauauugguaagac

SEQ ID NO: 877504 - RNA, 19 nt, Homo sapiens
  misc_RNA (1)...(19): siRNA sense strand
ggcauggugauuuguguuu

SEQ ID NO: 877505 - RNA, 19 nt, Homo sapiens
  misc_RNA (1)...(19): siRNA sense strand
cagcagcuauauugguaag

SEQ ID NO: 877506 - RNA, 19 nt, Homo sapiens
  misc_RNA (1)...(19): siRNA sense strand
ugauagcucccugcacuuu

SEQ ID NO: 877507 - RNA, 19 nt, Homo sapiens
  misc_RNA (1)...(19): siRNA sense strand
acuuaggaccuucuugaua

SEQ ID NO: 877508 - RNA, 19 nt, Homo sapiens
  misc_RNA (1)...(19): siRNA sense strand
gauagcucccugcacuuug

SEQ ID NO: 877509 - RNA, 19 nt, Homo sapiens
  misc_RNA (1)...(19): siRNA sense strand
ggagguguacagaucacuu

SEQ ID NO: 877510 - RNA, 19 nt, Homo sapiens
  misc_RNA (1)...(19): siRNA sense strand
cagcugcuccaccuuuguu

SEQ ID NO: 877511 - RNA, 19 nt, Homo sapiens
  misc_RNA (1)...(19): siRNA sense strand
gaaugggagguguacagau

SEQ ID NO: 877512 - RNA, 19 nt, Homo sapiens
  misc_RNA (1)...(19): siRNA sense strand
guguacagaucacuuucuc

SEQ ID NO: 877513 - RNA, 19 nt, Homo sapiens
  misc_RNA (1)...(19): siRNA sense strand
cacacucccuguccacaca

SEQ ID NO: 877514 - RNA, 19 nt, Homo sapiens
  misc_RNA (1)...(19): siRNA sense strand
ugucaggccugugcugcuu

SEQ ID NO: 877515 - RNA, 19 nt, Homo sapiens
  misc_RNA (1)...(19): siRNA sense strand
uguuuggcauggugauuug

SEQ ID NO: 877516 - RNA, 19 nt, Homo sapiens
  misc_RNA (1)...(19): siRNA sense strand
ucuuggugcuuaugugugu

SEQ ID NO: 877517 - RNA, 19 nt, Homo sapiens
  misc_RNA (1)...(19): siRNA sense strand
uacagaucacuuucucuuu

SEQ ID NO: 877518 - RNA, 19 nt, Homo sapiens
  misc_RNA (1)...(19): siRNA sense strand
ggaaugggauggccaguga

SEQ ID NO: 877519 - RNA, 19 nt, Homo sapiens
  misc_RNA (1)...(19): siRNA sense strand
ccacugggccugauacuua

SEQ ID NO: 877520 - RNA, 19 nt, Homo sapiens
  misc_RNA (1)...(19): siRNA sense strand
ugucugagcugguggauga

SEQ ID NO: 877521 - RNA, 19 nt, Homo sapiens
  misc_RNA (1)...(19): siRNA sense strand
ccaaagaccugcugaagac

SEQ ID NO: 877522 - RNA, 19 nt, Homo sapiens
  misc_RNA (1)...(19): siRNA sense strand
cgaagaaggugacgcgaau

SEQ ID NO: 877523 - RNA, 19 nt, Homo sapiens
  misc_RNA (1)...(19): siRNA sense strand
ccaacgugcugaagcuuaa

SEQ ID NO: 877524 - RNA, 19 nt, Homo sapiens
  misc_RNA (1)...(19): siRNA sense strand
ggacggagcacucagaaca

SEQ ID NO: 877525 - RNA, 19 nt, Homo sapiens
  misc_RNA (1)...(19): siRNA sense strand
ccaaggaggccgaggagua

SEQ ID NO: 877526 - RNA, 19 nt, Homo sapiens
  misc_RNA (1)...(19): siRNA sense strand
guacaggccugacaaagcu

SEQ ID NO: 877527 - RNA, 19 nt, Homo sapiens
  misc_RNA (1)...(19): siRNA sense strand
gaaugauggccaagacuuu

SEQ ID NO: 877528 - RNA, 19 nt, Homo sapiens
  misc_RNA (1)...(19): siRNA sense strand
gagaaaagccguuaugaga

SEQ ID NO: 877529 - RNA, 19 nt, Homo sapiens
  misc_RNA (1)...(19): siRNA sense strand
acaacuccaucaagaauga

SEQ ID NO: 877530 - RNA, 19 nt, Homo sapiens
  misc_RNA (1)...(19): siRNA sense strand
gggaugaggaugaugauga

SEQ ID NO: 877531 - RNA, 19 nt, Homo sapiens
  misc_RNA (1)...(19): siRNA sense strand
gggaguaccucaguuucuu

SEQ ID NO: 877532 - RNA, 19 nt, Homo sapiens
  misc_RNA (1)...(19): siRNA sense strand
gcaagaacaacgaguuuag

SEQ ID NO: 877533 - RNA, 19 nt, Homo sapiens
  misc_RNA (1)...(19): siRNA sense strand
gggccagacuugaacauuc

SEQ ID NO: 877534 - RNA, 19 nt, Homo sapiens
  misc_RNA (1)...(19): siRNA sense strand
ucaaagggaccauccugua

SEQ ID NO: 877535 - RNA, 19 nt, Homo sapiens
  misc_RNA (1)...(19): siRNA sense strand
gcugguggaugacaaguuc

SEQ ID NO: 877536 - RNA, 19 nt, Homo sapiens
  misc_RNA (1)...(19): siRNA sense strand
ggaggaggacaagcucuua

SEQ ID NO: 877537 - RNA, 19 nt, Homo sapiens
  misc_RNA (1)...(19): siRNA sense strand
ugaagacccuuuacaacuc

SEQ ID NO: 877538 - RNA, 19 nt, Homo sapiens
  misc_RNA (1)...(19): siRNA sense strand
ggaggacacggacaaguug

SEQ ID NO: 877539 - RNA, 19 nt, Homo sapiens
  misc_RNA (1)...(19): siRNA sense strand
ccaugugacuggcagcaaa

SEQ ID NO: 877540 - RNA, 19 nt, Homo sapiens
  misc_RNA (1)...(19): siRNA sense strand
ggaugaggaugaugaugag

SEQ ID NO: 877541 - RNA, 19 nt, Homo sapiens
  misc_RNA (1)...(19): siRNA sense strand
gggcaagaacaacgaguuu

SEQ ID NO: 877542 - RNA, 19 nt, Homo sapiens
  misc_RNA (1)...(19): siRNA sense strand
ugaacauucuggaagauuc

SEQ ID NO: 877543 - RNA, 19 nt, Homo sapiens
  misc_RNA (1)...(19): siRNA sense strand
gagcaacugcggucucaug

SEQ ID NO: 877544 - RNA, 19 nt, Homo sapiens
  misc_RNA (1)...(19): siRNA sense strand
ggacaggcacgaagaaggu

SEQ ID NO: 877545 - RNA, 19 nt, Homo sapiens
  misc_RNA (1)...(19): siRNA sense strand
gaacauucuggaagauuca

SEQ ID NO: 877546 - RNA, 19 nt, Homo sapiens
  misc_RNA (1)...(19): siRNA sense strand
caaagugggcucagaugau

SEQ ID NO: 877547 - RNA, 19 nt, Homo sapiens
  misc_RNA (1)...(19): siRNA sense strand
gcaccgagcaaggaagaaa

SEQ ID NO: 877548 - RNA, 19 nt, Homo sapiens
  misc_RNA (1)...(19): siRNA sense strand
gcucaccugugcccugaug

SEQ ID NO: 877549 - RNA, 19 nt, Homo sapiens
  misc_RNA (1)...(19): siRNA sense strand
aaagugggcucagaugauc

SEQ ID NO: 877550 - RNA, 19 nt, Homo sapiens
  misc_RNA (1)...(19): siRNA sense strand
aagaaaugcuguccuggau

SEQ ID NO: 877551 - RNA, 19 nt, Homo sapiens
  misc_RNA (1)...(19): siRNA sense strand
gccaaagaccugcugaaga

SEQ ID NO: 877552 - RNA, 19 nt, Homo sapiens
  misc_RNA (1)...(19): siRNA sense strand
ccugaaggauggccuguca

SEQ ID NO: 877553 - RNA, 19 nt, Homo sapiens
  misc_RNA (1)...(19): siRNA sense strand
ucagcuccaugaagaaguu

SEQ ID NO: 877554 - RNA, 19 nt, Homo sapiens
  misc_RNA (1)...(19): siRNA sense strand
aggaugagcugaggaaauc

SEQ ID NO: 877555 - RNA, 19 nt, Homo sapiens
  misc_RNA (1)...(19): siRNA sense strand
aaagauguccugucagcaa

SEQ ID NO: 877556 - RNA, 19 nt, Homo sapiens
  misc_RNA (1)...(19): siRNA sense strand
ggcaagaacaacgaguuua

SEQ ID NO: 877557 - RNA, 19 nt, Homo sapiens
  misc_RNA (1)...(19): siRNA sense strand
ggccagacuugaacauucu

SEQ ID NO: 877558 - RNA, 19 nt, Homo sapiens
  misc_RNA (1)...(19): siRNA sense strand
gaggaugagcugaggaaau

SEQ ID NO: 877559 - RNA, 19 nt, Homo sapiens
  misc_RNA (1)...(19): siRNA sense strand
aggcguggcuggaagaaau

SEQ ID NO: 877560 - RNA, 19 nt, Homo sapiens
  misc_RNA (1)...(19): siRNA sense strand
ccacgaaggacccagaugu

SEQ ID NO: 877561 - RNA, 19 nt, Homo sapiens
  misc_RNA (1)...(19): siRNA sense strand
gcgccacguuugagaagau

SEQ ID NO: 877562 - RNA, 19 nt, Homo sapiens
  misc_RNA (1)...(19): siRNA sense strand
caacuuggaccagcugaau

SEQ ID NO: 877563 - RNA, 19 nt, Homo sapiens
  misc_RNA (1)...(19): siRNA sense strand
gauguccugucagcaauuc

SEQ ID NO: 877564 - RNA, 19 nt, Homo sapiens
  misc_RNA (1)...(19): siRNA sense strand
ucaaagugggcucagauga

SEQ ID NO: 877565 - RNA, 19 nt, Homo sapiens
  misc_RNA (1)...(19): siRNA sense strand
gaagacucacgcugacaug

SEQ ID NO: 877566 - RNA, 19 nt, Homo sapiens
  misc_RNA (1)...(19): siRNA sense strand
cuuuacaacuccaucaaga

SEQ ID NO: 877567 - RNA, 19 nt, Homo sapiens
  misc_RNA (1)...(19): siRNA sense strand
ggaagacucacgcugacau

SEQ ID NO: 877568 - RNA, 19 nt, Homo sapiens
  misc_RNA (1)...(19): siRNA sense strand
uuacaacuccaucaagaau

SEQ ID NO: 877569 - RNA, 19 nt, Homo sapiens
  misc_RNA (1)...(19): siRNA sense strand
caaagggaccauccuguac

SEQ ID NO: 877570 - RNA, 19 nt, Homo sapiens
  misc_RNA (1)...(19): siRNA sense strand
ugaggaaaucccugucuga

SEQ ID NO: 877571 - RNA, 19 nt, Homo sapiens
  misc_RNA (1)...(19): siRNA sense strand
ccaccagggccucugacua

SEQ ID NO: 877572 - RNA, 19 nt, Homo sapiens
  misc_RNA (1)...(19): siRNA sense strand
ugaaggauggccugucaga

SEQ ID NO: 877573 - RNA, 19 nt, Homo sapiens
  misc_RNA (1)...(19): siRNA sense strand
gaggaggacaagcucuuau

SEQ ID NO: 877574 - RNA, 19 nt, Homo sapiens
  misc_RNA (1)...(19): siRNA sense strand
gacucacgcugacauggau

SEQ ID NO: 877575 - RNA, 19 nt, Homo sapiens
  misc_RNA (1)...(19): siRNA sense strand
ggaggacaagcucuuaucu

SEQ ID NO: 877576 - RNA, 19 nt, Homo sapiens
  misc_RNA (1)...(19): siRNA sense strand
gcugaaugauggccaagac

SEQ ID NO: 877577 - RNA, 19 nt, Homo sapiens
  misc_RNA (1)...(19): siRNA sense strand
gccguuaugagaccuauau

SEQ ID NO: 877578 - RNA, 19 nt, Homo sapiens
  misc_RNA (1)...(19): siRNA sense strand
acggagcacucagaacauu

SEQ ID NO: 877579 - RNA, 19 nt, Homo sapiens
  misc_RNA (1)...(19): siRNA sense strand
gaugaucuggagcggauug

SEQ ID NO: 877580 - RNA, 19 nt, Homo sapiens
  misc_RNA (1)...(19): siRNA sense strand
gaggacaagcucuuaucug

SEQ ID NO: 877581 - RNA, 19 nt, Homo sapiens
  misc_RNA (1)...(19): siRNA sense strand
gcugaagacccuuuacaac

SEQ ID NO: 877582 - RNA, 19 nt, Homo sapiens
  misc_RNA (1)...(19): siRNA sense strand
ugaaugauggccaagacuu

SEQ ID NO: 877583 - RNA, 19 nt, Homo sapiens
  misc_RNA (1)...(19): siRNA sense strand
caccagggccucugacuac

SEQ ID NO: 877584 - RNA, 19 nt, Homo sapiens
  misc_RNA (1)...(19): siRNA sense strand
guuaugagaccuauaucca

SEQ ID NO: 877585 - RNA, 19 nt, Homo sapiens
  misc_RNA (1)...(19): siRNA sense strand
ggaguaccucaguuucuuc

SEQ ID NO: 877586 - RNA, 19 nt, Homo sapiens
  misc_RNA (1)...(19): siRNA sense strand
gccgaggaguaccgguuga

SEQ ID NO: 877587 - RNA, 19 nt, Homo sapiens
  misc_RNA (1)...(19): siRNA sense strand
aagauguccugucagcaau

SEQ ID NO: 877588 - RNA, 19 nt, Homo sapiens
  misc_RNA (1)...(19): siRNA sense strand
gagcggguccucacacacu

SEQ ID NO: 877589 - RNA, 19 nt, Homo sapiens
  misc_RNA (1)...(19): siRNA sense strand
cagcagccgcucugagaau

SEQ ID NO: 877590 - RNA, 19 nt, Homo sapiens
  misc_RNA (1)...(19): siRNA sense strand
cugaggaacccacgaagga

SEQ ID NO: 877591 - RNA, 19 nt, Homo sapiens
  misc_RNA (1)...(19): siRNA sense strand
caaggaggccgaggaguac

SEQ ID NO: 877592 - RNA, 19 nt, Homo sapiens
  misc_RNA (1)...(19): siRNA sense strand
acuugaacauucuggaaga

SEQ ID NO: 877593 - RNA, 19 nt, Homo sapiens
  misc_RNA (1)...(19): siRNA sense strand
aaaucaaagugggcucaga

SEQ ID NO: 877594 - RNA, 19 nt, Homo sapiens
  misc_RNA (1)...(19): siRNA sense strand
acacugaggaacccacgaa

SEQ ID NO: 877595 - RNA, 19 nt, Homo sapiens
  misc_RNA (1)...(19): siRNA sense strand
uaucggagggugaccugaa

SEQ ID NO: 877596 - RNA, 19 nt, Homo sapiens
  misc_RNA (1)...(19): siRNA sense strand
cugaagacccuuuacaacu

SEQ ID NO: 877597 - RNA, 19 nt, Homo sapiens
  misc_RNA (1)...(19): siRNA sense strand
agacuugaacauucuggaa

SEQ ID NO: 877598 - RNA, 19 nt, Homo sapiens
  misc_RNA (1)...(19): siRNA sense strand
ugaguacaggccugacaaa

SEQ ID NO: 877599 - RNA, 19 nt, Homo sapiens
  misc_RNA (1)...(19): siRNA sense strand
gaugaguacaggccugaca

SEQ ID NO: 877600 - RNA, 19 nt, Homo sapiens
  misc_RNA (1)...(19): siRNA sense strand
gcccugaugcugcucaaca

SEQ ID NO: 877601 - RNA, 19 nt, Homo sapiens
  misc_RNA (1)...(19): siRNA sense strand
gguugaaggagcacuaucu

SEQ ID NO: 877602 - RNA, 19 nt, Homo sapiens
  misc_RNA (1)...(19): siRNA sense strand
gaagaacuguuugcuauua

SEQ ID NO: 877603 - RNA, 19 nt, Homo sapiens
  misc_RNA (1)...(19): siRNA sense strand
gcauagagcuugcauaaau

SEQ ID NO: 877604 - RNA, 19 nt, Homo sapiens
  misc_RNA (1)...(19): siRNA sense strand
acacaugucugaugacuua

SEQ ID NO: 877605 - RNA, 19 nt, Homo sapiens
  misc_RNA (1)...(19): siRNA sense strand
gagaauugcccuuggauua

SEQ ID NO: 877606 - RNA, 19 nt, Homo sapiens
  misc_RNA (1)...(19): siRNA sense strand
gaaguuauguuucucuuuc

SEQ ID NO: 877607 - RNA, 19 nt, Homo sapiens
  misc_RNA (1)...(19): siRNA sense strand
aaacggacauguagaaauu

SEQ ID NO: 877608 - RNA, 19 nt, Homo sapiens
  misc_RNA (1)...(19): siRNA sense strand
gaaggagaauugucauguu

SEQ ID NO: 877609 - RNA, 19 nt, Homo sapiens
  misc_RNA (1)...(19): siRNA sense strand
gcaugaagccuguaacuau

SEQ ID NO: 877610 - RNA, 19 nt, Homo sapiens
  misc_RNA (1)...(19): siRNA sense strand
cauagagcuugcauaaaua

SEQ ID NO: 877611 - RNA, 19 nt, Homo sapiens
  misc_RNA (1)...(19): siRNA sense strand
gaagucagaaggagaauug

SEQ ID NO: 877612 - RNA, 19 nt, Homo sapiens
  misc_RNA (1)...(19): siRNA sense strand
guaggauguugcuaaauuu

SEQ ID NO: 877613 - RNA, 19 nt, Homo sapiens
  misc_RNA (1)...(19): siRNA sense strand
aagaagaacuguuugcuau

SEQ ID NO: 877614 - RNA, 19 nt, Homo sapiens
  misc_RNA (1)...(19): siRNA sense strand
ucacaggaauuagagauuu

SEQ ID NO: 877615 - RNA, 19 nt, Homo sapiens
  misc_RNA (1)...(19): siRNA sense strand
ggaacugccugagaauuug

SEQ ID NO: 877616 - RNA, 19 nt, Homo sapiens
  misc_RNA (1)...(19): siRNA sense strand
gaaagauucaggugucaaa

SEQ ID NO: 877617 - RNA, 19 nt, Homo sapiens
  misc_RNA (1)...(19): siRNA sense strand
uuaaggaacugccugagaa

SEQ ID NO: 877618 - RNA, 19 nt, Homo sapiens
  misc_RNA (1)...(19): siRNA sense strand
ucagagaaccuuacuaaug

SEQ ID NO: 877619 - RNA, 19 nt, Homo sapiens
  misc_RNA (1)...(19): siRNA sense strand
ggagaaacagcccugcaua

SEQ ID NO: 877620 - RNA, 19 nt, Homo sapiens
  misc_RNA (1)...(19): siRNA sense strand
gaacuuucaugcacaagca

SEQ ID NO: 877621 - RNA, 19 nt, Homo sapiens
  misc_RNA (1)...(19): siRNA sense strand
ugauuuaucuucagaguuc

SEQ ID NO: 877622 - RNA, 19 nt, Homo sapiens
  misc_RNA (1)...(19): siRNA sense strand
gagccacucucucuucaga

SEQ ID NO: 877623 - RNA, 19 nt, Homo sapiens
  misc_RNA (1)...(19): siRNA sense strand
gaauugcccuuggauuaug

SEQ ID NO: 877624 - RNA, 19 nt, Homo sapiens
  misc_RNA (1)...(19): siRNA sense strand
cagagaaccuuacuaaugc

SEQ ID NO: 877625 - RNA, 19 nt, Homo sapiens
  misc_RNA (1)...(19): siRNA sense strand
gguuucaccucaaaucaaa

SEQ ID NO: 877626 - RNA, 19 nt, Homo sapiens
  misc_RNA (1)...(19): siRNA sense strand
gcagaaacucccacacauu

SEQ ID NO: 877627 - RNA, 19 nt, Homo sapiens
  misc_RNA (1)...(19): siRNA sense strand
ggagaacuuucaugcacaa

SEQ ID NO: 877628 - RNA, 19 nt, Homo sapiens
  misc_RNA (1)...(19): siRNA sense strand
gaaccuuacuaaugcugaa

SEQ ID NO: 877629 - RNA, 19 nt, Homo sapiens
  misc_RNA (1)...(19): siRNA sense strand
gaaaccaccaguguucaua

SEQ ID NO: 877630 - RNA, 19 nt, Homo sapiens
  misc_RNA (1)...(19): siRNA sense strand
gaaauugauucuucuucuc

SEQ ID NO: 877631 - RNA, 19 nt, Homo sapiens
  misc_RNA (1)...(19): siRNA sense strand
gcaacguuguccagaggua

SEQ ID NO: 877632 - RNA, 19 nt, Homo sapiens
  misc_RNA (1)...(19): siRNA sense strand
aguaggauguugcuaaauu

SEQ ID NO: 877633 - RNA, 19 nt, Homo sapiens
  misc_RNA (1)...(19): siRNA sense strand
ucgaagggcugccagaguu

SEQ ID NO: 877634 - RNA, 19 nt, Homo sapiens
  misc_RNA (1)...(19): siRNA sense strand
acugaggccuugaugauaa

SEQ ID NO: 877635 - RNA, 19 nt, Homo sapiens
  misc_RNA (1)...(19): siRNA sense strand
caugaagccuguaacuaug

SEQ ID NO: 877636 - RNA, 19 nt, Homo sapiens
  misc_RNA (1)...(19): siRNA sense strand
gcuugggucuggaaagauu

SEQ ID NO: 877637 - RNA, 19 nt, Homo sapiens
  misc_RNA (1)...(19): siRNA sense strand
gcccuuggauuaugugguu

SEQ ID NO: 877638 - RNA, 19 nt, Homo sapiens
  misc_RNA (1)...(19): siRNA sense strand
gccacucucucuucagaaa

SEQ ID NO: 877639 - RNA, 19 nt, Homo sapiens
  misc_RNA (1)...(19): siRNA sense strand
gcacaagcagagaaacauu

SEQ ID NO: 877640 - RNA, 19 nt, Homo sapiens
  misc_RNA (1)...(19): siRNA sense strand
uaaauaaccaaguggagaa

SEQ ID NO: 877641 - RNA, 19 nt, Homo sapiens
  misc_RNA (1)...(19): siRNA sense strand
uuacuaaugcugaauggua

SEQ ID NO: 877642 - RNA, 19 nt, Homo sapiens
  misc_RNA (1)...(19): siRNA sense strand
aggguuaacucaucuaaau

SEQ ID NO: 877643 - RNA, 19 nt, Homo sapiens
  misc_RNA (1)...(19): siRNA sense strand
gaaacagcccugcauagag

SEQ ID NO: 877644 - RNA, 19 nt, Homo sapiens
  misc_RNA (1)...(19): siRNA sense strand
uaaagaaaccaccaguguu

SEQ ID NO: 877645 - RNA, 19 nt, Homo sapiens
  misc_RNA (1)...(19): siRNA sense strand
gcuggacgccuuugcauga

SEQ ID NO: 877646 - RNA, 19 nt, Homo sapiens
  misc_RNA (1)...(19): siRNA sense strand
ccuccuggcuucaaauguu

SEQ ID NO: 877647 - RNA, 19 nt, Homo sapiens
  misc_RNA (1)...(19): siRNA sense strand
gaaacucccacacauucuu

SEQ ID NO: 877648 - RNA, 19 nt, Homo sapiens
  misc_RNA (1)...(19): siRNA sense strand
aaagaaaccaccaguguuc

SEQ ID NO: 877649 - RNA, 19 nt, Homo sapiens
  misc_RNA (1)...(19): siRNA sense strand
agauucaggugucaaagaa

SEQ ID NO: 877650 - RNA, 19 nt, Homo sapiens
  misc_RNA (1)...(19): siRNA sense strand
gcugaaugguacuaaacaa

SEQ ID NO: 877651 - RNA, 19 nt, Homo sapiens
  misc_RNA (1)...(19): siRNA sense strand
cagaaacucccacacauuc

SEQ ID NO: 877652 - RNA, 19 nt, Homo sapiens
  misc_RNA (1)...(19): siRNA sense strand
gaggaaugcuaagggagaa

SEQ ID NO: 877653 - RNA, 19 nt, Homo sapiens
  misc_RNA (1)...(19): siRNA sense strand
aaagaagaacuguuugcua

SEQ ID NO: 877654 - RNA, 19 nt, Homo sapiens
  misc_RNA (1)...(19): siRNA sense strand
ccaaaggguuaacucaucu

SEQ ID NO: 877655 - RNA, 19 nt, Homo sapiens
  misc_RNA (1)...(19): siRNA sense strand
ggaaguuauguuucucuuu

SEQ ID NO: 877656 - RNA, 19 nt, Homo sapiens
  misc_RNA (1)...(19): siRNA sense strand
gaccugaaccuugcuaaau

SEQ ID NO: 877657 - RNA, 19 nt, Homo sapiens
  misc_RNA (1)...(19): siRNA sense strand
uaaagacauugcagaaacu

SEQ ID NO: 877658 - RNA, 19 nt, Homo sapiens
  misc_RNA (1)...(19): siRNA sense strand
gagaaacagcccugcauag

SEQ ID NO: 877659 - RNA, 19 nt, Homo sapiens
  misc_RNA (1)...(19): siRNA sense strand
auaaccaaguggagaaauu

SEQ ID NO: 877660 - RNA, 19 nt, Homo sapiens
  misc_RNA (1)...(19): siRNA sense strand
gaacugccugagaauuuga

SEQ ID NO: 877661 - RNA, 19 nt, Homo sapiens
  misc_RNA (1)...(19): siRNA sense strand
ggaaauauaaagacauugc

SEQ ID NO: 877662 - RNA, 19 nt, Homo sapiens
  misc_RNA (1)...(19): siRNA sense strand
caccucaaaucaaagaaga

SEQ ID NO: 877663 - RNA, 19 nt, Homo sapiens
  misc_RNA (1)...(19): siRNA sense strand
uaggacagcggccuuguuu

SEQ ID NO: 877664 - RNA, 19 nt, Homo sapiens
  misc_RNA (1)...(19): siRNA sense strand
ccugagaauuugaaagugu

SEQ ID NO: 877665 - RNA, 19 nt, Homo sapiens
  misc_RNA (1)...(19): siRNA sense strand
aaacucccacacauucuua

SEQ ID NO: 877666 - RNA, 19 nt, Homo sapiens
  misc_RNA (1)...(19): siRNA sense strand
auaaagacauugcagaaac

SEQ ID NO: 877667 - RNA, 19 nt, Homo sapiens
  misc_RNA (1)...(19): siRNA sense strand
ugauucuucuucucucuuu

SEQ ID NO: 877668 - RNA, 19 nt, Homo sapiens
  misc_RNA (1)...(19): siRNA sense strand
gagcuugcauaaauaacca

SEQ ID NO: 877669 - RNA, 19 nt, Homo sapiens
  misc_RNA (1)...(19): siRNA sense strand
gugcuugggucuggaaaga

SEQ ID NO: 877670 - RNA, 19 nt, Homo sapiens
  misc_RNA (1)...(19): siRNA sense strand
gaacugcuuauggcuugua

SEQ ID NO: 877671 - RNA, 19 nt, Homo sapiens
  misc_RNA (1)...(19): siRNA sense strand
aaagaagucagaaggagaa

SEQ ID NO: 877672 - RNA, 19 nt, Homo sapiens
  misc_RNA (1)...(19): siRNA sense strand
aaggagaauugucauguuc

SEQ ID NO: 877673 - RNA, 19 nt, Homo sapiens
  misc_RNA (1)...(19): siRNA sense strand
gaacuguuugcuauuacaa

SEQ ID NO: 877674 - RNA, 19 nt, Homo sapiens
  misc_RNA (1)...(19): siRNA sense strand
ggagaauugcccuuggauu

SEQ ID NO: 877675 - RNA, 19 nt, Homo sapiens
  misc_RNA (1)...(19): siRNA sense strand
ccaaguggagaaauugauu

SEQ ID NO: 877676 - RNA, 19 nt, Homo sapiens
  misc_RNA (1)...(19): siRNA sense strand
ggagaauugucauguucca

SEQ ID NO: 877677 - RNA, 19 nt, Homo sapiens
  misc_RNA (1)...(19): siRNA sense strand
ggacagcggccuuguuuug

SEQ ID NO: 877678 - RNA, 19 nt, Homo sapiens
  misc_RNA (1)...(19): siRNA sense strand
acugguuacuggaucuuua

SEQ ID NO: 877679 - RNA, 19 nt, Homo sapiens
  misc_RNA (1)...(19): siRNA sense strand
caaacggacauguagaaau

SEQ ID NO: 877680 - RNA, 19 nt, Homo sapiens
  misc_RNA (1)...(19): siRNA sense strand
cgaagggcugccagaguua

SEQ ID NO: 877681 - RNA, 19 nt, Homo sapiens
  misc_RNA (1)...(19): siRNA sense strand
aagauacaguggagaacuu

SEQ ID NO: 877682 - RNA, 19 nt, Homo sapiens
  misc_RNA (1)...(19): siRNA sense strand
ggaaugcuaagggagaauu

SEQ ID NO: 877683 - RNA, 19 nt, Homo sapiens
  misc_RNA (1)...(19): siRNA sense strand
agaaacagcccugcauaga

SEQ ID NO: 877684 - RNA, 19 nt, Homo sapiens
  misc_RNA (1)...(19): siRNA sense strand
gcuaaauguuccucaucau

SEQ ID NO: 877685 - RNA, 19 nt, Homo sapiens
  misc_RNA (1)...(19): siRNA sense strand
cuaaaugaacugcuuaugg

SEQ ID NO: 877686 - RNA, 19 nt, Homo sapiens
  misc_RNA (1)...(19): siRNA sense strand
caucuaaaugaacugcuua

SEQ ID NO: 877687 - RNA, 19 nt, Homo sapiens
  misc_RNA (1)...(19): siRNA sense strand
uugcauaaauaaccaagug

SEQ ID NO: 877688 - RNA, 19 nt, Homo sapiens
  misc_RNA (1)...(19): siRNA sense strand
ccugaaccuugcuaaaugu

SEQ ID NO: 877689 - RNA, 19 nt, Homo sapiens
  misc_RNA (1)...(19): siRNA sense strand
gcuuauggcuuguaaaagu

SEQ ID NO: 877690 - RNA, 19 nt, Homo sapiens
  misc_RNA (1)...(19): siRNA sense strand
cacaagcagagaaacauuu

SEQ ID NO: 877691 - RNA, 19 nt, Homo sapiens
  misc_RNA (1)...(19): siRNA sense strand
uagaagauacaguggagaa

SEQ ID NO: 877692 - RNA, 19 nt, Homo sapiens
  misc_RNA (1)...(19): siRNA sense strand
uaugugguuucaccucaaa

SEQ ID NO: 877693 - RNA, 19 nt, Homo sapiens
  misc_RNA (1)...(19): siRNA sense strand
agguagaucugcucacuca

SEQ ID NO: 877694 - RNA, 19 nt, Homo sapiens
  misc_RNA (1)...(19): siRNA sense strand
uaaccaaguggagaaauug

SEQ ID NO: 877695 - RNA, 19 nt, Homo sapiens
  misc_RNA (1)...(19): siRNA sense strand
uccaaaggguuaacucauc

SEQ ID NO: 877696 - RNA, 19 nt, Homo sapiens
  misc_RNA (1)...(19): siRNA sense strand
aggaacugccugagaauuu

SEQ ID NO: 877697 - RNA, 19 nt, Homo sapiens
  misc_RNA (1)...(19): siRNA sense strand
ggggaaaacuggugugcuu

SEQ ID NO: 877698 - RNA, 19 nt, Homo sapiens
  misc_RNA (1)...(19): siRNA sense strand
uugcagaggcagucuuuaa

SEQ ID NO: 877699 - RNA, 19 nt, Homo sapiens
  misc_RNA (1)...(19): siRNA sense strand
auaaagaaaccaccagugu

SEQ ID NO: 877700 - RNA, 19 nt, Homo sapiens
  misc_RNA (1)...(19): siRNA sense strand
ggaucuuuaugcuggaaau

SEQ ID NO: 877701 - RNA, 19 nt, Homo sapiens
  misc_RNA (1)...(19): siRNA sense strand
ucccacacauucuuaagga

SEQ ID NO: 877702 - RNA, 19 nt, Homo sapiens
  misc_RNA (1)...(19): siRNA sense strand
gaaacaaucucaucuccua

SEQ ID NO: 877703 - RNA, 19 nt, Homo sapiens
  misc_RNA (1)...(19): siRNA sense strand
gcgcauagauuacaaauau

SEQ ID NO: 877704 - RNA, 19 nt, Homo sapiens
  misc_RNA (1)...(19): siRNA sense strand
gaagaagaaucacauaaga

SEQ ID NO: 877705 - RNA, 19 nt, Homo sapiens
  misc_RNA (1)...(19): siRNA sense strand
caacuucucugcugugaua

SEQ ID NO: 877706 - RNA, 19 nt, Homo sapiens
  misc_RNA (1)...(19): siRNA sense strand
gagcagaccuucauuaaag

SEQ ID NO: 877707 - RNA, 19 nt, Homo sapiens
  misc_RNA (1)...(19): siRNA sense strand
gaagaaggcuacagcauca

SEQ ID NO: 877708 - RNA, 19 nt, Homo sapiens
  misc_RNA (1)...(19): siRNA sense strand
gaaagcacuucuucaauau

SEQ ID NO: 877709 - RNA, 19 nt, Homo sapiens
  misc_RNA (1)...(19): siRNA sense strand
gaacuuauccagugaagaa

SEQ ID NO: 877710 - RNA, 19 nt, Homo sapiens
  misc_RNA (1)...(19): siRNA sense strand
gcaaauguaucguuaagau

SEQ ID NO: 877711 - RNA, 19 nt, Homo sapiens
  misc_RNA (1)...(19): siRNA sense strand
gaacagccuucccucguuu

SEQ ID NO: 877712 - RNA, 19 nt, Homo sapiens
  misc_RNA (1)...(19): siRNA sense strand
gaaaauacuuggcagauaa

SEQ ID NO: 877713 - RNA, 19 nt, Homo sapiens
  misc_RNA (1)...(19): siRNA sense strand
ccaagcaaauguaucguua

SEQ ID NO: 877714 - RNA, 19 nt, Homo sapiens
  misc_RNA (1)...(19): siRNA sense strand
ggguaaacaugccaaauuu

SEQ ID NO: 877715 - RNA, 19 nt, Homo sapiens
  misc_RNA (1)...(19): siRNA sense strand
ggaaauugauugggaaaga

SEQ ID NO: 877716 - RNA, 19 nt, Homo sapiens
  misc_RNA (1)...(19): siRNA sense strand
ggaagaagaagaagaauca

SEQ ID NO: 877717 - RNA, 19 nt, Homo sapiens
  misc_RNA (1)...(19): siRNA sense strand
gcacugaccugcgcauaga

SEQ ID NO: 877718 - RNA, 19 nt, Homo sapiens
  misc_RNA (1)...(19): siRNA sense strand
aagcaaaccuucuccauug

SEQ ID NO: 877719 - RNA, 19 nt, Homo sapiens
  misc_RNA (1)...(19): siRNA sense strand
uagaagaaguccagaagaa

SEQ ID NO: 877720 - RNA, 19 nt, Homo sapiens
  misc_RNA (1)...(19): siRNA sense strand
gaagaagaagaaucacaua

SEQ ID NO: 877721 - RNA, 19 nt, Homo sapiens
  misc_RNA (1)...(19): siRNA sense strand
uaaagaaagugucugaaca

SEQ ID NO: 877722 - RNA, 19 nt, Homo sapiens
  misc_RNA (1)...(19): siRNA sense strand
ccaagucuguugcuguuaa

SEQ ID NO: 877723 - RNA, 19 nt, Homo sapiens
  misc_RNA (1)...(19): siRNA sense strand
guaaacaugccaaauuuga

SEQ ID NO: 877724 - RNA, 19 nt, Homo sapiens
  misc_RNA (1)...(19): siRNA sense strand
caccugagcuggaugaaga

SEQ ID NO: 877725 - RNA, 19 nt, Homo sapiens
  misc_RNA (1)...(19): siRNA sense strand
gaacccggcucuaccaaag

SEQ ID NO: 877726 - RNA, 19 nt, Homo sapiens
  misc_RNA (1)...(19): siRNA sense strand
cagagaauauuguggaaga

SEQ ID NO: 877727 - RNA, 19 nt, Homo sapiens
  misc_RNA (1)...(19): siRNA sense strand
gcagcagcauuuacagaaa

SEQ ID NO: 877728 - RNA, 19 nt, Homo sapiens
  misc_RNA (1)...(19): siRNA sense strand
gaaccacccuacaauagca

SEQ ID NO: 877729 - RNA, 19 nt, Homo sapiens
  misc_RNA (1)...(19): siRNA sense strand
gaaauugauugggaaagau

SEQ ID NO: 877730 - RNA, 19 nt, Homo sapiens
  misc_RNA (1)...(19): siRNA sense strand
ggagauguguccagaccuu

SEQ ID NO: 877731 - RNA, 19 nt, Homo sapiens
  misc_RNA (1)...(19): siRNA sense strand
aaacuaccauccaucaaug

SEQ ID NO: 877732 - RNA, 19 nt, Homo sapiens
  misc_RNA (1)...(19): siRNA sense strand
ggaaaauacuuggcagaua

SEQ ID NO: 877733 - RNA, 19 nt, Homo sapiens
  misc_RNA (1)...(19): siRNA sense strand
ggaauacggaagaaagaaa

SEQ ID NO: 877734 - RNA, 19 nt, Homo sapiens
  misc_RNA (1)...(19): siRNA sense strand
uaggaaugcugcaacugua

SEQ ID NO: 877735 - RNA, 19 nt, Homo sapiens
  misc_RNA (1)...(19): siRNA sense strand
gcagugaauuggcgaugug

SEQ ID NO: 877736 - RNA, 19 nt, Homo sapiens
  misc_RNA (1)...(19): siRNA sense strand
gaagaaguccagaagaaag

SEQ ID NO: 877737 - RNA, 19 nt, Homo sapiens
  misc_RNA (1)...(19): siRNA sense strand
uaucgccgcucaauuuaga

SEQ ID NO: 877738 - RNA, 19 nt, Homo sapiens
  misc_RNA (1)...(19): siRNA sense strand
ugacucaccuaaagaaagu

SEQ ID NO: 877739 - RNA, 19 nt, Homo sapiens
  misc_RNA (1)...(19): siRNA sense strand
ucaauaucgucaaccaauu

SEQ ID NO: 877740 - RNA, 19 nt, Homo sapiens
  misc_RNA (1)...(19): siRNA sense strand
caagcaaaccuucuccauu

SEQ ID NO: 877741 - RNA, 19 nt, Homo sapiens
  misc_RNA (1)...(19): siRNA sense strand
gagcagacccaagcaaaug

SEQ ID NO: 877742 - RNA, 19 nt, Homo sapiens
  misc_RNA (1)...(19): siRNA sense strand
gcugagcagaccuucauua

SEQ ID NO: 877743 - RNA, 19 nt, Homo sapiens
  misc_RNA (1)...(19): siRNA sense strand
uaagauuaccggagaaaug

SEQ ID NO: 877744 - RNA, 19 nt, Homo sapiens
  misc_RNA (1)...(19): siRNA sense strand
aaaggaacuuauccaguga

SEQ ID NO: 877745 - RNA, 19 nt, Homo sapiens
  misc_RNA (1)...(19): siRNA sense strand
gcugugacauugaacuugu

SEQ ID NO: 877746 - RNA, 19 nt, Homo sapiens
  misc_RNA (1)...(19): siRNA sense strand
gcucaaauaucaggugucu

SEQ ID NO: 877747 - RNA, 19 nt, Homo sapiens
  misc_RNA (1)...(19): siRNA sense strand
uagaacacguccugccaaa

SEQ ID NO: 877748 - RNA, 19 nt, Homo sapiens
  misc_RNA (1)...(19): siRNA sense strand
gaagaaaaguggguccauu

SEQ ID NO: 877749 - RNA, 19 nt, Homo sapiens
  misc_RNA (1)...(19): siRNA sense strand
ggcccuugcuccucucuuu

SEQ ID NO: 877750 - RNA, 19 nt, Homo sapiens
  misc_RNA (1)...(19): siRNA sense strand
gcauggagucgccaaaguu

SEQ ID NO: 877751 - RNA, 19 nt, Homo sapiens
  misc_RNA (1)...(19): siRNA sense strand
auacuuggcagauaacuaa

SEQ ID NO: 877752 - RNA, 19 nt, Homo sapiens
  misc_RNA (1)...(19): siRNA sense strand
ggaauucuggguaaacaug

SEQ ID NO: 877753 - RNA, 19 nt, Homo sapiens
  misc_RNA (1)...(19): siRNA sense strand
ccagacacuuugccaacaa

SEQ ID NO: 877754 - RNA, 19 nt, Homo sapiens
  misc_RNA (1)...(19): siRNA sense strand
aaacagucaaugccuauuu

SEQ ID NO: 877755 - RNA, 19 nt, Homo sapiens
  misc_RNA (1)...(19): siRNA sense strand
ugaacagccuucccucguu

SEQ ID NO: 877756 - RNA, 19 nt, Homo sapiens
  misc_RNA (1)...(19): siRNA sense strand
cuccagaacuuauaagcaa

SEQ ID NO: 877757 - RNA, 19 nt, Homo sapiens
  misc_RNA (1)...(19): siRNA sense strand
ccaaggaauucuggguaaa

SEQ ID NO: 877758 - RNA, 19 nt, Homo sapiens
  misc_RNA (1)...(19): siRNA sense strand
gauaaauuucagcagguua

SEQ ID NO: 877759 - RNA, 19 nt, Homo sapiens
  misc_RNA (1)...(19): siRNA sense strand
cauggagucgccaaaguua

SEQ ID NO: 877760 - RNA, 19 nt, Homo sapiens
  misc_RNA (1)...(19): siRNA sense strand
aaaggacacugauucuaca

SEQ ID NO: 877761 - RNA, 19 nt, Homo sapiens
  misc_RNA (1)...(19): siRNA sense strand
gagaauauuguggaagauu

SEQ ID NO: 877762 - RNA, 19 nt, Homo sapiens
  misc_RNA (1)...(19): siRNA sense strand
ccaaagcuaccuccaggaa

SEQ ID NO: 877763 - RNA, 19 nt, Homo sapiens
  misc_RNA (1)...(19): siRNA sense strand
aagaaagugucugaacaaa

SEQ ID NO: 877764 - RNA, 19 nt, Homo sapiens
  misc_RNA (1)...(19): siRNA sense strand
aaagaaagugucugaacaa

SEQ ID NO: 877765 - RNA, 19 nt, Homo sapiens
  misc_RNA (1)...(19): siRNA sense strand
gcagacccaagcaaaugua

SEQ ID NO: 877766 - RNA, 19 nt, Homo sapiens
  misc_RNA (1)...(19): siRNA sense strand
caaugccuauuucaaagga

SEQ ID NO: 877767 - RNA, 19 nt, Homo sapiens
  misc_RNA (1)...(19): siRNA sense strand
uuccagcccuccuccaaua

SEQ ID NO: 877768 - RNA, 19 nt, Homo sapiens
  misc_RNA (1)...(19): siRNA sense strand
caagugaaucggaagaaga

SEQ ID NO: 877769 - RNA, 19 nt, Homo sapiens
  misc_RNA (1)...(19): siRNA sense strand
ggcuacauauuauaacguu

SEQ ID NO: 877770 - RNA, 19 nt, Homo sapiens
  misc_RNA (1)...(19): siRNA sense strand
uacuaucgccgcucaauuu

SEQ ID NO: 877771 - RNA, 19 nt, Homo sapiens
  misc_RNA (1)...(19): siRNA sense strand
ucuacagguucaccagaua

SEQ ID NO: 877772 - RNA, 19 nt, Homo sapiens
  misc_RNA (1)...(19): siRNA sense strand
ugauaucucucagaaguca

SEQ ID NO: 877773 - RNA, 19 nt, Homo sapiens
  misc_RNA (1)...(19): siRNA sense strand
aaacaugccaaauuugaug

SEQ ID NO: 877774 - RNA, 19 nt, Homo sapiens
  misc_RNA (1)...(19): siRNA sense strand
cuucucugcugugauaaua

SEQ ID NO: 877775 - RNA, 19 nt, Homo sapiens
  misc_RNA (1)...(19): siRNA sense strand
gauuuucacucaucaagaa

SEQ ID NO: 877776 - RNA, 19 nt, Homo sapiens
  misc_RNA (1)...(19): siRNA sense strand
guucaggccaaccaauuaa

SEQ ID NO: 877777 - RNA, 19 nt, Homo sapiens
  misc_RNA (1)...(19): siRNA sense strand
gcugaacaacagagaauau

SEQ ID NO: 877778 - RNA, 19 nt, Homo sapiens
  misc_RNA (1)...(19): siRNA sense strand
aagcaaauguaucguuaag

SEQ ID NO: 877779 - RNA, 19 nt, Homo sapiens
  misc_RNA (1)...(19): siRNA sense strand
agucaaugccuauuucaaa

SEQ ID NO: 877780 - RNA, 19 nt, Homo sapiens
  misc_RNA (1)...(19): siRNA sense strand
ggagcagacccaagcaaau

SEQ ID NO: 877781 - RNA, 19 nt, Homo sapiens
  misc_RNA (1)...(19): siRNA sense strand
cugcaacuguagaugaauu

SEQ ID NO: 877782 - RNA, 19 nt, Homo sapiens
  misc_RNA (1)...(19): siRNA sense strand
gguaaacaugccaaauuug

SEQ ID NO: 877783 - RNA, 19 nt, Homo sapiens
  misc_RNA (1)...(19): siRNA sense strand
gaacacguccugccaaacc

SEQ ID NO: 877784 - RNA, 19 nt, Homo sapiens
  misc_RNA (1)...(19): siRNA sense strand
gucaaugccuauuucaaag

SEQ ID NO: 877785 - RNA, 19 nt, Homo sapiens
  misc_RNA (1)...(19): siRNA sense strand
caauaucgucaaccaauuc

SEQ ID NO: 877786 - RNA, 19 nt, Homo sapiens
  misc_RNA (1)...(19): siRNA sense strand
ggaacccggcucuaccaaa

SEQ ID NO: 877787 - RNA, 19 nt, Homo sapiens
  misc_RNA (1)...(19): siRNA sense strand
guuggcaagauuucaguua

SEQ ID NO: 877788 - RNA, 19 nt, Homo sapiens
  misc_RNA (1)...(19): siRNA sense strand
caagcaaauguaucguuaa

SEQ ID NO: 877789 - RNA, 19 nt, Homo sapiens
  misc_RNA (1)...(19): siRNA sense strand
ucaaugacuuggacagcau

SEQ ID NO: 877790 - RNA, 19 nt, Homo sapiens
  misc_RNA (1)...(19): siRNA sense strand
uaccauccaucaaugacuu

SEQ ID NO: 877791 - RNA, 19 nt, Homo sapiens
  misc_RNA (1)...(19): siRNA sense strand
cacaccaacuccagaacuu

SEQ ID NO: 877792 - RNA, 19 nt, Homo sapiens
  misc_RNA (1)...(19): siRNA sense strand
ggaaugcugcaacuguaga

SEQ ID NO: 877793 - RNA, 19 nt, Homo sapiens
  misc_RNA (1)...(19): siRNA sense strand
ccauugcaaucuaaagaca

SEQ ID NO: 877794 - RNA, 19 nt, Homo sapiens
  misc_RNA (1)...(19): siRNA sense strand
guacuaucgccgcucaauu

SEQ ID NO: 877795 - RNA, 19 nt, Homo sapiens
  misc_RNA (1)...(19): siRNA sense strand
gaaaaggacacugauucua

SEQ ID NO: 877796 - RNA, 19 nt, Homo sapiens
  misc_RNA (1)...(19): siRNA sense strand
ugccaaauuugaugacuca

SEQ ID NO: 877797 - RNA, 19 nt, Homo sapiens
  misc_RNA (1)...(19): siRNA sense strand
ugauaaauuucagcagguu

SEQ ID NO: 877798 - RNA, 19 nt, Homo sapiens
  misc_RNA (1)...(19): siRNA sense strand
gacacugauucuacagguu

SEQ ID NO: 877799 - RNA, 19 nt, Homo sapiens
  misc_RNA (1)...(19): siRNA sense strand
caaagcuaccuccaggaaa

SEQ ID NO: 877800 - RNA, 19 nt, Homo sapiens
  misc_RNA (1)...(19): siRNA sense strand
ugagcagaccuucauuaaa

SEQ ID NO: 877801 - RNA, 19 nt, Homo sapiens
  misc_RNA (1)...(19): siRNA sense strand
gccgcucaauuuagaagaa

SEQ ID NO: 877802 - RNA, 19 nt, Homo sapiens
  misc_RNA (1)...(19): siRNA sense strand
gagacaggcucacauauug

SEQ ID NO: 877803 - RNA, 19 nt, Homo sapiens
  misc_RNA (1)...(19): siRNA sense strand
ucacacaggccauuaauua

SEQ ID NO: 877804 - RNA, 19 nt, Homo sapiens
  misc_RNA (1)...(19): siRNA sense strand
caugugcucuucugcauua

SEQ ID NO: 877805 - RNA, 19 nt, Homo sapiens
  misc_RNA (1)...(19): siRNA sense strand
gcuugaaguuagugaauua

SEQ ID NO: 877806 - RNA, 19 nt, Homo sapiens
  misc_RNA (1)...(19): siRNA sense strand
ggagggaucauaguauuua

SEQ ID NO: 877807 - RNA, 19 nt, Homo sapiens
  misc_RNA (1)...(19): siRNA sense strand
ggagacaggcucacauauu

SEQ ID NO: 877808 - RNA, 19 nt, Homo sapiens
  misc_RNA (1)...(19): siRNA sense strand
guguuuaucucgccauuaa

SEQ ID NO: 877809 - RNA, 19 nt, Homo sapiens
  misc_RNA (1)...(19): siRNA sense strand
gaauuacuccuucuucuuc

SEQ ID NO: 877810 - RNA, 19 nt, Homo sapiens
  misc_RNA (1)...(19): siRNA sense strand
gagcgugccuagcuucuuc

SEQ ID NO: 877811 - RNA, 19 nt, Homo sapiens
  misc_RNA (1)...(19): siRNA sense strand
gugccuagcuucuucuguu

SEQ ID NO: 877812 - RNA, 19 nt, Homo sapiens
  misc_RNA (1)...(19): siRNA sense strand
gaagaaaacuuugaagaag

SEQ ID NO: 877813 - RNA, 19 nt, Homo sapiens
  misc_RNA (1)...(19): siRNA sense strand
aauauucucucucgugcua

SEQ ID NO: 877814 - RNA, 19 nt, Homo sapiens
  misc_RNA (1)...(19): siRNA sense strand
guucagccaucaucauguu

SEQ ID NO: 877815 - RNA, 19 nt, Homo sapiens
  misc_RNA (1)...(19): siRNA sense strand
acgaauaugagccgaauua

SEQ ID NO: 877816 - RNA, 19 nt, Homo sapiens
  misc_RNA (1)...(19): siRNA sense strand
gagcagcaaccauuuguuc

SEQ ID NO: 877817 - RNA, 19 nt, Homo sapiens
  misc_RNA (1)...(19): siRNA sense strand
cuucgagucugcccuaauu

SEQ ID NO: 877818 - RNA, 19 nt, Homo sapiens
  misc_RNA (1)...(19): siRNA sense strand
ucaguaugguuaugaguau

SEQ ID NO: 877819 - RNA, 19 nt, Homo sapiens
  misc_RNA (1)...(19): siRNA sense strand
guuuaucucgccauuaaua

SEQ ID NO: 877820 - RNA, 19 nt, Homo sapiens
  misc_RNA (1)...(19): siRNA sense strand
ggucucugcugucccaguu

SEQ ID NO: 877821 - RNA, 19 nt, Homo sapiens
  misc_RNA (1)...(19): siRNA sense strand
gaaagccggacgaggaguu

SEQ ID NO: 877822 - RNA, 19 nt, Homo sapiens
  misc_RNA (1)...(19): siRNA sense strand
guacaauuguguuuaucuc

SEQ ID NO: 877823 - RNA, 19 nt, Homo sapiens
  misc_RNA (1)...(19): siRNA sense strand
aaauuggucucucggguau

SEQ ID NO: 877824 - RNA, 19 nt, Homo sapiens
  misc_RNA (1)...(19): siRNA sense strand
cuucuucuguucuucagua

SEQ ID NO: 877825 - RNA, 19 nt, Homo sapiens
  misc_RNA (1)...(19): siRNA sense strand
ugcgauggguucugucuuu

SEQ ID NO: 877826 - RNA, 19 nt, Homo sapiens
  misc_RNA (1)...(19): siRNA sense strand
gcugugggccuauucauca

SEQ ID NO: 877827 - RNA, 19 nt, Homo sapiens
  misc_RNA (1)...(19): siRNA sense strand
gauguggguuuucuacuuu

SEQ ID NO: 877828 - RNA, 19 nt, Homo sapiens
  misc_RNA (1)...(19): siRNA sense strand
ccaagaugauaguucuguu

SEQ ID NO: 877829 - RNA, 19 nt, Homo sapiens
  misc_RNA (1)...(19): siRNA sense strand
ugggaucguuaucuucuuu

SEQ ID NO: 877830 - RNA, 19 nt, Homo sapiens
  misc_RNA (1)...(19): siRNA sense strand
ucaaggcgauaagcuucua

SEQ ID NO: 877831 - RNA, 19 nt, Homo sapiens
  misc_RNA (1)...(19): siRNA sense strand
caagaugauaguucuguug

SEQ ID NO: 877832 - RNA, 19 nt, Homo sapiens
  misc_RNA (1)...(19): siRNA sense strand
ucacagaauggcugcguuu

SEQ ID NO: 877833 - RNA, 19 nt, Homo sapiens
  misc_RNA (1)...(19): siRNA sense strand
guaacaacuucggcuggaa

SEQ ID NO: 877834 - RNA, 19 nt, Homo sapiens
  misc_RNA (1)...(19): siRNA sense strand
cagccaucaucauguugua

SEQ ID NO: 877835 - RNA, 19 nt, Homo sapiens
  misc_RNA (1)...(19): siRNA sense strand
cacacaggccauuaauuaa

SEQ ID NO: 877836 - RNA, 19 nt, Homo sapiens
  misc_RNA (1)...(19): siRNA sense strand
gggacaagcuaggauggau

SEQ ID NO: 877837 - RNA, 19 nt, Homo sapiens
  misc_RNA (1)...(19): siRNA sense strand
gugaauuacuccuucuucu

SEQ ID NO: 877838 - RNA, 19 nt, Homo sapiens
  misc_RNA (1)...(19): siRNA sense strand
ugagggaaauauucucucu

SEQ ID NO: 877839 - RNA, 19 nt, Homo sapiens
  misc_RNA (1)...(19): siRNA sense strand
uuggagggaucauaguauu

SEQ ID NO: 877840 - RNA, 19 nt, Homo sapiens
  misc_RNA (1)...(19): siRNA sense strand
ggauguggguuuucuacuu

SEQ ID NO: 877841 - RNA, 19 nt, Homo sapiens
  misc_RNA (1)...(19): siRNA sense strand
cauaguauuuagugucucu

SEQ ID NO: 877842 - RNA, 19 nt, Homo sapiens
  misc_RNA (1)...(19): siRNA sense strand
gagggaucauaguauuuag

SEQ ID NO: 877843 - RNA, 19 nt, Homo sapiens
  misc_RNA (1)...(19): siRNA sense strand
aaggagacaggcucacaua

SEQ ID NO: 877844 - RNA, 19 nt, Homo sapiens
  misc_RNA (1)...(19): siRNA sense strand
gggcaacugguuugggaaa

SEQ ID NO: 877845 - RNA, 19 nt, Homo sapiens
  misc_RNA (1)...(19): siRNA sense strand
gagacagaaagaacaaugu

SEQ ID NO: 877846 - RNA, 19 nt, Homo sapiens
  misc_RNA (1)...(19): siRNA sense strand
gggaucauaguauuuagug

SEQ ID NO: 877847 - RNA, 19 nt, Homo sapiens
  misc_RNA (1)...(19): siRNA sense strand
ugaauuacuccuucuucuu

SEQ ID NO: 877848 - RNA, 19 nt, Homo sapiens
  misc_RNA (1)...(19): siRNA sense strand
ugaaguuagugaauuacuc

SEQ ID NO: 877849 - RNA, 19 nt, Homo sapiens
  misc_RNA (1)...(19): siRNA sense strand
aauccaagaugauaguucu

SEQ ID NO: 877850 - RNA, 19 nt, Homo sapiens
  misc_RNA (1)...(19): siRNA sense strand
agacgaauaugagccgaau

SEQ ID NO: 877851 - RNA, 19 nt, Homo sapiens
  misc_RNA (1)...(19): siRNA sense strand
ggcaugugcucuucugcau

SEQ ID NO: 877852 - RNA, 19 nt, Homo sapiens
  misc_RNA (1)...(19): siRNA sense strand
gugcucuucugcauuagug

SEQ ID NO: 877853 - RNA, 19 nt, Homo sapiens
  misc_RNA (1)...(19): siRNA sense strand
gcaaugucaaagucaguau

SEQ ID NO: 877854 - RNA, 19 nt, Homo sapiens
  misc_RNA (1)...(19): siRNA sense strand
cgagacagaaagaacaaug

SEQ ID NO: 877855 - RNA, 19 nt, Homo sapiens
  misc_RNA (1)...(19): siRNA sense strand
uuggugcgcucacagaaug

SEQ ID NO: 877856 - RNA, 19 nt, Homo sapiens
  misc_RNA (1)...(19): siRNA sense strand
ccagccugaucuuggauug

SEQ ID NO: 877857 - RNA, 19 nt, Homo sapiens
  misc_RNA (1)...(19): siRNA sense strand
ucacuuucuucaguuauuc

SEQ ID NO: 877858 - RNA, 19 nt, Homo sapiens
  misc_RNA (1)...(19): siRNA sense strand
caaguuguacaauuguguu

SEQ ID NO: 877859 - RNA, 19 nt, Homo sapiens
  misc_RNA (1)...(19): siRNA sense strand
gacaagcuaggauggaugu

SEQ ID NO: 877860 - RNA, 19 nt, Homo sapiens
  misc_RNA (1)...(19): siRNA sense strand
aaacuuugaagaagacuca

SEQ ID NO: 877861 - RNA, 19 nt, Homo sapiens
  misc_RNA (1)...(19): siRNA sense strand
ugucaggcgucucucaaca

SEQ ID NO: 877862 - RNA, 19 nt, Homo sapiens
  misc_RNA (1)...(19): siRNA sense strand
ccauuaauagugagggaaa

SEQ ID NO: 877863 - RNA, 19 nt, Homo sapiens
  misc_RNA (1)...(19): siRNA sense strand
gcuccaugcuucacgaaaa

SEQ ID NO: 877864 - RNA, 19 nt, Homo sapiens
  misc_RNA (1)...(19): siRNA sense strand
gaauggcugcguuucuaca

SEQ ID NO: 877865 - RNA, 19 nt, Homo sapiens
  misc_RNA (1)...(19): siRNA sense strand
ggaucauaguauuuagugu

SEQ ID NO: 877866 - RNA, 19 nt, Homo sapiens
  misc_RNA (1)...(19): siRNA sense strand
gcaacugguuugggaaagc

SEQ ID NO: 877867 - RNA, 19 nt, Homo sapiens
  misc_RNA (1)...(19): siRNA sense strand
cuucuguucuucaguaugg

SEQ ID NO: 877868 - RNA, 19 nt, Homo sapiens
  misc_RNA (1)...(19): siRNA sense strand
cuacgccugcuugaaguua

SEQ ID NO: 877869 - RNA, 19 nt, Homo sapiens
  misc_RNA (1)...(19): siRNA sense strand
uugccuuccuggagucaua

SEQ ID NO: 877870 - RNA, 19 nt, Homo sapiens
  misc_RNA (1)...(19): siRNA sense strand
auucaucaguggcaucguu

SEQ ID NO: 877871 - RNA, 19 nt, Homo sapiens
  misc_RNA (1)...(19): siRNA sense strand
cgacguuggagggaucaua

SEQ ID NO: 877872 - RNA, 19 nt, Homo sapiens
  misc_RNA (1)...(19): siRNA sense strand
ggccuacgccugcuugaag

SEQ ID NO: 877873 - RNA, 19 nt, Homo sapiens
  misc_RNA (1)...(19): siRNA sense strand
aaaugaagacgaauaugag

SEQ ID NO: 877874 - RNA, 19 nt, Homo sapiens
  misc_RNA (1)...(19): siRNA sense strand
cauuagugguguuugucuu

SEQ ID NO: 877875 - RNA, 19 nt, Homo sapiens
  misc_RNA (1)...(19): siRNA sense strand
gcaugugcucuucugcauu

SEQ ID NO: 877876 - RNA, 19 nt, Homo sapiens
  misc_RNA (1)...(19): siRNA sense strand
ggagcagcaaccauuuguu

SEQ ID NO: 877877 - RNA, 19 nt, Homo sapiens
  misc_RNA (1)...(19): siRNA sense strand
guauuuagugucucugauc

SEQ ID NO: 877878 - RNA, 19 nt, Homo sapiens
  misc_RNA (1)...(19): siRNA sense strand
agacucacacaggccauua

SEQ ID NO: 877879 - RNA, 19 nt, Homo sapiens
  misc_RNA (1)...(19): siRNA sense strand
ggaucguuaucuucuuugg

SEQ ID NO: 877880 - RNA, 19 nt, Homo sapiens
  misc_RNA (1)...(19): siRNA sense strand
guuaugggcaacugguuug

SEQ ID NO: 877881 - RNA, 19 nt, Homo sapiens
  misc_RNA (1)...(19): siRNA sense strand
guacugcugccuguggauu

SEQ ID NO: 877882 - RNA, 19 nt, Homo sapiens
  misc_RNA (1)...(19): siRNA sense strand
gcacacuggauaccauuuu

SEQ ID NO: 877883 - RNA, 19 nt, Homo sapiens
  misc_RNA (1)...(19): siRNA sense strand
agacaggcucacauauuga

SEQ ID NO: 877884 - RNA, 19 nt, Homo sapiens
  misc_RNA (1)...(19): siRNA sense strand
guucuucaguaugguuaug

SEQ ID NO: 877885 - RNA, 19 nt, Homo sapiens
  misc_RNA (1)...(19): siRNA sense strand
ccugugugguugcuguuau

SEQ ID NO: 877886 - RNA, 19 nt, Homo sapiens
  misc_RNA (1)...(19): siRNA sense strand
uggcugcguuucuacaaca

SEQ ID NO: 877887 - RNA, 19 nt, Homo sapiens
  misc_RNA (1)...(19): siRNA sense strand
cugcauuagugguguuugu

SEQ ID NO: 877888 - RNA, 19 nt, Homo sapiens
  misc_RNA (1)...(19): siRNA sense strand
aauuuggguuugucuagga

SEQ ID NO: 877889 - RNA, 19 nt, Homo sapiens
  misc_RNA (1)...(19): siRNA sense strand
gcuucuaccaggcauguug

SEQ ID NO: 877890 - RNA, 19 nt, Homo sapiens
  misc_RNA (1)...(19): siRNA sense strand
gguauugaggcagaagaaa

SEQ ID NO: 877891 - RNA, 19 nt, Homo sapiens
  misc_RNA (1)...(19): siRNA sense strand
ccuagcuucuucuguucuu

SEQ ID NO: 877892 - RNA, 19 nt, Homo sapiens
  misc_RNA (1)...(19): siRNA sense strand
uuagugguguuugucuuug

SEQ ID NO: 877893 - RNA, 19 nt, Homo sapiens
  misc_RNA (1)...(19): siRNA sense strand
gaucguuaucuucuuugga

SEQ ID NO: 877894 - RNA, 19 nt, Homo sapiens
  misc_RNA (1)...(19): siRNA sense strand
guuggagggaucauaguau

SEQ ID NO: 877895 - RNA, 19 nt, Homo sapiens
  misc_RNA (1)...(19): siRNA sense strand
ccugcucacuuucuucagu

SEQ ID NO: 877896 - RNA, 19 nt, Homo sapiens
  misc_RNA (1)...(19): siRNA sense strand
gcccaagucaaggcgauaa

SEQ ID NO: 877897 - RNA, 19 nt, Homo sapiens
  misc_RNA (1)...(19): siRNA sense strand
cugcucacuuucuucaguu

SEQ ID NO: 877898 - RNA, 19 nt, Homo sapiens
  misc_RNA (1)...(19): siRNA sense strand
ggugggaucguuaucuucu

SEQ ID NO: 877899 - RNA, 19 nt, Homo sapiens
  misc_RNA (1)...(19): siRNA sense strand
ucaggcgucucucaacacu

SEQ ID NO: 877900 - RNA, 19 nt, Homo sapiens
  misc_RNA (1)...(19): siRNA sense strand
cgaauaugagccgaauuau

SEQ ID NO: 877901 - RNA, 19 nt, Homo sapiens
  misc_RNA (1)...(19): siRNA sense strand
ggguauugaggcagaagaa

SEQ ID NO: 877902 - RNA, 19 nt, Homo sapiens
  misc_RNA (1)...(19): siRNA sense strand
gggagaagguguacuggau

SEQ ID NO: 877903 - RNA, 19 nt, Homo sapiens
  misc_RNA (1)...(19): siRNA sense strand
gagaagguguacuggaugu

SEQ ID NO: 877904 - RNA, 19 nt, Homo sapiens
  misc_RNA (1)...(19): siRNA sense strand
ccugaaagccagcagauuu

SEQ ID NO: 877905 - RNA, 19 nt, Homo sapiens
  misc_RNA (1)...(19): siRNA sense strand
ggacaucaaagacgucaga

SEQ ID NO: 877906 - RNA, 19 nt, Homo sapiens
  misc_RNA (1)...(19): siRNA sense strand
guucagcugugcuucaaga

SEQ ID NO: 877907 - RNA, 19 nt, Homo sapiens
  misc_RNA (1)...(19): siRNA sense strand
caagacguguucuccugaa

SEQ ID NO: 877908 - RNA, 19 nt, Homo sapiens
  misc_RNA (1)...(19): siRNA sense strand
gcacgaguccuuccucuac

SEQ ID NO: 877909 - RNA, 19 nt, Homo sapiens
  misc_RNA (1)...(19): siRNA sense strand
cagaaaagauucaaguuca

SEQ ID NO: 877910 - RNA, 19 nt, Homo sapiens
  misc_RNA (1)...(19): siRNA sense strand
cugaaagccagcagauuua

SEQ ID NO: 877911 - RNA, 19 nt, Homo sapiens
  misc_RNA (1)...(19): siRNA sense strand
gaaagccagcagauuuaug

SEQ ID NO: 877912 - RNA, 19 nt, Homo sapiens
  misc_RNA (1)...(19): siRNA sense strand
gcagcuuccugguguacga

SEQ ID NO: 877913 - RNA, 19 nt, Homo sapiens
  misc_RNA (1)...(19): siRNA sense strand
gcagcuuccugguguacga

SEQ ID NO: 877914 - RNA, 19 nt, Homo sapiens
  misc_RNA (1)...(19): siRNA sense strand
guacgaguccuuccucuac

SEQ ID NO: 877915 - RNA, 19 nt, Homo sapiens
  misc_RNA (1)...(19): siRNA sense strand
guacgaguccuuccucuac

SEQ ID NO: 877916 - RNA, 19 nt, Homo sapiens
  misc_RNA (1)...(19): siRNA sense strand
ccagaaagcgagcaaaggu

SEQ ID NO: 877917 - RNA, 19 nt, Homo sapiens
  misc_RNA (1)...(19): siRNA sense strand
cuccaucccucuugaagga

SEQ ID NO: 877918 - RNA, 19 nt, Homo sapiens
  misc_RNA (1)...(19): siRNA sense strand
ggauggcgagucccaguga

SEQ ID NO: 877919 - RNA, 19 nt, Homo sapiens
  misc_RNA (1)...(19): siRNA sense strand
gcgcuggccucucuuucca

SEQ ID NO: 877920 - RNA, 19 nt, Homo sapiens
  misc_RNA (1)...(19): siRNA sense strand
uccgaggcguggauaguuu

SEQ ID NO: 877921 - RNA, 19 nt, Homo sapiens
  misc_RNA (1)...(19): siRNA sense strand
gcccugaguuccugaagac

SEQ ID NO: 877922 - RNA, 19 nt, Homo sapiens
  misc_RNA (1)...(19): siRNA sense strand
caaguucagcugugcuuca

SEQ ID NO: 877923 - RNA, 19 nt, Homo sapiens
  misc_RNA (1)...(19): siRNA sense strand
ggcccugaguuccugaaga

SEQ ID NO: 877924 - RNA, 19 nt, Homo sapiens
  misc_RNA (1)...(19): siRNA sense strand
aaagccagcagauuuaugg

SEQ ID NO: 877925 - RNA, 19 nt, Homo sapiens
  misc_RNA (1)...(19): siRNA sense strand
caaagacgucagacuggau

SEQ ID NO: 877926 - RNA, 19 nt, Homo sapiens
  misc_RNA (1)...(19): siRNA sense strand
ugaaagccagcagauuuau

SEQ ID NO: 877927 - RNA, 19 nt, Homo sapiens
  misc_RNA (1)...(19): siRNA sense strand
cgauauggagggccuggaa

SEQ ID NO: 877928 - RNA, 19 nt, Homo sapiens
  misc_RNA (1)...(19): siRNA sense strand
ggaggacccagaaaagauu

SEQ ID NO: 877929 - RNA, 19 nt, Homo sapiens
  misc_RNA (1)...(19): siRNA sense strand
gacguguucuccugaaagc

SEQ ID NO: 877930 - RNA, 19 nt, Homo sapiens
  misc_RNA (1)...(19): siRNA sense strand
aagacguguucuccugaaa

SEQ ID NO: 877931 - RNA, 19 nt, Homo sapiens
  misc_RNA (1)...(19): siRNA sense strand
caaagacagucccagcaaa

SEQ ID NO: 877932 - RNA, 19 nt, Homo sapiens
  misc_RNA (1)...(19): siRNA sense strand
gcauuucuuucuauuccua

SEQ ID NO: 877933 - RNA, 19 nt, Homo sapiens
  misc_RNA (1)...(19): siRNA sense strand
gaauugagcagcauuguac

SEQ ID NO: 877934 - RNA, 19 nt, Homo sapiens
  misc_RNA (1)...(19): siRNA sense strand
gcaaagacagucccagcaa

SEQ ID NO: 877935 - RNA, 19 nt, Homo sapiens
  misc_RNA (1)...(19): siRNA sense strand
aaacuuccaugcaaagaca

SEQ ID NO: 877936 - RNA, 19 nt, Homo sapiens
  misc_RNA (1)...(19): siRNA sense strand
ggguaugugugccugguuu

SEQ ID NO: 877937 - RNA, 19 nt, Homo sapiens
  misc_RNA (1)...(19): siRNA sense strand
acaaacaauuuccaagcaa

SEQ ID NO: 877938 - RNA, 19 nt, Homo sapiens
  misc_RNA (1)...(19): siRNA sense strand
ugcagucucugucuauauu

SEQ ID NO: 877939 - RNA, 19 nt, Homo sapiens
  misc_RNA (1)...(19): siRNA sense strand
cccaggaaaugucuuuguu

SEQ ID NO: 877940 - RNA, 19 nt, Homo sapiens
  misc_RNA (1)...(19): siRNA sense strand
gagaugguacccaggaaau

SEQ ID NO: 877941 - RNA, 19 nt, Homo sapiens
  misc_RNA (1)...(19): siRNA sense strand
gacagucccagcaaaguug

SEQ ID NO: 877942 - RNA, 19 nt, Homo sapiens
  misc_RNA (1)...(19): siRNA sense strand
ccaaacaaacaauuuccaa

SEQ ID NO: 877943 - RNA, 19 nt, Homo sapiens
  misc_RNA (1)...(19): siRNA sense strand
guacccaggaaaugucuuu

SEQ ID NO: 877944 - RNA, 19 nt, Homo sapiens
  misc_RNA (1)...(19): siRNA sense strand
gauacaucuuauugaguug

SEQ ID NO: 877945 - RNA, 19 nt, Homo sapiens
  misc_RNA (1)...(19): siRNA sense strand
gagcagcauuguacaucag

SEQ ID NO: 877946 - RNA, 19 nt, Homo sapiens
  misc_RNA (1)...(19): siRNA sense strand
ccuaugcagucucugucua

SEQ ID NO: 877947 - RNA, 19 nt, Homo sapiens
  misc_RNA (1)...(19): siRNA sense strand
uaugcagucucugucuaua

SEQ ID NO: 877948 - RNA, 19 nt, Homo sapiens
  misc_RNA (1)...(19): siRNA sense strand
cgucaaaacuuccaugcaa

SEQ ID NO: 877949 - RNA, 19 nt, Homo sapiens
  misc_RNA (1)...(19): siRNA sense strand
gaugguacccaggaaaugu

SEQ ID NO: 877950 - RNA, 19 nt, Homo sapiens
  misc_RNA (1)...(19): siRNA sense strand
ccaauucuaagaucguuau

SEQ ID NO: 877951 - RNA, 19 nt, Homo sapiens
  misc_RNA (1)...(19): siRNA sense strand
ugagcagcauuguacauca

SEQ ID NO: 877952 - RNA, 19 nt, Homo sapiens
  misc_RNA (1)...(19): siRNA sense strand
aacaaacaauuuccaagca

SEQ ID NO: 877953 - RNA, 19 nt, Homo sapiens
  misc_RNA (1)...(19): siRNA sense strand
cagagaugguacccaggaa

SEQ ID NO: 877954 - RNA, 19 nt, Homo sapiens
  misc_RNA (1)...(19): siRNA sense strand
cagaugguugggaaagaua

SEQ ID NO: 877955 - RNA, 19 nt, Homo sapiens
  misc_RNA (1)...(19): siRNA sense strand
agaauugagcagcauugua

SEQ ID NO: 877956 - RNA, 19 nt, Homo sapiens
  misc_RNA (1)...(19): siRNA sense strand
cuauuccuaucuugccuuu

SEQ ID NO: 877957 - RNA, 19 nt, Homo sapiens
  misc_RNA (1)...(19): siRNA sense strand
cagucucugucuauauuug

SEQ ID NO: 877958 - RNA, 19 nt, Homo sapiens
  misc_RNA (1)...(19): siRNA sense strand
gcagucucugucuauauuu

SEQ ID NO: 877959 - RNA, 19 nt, Homo sapiens
  misc_RNA (1)...(19): siRNA sense strand
acagaugguugggaaagau

SEQ ID NO: 877960 - RNA, 19 nt, Homo sapiens
  misc_RNA (1)...(19): siRNA sense strand
ugucuuuguuccucaguau

SEQ ID NO: 877961 - RNA, 19 nt, Homo sapiens
  misc_RNA (1)...(19): siRNA sense strand
agacagucccagcaaaguu

SEQ ID NO: 877962 - RNA, 19 nt, Homo sapiens
  misc_RNA (1)...(19): siRNA sense strand
cuuauugaguuguccuaug

SEQ ID NO: 877963 - RNA, 19 nt, Homo sapiens
  misc_RNA (1)...(19): siRNA sense strand
uuauugaguuguccuaugc

SEQ ID NO: 877964 - RNA, 19 nt, Homo sapiens
  misc_RNA (1)...(19): siRNA sense strand
ccaggaaaugucuuuguuc

SEQ ID NO: 877965 - RNA, 19 nt, Homo sapiens
  misc_RNA (1)...(19): siRNA sense strand
ccagaauugagcagcauug

SEQ ID NO: 877966 - RNA, 19 nt, Homo sapiens
  misc_RNA (1)...(19): siRNA sense strand
uacagaugguugggaaaga

SEQ ID NO: 877967 - RNA, 19 nt, Homo sapiens
  misc_RNA (1)...(19): siRNA sense strand
aaagacagucccagcaaag

SEQ ID NO: 877968 - RNA, 19 nt, Homo sapiens
  misc_RNA (1)...(19): siRNA sense strand
guuauuuguuugccuucug

SEQ ID NO: 877969 - RNA, 19 nt, Homo sapiens
  misc_RNA (1)...(19): siRNA sense strand
ucuuuguuccucaguauuu

SEQ ID NO: 877970 - RNA, 19 nt, Homo sapiens
  misc_RNA (1)...(19): siRNA sense strand
gcaaaggacuaucagagaa

SEQ ID NO: 877971 - RNA, 19 nt, Homo sapiens
  misc_RNA (1)...(19): siRNA sense strand
caaagccucuaaccucaaa

SEQ ID NO: 877972 - RNA, 19 nt, Homo sapiens
  misc_RNA (1)...(19): siRNA sense strand
ggaccucacuggcuucuca

SEQ ID NO: 877973 - RNA, 19 nt, Homo sapiens
  misc_RNA (1)...(19): siRNA sense strand
ucaaugagacguuucaauu

SEQ ID NO: 877974 - RNA, 19 nt, Homo sapiens
  misc_RNA (1)...(19): siRNA sense strand
gagcucaacuucucacucu

SEQ ID NO: 877975 - RNA, 19 nt, Homo sapiens
  misc_RNA (1)...(19): siRNA sense strand
ggaguucaaugaccgaauc

SEQ ID NO: 877976 - RNA, 19 nt, Homo sapiens
  misc_RNA (1)...(19): siRNA sense strand
gugaaggccucccugauca

SEQ ID NO: 877977 - RNA, 19 nt, Homo sapiens
  misc_RNA (1)...(19): siRNA sense strand
aaaccuccaucaagaagaa

SEQ ID NO: 877978 - RNA, 19 nt, Homo sapiens
  misc_RNA (1)...(19): siRNA sense strand
agaccaaggugcacaggaa

SEQ ID NO: 877979 - RNA, 19 nt, Homo sapiens
  misc_RNA (1)...(19): siRNA sense strand
caaaggacuaucagagaaa

SEQ ID NO: 877980 - RNA, 19 nt, Homo sapiens
  misc_RNA (1)...(19): siRNA sense strand
aaacucauugggcagauua

SEQ ID NO: 877981 - RNA, 19 nt, Homo sapiens
  misc_RNA (1)...(19): siRNA sense strand
caaugagacguuucaauuc

SEQ ID NO: 877982 - RNA, 19 nt, Homo sapiens
  misc_RNA (1)...(19): siRNA sense strand
ggucaaaccgagccaaaca

SEQ ID NO: 877983 - RNA, 19 nt, Homo sapiens
  misc_RNA (1)...(19): siRNA sense strand
caaacucauugggcagauu

SEQ ID NO: 877984 - RNA, 19 nt, Homo sapiens
  misc_RNA (1)...(19): siRNA sense strand
aaugagacguuucaauucu

SEQ ID NO: 877985 - RNA, 19 nt, Homo sapiens
  misc_RNA (1)...(19): siRNA sense strand
cggaaaaccuccaucaaga

SEQ ID NO: 877986 - RNA, 19 nt, Homo sapiens
  misc_RNA (1)...(19): siRNA sense strand
gcaucgccgugguggacua

SEQ ID NO: 877987 - RNA, 19 nt, Homo sapiens
  misc_RNA (1)...(19): siRNA sense strand
caacgcaaacugcacuuca

SEQ ID NO: 877988 - RNA, 19 nt, Homo sapiens
  misc_RNA (1)...(19): siRNA sense strand
ucaagaagaacacgcugaa

SEQ ID NO: 877989 - RNA, 19 nt, Homo sapiens
  misc_RNA (1)...(19): siRNA sense strand
ggacuccaacggcuucuca

SEQ ID NO: 877990 - RNA, 19 nt, Homo sapiens
  misc_RNA (1)...(19): siRNA sense strand
gcagagaugcuggccaauc

SEQ ID NO: 877991 - RNA, 19 nt, Homo sapiens
  misc_RNA (1)...(19): siRNA sense strand
agauuaagccagagcugua

SEQ ID NO: 877992 - RNA, 19 nt, Homo sapiens
  misc_RNA (1)...(19): siRNA sense strand
cuucagcgucuaugacuuu

SEQ ID NO: 877993 - RNA, 19 nt, Homo sapiens
  misc_RNA (1)...(19): siRNA sense strand
cgagcuggcccaacgcaaa

SEQ ID NO: 877994 - RNA, 19 nt, Homo sapiens
  misc_RNA (1)...(19): siRNA sense strand
ggaaaaccuccaucaagaa

SEQ ID NO: 877995 - RNA, 19 nt, Homo sapiens
  misc_RNA (1)...(19): siRNA sense strand
cagagaugcuggccaaucc

SEQ ID NO: 877996 - RNA, 19 nt, Homo sapiens
  misc_RNA (1)...(19): siRNA sense strand
acuuggacauggacucgua

SEQ ID NO: 877997 - RNA, 19 nt, Homo sapiens
  misc_RNA (1)...(19): siRNA sense strand
ggugccaggaguucaauga

SEQ ID NO: 877998 - RNA, 19 nt, Homo sapiens
  misc_RNA (1)...(19): siRNA sense strand
gcagcaaaggacuaucaga

SEQ ID NO: 877999 - RNA, 19 nt, Homo sapiens
  misc_RNA (1)...(19): siRNA sense strand
gcccugcgguaccucuaug

SEQ ID NO: 878000 - RNA, 19 nt, Homo sapiens
  misc_RNA (1)...(19): siRNA sense strand
ggacuaucagagaaagaga

SEQ ID NO: 878001 - RNA, 19 nt, Homo sapiens
  misc_RNA (1)...(19): siRNA sense strand
gcacuucagcgucuaugac

SEQ ID NO: 878002 - RNA, 19 nt, Homo sapiens
  misc_RNA (1)...(19): siRNA sense strand
aaaggacuaucagagaaag

SEQ ID NO: 878003 - RNA, 19 nt, Homo sapiens
  misc_RNA (1)...(19): siRNA sense strand
auaaugaggcgcugguguu

SEQ ID NO: 878004 - RNA, 19 nt, Homo sapiens
  misc_RNA (1)...(19): siRNA sense strand
caccgugaccaucaucaaa

SEQ ID NO: 878005 - RNA, 19 nt, Homo sapiens
  misc_RNA (1)...(19): siRNA sense strand
ccagugcccagucacauca

SEQ ID NO: 878006 - RNA, 19 nt, Homo sapiens
  misc_RNA (1)...(19): siRNA sense strand
ggagcacuggcaucagcua

SEQ ID NO: 878007 - RNA, 19 nt, Homo sapiens
  misc_RNA (1)...(19): siRNA sense strand
gugacauucuguggcauug

SEQ ID NO: 878008 - RNA, 19 nt, Homo sapiens
  misc_RNA (1)...(19): siRNA sense strand
gagaugcugacaccaacga

SEQ ID NO: 878009 - RNA, 19 nt, Homo sapiens
  misc_RNA (1)...(19): siRNA sense strand
cgugaaggccucccugauc

SEQ ID NO: 878010 - RNA, 19 nt, Homo sapiens
  misc_RNA (1)...(19): siRNA sense strand
ucaaaccgagccaaacauc

SEQ ID NO: 878011 - RNA, 19 nt, Homo sapiens
  misc_RNA (1)...(19): siRNA sense strand
gaaaaccuccaucaagaag

SEQ ID NO: 878012 - RNA, 19 nt, Homo sapiens
  misc_RNA (1)...(19): siRNA sense strand
cgacaggugccaggaguuc

SEQ ID NO: 878013 - RNA, 19 nt, Homo sapiens
  misc_RNA (1)...(19): siRNA sense strand
cagcgucuaugacuuugac

SEQ ID NO: 878014 - RNA, 19 nt, Homo sapiens
  misc_RNA (1)...(19): siRNA sense strand
ccuccuacuuggacaugga

SEQ ID NO: 878015 - RNA, 19 nt, Homo sapiens
  misc_RNA (1)...(19): siRNA sense strand
uaucagagaaagagaacuc

SEQ ID NO: 878016 - RNA, 19 nt, Homo sapiens
  misc_RNA (1)...(19): siRNA sense strand
gacuaucagagaaagagaa

SEQ ID NO: 878017 - RNA, 19 nt, Homo sapiens
  misc_RNA (1)...(19): siRNA sense strand
gcucacaguugaaugauau

SEQ ID NO: 878018 - RNA, 19 nt, Homo sapiens
  misc_RNA (1)...(19): siRNA sense strand
caaucaaaguaucguguua

SEQ ID NO: 878019 - RNA, 19 nt, Homo sapiens
  misc_RNA (1)...(19): siRNA sense strand
agagaagccuugauauuga

SEQ ID NO: 878020 - RNA, 19 nt, Homo sapiens
  misc_RNA (1)...(19): siRNA sense strand
caaaguaucguguuaugaa

SEQ ID NO: 878021 - RNA, 19 nt, Homo sapiens
  misc_RNA (1)...(19): siRNA sense strand
uauguuagcucuucugcuu

SEQ ID NO: 878022 - RNA, 19 nt, Homo sapiens
  misc_RNA (1)...(19): siRNA sense strand
aaagaucaaugguacaaug

SEQ ID NO: 878023 - RNA, 19 nt, Homo sapiens
  misc_RNA (1)...(19): siRNA sense strand
cagagaagccuugauauug

SEQ ID NO: 878024 - RNA, 19 nt, Homo sapiens
  misc_RNA (1)...(19): siRNA sense strand
cuacagauaugccuuugau

SEQ ID NO: 878025 - RNA, 19 nt, Homo sapiens
  misc_RNA (1)...(19): siRNA sense strand
acagauaugccuuugauuu

SEQ ID NO: 878026 - RNA, 19 nt, Homo sapiens
  misc_RNA (1)...(19): siRNA sense strand
gagaagccuugauauugau

SEQ ID NO: 878027 - RNA, 19 nt, Homo sapiens
  misc_RNA (1)...(19): siRNA sense strand
ggaagacggaggccucaaa

SEQ ID NO: 878028 - RNA, 19 nt, Homo sapiens
  misc_RNA (1)...(19): siRNA sense strand
guauuagaauucagcagaa

SEQ ID NO: 878029 - RNA, 19 nt, Homo sapiens
  misc_RNA (1)...(19): siRNA sense strand
agaagugccuggcuugguu

SEQ ID NO: 878030 - RNA, 19 nt, Homo sapiens
  misc_RNA (1)...(19): siRNA sense strand
gggaggacauggccacugu

SEQ ID NO: 878031 - RNA, 19 nt, Homo sapiens
  misc_RNA (1)...(19): siRNA sense strand
ucagagaagccuugauauu

SEQ ID NO: 878032 - RNA, 19 nt, Homo sapiens
  misc_RNA (1)...(19): siRNA sense strand
acuaauaaguggagaggaa

SEQ ID NO: 878033 - RNA, 19 nt, Homo sapiens
  misc_RNA (1)...(19): siRNA sense strand
ggccuguucuucuugauga

SEQ ID NO: 878034 - RNA, 19 nt, Homo sapiens
  misc_RNA (1)...(19): siRNA sense strand
gugaagacauugguguuga

SEQ ID NO: 878035 - RNA, 19 nt, Homo sapiens
  misc_RNA (1)...(19): siRNA sense strand
gcacagaaaaguuacaaaa

SEQ ID NO: 878036 - RNA, 19 nt, Homo sapiens
  misc_RNA (1)...(19): siRNA sense strand
ugaagacauugguguugaa

SEQ ID NO: 878037 - RNA, 19 nt, Homo sapiens
  misc_RNA (1)...(19): siRNA sense strand
uaacuaugaugaagauggu

SEQ ID NO: 878038 - RNA, 19 nt, Homo sapiens
  misc_RNA (1)...(19): siRNA sense strand
gaacaguccaugcugaucu

SEQ ID NO: 878039 - RNA, 19 nt, Homo sapiens
  misc_RNA (1)...(19): siRNA sense strand
gaaauuggaggcugaaagc

SEQ ID NO: 878040 - RNA, 19 nt, Homo sapiens
  misc_RNA (1)...(19): siRNA sense strand
gaggacauggccacuguuu

SEQ ID NO: 878041 - RNA, 19 nt, Homo sapiens
  misc_RNA (1)...(19): siRNA sense strand
ugacuucauuacaguguga

SEQ ID NO: 878042 - RNA, 19 nt, Homo sapiens
  misc_RNA (1)...(19): siRNA sense strand
gcaaucaaaguaucguguu

SEQ ID NO: 878043 - RNA, 19 nt, Homo sapiens
  misc_RNA (1)...(19): siRNA sense strand
ugaacaaagaucaauggua

SEQ ID NO: 878044 - RNA, 19 nt, Homo sapiens
  misc_RNA (1)...(19): siRNA sense strand
uaaguggagaggaacauuu

SEQ ID NO: 878045 - RNA, 19 nt, Homo sapiens
  misc_RNA (1)...(19): siRNA sense strand
gaagugccuggcuugguuu

SEQ ID NO: 878046 - RNA, 19 nt, Homo sapiens
  misc_RNA (1)...(19): siRNA sense strand
cagcagcaguagcggaaga

SEQ ID NO: 878047 - RNA, 19 nt, Homo sapiens
  misc_RNA (1)...(19): siRNA sense strand
ggaaauuggaggcugaaag

SEQ ID NO: 878048 - RNA, 19 nt, Homo sapiens
  misc_RNA (1)...(19): siRNA sense strand
uguaaaaucuccagcuauu

SEQ ID NO: 878049 - RNA, 19 nt, Homo sapiens
  misc_RNA (1)...(19): siRNA sense strand
gauggugcuuggccuguuc

SEQ ID NO: 878050 - RNA, 19 nt, Homo sapiens
  misc_RNA (1)...(19): siRNA sense strand
ggacauggccacuguuuuc

SEQ ID NO: 878051 - RNA, 19 nt, Homo sapiens
  misc_RNA (1)...(19): siRNA sense strand
caaggaagaaugguuaaag

SEQ ID NO: 878052 - RNA, 19 nt, Homo sapiens
  misc_RNA (1)...(19): siRNA sense strand
ugacugcacagaaaaguua

SEQ ID NO: 878053 - RNA, 19 nt, Homo sapiens
  misc_RNA (1)...(19): siRNA sense strand
gaaguuguagggccagaag

SEQ ID NO: 878054 - RNA, 19 nt, Homo sapiens
  misc_RNA (1)...(19): siRNA sense strand
aagaaugguuaaagggaau

SEQ ID NO: 878055 - RNA, 19 nt, Homo sapiens
  misc_RNA (1)...(19): siRNA sense strand
aaggaagaaugguuaaagg

SEQ ID NO: 878056 - RNA, 19 nt, Homo sapiens
  misc_RNA (1)...(19): siRNA sense strand
acaaagaucaaugguacaa

SEQ ID NO: 878057 - RNA, 19 nt, Homo sapiens
  misc_RNA (1)...(19): siRNA sense strand
ugauacugcuaaaucuaug

SEQ ID NO: 878058 - RNA, 19 nt, Homo sapiens
  misc_RNA (1)...(19): siRNA sense strand
gguuaaagggaaugacuuc

SEQ ID NO: 878059 - RNA, 19 nt, Homo sapiens
  misc_RNA (1)...(19): siRNA sense strand
aaaucuauguuagcucuuc

SEQ ID NO: 878060 - RNA, 19 nt, Homo sapiens
  misc_RNA (1)...(19): siRNA sense strand
gggauaaagaucagagaag

SEQ ID NO: 878061 - RNA, 19 nt, Homo sapiens
  misc_RNA (1)...(19): siRNA sense strand
uggcuugguuuuaugaaua

SEQ ID NO: 878062 - RNA, 19 nt, Homo sapiens
  misc_RNA (1)...(19): siRNA sense strand
gcugaaagcaugggauuuu

SEQ ID NO: 878063 - RNA, 19 nt, Homo sapiens
  misc_RNA (1)...(19): siRNA sense strand
ucaaaguaucguguuauga

SEQ ID NO: 878064 - RNA, 19 nt, Homo sapiens
  misc_RNA (1)...(19): siRNA sense strand
cagauaugccuuugauuuu

SEQ ID NO: 878065 - RNA, 19 nt, Homo sapiens
  misc_RNA (1)...(19): siRNA sense strand
ccaaggaagaaugguuaaa

SEQ ID NO: 878066 - RNA, 19 nt, Homo sapiens
  misc_RNA (1)...(19): siRNA sense strand
agacauugguguugaaccu

SEQ ID NO: 878067 - RNA, 19 nt, Homo sapiens
  misc_RNA (1)...(19): siRNA sense strand
gaagacggaggccucaaaa

SEQ ID NO: 878068 - RNA, 19 nt, Homo sapiens
  misc_RNA (1)...(19): siRNA sense strand
acaguugaaugauauuucg

SEQ ID NO: 878069 - RNA, 19 nt, Homo sapiens
  misc_RNA (1)...(19): siRNA sense strand
ccugcuagacuaauaagug

SEQ ID NO: 878070 - RNA, 19 nt, Homo sapiens
  misc_RNA (1)...(19): siRNA sense strand
aaaguaucguguuaugaac

SEQ ID NO: 878071 - RNA, 19 nt, Homo sapiens
  misc_RNA (1)...(19): siRNA sense strand
guaccuggagcaaucaaag

SEQ ID NO: 878072 - RNA, 19 nt, Homo sapiens
  misc_RNA (1)...(19): siRNA sense strand
cggugaagaagaagagaaa

SEQ ID NO: 878073 - RNA, 19 nt, Homo sapiens
  misc_RNA (1)...(19): siRNA sense strand
gugcuuggccuguucuucu

SEQ ID NO: 878074 - RNA, 19 nt, Homo sapiens
  misc_RNA (1)...(19): siRNA sense strand
cgcucacaguugaaugaua

SEQ ID NO: 878075 - RNA, 19 nt, Homo sapiens
  misc_RNA (1)...(19): siRNA sense strand
aucaaaguaucguguuaug

SEQ ID NO: 878076 - RNA, 19 nt, Homo sapiens
  misc_RNA (1)...(19): siRNA sense strand
gcacacagcagauccaaga

SEQ ID NO: 878077 - RNA, 19 nt, Homo sapiens
  misc_RNA (1)...(19): siRNA sense strand
ggaggcagcuggaggacaa

SEQ ID NO: 878078 - RNA, 19 nt, Homo sapiens
  misc_RNA (1)...(19): siRNA sense strand
gggagcaacuuauucgaaa

SEQ ID NO: 878079 - RNA, 19 nt, Homo sapiens
  misc_RNA (1)...(19): siRNA sense strand
gaaacugauugcugaacaa

SEQ ID NO: 878080 - RNA, 19 nt, Homo sapiens
  misc_RNA (1)...(19): siRNA sense strand
gagcugaggcugagcauga

SEQ ID NO: 878081 - RNA, 19 nt, Homo sapiens
  misc_RNA (1)...(19): siRNA sense strand
gagaacaaacgguaugaaa

SEQ ID NO: 878082 - RNA, 19 nt, Homo sapiens
  misc_RNA (1)...(19): siRNA sense strand
gaaaucagccaaagaagag

SEQ ID NO: 878083 - RNA, 19 nt, Homo sapiens
  misc_RNA (1)...(19): siRNA sense strand
gcaaauacaagagaagauu

SEQ ID NO: 878084 - RNA, 19 nt, Homo sapiens
  misc_RNA (1)...(19): siRNA sense strand
caacuuauucgaaaucuug

SEQ ID NO: 878085 - RNA, 19 nt, Homo sapiens
  misc_RNA (1)...(19): siRNA sense strand
ggaaacugauugcugaaca

SEQ ID NO: 878086 - RNA, 19 nt, Homo sapiens
  misc_RNA (1)...(19): siRNA sense strand
cgaccaaacuaaagaagga

SEQ ID NO: 878087 - RNA, 19 nt, Homo sapiens
  misc_RNA (1)...(19): siRNA sense strand
gaagagcagaggaaacuga

SEQ ID NO: 878088 - RNA, 19 nt, Homo sapiens
  misc_RNA (1)...(19): siRNA sense strand
aagagaagauugagcagaa

SEQ ID NO: 878089 - RNA, 19 nt, Homo sapiens
  misc_RNA (1)...(19): siRNA sense strand
ggaugaagcaggccauuga

SEQ ID NO: 878090 - RNA, 19 nt, Homo sapiens
  misc_RNA (1)...(19): siRNA sense strand
aaacacagggagcaacuua

SEQ ID NO: 878091 - RNA, 19 nt, Homo sapiens
  misc_RNA (1)...(19): siRNA sense strand
gagcagaggaaacugauug

SEQ ID NO: 878092 - RNA, 19 nt, Homo sapiens
  misc_RNA (1)...(19): siRNA sense strand
uagagaggcuggaggaaga

SEQ ID NO: 878093 - RNA, 19 nt, Homo sapiens
  misc_RNA (1)...(19): siRNA sense strand
gaacuugcaggaaagaaga

SEQ ID NO: 878094 - RNA, 19 nt, Homo sapiens
  misc_RNA (1)...(19): siRNA sense strand
gcacgggacagacugauga

SEQ ID NO: 878095 - RNA, 19 nt, Homo sapiens
  misc_RNA (1)...(19): siRNA sense strand
ggaaaugcagaaagaagaa

SEQ ID NO: 878096 - RNA, 19 nt, Homo sapiens
  misc_RNA (1)...(19): siRNA sense strand
gaagggaggcgcuagaaag

SEQ ID NO: 878097 - RNA, 19 nt, Homo sapiens
  misc_RNA (1)...(19): siRNA sense strand
cguaaacucuugggaaaug

SEQ ID NO: 878098 - RNA, 19 nt, Homo sapiens
  misc_RNA (1)...(19): siRNA sense strand
uaaagaaggagcaggagaa

SEQ ID NO: 878099 - RNA, 19 nt, Homo sapiens
  misc_RNA (1)...(19): siRNA sense strand
gaacaaacgguaugaaaau

SEQ ID NO: 878100 - RNA, 19 nt, Homo sapiens
  misc_RNA (1)...(19): siRNA sense strand
caacagcaaauacaagaga

SEQ ID NO: 878101 - RNA, 19 nt, Homo sapiens
  misc_RNA (1)...(19): siRNA sense strand
gucguaaacucuugggaaa

SEQ ID NO: 878102 - RNA, 19 nt, Homo sapiens
  misc_RNA (1)...(19): siRNA sense strand
gcagaacagccguuacuuc

SEQ ID NO: 878103 - RNA, 19 nt, Homo sapiens
  misc_RNA (1)...(19): siRNA sense strand
ggagacaacagcaaauaca

SEQ ID NO: 878104 - RNA, 19 nt, Homo sapiens
  misc_RNA (1)...(19): siRNA sense strand
gacaacagcaaauacaaga

SEQ ID NO: 878105 - RNA, 19 nt, Homo sapiens
  misc_RNA (1)...(19): siRNA sense strand
ccaaagaagagcagaggaa

SEQ ID NO: 878106 - RNA, 19 nt, Homo sapiens
  misc_RNA (1)...(19): siRNA sense strand
caagaggaaucccugaaac

SEQ ID NO: 878107 - RNA, 19 nt, Homo sapiens
  misc_RNA (1)...(19): siRNA sense strand
cagaacagccguuacuuca

SEQ ID NO: 878108 - RNA, 19 nt, Homo sapiens
  misc_RNA (1)...(19): siRNA sense strand
gggaggcgcuagaaaggau

SEQ ID NO: 878109 - RNA, 19 nt, Homo sapiens
  misc_RNA (1)...(19): siRNA sense strand
caaagaagagcagaggaaa

SEQ ID NO: 878110 - RNA, 19 nt, Homo sapiens
  misc_RNA (1)...(19): siRNA sense strand
ggagcaacuuauucgaaau

SEQ ID NO: 878111 - RNA, 19 nt, Homo sapiens
  misc_RNA (1)...(19): siRNA sense strand
ugaaaucagccaaagaaga

SEQ ID NO: 878112 - RNA, 19 nt, Homo sapiens
  misc_RNA (1)...(19): siRNA sense strand
gggaaaugcagaaagaaga

SEQ ID NO: 878113 - RNA, 19 nt, Homo sapiens
  misc_RNA (1)...(19): siRNA sense strand
ccagaagcaugucguaaac

SEQ ID NO: 878114 - RNA, 19 nt, Homo sapiens
  misc_RNA (1)...(19): siRNA sense strand
gcaugaacuugcaggaaag

SEQ ID NO: 878115 - RNA, 19 nt, Homo sapiens
  misc_RNA (1)...(19): siRNA sense strand
agauggagcuggaccuuca

SEQ ID NO: 878116 - RNA, 19 nt, Homo sapiens
  misc_RNA (1)...(19): siRNA sense strand
gaaaugcagaaagaagaaa

SEQ ID NO: 878117 - RNA, 19 nt, Homo sapiens
  misc_RNA (1)...(19): siRNA sense strand
caaauacaagagaagauug

SEQ ID NO: 878118 - RNA, 19 nt, Homo sapiens
  misc_RNA (1)...(19): siRNA sense strand
caagagaacaaacgguaug

SEQ ID NO: 878119 - RNA, 19 nt, Homo sapiens
  misc_RNA (1)...(19): siRNA sense strand
gcaagagaacaaacgguau

SEQ ID NO: 878120 - RNA, 19 nt, Homo sapiens
  misc_RNA (1)...(19): siRNA sense strand
gagaaagaggagagugaaa

SEQ ID NO: 878121 - RNA, 19 nt, Homo sapiens
  misc_RNA (1)...(19): siRNA sense strand
gggcguuucuugagacauc

SEQ ID NO: 878122 - RNA, 19 nt, Homo sapiens
  misc_RNA (1)...(19): siRNA sense strand
aggagaaucuguugaagca

SEQ ID NO: 878123 - RNA, 19 nt, Homo sapiens
  misc_RNA (1)...(19): siRNA sense strand
gcaacuuauucgaaaucuu

SEQ ID NO: 878124 - RNA, 19 nt, Homo sapiens
  misc_RNA (1)...(19): siRNA sense strand
acacagggagcaacuuauu

SEQ ID NO: 878125 - RNA, 19 nt, Homo sapiens
  misc_RNA (1)...(19): siRNA sense strand
agcaugaacuugcaggaaa

SEQ ID NO: 878126 - RNA, 19 nt, Homo sapiens
  misc_RNA (1)...(19): siRNA sense strand
gcgagaaagaggagaguga

SEQ ID NO: 878127 - RNA, 19 nt, Homo sapiens
  misc_RNA (1)...(19): siRNA sense strand
gagacaacagcaaauacaa

SEQ ID NO: 878128 - RNA, 19 nt, Homo sapiens
  misc_RNA (1)...(19): siRNA sense strand
cuugggaaaugcagaaaga

SEQ ID NO: 878129 - RNA, 19 nt, Homo sapiens
  misc_RNA (1)...(19): siRNA sense strand
gcaggagaaucuguugaag

SEQ ID NO: 878130 - RNA, 19 nt, Homo sapiens
  misc_RNA (1)...(19): siRNA sense strand
agaaggagcaggagaaucu

SEQ ID NO: 878131 - RNA, 19 nt, Homo sapiens
  misc_RNA (1)...(19): siRNA sense strand
gagcagaacagccguuacu

SEQ ID NO: 878132 - RNA, 19 nt, Homo sapiens
  misc_RNA (1)...(19): siRNA sense strand
acugauugcugaacaacuu

SEQ ID NO: 878133 - RNA, 19 nt, Homo sapiens
  misc_RNA (1)...(19): siRNA sense strand
gaauggagcucuaaaaccu

SEQ ID NO: 878134 - RNA, 19 nt, Homo sapiens
  misc_RNA (1)...(19): siRNA sense strand
ccaaggagaugugggaaaa

SEQ ID NO: 878135 - RNA, 19 nt, Homo sapiens
  misc_RNA (1)...(19): siRNA sense strand
gagcaugaacuugcaggaa

SEQ ID NO: 878136 - RNA, 19 nt, Homo sapiens
  misc_RNA (1)...(19): siRNA sense strand
gagcaacuuauucgaaauc

SEQ ID NO: 878137 - RNA, 19 nt, Homo sapiens
  misc_RNA (1)...(19): siRNA sense strand
aagaacaacccgaaacuuc

SEQ ID NO: 878138 - RNA, 19 nt, Homo sapiens
  misc_RNA (1)...(19): siRNA sense strand
ccgcagagcaagagaacaa

SEQ ID NO: 878139 - RNA, 19 nt, Homo sapiens
  misc_RNA (1)...(19): siRNA sense strand
gggaggaggccaaggagau

SEQ ID NO: 878140 - RNA, 19 nt, Homo sapiens
  misc_RNA (1)...(19): siRNA sense strand
acaagaggaaucccugaaa

SEQ ID NO: 878141 - RNA, 19 nt, Homo sapiens
  misc_RNA (1)...(19): siRNA sense strand
caaacgguaugaaaaugaa

SEQ ID NO: 878142 - RNA, 19 nt, Homo sapiens
  misc_RNA (1)...(19): siRNA sense strand
gaggaaucccugaaacaca

SEQ ID NO: 878143 - RNA, 19 nt, Homo sapiens
  misc_RNA (1)...(19): siRNA sense strand
gaaccgacgggcacaagag

SEQ ID NO: 878144 - RNA, 19 nt, Homo sapiens
  misc_RNA (1)...(19): siRNA sense strand
gcuccaaacaggcagaaug

SEQ ID NO: 878145 - RNA, 19 nt, Homo sapiens
  misc_RNA (1)...(19): siRNA sense strand
gaggcgaccaaacuaaaga

SEQ ID NO: 878146 - RNA, 19 nt, Homo sapiens
  misc_RNA (1)...(19): siRNA sense strand
agaagcaugucguaaacuc

SEQ ID NO: 878147 - RNA, 19 nt, Homo sapiens
  misc_RNA (1)...(19): siRNA sense strand
gggagcagaacagccguua

SEQ ID NO: 878148 - RNA, 19 nt, Homo sapiens
  misc_RNA (1)...(19): siRNA sense strand
gaugagcgagguucugaca

SEQ ID NO: 878149 - RNA, 19 nt, Homo sapiens
  misc_RNA (1)...(19): siRNA sense strand
caguauaacgcucaacuca

SEQ ID NO: 878150 - RNA, 19 nt, Homo sapiens
  misc_RNA (1)...(19): siRNA sense strand
gagcaggagaaucuguuga

SEQ ID NO: 878151 - RNA, 19 nt, Homo sapiens
  misc_RNA (1)...(19): siRNA sense strand
gguggaggcgaccaaacua

SEQ ID NO: 878152 - RNA, 19 nt, Homo sapiens
  misc_RNA (1)...(19): siRNA sense strand
ccgaggcacugcugcaaca

SEQ ID NO: 878153 - RNA, 19 nt, Homo sapiens
  misc_RNA (1)...(19): siRNA sense strand
gccagcagcgccugaauca

SEQ ID NO: 878154 - RNA, 19 nt, Homo sapiens
  misc_RNA (1)...(19): siRNA sense strand
gcacgggaagcugaaauca

SEQ ID NO: 878155 - RNA, 19 nt, Homo sapiens
  misc_RNA (1)...(19): siRNA sense strand
ggaggaggccaaggagaug

SEQ ID NO: 878156 - RNA, 19 nt, Homo sapiens
  misc_RNA (1)...(19): siRNA sense strand
cgaagggaggcgcuagaaa

SEQ ID NO: 878157 - RNA, 19 nt, Homo sapiens
  misc_RNA (1)...(19): siRNA sense strand
gaaaggaugaaagcugaag

SEQ ID NO: 878158 - RNA, 19 nt, Homo sapiens
  misc_RNA (1)...(19): siRNA sense strand
ugacaucugcagcuccaaa

SEQ ID NO: 878159 - RNA, 19 nt, Homo sapiens
  misc_RNA (1)...(19): siRNA sense strand
ggagcaggagaaucuguug

SEQ ID NO: 878160 - RNA, 19 nt, Homo sapiens
  misc_RNA (1)...(19): siRNA sense strand
ggaggcgaccaaacuaaag

SEQ ID NO: 878161 - RNA, 19 nt, Homo sapiens
  misc_RNA (1)...(19): siRNA sense strand
cgagaaagaggagagugaa

SEQ ID NO: 878162 - RNA, 19 nt, Homo sapiens
  misc_RNA (1)...(19): siRNA sense strand
gaagaugaaggaggagaag

SEQ ID NO: 878163 - RNA, 19 nt, Homo sapiens
  misc_RNA (1)...(19): siRNA sense strand
cagcaaauacaagagaaga

SEQ ID NO: 878164 - RNA, 19 nt, Homo sapiens
  misc_RNA (1)...(19): siRNA sense strand
uaucagcgggagaagauga

SEQ ID NO: 878165 - RNA, 19 nt, Homo sapiens
  misc_RNA (1)...(19): siRNA sense strand
gaaacacagggagcaacuu

SEQ ID NO: 878166 - RNA, 19 nt, Homo sapiens
  misc_RNA (1)...(19): siRNA sense strand
gcagaauggagcucuaaaa

SEQ ID NO: 878167 - RNA, 19 nt, Homo sapiens
  misc_RNA (1)...(19): siRNA sense strand
gcaggaggcggagacuaug

SEQ ID NO: 878168 - RNA, 19 nt, Homo sapiens
  misc_RNA (1)...(19): siRNA sense strand
acagggagacaacagcaaa

SEQ ID NO: 878169 - RNA, 19 nt, Homo sapiens
  misc_RNA (1)...(19): siRNA sense strand
guggaggcgaccaaacuaa

SEQ ID NO: 878170 - RNA, 19 nt, Homo sapiens
  misc_RNA (1)...(19): siRNA sense strand
uugaggaggugagagaguu

SEQ ID NO: 878171 - RNA, 19 nt, Homo sapiens
  misc_RNA (1)...(19): siRNA sense strand
ucuugagacaucaguauaa

SEQ ID NO: 878172 - RNA, 19 nt, Homo sapiens
  misc_RNA (1)...(19): siRNA sense strand
ugcaggcccuccucgagaa

SEQ ID NO: 878173 - RNA, 19 nt, Homo sapiens
  misc_RNA (1)...(19): siRNA sense strand
ccuaucagcgggagaagau

SEQ ID NO: 878174 - RNA, 19 nt, Homo sapiens
  misc_RNA (1)...(19): siRNA sense strand
ugagggaggaggccaagga

SEQ ID NO: 878175 - RNA, 19 nt, Homo sapiens
  misc_RNA (1)...(19): siRNA sense strand
aacagcaaauacaagagaa

SEQ ID NO: 878176 - RNA, 19 nt, Homo sapiens
  misc_RNA (1)...(19): siRNA sense strand
ggccacagcuuucccauca

SEQ ID NO: 878177 - RNA, 19 nt, Homo sapiens
  misc_RNA (1)...(19): siRNA sense strand
gcucugggcuggugacaac

SEQ ID NO: 878178 - RNA, 19 nt, Homo sapiens
  misc_RNA (1)...(19): siRNA sense strand
cagcuuauccgguccuuug

SEQ ID NO: 878179 - RNA, 19 nt, Homo sapiens
  misc_RNA (1)...(19): siRNA sense strand
gcaugacaaugggcucaau

SEQ ID NO: 878180 - RNA, 19 nt, Homo sapiens
  misc_RNA (1)...(19): siRNA sense strand
ccacagcuuucccaucacu

SEQ ID NO: 878181 - RNA, 19 nt, Homo sapiens
  misc_RNA (1)...(19): siRNA sense strand
gucugcagcuggacuccua

SEQ ID NO: 878182 - RNA, 19 nt, Homo sapiens
  misc_RNA (1)...(19): siRNA sense strand
caugacaaugggcucaaua

SEQ ID NO: 878183 - RNA, 19 nt, Homo sapiens
  misc_RNA (1)...(19): siRNA sense strand
cuuauccgguccuuugaug

SEQ ID NO: 878184 - RNA, 19 nt, Homo sapiens
  misc_RNA (1)...(19): siRNA sense strand
ccacauccacugacaagac

SEQ ID NO: 878185 - RNA, 19 nt, Homo sapiens
  misc_RNA (1)...(19): siRNA sense strand
gacccaccaaggaccauuu

SEQ ID NO: 878186 - RNA, 19 nt, Homo sapiens
  misc_RNA (1)...(19): siRNA sense strand
ucaagaagcuggaaacaga

SEQ ID NO: 878187 - RNA, 19 nt, Homo sapiens
  misc_RNA (1)...(19): siRNA sense strand
uagcguuugugucucaaga

SEQ ID NO: 878188 - RNA, 19 nt, Homo sapiens
  misc_RNA (1)...(19): siRNA sense strand
guacggccuucagcaguca

SEQ ID NO: 878189 - RNA, 19 nt, Homo sapiens
  misc_RNA (1)...(19): siRNA sense strand
ucauccaugucuuugcaaa

SEQ ID NO: 878190 - RNA, 19 nt, Homo sapiens
  misc_RNA (1)...(19): siRNA sense strand
gacacgccguuggugauau

SEQ ID NO: 878191 - RNA, 19 nt, Homo sapiens
  misc_RNA (1)...(19): siRNA sense strand
ucucauccaugucuuugca

SEQ ID NO: 878192 - RNA, 19 nt, Homo sapiens
  misc_RNA (1)...(19): siRNA sense strand
aaagaaccugguagcguuu

SEQ ID NO: 878193 - RNA, 19 nt, Homo sapiens
  misc_RNA (1)...(19): siRNA sense strand
gcguuugugucucaagaag

SEQ ID NO: 878194 - RNA, 19 nt, Homo sapiens
  misc_RNA (1)...(19): siRNA sense strand
agacacgccguuggugaua

SEQ ID NO: 878195 - RNA, 19 nt, Homo sapiens
  misc_RNA (1)...(19): siRNA sense strand
cgccguuggugauaucgaa

SEQ ID NO: 878196 - RNA, 19 nt, Homo sapiens
  misc_RNA (1)...(19): siRNA sense strand
acacgccguuggugauauc

SEQ ID NO: 878197 - RNA, 19 nt, Homo sapiens
  misc_RNA (1)...(19): siRNA sense strand
ugguagcguuugugucuca

SEQ ID NO: 878198 - RNA, 19 nt, Homo sapiens
  misc_RNA (1)...(19): siRNA sense strand
gcaaccagauuucuucuua

SEQ ID NO: 878199 - RNA, 19 nt, Homo sapiens
  misc_RNA (1)...(19): siRNA sense strand
ggaaaggccuugccaugua

SEQ ID NO: 878200 - RNA, 19 nt, Homo sapiens
  misc_RNA (1)...(19): siRNA sense strand
gcaccuaccuugcaucuaa

SEQ ID NO: 878201 - RNA, 19 nt, Homo sapiens
  misc_RNA (1)...(19): siRNA sense strand
ucagggaaauugaagauua

SEQ ID NO: 878202 - RNA, 19 nt, Homo sapiens
  misc_RNA (1)...(19): siRNA sense strand
ggagaaagccaucaagaaa

SEQ ID NO: 878203 - RNA, 19 nt, Homo sapiens
  misc_RNA (1)...(19): siRNA sense strand
ggacacaccuaccaagaga

SEQ ID NO: 878204 - RNA, 19 nt, Homo sapiens
  misc_RNA (1)...(19): siRNA sense strand
gccauuaguuugaccaaua

SEQ ID NO: 878205 - RNA, 19 nt, Homo sapiens
  misc_RNA (1)...(19): siRNA sense strand
ggaaucaacuggugcuguu

SEQ ID NO: 878206 - RNA, 19 nt, Homo sapiens
  misc_RNA (1)...(19): siRNA sense strand
gaaaggccuugccauguau

SEQ ID NO: 878207 - RNA, 19 nt, Homo sapiens
  misc_RNA (1)...(19): siRNA sense strand
agaaagccaucaagaaauu

SEQ ID NO: 878208 - RNA, 19 nt, Homo sapiens
  misc_RNA (1)...(19): siRNA sense strand
gaaccuaaauccaguuugg

SEQ ID NO: 878209 - RNA, 19 nt, Homo sapiens
  misc_RNA (1)...(19): siRNA sense strand
gauuggaucugaugaugaa

SEQ ID NO: 878210 - RNA, 19 nt, Homo sapiens
  misc_RNA (1)...(19): siRNA sense strand
gggaggaccugguaucgaa

SEQ ID NO: 878211 - RNA, 19 nt, Homo sapiens
  misc_RNA (1)...(19): siRNA sense strand
gcaagaaaguggaaucaac

SEQ ID NO: 878212 - RNA, 19 nt, Homo sapiens
  misc_RNA (1)...(19): siRNA sense strand
caagcaaucuaucuguuug

SEQ ID NO: 878213 - RNA, 19 nt, Homo sapiens
  misc_RNA (1)...(19): siRNA sense strand
uggagaagcuaaugaauca

SEQ ID NO: 878214 - RNA, 19 nt, Homo sapiens
  misc_RNA (1)...(19): siRNA sense strand
ccagauuucuucuuagaug

SEQ ID NO: 878215 - RNA, 19 nt, Homo sapiens
  misc_RNA (1)...(19): siRNA sense strand
cagggaaauugaagauuaa

SEQ ID NO: 878216 - RNA, 19 nt, Homo sapiens
  misc_RNA (1)...(19): siRNA sense strand
ugaagaaauugaagcaguu

SEQ ID NO: 878217 - RNA, 19 nt, Homo sapiens
  misc_RNA (1)...(19): siRNA sense strand
uaacauggcccuagcaauc

SEQ ID NO: 878218 - RNA, 19 nt, Homo sapiens
  misc_RNA (1)...(19): siRNA sense strand
gcacgugguuucuugaucu

SEQ ID NO: 878219 - RNA, 19 nt, Homo sapiens
  misc_RNA (1)...(19): siRNA sense strand
uaaaccaggucauccuuug

SEQ ID NO: 878220 - RNA, 19 nt, Homo sapiens
  misc_RNA (1)...(19): siRNA sense strand
uggaauggcagaagaauuu

SEQ ID NO: 878221 - RNA, 19 nt, Homo sapiens
  misc_RNA (1)...(19): siRNA sense strand
gcaaaggauggagcaaaua

SEQ ID NO: 878222 - RNA, 19 nt, Homo sapiens
  misc_RNA (1)...(19): siRNA sense strand
gcagauguggugaugagua

SEQ ID NO: 878223 - RNA, 19 nt, Homo sapiens
  misc_RNA (1)...(19): siRNA sense strand
gagaaagccaucaagaaau

SEQ ID NO: 878224 - RNA, 19 nt, Homo sapiens
  misc_RNA (1)...(19): siRNA sense strand
uaaagccacucaagcaauc

SEQ ID NO: 878225 - RNA, 19 nt, Homo sapiens
  misc_RNA (1)...(19): siRNA sense strand
caaaggauggagcaaauau

SEQ ID NO: 878226 - RNA, 19 nt, Homo sapiens
  misc_RNA (1)...(19): siRNA sense strand
gcuaaugaaucagaugaau

SEQ ID NO: 878227 - RNA, 19 nt, Homo sapiens
  misc_RNA (1)...(19): siRNA sense strand
gcauguauuccuuauuuga

SEQ ID NO: 878228 - RNA, 19 nt, Homo sapiens
  misc_RNA (1)...(19): siRNA sense strand
ggauggagcaaauauuguu

SEQ ID NO: 878229 - RNA, 19 nt, Homo sapiens
  misc_RNA (1)...(19): siRNA sense strand
uaugacuacugaugacuuu

SEQ ID NO: 878230 - RNA, 19 nt, Homo sapiens
  misc_RNA (1)...(19): siRNA sense strand
cagaagcaguuagcaagaa

SEQ ID NO: 878231 - RNA, 19 nt, Homo sapiens
  misc_RNA (1)...(19): siRNA sense strand
ggaauggcagaagaauuua

SEQ ID NO: 878232 - RNA, 19 nt, Homo sapiens
  misc_RNA (1)...(19): siRNA sense strand
cagauguggugaugaguau

SEQ ID NO: 878233 - RNA, 19 nt, Homo sapiens
  misc_RNA (1)...(19): siRNA sense strand
caaagcuauugcauugaaa

SEQ ID NO: 878234 - RNA, 19 nt, Homo sapiens
  misc_RNA (1)...(19): siRNA sense strand
gaagauuaaagguaacaug

SEQ ID NO: 878235 - RNA, 19 nt, Homo sapiens
  misc_RNA (1)...(19): siRNA sense strand
gaugaaugccagacuguga

SEQ ID NO: 878236 - RNA, 19 nt, Homo sapiens
  misc_RNA (1)...(19): siRNA sense strand
gagaagcuaaugaaucaga

SEQ ID NO: 878237 - RNA, 19 nt, Homo sapiens
  misc_RNA (1)...(19): siRNA sense strand
gauggagcaaauauuguua

SEQ ID NO: 878238 - RNA, 19 nt, Homo sapiens
  misc_RNA (1)...(19): siRNA sense strand
gugcuuauaccauugcuaa

SEQ ID NO: 878239 - RNA, 19 nt, Homo sapiens
  misc_RNA (1)...(19): siRNA sense strand
ggaaauugaagauuaaagg

SEQ ID NO: 878240 - RNA, 19 nt, Homo sapiens
  misc_RNA (1)...(19): siRNA sense strand
caaucuaucuguuugaacu

SEQ ID NO: 878241 - RNA, 19 nt, Homo sapiens
  misc_RNA (1)...(19): siRNA sense strand
agaagcaguuagcaagaaa

SEQ ID NO: 878242 - RNA, 19 nt, Homo sapiens
  misc_RNA (1)...(19): siRNA sense strand
gguggcacgugguuucuug

SEQ ID NO: 878243 - RNA, 19 nt, Homo sapiens
  misc_RNA (1)...(19): siRNA sense strand
uaaggacucucucagugau

SEQ ID NO: 878244 - RNA, 19 nt, Homo sapiens
  misc_RNA (1)...(19): siRNA sense strand
gaaagccaucaagaaauuu

SEQ ID NO: 878245 - RNA, 19 nt, Homo sapiens
  misc_RNA (1)...(19): siRNA sense strand
gaauggcagaagaauuuaa

SEQ ID NO: 878246 - RNA, 19 nt, Homo sapiens
  misc_RNA (1)...(19): siRNA sense strand
cuaaagcauguauuccuua

SEQ ID NO: 878247 - RNA, 19 nt, Homo sapiens
  misc_RNA (1)...(19): siRNA sense strand
gacuacugaugacuuugua

SEQ ID NO: 878248 - RNA, 19 nt, Homo sapiens
  misc_RNA (1)...(19): siRNA sense strand
gcaauuaaaccaggucauc

SEQ ID NO: 878249 - RNA, 19 nt, Homo sapiens
  misc_RNA (1)...(19): siRNA sense strand
aguaugguaugucuaugua

SEQ ID NO: 878250 - RNA, 19 nt, Homo sapiens
  misc_RNA (1)...(19): siRNA sense strand
cuauacugcugcugaagaa

SEQ ID NO: 878251 - RNA, 19 nt, Homo sapiens
  misc_RNA (1)...(19): siRNA sense strand
ucaagcaaucuaucuguuu

SEQ ID NO: 878252 - RNA, 19 nt, Homo sapiens
  misc_RNA (1)...(19): siRNA sense strand
uaugguaugucuauguaug

SEQ ID NO: 878253 - RNA, 19 nt, Homo sapiens
  misc_RNA (1)...(19): siRNA sense strand
gaagaaauugaagcaguug

SEQ ID NO: 878254 - RNA, 19 nt, Homo sapiens
  misc_RNA (1)...(19): siRNA sense strand
gauguggugaugaguauga

SEQ ID NO: 878255 - RNA, 19 nt, Homo sapiens
  misc_RNA (1)...(19): siRNA sense strand
cagauuucuucuuagauga

SEQ ID NO: 878256 - RNA, 19 nt, Homo sapiens
  misc_RNA (1)...(19): siRNA sense strand
ucuaaagcauguauuccuu

SEQ ID NO: 878257 - RNA, 19 nt, Homo sapiens
  misc_RNA (1)...(19): siRNA sense strand
gaaagcagcaaaggaugga

SEQ ID NO: 878258 - RNA, 19 nt, Homo sapiens
  misc_RNA (1)...(19): siRNA sense strand
gauauggagagccuucuga

SEQ ID NO: 878259 - RNA, 19 nt, Homo sapiens
  misc_RNA (1)...(19): siRNA sense strand
gugaugauguuguuaaagc

SEQ ID NO: 878260 - RNA, 19 nt, Homo sapiens
  misc_RNA (1)...(19): siRNA sense strand
ucucagugaugauguuguu

SEQ ID NO: 878261 - RNA, 19 nt, Homo sapiens
  misc_RNA (1)...(19): siRNA sense strand
aaccagauuucuucuuaga

SEQ ID NO: 878262 - RNA, 19 nt, Homo sapiens
  misc_RNA (1)...(19): siRNA sense strand
caaccagauuucuucuuag

SEQ ID NO: 878263 - RNA, 19 nt, Homo sapiens
  misc_RNA (1)...(19): siRNA sense strand
guccaccacugaaccuaaa

SEQ ID NO: 878264 - RNA, 19 nt, Homo sapiens
  misc_RNA (1)...(19): siRNA sense strand
cuaaguaugguaugucuau

SEQ ID NO: 878265 - RNA, 19 nt, Homo sapiens
  misc_RNA (1)...(19): siRNA sense strand
cagugaugauguuguuaaa

SEQ ID NO: 878266 - RNA, 19 nt, Homo sapiens
  misc_RNA (1)...(19): siRNA sense strand
ugaagcaguuggaggaaag

SEQ ID NO: 878267 - RNA, 19 nt, Homo sapiens
  misc_RNA (1)...(19): siRNA sense strand
ucagugaugauguuguuaa

SEQ ID NO: 878268 - RNA, 19 nt, Homo sapiens
  misc_RNA (1)...(19): siRNA sense strand
acacacugcugcuauggau

SEQ ID NO: 878269 - RNA, 19 nt, Homo sapiens
  misc_RNA (1)...(19): siRNA sense strand
gcaucuaaagcauguauuc

SEQ ID NO: 878270 - RNA, 19 nt, Homo sapiens
  misc_RNA (1)...(19): siRNA sense strand
gcauucaugucagggaaau

SEQ ID NO: 878271 - RNA, 19 nt, Homo sapiens
  misc_RNA (1)...(19): siRNA sense strand
gaaagccaguguagaaaag

SEQ ID NO: 878272 - RNA, 19 nt, Homo sapiens
  misc_RNA (1)...(19): siRNA sense strand
gcuguggaagaaacauuua

SEQ ID NO: 878273 - RNA, 19 nt, Homo sapiens
  misc_RNA (1)...(19): siRNA sense strand
cuacugaugacuuuguaaa

SEQ ID NO: 878274 - RNA, 19 nt, Homo sapiens
  misc_RNA (1)...(19): siRNA sense strand
ucaagaaauuuggaggaau

SEQ ID NO: 878275 - RNA, 19 nt, Homo sapiens
  misc_RNA (1)...(19): siRNA sense strand
gggugggaaugucggauau

SEQ ID NO: 878276 - RNA, 19 nt, Homo sapiens
  misc_RNA (1)...(19): siRNA sense strand
gaauacccagaagcaguua

SEQ ID NO: 878277 - RNA, 19 nt, Homo sapiens
  misc_RNA (1)...(19): siRNA sense strand
ugaauacccagaagcaguu

SEQ ID NO: 878278 - RNA, 19 nt, Homo sapiens
  misc_RNA (1)...(19): siRNA sense strand
cuucuaggcacaaucuaua

SEQ ID NO: 878279 - RNA, 19 nt, Homo sapiens
  misc_RNA (1)...(19): siRNA sense strand
uaaauccaguuugguucaa

SEQ ID NO: 878280 - RNA, 19 nt, Homo sapiens
  misc_RNA (1)...(19): siRNA sense strand
caagaaaguggaaucaacu

SEQ ID NO: 878281 - RNA, 19 nt, Homo sapiens
  misc_RNA (1)...(19): siRNA sense strand
caaauuggagaagcuaaug

SEQ ID NO: 878282 - RNA, 19 nt, Homo sapiens
  misc_RNA (1)...(19): siRNA sense strand
aaggauggagcaaauauug

SEQ ID NO: 878283 - RNA, 19 nt, Homo sapiens
  misc_RNA (1)...(19): siRNA sense strand
gccagugccauuaguuuga

SEQ ID NO: 878284 - RNA, 19 nt, Homo sapiens
  misc_RNA (1)...(19): siRNA sense strand
ucaggcagauguggugaug

SEQ ID NO: 878285 - RNA, 19 nt, Homo sapiens
  misc_RNA (1)...(19): siRNA sense strand
cuauguaugugcuuggaau

SEQ ID NO: 878286 - RNA, 19 nt, Homo sapiens
  misc_RNA (1)...(19): siRNA sense strand
uggagaaagccaucaagaa

SEQ ID NO: 878287 - RNA, 19 nt, Homo sapiens
  misc_RNA (1)...(19): siRNA sense strand
gccuugccauguauuguug

SEQ ID NO: 878288 - RNA, 19 nt, Homo sapiens
  misc_RNA (1)...(19): siRNA sense strand
gaugguggcacgugguuuc

SEQ ID NO: 878289 - RNA, 19 nt, Homo sapiens
  misc_RNA (1)...(19): siRNA sense strand
ugccauguauuguugaugu

SEQ ID NO: 878290 - RNA, 19 nt, Homo sapiens
  misc_RNA (1)...(19): siRNA sense strand
aaucuauacugcugcugaa

SEQ ID NO: 878291 - RNA, 19 nt, Homo sapiens
  misc_RNA (1)...(19): siRNA sense strand
cagcaaaggauggagcaaa

SEQ ID NO: 878292 - RNA, 19 nt, Homo sapiens
  misc_RNA (1)...(19): siRNA sense strand
ccauuaguuugaccaauac

SEQ ID NO: 878293 - RNA, 19 nt, Homo sapiens
  misc_RNA (1)...(19): siRNA sense strand
uaaugaaucagaugaaugc

SEQ ID NO: 878294 - RNA, 19 nt, Homo sapiens
  misc_RNA (1)...(19): siRNA sense strand
gaagcuaaugaaucagaug

SEQ ID NO: 878295 - RNA, 19 nt, Homo sapiens
  misc_RNA (1)...(19): siRNA sense strand
agcaaaggauggagcaaau

SEQ ID NO: 878296 - RNA, 19 nt, Homo sapiens
  misc_RNA (1)...(19): siRNA sense strand
uuaaggacucucucaguga

SEQ ID NO: 878297 - RNA, 19 nt, Homo sapiens
  misc_RNA (1)...(19): siRNA sense strand
acacaccuaccaagagauu

SEQ ID NO: 878298 - RNA, 19 nt, Homo sapiens
  misc_RNA (1)...(19): siRNA sense strand
ggacgaggcuauauacuga

SEQ ID NO: 878299 - RNA, 19 nt, Homo sapiens
  misc_RNA (1)...(19): siRNA sense strand
gaagaaggaagaagaagua

SEQ ID NO: 878300 - RNA, 19 nt, Homo sapiens
  misc_RNA (1)...(19): siRNA sense strand
ggagaaagaagaagaagaa

SEQ ID NO: 878301 - RNA, 19 nt, Homo sapiens
  misc_RNA (1)...(19): siRNA sense strand
agagagauguggagcguua

SEQ ID NO: 878302 - RNA, 19 nt, Homo sapiens
  misc_RNA (1)...(19): siRNA sense strand
gaaagaagaagaagaagag

SEQ ID NO: 878303 - RNA, 19 nt, Homo sapiens
  misc_RNA (1)...(19): siRNA sense strand
ggaagaggaggaagaagaa

SEQ ID NO: 878304 - RNA, 19 nt, Homo sapiens
  misc_RNA (1)...(19): siRNA sense strand
agaagaacaugaagaggaa

SEQ ID NO: 878305 - RNA, 19 nt, Homo sapiens
  misc_RNA (1)...(19): siRNA sense strand
ggaggaagaagaagaguau

SEQ ID NO: 878306 - RNA, 19 nt, Homo sapiens
  misc_RNA (1)...(19): siRNA sense strand
ggaggaaacaauacagaaa

SEQ ID NO: 878307 - RNA, 19 nt, Homo sapiens
  misc_RNA (1)...(19): siRNA sense strand
ugacagugaugacaauaug

SEQ ID NO: 878308 - RNA, 19 nt, Homo sapiens
  misc_RNA (1)...(19): siRNA sense strand
agaagaguaugaugaagaa

SEQ ID NO: 878309 - RNA, 19 nt, Homo sapiens
  misc_RNA (1)...(19): siRNA sense strand
uagagacccuggagaagaa

SEQ ID NO: 878310 - RNA, 19 nt, Homo sapiens
  misc_RNA (1)...(19): siRNA sense strand
gaaacaauacagaaacuag

SEQ ID NO: 878311 - RNA, 19 nt, Homo sapiens
  misc_RNA (1)...(19): siRNA sense strand
gaaggaagaggaggaagaa

SEQ ID NO: 878312 - RNA, 19 nt, Homo sapiens
  misc_RNA (1)...(19): siRNA sense strand
gaauauguccuggcacuga

SEQ ID NO: 878313 - RNA, 19 nt, Homo sapiens
  misc_RNA (1)...(19): siRNA sense strand
ggacuuugguggugacagu

SEQ ID NO: 878314 - RNA, 19 nt, Homo sapiens
  misc_RNA (1)...(19): siRNA sense strand
agaggaaacugauuacauc

SEQ ID NO: 878315 - RNA, 19 nt, Homo sapiens
  misc_RNA (1)...(19): siRNA sense strand
gaaggaagaagaaguaacu

SEQ ID NO: 878316 - RNA, 19 nt, Homo sapiens
  misc_RNA (1)...(19): siRNA sense strand
ggagaagaaggaagaagaa

SEQ ID NO: 878317 - RNA, 19 nt, Homo sapiens
  misc_RNA (1)...(19): siRNA sense strand
ggagcguuauucagacaaa

SEQ ID NO: 878318 - RNA, 19 nt, Homo sapiens
  misc_RNA (1)...(19): siRNA sense strand
gaagaagaguaugaugaag

SEQ ID NO: 878319 - RNA, 19 nt, Homo sapiens
  misc_RNA (1)...(19): siRNA sense strand
gaagaagaagaguaugaug

SEQ ID NO: 878320 - RNA, 19 nt, Homo sapiens
  misc_RNA (1)...(19): siRNA sense strand
agaguaugaugaagaagaa

SEQ ID NO: 878321 - RNA, 19 nt, Homo sapiens
  misc_RNA (1)...(19): siRNA sense strand
ggaaacaauacagaaacua

SEQ ID NO: 878322 - RNA, 19 nt, Homo sapiens
  misc_RNA (1)...(19): siRNA sense strand
ucagacaaauaucagaugu

SEQ ID NO: 878323 - RNA, 19 nt, Homo sapiens
  misc_RNA (1)...(19): siRNA sense strand
ccuaagaccacagaagaua

SEQ ID NO: 878324 - RNA, 19 nt, Homo sapiens
  misc_RNA (1)...(19): siRNA sense strand
gaagauaaggaggaaacaa

SEQ ID NO: 878325 - RNA, 19 nt, Homo sapiens
  misc_RNA (1)...(19): siRNA sense strand
agaagaagaguaugaugaa

SEQ ID NO: 878326 - RNA, 19 nt, Homo sapiens
  misc_RNA (1)...(19): siRNA sense strand
ggaagaagaagaguaugau

SEQ ID NO: 878327 - RNA, 19 nt, Homo sapiens
  misc_RNA (1)...(19): siRNA sense strand
caauauggacgaggcuaua

SEQ ID NO: 878328 - RNA, 19 nt, Homo sapiens
  misc_RNA (1)...(19): siRNA sense strand
agauaaggaggaaacaaua

SEQ ID NO: 878329 - RNA, 19 nt, Homo sapiens
  misc_RNA (1)...(19): siRNA sense strand
uaacuucagaggaggauga

SEQ ID NO: 878330 - RNA, 19 nt, Homo sapiens
  misc_RNA (1)...(19): siRNA sense strand
aagaagaagaguaugauga

SEQ ID NO: 878331 - RNA, 19 nt, Homo sapiens
  misc_RNA (1)...(19): siRNA sense strand
agaggaggaugaggagaaa

SEQ ID NO: 878332 - RNA, 19 nt, Homo sapiens
  misc_RNA (1)...(19): siRNA sense strand
cuaagaccacagaagauaa

SEQ ID NO: 878333 - RNA, 19 nt, Homo sapiens
  misc_RNA (1)...(19): siRNA sense strand
gcagccuucuccacucuuc

SEQ ID NO: 878334 - RNA, 19 nt, Homo sapiens
  misc_RNA (1)...(19): siRNA sense strand
augaagaggaaacugauua

SEQ ID NO: 878335 - RNA, 19 nt, Homo sapiens
  misc_RNA (1)...(19): siRNA sense strand
ugaagaagaacaugaagag

SEQ ID NO: 878336 - RNA, 19 nt, Homo sapiens
  misc_RNA (1)...(19): siRNA sense strand
cacagaagauaaggaggaa

SEQ ID NO: 878337 - RNA, 19 nt, Homo sapiens
  misc_RNA (1)...(19): siRNA sense strand
ggaugaggagaaagaagaa

SEQ ID NO: 878338 - RNA, 19 nt, Homo sapiens
  misc_RNA (1)...(19): siRNA sense strand
cagaggaggaugaggagaa

SEQ ID NO: 878339 - RNA, 19 nt, Homo sapiens
  misc_RNA (1)...(19): siRNA sense strand
gauaaggaggaaacaauac

SEQ ID NO: 878340 - RNA, 19 nt, Homo sapiens
  misc_RNA (1)...(19): siRNA sense strand
gaagaggaaacugauuaca

SEQ ID NO: 878341 - RNA, 19 nt, Homo sapiens
  misc_RNA (1)...(19): siRNA sense strand
agaaagaagaagaagaaga

SEQ ID NO: 878342 - RNA, 19 nt, Homo sapiens
  misc_RNA (1)...(19): siRNA sense strand
aagaagaguaugaugaaga

SEQ ID NO: 878343 - RNA, 19 nt, Homo sapiens
  misc_RNA (1)...(19): siRNA sense strand
ucagaugucagguccgauu

SEQ ID NO: 878344 - RNA, 19 nt, Homo sapiens
  misc_RNA (1)...(19): siRNA sense strand
gaacaugaagaggaaacug

SEQ ID NO: 878345 - RNA, 19 nt, Homo sapiens
  misc_RNA (1)...(19): siRNA sense strand
gaggaaacaauacagaaac

SEQ ID NO: 878346 - RNA, 19 nt, Homo sapiens
  misc_RNA (1)...(19): siRNA sense strand
cuagagacccuggagaaga

SEQ ID NO: 878347 - RNA, 19 nt, Homo sapiens
  misc_RNA (1)...(19): siRNA sense strand
ugaugaagaagaacaugaa

SEQ ID NO: 878348 - RNA, 19 nt, Homo sapiens
  misc_RNA (1)...(19): siRNA sense strand
gagcuacgaggagccauga

SEQ ID NO: 878349 - RNA, 19 nt, Homo sapiens
  misc_RNA (1)...(19): siRNA sense strand
agaagaagaagaagagaag

SEQ ID NO: 878350 - RNA, 19 nt, Homo sapiens
  misc_RNA (1)...(19): siRNA sense strand
aagaagaagagaaggaaga

SEQ ID NO: 878351 - RNA, 19 nt, Homo sapiens
  misc_RNA (1)...(19): siRNA sense strand
aauauguccuggcacugaa

SEQ ID NO: 878352 - RNA, 19 nt, Homo sapiens
  misc_RNA (1)...(19): siRNA sense strand
aagauaaggaggaaacaau

SEQ ID NO: 878353 - RNA, 19 nt, Homo sapiens
  misc_RNA (1)...(19): siRNA sense strand
gagcguuauucagacaaau

SEQ ID NO: 878354 - RNA, 19 nt, Homo sapiens
  misc_RNA (1)...(19): siRNA sense strand
ugacaauggagaggacuuu

SEQ ID NO: 878355 - RNA, 19 nt, Homo sapiens
  misc_RNA (1)...(19): siRNA sense strand
agaagaagaagagaaggaa

SEQ ID NO: 878356 - RNA, 19 nt, Homo sapiens
  misc_RNA (1)...(19): siRNA sense strand
uggagaagaaggaagaaga

SEQ ID NO: 878357 - RNA, 19 nt, Homo sapiens
  misc_RNA (1)...(19): siRNA sense strand
gaagaacaugaagaggaaa

SEQ ID NO: 878358 - RNA, 19 nt, Homo sapiens
  misc_RNA (1)...(19): siRNA sense strand
agaaggaagaggaggaaga

SEQ ID NO: 878359 - RNA, 19 nt, Homo sapiens
  misc_RNA (1)...(19): siRNA sense strand
ugaggagaaagaagaagaa

SEQ ID NO: 878360 - RNA, 19 nt, Homo sapiens
  misc_RNA (1)...(19): siRNA sense strand
ggaggaugaggagaaagaa

SEQ ID NO: 878361 - RNA, 19 nt, Homo sapiens
  misc_RNA (1)...(19): siRNA sense strand
uaagaccacagaagauaag

SEQ ID NO: 878362 - RNA, 19 nt, Homo sapiens
  misc_RNA (1)...(19): siRNA sense strand
aagaguaugaugaagaaga

SEQ ID NO: 878363 - RNA, 19 nt, Homo sapiens
  misc_RNA (1)...(19): siRNA sense strand
aggaagaagaagaguauga

SEQ ID NO: 878364 - RNA, 19 nt, Homo sapiens
  misc_RNA (1)...(19): siRNA sense strand
aggaagaggaggaagaaga

SEQ ID NO: 878365 - RNA, 19 nt, Homo sapiens
  misc_RNA (1)...(19): siRNA sense strand
guggagcguuauucagaca

SEQ ID NO: 878366 - RNA, 19 nt, Homo sapiens
  misc_RNA (1)...(19): siRNA sense strand
ugaggcagcuccccuacuu

SEQ ID NO: 878367 - RNA, 19 nt, Homo sapiens
  misc_RNA (1)...(19): siRNA sense strand
aagaagaagaagaagagaa

SEQ ID NO: 878368 - RNA, 19 nt, Homo sapiens
  misc_RNA (1)...(19): siRNA sense strand
cagaagauaaggaggaaac

SEQ ID NO: 878369 - RNA, 19 nt, Homo sapiens
  misc_RNA (1)...(19): siRNA sense strand
ggugacagugaugacaaua

SEQ ID NO: 878370 - RNA, 19 nt, Homo sapiens
  misc_RNA (1)...(19): siRNA sense strand
aagaggaaacugauuacau

SEQ ID NO: 878371 - RNA, 19 nt, Homo sapiens
  misc_RNA (1)...(19): siRNA sense strand
gagauguggagcguuauuc

SEQ ID NO: 878372 - RNA, 19 nt, Homo sapiens
  misc_RNA (1)...(19): siRNA sense strand
gagaagaaggaagaagaag

SEQ ID NO: 878373 - RNA, 19 nt, Homo sapiens
  misc_RNA (1)...(19): siRNA sense strand
caauggagaggacuuuggu

SEQ ID NO: 878374 - RNA, 19 nt, Homo sapiens
  misc_RNA (1)...(19): siRNA sense strand
caugaagaggaaacugauu

SEQ ID NO: 878375 - RNA, 19 nt, Homo sapiens
  misc_RNA (1)...(19): siRNA sense strand
agaagaaggaagaagaagu

SEQ ID NO: 878376 - RNA, 19 nt, Homo sapiens
  misc_RNA (1)...(19): siRNA sense strand
gaugaagaagaacaugaag

SEQ ID NO: 878377 - RNA, 19 nt, Homo sapiens
  misc_RNA (1)...(19): siRNA sense strand
aagaagaagaagagaagga

SEQ ID NO: 878378 - RNA, 19 nt, Homo sapiens
  misc_RNA (1)...(19): siRNA sense strand
aggaugaggagaaagaaga

SEQ ID NO: 878379 - RNA, 19 nt, Homo sapiens
  misc_RNA (1)...(19): siRNA sense strand
guuaugacuucucccauga

SEQ ID NO: 878380 - RNA, 19 nt, Homo sapiens
  misc_RNA (1)...(19): siRNA sense strand
gcucagcccguuaugacuu

SEQ ID NO: 878381 - RNA, 19 nt, Homo sapiens
  misc_RNA (1)...(19): siRNA sense strand
gcacgugcuggaccuggaa

SEQ ID NO: 878382 - RNA, 19 nt, Homo sapiens
  misc_RNA (1)...(19): siRNA sense strand
gaagucgcgcuggucagaa

SEQ ID NO: 878383 - RNA, 19 nt, Homo sapiens
  misc_RNA (1)...(19): siRNA sense strand
ggcucccucuacauccuua

SEQ ID NO: 878384 - RNA, 19 nt, Homo sapiens
  misc_RNA (1)...(19): siRNA sense strand
ccacguggacagcaucaag

SEQ ID NO: 878385 - RNA, 19 nt, Homo sapiens
  misc_RNA (1)...(19): siRNA sense strand
guacaaaucuucugaguug

SEQ ID NO: 878386 - RNA, 19 nt, Homo sapiens
  misc_RNA (1)...(19): siRNA sense strand
gagaagagcuugcaguuug

SEQ ID NO: 878387 - RNA, 19 nt, Homo sapiens
  misc_RNA (1)...(19): siRNA sense strand
gaagaagaguggaaugcuu

SEQ ID NO: 878388 - RNA, 19 nt, Homo sapiens
  misc_RNA (1)...(19): siRNA sense strand
ccacucaucuguccuguau

SEQ ID NO: 878389 - RNA, 19 nt, Homo sapiens
  misc_RNA (1)...(19): siRNA sense strand
caagagcaguccaucauca

SEQ ID NO: 878390 - RNA, 19 nt, Homo sapiens
  misc_RNA (1)...(19): siRNA sense strand
ggaaugcuuugcagucagu

SEQ ID NO: 878391 - RNA, 19 nt, Homo sapiens
  misc_RNA (1)...(19): siRNA sense strand
agagaugccuggagagaau

SEQ ID NO: 878392 - RNA, 19 nt, Homo sapiens
  misc_RNA (1)...(19): siRNA sense strand
uggaggagcugauagacau

SEQ ID NO: 878393 - RNA, 19 nt, Homo sapiens
  misc_RNA (1)...(19): siRNA sense strand
agaagagcuugcaguuuga

SEQ ID NO: 878394 - RNA, 19 nt, Homo sapiens
  misc_RNA (1)...(19): siRNA sense strand
gcagagaugccuggagaga

SEQ ID NO: 878395 - RNA, 19 nt, Homo sapiens
  misc_RNA (1)...(19): siRNA sense strand
ggagaauuguccagaagac

SEQ ID NO: 878396 - RNA, 19 nt, Homo sapiens
  misc_RNA (1)...(19): siRNA sense strand
gaauuguccagaagacuug

SEQ ID NO: 878397 - RNA, 19 nt, Homo sapiens
  misc_RNA (1)...(19): siRNA sense strand
uucaagaggugauggaaga

SEQ ID NO: 878398 - RNA, 19 nt, Homo sapiens
  misc_RNA (1)...(19): siRNA sense strand
gggacaggcuccuaaacag

SEQ ID NO: 878399 - RNA, 19 nt, Homo sapiens
  misc_RNA (1)...(19): siRNA sense strand
acucaucuguccuguaugu

SEQ ID NO: 878400 - RNA, 19 nt, Homo sapiens
  misc_RNA (1)...(19): siRNA sense strand
aacaggagcugaucaacca

SEQ ID NO: 878401 - RNA, 19 nt, Homo sapiens
  misc_RNA (1)...(19): siRNA sense strand
gcagugggccagggaauuc

SEQ ID NO: 878402 - RNA, 19 nt, Homo sapiens
  misc_RNA (1)...(19): siRNA sense strand
gagcuugcaguuugaugaa

SEQ ID NO: 878403 - RNA, 19 nt, Homo sapiens
  misc_RNA (1)...(19): siRNA sense strand
aagaagaguggaaugcuuu

SEQ ID NO: 878404 - RNA, 19 nt, Homo sapiens
  misc_RNA (1)...(19): siRNA sense strand
guggaaugcuuugcaguca

SEQ ID NO: 878405 - RNA, 19 nt, Homo sapiens
  misc_RNA (1)...(19): siRNA sense strand
aagaggugauggaagaaga

SEQ ID NO: 878406 - RNA, 19 nt, Homo sapiens
  misc_RNA (1)...(19): siRNA sense strand
ugcagucaguggagaauug

SEQ ID NO: 878407 - RNA, 19 nt, Homo sapiens
  misc_RNA (1)...(19): siRNA sense strand
gcaguuugaugaaaagugu

SEQ ID NO: 878408 - RNA, 19 nt, Homo sapiens
  misc_RNA (1)...(19): siRNA sense strand
uggcugugcuggaggaaau

SEQ ID NO: 878409 - RNA, 19 nt, Homo sapiens
  misc_RNA (1)...(19): siRNA sense strand
ugagaagagcuugcaguuu

SEQ ID NO: 878410 - RNA, 19 nt, Homo sapiens
  misc_RNA (1)...(19): siRNA sense strand
ggaggcaaacccacucauc

SEQ ID NO: 878411 - RNA, 19 nt, Homo sapiens
  misc_RNA (1)...(19): siRNA sense strand
guauguacaaaucuucuga

SEQ ID NO: 878412 - RNA, 19 nt, Homo sapiens
  misc_RNA (1)...(19): siRNA sense strand
gaggcaaacccacucaucu

SEQ ID NO: 878413 - RNA, 19 nt, Homo sapiens
  misc_RNA (1)...(19): siRNA sense strand
gcgaguaugagaagagcuu

SEQ ID NO: 878414 - RNA, 19 nt, Homo sapiens
  misc_RNA (1)...(19): siRNA sense strand
ggcaaacccacucaucugu

SEQ ID NO: 878415 - RNA, 19 nt, Homo sapiens
  misc_RNA (1)...(19): siRNA sense strand
gaaaagugucucagcauca

SEQ ID NO: 878416 - RNA, 19 nt, Homo sapiens
  misc_RNA (1)...(19): siRNA sense strand
caucagcgaguaugagaag

SEQ ID NO: 878417 - RNA, 19 nt, Homo sapiens
  misc_RNA (1)...(19): siRNA sense strand
acaggcuccuaaacaggua

SEQ ID NO: 878418 - RNA, 19 nt, Homo sapiens
  misc_RNA (1)...(19): siRNA sense strand
agaauuguccagaagacuu

SEQ ID NO: 878419 - RNA, 19 nt, Homo sapiens
  misc_RNA (1)...(19): siRNA sense strand
gauggaagaagaguggaau

SEQ ID NO: 878420 - RNA, 19 nt, Homo sapiens
  misc_RNA (1)...(19): siRNA sense strand
ggaagaagaguggaaugcu

SEQ ID NO: 878421 - RNA, 19 nt, Homo sapiens
  misc_RNA (1)...(19): siRNA sense strand
acagcuuucuaguucaaga

SEQ ID NO: 878422 - RNA, 19 nt, Homo sapiens
  misc_RNA (1)...(19): siRNA sense strand
gaagagcuugcaguuugau

SEQ ID NO: 878423 - RNA, 19 nt, Homo sapiens
  misc_RNA (1)...(19): siRNA sense strand
cgggacaggcuccuaaaca

SEQ ID NO: 878424 - RNA, 19 nt, Homo sapiens
  misc_RNA (1)...(19): siRNA sense strand
ggucaccgcucgcuacugu

SEQ ID NO: 878425 - RNA, 19 nt, Homo sapiens
  misc_RNA (1)...(19): siRNA sense strand
ggagcaguauggccagugu

SEQ ID NO: 878426 - RNA, 19 nt, Homo sapiens
  misc_RNA (1)...(19): siRNA sense strand
gacugucacuaccuuaaga

SEQ ID NO: 878427 - RNA, 19 nt, Homo sapiens
  misc_RNA (1)...(19): siRNA sense strand
gggcaacugugcagagcau

SEQ ID NO: 878428 - RNA, 19 nt, Homo sapiens
  misc_RNA (1)...(19): siRNA sense strand
gcacauccucccacccaau

SEQ ID NO: 878429 - RNA, 19 nt, Homo sapiens
  misc_RNA (1)...(19): siRNA sense strand
gcaacugugcagagcauau

SEQ ID NO: 878430 - RNA, 19 nt, Homo sapiens
  misc_RNA (1)...(19): siRNA sense strand
gggacugucacuaccuuaa

SEQ ID NO: 878431 - RNA, 19 nt, Homo sapiens
  misc_RNA (1)...(19): siRNA sense strand
gcgggacugucacuaccuu

SEQ ID NO: 878432 - RNA, 19 nt, Homo sapiens
  misc_RNA (1)...(19): siRNA sense strand
ggacugucacuaccuuaag

SEQ ID NO: 878433 - RNA, 19 nt, Homo sapiens
  misc_RNA (1)...(19): siRNA sense strand
caacugugcagagcauaug

SEQ ID NO: 878434 - RNA, 19 nt, Homo sapiens
  misc_RNA (1)...(19): siRNA sense strand
gucacuaccuuaagaugag

SEQ ID NO: 878435 - RNA, 19 nt, Homo sapiens
  misc_RNA (1)...(19): siRNA sense strand
gcagcgggacugucacuac

SEQ ID NO: 878436 - RNA, 19 nt, Homo sapiens
  misc_RNA (1)...(19): siRNA sense strand
uaccuuaagaugagcauug

SEQ ID NO: 878437 - RNA, 19 nt, Homo sapiens
  misc_RNA (1)...(19): siRNA sense strand
ugucacuaccuuaagauga

SEQ ID NO: 878438 - RNA, 19 nt, Homo sapiens
  misc_RNA (1)...(19): siRNA sense strand
gagagacaauccugacuuu

SEQ ID NO: 878439 - RNA, 19 nt, Homo sapiens
  misc_RNA (1)...(19): siRNA sense strand
ggacauugaucuaaaggau

SEQ ID NO: 878440 - RNA, 19 nt, Homo sapiens
  misc_RNA (1)...(19): siRNA sense strand
cuacagugcugcuucauug

SEQ ID NO: 878441 - RNA, 19 nt, Homo sapiens
  misc_RNA (1)...(19): siRNA sense strand
gauauuugguucacuaaca

SEQ ID NO: 878442 - RNA, 19 nt, Homo sapiens
  misc_RNA (1)...(19): siRNA sense strand
guuagugggugaagaauuc

SEQ ID NO: 878443 - RNA, 19 nt, Homo sapiens
  misc_RNA (1)...(19): siRNA sense strand
caaagaaucuacagcuacu

SEQ ID NO: 878444 - RNA, 19 nt, Homo sapiens
  misc_RNA (1)...(19): siRNA sense strand
guuauauacugguguguga

SEQ ID NO: 878445 - RNA, 19 nt, Homo sapiens
  misc_RNA (1)...(19): siRNA sense strand
aaaagccucuucugauuua

SEQ ID NO: 878446 - RNA, 19 nt, Homo sapiens
  misc_RNA (1)...(19): siRNA sense strand
gaagauaacaagccacucu

SEQ ID NO: 878447 - RNA, 19 nt, Homo sapiens
  misc_RNA (1)...(19): siRNA sense strand
cagugcugcuucauuguua

SEQ ID NO: 878448 - RNA, 19 nt, Homo sapiens
  misc_RNA (1)...(19): siRNA sense strand
gaauuggacauugaucuaa

SEQ ID NO: 878449 - RNA, 19 nt, Homo sapiens
  misc_RNA (1)...(19): siRNA sense strand
uggaagaauuggacauuga

SEQ ID NO: 878450 - RNA, 19 nt, Homo sapiens
  misc_RNA (1)...(19): siRNA sense strand
aggguggucucauggauua

SEQ ID NO: 878451 - RNA, 19 nt, Homo sapiens
  misc_RNA (1)...(19): siRNA sense strand
guggagaaguugcauaugg

SEQ ID NO: 878452 - RNA, 19 nt, Homo sapiens
  misc_RNA (1)...(19): siRNA sense strand
ugaagaugaugauccugaa

SEQ ID NO: 878453 - RNA, 19 nt, Homo sapiens
  misc_RNA (1)...(19): siRNA sense strand
gaagaucucagugguucaa

SEQ ID NO: 878454 - RNA, 19 nt, Homo sapiens
  misc_RNA (1)...(19): siRNA sense strand
gacauugaucuaaaggaua

SEQ ID NO: 878455 - RNA, 19 nt, Homo sapiens
  misc_RNA (1)...(19): siRNA sense strand
gaugaugauccugaagaua

SEQ ID NO: 878456 - RNA, 19 nt, Homo sapiens
  misc_RNA (1)...(19): siRNA sense strand
gaucucagugguucaauag

SEQ ID NO: 878457 - RNA, 19 nt, Homo sapiens
  misc_RNA (1)...(19): siRNA sense strand
ggaagaauuggacauugau

SEQ ID NO: 878458 - RNA, 19 nt, Homo sapiens
  misc_RNA (1)...(19): siRNA sense strand
augaugauccugaagauaa

SEQ ID NO: 878459 - RNA, 19 nt, Homo sapiens
  misc_RNA (1)...(19): siRNA sense strand
agaucucagugguucaaua

SEQ ID NO: 878460 - RNA, 19 nt, Homo sapiens
  misc_RNA (1)...(19): siRNA sense strand
guggucucauggauuauaa

SEQ ID NO: 878461 - RNA, 19 nt, Homo sapiens
  misc_RNA (1)...(19): siRNA sense strand
ccagaugucaaauuaaauc

SEQ ID NO: 878462 - RNA, 19 nt, Homo sapiens
  misc_RNA (1)...(19): siRNA sense strand
ggaguuauaggauauucau

SEQ ID NO: 878463 - RNA, 19 nt, Homo sapiens
  misc_RNA (1)...(19): siRNA sense strand
auagacaaguggugagaga

SEQ ID NO: 878464 - RNA, 19 nt, Homo sapiens
  misc_RNA (1)...(19): siRNA sense strand
gugguuggaucauuugaag

SEQ ID NO: 878465 - RNA, 19 nt, Homo sapiens
  misc_RNA (1)...(19): siRNA sense strand
gacaaguggugagagacaa

SEQ ID NO: 878466 - RNA, 19 nt, Homo sapiens
  misc_RNA (1)...(19): siRNA sense strand
ggaaguugaagaugaugau

SEQ ID NO: 878467 - RNA, 19 nt, Homo sapiens
  misc_RNA (1)...(19): siRNA sense strand
agaauuggacauugaucua

SEQ ID NO: 878468 - RNA, 19 nt, Homo sapiens
  misc_RNA (1)...(19): siRNA sense strand
cuacuacauuucugagaca

SEQ ID NO: 878469 - RNA, 19 nt, Homo sapiens
  misc_RNA (1)...(19): siRNA sense strand
uuggauauuugguucacua

SEQ ID NO: 878470 - RNA, 19 nt, Homo sapiens
  misc_RNA (1)...(19): siRNA sense strand
cuacauuucugagacaaag

SEQ ID NO: 878471 - RNA, 19 nt, Homo sapiens
  misc_RNA (1)...(19): siRNA sense strand
gguggucucauggauuaua

SEQ ID NO: 878472 - RNA, 19 nt, Homo sapiens
  misc_RNA (1)...(19): siRNA sense strand
gagacaauccugacuuuug

SEQ ID NO: 878473 - RNA, 19 nt, Homo sapiens
  misc_RNA (1)...(19): siRNA sense strand
ucucagugguucaauagca

SEQ ID NO: 878474 - RNA, 19 nt, Homo sapiens
  misc_RNA (1)...(19): siRNA sense strand
cauuugaaguggugucuac

SEQ ID NO: 878475 - RNA, 19 nt, Homo sapiens
  misc_RNA (1)...(19): siRNA sense strand
gguuggaucauuugaagug

SEQ ID NO: 878476 - RNA, 19 nt, Homo sapiens
  misc_RNA (1)...(19): siRNA sense strand
uuuggugguuggaucauuu

SEQ ID NO: 878477 - RNA, 19 nt, Homo sapiens
  misc_RNA (1)...(19): siRNA sense strand
uacaaaauccgauguguuu

SEQ ID NO: 878478 - RNA, 19 nt, Homo sapiens
  misc_RNA (1)...(19): siRNA sense strand
gaagaauuggacauugauc

SEQ ID NO: 878479 - RNA, 19 nt, Homo sapiens
  misc_RNA (1)...(19): siRNA sense strand
guggagauuuuaucaaaga

SEQ ID NO: 878480 - RNA, 19 nt, Homo sapiens
  misc_RNA (1)...(19): siRNA sense strand
ccuuggaguuauaggauau

SEQ ID NO: 878481 - RNA, 19 nt, Homo sapiens
  misc_RNA (1)...(19): siRNA sense strand
gaaucuacagcuacuacau

SEQ ID NO: 878482 - RNA, 19 nt, Homo sapiens
  misc_RNA (1)...(19): siRNA sense strand
aaucuacagcuacuacauu

SEQ ID NO: 878483 - RNA, 19 nt, Homo sapiens
  misc_RNA (1)...(19): siRNA sense strand
ucuggaaguugaagaugau

SEQ ID NO: 878484 - RNA, 19 nt, Homo sapiens
  misc_RNA (1)...(19): siRNA sense strand
guucuuuucuuuuccauga

SEQ ID NO: 878485 - RNA, 19 nt, Homo sapiens
  misc_RNA (1)...(19): siRNA sense strand
ccccagaugucaaauuaaa

SEQ ID NO: 878486 - RNA, 19 nt, Homo sapiens
  misc_RNA (1)...(19): siRNA sense strand
cagcagacgcggaagaucu

SEQ ID NO: 878487 - RNA, 19 nt, Homo sapiens
  misc_RNA (1)...(19): siRNA sense strand
cuacagcuacuacauuucu

SEQ ID NO: 878488 - RNA, 19 nt, Homo sapiens
  misc_RNA (1)...(19): siRNA sense strand
ugagagacaauccugacuu

SEQ ID NO: 878489 - RNA, 19 nt, Homo sapiens
  misc_RNA (1)...(19): siRNA sense strand
gaagaugaugauccugaag

SEQ ID NO: 878490 - RNA, 19 nt, Homo sapiens
  misc_RNA (1)...(19): siRNA sense strand
gaagaauucaagaccaaaa

SEQ ID NO: 878491 - RNA, 19 nt, Homo sapiens
  misc_RNA (1)...(19): siRNA sense strand
uucauuacuuccucucauu

SEQ ID NO: 878492 - RNA, 19 nt, Homo sapiens
  misc_RNA (1)...(19): siRNA sense strand
aucuacagcuacuacauuu

SEQ ID NO: 878493 - RNA, 19 nt, Homo sapiens
  misc_RNA (1)...(19): siRNA sense strand
aucaaagaaucuacagcua

SEQ ID NO: 878494 - RNA, 19 nt, Homo sapiens
  misc_RNA (1)...(19): siRNA sense strand
agaugaugauccugaagau

SEQ ID NO: 878495 - RNA, 19 nt, Homo sapiens
  misc_RNA (1)...(19): siRNA sense strand
guaauagccccuguacuuu

SEQ ID NO: 878496 - RNA, 19 nt, Homo sapiens
  misc_RNA (1)...(19): siRNA sense strand
uaacggggacuucaccuuu

SEQ ID NO: 878497 - RNA, 19 nt, Homo sapiens
  misc_RNA (1)...(19): siRNA sense strand
aagaugaugauccugaaga

SEQ ID NO: 878498 - RNA, 19 nt, Homo sapiens
  misc_RNA (1)...(19): siRNA sense strand
uguaauagccccuguacuu

SEQ ID NO: 878499 - RNA, 19 nt, Homo sapiens
  misc_RNA (1)...(19): siRNA sense strand
auuacuuccucucauugua

SEQ ID NO: 878500 - RNA, 19 nt, Homo sapiens
  misc_RNA (1)...(19): siRNA sense strand
uaauagacaaguggugaga

SEQ ID NO: 878501 - RNA, 19 nt, Homo sapiens
  misc_RNA (1)...(19): siRNA sense strand
gcggaagaucucagugguu

SEQ ID NO: 878502 - RNA, 19 nt, Homo sapiens
  misc_RNA (1)...(19): siRNA sense strand
ggauuauaaccauuuggau

SEQ ID NO: 878503 - RNA, 19 nt, Homo sapiens
  misc_RNA (1)...(19): siRNA sense strand
uaauagccccuguacuuuu

SEQ ID NO: 878504 - RNA, 19 nt, Homo sapiens
  misc_RNA (1)...(19): siRNA sense strand
ggaaggacauucuuguauu

SEQ ID NO: 878505 - RNA, 19 nt, Homo sapiens
  misc_RNA (1)...(19): siRNA sense strand
gcaugcaggucauacguua

SEQ ID NO: 878506 - RNA, 19 nt, Homo sapiens
  misc_RNA (1)...(19): siRNA sense strand
gcaaauccacucucuuuaa

SEQ ID NO: 878507 - RNA, 19 nt, Homo sapiens
  misc_RNA (1)...(19): siRNA sense strand
gaagaagaaaggaaagaua

SEQ ID NO: 878508 - RNA, 19 nt, Homo sapiens
  misc_RNA (1)...(19): siRNA sense strand
gaaagaugcccacugguuu

SEQ ID NO: 878509 - RNA, 19 nt, Homo sapiens
  misc_RNA (1)...(19): siRNA sense strand
gacgcgagcuuccuuauga

SEQ ID NO: 878510 - RNA, 19 nt, Homo sapiens
  misc_RNA (1)...(19): siRNA sense strand
gaaggacauucuuguauuc

SEQ ID NO: 878511 - RNA, 19 nt, Homo sapiens
  misc_RNA (1)...(19): siRNA sense strand
cagaagaacagaaggauaa

SEQ ID NO: 878512 - RNA, 19 nt, Homo sapiens
  misc_RNA (1)...(19): siRNA sense strand
uaacauucccuuugaguuu

SEQ ID NO: 878513 - RNA, 19 nt, Homo sapiens
  misc_RNA (1)...(19): siRNA sense strand
caacccaacuccuuacaga

SEQ ID NO: 878514 - RNA, 19 nt, Homo sapiens
  misc_RNA (1)...(19): siRNA sense strand
gaacagaaggauaacauuc

SEQ ID NO: 878515 - RNA, 19 nt, Homo sapiens
  misc_RNA (1)...(19): siRNA sense strand
ggacauucuuguauucaga

SEQ ID NO: 878516 - RNA, 19 nt, Homo sapiens
  misc_RNA (1)...(19): siRNA sense strand
caaauccaccaaacaagua

SEQ ID NO: 878517 - RNA, 19 nt, Homo sapiens
  misc_RNA (1)...(19): siRNA sense strand
agaauugacugcacaagau

SEQ ID NO: 878518 - RNA, 19 nt, Homo sapiens
  misc_RNA (1)...(19): siRNA sense strand
gcuauggaguggaagaguu

SEQ ID NO: 878519 - RNA, 19 nt, Homo sapiens
  misc_RNA (1)...(19): siRNA sense strand
gaaaucagucagcuugguu

SEQ ID NO: 878520 - RNA, 19 nt, Homo sapiens
  misc_RNA (1)...(19): siRNA sense strand
caaauccacucucuuuaac

SEQ ID NO: 878521 - RNA, 19 nt, Homo sapiens
  misc_RNA (1)...(19): siRNA sense strand
cggcaaauccacucucuuu

SEQ ID NO: 878522 - RNA, 19 nt, Homo sapiens
  misc_RNA (1)...(19): siRNA sense strand
caacucaagcugaagaaga

SEQ ID NO: 878523 - RNA, 19 nt, Homo sapiens
  misc_RNA (1)...(19): siRNA sense strand
acacaaauccaccaaacaa

SEQ ID NO: 878524 - RNA, 19 nt, Homo sapiens
  misc_RNA (1)...(19): siRNA sense strand
aggauaacauucccuuuga

SEQ ID NO: 878525 - RNA, 19 nt, Homo sapiens
  misc_RNA (1)...(19): siRNA sense strand
ggacagcgcaucaagaaaa

SEQ ID NO: 878526 - RNA, 19 nt, Homo sapiens
  misc_RNA (1)...(19): siRNA sense strand
ggaaaucagucagcuuggu

SEQ ID NO: 878527 - RNA, 19 nt, Homo sapiens
  misc_RNA (1)...(19): siRNA sense strand
ugaaagaugcccacugguu

SEQ ID NO: 878528 - RNA, 19 nt, Homo sapiens
  misc_RNA (1)...(19): siRNA sense strand
cugauucacuugccuuuga

SEQ ID NO: 878529 - RNA, 19 nt, Homo sapiens
  misc_RNA (1)...(19): siRNA sense strand
aaagcaugguuaugucgua

SEQ ID NO: 878530 - RNA, 19 nt, Homo sapiens
  misc_RNA (1)...(19): siRNA sense strand
agaaaaguguggccuauaa

SEQ ID NO: 878531 - RNA, 19 nt, Homo sapiens
  misc_RNA (1)...(19): siRNA sense strand
gcagguuggguuucaguaa

SEQ ID NO: 878532 - RNA, 19 nt, Homo sapiens
  misc_RNA (1)...(19): siRNA sense strand
gaacgaauggcaggauuuc

SEQ ID NO: 878533 - RNA, 19 nt, Homo sapiens
  misc_RNA (1)...(19): siRNA sense strand
uggagaagguggugacaug

SEQ ID NO: 878534 - RNA, 19 nt, Homo sapiens
  misc_RNA (1)...(19): siRNA sense strand
gaccggcuauggaguggaa

SEQ ID NO: 878535 - RNA, 19 nt, Homo sapiens
  misc_RNA (1)...(19): siRNA sense strand
caccaaacaaguagaauug

SEQ ID NO: 878536 - RNA, 19 nt, Homo sapiens
  misc_RNA (1)...(19): siRNA sense strand
gaacaaaaucagcuuaaug

SEQ ID NO: 878537 - RNA, 19 nt, Homo sapiens
  misc_RNA (1)...(19): siRNA sense strand
gaggagcggcgacagcaaa

SEQ ID NO: 878538 - RNA, 19 nt, Homo sapiens
  misc_RNA (1)...(19): siRNA sense strand
ggcaaauccacucucuuua

SEQ ID NO: 878539 - RNA, 19 nt, Homo sapiens
  misc_RNA (1)...(19): siRNA sense strand
ugaguuugaugcugauuca

SEQ ID NO: 878540 - RNA, 19 nt, Homo sapiens
  misc_RNA (1)...(19): siRNA sense strand
gcaugguuaugucguagga

SEQ ID NO: 878541 - RNA, 19 nt, Homo sapiens
  misc_RNA (1)...(19): siRNA sense strand
ggccagguacuacauuaaa

SEQ ID NO: 878542 - RNA, 19 nt, Homo sapiens
  misc_RNA (1)...(19): siRNA sense strand
cuauacaccugaaggaaca

SEQ ID NO: 878543 - RNA, 19 nt, Homo sapiens
  misc_RNA (1)...(19): siRNA sense strand
ucagucagcuugguuuaca

SEQ ID NO: 878544 - RNA, 19 nt, Homo sapiens
  misc_RNA (1)...(19): siRNA sense strand
caagaacuuuugugcuuaa

SEQ ID NO: 878545 - RNA, 19 nt, Homo sapiens
  misc_RNA (1)...(19): siRNA sense strand
ccaccaaacaaguagaauu

SEQ ID NO: 878546 - RNA, 19 nt, Homo sapiens
  misc_RNA (1)...(19): siRNA sense strand
ggaagaagaaaggaaagau

SEQ ID NO: 878547 - RNA, 19 nt, Homo sapiens
  misc_RNA (1)...(19): siRNA sense strand
ugaggaagaagaaaggaaa

SEQ ID NO: 878548 - RNA, 19 nt, Homo sapiens
  misc_RNA (1)...(19): siRNA sense strand
ggauaacauucccuuugag

SEQ ID NO: 878549 - RNA, 19 nt, Homo sapiens
  misc_RNA (1)...(19): siRNA sense strand
ggagggcuuuggagaaggu

SEQ ID NO: 878550 - RNA, 19 nt, Homo sapiens
  misc_RNA (1)...(19): siRNA sense strand
gaauugacugcacaagaug

SEQ ID NO: 878551 - RNA, 19 nt, Homo sapiens
  misc_RNA (1)...(19): siRNA sense strand
uaaaaggcaucaaagacuu

SEQ ID NO: 878552 - RNA, 19 nt, Homo sapiens
  misc_RNA (1)...(19): siRNA sense strand
ugcaggagcuccagcaaca

SEQ ID NO: 878553 - RNA, 19 nt, Homo sapiens
  misc_RNA (1)...(19): siRNA sense strand
ccaagaacuuuugugcuua

SEQ ID NO: 878554 - RNA, 19 nt, Homo sapiens
  misc_RNA (1)...(19): siRNA sense strand
acacacaaauccaccaaac

SEQ ID NO: 878555 - RNA, 19 nt, Homo sapiens
  misc_RNA (1)...(19): siRNA sense strand
gauaacauucccuuugagu

SEQ ID NO: 878556 - RNA, 19 nt, Homo sapiens
  misc_RNA (1)...(19): siRNA sense strand
ucagaagaacagaaggaua

SEQ ID NO: 878557 - RNA, 19 nt, Homo sapiens
  misc_RNA (1)...(19): siRNA sense strand
ggacacggagggcuuugga

SEQ ID NO: 878558 - RNA, 19 nt, Homo sapiens
  misc_RNA (1)...(19): siRNA sense strand
ggguuucaguaacaccuaa

SEQ ID NO: 878559 - RNA, 19 nt, Homo sapiens
  misc_RNA (1)...(19): siRNA sense strand
ccaaacaaguagaauugac

SEQ ID NO: 878560 - RNA, 19 nt, Homo sapiens
  misc_RNA (1)...(19): siRNA sense strand
gaaaaugacccuguuaugg

SEQ ID NO: 878561 - RNA, 19 nt, Homo sapiens
  misc_RNA (1)...(19): siRNA sense strand
agucguggcuuccaacauc

SEQ ID NO: 878562 - RNA, 19 nt, Homo sapiens
  misc_RNA (1)...(19): siRNA sense strand
ggacgcgagcuuccuuaug

SEQ ID NO: 878563 - RNA, 19 nt, Homo sapiens
  misc_RNA (1)...(19): siRNA sense strand
aagaacgaauggcaggauu

SEQ ID NO: 878564 - RNA, 19 nt, Homo sapiens
  misc_RNA (1)...(19): siRNA sense strand
caaaggacagcgcaucaag

SEQ ID NO: 878565 - RNA, 19 nt, Homo sapiens
  misc_RNA (1)...(19): siRNA sense strand
ccaacuccuuacagaaugu

SEQ ID NO: 878566 - RNA, 19 nt, Homo sapiens
  misc_RNA (1)...(19): siRNA sense strand
aaggacagcgcaucaagaa

SEQ ID NO: 878567 - RNA, 19 nt, Homo sapiens
  misc_RNA (1)...(19): siRNA sense strand
uguuauggguacacacaaa

SEQ ID NO: 878568 - RNA, 19 nt, Homo sapiens
  misc_RNA (1)...(19): siRNA sense strand
gaucgugcugggaaacaaa

SEQ ID NO: 878569 - RNA, 19 nt, Homo sapiens
  misc_RNA (1)...(19): siRNA sense strand
ggauuuccuccucuuguug

SEQ ID NO: 878570 - RNA, 19 nt, Homo sapiens
  misc_RNA (1)...(19): siRNA sense strand
uagaauugacugcacaaga

SEQ ID NO: 878571 - RNA, 19 nt, Homo sapiens
  misc_RNA (1)...(19): siRNA sense strand
ucagcuuaauguccucaaa

SEQ ID NO: 878572 - RNA, 19 nt, Homo sapiens
  misc_RNA (1)...(19): siRNA sense strand
ugaaguuuccuauuugcaa

SEQ ID NO: 878573 - RNA, 19 nt, Homo sapiens
  misc_RNA (1)...(19): siRNA sense strand
guacuacauuaaaccuucu

SEQ ID NO: 878574 - RNA, 19 nt, Homo sapiens
  misc_RNA (1)...(19): siRNA sense strand
cuccuucccuuauguacaa

SEQ ID NO: 878575 - RNA, 19 nt, Homo sapiens
  misc_RNA (1)...(19): siRNA sense strand
guuugaugcugauucacuu

SEQ ID NO: 878576 - RNA, 19 nt, Homo sapiens
  misc_RNA (1)...(19): siRNA sense strand
gaagaacagaaggauaaca

SEQ ID NO: 878577 - RNA, 19 nt, Homo sapiens
  misc_RNA (1)...(19): siRNA sense strand
uggaaggacauucuuguau

SEQ ID NO: 878578 - RNA, 19 nt, Homo sapiens
  misc_RNA (1)...(19): siRNA sense strand
guaggaagaguuggaagga

SEQ ID NO: 878579 - RNA, 19 nt, Homo sapiens
  misc_RNA (1)...(19): siRNA sense strand
gcaggagcguuuucuguuc

SEQ ID NO: 878580 - RNA, 19 nt, Homo sapiens
  misc_RNA (1)...(19): siRNA sense strand
gaaaaguguggccuauaaa

SEQ ID NO: 878581 - RNA, 19 nt, Homo sapiens
  misc_RNA (1)...(19): siRNA sense strand
caagaaaaguguggccuau

SEQ ID NO: 878582 - RNA, 19 nt, Homo sapiens
  misc_RNA (1)...(19): siRNA sense strand
ggaaaaugacccuguuaug

SEQ ID NO: 878583 - RNA, 19 nt, Homo sapiens
  misc_RNA (1)...(19): siRNA sense strand
uuggccagguacuacauua

SEQ ID NO: 878584 - RNA, 19 nt, Homo sapiens
  misc_RNA (1)...(19): siRNA sense strand
uuacagucguggcuuccaa

SEQ ID NO: 878585 - RNA, 19 nt, Homo sapiens
  misc_RNA (1)...(19): siRNA sense strand
acaaauccaccaaacaagu

SEQ ID NO: 878586 - RNA, 19 nt, Homo sapiens
  misc_RNA (1)...(19): siRNA sense strand
aacucaagcugaagaagau

SEQ ID NO: 878587 - RNA, 19 nt, Homo sapiens
  misc_RNA (1)...(19): siRNA sense strand
uguacaacgugaggaagaa

SEQ ID NO: 878588 - RNA, 19 nt, Homo sapiens
  misc_RNA (1)...(19): siRNA sense strand
guacacacaaauccaccaa

SEQ ID NO: 878589 - RNA, 19 nt, Homo sapiens
  misc_RNA (1)...(19): siRNA sense strand
guugaucucugcccuucag

SEQ ID NO: 878590 - RNA, 19 nt, Homo sapiens
  misc_RNA (1)...(19): siRNA sense strand
caaacaaguagaauugacu

SEQ ID NO: 878591 - RNA, 19 nt, Homo sapiens
  misc_RNA (1)...(19): siRNA sense strand
aacauucccuuugaguuug

SEQ ID NO: 878592 - RNA, 19 nt, Homo sapiens
  misc_RNA (1)...(19): siRNA sense strand
cccaacuccuuacagaaug

SEQ ID NO: 878593 - RNA, 19 nt, Homo sapiens
  misc_RNA (1)...(19): siRNA sense strand
aaaggacagcgcaucaaga

SEQ ID NO: 878594 - RNA, 19 nt, Homo sapiens
  misc_RNA (1)...(19): siRNA sense strand
ucagaagcaugcaggucau

SEQ ID NO: 878595 - RNA, 19 nt, Homo sapiens
  misc_RNA (1)...(19): siRNA sense strand
aaucagucagcuugguuua

SEQ ID NO: 878596 - RNA, 19 nt, Homo sapiens
  misc_RNA (1)...(19): siRNA sense strand
gaagaguuggaaggacauu

SEQ ID NO: 878597 - RNA, 19 nt, Homo sapiens
  misc_RNA (1)...(19): siRNA sense strand
gccagguacuacauuaaac

SEQ ID NO: 878598 - RNA, 19 nt, Homo sapiens
  misc_RNA (1)...(19): siRNA sense strand
gccauauauuguuaacauc

SEQ ID NO: 878599 - RNA, 19 nt, Homo sapiens
  misc_RNA (1)...(19): siRNA sense strand
caacauccucccugugcau

SEQ ID NO: 878600 - RNA, 19 nt, Homo sapiens
  misc_RNA (1)...(19): siRNA sense strand
gagaagguggugacaugca

SEQ ID NO: 878601 - RNA, 19 nt, Homo sapiens
  misc_RNA (1)...(19): siRNA sense strand
agaacgaauggcaggauuu

SEQ ID NO: 878602 - RNA, 19 nt, Homo sapiens
  misc_RNA (1)...(19): siRNA sense strand
caacgugaggaagaagaaa

SEQ ID NO: 878603 - RNA, 19 nt, Homo sapiens
  misc_RNA (1)...(19): siRNA sense strand
cagguuggguuucaguaac

SEQ ID NO: 878604 - RNA, 19 nt, Homo sapiens
  misc_RNA (1)...(19): siRNA sense strand
gaaugcagcuagaacagaa

SEQ ID NO: 878605 - RNA, 19 nt, Homo sapiens
  misc_RNA (1)...(19): siRNA sense strand
gggaagagggcaccaagua

SEQ ID NO: 878606 - RNA, 19 nt, Homo sapiens
  misc_RNA (1)...(19): siRNA sense strand
ugaagucgaucuuggagaa

SEQ ID NO: 878607 - RNA, 19 nt, Homo sapiens
  misc_RNA (1)...(19): siRNA sense strand
gaaacuauaaucugcuuug

SEQ ID NO: 878608 - RNA, 19 nt, Homo sapiens
  misc_RNA (1)...(19): siRNA sense strand
cgugacaccuggacucuuu

SEQ ID NO: 878609 - RNA, 19 nt, Homo sapiens
  misc_RNA (1)...(19): siRNA sense strand
gcaccaaguacaagucuuu

SEQ ID NO: 878610 - RNA, 19 nt, Homo sapiens
  misc_RNA (1)...(19): siRNA sense strand
acuauaaucugcuuugcua

SEQ ID NO: 878611 - RNA, 19 nt, Homo sapiens
  misc_RNA (1)...(19): siRNA sense strand
ccaaagagcaauuuaaugg

SEQ ID NO: 878612 - RNA, 19 nt, Homo sapiens
  misc_RNA (1)...(19): siRNA sense strand
gaaagagggaccaaaguca

SEQ ID NO: 878613 - RNA, 19 nt, Homo sapiens
  misc_RNA (1)...(19): siRNA sense strand
ccauuguguugucuacuua

SEQ ID NO: 878614 - RNA, 19 nt, Homo sapiens
  misc_RNA (1)...(19): siRNA sense strand
guugucuacuuaugaguua

SEQ ID NO: 878615 - RNA, 19 nt, Homo sapiens
  misc_RNA (1)...(19): siRNA sense strand
gcucuaagcagaugaauac

SEQ ID NO: 878616 - RNA, 19 nt, Homo sapiens
  misc_RNA (1)...(19): siRNA sense strand
ccagugugcucguuacguu

SEQ ID NO: 878617 - RNA, 19 nt, Homo sapiens
  misc_RNA (1)...(19): siRNA sense strand
gaagagggcaccaaguaca

SEQ ID NO: 878618 - RNA, 19 nt, Homo sapiens
  misc_RNA (1)...(19): siRNA sense strand
ucugaaagaagcuccauua

SEQ ID NO: 878619 - RNA, 19 nt, Homo sapiens
  misc_RNA (1)...(19): siRNA sense strand
aucaagggcuguauacuuu

SEQ ID NO: 878620 - RNA, 19 nt, Homo sapiens
  misc_RNA (1)...(19): siRNA sense strand
uggcuucuauagaggauua

SEQ ID NO: 878621 - RNA, 19 nt, Homo sapiens
  misc_RNA (1)...(19): siRNA sense strand
cuguauacuuugcauguua

SEQ ID NO: 878622 - RNA, 19 nt, Homo sapiens
  misc_RNA (1)...(19): siRNA sense strand
ggagaaagagggaccaaag

SEQ ID NO: 878623 - RNA, 19 nt, Homo sapiens
  misc_RNA (1)...(19): siRNA sense strand
uaacagcaauauugugcau

SEQ ID NO: 878624 - RNA, 19 nt, Homo sapiens
  misc_RNA (1)...(19): siRNA sense strand
caucaagggcuguauacuu

SEQ ID NO: 878625 - RNA, 19 nt, Homo sapiens
  misc_RNA (1)...(19): siRNA sense strand
aggauuaacugccucguau

SEQ ID NO: 878626 - RNA, 19 nt, Homo sapiens
  misc_RNA (1)...(19): siRNA sense strand
gccauuguguugucuacuu

SEQ ID NO: 878627 - RNA, 19 nt, Homo sapiens
  misc_RNA (1)...(19): siRNA sense strand
gaucccaaauacugccauu

SEQ ID NO: 878628 - RNA, 19 nt, Homo sapiens
  misc_RNA (1)...(19): siRNA sense strand
guuaauuguguaccuguua

SEQ ID NO: 878629 - RNA, 19 nt, Homo sapiens
  misc_RNA (1)...(19): siRNA sense strand
caaauacugccauuguguu

SEQ ID NO: 878630 - RNA, 19 nt, Homo sapiens
  misc_RNA (1)...(19): siRNA sense strand
ccauuagccucuucugcaa

SEQ ID NO: 878631 - RNA, 19 nt, Homo sapiens
  misc_RNA (1)...(19): siRNA sense strand
ccacuagaagucauuaaga

SEQ ID NO: 878632 - RNA, 19 nt, Homo sapiens
  misc_RNA (1)...(19): siRNA sense strand
gguuggaguugcaccauca

SEQ ID NO: 878633 - RNA, 19 nt, Homo sapiens
  misc_RNA (1)...(19): siRNA sense strand
cuaagcagaugaauacacu

SEQ ID NO: 878634 - RNA, 19 nt, Homo sapiens
  misc_RNA (1)...(19): siRNA sense strand
cuuaaugaauccuauaugg

SEQ ID NO: 878635 - RNA, 19 nt, Homo sapiens
  misc_RNA (1)...(19): siRNA sense strand
gugccuaacagcaauauug

SEQ ID NO: 878636 - RNA, 19 nt, Homo sapiens
  misc_RNA (1)...(19): siRNA sense strand
gagaaagagggaccaaagu

SEQ ID NO: 878637 - RNA, 19 nt, Homo sapiens
  misc_RNA (1)...(19): siRNA sense strand
ccaaauacugccauugugu

SEQ ID NO: 878638 - RNA, 19 nt, Homo sapiens
  misc_RNA (1)...(19): siRNA sense strand
cggcagaucccaaauacug

SEQ ID NO: 878639 - RNA, 19 nt, Homo sapiens
  misc_RNA (1)...(19): siRNA sense strand
ggacuguuugcccagcuua

SEQ ID NO: 878640 - RNA, 19 nt, Homo sapiens
  misc_RNA (1)...(19): siRNA sense strand
caaagccaaagagcaauuu

SEQ ID NO: 878641 - RNA, 19 nt, Homo sapiens
  misc_RNA (1)...(19): siRNA sense strand
gcuguauacuuugcauguu

SEQ ID NO: 878642 - RNA, 19 nt, Homo sapiens
  misc_RNA (1)...(19): siRNA sense strand
gauuagcucuccggacagu

SEQ ID NO: 878643 - RNA, 19 nt, Homo sapiens
  misc_RNA (1)...(19): siRNA sense strand
ggaagagggcaccaaguac

SEQ ID NO: 878644 - RNA, 19 nt, Homo sapiens
  misc_RNA (1)...(19): siRNA sense strand
ccgaaacuauaaucugcuu

SEQ ID NO: 878645 - RNA, 19 nt, Homo sapiens
  misc_RNA (1)...(19): siRNA sense strand
ccaaagccaaagagcaauu

SEQ ID NO: 878646 - RNA, 19 nt, Homo sapiens
  misc_RNA (1)...(19): siRNA sense strand
gccaaagagcaauuuaaug

SEQ ID NO: 878647 - RNA, 19 nt, Homo sapiens
  misc_RNA (1)...(19): siRNA sense strand
ggcugugccuccugcauug

SEQ ID NO: 878648 - RNA, 19 nt, Homo sapiens
  misc_RNA (1)...(19): siRNA sense strand
cugcuuugcuauuuaugaa

SEQ ID NO: 878649 - RNA, 19 nt, Homo sapiens
  misc_RNA (1)...(19): siRNA sense strand
gaagcuccauuagccucuu

SEQ ID NO: 878650 - RNA, 19 nt, Homo sapiens
  misc_RNA (1)...(19): siRNA sense strand
gggcugugccuccugcauu

SEQ ID NO: 878651 - RNA, 19 nt, Homo sapiens
  misc_RNA (1)...(19): siRNA sense strand
gcagcuagaacagaaagug

SEQ ID NO: 878652 - RNA, 19 nt, Homo sapiens
  misc_RNA (1)...(19): siRNA sense strand
uuguguaccuguuagaaga

SEQ ID NO: 878653 - RNA, 19 nt, Homo sapiens
  misc_RNA (1)...(19): siRNA sense strand
gaagucgaucuuggagaaa

SEQ ID NO: 878654 - RNA, 19 nt, Homo sapiens
  misc_RNA (1)...(19): siRNA sense strand
caagggcuguauacuuugc

SEQ ID NO: 878655 - RNA, 19 nt, Homo sapiens
  misc_RNA (1)...(19): siRNA sense strand
aaagccaaagagcaauuua

SEQ ID NO: 878656 - RNA, 19 nt, Homo sapiens
  misc_RNA (1)...(19): siRNA sense strand
cccaaauacugccauugug

SEQ ID NO: 878657 - RNA, 19 nt, Homo sapiens
  misc_RNA (1)...(19): siRNA sense strand
ccacacgaagucauaagga

SEQ ID NO: 878658 - RNA, 19 nt, Homo sapiens
  misc_RNA (1)...(19): siRNA sense strand
cagcuagaacagaaaguga

SEQ ID NO: 878659 - RNA, 19 nt, Homo sapiens
  misc_RNA (1)...(19): siRNA sense strand
agucuacuauccucagguu

SEQ ID NO: 878660 - RNA, 19 nt, Homo sapiens
  misc_RNA (1)...(19): siRNA sense strand
caccaucaagggcuguaua

SEQ ID NO: 878661 - RNA, 19 nt, Homo sapiens
  misc_RNA (1)...(19): siRNA sense strand
uuaauuguguaccuguuag

SEQ ID NO: 878662 - RNA, 19 nt, Homo sapiens
  misc_RNA (1)...(19): siRNA sense strand
ugaaagaagcuccauuagc

SEQ ID NO: 878663 - RNA, 19 nt, Homo sapiens
  misc_RNA (1)...(19): siRNA sense strand
auucguggcuucuauagag

SEQ ID NO: 878664 - RNA, 19 nt, Homo sapiens
  misc_RNA (1)...(19): siRNA sense strand
aagccaaagagcaauuuaa

SEQ ID NO: 878665 - RNA, 19 nt, Homo sapiens
  misc_RNA (1)...(19): siRNA sense strand
agaaagagggaccaaaguc

SEQ ID NO: 878666 - RNA, 19 nt, Homo sapiens
  misc_RNA (1)...(19): siRNA sense strand
gcaaaugggacugagaaaa

SEQ ID NO: 878667 - RNA, 19 nt, Homo sapiens
  misc_RNA (1)...(19): siRNA sense strand
ggcauucguggcuucuaua

SEQ ID NO: 878668 - RNA, 19 nt, Homo sapiens
  misc_RNA (1)...(19): siRNA sense strand
aaacccgaaugcagcuaga

SEQ ID NO: 878669 - RNA, 19 nt, Homo sapiens
  misc_RNA (1)...(19): siRNA sense strand
cacuagaagucauuaagac

SEQ ID NO: 878670 - RNA, 19 nt, Homo sapiens
  misc_RNA (1)...(19): siRNA sense strand
acacgcugcuucaccucuu

SEQ ID NO: 878671 - RNA, 19 nt, Homo sapiens
  misc_RNA (1)...(19): siRNA sense strand
aggcauucguggcuucuau

SEQ ID NO: 878672 - RNA, 19 nt, Homo sapiens
  misc_RNA (1)...(19): siRNA sense strand
cgaaugcagcuagaacaga

SEQ ID NO: 878673 - RNA, 19 nt, Homo sapiens
  misc_RNA (1)...(19): siRNA sense strand
aaauuugguuggaguugca

SEQ ID NO: 878674 - RNA, 19 nt, Homo sapiens
  misc_RNA (1)...(19): siRNA sense strand
gagaccaacauccgugaca

SEQ ID NO: 878675 - RNA, 19 nt, Homo sapiens
  misc_RNA (1)...(19): siRNA sense strand
uuagaagaccguacucagu

SEQ ID NO: 878676 - RNA, 19 nt, Homo sapiens
  misc_RNA (1)...(19): siRNA sense strand
aaauacugccauuguguug

SEQ ID NO: 878677 - RNA, 19 nt, Homo sapiens
  misc_RNA (1)...(19): siRNA sense strand
gauuaacugccucguaugc

SEQ ID NO: 878678 - RNA, 19 nt, Homo sapiens
  misc_RNA (1)...(19): siRNA sense strand
agugugcucguuacguuua

SEQ ID NO: 878679 - RNA, 19 nt, Homo sapiens
  misc_RNA (1)...(19): siRNA sense strand
auacugccauuguguuguc

SEQ ID NO: 878680 - RNA, 19 nt, Homo sapiens
  misc_RNA (1)...(19): siRNA sense strand
cuccaaagccaaagagcaa

SEQ ID NO: 878681 - RNA, 19 nt, Homo sapiens
  misc_RNA (1)...(19): siRNA sense strand
ggauuaacugccucguaug

SEQ ID NO: 878682 - RNA, 19 nt, Homo sapiens
  misc_RNA (1)...(19): siRNA sense strand
uuaccagaccgaaggcauu

SEQ ID NO: 878683 - RNA, 19 nt, Homo sapiens
  misc_RNA (1)...(19): siRNA sense strand
caacacacauuccucauga

SEQ ID NO: 878684 - RNA, 19 nt, Homo sapiens
  misc_RNA (1)...(19): siRNA sense strand
ccucggcacuguauucuuu

SEQ ID NO: 878685 - RNA, 19 nt, Homo sapiens
  misc_RNA (1)...(19): siRNA sense strand
guaaagggccugcucucuu

SEQ ID NO: 878686 - RNA, 19 nt, Homo sapiens
  misc_RNA (1)...(19): siRNA sense strand
gcaccuguagucccagcua

SEQ ID NO: 878687 - RNA, 19 nt, Homo sapiens
  misc_RNA (1)...(19): siRNA sense strand
ugacuguucuacaugaaac

SEQ ID NO: 878688 - RNA, 19 nt, Homo sapiens
  misc_RNA (1)...(19): siRNA sense strand
guugacuguucuacaugaa

SEQ ID NO: 878689 - RNA, 19 nt, Homo sapiens
  misc_RNA (1)...(19): siRNA sense strand
ucaacacacauuccucaug

SEQ ID NO: 878690 - RNA, 19 nt, Homo sapiens
  misc_RNA (1)...(19): siRNA sense strand
ggacuuuggugguaucuuu

SEQ ID NO: 878691 - RNA, 19 nt, Homo sapiens
  misc_RNA (1)...(19): siRNA sense strand
ggugguaucuuucacacaa

SEQ ID NO: 878692 - RNA, 19 nt, Homo sapiens
  misc_RNA (1)...(19): siRNA sense strand
cagcaacgguuucuucauc

SEQ ID NO: 878693 - RNA, 19 nt, Homo sapiens
  misc_RNA (1)...(19): siRNA sense strand
gggcggugaucaucucuga

SEQ ID NO: 878694 - RNA, 19 nt, Homo sapiens
  misc_RNA (1)...(19): siRNA sense strand
gagaugauccaggacagua

SEQ ID NO: 878695 - RNA, 19 nt, Homo sapiens
  misc_RNA (1)...(19): siRNA sense strand
gacauucgauacaucuuca

SEQ ID NO: 878696 - RNA, 19 nt, Homo sapiens
  misc_RNA (1)...(19): siRNA sense strand
ggacauucgauacaucuuc

SEQ ID NO: 878697 - RNA, 19 nt, Homo sapiens
  misc_RNA (1)...(19): siRNA sense strand
gcuuccguauccaugauua

SEQ ID NO: 878698 - RNA, 19 nt, Homo sapiens
  misc_RNA (1)...(19): siRNA sense strand
ccguauccaugauuauuug

SEQ ID NO: 878699 - RNA, 19 nt, Homo sapiens
  misc_RNA (1)...(19): siRNA sense strand
cacaagguaugagcagauu

SEQ ID NO: 878700 - RNA, 19 nt, Homo sapiens
  misc_RNA (1)...(19): siRNA sense strand
caagguaugagcagauuca

SEQ ID NO: 878701 - RNA, 19 nt, Homo sapiens
  misc_RNA (1)...(19): siRNA sense strand
caaccgcccuggaccuucu

SEQ ID NO: 878702 - RNA, 19 nt, Homo sapiens
  misc_RNA (1)...(19): siRNA sense strand
gaacucagcaacgguuucu

SEQ ID NO: 878703 - RNA, 19 nt, Homo sapiens
  misc_RNA (1)...(19): siRNA sense strand
caaggacuuuggugguauc

SEQ ID NO: 878704 - RNA, 19 nt, Homo sapiens
  misc_RNA (1)...(19): siRNA sense strand
gcaacgguuucuucaucca

SEQ ID NO: 878705 - RNA, 19 nt, Homo sapiens
  misc_RNA (1)...(19): siRNA sense strand
gcggugaucaucucugaca

SEQ ID NO: 878706 - RNA, 19 nt, Homo sapiens
  misc_RNA (1)...(19): siRNA sense strand
gcuucuacguggagaugau

SEQ ID NO: 878707 - RNA, 19 nt, Homo sapiens
  misc_RNA (1)...(19): siRNA sense strand
ccacaccugccaaggacuu

SEQ ID NO: 878708 - RNA, 19 nt, Homo sapiens
  misc_RNA (1)...(19): siRNA sense strand
ggaacucagcaacgguuuc

SEQ ID NO: 878709 - RNA, 19 nt, Homo sapiens
  misc_RNA (1)...(19): siRNA sense strand
ucauuuccaucccagucaa

SEQ ID NO: 878710 - RNA, 19 nt, Homo sapiens
  misc_RNA (1)...(19): siRNA sense strand
guaucuuucacacaaggua

SEQ ID NO: 878711 - RNA, 19 nt, Homo sapiens
  misc_RNA (1)...(19): siRNA sense strand
cagccacaccugccaagga

SEQ ID NO: 878712 - RNA, 19 nt, Homo sapiens
  misc_RNA (1)...(19): siRNA sense strand
gaagagagaugucuaccua

SEQ ID NO: 878713 - RNA, 19 nt, Homo sapiens
  misc_RNA (1)...(19): siRNA sense strand
gcaauaacaucaaguacca

SEQ ID NO: 878714 - RNA, 19 nt, Homo sapiens
  misc_RNA (1)...(19): siRNA sense strand
caggauaucuugugugaug

SEQ ID NO: 878715 - RNA, 19 nt, Homo sapiens
  misc_RNA (1)...(19): siRNA sense strand
uaggauggcuucuccaguu

SEQ ID NO: 878716 - RNA, 19 nt, Homo sapiens
  misc_RNA (1)...(19): siRNA sense strand
gaaccuccagggaccaaua

SEQ ID NO: 878717 - RNA, 19 nt, Homo sapiens
  misc_RNA (1)...(19): siRNA sense strand
gacauuccauacauugaga

SEQ ID NO: 878718 - RNA, 19 nt, Homo sapiens
  misc_RNA (1)...(19): siRNA sense strand
aagcaaacuuucccauuuc

SEQ ID NO: 878719 - RNA, 19 nt, Homo sapiens
  misc_RNA (1)...(19): siRNA sense strand
caucaaguaccaugacauu

SEQ ID NO: 878720 - RNA, 19 nt, Homo sapiens
  misc_RNA (1)...(19): siRNA sense strand
caaugggcaugcaauaaca

SEQ ID NO: 878721 - RNA, 19 nt, Homo sapiens
  misc_RNA (1)...(19): siRNA sense strand
gcaaugggcaugcaauaac

SEQ ID NO: 878722 - RNA, 19 nt, Homo sapiens
  misc_RNA (1)...(19): siRNA sense strand
caaacuuucccauuuccua

SEQ ID NO: 878723 - RNA, 19 nt, Homo sapiens
  misc_RNA (1)...(19): siRNA sense strand
gagagugaagaacccuuua

SEQ ID NO: 878724 - RNA, 19 nt, Homo sapiens
  misc_RNA (1)...(19): siRNA sense strand
agaagcagcaugagaguga

SEQ ID NO: 878725 - RNA, 19 nt, Homo sapiens
  misc_RNA (1)...(19): siRNA sense strand
ucaaagaggaagugaagga

SEQ ID NO: 878726 - RNA, 19 nt, Homo sapiens
  misc_RNA (1)...(19): siRNA sense strand
uuccauacauugagaguga

SEQ ID NO: 878727 - RNA, 19 nt, Homo sapiens
  misc_RNA (1)...(19): siRNA sense strand
gaagcagcaugagagugaa

SEQ ID NO: 878728 - RNA, 19 nt, Homo sapiens
  misc_RNA (1)...(19): siRNA sense strand
ccaugacauuccauacauu

SEQ ID NO: 878729 - RNA, 19 nt, Homo sapiens
  misc_RNA (1)...(19): siRNA sense strand
cagcaaugggcaugcaaua

SEQ ID NO: 878730 - RNA, 19 nt, Homo sapiens
  misc_RNA (1)...(19): siRNA sense strand
ugcaugaaaucaaagcaaa

SEQ ID NO: 878731 - RNA, 19 nt, Homo sapiens
  misc_RNA (1)...(19): siRNA sense strand
aggauggcuucuccaguua

SEQ ID NO: 878732 - RNA, 19 nt, Homo sapiens
  misc_RNA (1)...(19): siRNA sense strand
gauggcuucuccaguuaau

SEQ ID NO: 878733 - RNA, 19 nt, Homo sapiens
  misc_RNA (1)...(19): siRNA sense strand
cucaggauaucuuguguga

SEQ ID NO: 878734 - RNA, 19 nt, Homo sapiens
  misc_RNA (1)...(19): siRNA sense strand
agagaugucuaccuaggau

SEQ ID NO: 878735 - RNA, 19 nt, Homo sapiens
  misc_RNA (1)...(19): siRNA sense strand
caaguaccaugacauucca

SEQ ID NO: 878736 - RNA, 19 nt, Homo sapiens
  misc_RNA (1)...(19): siRNA sense strand
gagugaagaacccuuuaug

SEQ ID NO: 878737 - RNA, 19 nt, Homo sapiens
  misc_RNA (1)...(19): siRNA sense strand
caugcaauaacaucaagua

SEQ ID NO: 878738 - RNA, 19 nt, Homo sapiens
  misc_RNA (1)...(19): siRNA sense strand
caaagaggaagugaaggaa

SEQ ID NO: 878739 - RNA, 19 nt, Homo sapiens
  misc_RNA (1)...(19): siRNA sense strand
ggugagaagcagcaugaga

SEQ ID NO: 878740 - RNA, 19 nt, Homo sapiens
  misc_RNA (1)...(19): siRNA sense strand
cccauuuccuaccauauau

SEQ ID NO: 878741 - RNA, 19 nt, Homo sapiens
  misc_RNA (1)...(19): siRNA sense strand
ggauggcuucuccaguuaa

SEQ ID NO: 878742 - RNA, 19 nt, Homo sapiens
  misc_RNA (1)...(19): siRNA sense strand
gagagaugucuaccuagga

SEQ ID NO: 878743 - RNA, 19 nt, Homo sapiens
  misc_RNA (1)...(19): siRNA sense strand
caugacauuccauacauug

SEQ ID NO: 878744 - RNA, 19 nt, Homo sapiens
  misc_RNA (1)...(19): siRNA sense strand
ucccauuuccuaccauaua

SEQ ID NO: 878745 - RNA, 19 nt, Homo sapiens
  misc_RNA (1)...(19): siRNA sense strand
gggcaugcaauaacaucaa

SEQ ID NO: 878746 - RNA, 19 nt, Homo sapiens
  misc_RNA (1)...(19): siRNA sense strand
ugagagugaagaacccuuu

SEQ ID NO: 878747 - RNA, 19 nt, Homo sapiens
  misc_RNA (1)...(19): siRNA sense strand
ggcaugcaauaacaucaag

SEQ ID NO: 878748 - RNA, 19 nt, Homo sapiens
  misc_RNA (1)...(19): siRNA sense strand
ugucaaagaggaagugaag

SEQ ID NO: 878749 - RNA, 19 nt, Homo sapiens
  misc_RNA (1)...(19): siRNA sense strand
aaggugagaagcagcauga

SEQ ID NO: 878750 - RNA, 19 nt, Homo sapiens
  misc_RNA (1)...(19): siRNA sense strand
gcagcaaugggcaugcaau

SEQ ID NO: 878751 - RNA, 19 nt, Homo sapiens
  misc_RNA (1)...(19): siRNA sense strand
gccagaagagagaugucua

SEQ ID NO: 878752 - RNA, 19 nt, Homo sapiens
  misc_RNA (1)...(19): siRNA sense strand
cauuuccuaccauauauga

SEQ ID NO: 878753 - RNA, 19 nt, Homo sapiens
  misc_RNA (1)...(19): siRNA sense strand
gcagcaugagagugaagaa

SEQ ID NO: 878754 - RNA, 19 nt, Homo sapiens
  misc_RNA (1)...(19): siRNA sense strand
accaugacauuccauacau

SEQ ID NO: 878755 - RNA, 19 nt, Homo sapiens
  misc_RNA (1)...(19): siRNA sense strand
uaacaucaaguaccaugac

SEQ ID NO: 878756 - RNA, 19 nt, Homo sapiens
  misc_RNA (1)...(19): siRNA sense strand
uauaugaaggugagaagca

SEQ ID NO: 878757 - RNA, 19 nt, Homo sapiens
  misc_RNA (1)...(19): siRNA sense strand
uagaggagcugcccgaaga

SEQ ID NO: 878758 - RNA, 19 nt, Homo sapiens
  misc_RNA (1)...(19): siRNA sense strand
gaagugaagaggucugauu

SEQ ID NO: 878759 - RNA, 19 nt, Homo sapiens
  misc_RNA (1)...(19): siRNA sense strand
ucucuucccuugccuacua

SEQ ID NO: 878760 - RNA, 19 nt, Homo sapiens
  misc_RNA (1)...(19): siRNA sense strand
ggucuagacagcacaguaa

SEQ ID NO: 878761 - RNA, 19 nt, Homo sapiens
  misc_RNA (1)...(19): siRNA sense strand
uggccgugcuuuccacuua

SEQ ID NO: 878762 - RNA, 19 nt, Homo sapiens
  misc_RNA (1)...(19): siRNA sense strand
gagccgcacucauucucuu

SEQ ID NO: 878763 - RNA, 19 nt, Homo sapiens
  misc_RNA (1)...(19): siRNA sense strand
guccagcucuuuauucucu

SEQ ID NO: 878764 - RNA, 19 nt, Homo sapiens
  misc_RNA (1)...(19): siRNA sense strand
ugucgaugcugauguggaa

SEQ ID NO: 878765 - RNA, 19 nt, Homo sapiens
  misc_RNA (1)...(19): siRNA sense strand
uaagugaggcugccaccuu

SEQ ID NO: 878766 - RNA, 19 nt, Homo sapiens
  misc_RNA (1)...(19): siRNA sense strand
ccaaccugcugccugagaa

SEQ ID NO: 878767 - RNA, 19 nt, Homo sapiens
  misc_RNA (1)...(19): siRNA sense strand
cgugggagccgcacucauu

SEQ ID NO: 878768 - RNA, 19 nt, Homo sapiens
  misc_RNA (1)...(19): siRNA sense strand
gcucuuuauucucuacuuc

SEQ ID NO: 878769 - RNA, 19 nt, Homo sapiens
  misc_RNA (1)...(19): siRNA sense strand
ucugcucacuggucucuuu

SEQ ID NO: 878770 - RNA, 19 nt, Homo sapiens
  misc_RNA (1)...(19): siRNA sense strand
cagaaccacuuaccaagcu

SEQ ID NO: 878771 - RNA, 19 nt, Homo sapiens
  misc_RNA (1)...(19): siRNA sense strand
uguggaaccucuacuacau

SEQ ID NO: 878772 - RNA, 19 nt, Homo sapiens
  misc_RNA (1)...(19): siRNA sense strand
gagauccaccggcgauaug

SEQ ID NO: 878773 - RNA, 19 nt, Homo sapiens
  misc_RNA (1)...(19): siRNA sense strand
ggagauccaccggcgauau

SEQ ID NO: 878774 - RNA, 19 nt, Homo sapiens
  misc_RNA (1)...(19): siRNA sense strand
gcuacggccugacguuucu

SEQ ID NO: 878775 - RNA, 19 nt, Homo sapiens
  misc_RNA (1)...(19): siRNA sense strand
gacccuggcccuacuggaa

SEQ ID NO: 878776 - RNA, 19 nt, Homo sapiens
  misc_RNA (1)...(19): siRNA sense strand
cuucgugccuauugaccua

SEQ ID NO: 878777 - RNA, 19 nt, Homo sapiens
  misc_RNA (1)...(19): siRNA sense strand
uggaaccucuacuacaugu

SEQ ID NO: 878778 - RNA, 19 nt, Homo sapiens
  misc_RNA (1)...(19): siRNA sense strand
gaucuacuggcugaccuuu

SEQ ID NO: 878779 - RNA, 19 nt, Homo sapiens
  misc_RNA (1)...(19): siRNA sense strand
ggagcugcccgaagacgau

SEQ ID NO: 878780 - RNA, 19 nt, Homo sapiens
  misc_RNA (1)...(19): siRNA sense strand
ggagaccgugaguggcuaa

SEQ ID NO: 878781 - RNA, 19 nt, Homo sapiens
  misc_RNA (1)...(19): siRNA sense strand
ugaguucccgccugaucua

SEQ ID NO: 878782 - RNA, 19 nt, Homo sapiens
  misc_RNA (1)...(19): siRNA sense strand
ugauguggaaccucuacua

SEQ ID NO: 878783 - RNA, 19 nt, Homo sapiens
  misc_RNA (1)...(19): siRNA sense strand
gugccuucgugccuauuga

SEQ ID NO: 878784 - RNA, 19 nt, Homo sapiens
  misc_RNA (1)...(19): siRNA sense strand
gauguggaaccucuacuac

SEQ ID NO: 878785 - RNA, 19 nt, Homo sapiens
  misc_RNA (1)...(19): siRNA sense strand
gcugagccuguuaugcuuu

SEQ ID NO: 878786 - RNA, 19 nt, Homo sapiens
  misc_RNA (1)...(19): siRNA sense strand
cuauugaccuacagugcau

SEQ ID NO: 878787 - RNA, 19 nt, Homo sapiens
  misc_RNA (1)...(19): siRNA sense strand
cuagacagcacaguaagug

SEQ ID NO: 878788 - RNA, 19 nt, Homo sapiens
  misc_RNA (1)...(19): siRNA sense strand
agucagaaccacuuaccaa

SEQ ID NO: 878789 - RNA, 19 nt, Homo sapiens
  misc_RNA (1)...(19): siRNA sense strand
caaccugcugccugagaaa

SEQ ID NO: 878790 - RNA, 19 nt, Homo sapiens
  misc_RNA (1)...(19): siRNA sense strand
agaaccacuuaccaagcua

SEQ ID NO: 878791 - RNA, 19 nt, Homo sapiens
  misc_RNA (1)...(19): siRNA sense strand
ucuacuggcugaccuuugc

SEQ ID NO: 878792 - RNA, 19 nt, Homo sapiens
  misc_RNA (1)...(19): siRNA sense strand
gaaaggaugugaagguguu

SEQ ID NO: 878793 - RNA, 19 nt, Homo sapiens
  misc_RNA (1)...(19): siRNA sense strand
gaagaaaucagaaacagaa

SEQ ID NO: 878794 - RNA, 19 nt, Homo sapiens
  misc_RNA (1)...(19): siRNA sense strand
caacauugauccauaaagc

SEQ ID NO: 878795 - RNA, 19 nt, Homo sapiens
  misc_RNA (1)...(19): siRNA sense strand
aaacgugaaugccgaguug

SEQ ID NO: 878796 - RNA, 19 nt, Homo sapiens
  misc_RNA (1)...(19): siRNA sense strand
gcacaaucccaguuccuaa

SEQ ID NO: 878797 - RNA, 19 nt, Homo sapiens
  misc_RNA (1)...(19): siRNA sense strand
gugaagguguuuaauguca

SEQ ID NO: 878798 - RNA, 19 nt, Homo sapiens
  misc_RNA (1)...(19): siRNA sense strand
agauggagcucuucaguca

SEQ ID NO: 878799 - RNA, 19 nt, Homo sapiens
  misc_RNA (1)...(19): siRNA sense strand
gcaaagagugugcgucauc

SEQ ID NO: 878800 - RNA, 19 nt, Homo sapiens
  misc_RNA (1)...(19): siRNA sense strand
gaugugaagguguuuaaug

SEQ ID NO: 878801 - RNA, 19 nt, Homo sapiens
  misc_RNA (1)...(19): siRNA sense strand
ccauaaagccagugagguu

SEQ ID NO: 878802 - RNA, 19 nt, Homo sapiens
  misc_RNA (1)...(19): siRNA sense strand
gaaaucagaaacagaaagg

SEQ ID NO: 878803 - RNA, 19 nt, Homo sapiens
  misc_RNA (1)...(19): siRNA sense strand
ggagggagaagaauaggau

SEQ ID NO: 878804 - RNA, 19 nt, Homo sapiens
  misc_RNA (1)...(19): siRNA sense strand
gauucgaugucgucacguu

SEQ ID NO: 878805 - RNA, 19 nt, Homo sapiens
  misc_RNA (1)...(19): siRNA sense strand
ccagugagguuuuaaaauc

SEQ ID NO: 878806 - RNA, 19 nt, Homo sapiens
  misc_RNA (1)...(19): siRNA sense strand
gaaacagaaaggaugugaa

SEQ ID NO: 878807 - RNA, 19 nt, Homo sapiens
  misc_RNA (1)...(19): siRNA sense strand
guagaagaaaucagaaaca

SEQ ID NO: 878808 - RNA, 19 nt, Homo sapiens
  misc_RNA (1)...(19): siRNA sense strand
aaacagaaaggaugugaag

SEQ ID NO: 878809 - RNA, 19 nt, Homo sapiens
  misc_RNA (1)...(19): siRNA sense strand
agacagggagggagaagaa

SEQ ID NO: 878810 - RNA, 19 nt, Homo sapiens
  misc_RNA (1)...(19): siRNA sense strand
uauaauccuuggcacaauc

SEQ ID NO: 878811 - RNA, 19 nt, Homo sapiens
  misc_RNA (1)...(19): siRNA sense strand
uggucgaccugacuucuuu

SEQ ID NO: 878812 - RNA, 19 nt, Homo sapiens
  misc_RNA (1)...(19): siRNA sense strand
gugcagagcagcaggaagu

SEQ ID NO: 878813 - RNA, 19 nt, Homo sapiens
  misc_RNA (1)...(19): siRNA sense strand
gggccuuuaucgagaguug

SEQ ID NO: 878814 - RNA, 19 nt, Homo sapiens
  misc_RNA (1)...(19): siRNA sense strand
uagaagaaaucagaaacag

SEQ ID NO: 878815 - RNA, 19 nt, Homo sapiens
  misc_RNA (1)...(19): siRNA sense strand
ucagucagcuuuucauuca

SEQ ID NO: 878816 - RNA, 19 nt, Homo sapiens
  misc_RNA (1)...(19): siRNA sense strand
ucgaugagauugggaagau

SEQ ID NO: 878817 - RNA, 19 nt, Homo sapiens
  misc_RNA (1)...(19): siRNA sense strand
acagggagggagaagaaua

SEQ ID NO: 878818 - RNA, 19 nt, Homo sapiens
  misc_RNA (1)...(19): siRNA sense strand
cuacccgucuugaggaaug

SEQ ID NO: 878819 - RNA, 19 nt, Homo sapiens
  misc_RNA (1)...(19): siRNA sense strand
ccucuggugugccuguuga

SEQ ID NO: 878820 - RNA, 19 nt, Homo sapiens
  misc_RNA (1)...(19): siRNA sense strand
cauaaagccagugagguuu

SEQ ID NO: 878821 - RNA, 19 nt, Homo sapiens
  misc_RNA (1)...(19): siRNA sense strand
cacaaucccaguuccuaaa

SEQ ID NO: 878822 - RNA, 19 nt, Homo sapiens
  misc_RNA (1)...(19): siRNA sense strand
gcagagcagcaggaaguga

SEQ ID NO: 878823 - RNA, 19 nt, Homo sapiens
  misc_RNA (1)...(19): siRNA sense strand
uguuuaaugucaccaagga

SEQ ID NO: 878824 - RNA, 19 nt, Homo sapiens
  misc_RNA (1)...(19): siRNA sense strand
uaucgagaguuggguuaga

SEQ ID NO: 878825 - RNA, 19 nt, Homo sapiens
  misc_RNA (1)...(19): siRNA sense strand
acagaaaggaugugaaggu

SEQ ID NO: 878826 - RNA, 19 nt, Homo sapiens
  misc_RNA (1)...(19): siRNA sense strand
augugaagguguuuaaugu

SEQ ID NO: 878827 - RNA, 19 nt, Homo sapiens
  misc_RNA (1)...(19): siRNA sense strand
agaagaaaucagaaacaga

SEQ ID NO: 878828 - RNA, 19 nt, Homo sapiens
  misc_RNA (1)...(19): siRNA sense strand
ucagaaacagaaaggaugu

SEQ ID NO: 878829 - RNA, 19 nt, Homo sapiens
  misc_RNA (1)...(19): siRNA sense strand
cccagggacuauaauccuu

SEQ ID NO: 878830 - RNA, 19 nt, Homo sapiens
  misc_RNA (1)...(19): siRNA sense strand
agaaacagaaaggauguga

SEQ ID NO: 878831 - RNA, 19 nt, Homo sapiens
  misc_RNA (1)...(19): siRNA sense strand
ggcacaaucccaguuccua

SEQ ID NO: 878832 - RNA, 19 nt, Homo sapiens
  misc_RNA (1)...(19): siRNA sense strand
cuauaauccuuggcacaau

SEQ ID NO: 878833 - RNA, 19 nt, Homo sapiens
  misc_RNA (1)...(19): siRNA sense strand
aaucagaaacagaaaggau

SEQ ID NO: 878834 - RNA, 19 nt, Homo sapiens
  misc_RNA (1)...(19): siRNA sense strand
uuuaaugucaccaaggaaa

SEQ ID NO: 878835 - RNA, 19 nt, Homo sapiens
  misc_RNA (1)...(19): siRNA sense strand
caucuucucucucuucuuu

SEQ ID NO: 878836 - RNA, 19 nt, Homo sapiens
  misc_RNA (1)...(19): siRNA sense strand
caaccuggccugcaugaug

SEQ ID NO: 878837 - RNA, 19 nt, Homo sapiens
  misc_RNA (1)...(19): siRNA sense strand
gcaguucgacagaagugua

SEQ ID NO: 878838 - RNA, 19 nt, Homo sapiens
  misc_RNA (1)...(19): siRNA sense strand
gaaaacagacgacacacuu

SEQ ID NO: 878839 - RNA, 19 nt, Homo sapiens
  misc_RNA (1)...(19): siRNA sense strand
cgugucagcugcaccauca

SEQ ID NO: 878840 - RNA, 19 nt, Homo sapiens
  misc_RNA (1)...(19): siRNA sense strand
ggacaucugcgaagacaac

SEQ ID NO: 878841 - RNA, 19 nt, Homo sapiens
  misc_RNA (1)...(19): siRNA sense strand
caucaucgccaccgucaug

SEQ ID NO: 878842 - RNA, 19 nt, Homo sapiens
  misc_RNA (1)...(19): siRNA sense strand
aaccuggccugcaugauga

SEQ ID NO: 878843 - RNA, 19 nt, Homo sapiens
  misc_RNA (1)...(19): siRNA sense strand
gucaugauccugccuguga

SEQ ID NO: 878844 - RNA, 19 nt, Homo sapiens
  misc_RNA (1)...(19): siRNA sense strand
gggcagcacacacaagguu

SEQ ID NO: 878845 - RNA, 19 nt, Homo sapiens
  misc_RNA (1)...(19): siRNA sense strand
caagguuguuccaaguugu

SEQ ID NO: 878846 - RNA, 19 nt, Homo sapiens
  misc_RNA (1)...(19): siRNA sense strand
cuuccugccuuacacguuu

SEQ ID NO: 878847 - RNA, 19 nt, Homo sapiens
  misc_RNA (1)...(19): siRNA sense strand
ugucuuaccugcugauggu

SEQ ID NO: 878848 - RNA, 19 nt, Homo sapiens
  misc_RNA (1)...(19): siRNA sense strand
ccaucaccuuccugccuua

SEQ ID NO: 878849 - RNA, 19 nt, Homo sapiens
  misc_RNA (1)...(19): siRNA sense strand
caacgcaugcucagcuuca

SEQ ID NO: 878850 - RNA, 19 nt, Homo sapiens
  misc_RNA (1)...(19): siRNA sense strand
ggauugccgucuaccugau

SEQ ID NO: 878851 - RNA, 19 nt, Homo sapiens
  misc_RNA (1)...(19): siRNA sense strand
cagcggccaucuucucucu

SEQ ID NO: 878852 - RNA, 19 nt, Homo sapiens
  misc_RNA (1)...(19): siRNA sense strand
cagcaaggagcgcguggaa

SEQ ID NO: 878853 - RNA, 19 nt, Homo sapiens
  misc_RNA (1)...(19): siRNA sense strand
gcggccaucuucucucucu

SEQ ID NO: 878854 - RNA, 19 nt, Homo sapiens
  misc_RNA (1)...(19): siRNA sense strand
gggcaucuuccaccucaug

SEQ ID NO: 878855 - RNA, 19 nt, Homo sapiens
  misc_RNA (1)...(19): siRNA sense strand
cagcugcaccaucaucuuc

SEQ ID NO: 878856 - RNA, 19 nt, Homo sapiens
  misc_RNA (1)...(19): siRNA sense strand
auggugaccuucccugaug

SEQ ID NO: 878857 - RNA, 19 nt, Homo sapiens
  misc_RNA (1)...(19): siRNA sense strand
gcaucuucuuguucugugu

SEQ ID NO: 878858 - RNA, 19 nt, Homo sapiens
  misc_RNA (1)...(19): siRNA sense strand
ccgucuaccugaugaccuu

SEQ ID NO: 878859 - RNA, 19 nt, Homo sapiens
  misc_RNA (1)...(19): siRNA sense strand
ggccaucuucucucucuuc

SEQ ID NO: 878860 - RNA, 19 nt, Homo sapiens
  misc_RNA (1)...(19): siRNA sense strand
gaccaugagucgaauaaua

SEQ ID NO: 878861 - RNA, 19 nt, Homo sapiens
  misc_RNA (1)...(19): siRNA sense strand
gaacaauuaucaggucauu

SEQ ID NO: 878862 - RNA, 19 nt, Homo sapiens
  misc_RNA (1)...(19): siRNA sense strand
ggaaauggaagaaauguug

SEQ ID NO: 878863 - RNA, 19 nt, Homo sapiens
  misc_RNA (1)...(19): siRNA sense strand
ggacagggaagagauaaua

SEQ ID NO: 878864 - RNA, 19 nt, Homo sapiens
  misc_RNA (1)...(19): siRNA sense strand
uaacaaugauggugauaga

SEQ ID NO: 878865 - RNA, 19 nt, Homo sapiens
  misc_RNA (1)...(19): siRNA sense strand
ucaaguauaugacugaaga

SEQ ID NO: 878866 - RNA, 19 nt, Homo sapiens
  misc_RNA (1)...(19): siRNA sense strand
gagcugaucaaguauauga

SEQ ID NO: 878867 - RNA, 19 nt, Homo sapiens
  misc_RNA (1)...(19): siRNA sense strand
aggacgagcugaucaagua

SEQ ID NO: 878868 - RNA, 19 nt, Homo sapiens
  misc_RNA (1)...(19): siRNA sense strand
gaaggacagggaagagaua

SEQ ID NO: 878869 - RNA, 19 nt, Homo sapiens
  misc_RNA (1)...(19): siRNA sense strand
aagaagaaccuacuggaua

SEQ ID NO: 878870 - RNA, 19 nt, Homo sapiens
  misc_RNA (1)...(19): siRNA sense strand
ugacagaaauacuacuaga

SEQ ID NO: 878871 - RNA, 19 nt, Homo sapiens
  misc_RNA (1)...(19): siRNA sense strand
guauaugacugaagaaggu

SEQ ID NO: 878872 - RNA, 19 nt, Homo sapiens
  misc_RNA (1)...(19): siRNA sense strand
caaugauggugauagauga

SEQ ID NO: 878873 - RNA, 19 nt, Homo sapiens
  misc_RNA (1)...(19): siRNA sense strand
caaggacuauauaacaaug

SEQ ID NO: 878874 - RNA, 19 nt, Homo sapiens
  misc_RNA (1)...(19): siRNA sense strand
gaagaagaaccuacuggau

SEQ ID NO: 878875 - RNA, 19 nt, Homo sapiens
  misc_RNA (1)...(19): siRNA sense strand
ggugaugacagaaauacua

SEQ ID NO: 878876 - RNA, 19 nt, Homo sapiens
  misc_RNA (1)...(19): siRNA sense strand
gaaagaaaauacagaccaa

SEQ ID NO: 878877 - RNA, 19 nt, Homo sapiens
  misc_RNA (1)...(19): siRNA sense strand
aaggagagcugcaugaucu

SEQ ID NO: 878878 - RNA, 19 nt, Homo sapiens
  misc_RNA (1)...(19): siRNA sense strand
gaugacagaaauacuacua

SEQ ID NO: 878879 - RNA, 19 nt, Homo sapiens
  misc_RNA (1)...(19): siRNA sense strand
gaaauguugucugcugcaa

SEQ ID NO: 878880 - RNA, 19 nt, Homo sapiens
  misc_RNA (1)...(19): siRNA sense strand
gaucaaguauaugacugaa

SEQ ID NO: 878881 - RNA, 19 nt, Homo sapiens
  misc_RNA (1)...(19): siRNA sense strand
aauguugucugcugcaauu

SEQ ID NO: 878882 - RNA, 19 nt, Homo sapiens
  misc_RNA (1)...(19): siRNA sense strand
aagaggaaauggaagaaau

SEQ ID NO: 878883 - RNA, 19 nt, Homo sapiens
  misc_RNA (1)...(19): siRNA sense strand
agaagaaccuacuggauac

SEQ ID NO: 878884 - RNA, 19 nt, Homo sapiens
  misc_RNA (1)...(19): siRNA sense strand
gaaccuacuggauacauuc

SEQ ID NO: 878885 - RNA, 19 nt, Homo sapiens
  misc_RNA (1)...(19): siRNA sense strand
agaggcauuugaagucuuu

SEQ ID NO: 878886 - RNA, 19 nt, Homo sapiens
  misc_RNA (1)...(19): siRNA sense strand
cagggaagagauaauagua

SEQ ID NO: 878887 - RNA, 19 nt, Homo sapiens
  misc_RNA (1)...(19): siRNA sense strand
gaaggagagcugcaugauc

SEQ ID NO: 878888 - RNA, 19 nt, Homo sapiens
  misc_RNA (1)...(19): siRNA sense strand
cagaaauacuacuagaaag

SEQ ID NO: 878889 - RNA, 19 nt, Homo sapiens
  misc_RNA (1)...(19): siRNA sense strand
acaauuaucaggucauuag

SEQ ID NO: 878890 - RNA, 19 nt, Homo sapiens
  misc_RNA (1)...(19): siRNA sense strand
gaaauggaagaaauguugu

SEQ ID NO: 878891 - RNA, 19 nt, Homo sapiens
  misc_RNA (1)...(19): siRNA sense strand
cgaauaauacaguggaugu

SEQ ID NO: 878892 - RNA, 19 nt, Homo sapiens
  misc_RNA (1)...(19): siRNA sense strand
gacagaaauacuacuagaa

SEQ ID NO: 878893 - RNA, 19 nt, Homo sapiens
  misc_RNA (1)...(19): siRNA sense strand
gaugugagagagauuggaa

SEQ ID NO: 878894 - RNA, 19 nt, Homo sapiens
  misc_RNA (1)...(19): siRNA sense strand
uugcagagguagaggaaga

SEQ ID NO: 878895 - RNA, 19 nt, Homo sapiens
  misc_RNA (1)...(19): siRNA sense strand
agagguagaggaagaagaa

SEQ ID NO: 878896 - RNA, 19 nt, Homo sapiens
  misc_RNA (1)...(19): siRNA sense strand
acagaccaauuccagaaga

SEQ ID NO: 878897 - RNA, 19 nt, Homo sapiens
  misc_RNA (1)...(19): siRNA sense strand
gacgagcugaucaaguaua

SEQ ID NO: 878898 - RNA, 19 nt, Homo sapiens
  misc_RNA (1)...(19): siRNA sense strand
gagaaggacagggaagaga

SEQ ID NO: 878899 - RNA, 19 nt, Homo sapiens
  misc_RNA (1)...(19): siRNA sense strand
ggaaggagagcugcaugau

SEQ ID NO: 878900 - RNA, 19 nt, Homo sapiens
  misc_RNA (1)...(19): siRNA sense strand
caagaggaaauggaagaaa

SEQ ID NO: 878901 - RNA, 19 nt, Homo sapiens
  misc_RNA (1)...(19): siRNA sense strand
aacguggguuucuuacuaa

SEQ ID NO: 878902 - RNA, 19 nt, Homo sapiens
  misc_RNA (1)...(19): siRNA sense strand
gagauaauaguagcagaau

SEQ ID NO: 878903 - RNA, 19 nt, Homo sapiens
  misc_RNA (1)...(19): siRNA sense strand
agagcugcaugaucugauu

SEQ ID NO: 878904 - RNA, 19 nt, Homo sapiens
  misc_RNA (1)...(19): siRNA sense strand
agaaccuacuggauacauu

SEQ ID NO: 878905 - RNA, 19 nt, Homo sapiens
  misc_RNA (1)...(19): siRNA sense strand
ggagagcugcaugaucuga

SEQ ID NO: 878906 - RNA, 19 nt, Homo sapiens
  misc_RNA (1)...(19): siRNA sense strand
acaaugauggugauagaug

SEQ ID NO: 878907 - RNA, 19 nt, Homo sapiens
  misc_RNA (1)...(19): siRNA sense strand
aaagaggcauuugaagucu

SEQ ID NO: 878908 - RNA, 19 nt, Homo sapiens
  misc_RNA (1)...(19): siRNA sense strand
auacagaccaauuccagaa

SEQ ID NO: 878909 - RNA, 19 nt, Homo sapiens
  misc_RNA (1)...(19): siRNA sense strand
gaccaauuccagaagaugu

SEQ ID NO: 878910 - RNA, 19 nt, Homo sapiens
  misc_RNA (1)...(19): siRNA sense strand
gaggaaauggaagaaaugu

SEQ ID NO: 878911 - RNA, 19 nt, Homo sapiens
  misc_RNA (1)...(19): siRNA sense strand
ggacgagcugaucaaguau

SEQ ID NO: 878912 - RNA, 19 nt, Homo sapiens
  misc_RNA (1)...(19): siRNA sense strand
guagcagaauuucacaaaa

SEQ ID NO: 878913 - RNA, 19 nt, Homo sapiens
  misc_RNA (1)...(19): siRNA sense strand
aauaauacaguggauguga

SEQ ID NO: 878914 - RNA, 19 nt, Homo sapiens
  misc_RNA (1)...(19): siRNA sense strand
acgagcugaucaaguauau

SEQ ID NO: 878915 - RNA, 19 nt, Homo sapiens
  misc_RNA (1)...(19): siRNA sense strand
uaauacaguggaugugaga

SEQ ID NO: 878916 - RNA, 19 nt, Homo sapiens
  misc_RNA (1)...(19): siRNA sense strand
gauugcagagguagaggaa

SEQ ID NO: 878917 - RNA, 19 nt, Homo sapiens
  misc_RNA (1)...(19): siRNA sense strand
agagauaauaguagcagaa

SEQ ID NO: 878918 - RNA, 19 nt, Homo sapiens
  misc_RNA (1)...(19): siRNA sense strand
cagaccaauuccagaagau

SEQ ID NO: 878919 - RNA, 19 nt, Homo sapiens
  misc_RNA (1)...(19): siRNA sense strand
ugaagucuuugaccaugag

SEQ ID NO: 878920 - RNA, 19 nt, Homo sapiens
  misc_RNA (1)...(19): siRNA sense strand
gaauaauacaguggaugug

SEQ ID NO: 878921 - RNA, 19 nt, Homo sapiens
  misc_RNA (1)...(19): siRNA sense strand
guugucugcugcaauugau

SEQ ID NO: 878922 - RNA, 19 nt, Homo sapiens
  misc_RNA (1)...(19): siRNA sense strand
aguagcagaauuucacaaa

SEQ ID NO: 878923 - RNA, 19 nt, Homo sapiens
  misc_RNA (1)...(19): siRNA sense strand
ggaagagauaauaguagca

SEQ ID NO: 878924 - RNA, 19 nt, Homo sapiens
  misc_RNA (1)...(19): siRNA sense strand
gaagaaccuacuggauaca

SEQ ID NO: 878925 - RNA, 19 nt, Homo sapiens
  misc_RNA (1)...(19): siRNA sense strand
auuaucaggucauuaggau

SEQ ID NO: 878926 - RNA, 19 nt, Homo sapiens
  misc_RNA (1)...(19): siRNA sense strand
gagcugcaugaucugauug

SEQ ID NO: 878927 - RNA, 19 nt, Homo sapiens
  misc_RNA (1)...(19): siRNA sense strand
uugaagucuuugaccauga

SEQ ID NO: 878928 - RNA, 19 nt, Homo sapiens
  misc_RNA (1)...(19): siRNA sense strand
ggacuauauaacaaugaug

SEQ ID NO: 878929 - RNA, 19 nt, Homo sapiens
  misc_RNA (1)...(19): siRNA sense strand
agaggaaauggaagaaaug

SEQ ID NO: 878930 - RNA, 19 nt, Homo sapiens
  misc_RNA (1)...(19): siRNA sense strand
ccuacuggauacauucgau

SEQ ID NO: 878931 - RNA, 19 nt, Homo sapiens
  misc_RNA (1)...(19): siRNA sense strand
gacagggaagagauaauag

SEQ ID NO: 878932 - RNA, 19 nt, Homo sapiens
  misc_RNA (1)...(19): siRNA sense strand
cggaaggagagcugcauga

SEQ ID NO: 878933 - RNA, 19 nt, Homo sapiens
  misc_RNA (1)...(19): siRNA sense strand
ugaucaaguauaugacuga

SEQ ID NO: 878934 - RNA, 19 nt, Homo sapiens
  misc_RNA (1)...(19): siRNA sense strand
cuaaggacgagcugaucaa

SEQ ID NO: 878935 - RNA, 19 nt, Homo sapiens
  misc_RNA (1)...(19): siRNA sense strand
ccacugaucugaugaauau

SEQ ID NO: 878936 - RNA, 19 nt, Homo sapiens
  misc_RNA (1)...(19): siRNA sense strand
gaacaacuuuaccaaauga

SEQ ID NO: 878937 - RNA, 19 nt, Homo sapiens
  misc_RNA (1)...(19): siRNA sense strand
acaaagaucuuaagacuga

SEQ ID NO: 878938 - RNA, 19 nt, Homo sapiens
  misc_RNA (1)...(19): siRNA sense strand
gcacaaagaucuuaagacu

SEQ ID NO: 878939 - RNA, 19 nt, Homo sapiens
  misc_RNA (1)...(19): siRNA sense strand
ggaacaacaucaagaaaug

SEQ ID NO: 878940 - RNA, 19 nt, Homo sapiens
  misc_RNA (1)...(19): siRNA sense strand
gaaggaggaggaagaaaua

SEQ ID NO: 878941 - RNA, 19 nt, Homo sapiens
  misc_RNA (1)...(19): siRNA sense strand
uaaugaagauggagauaug

SEQ ID NO: 878942 - RNA, 19 nt, Homo sapiens
  misc_RNA (1)...(19): siRNA sense strand
gagauggccugauucaagu

SEQ ID NO: 878943 - RNA, 19 nt, Homo sapiens
  misc_RNA (1)...(19): siRNA sense strand
agauagagauggccugauu

SEQ ID NO: 878944 - RNA, 19 nt, Homo sapiens
  misc_RNA (1)...(19): siRNA sense strand
ggaggaggaagaaauauug

SEQ ID NO: 878945 - RNA, 19 nt, Homo sapiens
  misc_RNA (1)...(19): siRNA sense strand
gaaauggcaguguguuuau

SEQ ID NO: 878946 - RNA, 19 nt, Homo sapiens
  misc_RNA (1)...(19): siRNA sense strand
gcugggcuuugaagaauuu

SEQ ID NO: 878947 - RNA, 19 nt, Homo sapiens
  misc_RNA (1)...(19): siRNA sense strand
gaagauggagauauggauu

SEQ ID NO: 878948 - RNA, 19 nt, Homo sapiens
  misc_RNA (1)...(19): siRNA sense strand
ugaacaacuuuaccaaaug

SEQ ID NO: 878949 - RNA, 19 nt, Homo sapiens
  misc_RNA (1)...(19): siRNA sense strand
uuaaguaucuguggaacaa

SEQ ID NO: 878950 - RNA, 19 nt, Homo sapiens
  misc_RNA (1)...(19): siRNA sense strand
ccagcuaaaugaacaacuu

SEQ ID NO: 878951 - RNA, 19 nt, Homo sapiens
  misc_RNA (1)...(19): siRNA sense strand
ugcaaaggcucuauuggaa

SEQ ID NO: 878952 - RNA, 19 nt, Homo sapiens
  misc_RNA (1)...(19): siRNA sense strand
agaaauggcaguguguuua

SEQ ID NO: 878953 - RNA, 19 nt, Homo sapiens
  misc_RNA (1)...(19): siRNA sense strand
caacuuuaccaaaugauug

SEQ ID NO: 878954 - RNA, 19 nt, Homo sapiens
  misc_RNA (1)...(19): siRNA sense strand
cgauuucggcaacaauuua

SEQ ID NO: 878955 - RNA, 19 nt, Homo sapiens
  misc_RNA (1)...(19): siRNA sense strand
uggaggagguggucagaga

SEQ ID NO: 878956 - RNA, 19 nt, Homo sapiens
  misc_RNA (1)...(19): siRNA sense strand
agggauaguuggaggaauu

SEQ ID NO: 878957 - RNA, 19 nt, Homo sapiens
  misc_RNA (1)...(19): siRNA sense strand
ccgccuggaugccauguuu

SEQ ID NO: 878958 - RNA, 19 nt, Homo sapiens
  misc_RNA (1)...(19): siRNA sense strand
gccgcaggcuuccagcuaa

SEQ ID NO: 878959 - RNA, 19 nt, Homo sapiens
  misc_RNA (1)...(19): siRNA sense strand
aaauggcaguguguuuaua

SEQ ID NO: 878960 - RNA, 19 nt, Homo sapiens
  misc_RNA (1)...(19): siRNA sense strand
ugaggaaguuaggcgauuu

SEQ ID NO: 878961 - RNA, 19 nt, Homo sapiens
  misc_RNA (1)...(19): siRNA sense strand
gaucugaugaauauucuca

SEQ ID NO: 878962 - RNA, 19 nt, Homo sapiens
  misc_RNA (1)...(19): siRNA sense strand
aagaaauauuggagggaua

SEQ ID NO: 878963 - RNA, 19 nt, Homo sapiens
  misc_RNA (1)...(19): siRNA sense strand
ucagaaagugaggaaguua

SEQ ID NO: 878964 - RNA, 19 nt, Homo sapiens
  misc_RNA (1)...(19): siRNA sense strand
ggcaguguguuuauaagca

SEQ ID NO: 878965 - RNA, 19 nt, Homo sapiens
  misc_RNA (1)...(19): siRNA sense strand
gaacaacaucaagaaaugg

SEQ ID NO: 878966 - RNA, 19 nt, Homo sapiens
  misc_RNA (1)...(19): siRNA sense strand
gugaggaaguuaggcgauu

SEQ ID NO: 878967 - RNA, 19 nt, Homo sapiens
  misc_RNA (1)...(19): siRNA sense strand
gcgauuucggcaacaauuu

SEQ ID NO: 878968 - RNA, 19 nt, Homo sapiens
  misc_RNA (1)...(19): siRNA sense strand
gccuucaagucucuggaua

SEQ ID NO: 878969 - RNA, 19 nt, Homo sapiens
  misc_RNA (1)...(19): siRNA sense strand
cagaaccgccucccacuca

SEQ ID NO: 878970 - RNA, 19 nt, Homo sapiens
  misc_RNA (1)...(19): siRNA sense strand
cuucaagucucuggauaga

SEQ ID NO: 878971 - RNA, 19 nt, Homo sapiens
  misc_RNA (1)...(19): siRNA sense strand
agaucgaggucuuggagaa

SEQ ID NO: 878972 - RNA, 19 nt, Homo sapiens
  misc_RNA (1)...(19): siRNA sense strand
agagauggccugauucaag

SEQ ID NO: 878973 - RNA, 19 nt, Homo sapiens
  misc_RNA (1)...(19): siRNA sense strand
agaaggaggaggaagaaau

SEQ ID NO: 878974 - RNA, 19 nt, Homo sapiens
  misc_RNA (1)...(19): siRNA sense strand
gcuaaugaagauggagaua

SEQ ID NO: 878975 - RNA, 19 nt, Homo sapiens
  misc_RNA (1)...(19): siRNA sense strand
guggaggccucagaaagug

SEQ ID NO: 878976 - RNA, 19 nt, Homo sapiens
  misc_RNA (1)...(19): siRNA sense strand
cagcuaaaugaacaacuuu

SEQ ID NO: 878977 - RNA, 19 nt, Homo sapiens
  misc_RNA (1)...(19): siRNA sense strand
ggcugcaguugaccaugua

SEQ ID NO: 878978 - RNA, 19 nt, Homo sapiens
  misc_RNA (1)...(19): siRNA sense strand
gauucaagugucuaucaaa

SEQ ID NO: 878979 - RNA, 19 nt, Homo sapiens
  misc_RNA (1)...(19): siRNA sense strand
ggaggagguggucagagaa

SEQ ID NO: 878980 - RNA, 19 nt, Homo sapiens
  misc_RNA (1)...(19): siRNA sense strand
ccgcaggcuuccagcuaaa

SEQ ID NO: 878981 - RNA, 19 nt, Homo sapiens
  misc_RNA (1)...(19): siRNA sense strand
ggagggauaguuggaggaa

SEQ ID NO: 878982 - RNA, 19 nt, Homo sapiens
  misc_RNA (1)...(19): siRNA sense strand
gcuuccagcuaaaugaaca

SEQ ID NO: 878983 - RNA, 19 nt, Homo sapiens
  misc_RNA (1)...(19): siRNA sense strand
gagcauugugucugucaug

SEQ ID NO: 878984 - RNA, 19 nt, Homo sapiens
  misc_RNA (1)...(19): siRNA sense strand
gggugccacugaucugaug

SEQ ID NO: 878985 - RNA, 19 nt, Homo sapiens
  misc_RNA (1)...(19): siRNA sense strand
caagaaauggcaguguguu

SEQ ID NO: 878986 - RNA, 19 nt, Homo sapiens
  misc_RNA (1)...(19): siRNA sense strand
gcucuuggaggccucuuug

SEQ ID NO: 878987 - RNA, 19 nt, Homo sapiens
  misc_RNA (1)...(19): siRNA sense strand
guguuuauaagcaguauga

SEQ ID NO: 878988 - RNA, 19 nt, Homo sapiens
  misc_RNA (1)...(19): siRNA sense strand
aagaaauggcaguguguuu

SEQ ID NO: 878989 - RNA, 19 nt, Homo sapiens
  misc_RNA (1)...(19): siRNA sense strand
aauauuggagggauaguug

SEQ ID NO: 878990 - RNA, 19 nt, Homo sapiens
  misc_RNA (1)...(19): siRNA sense strand
uggaacaacaucaagaaau

SEQ ID NO: 878991 - RNA, 19 nt, Homo sapiens
  misc_RNA (1)...(19): siRNA sense strand
aagauggagauauggauuu

SEQ ID NO: 878992 - RNA, 19 nt, Homo sapiens
  misc_RNA (1)...(19): siRNA sense strand
ccgguaugcuaaugaagau

SEQ ID NO: 878993 - RNA, 19 nt, Homo sapiens
  misc_RNA (1)...(19): siRNA sense strand
gccgguaugcuaaugaaga

SEQ ID NO: 878994 - RNA, 19 nt, Homo sapiens
  misc_RNA (1)...(19): siRNA sense strand
aauggcaguguguuuauaa

SEQ ID NO: 878995 - RNA, 19 nt, Homo sapiens
  misc_RNA (1)...(19): siRNA sense strand
gccggagcauugugucugu

SEQ ID NO: 878996 - RNA, 19 nt, Homo sapiens
  misc_RNA (1)...(19): siRNA sense strand
gauaguuggaggaauugug

SEQ ID NO: 878997 - RNA, 19 nt, Homo sapiens
  misc_RNA (1)...(19): siRNA sense strand
gcaggcuuccagcuaaaug

SEQ ID NO: 878998 - RNA, 19 nt, Homo sapiens
  misc_RNA (1)...(19): siRNA sense strand
guggaacaacaucaagaaa

SEQ ID NO: 878999 - RNA, 19 nt, Homo sapiens
  misc_RNA (1)...(19): siRNA sense strand
uugcaaaggcucuauugga

SEQ ID NO: 879000 - RNA, 19 nt, Homo sapiens
  misc_RNA (1)...(19): siRNA sense strand
uggcugcaguugaccaugu

SEQ ID NO: 879001 - RNA, 19 nt, Homo sapiens
  misc_RNA (1)...(19): siRNA sense strand
gauagagauggccugauuc

SEQ ID NO: 879002 - RNA, 19 nt, Homo sapiens
  misc_RNA (1)...(19): siRNA sense strand
aagagaaggaggaggaaga

SEQ ID NO: 879003 - RNA, 19 nt, Homo sapiens
  misc_RNA (1)...(19): siRNA sense strand
cuaaugaagauggagauau

SEQ ID NO: 879004 - RNA, 19 nt, Homo sapiens
  misc_RNA (1)...(19): siRNA sense strand
gagaaggaggaggaagaaa

SEQ ID NO: 879005 - RNA, 19 nt, Homo sapiens
  misc_RNA (1)...(19): siRNA sense strand
gccacugaucugaugaaua

SEQ ID NO: 879006 - RNA, 19 nt, Homo sapiens
  misc_RNA (1)...(19): siRNA sense strand
gaggaaguuaggcgauuuc

SEQ ID NO: 879007 - RNA, 19 nt, Homo sapiens
  misc_RNA (1)...(19): siRNA sense strand
ucaagaaauggcagugugu

SEQ ID NO: 879008 - RNA, 19 nt, Homo sapiens
  misc_RNA (1)...(19): siRNA sense strand
ggcgauuucggcaacaauu

SEQ ID NO: 879009 - RNA, 19 nt, Homo sapiens
  misc_RNA (1)...(19): siRNA sense strand
auucaagugucuaucaaag

SEQ ID NO: 879010 - RNA, 19 nt, Homo sapiens
  misc_RNA (1)...(19): siRNA sense strand
ggagauauggauuuuaaca

SEQ ID NO: 879011 - RNA, 19 nt, Homo sapiens
  misc_RNA (1)...(19): siRNA sense strand
aaguaucuguggaacaaca

SEQ ID NO: 879012 - RNA, 19 nt, Homo sapiens
  misc_RNA (1)...(19): siRNA sense strand
gaauauucucaacaaaguc

SEQ ID NO: 879013 - RNA, 19 nt, Homo sapiens
  misc_RNA (1)...(19): siRNA sense strand
gagguggucagagaagaga

SEQ ID NO: 879014 - RNA, 19 nt, Homo sapiens
  misc_RNA (1)...(19): siRNA sense strand
guaugcuaaugaagaugga

SEQ ID NO: 879015 - RNA, 19 nt, Homo sapiens
  misc_RNA (1)...(19): siRNA sense strand
auaguuggaggaauuguga

SEQ ID NO: 879016 - RNA, 19 nt, Homo sapiens
  misc_RNA (1)...(19): siRNA sense strand
aagcacaaagaucuuaaga

SEQ ID NO: 879017 - RNA, 19 nt, Homo sapiens
  misc_RNA (1)...(19): siRNA sense strand
ggacuuccuuagugccauu

SEQ ID NO: 879018 - RNA, 19 nt, Homo sapiens
  misc_RNA (1)...(19): siRNA sense strand
ggaggccgguuuaucucaa

SEQ ID NO: 879019 - RNA, 19 nt, Homo sapiens
  misc_RNA (1)...(19): siRNA sense strand
uggcagcgguuuccacuuc

SEQ ID NO: 879020 - RNA, 19 nt, Homo sapiens
  misc_RNA (1)...(19): siRNA sense strand
ggaacagugcccugagcua

SEQ ID NO: 879021 - RNA, 19 nt, Homo sapiens
  misc_RNA (1)...(19): siRNA sense strand
cgguuuaucucaaugacuu

SEQ ID NO: 879022 - RNA, 19 nt, Homo sapiens
  misc_RNA (1)...(19): siRNA sense strand
ggaggcuucccuaauguga

SEQ ID NO: 879023 - RNA, 19 nt, Homo sapiens
  misc_RNA (1)...(19): siRNA sense strand
caccucaccuugcuuccuu

SEQ ID NO: 879024 - RNA, 19 nt, Homo sapiens
  misc_RNA (1)...(19): siRNA sense strand
gcugggagaccauggaugu

SEQ ID NO: 879025 - RNA, 19 nt, Homo sapiens
  misc_RNA (1)...(19): siRNA sense strand
uggaccagguguugaguga

SEQ ID NO: 879026 - RNA, 19 nt, Homo sapiens
  misc_RNA (1)...(19): siRNA sense strand
ccugaggcaugcuaccuau

SEQ ID NO: 879027 - RNA, 19 nt, Homo sapiens
  misc_RNA (1)...(19): siRNA sense strand
cuucaggacucagaucaug

SEQ ID NO: 879028 - RNA, 19 nt, Homo sapiens
  misc_RNA (1)...(19): siRNA sense strand
acuaugcccaagccuauua

SEQ ID NO: 879029 - RNA, 19 nt, Homo sapiens
  misc_RNA (1)...(19): siRNA sense strand
cucggaggcuucccuaaug

SEQ ID NO: 879030 - RNA, 19 nt, Homo sapiens
  misc_RNA (1)...(19): siRNA sense strand
acacuaugcccaagccuau

SEQ ID NO: 879031 - RNA, 19 nt, Homo sapiens
  misc_RNA (1)...(19): siRNA sense strand
gaggccgguuuaucucaau

SEQ ID NO: 879032 - RNA, 19 nt, Homo sapiens
  misc_RNA (1)...(19): siRNA sense strand
ucccuaaugugaccagugu

SEQ ID NO: 879033 - RNA, 19 nt, Homo sapiens
  misc_RNA (1)...(19): siRNA sense strand
gaccguguccucugaaggu

SEQ ID NO: 879034 - RNA, 19 nt, Homo sapiens
  misc_RNA (1)...(19): siRNA sense strand
ccaaggcgcagccgauucu

SEQ ID NO: 879035 - RNA, 19 nt, Homo sapiens
  misc_RNA (1)...(19): siRNA sense strand
gguuuccacuuccaucucu

SEQ ID NO: 879036 - RNA, 19 nt, Homo sapiens
  misc_RNA (1)...(19): siRNA sense strand
ucggaggcuucccuaaugu

SEQ ID NO: 879037 - RNA, 19 nt, Homo sapiens
  misc_RNA (1)...(19): siRNA sense strand
ugaccaguguggacuacuc

SEQ ID NO: 879038 - RNA, 19 nt, Homo sapiens
  misc_RNA (1)...(19): siRNA sense strand
ggaccguauccuugugcua

SEQ ID NO: 879039 - RNA, 19 nt, Homo sapiens
  misc_RNA (1)...(19): siRNA sense strand
acagugcccugagcuacga

SEQ ID NO: 879040 - RNA, 19 nt, Homo sapiens
  misc_RNA (1)...(19): siRNA sense strand
ugaacacggugcaguuuaa

SEQ ID NO: 879041 - RNA, 19 nt, Homo sapiens
  misc_RNA (1)...(19): siRNA sense strand
gccauaagaaccaggaaua

SEQ ID NO: 879042 - RNA, 19 nt, Homo sapiens
  misc_RNA (1)...(19): siRNA sense strand
gagauggcguguccagugu

SEQ ID NO: 879043 - RNA, 19 nt, Homo sapiens
  misc_RNA (1)...(19): siRNA sense strand
gggcagcucuucucagacu

SEQ ID NO: 879044 - RNA, 19 nt, Homo sapiens
  misc_RNA (1)...(19): siRNA sense strand
gugcgagccguacgauuua

SEQ ID NO: 879045 - RNA, 19 nt, Homo sapiens
  misc_RNA (1)...(19): siRNA sense strand
gugagacgcuaugaccuaa

SEQ ID NO: 879046 - RNA, 19 nt, Homo sapiens
  misc_RNA (1)...(19): siRNA sense strand
gauggcguguccaguguga

SEQ ID NO: 879047 - RNA, 19 nt, Homo sapiens
  misc_RNA (1)...(19): siRNA sense strand
guacaagggccauaagaac

SEQ ID NO: 879048 - RNA, 19 nt, Homo sapiens
  misc_RNA (1)...(19): siRNA sense strand
gugaacacggugcaguuua

SEQ ID NO: 879049 - RNA, 19 nt, Homo sapiens
  misc_RNA (1)...(19): siRNA sense strand
acacggugcaguuuaauga

SEQ ID NO: 879050 - RNA, 19 nt, Homo sapiens
  misc_RNA (1)...(19): siRNA sense strand
ggcgagaggaggccuauga

SEQ ID NO: 879051 - RNA, 19 nt, Homo sapiens
  misc_RNA (1)...(19): siRNA sense strand
gagacgcuaugaccuaagg

SEQ ID NO: 879052 - RNA, 19 nt, Homo sapiens
  misc_RNA (1)...(19): siRNA sense strand
gagcgagcgugacacacau

SEQ ID NO: 879053 - RNA, 19 nt, Homo sapiens
  misc_RNA (1)...(19): siRNA sense strand
gcagugacaagacgcugaa

SEQ ID NO: 879054 - RNA, 19 nt, Homo sapiens
  misc_RNA (1)...(19): siRNA sense strand
gcaggucgugcgcaaauuc

SEQ ID NO: 879055 - RNA, 19 nt, Homo sapiens
  misc_RNA (1)...(19): siRNA sense strand
ggacaaggcggugguucug

SEQ ID NO: 879056 - RNA, 19 nt, Homo sapiens
  misc_RNA (1)...(19): siRNA sense strand
ccgcagaaacgguugaaga

SEQ ID NO: 879057 - RNA, 19 nt, Homo sapiens
  misc_RNA (1)...(19): siRNA sense strand
gaacacggugcaguuuaau

SEQ ID NO: 879058 - RNA, 19 nt, Homo sapiens
  misc_RNA (1)...(19): siRNA sense strand
auaagaaccaggaauacaa

SEQ ID NO: 879059 - RNA, 19 nt, Homo sapiens
  misc_RNA (1)...(19): siRNA sense strand
uaaugaagaggccacaguu

SEQ ID NO: 879060 - RNA, 19 nt, Homo sapiens
  misc_RNA (1)...(19): siRNA sense strand
ggugaacacggugcaguuu

SEQ ID NO: 879061 - RNA, 19 nt, Homo sapiens
  misc_RNA (1)...(19): siRNA sense strand
aaugaagaggccacaguua

SEQ ID NO: 879062 - RNA, 19 nt, Homo sapiens
  misc_RNA (1)...(19): siRNA sense strand
gggcaggucgugcgcaaau

SEQ ID NO: 879063 - RNA, 19 nt, Homo sapiens
  misc_RNA (1)...(19): siRNA sense strand
gcgaguacaagggccauaa

SEQ ID NO: 879064 - RNA, 19 nt, Homo sapiens
  misc_RNA (1)...(19): siRNA sense strand
ugaagaggccacaguuauc

SEQ ID NO: 879065 - RNA, 19 nt, Homo sapiens
  misc_RNA (1)...(19): siRNA sense strand
gaguacaagggccauaaga

SEQ ID NO: 879066 - RNA, 19 nt, Homo sapiens
  misc_RNA (1)...(19): siRNA sense strand
cgugagacgcuaugaccua

SEQ ID NO: 879067 - RNA, 19 nt, Homo sapiens
  misc_RNA (1)...(19): siRNA sense strand
cauaagaaccaggaauaca

SEQ ID NO: 879068 - RNA, 19 nt, Homo sapiens
  misc_RNA (1)...(19): siRNA sense strand
agugcgagccguacgauuu

SEQ ID NO: 879069 - RNA, 19 nt, Homo sapiens
  misc_RNA (1)...(19): siRNA sense strand
gaagaggccacaguuaucc

SEQ ID NO: 879070 - RNA, 19 nt, Homo sapiens
  misc_RNA (1)...(19): siRNA sense strand
uaagaaccaggaauacaag

SEQ ID NO: 879071 - RNA, 19 nt, Homo sapiens
  misc_RNA (1)...(19): siRNA sense strand
cauugcggcuccuggacaa

SEQ ID NO: 879072 - RNA, 19 nt, Homo sapiens
  misc_RNA (1)...(19): siRNA sense strand
cggugcaguuuaaugaaga

SEQ ID NO: 879073 - RNA, 19 nt, Homo sapiens
  misc_RNA (1)...(19): siRNA sense strand
ggcaggucgugcgcaaauu

SEQ ID NO: 879074 - RNA, 19 nt, Homo sapiens
  misc_RNA (1)...(19): siRNA sense strand
gcucuauugauuccaguau

SEQ ID NO: 879075 - RNA, 19 nt, Homo sapiens
  misc_RNA (1)...(19): siRNA sense strand
ggugucagaccacgagauc

SEQ ID NO: 879076 - RNA, 19 nt, Homo sapiens
  misc_RNA (1)...(19): siRNA sense strand
augaagaggccacaguuau

SEQ ID NO: 879077 - RNA, 19 nt, Homo sapiens
  misc_RNA (1)...(19): siRNA sense strand
uauccuguccggcucuauu

SEQ ID NO: 879078 - RNA, 19 nt, Homo sapiens
  misc_RNA (1)...(19): siRNA sense strand
ugagcgagcgugacacaca

SEQ ID NO: 879079 - RNA, 19 nt, Homo sapiens
  misc_RNA (1)...(19): siRNA sense strand
cagugcagacgcuggauga

SEQ ID NO: 879080 - RNA, 19 nt, Homo sapiens
  misc_RNA (1)...(19): siRNA sense strand
ggacaaaccuucucccaaa

SEQ ID NO: 879081 - RNA, 19 nt, Homo sapiens
  misc_RNA (1)...(19): siRNA sense strand
gaauuugucugugaaagua

SEQ ID NO: 879082 - RNA, 19 nt, Homo sapiens
  misc_RNA (1)...(19): siRNA sense strand
gaacagaucuaacccaaaa

SEQ ID NO: 879083 - RNA, 19 nt, Homo sapiens
  misc_RNA (1)...(19): siRNA sense strand
ggaacaggguuuagugaaa

SEQ ID NO: 879084 - RNA, 19 nt, Homo sapiens
  misc_RNA (1)...(19): siRNA sense strand
caacacaggaucagaauuu

SEQ ID NO: 879085 - RNA, 19 nt, Homo sapiens
  misc_RNA (1)...(19): siRNA sense strand
gcagaaacaugccaagaag

SEQ ID NO: 879086 - RNA, 19 nt, Homo sapiens
  misc_RNA (1)...(19): siRNA sense strand
gaaaguaucaaacaucuca

SEQ ID NO: 879087 - RNA, 19 nt, Homo sapiens
  misc_RNA (1)...(19): siRNA sense strand
gggaaauccucaucauuau

SEQ ID NO: 879088 - RNA, 19 nt, Homo sapiens
  misc_RNA (1)...(19): siRNA sense strand
gaaaauaaguggucccaau

SEQ ID NO: 879089 - RNA, 19 nt, Homo sapiens
  misc_RNA (1)...(19): siRNA sense strand
ccaauccucuuaguuguuu

SEQ ID NO: 879090 - RNA, 19 nt, Homo sapiens
  misc_RNA (1)...(19): siRNA sense strand
gaagcagaaugcagaagga

SEQ ID NO: 879091 - RNA, 19 nt, Homo sapiens
  misc_RNA (1)...(19): siRNA sense strand
gaaugcagaaggagaauga

SEQ ID NO: 879092 - RNA, 19 nt, Homo sapiens
  misc_RNA (1)...(19): siRNA sense strand
agggaaauccucaucauua

SEQ ID NO: 879093 - RNA, 19 nt, Homo sapiens
  misc_RNA (1)...(19): siRNA sense strand
uaucaaacaucucaaagag

SEQ ID NO: 879094 - RNA, 19 nt, Homo sapiens
  misc_RNA (1)...(19): siRNA sense strand
gaacaggguuuagugaaaa

SEQ ID NO: 879095 - RNA, 19 nt, Homo sapiens
  misc_RNA (1)...(19): siRNA sense strand
guucgaaauuguccucauu

SEQ ID NO: 879096 - RNA, 19 nt, Homo sapiens
  misc_RNA (1)...(19): siRNA sense strand
ggaguuccucucauguuua

SEQ ID NO: 879097 - RNA, 19 nt, Homo sapiens
  misc_RNA (1)...(19): siRNA sense strand
ggaaauccucaucauuauu

SEQ ID NO: 879098 - RNA, 19 nt, Homo sapiens
  misc_RNA (1)...(19): siRNA sense strand
guuccucucauguuuauua

SEQ ID NO: 879099 - RNA, 19 nt, Homo sapiens
  misc_RNA (1)...(19): siRNA sense strand
acaaucaucugcuucugaa

SEQ ID NO: 879100 - RNA, 19 nt, Homo sapiens
  misc_RNA (1)...(19): siRNA sense strand
ccucucauguuuauuauuc

SEQ ID NO: 879101 - RNA, 19 nt, Homo sapiens
  misc_RNA (1)...(19): siRNA sense strand
gaguuccucucauguuuau

SEQ ID NO: 879102 - RNA, 19 nt, Homo sapiens
  misc_RNA (1)...(19): siRNA sense strand
gcagaaugcagaaggagaa

SEQ ID NO: 879103 - RNA, 19 nt, Homo sapiens
  misc_RNA (1)...(19): siRNA sense strand
caaagaggaacaggguuua

SEQ ID NO: 879104 - RNA, 19 nt, Homo sapiens
  misc_RNA (1)...(19): siRNA sense strand
caagauguguguuaaaaga

SEQ ID NO: 879105 - RNA, 19 nt, Homo sapiens
  misc_RNA (1)...(19): siRNA sense strand
gaagaucacaaggcagaaa

SEQ ID NO: 879106 - RNA, 19 nt, Homo sapiens
  misc_RNA (1)...(19): siRNA sense strand
ucaaagaggaacaggguuu

SEQ ID NO: 879107 - RNA, 19 nt, Homo sapiens
  misc_RNA (1)...(19): siRNA sense strand
ggacuuauauggggcaaaa

SEQ ID NO: 879108 - RNA, 19 nt, Homo sapiens
  misc_RNA (1)...(19): siRNA sense strand
uggaguuccucucauguuu

SEQ ID NO: 879109 - RNA, 19 nt, Homo sapiens
  misc_RNA (1)...(19): siRNA sense strand
caaaacugauugcacaaaa

SEQ ID NO: 879110 - RNA, 19 nt, Homo sapiens
  misc_RNA (1)...(19): siRNA sense strand
caggucagcuugucucagu

SEQ ID NO: 879111 - RNA, 19 nt, Homo sapiens
  misc_RNA (1)...(19): siRNA sense strand
gcagugaguggaucagaau

SEQ ID NO: 879112 - RNA, 19 nt, Homo sapiens
  misc_RNA (1)...(19): siRNA sense strand
gaggaacaggguuuaguga

SEQ ID NO: 879113 - RNA, 19 nt, Homo sapiens
  misc_RNA (1)...(19): siRNA sense strand
guaucaaacaucucaaaga

SEQ ID NO: 879114 - RNA, 19 nt, Homo sapiens
  misc_RNA (1)...(19): siRNA sense strand
ggagucaggucagcuuguc

SEQ ID NO: 879115 - RNA, 19 nt, Homo sapiens
  misc_RNA (1)...(19): siRNA sense strand
gaauucggaacagaucuaa

SEQ ID NO: 879116 - RNA, 19 nt, Homo sapiens
  misc_RNA (1)...(19): siRNA sense strand
gacacacaaucaucugcuu

SEQ ID NO: 879117 - RNA, 19 nt, Homo sapiens
  misc_RNA (1)...(19): siRNA sense strand
ggaacagaucuaacccaaa

SEQ ID NO: 879118 - RNA, 19 nt, Homo sapiens
  misc_RNA (1)...(19): siRNA sense strand
cuagaaacauugggaaagg

SEQ ID NO: 879119 - RNA, 19 nt, Homo sapiens
  misc_RNA (1)...(19): siRNA sense strand
gcaacacaggaucagaauu

SEQ ID NO: 879120 - RNA, 19 nt, Homo sapiens
  misc_RNA (1)...(19): siRNA sense strand
gagaaagaaaguaucaaac

SEQ ID NO: 879121 - RNA, 19 nt, Homo sapiens
  misc_RNA (1)...(19): siRNA sense strand
caugagaaagaaaguauca

SEQ ID NO: 879122 - RNA, 19 nt, Homo sapiens
  misc_RNA (1)...(19): siRNA sense strand
auucagaacacuaugguuu

SEQ ID NO: 879123 - RNA, 19 nt, Homo sapiens
  misc_RNA (1)...(19): siRNA sense strand
uagaaacauugggaaagga

SEQ ID NO: 879124 - RNA, 19 nt, Homo sapiens
  misc_RNA (1)...(19): siRNA sense strand
gucccaauccucuuaguug

SEQ ID NO: 879125 - RNA, 19 nt, Homo sapiens
  misc_RNA (1)...(19): siRNA sense strand
gacaaaccuucucccaaaa

SEQ ID NO: 879126 - RNA, 19 nt, Homo sapiens
  misc_RNA (1)...(19): siRNA sense strand
aaagaagccuggaguuccu

SEQ ID NO: 879127 - RNA, 19 nt, Homo sapiens
  misc_RNA (1)...(19): siRNA sense strand
gccuggaguuccucucaug

SEQ ID NO: 879128 - RNA, 19 nt, Homo sapiens
  misc_RNA (1)...(19): siRNA sense strand
agaaacaugccaagaagca

SEQ ID NO: 879129 - RNA, 19 nt, Homo sapiens
  misc_RNA (1)...(19): siRNA sense strand
cacaaucaucugcuucuga

SEQ ID NO: 879130 - RNA, 19 nt, Homo sapiens
  misc_RNA (1)...(19): siRNA sense strand
gcuagaaacauugggaaag

SEQ ID NO: 879131 - RNA, 19 nt, Homo sapiens
  misc_RNA (1)...(19): siRNA sense strand
uuucaagaaugcagugagu

SEQ ID NO: 879132 - RNA, 19 nt, Homo sapiens
  misc_RNA (1)...(19): siRNA sense strand
gaaugcagugaguggauca

SEQ ID NO: 879133 - RNA, 19 nt, Homo sapiens
  misc_RNA (1)...(19): siRNA sense strand
agaauucggaacagaucua

SEQ ID NO: 879134 - RNA, 19 nt, Homo sapiens
  misc_RNA (1)...(19): siRNA sense strand
gcaccggacacacaaucau

SEQ ID NO: 879135 - RNA, 19 nt, Homo sapiens
  misc_RNA (1)...(19): siRNA sense strand
uggcaacacaggaucagaa

SEQ ID NO: 879136 - RNA, 19 nt, Homo sapiens
  misc_RNA (1)...(19): siRNA sense strand
gugaguggaucagaauguc

SEQ ID NO: 879137 - RNA, 19 nt, Homo sapiens
  misc_RNA (1)...(19): siRNA sense strand
ugcagugaguggaucagaa

SEQ ID NO: 879138 - RNA, 19 nt, Homo sapiens
  misc_RNA (1)...(19): siRNA sense strand
aaagaauucggaacagauc

SEQ ID NO: 879139 - RNA, 19 nt, Homo sapiens
  misc_RNA (1)...(19): siRNA sense strand
cauugggaaaggacuuaua

SEQ ID NO: 879140 - RNA, 19 nt, Homo sapiens
  misc_RNA (1)...(19): siRNA sense strand
ugggaaaggacuuauaugg

SEQ ID NO: 879141 - RNA, 19 nt, Homo sapiens
  misc_RNA (1)...(19): siRNA sense strand
gugcaugagaaagaaagua

SEQ ID NO: 879142 - RNA, 19 nt, Homo sapiens
  misc_RNA (1)...(19): siRNA sense strand
ucccaauccucuuaguugu

SEQ ID NO: 879143 - RNA, 19 nt, Homo sapiens
  misc_RNA (1)...(19): siRNA sense strand
ggucccaauccucuuaguu

SEQ ID NO: 879144 - RNA, 19 nt, Homo sapiens
  misc_RNA (1)...(19): siRNA sense strand
aaugccaaguucgaaauug

SEQ ID NO: 879145 - RNA, 19 nt, Homo sapiens
  misc_RNA (1)...(19): siRNA sense strand
gaucacaaggcagaaacau

SEQ ID NO: 879146 - RNA, 19 nt, Homo sapiens
  misc_RNA (1)...(19): siRNA sense strand
aacacaggaucagaauuug

SEQ ID NO: 879147 - RNA, 19 nt, Homo sapiens
  misc_RNA (1)...(19): siRNA sense strand
ggcaacacaggaucagaau

SEQ ID NO: 879148 - RNA, 19 nt, Homo sapiens
  misc_RNA (1)...(19): siRNA sense strand
gcacgaagcugauguguuc

SEQ ID NO: 879149 - RNA, 19 nt, Homo sapiens
  misc_RNA (1)...(19): siRNA sense strand
caaggaauguggacaguua

SEQ ID NO: 879150 - RNA, 19 nt, Homo sapiens
  misc_RNA (1)...(19): siRNA sense strand
gaaaguaguuccuauagag

SEQ ID NO: 879151 - RNA, 19 nt, Homo sapiens
  misc_RNA (1)...(19): siRNA sense strand
ugauaaagcucaaauacga

SEQ ID NO: 879152 - RNA, 19 nt, Homo sapiens
  misc_RNA (1)...(19): siRNA sense strand
uuaaagggcugucagaaga

SEQ ID NO: 879153 - RNA, 19 nt, Homo sapiens
  misc_RNA (1)...(19): siRNA sense strand
gaggaaaacugcauauauu

SEQ ID NO: 879154 - RNA, 19 nt, Homo sapiens
  misc_RNA (1)...(19): siRNA sense strand
gaauguggacaguuacuaa

SEQ ID NO: 879155 - RNA, 19 nt, Homo sapiens
  misc_RNA (1)...(19): siRNA sense strand
gcaaaggaaggccaagaaa

SEQ ID NO: 879156 - RNA, 19 nt, Homo sapiens
  misc_RNA (1)...(19): siRNA sense strand
gaauuuggagacuuugaua

SEQ ID NO: 879157 - RNA, 19 nt, Homo sapiens
  misc_RNA (1)...(19): siRNA sense strand
cagaugaaauggaaaguag

SEQ ID NO: 879158 - RNA, 19 nt, Homo sapiens
  misc_RNA (1)...(19): siRNA sense strand
gacaguuacuaauaucuga

SEQ ID NO: 879159 - RNA, 19 nt, Homo sapiens
  misc_RNA (1)...(19): siRNA sense strand
ugaaagucuugguggauuu

SEQ ID NO: 879160 - RNA, 19 nt, Homo sapiens
  misc_RNA (1)...(19): siRNA sense strand
gaacagaugaaauggaaag

SEQ ID NO: 879161 - RNA, 19 nt, Homo sapiens
  misc_RNA (1)...(19): siRNA sense strand
uggaacagaugaaauggaa

SEQ ID NO: 879162 - RNA, 19 nt, Homo sapiens
  misc_RNA (1)...(19): siRNA sense strand
gaagauaccagguccacau

SEQ ID NO: 879163 - RNA, 19 nt, Homo sapiens
  misc_RNA (1)...(19): siRNA sense strand
gagcagaauuuggagacuu

SEQ ID NO: 879164 - RNA, 19 nt, Homo sapiens
  misc_RNA (1)...(19): siRNA sense strand
caagcucaguugaacagaa

SEQ ID NO: 879165 - RNA, 19 nt, Homo sapiens
  misc_RNA (1)...(19): siRNA sense strand
aaagggcugucagaagaua

SEQ ID NO: 879166 - RNA, 19 nt, Homo sapiens
  misc_RNA (1)...(19): siRNA sense strand
gaugaaauggaaaguaguu

SEQ ID NO: 879167 - RNA, 19 nt, Homo sapiens
  misc_RNA (1)...(19): siRNA sense strand
caacaucaagagcagaauu

SEQ ID NO: 879168 - RNA, 19 nt, Homo sapiens
  misc_RNA (1)...(19): siRNA sense strand
aagcucaguugaacagaaa

SEQ ID NO: 879169 - RNA, 19 nt, Homo sapiens
  misc_RNA (1)...(19): siRNA sense strand
aaacuguacuucaggagau

SEQ ID NO: 879170 - RNA, 19 nt, Homo sapiens
  misc_RNA (1)...(19): siRNA sense strand
cgaagcugauguguucuuu

SEQ ID NO: 879171 - RNA, 19 nt, Homo sapiens
  misc_RNA (1)...(19): siRNA sense strand
cauuauaagugcauguugu

SEQ ID NO: 879172 - RNA, 19 nt, Homo sapiens
  misc_RNA (1)...(19): siRNA sense strand
agauaggucuccacacaga

SEQ ID NO: 879173 - RNA, 19 nt, Homo sapiens
  misc_RNA (1)...(19): siRNA sense strand
gcaugauaaagcucaaaua

SEQ ID NO: 879174 - RNA, 19 nt, Homo sapiens
  misc_RNA (1)...(19): siRNA sense strand
aagcugauguguucuuugu

SEQ ID NO: 879175 - RNA, 19 nt, Homo sapiens
  misc_RNA (1)...(19): siRNA sense strand
caagaaaacugcacauaac

SEQ ID NO: 879176 - RNA, 19 nt, Homo sapiens
  misc_RNA (1)...(19): siRNA sense strand
caaauagagacaaggaaug

SEQ ID NO: 879177 - RNA, 19 nt, Homo sapiens
  misc_RNA (1)...(19): siRNA sense strand
uguggacaguuacuaauau

SEQ ID NO: 879178 - RNA, 19 nt, Homo sapiens
  misc_RNA (1)...(19): siRNA sense strand
ccacuaccacugugcauug

SEQ ID NO: 879179 - RNA, 19 nt, Homo sapiens
  misc_RNA (1)...(19): siRNA sense strand
ggacaguuacuaauaucug

SEQ ID NO: 879180 - RNA, 19 nt, Homo sapiens
  misc_RNA (1)...(19): siRNA sense strand
aguaguuccuauagagaua

SEQ ID NO: 879181 - RNA, 19 nt, Homo sapiens
  misc_RNA (1)...(19): siRNA sense strand
ccauggaacagaugaaaug

SEQ ID NO: 879182 - RNA, 19 nt, Homo sapiens
  misc_RNA (1)...(19): siRNA sense strand
ggaauguggacaguuacua

SEQ ID NO: 879183 - RNA, 19 nt, Homo sapiens
  misc_RNA (1)...(19): siRNA sense strand
gaagauguccaaaaggaaa

SEQ ID NO: 879184 - RNA, 19 nt, Homo sapiens
  misc_RNA (1)...(19): siRNA sense strand
ucaaauagagacaaggaau

SEQ ID NO: 879185 - RNA, 19 nt, Homo sapiens
  misc_RNA (1)...(19): siRNA sense strand
gcucacaacaacaucaaga

SEQ ID NO: 879186 - RNA, 19 nt, Homo sapiens
  misc_RNA (1)...(19): siRNA sense strand
aaagaaaagucgcaaagga

SEQ ID NO: 879187 - RNA, 19 nt, Homo sapiens
  misc_RNA (1)...(19): siRNA sense strand
uaagucaaauagagacaag

SEQ ID NO: 879188 - RNA, 19 nt, Homo sapiens
  misc_RNA (1)...(19): siRNA sense strand
cgagagaaaccuucacaag

SEQ ID NO: 879189 - RNA, 19 nt, Homo sapiens
  misc_RNA (1)...(19): siRNA sense strand
cuggagcccucaucaccua

SEQ ID NO: 879190 - RNA, 19 nt, Homo sapiens
  misc_RNA (1)...(19): siRNA sense strand
caaauacgagagaaaccuu

SEQ ID NO: 879191 - RNA, 19 nt, Homo sapiens
  misc_RNA (1)...(19): siRNA sense strand
agcagaauuuggagacuuu

SEQ ID NO: 879192 - RNA, 19 nt, Homo sapiens
  misc_RNA (1)...(19): siRNA sense strand
gacaaggaauguggacagu

SEQ ID NO: 879193 - RNA, 19 nt, Homo sapiens
  misc_RNA (1)...(19): siRNA sense strand
caugauaaagcucaaauac

SEQ ID NO: 879194 - RNA, 19 nt, Homo sapiens
  misc_RNA (1)...(19): siRNA sense strand
gaaaaugaagcacgaggaa

SEQ ID NO: 879195 - RNA, 19 nt, Homo sapiens
  misc_RNA (1)...(19): siRNA sense strand
caucugcuuugguaucauc

SEQ ID NO: 879196 - RNA, 19 nt, Homo sapiens
  misc_RNA (1)...(19): siRNA sense strand
agaagcagcccuagugaca

SEQ ID NO: 879197 - RNA, 19 nt, Homo sapiens
  misc_RNA (1)...(19): siRNA sense strand
cacagaagcagcccuagug

SEQ ID NO: 879198 - RNA, 19 nt, Homo sapiens
  misc_RNA (1)...(19): siRNA sense strand
gcagcugcccauuauaagu

SEQ ID NO: 879199 - RNA, 19 nt, Homo sapiens
  misc_RNA (1)...(19): siRNA sense strand
ucacaggacauaccacuac

SEQ ID NO: 879200 - RNA, 19 nt, Homo sapiens
  misc_RNA (1)...(19): siRNA sense strand
guggacaguuacuaauauc

SEQ ID NO: 879201 - RNA, 19 nt, Homo sapiens
  misc_RNA (1)...(19): siRNA sense strand
aaauagagacaaggaaugu

SEQ ID NO: 879202 - RNA, 19 nt, Homo sapiens
  misc_RNA (1)...(19): siRNA sense strand
cagcugcccauuauaagug

SEQ ID NO: 879203 - RNA, 19 nt, Homo sapiens
  misc_RNA (1)...(19): siRNA sense strand
gacauaccacuaccacugu

SEQ ID NO: 879204 - RNA, 19 nt, Homo sapiens
  misc_RNA (1)...(19): siRNA sense strand
gaagcugauguguucuuug

SEQ ID NO: 879205 - RNA, 19 nt, Homo sapiens
  misc_RNA (1)...(19): siRNA sense strand
aaauguggcuuuuguaagu

SEQ ID NO: 879206 - RNA, 19 nt, Homo sapiens
  misc_RNA (1)...(19): siRNA sense strand
cuacaagacagcgcaaaug

SEQ ID NO: 879207 - RNA, 19 nt, Homo sapiens
  misc_RNA (1)...(19): siRNA sense strand
ccucaucaccuaaaaguaa

SEQ ID NO: 879208 - RNA, 19 nt, Homo sapiens
  misc_RNA (1)...(19): siRNA sense strand
acaagaaaacugcacauaa

SEQ ID NO: 879209 - RNA, 19 nt, Homo sapiens
  misc_RNA (1)...(19): siRNA sense strand
gcacaguccagcucacaac

SEQ ID NO: 879210 - RNA, 19 nt, Homo sapiens
  misc_RNA (1)...(19): siRNA sense strand
acagaugaaauggaaagua

SEQ ID NO: 879211 - RNA, 19 nt, Homo sapiens
  misc_RNA (1)...(19): siRNA sense strand
caaaggaaggccaagaaaa

SEQ ID NO: 879212 - RNA, 19 nt, Homo sapiens
  misc_RNA (1)...(19): siRNA sense strand
ccauuguccuggagcaaca

SEQ ID NO: 879213 - RNA, 19 nt, Homo sapiens
  misc_RNA (1)...(19): siRNA sense strand
uacaagacagcgcaaaugu

SEQ ID NO: 879214 - RNA, 19 nt, Homo sapiens
  misc_RNA (1)...(19): siRNA sense strand
augaaagucuugguggauu

SEQ ID NO: 879215 - RNA, 19 nt, Homo sapiens
  misc_RNA (1)...(19): siRNA sense strand
aaaguaguuccuauagaga

SEQ ID NO: 879216 - RNA, 19 nt, Homo sapiens
  misc_RNA (1)...(19): siRNA sense strand
uggcagcgcaccauaagug

SEQ ID NO: 879217 - RNA, 19 nt, Homo sapiens
  misc_RNA (1)...(19): siRNA sense strand
acacucugauaaugaaagu

SEQ ID NO: 879218 - RNA, 19 nt, Homo sapiens
  misc_RNA (1)...(19): siRNA sense strand
gcucaaauacgagagaaac

SEQ ID NO: 879219 - RNA, 19 nt, Homo sapiens
  misc_RNA (1)...(19): siRNA sense strand
cgaggaaaacugcauauau

SEQ ID NO: 879220 - RNA, 19 nt, Homo sapiens
  misc_RNA (1)...(19): siRNA sense strand
gauaccagguccacauccu

SEQ ID NO: 879221 - RNA, 19 nt, Homo sapiens
  misc_RNA (1)...(19): siRNA sense strand
gaacuggagcccucaucac

SEQ ID NO: 879222 - RNA, 19 nt, Homo sapiens
  misc_RNA (1)...(19): siRNA sense strand
aacaucaagagcagaauuu

SEQ ID NO: 879223 - RNA, 19 nt, Homo sapiens
  misc_RNA (1)...(19): siRNA sense strand
gcacgaggaaaacugcaua

SEQ ID NO: 879224 - RNA, 19 nt, Homo sapiens
  misc_RNA (1)...(19): siRNA sense strand
ugacaccaggccuaaaugu

SEQ ID NO: 879225 - RNA, 19 nt, Homo sapiens
  misc_RNA (1)...(19): siRNA sense strand
ggagcccucaucaccuaaa

SEQ ID NO: 879226 - RNA, 19 nt, Homo sapiens
  misc_RNA (1)...(19): siRNA sense strand
ggaacagaugaaauggaaa

SEQ ID NO: 879227 - RNA, 19 nt, Homo sapiens
  misc_RNA (1)...(19): siRNA sense strand
gauaggucuccacacagaa

SEQ ID NO: 879228 - RNA, 19 nt, Homo sapiens
  misc_RNA (1)...(19): siRNA sense strand
cgcaaaggaaggccaagaa

SEQ ID NO: 879229 - RNA, 19 nt, Homo sapiens
  misc_RNA (1)...(19): siRNA sense strand
guaagucaaauagagacaa

SEQ ID NO: 879230 - RNA, 19 nt, Homo sapiens
  misc_RNA (1)...(19): siRNA sense strand
gacaccaggccuaaaugug

SEQ ID NO: 879231 - RNA, 19 nt, Homo sapiens
  misc_RNA (1)...(19): siRNA sense strand
acagaagcagcccuaguga

SEQ ID NO: 879232 - RNA, 19 nt, Homo sapiens
  misc_RNA (1)...(19): siRNA sense strand
uaaagggcugucagaagau

SEQ ID NO: 879233 - RNA, 19 nt, Homo sapiens
  misc_RNA (1)...(19): siRNA sense strand
gcacgaagcugauguguuc

SEQ ID NO: 879234 - RNA, 19 nt, Homo sapiens
  misc_RNA (1)...(19): siRNA sense strand
caaggaauguggacaguua

SEQ ID NO: 879235 - RNA, 19 nt, Homo sapiens
  misc_RNA (1)...(19): siRNA sense strand
gaaaguaguuccuauagag

SEQ ID NO: 879236 - RNA, 19 nt, Homo sapiens
  misc_RNA (1)...(19): siRNA sense strand
ugauaaagcucaaauacga

SEQ ID NO: 879237 - RNA, 19 nt, Homo sapiens
  misc_RNA (1)...(19): siRNA sense strand
uuaaagggcugucagaaga

SEQ ID NO: 879238 - RNA, 19 nt, Homo sapiens
  misc_RNA (1)...(19): siRNA sense strand
gaggaaaacugcauauauu

SEQ ID NO: 879239 - RNA, 19 nt, Homo sapiens
  misc_RNA (1)...(19): siRNA sense strand
gaauguggacaguuacuaa

SEQ ID NO: 879240 - RNA, 19 nt, Homo sapiens
  misc_RNA (1)...(19): siRNA sense strand
gcaaaggaaggccaagaaa

SEQ ID NO: 879241 - RNA, 19 nt, Homo sapiens
  misc_RNA (1)...(19): siRNA sense strand
gaauuuggagacuuugaua

SEQ ID NO: 879242 - RNA, 19 nt, Homo sapiens
  misc_RNA (1)...(19): siRNA sense strand
cagaugaaauggaaaguag

SEQ ID NO: 879243 - RNA, 19 nt, Homo sapiens
  misc_RNA (1)...(19): siRNA sense strand
gacaguuacuaauaucuga

SEQ ID NO: 879244 - RNA, 19 nt, Homo sapiens
  misc_RNA (1)...(19): siRNA sense strand
ugaaagucuugguggauuu

SEQ ID NO: 879245 - RNA, 19 nt, Homo sapiens
  misc_RNA (1)...(19): siRNA sense strand
gaacagaugaaauggaaag

SEQ ID NO: 879246 - RNA, 19 nt, Homo sapiens
  misc_RNA (1)...(19): siRNA sense strand
uggaacagaugaaauggaa

SEQ ID NO: 879247 - RNA, 19 nt, Homo sapiens
  misc_RNA (1)...(19): siRNA sense strand
gaagauaccagguccacau

SEQ ID NO: 879248 - RNA, 19 nt, Homo sapiens
  misc_RNA (1)...(19): siRNA sense strand
gagcagaauuuggagacuu

SEQ ID NO: 879249 - RNA, 19 nt, Homo sapiens
  misc_RNA (1)...(19): siRNA sense strand
caagcucaguugaacagaa

SEQ ID NO: 879250 - RNA, 19 nt, Homo sapiens
  misc_RNA (1)...(19): siRNA sense strand
aaagggcugucagaagaua

SEQ ID NO: 879251 - RNA, 19 nt, Homo sapiens
  misc_RNA (1)...(19): siRNA sense strand
gaugaaauggaaaguaguu

SEQ ID NO: 879252 - RNA, 19 nt, Homo sapiens
  misc_RNA (1)...(19): siRNA sense strand
caacaucaagagcagaauu

SEQ ID NO: 879253 - RNA, 19 nt, Homo sapiens
  misc_RNA (1)...(19): siRNA sense strand
aagcucaguugaacagaaa

SEQ ID NO: 879254 - RNA, 19 nt, Homo sapiens
  misc_RNA (1)...(19): siRNA sense strand
aaacuguacuucaggagau

SEQ ID NO: 879255 - RNA, 19 nt, Homo sapiens
  misc_RNA (1)...(19): siRNA sense strand
cgaagcugauguguucuuu

SEQ ID NO: 879256 - RNA, 19 nt, Homo sapiens
  misc_RNA (1)...(19): siRNA sense strand
cauuauaagugcauguugu

SEQ ID NO: 879257 - RNA, 19 nt, Homo sapiens
  misc_RNA (1)...(19): siRNA sense strand
agauaggucuccacacaga

SEQ ID NO: 879258 - RNA, 19 nt, Homo sapiens
  misc_RNA (1)...(19): siRNA sense strand
gcaugauaaagcucaaaua

SEQ ID NO: 879259 - RNA, 19 nt, Homo sapiens
  misc_RNA (1)...(19): siRNA sense strand
aagcugauguguucuuugu

SEQ ID NO: 879260 - RNA, 19 nt, Homo sapiens
  misc_RNA (1)...(19): siRNA sense strand
caagaaaacugcacauaac

SEQ ID NO: 879261 - RNA, 19 nt, Homo sapiens
  misc_RNA (1)...(19): siRNA sense strand
caaauagagacaaggaaug

SEQ ID NO: 879262 - RNA, 19 nt, Homo sapiens
  misc_RNA (1)...(19): siRNA sense strand
uguggacaguuacuaauau

SEQ ID NO: 879263 - RNA, 19 nt, Homo sapiens
  misc_RNA (1)...(19): siRNA sense strand
ccacuaccacugugcauug

SEQ ID NO: 879264 - RNA, 19 nt, Homo sapiens
  misc_RNA (1)...(19): siRNA sense strand
ggacaguuacuaauaucug

SEQ ID NO: 879265 - RNA, 19 nt, Homo sapiens
  misc_RNA (1)...(19): siRNA sense strand
aguaguuccuauagagaua

SEQ ID NO: 879266 - RNA, 19 nt, Homo sapiens
  misc_RNA (1)...(19): siRNA sense strand
ccauggaacagaugaaaug

SEQ ID NO: 879267 - RNA, 19 nt, Homo sapiens
  misc_RNA (1)...(19): siRNA sense strand
ggaauguggacaguuacua

SEQ ID NO: 879268 - RNA, 19 nt, Homo sapiens
  misc_RNA (1)...(19): siRNA sense strand
gaagauguccaaaaggaaa

SEQ ID NO: 879269 - RNA, 19 nt, Homo sapiens
  misc_RNA (1)...(19): siRNA sense strand
ucaaauagagacaaggaau

SEQ ID NO: 879270 - RNA, 19 nt, Homo sapiens
  misc_RNA (1)...(19): siRNA sense strand
gcucacaacaacaucaaga

SEQ ID NO: 879271 - RNA, 19 nt, Homo sapiens
  misc_RNA (1)...(19): siRNA sense strand
aaagaaaagucgcaaagga

SEQ ID NO: 879272 - RNA, 19 nt, Homo sapiens
  misc_RNA (1)...(19): siRNA sense strand
uaagucaaauagagacaag

SEQ ID NO: 879273 - RNA, 19 nt, Homo sapiens
  misc_RNA (1)...(19): siRNA sense strand
cgagagaaaccuucacaag

SEQ ID NO: 879274 - RNA, 19 nt, Homo sapiens
  misc_RNA (1)...(19): siRNA sense strand
cuggagcccucaucaccua

SEQ ID NO: 879275 - RNA, 19 nt, Homo sapiens
  misc_RNA (1)...(19): siRNA sense strand
caaauacgagagaaaccuu

SEQ ID NO: 879276 - RNA, 19 nt, Homo sapiens
  misc_RNA (1)...(19): siRNA sense strand
agcagaauuuggagacuuu

SEQ ID NO: 879277 - RNA, 19 nt, Homo sapiens
  misc_RNA (1)...(19): siRNA sense strand
gacaaggaauguggacagu

SEQ ID NO: 879278 - RNA, 19 nt, Homo sapiens
  misc_RNA (1)...(19): siRNA sense strand
caugauaaagcucaaauac

SEQ ID NO: 879279 - RNA, 19 nt, Homo sapiens
  misc_RNA (1)...(19): siRNA sense strand
gaaaaugaagcacgaggaa

SEQ ID NO: 879280 - RNA, 19 nt, Homo sapiens
  misc_RNA (1)...(19): siRNA sense strand
caucugcuuugguaucauc

SEQ ID NO: 879281 - RNA, 19 nt, Homo sapiens
  misc_RNA (1)...(19): siRNA sense strand
agaagcagcccuagugaca

SEQ ID NO: 879282 - RNA, 19 nt, Homo sapiens
  misc_RNA (1)...(19): siRNA sense strand
cacagaagcagcccuagug

SEQ ID NO: 879283 - RNA, 19 nt, Homo sapiens
  misc_RNA (1)...(19): siRNA sense strand
gcagcugcccauuauaagu

SEQ ID NO: 879284 - RNA, 19 nt, Homo sapiens
  misc_RNA (1)...(19): siRNA sense strand
ucacaggacauaccacuac

SEQ ID NO: 879285 - RNA, 19 nt, Homo sapiens
  misc_RNA (1)...(19): siRNA sense strand
guggacaguuacuaauauc

SEQ ID NO: 879286 - RNA, 19 nt, Homo sapiens
  misc_RNA (1)...(19): siRNA sense strand
aaauagagacaaggaaugu

SEQ ID NO: 879287 - RNA, 19 nt, Homo sapiens
  misc_RNA (1)...(19): siRNA sense strand
cagcugcccauuauaagug

SEQ ID NO: 879288 - RNA, 19 nt, Homo sapiens
  misc_RNA (1)...(19): siRNA sense strand
gacauaccacuaccacugu

SEQ ID NO: 879289 - RNA, 19 nt, Homo sapiens
  misc_RNA (1)...(19): siRNA sense strand
gaagcugauguguucuuug

SEQ ID NO: 879290 - RNA, 19 nt, Homo sapiens
  misc_RNA (1)...(19): siRNA sense strand
aaauguggcuuuuguaagu

SEQ ID NO: 879291 - RNA, 19 nt, Homo sapiens
  misc_RNA (1)...(19): siRNA sense strand
cuacaagacagcgcaaaug

SEQ ID NO: 879292 - RNA, 19 nt, Homo sapiens
  misc_RNA (1)...(19): siRNA sense strand
ccucaucaccuaaaaguaa

SEQ ID NO: 879293 - RNA, 19 nt, Homo sapiens
  misc_RNA (1)...(19): siRNA sense strand
acaagaaaacugcacauaa

SEQ ID NO: 879294 - RNA, 19 nt, Homo sapiens
  misc_RNA (1)...(19): siRNA sense strand
gcacaguccagcucacaac

SEQ ID NO: 879295 - RNA, 19 nt, Homo sapiens
  misc_RNA (1)...(19): siRNA sense strand
acagaugaaauggaaagua

SEQ ID NO: 879296 - RNA, 19 nt, Homo sapiens
  misc_RNA (1)...(19): siRNA sense strand
caaaggaaggccaagaaaa

SEQ ID NO: 879297 - RNA, 19 nt, Homo sapiens
  misc_RNA (1)...(19): siRNA sense strand
ccauuguccuggagcaaca

SEQ ID NO: 879298 - RNA, 19 nt, Homo sapiens
  misc_RNA (1)...(19): siRNA sense strand
uacaagacagcgcaaaugu

SEQ ID NO: 879299 - RNA, 19 nt, Homo sapiens
  misc_RNA (1)...(19): siRNA sense strand
augaaagucuugguggauu

SEQ ID NO: 879300 - RNA, 19 nt, Homo sapiens
  misc_RNA (1)...(19): siRNA sense strand
aaaguaguuccuauagaga

SEQ ID NO: 879301 - RNA, 19 nt, Homo sapiens
  misc_RNA (1)...(19): siRNA sense strand
uggcagcgcaccauaagug

SEQ ID NO: 879302 - RNA, 19 nt, Homo sapiens
  misc_RNA (1)...(19): siRNA sense strand
acacucugauaaugaaagu

SEQ ID NO: 879303 - RNA, 19 nt, Homo sapiens
  misc_RNA (1)...(19): siRNA sense strand
gcucaaauacgagagaaac

SEQ ID NO: 879304 - RNA, 19 nt, Homo sapiens
  misc_RNA (1)...(19): siRNA sense strand
cgaggaaaacugcauauau

SEQ ID NO: 879305 - RNA, 19 nt, Homo sapiens
  misc_RNA (1)...(19): siRNA sense strand
gauaccagguccacauccu

SEQ ID NO: 879306 - RNA, 19 nt, Homo sapiens
  misc_RNA (1)...(19): siRNA sense strand
gaacuggagcccucaucac

SEQ ID NO: 879307 - RNA, 19 nt, Homo sapiens
  misc_RNA (1)...(19): siRNA sense strand
aacaucaagagcagaauuu

SEQ ID NO: 879308 - RNA, 19 nt, Homo sapiens
  misc_RNA (1)...(19): siRNA sense strand
gcacgaggaaaacugcaua

SEQ ID NO: 879309 - RNA, 19 nt, Homo sapiens
  misc_RNA (1)...(19): siRNA sense strand
ugacaccaggccuaaaugu

SEQ ID NO: 879310 - RNA, 19 nt, Homo sapiens
  misc_RNA (1)...(19): siRNA sense strand
ggagcccucaucaccuaaa

SEQ ID NO: 879311 - RNA, 19 nt, Homo sapiens
  misc_RNA (1)...(19): siRNA sense strand
ggaacagaugaaauggaaa

SEQ ID NO: 879312 - RNA, 19 nt, Homo sapiens
  misc_RNA (1)...(19): siRNA sense strand
gauaggucuccacacagaa

SEQ ID NO: 879313 - RNA, 19 nt, Homo sapiens
  misc_RNA (1)...(19): siRNA sense strand
cgcaaaggaaggccaagaa

SEQ ID NO: 879314 - RNA, 19 nt, Homo sapiens
  misc_RNA (1)...(19): siRNA sense strand
guaagucaaauagagacaa

SEQ ID NO: 879315 - RNA, 19 nt, Homo sapiens
  misc_RNA (1)...(19): siRNA sense strand
gacaccaggccuaaaugug

SEQ ID NO: 879316 - RNA, 19 nt, Homo sapiens
  misc_RNA (1)...(19): siRNA sense strand
acagaagcagcccuaguga

SEQ ID NO: 879317 - RNA, 19 nt, Homo sapiens
  misc_RNA (1)...(19): siRNA sense strand
uaaagggcugucagaagau

SEQ ID NO: 879318 - RNA, 19 nt, Homo sapiens
  misc_RNA (1)...(19): siRNA sense strand
gagcaagccugagauugua

SEQ ID NO: 879319 - RNA, 19 nt, Homo sapiens
  misc_RNA (1)...(19): siRNA sense strand
aaccagaucuagauucuua

SEQ ID NO: 879320 - RNA, 19 nt, Homo sapiens
  misc_RNA (1)...(19): siRNA sense strand
gagcaggccuggaugaaug

SEQ ID NO: 879321 - RNA, 19 nt, Homo sapiens
  misc_RNA (1)...(19): siRNA sense strand
gcagagggacuacgugauu

SEQ ID NO: 879322 - RNA, 19 nt, Homo sapiens
  misc_RNA (1)...(19): siRNA sense strand
caaaccagaucuagauucu

SEQ ID NO: 879323 - RNA, 19 nt, Homo sapiens
  misc_RNA (1)...(19): siRNA sense strand
cugcagagcucauugaaag

SEQ ID NO: 879324 - RNA, 19 nt, Homo sapiens
  misc_RNA (1)...(19): siRNA sense strand
ucaugaagauagagaaguu

SEQ ID NO: 879325 - RNA, 19 nt, Homo sapiens
  misc_RNA (1)...(19): siRNA sense strand
gcacuugauccgauacaaa

SEQ ID NO: 879326 - RNA, 19 nt, Homo sapiens
  misc_RNA (1)...(19): siRNA sense strand
ucuagauucuuacguguuu

SEQ ID NO: 879327 - RNA, 19 nt, Homo sapiens
  misc_RNA (1)...(19): siRNA sense strand
uguagaaugugucauggaa

SEQ ID NO: 879328 - RNA, 19 nt, Homo sapiens
  misc_RNA (1)...(19): siRNA sense strand
ggagagcaagccugagauu

SEQ ID NO: 879329 - RNA, 19 nt, Homo sapiens
  misc_RNA (1)...(19): siRNA sense strand
uagaaugugucauggaaca

SEQ ID NO: 879330 - RNA, 19 nt, Homo sapiens
  misc_RNA (1)...(19): siRNA sense strand
aaauggagauggagaggau

SEQ ID NO: 879331 - RNA, 19 nt, Homo sapiens
  misc_RNA (1)...(19): siRNA sense strand
gaagggcucacagcacuug

SEQ ID NO: 879332 - RNA, 19 nt, Homo sapiens
  misc_RNA (1)...(19): siRNA sense strand
gauuguagaaugugucaug

SEQ ID NO: 879333 - RNA, 19 nt, Homo sapiens
  misc_RNA (1)...(19): siRNA sense strand
gcagagcucauugaaagau

SEQ ID NO: 879334 - RNA, 19 nt, Homo sapiens
  misc_RNA (1)...(19): siRNA sense strand
ggugucgccucaugaagau

SEQ ID NO: 879335 - RNA, 19 nt, Homo sapiens
  misc_RNA (1)...(19): siRNA sense strand
uggaacagcuggagcacau

SEQ ID NO: 879336 - RNA, 19 nt, Homo sapiens
  misc_RNA (1)...(19): siRNA sense strand
cacagcacuugauccgaua

SEQ ID NO: 879337 - RNA, 19 nt, Homo sapiens
  misc_RNA (1)...(19): siRNA sense strand
agccugagauuguagaaug

SEQ ID NO: 879338 - RNA, 19 nt, Homo sapiens
  misc_RNA (1)...(19): siRNA sense strand
cagagggacuacgugauug

SEQ ID NO: 879339 - RNA, 19 nt, Homo sapiens
  misc_RNA (1)...(19): siRNA sense strand
ggucagcauccaccaaaug

SEQ ID NO: 879340 - RNA, 19 nt, Homo sapiens
  misc_RNA (1)...(19): siRNA sense strand
cagagcucauugaaagauu

SEQ ID NO: 879341 - RNA, 19 nt, Homo sapiens
  misc_RNA (1)...(19): siRNA sense strand
gguagaaccagacacagau

SEQ ID NO: 879342 - RNA, 19 nt, Homo sapiens
  misc_RNA (1)...(19): siRNA sense strand
cagaugagcagagggacua

SEQ ID NO: 879343 - RNA, 19 nt, Homo sapiens
  misc_RNA (1)...(19): siRNA sense strand
gaaggucagcauccaccaa

SEQ ID NO: 879344 - RNA, 19 nt, Homo sapiens
  misc_RNA (1)...(19): siRNA sense strand
gugagagaacgacaagaaa

SEQ ID NO: 879345 - RNA, 19 nt, Homo sapiens
  misc_RNA (1)...(19): siRNA sense strand
cggaagaguuggccuuugc

SEQ ID NO: 879346 - RNA, 19 nt, Homo sapiens
  misc_RNA (1)...(19): siRNA sense strand
gagagcaagccugagauug

SEQ ID NO: 879347 - RNA, 19 nt, Homo sapiens
  misc_RNA (1)...(19): siRNA sense strand
ggaccucuuucgggcaguu

SEQ ID NO: 879348 - RNA, 19 nt, Homo sapiens
  misc_RNA (1)...(19): siRNA sense strand
agagcaagccugagauugu

SEQ ID NO: 879349 - RNA, 19 nt, Homo sapiens
  misc_RNA (1)...(19): siRNA sense strand
ggagcaggccuggaugaau

SEQ ID NO: 879350 - RNA, 19 nt, Homo sapiens
  misc_RNA (1)...(19): siRNA sense strand
gagauuguagaauguguca

SEQ ID NO: 879351 - RNA, 19 nt, Homo sapiens
  misc_RNA (1)...(19): siRNA sense strand
ccaaaccagaucuagauuc

SEQ ID NO: 879352 - RNA, 19 nt, Homo sapiens
  misc_RNA (1)...(19): siRNA sense strand
gauuggagcaggccuggau

SEQ ID NO: 879353 - RNA, 19 nt, Homo sapiens
  misc_RNA (1)...(19): siRNA sense strand
agagcucauugaaagauug

SEQ ID NO: 879354 - RNA, 19 nt, Homo sapiens
  misc_RNA (1)...(19): siRNA sense strand
gaccgaagaaguggauuuc

SEQ ID NO: 879355 - RNA, 19 nt, Homo sapiens
  misc_RNA (1)...(19): siRNA sense strand
gagagugagagaacgacaa

SEQ ID NO: 879356 - RNA, 19 nt, Homo sapiens
  misc_RNA (1)...(19): siRNA sense strand
gcaagccugagauuguaga

SEQ ID NO: 879357 - RNA, 19 nt, Homo sapiens
  misc_RNA (1)...(19): siRNA sense strand
gcuacguccucagcagcua

SEQ ID NO: 879358 - RNA, 19 nt, Homo sapiens
  misc_RNA (1)...(19): siRNA sense strand
agugagagaacgacaagaa

SEQ ID NO: 879359 - RNA, 19 nt, Homo sapiens
  misc_RNA (1)...(19): siRNA sense strand
gcaguucccaaaccagauc

SEQ ID NO: 879360 - RNA, 19 nt, Homo sapiens
  misc_RNA (1)...(19): siRNA sense strand
guagaaccagacacagaug

SEQ ID NO: 879361 - RNA, 19 nt, Homo sapiens
  misc_RNA (1)...(19): siRNA sense strand
ccgaagaaguggauuuccu

SEQ ID NO: 879362 - RNA, 19 nt, Homo sapiens
  misc_RNA (1)...(19): siRNA sense strand
gccugagauuguagaaugu

SEQ ID NO: 879363 - RNA, 19 nt, Homo sapiens
  misc_RNA (1)...(19): siRNA sense strand
ucccaaaccagaucuagau

SEQ ID NO: 879364 - RNA, 19 nt, Homo sapiens
  misc_RNA (1)...(19): siRNA sense strand
uagaaccagacacagauga

SEQ ID NO: 879365 - RNA, 19 nt, Homo sapiens
  misc_RNA (1)...(19): siRNA sense strand
ccuuugagauagagauaaa

SEQ ID NO: 879366 - RNA, 19 nt, Homo sapiens
  misc_RNA (1)...(19): siRNA sense strand
cacaggugccuuugagaua

SEQ ID NO: 879367 - RNA, 19 nt, Homo sapiens
  misc_RNA (1)...(19): siRNA sense strand
gagaaacccuagaaaagau

SEQ ID NO: 879368 - RNA, 19 nt, Homo sapiens
  misc_RNA (1)...(19): siRNA sense strand
ggagaaacccuagaaaaga

SEQ ID NO: 879369 - RNA, 19 nt, Homo sapiens
  misc_RNA (1)...(19): siRNA sense strand
ccgaagagccaguaaugga

SEQ ID NO: 879370 - RNA, 19 nt, Homo sapiens
  misc_RNA (1)...(19): siRNA sense strand
uaaauggacagcugguguu

SEQ ID NO: 879371 - RNA, 19 nt, Homo sapiens
  misc_RNA (1)...(19): siRNA sense strand
ugagauagagauaaaugga

SEQ ID NO: 879372 - RNA, 19 nt, Homo sapiens
  misc_RNA (1)...(19): siRNA sense strand
uaauggagaaacccuagaa

SEQ ID NO: 879373 - RNA, 19 nt, Homo sapiens
  misc_RNA (1)...(19): siRNA sense strand
gagcuggccagugcuguga

SEQ ID NO: 879374 - RNA, 19 nt, Homo sapiens
  misc_RNA (1)...(19): siRNA sense strand
gacagcugguguucuccaa

SEQ ID NO: 879375 - RNA, 19 nt, Homo sapiens
  misc_RNA (1)...(19): siRNA sense strand
caggugccuuugagauaga

SEQ ID NO: 879376 - RNA, 19 nt, Homo sapiens
  misc_RNA (1)...(19): siRNA sense strand
acaggugccuuugagauag

SEQ ID NO: 879377 - RNA, 19 nt, Homo sapiens
  misc_RNA (1)...(19): siRNA sense strand
gcaucgugguggaguacug

SEQ ID NO: 879378 - RNA, 19 nt, Homo sapiens
  misc_RNA (1)...(19): siRNA sense strand
uagaaaagaucaccaacag

SEQ ID NO: 879379 - RNA, 19 nt, Homo sapiens
  misc_RNA (1)...(19): siRNA sense strand
gcaaggacauggcacugua

SEQ ID NO: 879380 - RNA, 19 nt, Homo sapiens
  misc_RNA (1)...(19): siRNA sense strand
ccaaguugcucuccaagua

SEQ ID NO: 879381 - RNA, 19 nt, Homo sapiens
  misc_RNA (1)...(19): siRNA sense strand
ggguuuagcuggccuguaa

SEQ ID NO: 879382 - RNA, 19 nt, Homo sapiens
  misc_RNA (1)...(19): siRNA sense strand
gagcagaucuucccagucu

SEQ ID NO: 879383 - RNA, 19 nt, Homo sapiens
  misc_RNA (1)...(19): siRNA sense strand
gcacuguacucgcuguuga

SEQ ID NO: 879384 - RNA, 19 nt, Homo sapiens
  misc_RNA (1)...(19): siRNA sense strand
gcacugaggaugauuaugg

SEQ ID NO: 879385 - RNA, 19 nt, Homo sapiens
  misc_RNA (1)...(19): siRNA sense strand
uuacuaaccuggauauaca

SEQ ID NO: 879386 - RNA, 19 nt, Homo sapiens
  misc_RNA (1)...(19): siRNA sense strand
guccagcucuucauccuaa

SEQ ID NO: 879387 - RNA, 19 nt, Homo sapiens
  misc_RNA (1)...(19): siRNA sense strand
gaagcaggacuaugucuau

SEQ ID NO: 879388 - RNA, 19 nt, Homo sapiens
  misc_RNA (1)...(19): siRNA sense strand
gguagaagacgaugcugua

SEQ ID NO: 879389 - RNA, 19 nt, Homo sapiens
  misc_RNA (1)...(19): siRNA sense strand
ccaacucguuugagaaaga

SEQ ID NO: 879390 - RNA, 19 nt, Homo sapiens
  misc_RNA (1)...(19): siRNA sense strand
ggagagagggccuauguag

SEQ ID NO: 879391 - RNA, 19 nt, Homo sapiens
  misc_RNA (1)...(19): siRNA sense strand
gaccaacucguuugagaaa

SEQ ID NO: 879392 - RNA, 19 nt, Homo sapiens
  misc_RNA (1)...(19): siRNA sense strand
ccgagaggcuccagcacua

SEQ ID NO: 879393 - RNA, 19 nt, Homo sapiens
  misc_RNA (1)...(19): siRNA sense strand
aggcugcccuccacuauuu

SEQ ID NO: 879394 - RNA, 19 nt, Homo sapiens
  misc_RNA (1)...(19): siRNA sense strand
uaacaguggugacguuugg

SEQ ID NO: 879395 - RNA, 19 nt, Homo sapiens
  misc_RNA (1)...(19): siRNA sense strand
agacgaugcuguaccagaa

SEQ ID NO: 879396 - RNA, 19 nt, Homo sapiens
  misc_RNA (1)...(19): siRNA sense strand
gagcuucccucugccaaug

SEQ ID NO: 879397 - RNA, 19 nt, Homo sapiens
  misc_RNA (1)...(19): siRNA sense strand
agaaagagaagcaggacua

SEQ ID NO: 879398 - RNA, 19 nt, Homo sapiens
  misc_RNA (1)...(19): siRNA sense strand
gcagaucuucccagucuug

SEQ ID NO: 879399 - RNA, 19 nt, Homo sapiens
  misc_RNA (1)...(19): siRNA sense strand
ucaccuaccugucccaagu

SEQ ID NO: 879400 - RNA, 19 nt, Homo sapiens
  misc_RNA (1)...(19): siRNA sense strand
gcaggacuaugucuauugc

SEQ ID NO: 879401 - RNA, 19 nt, Homo sapiens
  misc_RNA (1)...(19): siRNA sense strand
ccaaaugagccaagaguuc

SEQ ID NO: 879402 - RNA, 19 nt, Homo sapiens
  misc_RNA (1)...(19): siRNA sense strand
agucaucccugcagaccua

SEQ ID NO: 879403 - RNA, 19 nt, Homo sapiens
  misc_RNA (1)...(19): siRNA sense strand
caagaguuccugcagcaaa

SEQ ID NO: 879404 - RNA, 19 nt, Homo sapiens
  misc_RNA (1)...(19): siRNA sense strand
ucuacacucuuacuucuau

SEQ ID NO: 879405 - RNA, 19 nt, Homo sapiens
  misc_RNA (1)...(19): siRNA sense strand
gaaagagaagcaggacuau

SEQ ID NO: 879406 - RNA, 19 nt, Homo sapiens
  misc_RNA (1)...(19): siRNA sense strand
ggauauacaugagguuugc

SEQ ID NO: 879407 - RNA, 19 nt, Homo sapiens
  misc_RNA (1)...(19): siRNA sense strand
gagcguagugugagccauu

SEQ ID NO: 879408 - RNA, 19 nt, Homo sapiens
  misc_RNA (1)...(19): siRNA sense strand
agagagggccuauguagug

SEQ ID NO: 879409 - RNA, 19 nt, Homo sapiens
  misc_RNA (1)...(19): siRNA sense strand
aagagaagcaggacuaugu

SEQ ID NO: 879410 - RNA, 19 nt, Homo sapiens
  misc_RNA (1)...(19): siRNA sense strand
cccuuuaucucaagcugua

SEQ ID NO: 879411 - RNA, 19 nt, Homo sapiens
  misc_RNA (1)...(19): siRNA sense strand
agaagacgaugcuguacca

SEQ ID NO: 879412 - RNA, 19 nt, Homo sapiens
  misc_RNA (1)...(19): siRNA sense strand
guccuucccuguacagugu

SEQ ID NO: 879413 - RNA, 19 nt, Homo sapiens
  misc_RNA (1)...(19): siRNA sense strand
gcugaguccuucccuguac

SEQ ID NO: 879414 - RNA, 19 nt, Homo sapiens
  misc_RNA (1)...(19): siRNA sense strand
gugaugacccuucgaccaa

SEQ ID NO: 879415 - RNA, 19 nt, Homo sapiens
  misc_RNA (1)...(19): siRNA sense strand
uaaccuggauauacaugag

SEQ ID NO: 879416 - RNA, 19 nt, Homo sapiens
  misc_RNA (1)...(19): siRNA sense strand
ucuauugccuggagucauc

SEQ ID NO: 879417 - RNA, 19 nt, Homo sapiens
  misc_RNA (1)...(19): siRNA sense strand
caaguugcucuccaaguau

SEQ ID NO: 879418 - RNA, 19 nt, Homo sapiens
  misc_RNA (1)...(19): siRNA sense strand
gcuggugggucggcacuau

SEQ ID NO: 879419 - RNA, 19 nt, Homo sapiens
  misc_RNA (1)...(19): siRNA sense strand
ucgaccaacucguuugaga

SEQ ID NO: 879420 - RNA, 19 nt, Homo sapiens
  misc_RNA (1)...(19): siRNA sense strand
guuccugccucucaguguu

SEQ ID NO: 879421 - RNA, 19 nt, Homo sapiens
  misc_RNA (1)...(19): siRNA sense strand
aagcaggacuaugucuauu

SEQ ID NO: 879422 - RNA, 19 nt, Homo sapiens
  misc_RNA (1)...(19): siRNA sense strand
gaggaugauuauggugaug

SEQ ID NO: 879423 - RNA, 19 nt, Homo sapiens
  misc_RNA (1)...(19): siRNA sense strand
agccgaaccucgugaaaca

SEQ ID NO: 879424 - RNA, 19 nt, Homo sapiens
  misc_RNA (1)...(19): siRNA sense strand
gagagagggccuauguagu

SEQ ID NO: 879425 - RNA, 19 nt, Homo sapiens
  misc_RNA (1)...(19): siRNA sense strand
ccaugcggauccuggaaug

SEQ ID NO: 879426 - RNA, 19 nt, Homo sapiens
  misc_RNA (1)...(19): siRNA sense strand
gggagagagggccuaugua

SEQ ID NO: 879427 - RNA, 19 nt, Homo sapiens
  misc_RNA (1)...(19): siRNA sense strand
cgaccaacucguuugagaa

SEQ ID NO: 879428 - RNA, 19 nt, Homo sapiens
  misc_RNA (1)...(19): siRNA sense strand
ugaaacacaucgggcucuu

SEQ ID NO: 879429 - RNA, 19 nt, Homo sapiens
  misc_RNA (1)...(19): siRNA sense strand
ugaaccaaaugagccaaga

SEQ ID NO: 879430 - RNA, 19 nt, Homo sapiens
  misc_RNA (1)...(19): siRNA sense strand
ucaccgacuucuacacucu

SEQ ID NO: 879431 - RNA, 19 nt, Homo sapiens
  misc_RNA (1)...(19): siRNA sense strand
gcucuucuucucccuguau

SEQ ID NO: 879432 - RNA, 19 nt, Homo sapiens
  misc_RNA (1)...(19): siRNA sense strand
ugaggaugauuauggugau

SEQ ID NO: 879433 - RNA, 19 nt, Homo sapiens
  misc_RNA (1)...(19): siRNA sense strand
guaugucccuguggccaau

SEQ ID NO: 879434 - RNA, 19 nt, Homo sapiens
  misc_RNA (1)...(19): siRNA sense strand
cagacuacguccugauggu

SEQ ID NO: 879435 - RNA, 19 nt, Homo sapiens
  misc_RNA (1)...(19): siRNA sense strand
ccaccggcuucuucagcaa

SEQ ID NO: 879436 - RNA, 19 nt, Homo sapiens
  misc_RNA (1)...(19): siRNA sense strand
gaaccucgugaaacacauc

SEQ ID NO: 879437 - RNA, 19 nt, Homo sapiens
  misc_RNA (1)...(19): siRNA sense strand
ggagccgaaccucgugaaa

SEQ ID NO: 879438 - RNA, 19 nt, Homo sapiens
  misc_RNA (1)...(19): siRNA sense strand
cuucuacacucuuacuucu

SEQ ID NO: 879439 - RNA, 19 nt, Homo sapiens
  misc_RNA (1)...(19): siRNA sense strand
ugagggcacugaggaugau

SEQ ID NO: 879440 - RNA, 19 nt, Homo sapiens
  misc_RNA (1)...(19): siRNA sense strand
aaacacaucgggcucuucu

SEQ ID NO: 879441 - RNA, 19 nt, Homo sapiens
  misc_RNA (1)...(19): siRNA sense strand
gaaacacaucgggcucuuc

SEQ ID NO: 879442 - RNA, 19 nt, Homo sapiens
  misc_RNA (1)...(19): siRNA sense strand
ccaaguguacugccacaag

SEQ ID NO: 879443 - RNA, 19 nt, Homo sapiens
  misc_RNA (1)...(19): siRNA sense strand
agaagcaggacuaugucua

SEQ ID NO: 879444 - RNA, 19 nt, Homo sapiens
  misc_RNA (1)...(19): siRNA sense strand
caacucguuugagaaagag

SEQ ID NO: 879445 - RNA, 19 nt, Homo sapiens
  misc_RNA (1)...(19): siRNA sense strand
gaaccaaaugagccaagag

SEQ ID NO: 879446 - RNA, 19 nt, Homo sapiens
  misc_RNA (1)...(19): siRNA sense strand
ggccuguaaugcucuucuu

SEQ ID NO: 879447 - RNA, 19 nt, Homo sapiens
  misc_RNA (1)...(19): siRNA sense strand
gggcacugaggaugauuau

SEQ ID NO: 879448 - RNA, 19 nt, Homo sapiens
  misc_RNA (1)...(19): siRNA sense strand
aaguugcucuccaaguaug

SEQ ID NO: 879449 - RNA, 19 nt, Homo sapiens
  misc_RNA (1)...(19): siRNA sense strand
gagaggcuccagcacuaca

SEQ ID NO: 879450 - RNA, 19 nt, Homo sapiens
  misc_RNA (1)...(19): siRNA sense strand
aagaguuccugcagcaaag

SEQ ID NO: 879451 - RNA, 19 nt, Homo sapiens
  misc_RNA (1)...(19): siRNA sense strand
accgacuucuacacucuua

SEQ ID NO: 879452 - RNA, 19 nt, Homo sapiens
  misc_RNA (1)...(19): siRNA sense strand
guacugccacaagggcuuu

SEQ ID NO: 879453 - RNA, 19 nt, Homo sapiens
  misc_RNA (1)...(19): siRNA sense strand
agacuacguccugauggua

SEQ ID NO: 879454 - RNA, 19 nt, Homo sapiens
  misc_RNA (1)...(19): siRNA sense strand
gcagcaaagcuugaaagag

SEQ ID NO: 879455 - RNA, 19 nt, Homo sapiens
  misc_RNA (1)...(19): siRNA sense strand
gcuccagcacuacaucaau

SEQ ID NO: 879456 - RNA, 19 nt, Homo sapiens
  misc_RNA (1)...(19): siRNA sense strand
gagaagcaggacuaugucu

SEQ ID NO: 879457 - RNA, 19 nt, Homo sapiens
  misc_RNA (1)...(19): siRNA sense strand
gaugacccuucgaccaacu

SEQ ID NO: 879458 - RNA, 19 nt, Homo sapiens
  misc_RNA (1)...(19): siRNA sense strand
ggaugauuauggugaugac

SEQ ID NO: 879459 - RNA, 19 nt, Homo sapiens
  misc_RNA (1)...(19): siRNA sense strand
gaagaaugcugagauguau

SEQ ID NO: 879460 - RNA, 19 nt, Homo sapiens
  misc_RNA (1)...(19): siRNA sense strand
ggaagaaugcugagaugua

SEQ ID NO: 879461 - RNA, 19 nt, Homo sapiens
  misc_RNA (1)...(19): siRNA sense strand
uguauaaacugucuucaga

SEQ ID NO: 879462 - RNA, 19 nt, Homo sapiens
  misc_RNA (1)...(19): siRNA sense strand
gaggaagaaugcugagaug

SEQ ID NO: 879463 - RNA, 19 nt, Homo sapiens
  misc_RNA (1)...(19): siRNA sense strand
gagcagagaggcagagcua

SEQ ID NO: 879464 - RNA, 19 nt, Homo sapiens
  misc_RNA (1)...(19): siRNA sense strand
uaaacugucuucagagcaa

SEQ ID NO: 879465 - RNA, 19 nt, Homo sapiens
  misc_RNA (1)...(19): siRNA sense strand
gcugagauguauaaacugu

SEQ ID NO: 879466 - RNA, 19 nt, Homo sapiens
  misc_RNA (1)...(19): siRNA sense strand
ucccacaucuucuaccuuu

SEQ ID NO: 879467 - RNA, 19 nt, Homo sapiens
  misc_RNA (1)...(19): siRNA sense strand
gagcuaagacgccgugaca

SEQ ID NO: 879468 - RNA, 19 nt, Homo sapiens
  misc_RNA (1)...(19): siRNA sense strand
aaagauggagagcacaaua

SEQ ID NO: 879469 - RNA, 19 nt, Homo sapiens
  misc_RNA (1)...(19): siRNA sense strand
agaaugcugagauguauaa

SEQ ID NO: 879470 - RNA, 19 nt, Homo sapiens
  misc_RNA (1)...(19): siRNA sense strand
aaagagaggcugccaccaa

SEQ ID NO: 879471 - RNA, 19 nt, Homo sapiens
  misc_RNA (1)...(19): siRNA sense strand
gagcagcuggagcguauug

SEQ ID NO: 879472 - RNA, 19 nt, Homo sapiens
  misc_RNA (1)...(19): siRNA sense strand
gcagagaggcagagcuaag

SEQ ID NO: 879473 - RNA, 19 nt, Homo sapiens
  misc_RNA (1)...(19): siRNA sense strand
cuucagagcaauuccauga

SEQ ID NO: 879474 - RNA, 19 nt, Homo sapiens
  misc_RNA (1)...(19): siRNA sense strand
gagagccccucacaaagaa

SEQ ID NO: 879475 - RNA, 19 nt, Homo sapiens
  misc_RNA (1)...(19): siRNA sense strand
ugagauguauaaacugucu

SEQ ID NO: 879476 - RNA, 19 nt, Homo sapiens
  misc_RNA (1)...(19): siRNA sense strand
aggagcagcuggagcguau

SEQ ID NO: 879477 - RNA, 19 nt, Homo sapiens
  misc_RNA (1)...(19): siRNA sense strand
aggagggugucaagaggua

SEQ ID NO: 879478 - RNA, 19 nt, Homo sapiens
  misc_RNA (1)...(19): siRNA sense strand
uggcaaagagggaaagaga

SEQ ID NO: 879479 - RNA, 19 nt, Homo sapiens
  misc_RNA (1)...(19): siRNA sense strand
aagauggagagcacaauaa

SEQ ID NO: 879480 - RNA, 19 nt, Homo sapiens
  misc_RNA (1)...(19): siRNA sense strand
gaugaaggagggugucaag

SEQ ID NO: 879481 - RNA, 19 nt, Homo sapiens
  misc_RNA (1)...(19): siRNA sense strand
augcugagauguauaaacu

SEQ ID NO: 879482 - RNA, 19 nt, Homo sapiens
  misc_RNA (1)...(19): siRNA sense strand
agauggagagcacaauaaa

SEQ ID NO: 879483 - RNA, 19 nt, Homo sapiens
  misc_RNA (1)...(19): siRNA sense strand
ugaaggagggugucaagag

SEQ ID NO: 879484 - RNA, 19 nt, Homo sapiens
  misc_RNA (1)...(19): siRNA sense strand
cccagauucuccacugcua

SEQ ID NO: 879485 - RNA, 19 nt, Homo sapiens
  misc_RNA (1)...(19): siRNA sense strand
cagagaggcagagcuaaga

SEQ ID NO: 879486 - RNA, 19 nt, Homo sapiens
  misc_RNA (1)...(19): siRNA sense strand
guauugagaggaagaaugc

SEQ ID NO: 879487 - RNA, 19 nt, Homo sapiens
  misc_RNA (1)...(19): siRNA sense strand
ucaaagauggagagcacaa

SEQ ID NO: 879488 - RNA, 19 nt, Homo sapiens
  misc_RNA (1)...(19): siRNA sense strand
ccacaucuucuaccuuugg

SEQ ID NO: 879489 - RNA, 19 nt, Homo sapiens
  misc_RNA (1)...(19): siRNA sense strand
gguguccggcugucugaaa

SEQ ID NO: 879490 - RNA, 19 nt, Homo sapiens
  misc_RNA (1)...(19): siRNA sense strand
gagcguauugagaggaaga

SEQ ID NO: 879491 - RNA, 19 nt, Homo sapiens
  misc_RNA (1)...(19): siRNA sense strand
gagaggcugccaccaagca

SEQ ID NO: 879492 - RNA, 19 nt, Homo sapiens
  misc_RNA (1)...(19): siRNA sense strand
cagcuggagcguauugaga

SEQ ID NO: 879493 - RNA, 19 nt, Homo sapiens
  misc_RNA (1)...(19): siRNA sense strand
gccgugacaccuucuacaa

SEQ ID NO: 879494 - RNA, 19 nt, Homo sapiens
  misc_RNA (1)...(19): siRNA sense strand
gauggagagcacaauaaag

SEQ ID NO: 879495 - RNA, 19 nt, Homo sapiens
  misc_RNA (1)...(19): siRNA sense strand
uggagcguauugagaggaa

SEQ ID NO: 879496 - RNA, 19 nt, Homo sapiens
  misc_RNA (1)...(19): siRNA sense strand
gccaugaggagcagaaguc

SEQ ID NO: 879497 - RNA, 19 nt, Homo sapiens
  misc_RNA (1)...(19): siRNA sense strand
uaagacgccgugacaccuu

SEQ ID NO: 879498 - RNA, 19 nt, Homo sapiens
  misc_RNA (1)...(19): siRNA sense strand
gagaggaagaaugcugaga

SEQ ID NO: 879499 - RNA, 19 nt, Homo sapiens
  misc_RNA (1)...(19): siRNA sense strand
ggugguacaugaacucuuu

SEQ ID NO: 879500 - RNA, 19 nt, Homo sapiens
  misc_RNA (1)...(19): siRNA sense strand
cuacaggaaucuucuuugu

SEQ ID NO: 879501 - RNA, 19 nt, Homo sapiens
  misc_RNA (1)...(19): siRNA sense strand
ccacgagucuacaggaauc

SEQ ID NO: 879502 - RNA, 19 nt, Homo sapiens
  misc_RNA (1)...(19): siRNA sense strand
gccgaugacuuccuugucu

SEQ ID NO: 879503 - RNA, 19 nt, Homo sapiens
  misc_RNA (1)...(19): siRNA sense strand
gcccacgagucuacaggaa

SEQ ID NO: 879504 - RNA, 19 nt, Homo sapiens
  misc_RNA (1)...(19): siRNA sense strand
cacagaacgugcggagauu

SEQ ID NO: 879505 - RNA, 19 nt, Homo sapiens
  misc_RNA (1)...(19): siRNA sense strand
ggccaaaggcgccaucauc

SEQ ID NO: 879506 - RNA, 19 nt, Homo sapiens
  misc_RNA (1)...(19): siRNA sense strand
gccugggccuuacuuccua

SEQ ID NO: 879507 - RNA, 19 nt, Homo sapiens
  misc_RNA (1)...(19): siRNA sense strand
ggcagcuggugguacauga

SEQ ID NO: 879508 - RNA, 19 nt, Homo sapiens
  misc_RNA (1)...(19): siRNA sense strand
acacagaacgugcggagau

SEQ ID NO: 879509 - RNA, 19 nt, Homo sapiens
  misc_RNA (1)...(19): siRNA sense strand
gagccagugccgaguucua

SEQ ID NO: 879510 - RNA, 19 nt, Homo sapiens
  misc_RNA (1)...(19): siRNA sense strand
gaggaagcacuaccugagu

SEQ ID NO: 879511 - RNA, 19 nt, Homo sapiens
  misc_RNA (1)...(19): siRNA sense strand
gcgccaucauccucuacaa

SEQ ID NO: 879512 - RNA, 19 nt, Homo sapiens
  misc_RNA (1)...(19): siRNA sense strand
gaucugugaugaggugaac

SEQ ID NO: 879513 - RNA, 19 nt, Homo sapiens
  misc_RNA (1)...(19): siRNA sense strand
cuucugagcaggugaggaa

SEQ ID NO: 879514 - RNA, 19 nt, Homo sapiens
  misc_RNA (1)...(19): siRNA sense strand
uucaggagaucugugauga

SEQ ID NO: 879515 - RNA, 19 nt, Homo sapiens
  misc_RNA (1)...(19): siRNA sense strand
cacagccgaugacuuccuu

SEQ ID NO: 879516 - RNA, 19 nt, Homo sapiens
  misc_RNA (1)...(19): siRNA sense strand
ccgaugacuuccuugucuu

SEQ ID NO: 879517 - RNA, 19 nt, Homo sapiens
  misc_RNA (1)...(19): siRNA sense strand
gagacuuccugggcaccaa

SEQ ID NO: 879518 - RNA, 19 nt, Homo sapiens
  misc_RNA (1)...(19): siRNA sense strand
ggagaugugggcugaacuc

SEQ ID NO: 879519 - RNA, 19 nt, Homo sapiens
  misc_RNA (1)...(19): siRNA sense strand
gcagcuggugguacaugaa

SEQ ID NO: 879520 - RNA, 19 nt, Homo sapiens
  misc_RNA (1)...(19): siRNA sense strand
agugcagccugacuucuga

SEQ ID NO: 879521 - RNA, 19 nt, Homo sapiens
  misc_RNA (1)...(19): siRNA sense strand
ggcaucgcccgaaaugaga

SEQ ID NO: 879522 - RNA, 19 nt, Homo sapiens
  misc_RNA (1)...(19): siRNA sense strand
ccagugccgaguucuaugu

SEQ ID NO: 879523 - RNA, 19 nt, Homo sapiens
  misc_RNA (1)...(19): siRNA sense strand
gaaccaggccucuccaaga

SEQ ID NO: 879524 - RNA, 19 nt, Homo sapiens
  misc_RNA (1)...(19): siRNA sense strand
gcaaguauaucgcgucaac

SEQ ID NO: 879525 - RNA, 19 nt, Homo sapiens
  misc_RNA (1)...(19): siRNA sense strand
gagaaagccaagaagauaa

SEQ ID NO: 879526 - RNA, 19 nt, Homo sapiens
  misc_RNA (1)...(19): siRNA sense strand
gcaaagagcagcuagaaaa

SEQ ID NO: 879527 - RNA, 19 nt, Homo sapiens
  misc_RNA (1)...(19): siRNA sense strand
ugagaaagccaagaagaua

SEQ ID NO: 879528 - RNA, 19 nt, Homo sapiens
  misc_RNA (1)...(19): siRNA sense strand
gaagauaaagaaccuaaag

SEQ ID NO: 879529 - RNA, 19 nt, Homo sapiens
  misc_RNA (1)...(19): siRNA sense strand
aggaggaggucccaguaua

SEQ ID NO: 879530 - RNA, 19 nt, Homo sapiens
  misc_RNA (1)...(19): siRNA sense strand
ggaggaggucccaguauau

SEQ ID NO: 879531 - RNA, 19 nt, Homo sapiens
  misc_RNA (1)...(19): siRNA sense strand
gauaaagaaccuaaagaag

SEQ ID NO: 879532 - RNA, 19 nt, Homo sapiens
  misc_RNA (1)...(19): siRNA sense strand
ggaggucccaguauaugaa

SEQ ID NO: 879533 - RNA, 19 nt, Homo sapiens
  misc_RNA (1)...(19): siRNA sense strand
ccaagacagccaaacguaa

SEQ ID NO: 879534 - RNA, 19 nt, Homo sapiens
  misc_RNA (1)...(19): siRNA sense strand
guuagaggacuuggaguua

SEQ ID NO: 879535 - RNA, 19 nt, Homo sapiens
  misc_RNA (1)...(19): siRNA sense strand
ggaggagggcgcuagaaga

SEQ ID NO: 879536 - RNA, 19 nt, Homo sapiens
  misc_RNA (1)...(19): siRNA sense strand
ccaagaagauaaagaaccu

SEQ ID NO: 879537 - RNA, 19 nt, Homo sapiens
  misc_RNA (1)...(19): siRNA sense strand
ccacugagaaagccaagaa

SEQ ID NO: 879538 - RNA, 19 nt, Homo sapiens
  misc_RNA (1)...(19): siRNA sense strand
ggugaaagaaggauaugug

SEQ ID NO: 879539 - RNA, 19 nt, Homo sapiens
  misc_RNA (1)...(19): siRNA sense strand
aacguaaccugaagcgaaa

SEQ ID NO: 879540 - RNA, 19 nt, Homo sapiens
  misc_RNA (1)...(19): siRNA sense strand
cagcaaagagcagcuagaa

SEQ ID NO: 879541 - RNA, 19 nt, Homo sapiens
  misc_RNA (1)...(19): siRNA sense strand
ugagcaggacucuugauaa

SEQ ID NO: 879542 - RNA, 19 nt, Homo sapiens
  misc_RNA (1)...(19): siRNA sense strand
agaaagccaagaagauaaa

SEQ ID NO: 879543 - RNA, 19 nt, Homo sapiens
  misc_RNA (1)...(19): siRNA sense strand
gaggaggucccaguauaug

SEQ ID NO: 879544 - RNA, 19 nt, Homo sapiens
  misc_RNA (1)...(19): siRNA sense strand
gaggagggcgcuagaagag

SEQ ID NO: 879545 - RNA, 19 nt, Homo sapiens
  misc_RNA (1)...(19): siRNA sense strand
cuacggagacaggcaagua

SEQ ID NO: 879546 - RNA, 19 nt, Homo sapiens
  misc_RNA (1)...(19): siRNA sense strand
gcaagcagcggagggugaa

SEQ ID NO: 879547 - RNA, 19 nt, Homo sapiens
  misc_RNA (1)...(19): siRNA sense strand
caagaguaaaccagaguug

SEQ ID NO: 879548 - RNA, 19 nt, Homo sapiens
  misc_RNA (1)...(19): siRNA sense strand
ggaagagacagcccaacuc

SEQ ID NO: 879549 - RNA, 19 nt, Homo sapiens
  misc_RNA (1)...(19): siRNA sense strand
ggagggugaaagaaggaua

SEQ ID NO: 879550 - RNA, 19 nt, Homo sapiens
  misc_RNA (1)...(19): siRNA sense strand
gaaaacaaguaugugaagu

SEQ ID NO: 879551 - RNA, 19 nt, Homo sapiens
  misc_RNA (1)...(19): siRNA sense strand
ccaggaggaggucccagua

SEQ ID NO: 879552 - RNA, 19 nt, Homo sapiens
  misc_RNA (1)...(19): siRNA sense strand
caagacagccaaacguaac

SEQ ID NO: 879553 - RNA, 19 nt, Homo sapiens
  misc_RNA (1)...(19): siRNA sense strand
gagggugaaagaaggauau

SEQ ID NO: 879554 - RNA, 19 nt, Homo sapiens
  misc_RNA (1)...(19): siRNA sense strand
aagccaagaagauaaagaa

SEQ ID NO: 879555 - RNA, 19 nt, Homo sapiens
  misc_RNA (1)...(19): siRNA sense strand
ggagacaggcaaguauauc

SEQ ID NO: 879556 - RNA, 19 nt, Homo sapiens
  misc_RNA (1)...(19): siRNA sense strand
aagaggaguuagaggacuu

SEQ ID NO: 879557 - RNA, 19 nt, Homo sapiens
  misc_RNA (1)...(19): siRNA sense strand
gccuugagcaggacucuug

SEQ ID NO: 879558 - RNA, 19 nt, Homo sapiens
  misc_RNA (1)...(19): siRNA sense strand
uuagaggacuuggaguuag

SEQ ID NO: 879559 - RNA, 19 nt, Homo sapiens
  misc_RNA (1)...(19): siRNA sense strand
gaggucccaguauaugaaa

SEQ ID NO: 879560 - RNA, 19 nt, Homo sapiens
  misc_RNA (1)...(19): siRNA sense strand
cagccaaacguaaccugaa

SEQ ID NO: 879561 - RNA, 19 nt, Homo sapiens
  misc_RNA (1)...(19): siRNA sense strand
uccaagacagccaaacgua

SEQ ID NO: 879562 - RNA, 19 nt, Homo sapiens
  misc_RNA (1)...(19): siRNA sense strand
uagaggacuuggaguuagg

SEQ ID NO: 879563 - RNA, 19 nt, Homo sapiens
  misc_RNA (1)...(19): siRNA sense strand
ggcgcuagaagaggaguua

SEQ ID NO: 879564 - RNA, 19 nt, Homo sapiens
  misc_RNA (1)...(19): siRNA sense strand
caaggaggagggcgcuaga

SEQ ID NO: 879565 - RNA, 19 nt, Homo sapiens
  misc_RNA (1)...(19): siRNA sense strand
gaaacuccggcagguggaa

SEQ ID NO: 879566 - RNA, 19 nt, Homo sapiens
  misc_RNA (1)...(19): siRNA sense strand
gaagaggcggcagcagcaa

SEQ ID NO: 879567 - RNA, 19 nt, Homo sapiens
  misc_RNA (1)...(19): siRNA sense strand
cagcugccaccacugagaa

SEQ ID NO: 879568 - RNA, 19 nt, Homo sapiens
  misc_RNA (1)...(19): siRNA sense strand
cagcggagggugaaagaag

SEQ ID NO: 879569 - RNA, 19 nt, Homo sapiens
  misc_RNA (1)...(19): siRNA sense strand
gagacaggcaaguauaucg

SEQ ID NO: 879570 - RNA, 19 nt, Homo sapiens
  misc_RNA (1)...(19): siRNA sense strand
gcuagaagaggaguuagag

SEQ ID NO: 879571 - RNA, 19 nt, Homo sapiens
  misc_RNA (1)...(19): siRNA sense strand
uugagcaggacucuugaua

SEQ ID NO: 879572 - RNA, 19 nt, Homo sapiens
  misc_RNA (1)...(19): siRNA sense strand
cggagacaggcaaguauau

SEQ ID NO: 879573 - RNA, 19 nt, Homo sapiens
  misc_RNA (1)...(19): siRNA sense strand
gaaccuaaagaagaaacuc

SEQ ID NO: 879574 - RNA, 19 nt, Homo sapiens
  misc_RNA (1)...(19): siRNA sense strand
gaaagccaagaagauaaag

SEQ ID NO: 879575 - RNA, 19 nt, Homo sapiens
  misc_RNA (1)...(19): siRNA sense strand
gcucaagagugcuaauuua

SEQ ID NO: 879576 - RNA, 19 nt, Homo sapiens
  misc_RNA (1)...(19): siRNA sense strand
agaagacccagaugaauua

SEQ ID NO: 879577 - RNA, 19 nt, Homo sapiens
  misc_RNA (1)...(19): siRNA sense strand
cccaaagccuuccuaauga

SEQ ID NO: 879578 - RNA, 19 nt, Homo sapiens
  misc_RNA (1)...(19): siRNA sense strand
agacccagaugaauuauug

SEQ ID NO: 879579 - RNA, 19 nt, Homo sapiens
  misc_RNA (1)...(19): siRNA sense strand
gaacaauucuaguuuacac

SEQ ID NO: 879580 - RNA, 19 nt, Homo sapiens
  misc_RNA (1)...(19): siRNA sense strand
gaucagacguuuuacaaau

SEQ ID NO: 879581 - RNA, 19 nt, Homo sapiens
  misc_RNA (1)...(19): siRNA sense strand
gcauugccauggaucaguu

SEQ ID NO: 879582 - RNA, 19 nt, Homo sapiens
  misc_RNA (1)...(19): siRNA sense strand
gaccugcccuacaucagaa

SEQ ID NO: 879583 - RNA, 19 nt, Homo sapiens
  misc_RNA (1)...(19): siRNA sense strand
gcugaggacuggugugaag

SEQ ID NO: 879584 - RNA, 19 nt, Homo sapiens
  misc_RNA (1)...(19): siRNA sense strand
ggacugcucggcuccaaga

SEQ ID NO: 879585 - RNA, 19 nt, Homo sapiens
  misc_RNA (1)...(19): siRNA sense strand
ccaaagccuuccuaaugau

SEQ ID NO: 879586 - RNA, 19 nt, Homo sapiens
  misc_RNA (1)...(19): siRNA sense strand
gcaggacgcucagaaacag

SEQ ID NO: 879587 - RNA, 19 nt, Homo sapiens
  misc_RNA (1)...(19): siRNA sense strand
acaagaagacccagaugaa

SEQ ID NO: 879588 - RNA, 19 nt, Homo sapiens
  misc_RNA (1)...(19): siRNA sense strand
ucccaaagccuuccuaaug

SEQ ID NO: 879589 - RNA, 19 nt, Homo sapiens
  misc_RNA (1)...(19): siRNA sense strand
gagcagauuuugagguauu

SEQ ID NO: 879590 - RNA, 19 nt, Homo sapiens
  misc_RNA (1)...(19): siRNA sense strand
aagaagacccagaugaauu

SEQ ID NO: 879591 - RNA, 19 nt, Homo sapiens
  misc_RNA (1)...(19): siRNA sense strand
gaucaguugcuuucccaaa

SEQ ID NO: 879592 - RNA, 19 nt, Homo sapiens
  misc_RNA (1)...(19): siRNA sense strand
agacucccauggaagaauu

SEQ ID NO: 879593 - RNA, 19 nt, Homo sapiens
  misc_RNA (1)...(19): siRNA sense strand
cagcagugccaaagacgua

SEQ ID NO: 879594 - RNA, 19 nt, Homo sapiens
  misc_RNA (1)...(19): siRNA sense strand
caagaagacccagaugaau

SEQ ID NO: 879595 - RNA, 19 nt, Homo sapiens
  misc_RNA (1)...(19): siRNA sense strand
uugcagaugaggaugauua

SEQ ID NO: 879596 - RNA, 19 nt, Homo sapiens
  misc_RNA (1)...(19): siRNA sense strand
caccacaguuuaccuugga

SEQ ID NO: 879597 - RNA, 19 nt, Homo sapiens
  misc_RNA (1)...(19): siRNA sense strand
gagggacuaucagcagaga

SEQ ID NO: 879598 - RNA, 19 nt, Homo sapiens
  misc_RNA (1)...(19): siRNA sense strand
gggacuaucagcagagaga

SEQ ID NO: 879599 - RNA, 19 nt, Homo sapiens
  misc_RNA (1)...(19): siRNA sense strand
ggugugaaggugcugauga

SEQ ID NO: 879600 - RNA, 19 nt, Homo sapiens
  misc_RNA (1)...(19): siRNA sense strand
ucaucagacucccauggaa

SEQ ID NO: 879601 - RNA, 19 nt, Homo sapiens
  misc_RNA (1)...(19): siRNA sense strand
acacaugugagaagaguug

SEQ ID NO: 879602 - RNA, 19 nt, Homo sapiens
  misc_RNA (1)...(19): siRNA sense strand
caauucuaguuuacacaug

SEQ ID NO: 879603 - RNA, 19 nt, Homo sapiens
  misc_RNA (1)...(19): siRNA sense strand
gauauuugaguuucagcuu

SEQ ID NO: 879604 - RNA, 19 nt, Homo sapiens
  misc_RNA (1)...(19): siRNA sense strand
guguggaggccaaaggaua

SEQ ID NO: 879605 - RNA, 19 nt, Homo sapiens
  misc_RNA (1)...(19): siRNA sense strand
guggagaucagacguuuua

SEQ ID NO: 879606 - RNA, 19 nt, Homo sapiens
  misc_RNA (1)...(19): siRNA sense strand
aaguggagaucagacguuu

SEQ ID NO: 879607 - RNA, 19 nt, Homo sapiens
  misc_RNA (1)...(19): siRNA sense strand
uacaagaagacccagauga

SEQ ID NO: 879608 - RNA, 19 nt, Homo sapiens
  misc_RNA (1)...(19): siRNA sense strand
caaagccuuccuaaugaug

SEQ ID NO: 879609 - RNA, 19 nt, Homo sapiens
  misc_RNA (1)...(19): siRNA sense strand
ggaacaauucuaguuuaca

SEQ ID NO: 879610 - RNA, 19 nt, Homo sapiens
  misc_RNA (1)...(19): siRNA sense strand
ugaccugcccuacaucaga

SEQ ID NO: 879611 - RNA, 19 nt, Homo sapiens
  misc_RNA (1)...(19): siRNA sense strand
uggaacaauucuaguuuac

SEQ ID NO: 879612 - RNA, 19 nt, Homo sapiens
  misc_RNA (1)...(19): siRNA sense strand
uuacacaugugagaagagu

SEQ ID NO: 879613 - RNA, 19 nt, Homo sapiens
  misc_RNA (1)...(19): siRNA sense strand
gagaucagacguuuuacaa

SEQ ID NO: 879614 - RNA, 19 nt, Homo sapiens
  misc_RNA (1)...(19): siRNA sense strand
gggccuucaccacaguuua

SEQ ID NO: 879615 - RNA, 19 nt, Homo sapiens
  misc_RNA (1)...(19): siRNA sense strand
gaagacccagaugaauuau

SEQ ID NO: 879616 - RNA, 19 nt, Homo sapiens
  misc_RNA (1)...(19): siRNA sense strand
gcucagaaacagggaaaca

SEQ ID NO: 879617 - RNA, 19 nt, Homo sapiens
  misc_RNA (1)...(19): siRNA sense strand
cagcagagagaaggcauug

SEQ ID NO: 879618 - RNA, 19 nt, Homo sapiens
  misc_RNA (1)...(19): siRNA sense strand
gauuacagggacuuuguca

SEQ ID NO: 879619 - RNA, 19 nt, Homo sapiens
  misc_RNA (1)...(19): siRNA sense strand
guuuacacaugugagaaga

SEQ ID NO: 879620 - RNA, 19 nt, Homo sapiens
  misc_RNA (1)...(19): siRNA sense strand
cagcugaggacugguguga

SEQ ID NO: 879621 - RNA, 19 nt, Homo sapiens
  misc_RNA (1)...(19): siRNA sense strand
cacaguuuaccuuggauuu

SEQ ID NO: 879622 - RNA, 19 nt, Homo sapiens
  misc_RNA (1)...(19): siRNA sense strand
ccauggaucaguugcuuuc

SEQ ID NO: 879623 - RNA, 19 nt, Homo sapiens
  misc_RNA (1)...(19): siRNA sense strand
cagaugaggaugauuacag

SEQ ID NO: 879624 - RNA, 19 nt, Homo sapiens
  misc_RNA (1)...(19): siRNA sense strand
uuacagggacuuugucaac

SEQ ID NO: 879625 - RNA, 19 nt, Homo sapiens
  misc_RNA (1)...(19): siRNA sense strand
gaugauuacagggacuuug

SEQ ID NO: 879626 - RNA, 19 nt, Homo sapiens
  misc_RNA (1)...(19): siRNA sense strand
ggacuuugucaaccuggau

SEQ ID NO: 879627 - RNA, 19 nt, Homo sapiens
  misc_RNA (1)...(19): siRNA sense strand
gaacaagaacuaauacuag

SEQ ID NO: 879628 - RNA, 19 nt, Homo sapiens
  misc_RNA (1)...(19): siRNA sense strand
ggaacaagaacuaauacua

SEQ ID NO: 879629 - RNA, 19 nt, Homo sapiens
  misc_RNA (1)...(19): siRNA sense strand
caaaggagcagaucuuaga

SEQ ID NO: 879630 - RNA, 19 nt, Homo sapiens
  misc_RNA (1)...(19): siRNA sense strand
gcuacacauucaacaauuu

SEQ ID NO: 879631 - RNA, 19 nt, Homo sapiens
  misc_RNA (1)...(19): siRNA sense strand
gaaccuucauuucgaggaa

SEQ ID NO: 879632 - RNA, 19 nt, Homo sapiens
  misc_RNA (1)...(19): siRNA sense strand
gcagugccauggaaggauu

SEQ ID NO: 879633 - RNA, 19 nt, Homo sapiens
  misc_RNA (1)...(19): siRNA sense strand
gagggcaucucagaagaaa

SEQ ID NO: 879634 - RNA, 19 nt, Homo sapiens
  misc_RNA (1)...(19): siRNA sense strand
ggaaggauuuaacaugucu

SEQ ID NO: 879635 - RNA, 19 nt, Homo sapiens
  misc_RNA (1)...(19): siRNA sense strand
ccaccauccugccaucuaa

SEQ ID NO: 879636 - RNA, 19 nt, Homo sapiens
  misc_RNA (1)...(19): siRNA sense strand
gaauguguuucuccaggaa

SEQ ID NO: 879637 - RNA, 19 nt, Homo sapiens
  misc_RNA (1)...(19): siRNA sense strand
gaccagcagugccauggaa

SEQ ID NO: 879638 - RNA, 19 nt, Homo sapiens
  misc_RNA (1)...(19): siRNA sense strand
ggauuuaacaugucucaga

SEQ ID NO: 879639 - RNA, 19 nt, Homo sapiens
  misc_RNA (1)...(19): siRNA sense strand
gaucuuagaacugcuggua

SEQ ID NO: 879640 - RNA, 19 nt, Homo sapiens
  misc_RNA (1)...(19): siRNA sense strand
ucaggaaccuucauuucga

SEQ ID NO: 879641 - RNA, 19 nt, Homo sapiens
  misc_RNA (1)...(19): siRNA sense strand
gcuuugccaucaacacuuu

SEQ ID NO: 879642 - RNA, 19 nt, Homo sapiens
  misc_RNA (1)...(19): siRNA sense strand
ucaacaauuucuugcuuug

SEQ ID NO: 879643 - RNA, 19 nt, Homo sapiens
  misc_RNA (1)...(19): siRNA sense strand
ugccagaguugcacacaaa

SEQ ID NO: 879644 - RNA, 19 nt, Homo sapiens
  misc_RNA (1)...(19): siRNA sense strand
gagcaguuccugagcauuc

SEQ ID NO: 879645 - RNA, 19 nt, Homo sapiens
  misc_RNA (1)...(19): siRNA sense strand
uaaagacacagcugaaauc

SEQ ID NO: 879646 - RNA, 19 nt, Homo sapiens
  misc_RNA (1)...(19): siRNA sense strand
ggcuacacauucaacaauu

SEQ ID NO: 879647 - RNA, 19 nt, Homo sapiens
  misc_RNA (1)...(19): siRNA sense strand
gaacagugaaacagcaaca

SEQ ID NO: 879648 - RNA, 19 nt, Homo sapiens
  misc_RNA (1)...(19): siRNA sense strand
cacaaaggagcagaucuua

SEQ ID NO: 879649 - RNA, 19 nt, Homo sapiens
  misc_RNA (1)...(19): siRNA sense strand
cagcugaaauccuggaaac

SEQ ID NO: 879650 - RNA, 19 nt, Homo sapiens
  misc_RNA (1)...(19): siRNA sense strand
ucagcaacauaauccagaa

SEQ ID NO: 879651 - RNA, 19 nt, Homo sapiens
  misc_RNA (1)...(19): siRNA sense strand
acacaaaggagcagaucuu

SEQ ID NO: 879652 - RNA, 19 nt, Homo sapiens
  misc_RNA (1)...(19): siRNA sense strand
ggauuuagagagggaguuu

SEQ ID NO: 879653 - RNA, 19 nt, Homo sapiens
  misc_RNA (1)...(19): siRNA sense strand
cugaggagcugcagaucug

SEQ ID NO: 879654 - RNA, 19 nt, Homo sapiens
  misc_RNA (1)...(19): siRNA sense strand
uccaggaacuuugcuauca

SEQ ID NO: 879655 - RNA, 19 nt, Homo sapiens
  misc_RNA (1)...(19): siRNA sense strand
guccagaccucccaaagcu

SEQ ID NO: 879656 - RNA, 19 nt, Homo sapiens
  misc_RNA (1)...(19): siRNA sense strand
gcuguggaaucuggaguga

SEQ ID NO: 879657 - RNA, 19 nt, Homo sapiens
  misc_RNA (1)...(19): siRNA sense strand
gaucuggguucagcaacau

SEQ ID NO: 879658 - RNA, 19 nt, Homo sapiens
  misc_RNA (1)...(19): siRNA sense strand
gcagaucuggguucagcaa

SEQ ID NO: 879659 - RNA, 19 nt, Homo sapiens
  misc_RNA (1)...(19): siRNA sense strand
caaaagagggcaucucaga

SEQ ID NO: 879660 - RNA, 19 nt, Homo sapiens
  misc_RNA (1)...(19): siRNA sense strand
gcaacauaauccagaaagc

SEQ ID NO: 879661 - RNA, 19 nt, Homo sapiens
  misc_RNA (1)...(19): siRNA sense strand
cagaaugggaguacucaau

SEQ ID NO: 879662 - RNA, 19 nt, Homo sapiens
  misc_RNA (1)...(19): siRNA sense strand
aagagggcaucucagaaga

SEQ ID NO: 879663 - RNA, 19 nt, Homo sapiens
  misc_RNA (1)...(19): siRNA sense strand
cagagcaucccaagaguca

SEQ ID NO: 879664 - RNA, 19 nt, Homo sapiens
  misc_RNA (1)...(19): siRNA sense strand
agaauuguuucgucagcaa

SEQ ID NO: 879665 - RNA, 19 nt, Homo sapiens
  misc_RNA (1)...(19): siRNA sense strand
aaagagggcaucucagaag

SEQ ID NO: 879666 - RNA, 19 nt, Homo sapiens
  misc_RNA (1)...(19): siRNA sense strand
gggaugagaaauuuaagca

SEQ ID NO: 879667 - RNA, 19 nt, Homo sapiens
  misc_RNA (1)...(19): siRNA sense strand
uuaaagacacagcugaaau

SEQ ID NO: 879668 - RNA, 19 nt, Homo sapiens
  misc_RNA (1)...(19): siRNA sense strand
cuagugaaaguagaagaua

SEQ ID NO: 879669 - RNA, 19 nt, Homo sapiens
  misc_RNA (1)...(19): siRNA sense strand
gaaugggaguacucaaucc

SEQ ID NO: 879670 - RNA, 19 nt, Homo sapiens
  misc_RNA (1)...(19): siRNA sense strand
acucaauccugccaagaau

SEQ ID NO: 879671 - RNA, 19 nt, Homo sapiens
  misc_RNA (1)...(19): siRNA sense strand
ccugggaugagaaauuuaa

SEQ ID NO: 879672 - RNA, 19 nt, Homo sapiens
  misc_RNA (1)...(19): siRNA sense strand
uagagagggaguuugauga

SEQ ID NO: 879673 - RNA, 19 nt, Homo sapiens
  misc_RNA (1)...(19): siRNA sense strand
caggaacuuugcuaucagu

SEQ ID NO: 879674 - RNA, 19 nt, Homo sapiens
  misc_RNA (1)...(19): siRNA sense strand
ugacccuguuggaggauuu

SEQ ID NO: 879675 - RNA, 19 nt, Homo sapiens
  misc_RNA (1)...(19): siRNA sense strand
uuccugggaugagaaauuu

SEQ ID NO: 879676 - RNA, 19 nt, Homo sapiens
  misc_RNA (1)...(19): siRNA sense strand
auggaaggauuuaacaugu

SEQ ID NO: 879677 - RNA, 19 nt, Homo sapiens
  misc_RNA (1)...(19): siRNA sense strand
acagugaaacagcaacaaa

SEQ ID NO: 879678 - RNA, 19 nt, Homo sapiens
  misc_RNA (1)...(19): siRNA sense strand
gagaacagugaaacagcaa

SEQ ID NO: 879679 - RNA, 19 nt, Homo sapiens
  misc_RNA (1)...(19): siRNA sense strand
gcacacaaaggagcagauc

SEQ ID NO: 879680 - RNA, 19 nt, Homo sapiens
  misc_RNA (1)...(19): siRNA sense strand
ucucagagcaucccaagag

SEQ ID NO: 879681 - RNA, 19 nt, Homo sapiens
  misc_RNA (1)...(19): siRNA sense strand
cagaguugcacacaaagga

SEQ ID NO: 879682 - RNA, 19 nt, Homo sapiens
  misc_RNA (1)...(19): siRNA sense strand
gaggcuacacauucaacaa

SEQ ID NO: 879683 - RNA, 19 nt, Homo sapiens
  misc_RNA (1)...(19): siRNA sense strand
gcugaaauccuggaaacca

SEQ ID NO: 879684 - RNA, 19 nt, Homo sapiens
  misc_RNA (1)...(19): siRNA sense strand
ccucaggaaccuucauuuc

SEQ ID NO: 879685 - RNA, 19 nt, Homo sapiens
  misc_RNA (1)...(19): siRNA sense strand
ccaggaacuuugcuaucag

SEQ ID NO: 879686 - RNA, 19 nt, Homo sapiens
  misc_RNA (1)...(19): siRNA sense strand
gugauugugagaacaguga

SEQ ID NO: 879687 - RNA, 19 nt, Homo sapiens
  misc_RNA (1)...(19): siRNA sense strand
cgucagcaauucagaaaau

SEQ ID NO: 879688 - RNA, 19 nt, Homo sapiens
  misc_RNA (1)...(19): siRNA sense strand
cugcugaggcuacacauuc

SEQ ID NO: 879689 - RNA, 19 nt, Homo sapiens
  misc_RNA (1)...(19): siRNA sense strand
uaaaagugauugugagaac

SEQ ID NO: 879690 - RNA, 19 nt, Homo sapiens
  misc_RNA (1)...(19): siRNA sense strand
uccggaacaagaacuaaua

SEQ ID NO: 879691 - RNA, 19 nt, Homo sapiens
  misc_RNA (1)...(19): siRNA sense strand
aggaagcugugacccuguu

SEQ ID NO: 879692 - RNA, 19 nt, Homo sapiens
  misc_RNA (1)...(19): siRNA sense strand
cacauucaacaauuucuug

SEQ ID NO: 879693 - RNA, 19 nt, Homo sapiens
  misc_RNA (1)...(19): siRNA sense strand
cuacacauucaacaauuuc

SEQ ID NO: 879694 - RNA, 19 nt, Homo sapiens
  misc_RNA (1)...(19): siRNA sense strand
ucaggauccuccggaacaa

SEQ ID NO: 879695 - RNA, 19 nt, Homo sapiens
  misc_RNA (1)...(19): siRNA sense strand
ucagcuauccguugggaau

SEQ ID NO: 879696 - RNA, 19 nt, Homo sapiens
  misc_RNA (1)...(19): siRNA sense strand
uuagagagggaguuugaug

SEQ ID NO: 879697 - RNA, 19 nt, Homo sapiens
  misc_RNA (1)...(19): siRNA sense strand
uggaaggauuuaacauguc

SEQ ID NO: 879698 - RNA, 19 nt, Homo sapiens
  misc_RNA (1)...(19): siRNA sense strand
gccaccauccugccaucua

SEQ ID NO: 879699 - RNA, 19 nt, Homo sapiens
  misc_RNA (1)...(19): siRNA sense strand
ccaagagucaacagacauc

SEQ ID NO: 879700 - RNA, 19 nt, Homo sapiens
  misc_RNA (1)...(19): siRNA sense strand
gagcaucccaagagucaac

SEQ ID NO: 879701 - RNA, 19 nt, Homo sapiens
  misc_RNA (1)...(19): siRNA sense strand
agaaugggaguacucaauc

SEQ ID NO: 879702 - RNA, 19 nt, Homo sapiens
  misc_RNA (1)...(19): siRNA sense strand
ucccaagagucaacagaca

SEQ ID NO: 879703 - RNA, 19 nt, Homo sapiens
  misc_RNA (1)...(19): siRNA sense strand
cagcaacauaauccagaaa

SEQ ID NO: 879704 - RNA, 19 nt, Homo sapiens
  misc_RNA (1)...(19): siRNA sense strand
aaccaugccuuuccccuaa

SEQ ID NO: 879705 - RNA, 19 nt, Homo sapiens
  misc_RNA (1)...(19): siRNA sense strand
cugaaauccuggaaaccau

SEQ ID NO: 879706 - RNA, 19 nt, Homo sapiens
  misc_RNA (1)...(19): siRNA sense strand
ggaaggagaacugcaaaua

SEQ ID NO: 879707 - RNA, 19 nt, Homo sapiens
  misc_RNA (1)...(19): siRNA sense strand
guacaucgaccuagacaaa

SEQ ID NO: 879708 - RNA, 19 nt, Homo sapiens
  misc_RNA (1)...(19): siRNA sense strand
ccaaguacaucgaccuaga

SEQ ID NO: 879709 - RNA, 19 nt, Homo sapiens
  misc_RNA (1)...(19): siRNA sense strand
gaaggagaacugcaaauag

SEQ ID NO: 879710 - RNA, 19 nt, Homo sapiens
  misc_RNA (1)...(19): siRNA sense strand
gagccgagcccacuucuuc

SEQ ID NO: 879711 - RNA, 19 nt, Homo sapiens
  misc_RNA (1)...(19): siRNA sense strand
gaggacauccagcuagauu

SEQ ID NO: 879712 - RNA, 19 nt, Homo sapiens
  misc_RNA (1)...(19): siRNA sense strand
gaccagaagucgggaaagu

SEQ ID NO: 879713 - RNA, 19 nt, Homo sapiens
  misc_RNA (1)...(19): siRNA sense strand
gccacaacgucaucaaugu

SEQ ID NO: 879714 - RNA, 19 nt, Homo sapiens
  misc_RNA (1)...(19): siRNA sense strand
gugaggacauccagcuaga

SEQ ID NO: 879715 - RNA, 19 nt, Homo sapiens
  misc_RNA (1)...(19): siRNA sense strand
ggacauccagcuagauuac

SEQ ID NO: 879716 - RNA, 19 nt, Homo sapiens
  misc_RNA (1)...(19): siRNA sense strand
ggggaaggauguuaacuug

SEQ ID NO: 879717 - RNA, 19 nt, Homo sapiens
  misc_RNA (1)...(19): siRNA sense strand
ccagaagucgggaaaguca

SEQ ID NO: 879718 - RNA, 19 nt, Homo sapiens
  misc_RNA (1)...(19): siRNA sense strand
acaaaggguuccggaagga

SEQ ID NO: 879719 - RNA, 19 nt, Homo sapiens
  misc_RNA (1)...(19): siRNA sense strand
gcaaccugcaccaucacua

SEQ ID NO: 879720 - RNA, 19 nt, Homo sapiens
  misc_RNA (1)...(19): siRNA sense strand
gggaccagaugcuuuacag

SEQ ID NO: 879721 - RNA, 19 nt, Homo sapiens
  misc_RNA (1)...(19): siRNA sense strand
ggccacaacgucaucaaug

SEQ ID NO: 879722 - RNA, 19 nt, Homo sapiens
  misc_RNA (1)...(19): siRNA sense strand
acauccagcuagauuacaa

SEQ ID NO: 879723 - RNA, 19 nt, Homo sapiens
  misc_RNA (1)...(19): siRNA sense strand
ccacgcugcugcucuucau

SEQ ID NO: 879724 - RNA, 19 nt, Homo sapiens
  misc_RNA (1)...(19): siRNA sense strand
cgaauacucggaccagaag

SEQ ID NO: 879725 - RNA, 19 nt, Homo sapiens
  misc_RNA (1)...(19): siRNA sense strand
ccgcggaggcuacgaauac

SEQ ID NO: 879726 - RNA, 19 nt, Homo sapiens
  misc_RNA (1)...(19): siRNA sense strand
gaauccugcuuuggaaacu

SEQ ID NO: 879727 - RNA, 19 nt, Homo sapiens
  misc_RNA (1)...(19): siRNA sense strand
uuacaggagugaggacauc

SEQ ID NO: 879728 - RNA, 19 nt, Homo sapiens
  misc_RNA (1)...(19): siRNA sense strand
caaaggggaaggauguuaa

SEQ ID NO: 879729 - RNA, 19 nt, Homo sapiens
  misc_RNA (1)...(19): siRNA sense strand
agaagucgggaaagucaaa

SEQ ID NO: 879730 - RNA, 19 nt, Homo sapiens
  misc_RNA (1)...(19): siRNA sense strand
cccgaauccugcuuuggaa

SEQ ID NO: 879731 - RNA, 19 nt, Homo sapiens
  misc_RNA (1)...(19): siRNA sense strand
caacuucucgcugcucauc

SEQ ID NO: 879732 - RNA, 19 nt, Homo sapiens
  misc_RNA (1)...(19): siRNA sense strand
gagugaggacauccagcua

SEQ ID NO: 879733 - RNA, 19 nt, Homo sapiens
  misc_RNA (1)...(19): siRNA sense strand
ggcgccugcuggacuugua

SEQ ID NO: 879734 - RNA, 19 nt, Homo sapiens
  misc_RNA (1)...(19): siRNA sense strand
caucccgaauccugcuuug

SEQ ID NO: 879735 - RNA, 19 nt, Homo sapiens
  misc_RNA (1)...(19): siRNA sense strand
caaccugcaccaucacuac

SEQ ID NO: 879736 - RNA, 19 nt, Homo sapiens
  misc_RNA (1)...(19): siRNA sense strand
caacgucaucaaugucauc

SEQ ID NO: 879737 - RNA, 19 nt, Homo sapiens
  misc_RNA (1)...(19): siRNA sense strand
gccaccugcaccaccauua

SEQ ID NO: 879738 - RNA, 19 nt, Homo sapiens
  misc_RNA (1)...(19): siRNA sense strand
ccacaacgucaucaauguc

SEQ ID NO: 879739 - RNA, 19 nt, Homo sapiens
  misc_RNA (1)...(19): siRNA sense strand
uuuggaaacuugugcuucu

SEQ ID NO: 879740 - RNA, 19 nt, Homo sapiens
  misc_RNA (1)...(19): siRNA sense strand
agaaggcccuggagaaguu

SEQ ID NO: 879741 - RNA, 19 nt, Homo sapiens
  misc_RNA (1)...(19): siRNA sense strand
gaagaaggcccuggagaag

SEQ ID NO: 879742 - RNA, 19 nt, Homo sapiens
  misc_RNA (1)...(19): siRNA sense strand
ucaaggugcucaacaugau

SEQ ID NO: 879743 - RNA, 19 nt, Homo sapiens
  misc_RNA (1)...(19): siRNA sense strand
ccaccgagaagcagaagaa

SEQ ID NO: 879744 - RNA, 19 nt, Homo sapiens
  misc_RNA (1)...(19): siRNA sense strand
agaagaaggcccuggagaa

SEQ ID NO: 879745 - RNA, 19 nt, Homo sapiens
  misc_RNA (1)...(19): siRNA sense strand
uaagugccagcuccucuuu

SEQ ID NO: 879746 - RNA, 19 nt, Homo sapiens
  misc_RNA (1)...(19): siRNA sense strand
uuccggagcugaagcagau

SEQ ID NO: 879747 - RNA, 19 nt, Homo sapiens
  misc_RNA (1)...(19): siRNA sense strand
ucucggugcugaugcagau

SEQ ID NO: 879748 - RNA, 19 nt, Homo sapiens
  misc_RNA (1)...(19): siRNA sense strand
ccgaggagaagcugguuga

SEQ ID NO: 879749 - RNA, 19 nt, Homo sapiens
  misc_RNA (1)...(19): siRNA sense strand
cacaagaacuggagguuuc

SEQ ID NO: 879750 - RNA, 19 nt, Homo sapiens
  misc_RNA (1)...(19): siRNA sense strand
gagcagaggguccuggaaa

SEQ ID NO: 879751 - RNA, 19 nt, Homo sapiens
  misc_RNA (1)...(19): siRNA sense strand
gugacaagguucccgauga

SEQ ID NO: 879752 - RNA, 19 nt, Homo sapiens
  misc_RNA (1)...(19): siRNA sense strand
gcacaagaacuggagguuu

SEQ ID NO: 879753 - RNA, 19 nt, Homo sapiens
  misc_RNA (1)...(19): siRNA sense strand
gagaaaaguuccugaagug

SEQ ID NO: 879754 - RNA, 19 nt, Homo sapiens
  misc_RNA (1)...(19): siRNA sense strand
guaugacagugacaagguu

SEQ ID NO: 879755 - RNA, 19 nt, Homo sapiens
  misc_RNA (1)...(19): siRNA sense strand
gaacuggagguuucagaag

SEQ ID NO: 879756 - RNA, 19 nt, Homo sapiens
  misc_RNA (1)...(19): siRNA sense strand
ugacaagguucccgaugag

SEQ ID NO: 879757 - RNA, 19 nt, Homo sapiens
  misc_RNA (1)...(19): siRNA sense strand
gaaggcggaagcccugaug

SEQ ID NO: 879758 - RNA, 19 nt, Homo sapiens
  misc_RNA (1)...(19): siRNA sense strand
gaagagaaaaguuccugaa

SEQ ID NO: 879759 - RNA, 19 nt, Homo sapiens
  misc_RNA (1)...(19): siRNA sense strand
aaaaggaacggaagaaaga

SEQ ID NO: 879760 - RNA, 19 nt, Homo sapiens
  misc_RNA (1)...(19): siRNA sense strand
aacuggagguuucagaaga

SEQ ID NO: 879761 - RNA, 19 nt, Homo sapiens
  misc_RNA (1)...(19): siRNA sense strand
uggacuaccucugcagaug

SEQ ID NO: 879762 - RNA, 19 nt, Homo sapiens
  misc_RNA (1)...(19): siRNA sense strand
uuccugaagugacagagaa

SEQ ID NO: 879763 - RNA, 19 nt, Homo sapiens
  misc_RNA (1)...(19): siRNA sense strand
gagagcugacggugcagaa

SEQ ID NO: 879764 - RNA, 19 nt, Homo sapiens
  misc_RNA (1)...(19): siRNA sense strand
gaugaggagggcucugauc

SEQ ID NO: 879765 - RNA, 19 nt, Homo sapiens
  misc_RNA (1)...(19): siRNA sense strand
ugcugcagcugcucuccua

SEQ ID NO: 879766 - RNA, 19 nt, Homo sapiens
  misc_RNA (1)...(19): siRNA sense strand
aaacagaagagaaaaguuc

SEQ ID NO: 879767 - RNA, 19 nt, Homo sapiens
  misc_RNA (1)...(19): siRNA sense strand
gaagaagaauggaauguuu

SEQ ID NO: 879768 - RNA, 19 nt, Homo sapiens
  misc_RNA (1)...(19): siRNA sense strand
ggagauagcucagaaaugg

SEQ ID NO: 879769 - RNA, 19 nt, Homo sapiens
  misc_RNA (1)...(19): siRNA sense strand
gaugaaauguccaaucuug

SEQ ID NO: 879770 - RNA, 19 nt, Homo sapiens
  misc_RNA (1)...(19): siRNA sense strand
gcucagaaauggaugauga

SEQ ID NO: 879771 - RNA, 19 nt, Homo sapiens
  misc_RNA (1)...(19): siRNA sense strand
gcaaauucguacaaaggua

SEQ ID NO: 879772 - RNA, 19 nt, Homo sapiens
  misc_RNA (1)...(19): siRNA sense strand
gaagacuggacaacaauua

SEQ ID NO: 879773 - RNA, 19 nt, Homo sapiens
  misc_RNA (1)...(19): siRNA sense strand
gcgaaaagcuguugcuaua

SEQ ID NO: 879774 - RNA, 19 nt, Homo sapiens
  misc_RNA (1)...(19): siRNA sense strand
ccucagagcuguggaauga

SEQ ID NO: 879775 - RNA, 19 nt, Homo sapiens
  misc_RNA (1)...(19): siRNA sense strand
gaugaagacugugaaagaa

SEQ ID NO: 879776 - RNA, 19 nt, Homo sapiens
  misc_RNA (1)...(19): siRNA sense strand
gaagagggaagacuauauu

SEQ ID NO: 879777 - RNA, 19 nt, Homo sapiens
  misc_RNA (1)...(19): siRNA sense strand
guacaaagguagcaggaau

SEQ ID NO: 879778 - RNA, 19 nt, Homo sapiens
  misc_RNA (1)...(19): siRNA sense strand
ggaagacuauauuaugaug

SEQ ID NO: 879779 - RNA, 19 nt, Homo sapiens
  misc_RNA (1)...(19): siRNA sense strand
gcauugauauuaccucaga

SEQ ID NO: 879780 - RNA, 19 nt, Homo sapiens
  misc_RNA (1)...(19): siRNA sense strand
gaaagaagaagaauggaau

SEQ ID NO: 879781 - RNA, 19 nt, Homo sapiens
  misc_RNA (1)...(19): siRNA sense strand
gaugaaguuugguuuaaga

SEQ ID NO: 879782 - RNA, 19 nt, Homo sapiens
  misc_RNA (1)...(19): siRNA sense strand
gauaggcacagcauugaua

SEQ ID NO: 879783 - RNA, 19 nt, Homo sapiens
  misc_RNA (1)...(19): siRNA sense strand
guauauacguggacaaaca

SEQ ID NO: 879784 - RNA, 19 nt, Homo sapiens
  misc_RNA (1)...(19): siRNA sense strand
ggauggagauagcucagaa

SEQ ID NO: 879785 - RNA, 19 nt, Homo sapiens
  misc_RNA (1)...(19): siRNA sense strand
uaagucagguggaugcaaa

SEQ ID NO: 879786 - RNA, 19 nt, Homo sapiens
  misc_RNA (1)...(19): siRNA sense strand
gaagccaguuguuguuuca

SEQ ID NO: 879787 - RNA, 19 nt, Homo sapiens
  misc_RNA (1)...(19): siRNA sense strand
gaacuagaggagaagauaa

SEQ ID NO: 879788 - RNA, 19 nt, Homo sapiens
  misc_RNA (1)...(19): siRNA sense strand
gaaaagcuguugcuauaug

SEQ ID NO: 879789 - RNA, 19 nt, Homo sapiens
  misc_RNA (1)...(19): siRNA sense strand
aaagaugaauguccuacaa

SEQ ID NO: 879790 - RNA, 19 nt, Homo sapiens
  misc_RNA (1)...(19): siRNA sense strand
uggaaccgcuggcaacuuu

SEQ ID NO: 879791 - RNA, 19 nt, Homo sapiens
  misc_RNA (1)...(19): siRNA sense strand
gagggaagacuauauuaug

SEQ ID NO: 879792 - RNA, 19 nt, Homo sapiens
  misc_RNA (1)...(19): siRNA sense strand
gcuggcaacuuuacaggaa

SEQ ID NO: 879793 - RNA, 19 nt, Homo sapiens
  misc_RNA (1)...(19): siRNA sense strand
ugaagacugugaaagaaga

SEQ ID NO: 879794 - RNA, 19 nt, Homo sapiens
  misc_RNA (1)...(19): siRNA sense strand
gaaauguccaaucuugaaa

SEQ ID NO: 879795 - RNA, 19 nt, Homo sapiens
  misc_RNA (1)...(19): siRNA sense strand
gaggauaggcacagcauug

SEQ ID NO: 879796 - RNA, 19 nt, Homo sapiens
  misc_RNA (1)...(19): siRNA sense strand
gauggugaaugguauauac

SEQ ID NO: 879797 - RNA, 19 nt, Homo sapiens
  misc_RNA (1)...(19): siRNA sense strand
aaagguagcaggaaucuau

SEQ ID NO: 879798 - RNA, 19 nt, Homo sapiens
  misc_RNA (1)...(19): siRNA sense strand
uagcaggaaucuauagaga

SEQ ID NO: 879799 - RNA, 19 nt, Homo sapiens
  misc_RNA (1)...(19): siRNA sense strand
ucagguccauauauaguuu

SEQ ID NO: 879800 - RNA, 19 nt, Homo sapiens
  misc_RNA (1)...(19): siRNA sense strand
agagugaacuagaggagaa

SEQ ID NO: 879801 - RNA, 19 nt, Homo sapiens
  misc_RNA (1)...(19): siRNA sense strand
gaauggaauguuuggauga

SEQ ID NO: 879802 - RNA, 19 nt, Homo sapiens
  misc_RNA (1)...(19): siRNA sense strand
gcaaaucuaagcuuuacau

SEQ ID NO: 879803 - RNA, 19 nt, Homo sapiens
  misc_RNA (1)...(19): siRNA sense strand
agaaauggaugaugaagac

SEQ ID NO: 879804 - RNA, 19 nt, Homo sapiens
  misc_RNA (1)...(19): siRNA sense strand
caacaauuaaccaugauga

SEQ ID NO: 879805 - RNA, 19 nt, Homo sapiens
  misc_RNA (1)...(19): siRNA sense strand
agggaagacuauauuauga

SEQ ID NO: 879806 - RNA, 19 nt, Homo sapiens
  misc_RNA (1)...(19): siRNA sense strand
ucagagcuguggaaugaug

SEQ ID NO: 879807 - RNA, 19 nt, Homo sapiens
  misc_RNA (1)...(19): siRNA sense strand
ugaaauguccaaucuugaa

SEQ ID NO: 879808 - RNA, 19 nt, Homo sapiens
  misc_RNA (1)...(19): siRNA sense strand
ggaaccaccugugaaacug

SEQ ID NO: 879809 - RNA, 19 nt, Homo sapiens
  misc_RNA (1)...(19): siRNA sense strand
aggcacagcauugauauua

SEQ ID NO: 879810 - RNA, 19 nt, Homo sapiens
  misc_RNA (1)...(19): siRNA sense strand
uguuucagguccauauaua

SEQ ID NO: 879811 - RNA, 19 nt, Homo sapiens
  misc_RNA (1)...(19): siRNA sense strand
gauaagaaggcuugaagag

SEQ ID NO: 879812 - RNA, 19 nt, Homo sapiens
  misc_RNA (1)...(19): siRNA sense strand
caugaugaaguuugguuua

SEQ ID NO: 879813 - RNA, 19 nt, Homo sapiens
  misc_RNA (1)...(19): siRNA sense strand
ugaugaagacugugaaaga

SEQ ID NO: 879814 - RNA, 19 nt, Homo sapiens
  misc_RNA (1)...(19): siRNA sense strand
gaaaagcaccagaauacuu

SEQ ID NO: 879815 - RNA, 19 nt, Homo sapiens
  misc_RNA (1)...(19): siRNA sense strand
gaagauaagaaggcuugaa

SEQ ID NO: 879816 - RNA, 19 nt, Homo sapiens
  misc_RNA (1)...(19): siRNA sense strand
agaaggagaccaaccauca

SEQ ID NO: 879817 - RNA, 19 nt, Homo sapiens
  misc_RNA (1)...(19): siRNA sense strand
gcuuagaaucuguaaagaa

SEQ ID NO: 879818 - RNA, 19 nt, Homo sapiens
  misc_RNA (1)...(19): siRNA sense strand
cuugaagacuggacaacaa

SEQ ID NO: 879819 - RNA, 19 nt, Homo sapiens
  misc_RNA (1)...(19): siRNA sense strand
cuuagaaucuguaaagaac

SEQ ID NO: 879820 - RNA, 19 nt, Homo sapiens
  misc_RNA (1)...(19): siRNA sense strand
uaaccaugaugaaguuugg

SEQ ID NO: 879821 - RNA, 19 nt, Homo sapiens
  misc_RNA (1)...(19): siRNA sense strand
gcacagcauugauauuacc

SEQ ID NO: 879822 - RNA, 19 nt, Homo sapiens
  misc_RNA (1)...(19): siRNA sense strand
ugaacuagaggagaagaua

SEQ ID NO: 879823 - RNA, 19 nt, Homo sapiens
  misc_RNA (1)...(19): siRNA sense strand
ugaaagaagaagaauggaa

SEQ ID NO: 879824 - RNA, 19 nt, Homo sapiens
  misc_RNA (1)...(19): siRNA sense strand
aaagaagccaguuguuguu

SEQ ID NO: 879825 - RNA, 19 nt, Homo sapiens
  misc_RNA (1)...(19): siRNA sense strand
gggauaagaaggagaccaa

SEQ ID NO: 879826 - RNA, 19 nt, Homo sapiens
  misc_RNA (1)...(19): siRNA sense strand
caauuaaccaugaugaagu

SEQ ID NO: 879827 - RNA, 19 nt, Homo sapiens
  misc_RNA (1)...(19): siRNA sense strand
gcuguggaaugaugagcuu

SEQ ID NO: 879828 - RNA, 19 nt, Homo sapiens
  misc_RNA (1)...(19): siRNA sense strand
gaugaugaagacugugaaa

SEQ ID NO: 879829 - RNA, 19 nt, Homo sapiens
  misc_RNA (1)...(19): siRNA sense strand
aaacggaaccaccugugaa

SEQ ID NO: 879830 - RNA, 19 nt, Homo sapiens
  misc_RNA (1)...(19): siRNA sense strand
augaugagcuucagucaag

SEQ ID NO: 879831 - RNA, 19 nt, Homo sapiens
  misc_RNA (1)...(19): siRNA sense strand
caagaagucauagcuggaa

SEQ ID NO: 879832 - RNA, 19 nt, Homo sapiens
  misc_RNA (1)...(19): siRNA sense strand
gcuuuacauuucacagcua

SEQ ID NO: 879833 - RNA, 19 nt, Homo sapiens
  misc_RNA (1)...(19): siRNA sense strand
gagguggacuacgccgaaa

SEQ ID NO: 879834 - RNA, 19 nt, Homo sapiens
  misc_RNA (1)...(19): siRNA sense strand
aagagggaagacuauauua

SEQ ID NO: 879835 - RNA, 19 nt, Homo sapiens
  misc_RNA (1)...(19): siRNA sense strand
uggaauguuuggaugaaau

SEQ ID NO: 879836 - RNA, 19 nt, Homo sapiens
  misc_RNA (1)...(19): siRNA sense strand
ggaauguuuggaugaaaug

SEQ ID NO: 879837 - RNA, 19 nt, Homo sapiens
  misc_RNA (1)...(19): siRNA sense strand
ugaagagggaagacuauau

SEQ ID NO: 879838 - RNA, 19 nt, Homo sapiens
  misc_RNA (1)...(19): siRNA sense strand
ucagguggaugcaaaacua

SEQ ID NO: 879839 - RNA, 19 nt, Homo sapiens
  misc_RNA (1)...(19): siRNA sense strand
gaugaauguccuacaagug

SEQ ID NO: 879840 - RNA, 19 nt, Homo sapiens
  misc_RNA (1)...(19): siRNA sense strand
gaugagcuucagucaagaa

SEQ ID NO: 879841 - RNA, 19 nt, Homo sapiens
  misc_RNA (1)...(19): siRNA sense strand
gaaugaugagcuucaguca

SEQ ID NO: 879842 - RNA, 19 nt, Homo sapiens
  misc_RNA (1)...(19): siRNA sense strand
gaagacugugaaagaagaa

SEQ ID NO: 879843 - RNA, 19 nt, Homo sapiens
  misc_RNA (1)...(19): siRNA sense strand
gggaagacuauauuaugau

SEQ ID NO: 879844 - RNA, 19 nt, Homo sapiens
  misc_RNA (1)...(19): siRNA sense strand
ucacagcuacagaaaggaa

SEQ ID NO: 879845 - RNA, 19 nt, Homo sapiens
  misc_RNA (1)...(19): siRNA sense strand
gagcucugcuuagaaucug

SEQ ID NO: 879846 - RNA, 19 nt, Homo sapiens
  misc_RNA (1)...(19): siRNA sense strand
gauggaagcaaaucuaagc

SEQ ID NO: 879847 - RNA, 19 nt, Homo sapiens
  misc_RNA (1)...(19): siRNA sense strand
agaugaauguccuacaagu

SEQ ID NO: 879848 - RNA, 19 nt, Homo sapiens
  misc_RNA (1)...(19): siRNA sense strand
aauggaauguuuggaugaa

SEQ ID NO: 879849 - RNA, 19 nt, Homo sapiens
  misc_RNA (1)...(19): siRNA sense strand
auacguggacaaacaauau

SEQ ID NO: 879850 - RNA, 19 nt, Homo sapiens
  misc_RNA (1)...(19): siRNA sense strand
cagaaauggaugaugaaga

SEQ ID NO: 879851 - RNA, 19 nt, Homo sapiens
  misc_RNA (1)...(19): siRNA sense strand
ggaaccgcuggcaacuuua

SEQ ID NO: 879852 - RNA, 19 nt, Homo sapiens
  misc_RNA (1)...(19): siRNA sense strand
caacaauuaggaaggcaau

SEQ ID NO: 879853 - RNA, 19 nt, Homo sapiens
  misc_RNA (1)...(19): siRNA sense strand
agaagccaguuguuguuuc

SEQ ID NO: 879854 - RNA, 19 nt, Homo sapiens
  misc_RNA (1)...(19): siRNA sense strand
ggagaccaaccaucacgau

SEQ ID NO: 879855 - RNA, 19 nt, Homo sapiens
  misc_RNA (1)...(19): siRNA sense strand
agucauagcuggaaaagca

SEQ ID NO: 879856 - RNA, 19 nt, Homo sapiens
  misc_RNA (1)...(19): siRNA sense strand
acaguuuaccgaucucaaa

SEQ ID NO: 879857 - RNA, 19 nt, Homo sapiens
  misc_RNA (1)...(19): siRNA sense strand
gaggccugauggaagcaaa

SEQ ID NO: 879858 - RNA, 19 nt, Homo sapiens
  misc_RNA (1)...(19): siRNA sense strand
agagggaagacuauauuau

SEQ ID NO: 879859 - RNA, 19 nt, Homo sapiens
  misc_RNA (1)...(19): siRNA sense strand
agaagaagaauggaauguu

SEQ ID NO: 879860 - RNA, 19 nt, Homo sapiens
  misc_RNA (1)...(19): siRNA sense strand
aagcuguugcuauaugaua

SEQ ID NO: 879861 - RNA, 19 nt, Homo sapiens
  misc_RNA (1)...(19): siRNA sense strand
gaaccgcuggcaacuuuac

SEQ ID NO: 879862 - RNA, 19 nt, Homo sapiens
  misc_RNA (1)...(19): siRNA sense strand
gguagcaggaaucuauaga

SEQ ID NO: 879863 - RNA, 19 nt, Homo sapiens
  misc_RNA (1)...(19): siRNA sense strand
aagaagucauagcuggaaa

SEQ ID NO: 879864 - RNA, 19 nt, Homo sapiens
  misc_RNA (1)...(19): siRNA sense strand
uagaggagaagauaagaag

SEQ ID NO: 879865 - RNA, 19 nt, Homo sapiens
  misc_RNA (1)...(19): siRNA sense strand
gauggagauagcucagaaa

SEQ ID NO: 879866 - RNA, 19 nt, Homo sapiens
  misc_RNA (1)...(19): siRNA sense strand
ccugauggaagcaaaucua

SEQ ID NO: 879867 - RNA, 19 nt, Homo sapiens
  misc_RNA (1)...(19): siRNA sense strand
cagaacaacuccgucuuua

SEQ ID NO: 879868 - RNA, 19 nt, Homo sapiens
  misc_RNA (1)...(19): siRNA sense strand
uagaggaacugaggaagaa

SEQ ID NO: 879869 - RNA, 19 nt, Homo sapiens
  misc_RNA (1)...(19): siRNA sense strand
uguaugaacugacuaaugg

SEQ ID NO: 879870 - RNA, 19 nt, Homo sapiens
  misc_RNA (1)...(19): siRNA sense strand
gcacaaggccgagaucauc

SEQ ID NO: 879871 - RNA, 19 nt, Homo sapiens
  misc_RNA (1)...(19): siRNA sense strand
cacaaacaguccagcauga

SEQ ID NO: 879872 - RNA, 19 nt, Homo sapiens
  misc_RNA (1)...(19): siRNA sense strand
ccagaacaacuccgucuuu

SEQ ID NO: 879873 - RNA, 19 nt, Homo sapiens
  misc_RNA (1)...(19): siRNA sense strand
gggaagacacagaggauga

SEQ ID NO: 879874 - RNA, 19 nt, Homo sapiens
  misc_RNA (1)...(19): siRNA sense strand
gaacaacuccgucuuuacc

SEQ ID NO: 879875 - RNA, 19 nt, Homo sapiens
  misc_RNA (1)...(19): siRNA sense strand
ggaugaagccacucuacug

SEQ ID NO: 879876 - RNA, 19 nt, Homo sapiens
  misc_RNA (1)...(19): siRNA sense strand
cgauccagauuguauuaga

SEQ ID NO: 879877 - RNA, 19 nt, Homo sapiens
  misc_RNA (1)...(19): siRNA sense strand
acacagaggaugaggaguu

SEQ ID NO: 879878 - RNA, 19 nt, Homo sapiens
  misc_RNA (1)...(19): siRNA sense strand
gauccagauuguauuagag

SEQ ID NO: 879879 - RNA, 19 nt, Homo sapiens
  misc_RNA (1)...(19): siRNA sense strand
ucaacaacgucaagcuaca

SEQ ID NO: 879880 - RNA, 19 nt, Homo sapiens
  misc_RNA (1)...(19): siRNA sense strand
gggaaacucaucuaucagu

SEQ ID NO: 879881 - RNA, 19 nt, Homo sapiens
  misc_RNA (1)...(19): siRNA sense strand
gccgagaucaucacuguca

SEQ ID NO: 879882 - RNA, 19 nt, Homo sapiens
  misc_RNA (1)...(19): siRNA sense strand
gagucgauccagauuguau

SEQ ID NO: 879883 - RNA, 19 nt, Homo sapiens
  misc_RNA (1)...(19): siRNA sense strand
gucgauccagauuguauua

SEQ ID NO: 879884 - RNA, 19 nt, Homo sapiens
  misc_RNA (1)...(19): siRNA sense strand
gccgaggcgucaaguucuu

SEQ ID NO: 879885 - RNA, 19 nt, Homo sapiens
  misc_RNA (1)...(19): siRNA sense strand
cacagaggaugaggaguuc

SEQ ID NO: 879886 - RNA, 19 nt, Homo sapiens
  misc_RNA (1)...(19): siRNA sense strand
aggccgagaucaucacugu

SEQ ID NO: 879887 - RNA, 19 nt, Homo sapiens
  misc_RNA (1)...(19): siRNA sense strand
ccagcuuccugaucaugug

SEQ ID NO: 879888 - RNA, 19 nt, Homo sapiens
  misc_RNA (1)...(19): siRNA sense strand
gcucgcugguccuguccuu

SEQ ID NO: 879889 - RNA, 19 nt, Homo sapiens
  misc_RNA (1)...(19): siRNA sense strand
ucgcuucccacccuucuuu

SEQ ID NO: 879890 - RNA, 19 nt, Homo sapiens
  misc_RNA (1)...(19): siRNA sense strand
gcggaggccagaagaaugg

SEQ ID NO: 879891 - RNA, 19 nt, Homo sapiens
  misc_RNA (1)...(19): siRNA sense strand
aaguccagcuuccugauca

SEQ ID NO: 879892 - RNA, 19 nt, Homo sapiens
  misc_RNA (1)...(19): siRNA sense strand
gcaaguccagcuuccugau

SEQ ID NO: 879893 - RNA, 19 nt, Homo sapiens
  misc_RNA (1)...(19): siRNA sense strand
cuucaacaacgucaagcua

SEQ ID NO: 879894 - RNA, 19 nt, Homo sapiens
  misc_RNA (1)...(19): siRNA sense strand
gaggaacugaggaagaaag

SEQ ID NO: 879895 - RNA, 19 nt, Homo sapiens
  misc_RNA (1)...(19): siRNA sense strand
uuagaggaacugaggaaga

SEQ ID NO: 879896 - RNA, 19 nt, Homo sapiens
  misc_RNA (1)...(19): siRNA sense strand
ccagauuguauuagaggaa

SEQ ID NO: 879897 - RNA, 19 nt, Homo sapiens
  misc_RNA (1)...(19): siRNA sense strand
cagcaugacggugauggaa

SEQ ID NO: 879898 - RNA, 19 nt, Homo sapiens
  misc_RNA (1)...(19): siRNA sense strand
ggagucgauccagauugua

SEQ ID NO: 879899 - RNA, 19 nt, Homo sapiens
  misc_RNA (1)...(19): siRNA sense strand
gagcacaaggccgagauca

SEQ ID NO: 879900 - RNA, 19 nt, Homo sapiens
  misc_RNA (1)...(19): siRNA sense strand
ucgagugguuggauaagag

SEQ ID NO: 879901 - RNA, 19 nt, Homo sapiens
  misc_RNA (1)...(19): siRNA sense strand
ucgaguggccguggcagua

SEQ ID NO: 879902 - RNA, 19 nt, Homo sapiens
  misc_RNA (1)...(19): siRNA sense strand
ggaagacacagaggaugag

SEQ ID NO: 879903 - RNA, 19 nt, Homo sapiens
  misc_RNA (1)...(19): siRNA sense strand
gaguggccguggcaguauc

SEQ ID NO: 879904 - RNA, 19 nt, Homo sapiens
  misc_RNA (1)...(19): siRNA sense strand
gcacauugacuccuucuga

SEQ ID NO: 879905 - RNA, 19 nt, Homo sapiens
  misc_RNA (1)...(19): siRNA sense strand
ccaggaagcucugaggauu

SEQ ID NO: 879906 - RNA, 19 nt, Homo sapiens
  misc_RNA (1)...(19): siRNA sense strand
cuacugacaugcagaggaa

SEQ ID NO: 879907 - RNA, 19 nt, Homo sapiens
  misc_RNA (1)...(19): siRNA sense strand
caacgcagccggcuucuuc

SEQ ID NO: 879908 - RNA, 19 nt, Homo sapiens
  misc_RNA (1)...(19): siRNA sense strand
gaagcagaacuaugauuug

SEQ ID NO: 879909 - RNA, 19 nt, Homo sapiens
  misc_RNA (1)...(19): siRNA sense strand
ccagaagcaugucuuugug

SEQ ID NO: 879910 - RNA, 19 nt, Homo sapiens
  misc_RNA (1)...(19): siRNA sense strand
ccaggagggugccauguuc

SEQ ID NO: 879911 - RNA, 19 nt, Homo sapiens
  misc_RNA (1)...(19): siRNA sense strand
cugcgucacuuccucuaua

SEQ ID NO: 879912 - RNA, 19 nt, Homo sapiens
  misc_RNA (1)...(19): siRNA sense strand
gaggagaugcugccaggaa

SEQ ID NO: 879913 - RNA, 19 nt, Homo sapiens
  misc_RNA (1)...(19): siRNA sense strand
cuacagcguugcccaagug

SEQ ID NO: 879914 - RNA, 19 nt, Homo sapiens
  misc_RNA (1)...(19): siRNA sense strand
gcaccagaagcaugucuuu

SEQ ID NO: 879915 - RNA, 19 nt, Homo sapiens
  misc_RNA (1)...(19): siRNA sense strand
gaagagaagcagcgaaugc

SEQ ID NO: 879916 - RNA, 19 nt, Homo sapiens
  misc_RNA (1)...(19): siRNA sense strand
gauggcacauugacuccuu

SEQ ID NO: 879917 - RNA, 19 nt, Homo sapiens
  misc_RNA (1)...(19): siRNA sense strand
agaagcagaacuaugauuu

SEQ ID NO: 879918 - RNA, 19 nt, Homo sapiens
  misc_RNA (1)...(19): siRNA sense strand
ccuuugagcucuacaugug

SEQ ID NO: 879919 - RNA, 19 nt, Homo sapiens
  misc_RNA (1)...(19): siRNA sense strand
gcgccgaaaggaccaauuu

SEQ ID NO: 879920 - RNA, 19 nt, Homo sapiens
  misc_RNA (1)...(19): siRNA sense strand
cagaucagccaggacuuua

SEQ ID NO: 879921 - RNA, 19 nt, Homo sapiens
  misc_RNA (1)...(19): siRNA sense strand
ccgugugccugcccaaauu

SEQ ID NO: 879922 - RNA, 19 nt, Homo sapiens
  misc_RNA (1)...(19): siRNA sense strand
ccacugaccgugaggacuu

SEQ ID NO: 879923 - RNA, 19 nt, Homo sapiens
  misc_RNA (1)...(19): siRNA sense strand
cuacagacaugcgccagau

SEQ ID NO: 879924 - RNA, 19 nt, Homo sapiens
  misc_RNA (1)...(19): siRNA sense strand
gcacuuuccagcacuaugg

SEQ ID NO: 879925 - RNA, 19 nt, Homo sapiens
  misc_RNA (1)...(19): siRNA sense strand
gaggcacuuuccagcacua

SEQ ID NO: 879926 - RNA, 19 nt, Homo sapiens
  misc_RNA (1)...(19): siRNA sense strand
ucaccagcccugagauuga

SEQ ID NO: 879927 - RNA, 19 nt, Homo sapiens
  misc_RNA (1)...(19): siRNA sense strand
agcagaagcagaacuauga

SEQ ID NO: 879928 - RNA, 19 nt, Homo sapiens
  misc_RNA (1)...(19): siRNA sense strand
ccagaucagccaggacuuu

SEQ ID NO: 879929 - RNA, 19 nt, Homo sapiens
  misc_RNA (1)...(19): siRNA sense strand
cacauugacuccuucugau

SEQ ID NO: 879930 - RNA, 19 nt, Homo sapiens
  misc_RNA (1)...(19): siRNA sense strand
cauggcgccugcaccagaa

SEQ ID NO: 879931 - RNA, 19 nt, Homo sapiens
  misc_RNA (1)...(19): siRNA sense strand
ucaagaccauuuacuacac

SEQ ID NO: 879932 - RNA, 19 nt, Homo sapiens
  misc_RNA (1)...(19): siRNA sense strand
ggucugaggaggcacuuuc

SEQ ID NO: 879933 - RNA, 19 nt, Homo sapiens
  misc_RNA (1)...(19): siRNA sense strand
ucuucaaccucauuaguuc

SEQ ID NO: 879934 - RNA, 19 nt, Homo sapiens
  misc_RNA (1)...(19): siRNA sense strand
gaccugcaccugcucuuca

SEQ ID NO: 879935 - RNA, 19 nt, Homo sapiens
  misc_RNA (1)...(19): siRNA sense strand
gcagcugagccacaucuuc

SEQ ID NO: 879936 - RNA, 19 nt, Homo sapiens
  misc_RNA (1)...(19): siRNA sense strand
gcacugcgcacacccuacu

SEQ ID NO: 879937 - RNA, 19 nt, Homo sapiens
  misc_RNA (1)...(19): siRNA sense strand
cagaagcagaacuaugauu

SEQ ID NO: 879938 - RNA, 19 nt, Homo sapiens
  misc_RNA (1)...(19): siRNA sense strand
cagcagaagcagaacuaug

SEQ ID NO: 879939 - RNA, 19 nt, Homo sapiens
  misc_RNA (1)...(19): siRNA sense strand
aagcagaacuaugauuugc

SEQ ID NO: 879940 - RNA, 19 nt, Homo sapiens
  misc_RNA (1)...(19): siRNA sense strand
ucacgccccucaccuauug

SEQ ID NO: 879941 - RNA, 19 nt, Homo sapiens
  misc_RNA (1)...(19): siRNA sense strand
ugcgucacuuccucuauaa

SEQ ID NO: 879942 - RNA, 19 nt, Homo sapiens
  misc_RNA (1)...(19): siRNA sense strand
ggaagagaagcagcgaaug

SEQ ID NO: 879943 - RNA, 19 nt, Homo sapiens
  misc_RNA (1)...(19): siRNA sense strand
ggaauggcccagggaaugg

SEQ ID NO: 879944 - RNA, 19 nt, Homo sapiens
  misc_RNA (1)...(19): siRNA sense strand
gcagaagcagaacuaugau

SEQ ID NO: 879945 - RNA, 19 nt, Homo sapiens
  misc_RNA (1)...(19): siRNA sense strand
gcucuucaaccucauuagu

SEQ ID NO: 879946 - RNA, 19 nt, Homo sapiens
  misc_RNA (1)...(19): siRNA sense strand
gccaggagggugccauguu

SEQ ID NO: 879947 - RNA, 19 nt, Homo sapiens
  misc_RNA (1)...(19): siRNA sense strand
gcacuauggguguuauggu

SEQ ID NO: 879948 - RNA, 19 nt, Homo sapiens
  misc_RNA (1)...(19): siRNA sense strand
cacucaagaccauuuacua

SEQ ID NO: 879949 - RNA, 19 nt, Homo sapiens
  misc_RNA (1)...(19): siRNA sense strand
gcccacucaagaccauuua

SEQ ID NO: 879950 - RNA, 19 nt, Homo sapiens
  misc_RNA (1)...(19): siRNA sense strand
cagagcgcaucaccgacaa

SEQ ID NO: 879951 - RNA, 19 nt, Homo sapiens
  misc_RNA (1)...(19): siRNA sense strand
gacaugcagaggaagagaa

SEQ ID NO: 879952 - RNA, 19 nt, Homo sapiens
  misc_RNA (1)...(19): siRNA sense strand
caggaagcucugaggauug

SEQ ID NO: 879953 - RNA, 19 nt, Homo sapiens
  misc_RNA (1)...(19): siRNA sense strand
ucagugccauccauaagcu

SEQ ID NO: 879954 - RNA, 19 nt, Homo sapiens
  misc_RNA (1)...(19): siRNA sense strand
ugaccgugaggacuucuuu

SEQ ID NO: 879955 - RNA, 19 nt, Homo sapiens
  misc_RNA (1)...(19): siRNA sense strand
gugcgcagcugagccacau

SEQ ID NO: 879956 - RNA, 19 nt, Homo sapiens
  misc_RNA (1)...(19): siRNA sense strand
ccuacgaggaccugacuga

SEQ ID NO: 879957 - RNA, 19 nt, Homo sapiens
  misc_RNA (1)...(19): siRNA sense strand
accuagagccugacacuga

SEQ ID NO: 879958 - RNA, 19 nt, Homo sapiens
  misc_RNA (1)...(19): siRNA sense strand
gcaugucuuugugcugagu

SEQ ID NO: 879959 - RNA, 19 nt, Homo sapiens
  misc_RNA (1)...(19): siRNA sense strand
uuugagcucuacauguguu

SEQ ID NO: 879960 - RNA, 19 nt, Homo sapiens
  misc_RNA (1)...(19): siRNA sense strand
acagacaugcgccagauca

SEQ ID NO: 879961 - RNA, 19 nt, Homo sapiens
  misc_RNA (1)...(19): siRNA sense strand
ccagcacuauggguguuau

SEQ ID NO: 879962 - RNA, 19 nt, Homo sapiens
  misc_RNA (1)...(19): siRNA sense strand
caacaagacuaugcgcauu

SEQ ID NO: 879963 - RNA, 19 nt, Homo sapiens
  misc_RNA (1)...(19): siRNA sense strand
uagaggcgcugcucaacaa

SEQ ID NO: 879964 - RNA, 19 nt, Homo sapiens
  misc_RNA (1)...(19): siRNA sense strand
gcacugaccgugacugcaa

SEQ ID NO: 879965 - RNA, 19 nt, Homo sapiens
  misc_RNA (1)...(19): siRNA sense strand
ccacaucguuuccauugag

SEQ ID NO: 879966 - RNA, 19 nt, Homo sapiens
  misc_RNA (1)...(19): siRNA sense strand
ggucugagcgcuuguuaca

SEQ ID NO: 879967 - RNA, 19 nt, Homo sapiens
  misc_RNA (1)...(19): siRNA sense strand
ggacacuggucggcugcuu

SEQ ID NO: 879968 - RNA, 19 nt, Homo sapiens
  misc_RNA (1)...(19): siRNA sense strand
caccacaucguuuccauug

SEQ ID NO: 879969 - RNA, 19 nt, Homo sapiens
  misc_RNA (1)...(19): siRNA sense strand
gcagucaagcagcaagaug

SEQ ID NO: 879970 - RNA, 19 nt, Homo sapiens
  misc_RNA (1)...(19): siRNA sense strand
gcgcugcucaacaagacua

SEQ ID NO: 879971 - RNA, 19 nt, Homo sapiens
  misc_RNA (1)...(19): siRNA sense strand
gacaccacaucguuuccau

SEQ ID NO: 879972 - RNA, 19 nt, Homo sapiens
  misc_RNA (1)...(19): siRNA sense strand
gcggucugagcgcuuguua

SEQ ID NO: 879973 - RNA, 19 nt, Homo sapiens
  misc_RNA (1)...(19): siRNA sense strand
gcugcuuccucugcacuga

SEQ ID NO: 879974 - RNA, 19 nt, Homo sapiens
  misc_RNA (1)...(19): siRNA sense strand
caaagaagcuugugaagga

SEQ ID NO: 879975 - RNA, 19 nt, Homo sapiens
  misc_RNA (1)...(19): siRNA sense strand
ggagagagaucuucaagga

SEQ ID NO: 879976 - RNA, 19 nt, Homo sapiens
  misc_RNA (1)...(19): siRNA sense strand
gcagaaagcucuaagugau

SEQ ID NO: 879977 - RNA, 19 nt, Homo sapiens
  misc_RNA (1)...(19): siRNA sense strand
ggaagagauugcugaauug

SEQ ID NO: 879978 - RNA, 19 nt, Homo sapiens
  misc_RNA (1)...(19): siRNA sense strand
gggaagcguuuacagauaa

SEQ ID NO: 879979 - RNA, 19 nt, Homo sapiens
  misc_RNA (1)...(19): siRNA sense strand
caaagcagauccuaaaaua

SEQ ID NO: 879980 - RNA, 19 nt, Homo sapiens
  misc_RNA (1)...(19): siRNA sense strand
gagcaaauguuguauaagg

SEQ ID NO: 879981 - RNA, 19 nt, Homo sapiens
  misc_RNA (1)...(19): siRNA sense strand
ugaagaaacuggaacucua

SEQ ID NO: 879982 - RNA, 19 nt, Homo sapiens
  misc_RNA (1)...(19): siRNA sense strand
cccaagaacugcucuauga

SEQ ID NO: 879983 - RNA, 19 nt, Homo sapiens
  misc_RNA (1)...(19): siRNA sense strand
gacagaaacugaaagacuu

SEQ ID NO: 879984 - RNA, 19 nt, Homo sapiens
  misc_RNA (1)...(19): siRNA sense strand
gcaauagacgggcacauaa

SEQ ID NO: 879985 - RNA, 19 nt, Homo sapiens
  misc_RNA (1)...(19): siRNA sense strand
gggaacagaugcuggagaa

SEQ ID NO: 879986 - RNA, 19 nt, Homo sapiens
  misc_RNA (1)...(19): siRNA sense strand
ggaaaaguguugcccguua

SEQ ID NO: 879987 - RNA, 19 nt, Homo sapiens
  misc_RNA (1)...(19): siRNA sense strand
ccagagaaaucagaacaaa

SEQ ID NO: 879988 - RNA, 19 nt, Homo sapiens
  misc_RNA (1)...(19): siRNA sense strand
aggaagagauugcugaauu

SEQ ID NO: 879989 - RNA, 19 nt, Homo sapiens
  misc_RNA (1)...(19): siRNA sense strand
gcagugcauuuccuuagaa

SEQ ID NO: 879990 - RNA, 19 nt, Homo sapiens
  misc_RNA (1)...(19): siRNA sense strand
gaaacuggaacucuacaaa

SEQ ID NO: 879991 - RNA, 19 nt, Homo sapiens
  misc_RNA (1)...(19): siRNA sense strand
ggauucaccuugaggaaau

SEQ ID NO: 879992 - RNA, 19 nt, Homo sapiens
  misc_RNA (1)...(19): siRNA sense strand
gcgaacaguugucuccaaa

SEQ ID NO: 879993 - RNA, 19 nt, Homo sapiens
  misc_RNA (1)...(19): siRNA sense strand
aauauagggugcaguguaa

SEQ ID NO: 879994 - RNA, 19 nt, Homo sapiens
  misc_RNA (1)...(19): siRNA sense strand
ugaaagacuuggagcaaau

SEQ ID NO: 879995 - RNA, 19 nt, Homo sapiens
  misc_RNA (1)...(19): siRNA sense strand
uggagcaaauguuguauaa

SEQ ID NO: 879996 - RNA, 19 nt, Homo sapiens
  misc_RNA (1)...(19): siRNA sense strand
cuggagaagugaccuauuu

SEQ ID NO: 879997 - RNA, 19 nt, Homo sapiens
  misc_RNA (1)...(19): siRNA sense strand
cagaaucucuuggcucuug

SEQ ID NO: 879998 - RNA, 19 nt, Homo sapiens
  misc_RNA (1)...(19): siRNA sense strand
gaaguagaaggcuuuaaga

SEQ ID NO: 879999 - RNA, 19 nt, Homo sapiens
  misc_RNA (1)...(19): siRNA sense strand
gaacaguugucuccaaacg

SEQ ID NO: 880000 - RNA, 19 nt, Homo sapiens
  misc_RNA (1)...(19): siRNA sense strand
ggagagcagaccaaacuuu

SEQ ID NO: 880001 - RNA, 19 nt, Homo sapiens
  misc_RNA (1)...(19): siRNA sense strand
gcagagggaggaagagauu

SEQ ID NO: 880002 - RNA, 19 nt, Homo sapiens
  misc_RNA (1)...(19): siRNA sense strand
ucagggagcuagaagacaa

SEQ ID NO: 880003 - RNA, 19 nt, Homo sapiens
  misc_RNA (1)...(19): siRNA sense strand
gaaugaacuuagacucugu

SEQ ID NO: 880004 - RNA, 19 nt, Homo sapiens
  misc_RNA (1)...(19): siRNA sense strand
aagaagaacuugcccgaau

SEQ ID NO: 880005 - RNA, 19 nt, Homo sapiens
  misc_RNA (1)...(19): siRNA sense strand
gcauaaacuugaaugugau

SEQ ID NO: 880006 - RNA, 19 nt, Homo sapiens
  misc_RNA (1)...(19): siRNA sense strand
aaggagaacugaagaaucu

SEQ ID NO: 880007 - RNA, 19 nt, Homo sapiens
  misc_RNA (1)...(19): siRNA sense strand
ggaaguagaaggcuuuaag

SEQ ID NO: 880008 - RNA, 19 nt, Homo sapiens
  misc_RNA (1)...(19): siRNA sense strand
gaacagaugcuggagaagu

SEQ ID NO: 880009 - RNA, 19 nt, Homo sapiens
  misc_RNA (1)...(19): siRNA sense strand
gcagaaagcgaacaguugu

SEQ ID NO: 880010 - RNA, 19 nt, Homo sapiens
  misc_RNA (1)...(19): siRNA sense strand
ggagcuagaagacaagaaa

SEQ ID NO: 880011 - RNA, 19 nt, Homo sapiens
  misc_RNA (1)...(19): siRNA sense strand
agcauaaacuugaauguga

SEQ ID NO: 880012 - RNA, 19 nt, Homo sapiens
  misc_RNA (1)...(19): siRNA sense strand
agaagaacuugcccgaauu

SEQ ID NO: 880013 - RNA, 19 nt, Homo sapiens
  misc_RNA (1)...(19): siRNA sense strand
caauauagggugcagugua

SEQ ID NO: 880014 - RNA, 19 nt, Homo sapiens
  misc_RNA (1)...(19): siRNA sense strand
uaugagagcaccaaagauu

SEQ ID NO: 880015 - RNA, 19 nt, Homo sapiens
  misc_RNA (1)...(19): siRNA sense strand
gaaaaugaccgacugagaa

SEQ ID NO: 880016 - RNA, 19 nt, Homo sapiens
  misc_RNA (1)...(19): siRNA sense strand
gaaggacagcauaaacuug

SEQ ID NO: 880017 - RNA, 19 nt, Homo sapiens
  misc_RNA (1)...(19): siRNA sense strand
agaaagcucuaagugauau

SEQ ID NO: 880018 - RNA, 19 nt, Homo sapiens
  misc_RNA (1)...(19): siRNA sense strand
cagaaagcucuaagugaua

SEQ ID NO: 880019 - RNA, 19 nt, Homo sapiens
  misc_RNA (1)...(19): siRNA sense strand
aaucuuaagucgaaagugu

SEQ ID NO: 880020 - RNA, 19 nt, Homo sapiens
  misc_RNA (1)...(19): siRNA sense strand
gaagaacuugcccgaauuc

SEQ ID NO: 880021 - RNA, 19 nt, Homo sapiens
  misc_RNA (1)...(19): siRNA sense strand
caagaacugcucuaugaga

SEQ ID NO: 880022 - RNA, 19 nt, Homo sapiens
  misc_RNA (1)...(19): siRNA sense strand
ccaaagagacauacagaca

SEQ ID NO: 880023 - RNA, 19 nt, Homo sapiens
  misc_RNA (1)...(19): siRNA sense strand
aaugaggacuugcugaaga

SEQ ID NO: 880024 - RNA, 19 nt, Homo sapiens
  misc_RNA (1)...(19): siRNA sense strand
gaagaaacuggaacucuac

SEQ ID NO: 880025 - RNA, 19 nt, Homo sapiens
  misc_RNA (1)...(19): siRNA sense strand
ucaaggaucgcacuaacaa

SEQ ID NO: 880026 - RNA, 19 nt, Homo sapiens
  misc_RNA (1)...(19): siRNA sense strand
uagaaggcuuuaagacaga

SEQ ID NO: 880027 - RNA, 19 nt, Homo sapiens
  misc_RNA (1)...(19): siRNA sense strand
agaagaccaucgagagaga

SEQ ID NO: 880028 - RNA, 19 nt, Homo sapiens
  misc_RNA (1)...(19): siRNA sense strand
gagaaugaacuuagacucu

SEQ ID NO: 880029 - RNA, 19 nt, Homo sapiens
  misc_RNA (1)...(19): siRNA sense strand
ggaucgcacuaacaagaug

SEQ ID NO: 880030 - RNA, 19 nt, Homo sapiens
  misc_RNA (1)...(19): siRNA sense strand
gaaaaguguugcccguuau

SEQ ID NO: 880031 - RNA, 19 nt, Homo sapiens
  misc_RNA (1)...(19): siRNA sense strand
gagagcagaccaaacuuuc

SEQ ID NO: 880032 - RNA, 19 nt, Homo sapiens
  misc_RNA (1)...(19): siRNA sense strand
caaagucaccauucuccaa

SEQ ID NO: 880033 - RNA, 19 nt, Homo sapiens
  misc_RNA (1)...(19): siRNA sense strand
ggaagcguuuacagauaau

SEQ ID NO: 880034 - RNA, 19 nt, Homo sapiens
  misc_RNA (1)...(19): siRNA sense strand
gugcauuuccuuagaagaa

SEQ ID NO: 880035 - RNA, 19 nt, Homo sapiens
  misc_RNA (1)...(19): siRNA sense strand
aaucaaagagcuaaccaaa

SEQ ID NO: 880036 - RNA, 19 nt, Homo sapiens
  misc_RNA (1)...(19): siRNA sense strand
acagacggauucaccuuga

SEQ ID NO: 880037 - RNA, 19 nt, Homo sapiens
  misc_RNA (1)...(19): siRNA sense strand
uauccaggcuguaggugaa

SEQ ID NO: 880038 - RNA, 19 nt, Homo sapiens
  misc_RNA (1)...(19): siRNA sense strand
ggacagacggauucaccuu

SEQ ID NO: 880039 - RNA, 19 nt, Homo sapiens
  misc_RNA (1)...(19): siRNA sense strand
ccaaacuccauccuucuaa

SEQ ID NO: 880040 - RNA, 19 nt, Homo sapiens
  misc_RNA (1)...(19): siRNA sense strand
gaacaaaaucaaagagcua

SEQ ID NO: 880041 - RNA, 19 nt, Homo sapiens
  misc_RNA (1)...(19): siRNA sense strand
gcauuuccuuagaagaaga

SEQ ID NO: 880042 - RNA, 19 nt, Homo sapiens
  misc_RNA (1)...(19): siRNA sense strand
uguuuggucuggagaauga

SEQ ID NO: 880043 - RNA, 19 nt, Homo sapiens
  misc_RNA (1)...(19): siRNA sense strand
uagacgggcacauaagaua

SEQ ID NO: 880044 - RNA, 19 nt, Homo sapiens
  misc_RNA (1)...(19): siRNA sense strand
caaacuccauccuucuaag

SEQ ID NO: 880045 - RNA, 19 nt, Homo sapiens
  misc_RNA (1)...(19): siRNA sense strand
ggggaagcguuuacagaua

SEQ ID NO: 880046 - RNA, 19 nt, Homo sapiens
  misc_RNA (1)...(19): siRNA sense strand
cagauucacuggagucaac

SEQ ID NO: 880047 - RNA, 19 nt, Homo sapiens
  misc_RNA (1)...(19): siRNA sense strand
gauaaguuaguacaagaga

SEQ ID NO: 880048 - RNA, 19 nt, Homo sapiens
  misc_RNA (1)...(19): siRNA sense strand
ggaggaagagauugcugaa

SEQ ID NO: 880049 - RNA, 19 nt, Homo sapiens
  misc_RNA (1)...(19): siRNA sense strand
cgacagaaacugaaagacu

SEQ ID NO: 880050 - RNA, 19 nt, Homo sapiens
  misc_RNA (1)...(19): siRNA sense strand
gcauuggagcgucgacgua

SEQ ID NO: 880051 - RNA, 19 nt, Homo sapiens
  misc_RNA (1)...(19): siRNA sense strand
gagcagugcauuuccuuag

SEQ ID NO: 880052 - RNA, 19 nt, Homo sapiens
  misc_RNA (1)...(19): siRNA sense strand
gauucaccuugaggaaaua

SEQ ID NO: 880053 - RNA, 19 nt, Homo sapiens
  misc_RNA (1)...(19): siRNA sense strand
uuucaaagcagauccuaaa

SEQ ID NO: 880054 - RNA, 19 nt, Homo sapiens
  misc_RNA (1)...(19): siRNA sense strand
aacuggaacucuacaaaga

SEQ ID NO: 880055 - RNA, 19 nt, Homo sapiens
  misc_RNA (1)...(19): siRNA sense strand
uuacgccucuacucagaaa

SEQ ID NO: 880056 - RNA, 19 nt, Homo sapiens
  misc_RNA (1)...(19): siRNA sense strand
ggaacgggaacauguuuua

SEQ ID NO: 880057 - RNA, 19 nt, Homo sapiens
  misc_RNA (1)...(19): siRNA sense strand
uaagauacaaggagaacug

SEQ ID NO: 880058 - RNA, 19 nt, Homo sapiens
  misc_RNA (1)...(19): siRNA sense strand
gaaagacuuggagcaaaug

SEQ ID NO: 880059 - RNA, 19 nt, Homo sapiens
  misc_RNA (1)...(19): siRNA sense strand
cgacguauccuggaaguag

SEQ ID NO: 880060 - RNA, 19 nt, Homo sapiens
  misc_RNA (1)...(19): siRNA sense strand
uguccaauauguaccaaga

SEQ ID NO: 880061 - RNA, 19 nt, Homo sapiens
  misc_RNA (1)...(19): siRNA sense strand
aaagagacauacagacacu

SEQ ID NO: 880062 - RNA, 19 nt, Homo sapiens
  misc_RNA (1)...(19): siRNA sense strand
gcauuaccaaagagacaua

SEQ ID NO: 880063 - RNA, 19 nt, Homo sapiens
  misc_RNA (1)...(19): siRNA sense strand
gaccaucgagagagagaaa

SEQ ID NO: 880064 - RNA, 19 nt, Homo sapiens
  misc_RNA (1)...(19): siRNA sense strand
aaagaagaccaucgagaga

SEQ ID NO: 880065 - RNA, 19 nt, Homo sapiens
  misc_RNA (1)...(19): siRNA sense strand
uguauaaggcaacaguuaa

SEQ ID NO: 880066 - RNA, 19 nt, Homo sapiens
  misc_RNA (1)...(19): siRNA sense strand
ugaaggacagcauaaacuu

SEQ ID NO: 880067 - RNA, 19 nt, Homo sapiens
  misc_RNA (1)...(19): siRNA sense strand
guucugagcauuaccaaag

SEQ ID NO: 880068 - RNA, 19 nt, Homo sapiens
  misc_RNA (1)...(19): siRNA sense strand
gccaaacuccauccuucua

SEQ ID NO: 880069 - RNA, 19 nt, Homo sapiens
  misc_RNA (1)...(19): siRNA sense strand
guauaaggcaacaguuaau

SEQ ID NO: 880070 - RNA, 19 nt, Homo sapiens
  misc_RNA (1)...(19): siRNA sense strand
cugaaagacuuggagcaaa

SEQ ID NO: 880071 - RNA, 19 nt, Homo sapiens
  misc_RNA (1)...(19): siRNA sense strand
gacguauccuggaaguaga

SEQ ID NO: 880072 - RNA, 19 nt, Homo sapiens
  misc_RNA (1)...(19): siRNA sense strand
ggaaugaggagagagaucu

SEQ ID NO: 880073 - RNA, 19 nt, Homo sapiens
  misc_RNA (1)...(19): siRNA sense strand
gagagucaccaugcucaaa

SEQ ID NO: 880074 - RNA, 19 nt, Homo sapiens
  misc_RNA (1)...(19): siRNA sense strand
gaucagaaguugaggagaa

SEQ ID NO: 880075 - RNA, 19 nt, Homo sapiens
  misc_RNA (1)...(19): siRNA sense strand
gaagaaaucgguccugaug

SEQ ID NO: 880076 - RNA, 19 nt, Homo sapiens
  misc_RNA (1)...(19): siRNA sense strand
gaaaggagguauucgaacu

SEQ ID NO: 880077 - RNA, 19 nt, Homo sapiens
  misc_RNA (1)...(19): siRNA sense strand
ccaaacagccuaaagaaug

SEQ ID NO: 880078 - RNA, 19 nt, Homo sapiens
  misc_RNA (1)...(19): siRNA sense strand
gaaccacagugagaagaaa

SEQ ID NO: 880079 - RNA, 19 nt, Homo sapiens
  misc_RNA (1)...(19): siRNA sense strand
caaacagccuaaagaaugu

SEQ ID NO: 880080 - RNA, 19 nt, Homo sapiens
  misc_RNA (1)...(19): siRNA sense strand
uacagaagcugaugaagga

SEQ ID NO: 880081 - RNA, 19 nt, Homo sapiens
  misc_RNA (1)...(19): siRNA sense strand
gauggacauucccgagaua

SEQ ID NO: 880082 - RNA, 19 nt, Homo sapiens
  misc_RNA (1)...(19): siRNA sense strand
gaacugaaccugccagacu

SEQ ID NO: 880083 - RNA, 19 nt, Homo sapiens
  misc_RNA (1)...(19): siRNA sense strand
uuacugauguucuugcaaa

SEQ ID NO: 880084 - RNA, 19 nt, Homo sapiens
  misc_RNA (1)...(19): siRNA sense strand
gcagacgcuuggugauuga

SEQ ID NO: 880085 - RNA, 19 nt, Homo sapiens
  misc_RNA (1)...(19): siRNA sense strand
ggagacggcaaaguuauaa

SEQ ID NO: 880086 - RNA, 19 nt, Homo sapiens
  misc_RNA (1)...(19): siRNA sense strand
ggacauucccgagauaaga

SEQ ID NO: 880087 - RNA, 19 nt, Homo sapiens
  misc_RNA (1)...(19): siRNA sense strand
ggaagaaccacagugagaa

SEQ ID NO: 880088 - RNA, 19 nt, Homo sapiens
  misc_RNA (1)...(19): siRNA sense strand
gauaagaaaggagguauuc

SEQ ID NO: 880089 - RNA, 19 nt, Homo sapiens
  misc_RNA (1)...(19): siRNA sense strand
cagaggagacggcaaaguu

SEQ ID NO: 880090 - RNA, 19 nt, Homo sapiens
  misc_RNA (1)...(19): siRNA sense strand
gaaggagacacagaaguga

SEQ ID NO: 880091 - RNA, 19 nt, Homo sapiens
  misc_RNA (1)...(19): siRNA sense strand
gaaaagagaauaccaccaa

SEQ ID NO: 880092 - RNA, 19 nt, Homo sapiens
  misc_RNA (1)...(19): siRNA sense strand
aaaccaaacagccuaaaga

SEQ ID NO: 880093 - RNA, 19 nt, Homo sapiens
  misc_RNA (1)...(19): siRNA sense strand
ggagagaucagaaguugag

SEQ ID NO: 880094 - RNA, 19 nt, Homo sapiens
  misc_RNA (1)...(19): siRNA sense strand
gacuggaacuggagagauc

SEQ ID NO: 880095 - RNA, 19 nt, Homo sapiens
  misc_RNA (1)...(19): siRNA sense strand
gcaggagacaguuccaguu

SEQ ID NO: 880096 - RNA, 19 nt, Homo sapiens
  misc_RNA (1)...(19): siRNA sense strand
agaggagacggcaaaguua

SEQ ID NO: 880097 - RNA, 19 nt, Homo sapiens
  misc_RNA (1)...(19): siRNA sense strand
ccucaaggccaaugauuug

SEQ ID NO: 880098 - RNA, 19 nt, Homo sapiens
  misc_RNA (1)...(19): siRNA sense strand
aggguuaccugaagaccua

SEQ ID NO: 880099 - RNA, 19 nt, Homo sapiens
  misc_RNA (1)...(19): siRNA sense strand
uuaggucgaugacagcauu

SEQ ID NO: 880100 - RNA, 19 nt, Homo sapiens
  misc_RNA (1)...(19): siRNA sense strand
gaacuggagagaucagaag

SEQ ID NO: 880101 - RNA, 19 nt, Homo sapiens
  misc_RNA (1)...(19): siRNA sense strand
uaagaaaggagguauucga

SEQ ID NO: 880102 - RNA, 19 nt, Homo sapiens
  misc_RNA (1)...(19): siRNA sense strand
gaagaaccacagugagaag

SEQ ID NO: 880103 - RNA, 19 nt, Homo sapiens
  misc_RNA (1)...(19): siRNA sense strand
gaggagacggcaaaguuau

SEQ ID NO: 880104 - RNA, 19 nt, Homo sapiens
  misc_RNA (1)...(19): siRNA sense strand
gacgcuuggugauugaauu

SEQ ID NO: 880105 - RNA, 19 nt, Homo sapiens
  misc_RNA (1)...(19): siRNA sense strand
cuggagagaucagaaguug

SEQ ID NO: 880106 - RNA, 19 nt, Homo sapiens
  misc_RNA (1)...(19): siRNA sense strand
gcuuggugauugaauuaga

SEQ ID NO: 880107 - RNA, 19 nt, Homo sapiens
  misc_RNA (1)...(19): siRNA sense strand
gguauucgaacuucuggaa

SEQ ID NO: 880108 - RNA, 19 nt, Homo sapiens
  misc_RNA (1)...(19): siRNA sense strand
agucuuuccucauaccuaa

SEQ ID NO: 880109 - RNA, 19 nt, Homo sapiens
  misc_RNA (1)...(19): siRNA sense strand
cucacagucuuuccucaua

SEQ ID NO: 880110 - RNA, 19 nt, Homo sapiens
  misc_RNA (1)...(19): siRNA sense strand
ggugauugaauuagaagaa

SEQ ID NO: 880111 - RNA, 19 nt, Homo sapiens
  misc_RNA (1)...(19): siRNA sense strand
agaagcugaugaaggacua

SEQ ID NO: 880112 - RNA, 19 nt, Homo sapiens
  misc_RNA (1)...(19): siRNA sense strand
uauucgaacuucuggaaau

SEQ ID NO: 880113 - RNA, 19 nt, Homo sapiens
  misc_RNA (1)...(19): siRNA sense strand
gaaguugaggagaaugaug

SEQ ID NO: 880114 - RNA, 19 nt, Homo sapiens
  misc_RNA (1)...(19): siRNA sense strand
gccaaugauuugacucaca

SEQ ID NO: 880115 - RNA, 19 nt, Homo sapiens
  misc_RNA (1)...(19): siRNA sense strand
ggagacaguuccaguuccu

SEQ ID NO: 880116 - RNA, 19 nt, Homo sapiens
  misc_RNA (1)...(19): siRNA sense strand
gacauucccgagauaagaa

SEQ ID NO: 880117 - RNA, 19 nt, Homo sapiens
  misc_RNA (1)...(19): siRNA sense strand
gcugaugaaggacuauuau

SEQ ID NO: 880118 - RNA, 19 nt, Homo sapiens
  misc_RNA (1)...(19): siRNA sense strand
uccuguaccuucagagaaa

SEQ ID NO: 880119 - RNA, 19 nt, Homo sapiens
  misc_RNA (1)...(19): siRNA sense strand
ggaacuggagagaucagaa

SEQ ID NO: 880120 - RNA, 19 nt, Homo sapiens
  misc_RNA (1)...(19): siRNA sense strand
agaaaucgguccugaugcu

SEQ ID NO: 880121 - RNA, 19 nt, Homo sapiens
  misc_RNA (1)...(19): siRNA sense strand
cagcagacgcuuggugauu

SEQ ID NO: 880122 - RNA, 19 nt, Homo sapiens
  misc_RNA (1)...(19): siRNA sense strand
gauacaaccaaaggaaaga

SEQ ID NO: 880123 - RNA, 19 nt, Homo sapiens
  misc_RNA (1)...(19): siRNA sense strand
ggaaaugggagugcucagu

SEQ ID NO: 880124 - RNA, 19 nt, Homo sapiens
  misc_RNA (1)...(19): siRNA sense strand
agaaggagacacagaagug

SEQ ID NO: 880125 - RNA, 19 nt, Homo sapiens
  misc_RNA (1)...(19): siRNA sense strand
ggguaaaacuuaggaagaa

SEQ ID NO: 880126 - RNA, 19 nt, Homo sapiens
  misc_RNA (1)...(19): siRNA sense strand
ugaauuagaagaacugaac

SEQ ID NO: 880127 - RNA, 19 nt, Homo sapiens
  misc_RNA (1)...(19): siRNA sense strand
ugaaggagaaggagacaca

SEQ ID NO: 880128 - RNA, 19 nt, Homo sapiens
  misc_RNA (1)...(19): siRNA sense strand
uuaggaagaaccacaguga

SEQ ID NO: 880129 - RNA, 19 nt, Homo sapiens
  misc_RNA (1)...(19): siRNA sense strand
gagaaggagacacagaagu

SEQ ID NO: 880130 - RNA, 19 nt, Homo sapiens
  misc_RNA (1)...(19): siRNA sense strand
ggagguauucgaacuucug

SEQ ID NO: 880131 - RNA, 19 nt, Homo sapiens
  misc_RNA (1)...(19): siRNA sense strand
gagauaagaaaggagguau

SEQ ID NO: 880132 - RNA, 19 nt, Homo sapiens
  misc_RNA (1)...(19): siRNA sense strand
ugauggacauucccgagau

SEQ ID NO: 880133 - RNA, 19 nt, Homo sapiens
  misc_RNA (1)...(19): siRNA sense strand
cagaaguugaggagaauga

SEQ ID NO: 880134 - RNA, 19 nt, Homo sapiens
  misc_RNA (1)...(19): siRNA sense strand
aaagagaauaccaccaaga

SEQ ID NO: 880135 - RNA, 19 nt, Homo sapiens
  misc_RNA (1)...(19): siRNA sense strand
ggagaaggagacacagaag

SEQ ID NO: 880136 - RNA, 19 nt, Homo sapiens
  misc_RNA (1)...(19): siRNA sense strand
cagcagcccagaagcauca

SEQ ID NO: 880137 - RNA, 19 nt, Homo sapiens
  misc_RNA (1)...(19): siRNA sense strand
aagaaaggagguauucgaa

SEQ ID NO: 880138 - RNA, 19 nt, Homo sapiens
  misc_RNA (1)...(19): siRNA sense strand
caaggccaaugauuugacu

SEQ ID NO: 880139 - RNA, 19 nt, Homo sapiens
  misc_RNA (1)...(19): siRNA sense strand
ucacagucuuuccucauac

SEQ ID NO: 880140 - RNA, 19 nt, Homo sapiens
  misc_RNA (1)...(19): siRNA sense strand
agguaaaguugcuggagaa

SEQ ID NO: 880141 - RNA, 19 nt, Homo sapiens
  misc_RNA (1)...(19): siRNA sense strand
ggaaaagaagaaagaagaa

SEQ ID NO: 880142 - RNA, 19 nt, Homo sapiens
  misc_RNA (1)...(19): siRNA sense strand
cgagauaagaaaggaggua

SEQ ID NO: 880143 - RNA, 19 nt, Homo sapiens
  misc_RNA (1)...(19): siRNA sense strand
cugaagaccuacagaagcu

SEQ ID NO: 880144 - RNA, 19 nt, Homo sapiens
  misc_RNA (1)...(19): siRNA sense strand
ugaggagaaugauggacau

SEQ ID NO: 880145 - RNA, 19 nt, Homo sapiens
  misc_RNA (1)...(19): siRNA sense strand
aaccaaacagccuaaagaa

SEQ ID NO: 880146 - RNA, 19 nt, Homo sapiens
  misc_RNA (1)...(19): siRNA sense strand
cuuggugauugaauuagaa

SEQ ID NO: 880147 - RNA, 19 nt, Homo sapiens
  misc_RNA (1)...(19): siRNA sense strand
uugcaaagcacauaaaggu

SEQ ID NO: 880148 - RNA, 19 nt, Homo sapiens
  misc_RNA (1)...(19): siRNA sense strand
caggagacaguuccaguuc

SEQ ID NO: 880149 - RNA, 19 nt, Homo sapiens
  misc_RNA (1)...(19): siRNA sense strand
aggaagaaccacagugaga

SEQ ID NO: 880150 - RNA, 19 nt, Homo sapiens
  misc_RNA (1)...(19): siRNA sense strand
cugaugaaggacuauuaua

SEQ ID NO: 880151 - RNA, 19 nt, Homo sapiens
  misc_RNA (1)...(19): siRNA sense strand
gagacggcaaaguuauaaa

SEQ ID NO: 880152 - RNA, 19 nt, Homo sapiens
  misc_RNA (1)...(19): siRNA sense strand
agcagacgcuuggugauug

SEQ ID NO: 880153 - RNA, 19 nt, Homo sapiens
  misc_RNA (1)...(19): siRNA sense strand
acgcuuggugauugaauua

SEQ ID NO: 880154 - RNA, 19 nt, Homo sapiens
  misc_RNA (1)...(19): siRNA sense strand
aggagacggcaaaguuaua

SEQ ID NO: 880155 - RNA, 19 nt, Homo sapiens
  misc_RNA (1)...(19): siRNA sense strand
agacuccuguuuccucaag

SEQ ID NO: 880156 - RNA, 19 nt, Homo sapiens
  misc_RNA (1)...(19): siRNA sense strand
ccucauaccuaaaaggaau

SEQ ID NO: 880157 - RNA, 19 nt, Homo sapiens
  misc_RNA (1)...(19): siRNA sense strand
aaggagguauucgaacuuc

SEQ ID NO: 880158 - RNA, 19 nt, Homo sapiens
  misc_RNA (1)...(19): siRNA sense strand
gaccuacagaagcugauga

SEQ ID NO: 880159 - RNA, 19 nt, Homo sapiens
  misc_RNA (1)...(19): siRNA sense strand
aaaugggagugcucagucu

SEQ ID NO: 880160 - RNA, 19 nt, Homo sapiens
  misc_RNA (1)...(19): siRNA sense strand
gugauugaauuagaagaac

SEQ ID NO: 880161 - RNA, 19 nt, Homo sapiens
  misc_RNA (1)...(19): siRNA sense strand
guauucgaacuucuggaaa

SEQ ID NO: 880162 - RNA, 19 nt, Homo sapiens
  misc_RNA (1)...(19): siRNA sense strand
aaaggagguauucgaacuu

SEQ ID NO: 880163 - RNA, 19 nt, Homo sapiens
  misc_RNA (1)...(19): siRNA sense strand
ggagaauuaaagaacuugu

SEQ ID NO: 880164 - RNA, 19 nt, Homo sapiens
  misc_RNA (1)...(19): siRNA sense strand
ccaaacagcucuacauuau

SEQ ID NO: 880165 - RNA, 19 nt, Homo sapiens
  misc_RNA (1)...(19): siRNA sense strand
aaaccaagcuucuuugauu

SEQ ID NO: 880166 - RNA, 19 nt, Homo sapiens
  misc_RNA (1)...(19): siRNA sense strand
gaauauaucgcaguaguua

SEQ ID NO: 880167 - RNA, 19 nt, Homo sapiens
  misc_RNA (1)...(19): siRNA sense strand
caacauagagcugacauua

SEQ ID NO: 880168 - RNA, 19 nt, Homo sapiens
  misc_RNA (1)...(19): siRNA sense strand
gcaggaauauaucgcagua

SEQ ID NO: 880169 - RNA, 19 nt, Homo sapiens
  misc_RNA (1)...(19): siRNA sense strand
ggaaagcacuuggugauuc

SEQ ID NO: 880170 - RNA, 19 nt, Homo sapiens
  misc_RNA (1)...(19): siRNA sense strand
ggucaaaguuggaaauugu

SEQ ID NO: 880171 - RNA, 19 nt, Homo sapiens
  misc_RNA (1)...(19): siRNA sense strand
gaaagcacuuggugauuca

SEQ ID NO: 880172 - RNA, 19 nt, Homo sapiens
  misc_RNA (1)...(19): siRNA sense strand
gccaagcaaugcaggaaua

SEQ ID NO: 880173 - RNA, 19 nt, Homo sapiens
  misc_RNA (1)...(19): siRNA sense strand
ccaaagccaucaaaucgaa

SEQ ID NO: 880174 - RNA, 19 nt, Homo sapiens
  misc_RNA (1)...(19): siRNA sense strand
guacaaacaggucaaaguu

SEQ ID NO: 880175 - RNA, 19 nt, Homo sapiens
  misc_RNA (1)...(19): siRNA sense strand
gccaaacagcucuacauua

SEQ ID NO: 880176 - RNA, 19 nt, Homo sapiens
  misc_RNA (1)...(19): siRNA sense strand
aaacagcucuacauuaugc

SEQ ID NO: 880177 - RNA, 19 nt, Homo sapiens
  misc_RNA (1)...(19): siRNA sense strand
ggacauaaggaacuaguca

SEQ ID NO: 880178 - RNA, 19 nt, Homo sapiens
  misc_RNA (1)...(19): siRNA sense strand
acauagagcugacauuaac

SEQ ID NO: 880179 - RNA, 19 nt, Homo sapiens
  misc_RNA (1)...(19): siRNA sense strand
uggccgagcuguuugagaa

SEQ ID NO: 880180 - RNA, 19 nt, Homo sapiens
  misc_RNA (1)...(19): siRNA sense strand
ggaacuagucacaguguug

SEQ ID NO: 880181 - RNA, 19 nt, Homo sapiens
  misc_RNA (1)...(19): siRNA sense strand
gaaaacaacauugaccaua

SEQ ID NO: 880182 - RNA, 19 nt, Homo sapiens
  misc_RNA (1)...(19): siRNA sense strand
ccugugaguuucuggauau

SEQ ID NO: 880183 - RNA, 19 nt, Homo sapiens
  misc_RNA (1)...(19): siRNA sense strand
ggacaaugaaggccaaaca

SEQ ID NO: 880184 - RNA, 19 nt, Homo sapiens
  misc_RNA (1)...(19): siRNA sense strand
caucagggaagaagacaaa

SEQ ID NO: 880185 - RNA, 19 nt, Homo sapiens
  misc_RNA (1)...(19): siRNA sense strand
aaccaagcuucuuugauuu

SEQ ID NO: 880186 - RNA, 19 nt, Homo sapiens
  misc_RNA (1)...(19): siRNA sense strand
ggaauauaucgcaguaguu

SEQ ID NO: 880187 - RNA, 19 nt, Homo sapiens
  misc_RNA (1)...(19): siRNA sense strand
gugaguuucuggauauugu

SEQ ID NO: 880188 - RNA, 19 nt, Homo sapiens
  misc_RNA (1)...(19): siRNA sense strand
uaaccaaagccaucaaauc

SEQ ID NO: 880189 - RNA, 19 nt, Homo sapiens
  misc_RNA (1)...(19): siRNA sense strand
ggaaauuguaauacuccua

SEQ ID NO: 880190 - RNA, 19 nt, Homo sapiens
  misc_RNA (1)...(19): siRNA sense strand
acacaacuggcaaggcuua

SEQ ID NO: 880191 - RNA, 19 nt, Homo sapiens
  misc_RNA (1)...(19): siRNA sense strand
ucagauaccagagaagaaa

SEQ ID NO: 880192 - RNA, 19 nt, Homo sapiens
  misc_RNA (1)...(19): siRNA sense strand
ggaggugacaggcugcaaa

SEQ ID NO: 880193 - RNA, 19 nt, Homo sapiens
  misc_RNA (1)...(19): siRNA sense strand
ggaugugaaugugaaagau

SEQ ID NO: 880194 - RNA, 19 nt, Homo sapiens
  misc_RNA (1)...(19): siRNA sense strand
ggccaaacagcucuacauu

SEQ ID NO: 880195 - RNA, 19 nt, Homo sapiens
  misc_RNA (1)...(19): siRNA sense strand
aagcaaugcaggaauauau

SEQ ID NO: 880196 - RNA, 19 nt, Homo sapiens
  misc_RNA (1)...(19): siRNA sense strand
auaaggaacuagucacagu

SEQ ID NO: 880197 - RNA, 19 nt, Homo sapiens
  misc_RNA (1)...(19): siRNA sense strand
gaaaggaaaagaagcaaau

SEQ ID NO: 880198 - RNA, 19 nt, Homo sapiens
  misc_RNA (1)...(19): siRNA sense strand
gccugugaguuucuggaua

SEQ ID NO: 880199 - RNA, 19 nt, Homo sapiens
  misc_RNA (1)...(19): siRNA sense strand
caagcaaugcaggaauaua

SEQ ID NO: 880200 - RNA, 19 nt, Homo sapiens
  misc_RNA (1)...(19): siRNA sense strand
gguacaaacaggucaaagu

SEQ ID NO: 880201 - RNA, 19 nt, Homo sapiens
  misc_RNA (1)...(19): siRNA sense strand
uaccagagaagaaaggaaa

SEQ ID NO: 880202 - RNA, 19 nt, Homo sapiens
  misc_RNA (1)...(19): siRNA sense strand
ccaguuauuaguucucuau

SEQ ID NO: 880203 - RNA, 19 nt, Homo sapiens
  misc_RNA (1)...(19): siRNA sense strand
gcaccugcaaggccugauu

SEQ ID NO: 880204 - RNA, 19 nt, Homo sapiens
  misc_RNA (1)...(19): siRNA sense strand
gaugugaaugugaaagaug

SEQ ID NO: 880205 - RNA, 19 nt, Homo sapiens
  misc_RNA (1)...(19): siRNA sense strand
aggaauauaucgcaguagu

SEQ ID NO: 880206 - RNA, 19 nt, Homo sapiens
  misc_RNA (1)...(19): siRNA sense strand
aagaaaccaucagggaaga

SEQ ID NO: 880207 - RNA, 19 nt, Homo sapiens
  misc_RNA (1)...(19): siRNA sense strand
caaacagcucuacauuaug

SEQ ID NO: 880208 - RNA, 19 nt, Homo sapiens
  misc_RNA (1)...(19): siRNA sense strand
guuggaaauuguaauacuc

SEQ ID NO: 880209 - RNA, 19 nt, Homo sapiens
  misc_RNA (1)...(19): siRNA sense strand
gcaacauagagcugacauu

SEQ ID NO: 880210 - RNA, 19 nt, Homo sapiens
  misc_RNA (1)...(19): siRNA sense strand
ucgaggacauaaggaacua

SEQ ID NO: 880211 - RNA, 19 nt, Homo sapiens
  misc_RNA (1)...(19): siRNA sense strand
caacauugaccauauaacc

SEQ ID NO: 880212 - RNA, 19 nt, Homo sapiens
  misc_RNA (1)...(19): siRNA sense strand
aagaagcaaauacagguuu

SEQ ID NO: 880213 - RNA, 19 nt, Homo sapiens
  misc_RNA (1)...(19): siRNA sense strand
cuaaaccaagcuucuuuga

SEQ ID NO: 880214 - RNA, 19 nt, Homo sapiens
  misc_RNA (1)...(19): siRNA sense strand
gaaugugaaagaugaagag

SEQ ID NO: 880215 - RNA, 19 nt, Homo sapiens
  misc_RNA (1)...(19): siRNA sense strand
gaagaaaggaaaagaagca

SEQ ID NO: 880216 - RNA, 19 nt, Homo sapiens
  misc_RNA (1)...(19): siRNA sense strand
cauugaccauauaaccaaa

SEQ ID NO: 880217 - RNA, 19 nt, Homo sapiens
  misc_RNA (1)...(19): siRNA sense strand
gaaaccaucagggaagaag

SEQ ID NO: 880218 - RNA, 19 nt, Homo sapiens
  misc_RNA (1)...(19): siRNA sense strand
agguuggaauccucagaua

SEQ ID NO: 880219 - RNA, 19 nt, Homo sapiens
  misc_RNA (1)...(19): siRNA sense strand
aaauguggaugugaaugug

SEQ ID NO: 880220 - RNA, 19 nt, Homo sapiens
  misc_RNA (1)...(19): siRNA sense strand
uuugauuacugcagggaaa

SEQ ID NO: 880221 - RNA, 19 nt, Homo sapiens
  misc_RNA (1)...(19): siRNA sense strand
aacauagagcugacauuaa

SEQ ID NO: 880222 - RNA, 19 nt, Homo sapiens
  misc_RNA (1)...(19): siRNA sense strand
uaaaccaagcuucuuugau

SEQ ID NO: 880223 - RNA, 19 nt, Homo sapiens
  misc_RNA (1)...(19): siRNA sense strand
gcaaugcaggaauauaucg

SEQ ID NO: 880224 - RNA, 19 nt, Homo sapiens
  misc_RNA (1)...(19): siRNA sense strand
aaacaggucaaaguuggaa

SEQ ID NO: 880225 - RNA, 19 nt, Homo sapiens
  misc_RNA (1)...(19): siRNA sense strand
uauaaccaaagccaucaaa

SEQ ID NO: 880226 - RNA, 19 nt, Homo sapiens
  misc_RNA (1)...(19): siRNA sense strand
gcagggaaaacaacauuga

SEQ ID NO: 880227 - RNA, 19 nt, Homo sapiens
  misc_RNA (1)...(19): siRNA sense strand
ccucagauaccagagaaga

SEQ ID NO: 880228 - RNA, 19 nt, Homo sapiens
  misc_RNA (1)...(19): siRNA sense strand
uguaauacuccuaaaccaa

SEQ ID NO: 880229 - RNA, 19 nt, Homo sapiens
  misc_RNA (1)...(19): siRNA sense strand
gugggccaguuauuaguuc

SEQ ID NO: 880230 - RNA, 19 nt, Homo sapiens
  misc_RNA (1)...(19): siRNA sense strand
ggugggccaguuauuaguu

SEQ ID NO: 880231 - RNA, 19 nt, Homo sapiens
  misc_RNA (1)...(19): siRNA sense strand
aaccaaagccaucaaaucg

SEQ ID NO: 880232 - RNA, 19 nt, Homo sapiens
  misc_RNA (1)...(19): siRNA sense strand
uacaaacaggucaaaguug

SEQ ID NO: 880233 - RNA, 19 nt, Homo sapiens
  misc_RNA (1)...(19): siRNA sense strand
gucaaaguuggaaauugua

SEQ ID NO: 880234 - RNA, 19 nt, Homo sapiens
  misc_RNA (1)...(19): siRNA sense strand
augugaaugugaaagauga

SEQ ID NO: 880235 - RNA, 19 nt, Homo sapiens
  misc_RNA (1)...(19): siRNA sense strand
caaagccaucaaaucgaaa

SEQ ID NO: 880236 - RNA, 19 nt, Homo sapiens
  misc_RNA (1)...(19): siRNA sense strand
aaagaagcaaauacagguu

SEQ ID NO: 880237 - RNA, 19 nt, Homo sapiens
  misc_RNA (1)...(19): siRNA sense strand
caaacaggucaaaguugga

SEQ ID NO: 880238 - RNA, 19 nt, Homo sapiens
  misc_RNA (1)...(19): siRNA sense strand
uuuggugggccaguuauua

SEQ ID NO: 880239 - RNA, 19 nt, Homo sapiens
  misc_RNA (1)...(19): siRNA sense strand
ccuaaaccaagcuucuuug

SEQ ID NO: 880240 - RNA, 19 nt, Homo sapiens
  misc_RNA (1)...(19): siRNA sense strand
acauugaccauauaaccaa

SEQ ID NO: 880241 - RNA, 19 nt, Homo sapiens
  misc_RNA (1)...(19): siRNA sense strand
cauauaaccaaagccauca

SEQ ID NO: 880242 - RNA, 19 nt, Homo sapiens
  misc_RNA (1)...(19): siRNA sense strand
gcagcucuuguaccuguau

SEQ ID NO: 880243 - RNA, 19 nt, Homo sapiens
  misc_RNA (1)...(19): siRNA sense strand
ugacaaagacggcaaauau

SEQ ID NO: 880244 - RNA, 19 nt, Homo sapiens
  misc_RNA (1)...(19): siRNA sense strand
cagaagagcaguucaaguu

SEQ ID NO: 880245 - RNA, 19 nt, Homo sapiens
  misc_RNA (1)...(19): siRNA sense strand
caaguaauccugaccuauu

SEQ ID NO: 880246 - RNA, 19 nt, Homo sapiens
  misc_RNA (1)...(19): siRNA sense strand
guaagaacccucaguuuca

SEQ ID NO: 880247 - RNA, 19 nt, Homo sapiens
  misc_RNA (1)...(19): siRNA sense strand
guggugaccuuuauugaug

SEQ ID NO: 880248 - RNA, 19 nt, Homo sapiens
  misc_RNA (1)...(19): siRNA sense strand
gggagaacauuaauaucug

SEQ ID NO: 880249 - RNA, 19 nt, Homo sapiens
  misc_RNA (1)...(19): siRNA sense strand
gaugauguggugaccuuua

SEQ ID NO: 880250 - RNA, 19 nt, Homo sapiens
  misc_RNA (1)...(19): siRNA sense strand
acaaagacggcaaauauga

SEQ ID NO: 880251 - RNA, 19 nt, Homo sapiens
  misc_RNA (1)...(19): siRNA sense strand
ucaacgaaaucuccuggaa

SEQ ID NO: 880252 - RNA, 19 nt, Homo sapiens
  misc_RNA (1)...(19): siRNA sense strand
aaguaauccugaccuauuu

SEQ ID NO: 880253 - RNA, 19 nt, Homo sapiens
  misc_RNA (1)...(19): siRNA sense strand
uguuugggcuuccuaauga

SEQ ID NO: 880254 - RNA, 19 nt, Homo sapiens
  misc_RNA (1)...(19): siRNA sense strand
guaucaacauccucagcua

SEQ ID NO: 880255 - RNA, 19 nt, Homo sapiens
  misc_RNA (1)...(19): siRNA sense strand
ggacaaacuaugggaggua

SEQ ID NO: 880256 - RNA, 19 nt, Homo sapiens
  misc_RNA (1)...(19): siRNA sense strand
aauccugaccuauuuguua

SEQ ID NO: 880257 - RNA, 19 nt, Homo sapiens
  misc_RNA (1)...(19): siRNA sense strand
uaugggagguacaguguga

SEQ ID NO: 880258 - RNA, 19 nt, Homo sapiens
  misc_RNA (1)...(19): siRNA sense strand
ggauguggaugaguuagug

SEQ ID NO: 880259 - RNA, 19 nt, Homo sapiens
  misc_RNA (1)...(19): siRNA sense strand
caagacacaccguuccaaa

SEQ ID NO: 880260 - RNA, 19 nt, Homo sapiens
  misc_RNA (1)...(19): siRNA sense strand
gacaaagacggcaaauaug

SEQ ID NO: 880261 - RNA, 19 nt, Homo sapiens
  misc_RNA (1)...(19): siRNA sense strand
cugcaucuguaucaaguuu

SEQ ID NO: 880262 - RNA, 19 nt, Homo sapiens
  misc_RNA (1)...(19): siRNA sense strand
caaaaugcauugccacugu

SEQ ID NO: 880263 - RNA, 19 nt, Homo sapiens
  misc_RNA (1)...(19): siRNA sense strand
gcauuugccugugaugaca

SEQ ID NO: 880264 - RNA, 19 nt, Homo sapiens
  misc_RNA (1)...(19): siRNA sense strand
gauguggugaccuuuauug

SEQ ID NO: 880265 - RNA, 19 nt, Homo sapiens
  misc_RNA (1)...(19): siRNA sense strand
aaaggccucugcuggcauu

SEQ ID NO: 880266 - RNA, 19 nt, Homo sapiens
  misc_RNA (1)...(19): siRNA sense strand
cagcaucggaagaucauuu

SEQ ID NO: 880267 - RNA, 19 nt, Homo sapiens
  misc_RNA (1)...(19): siRNA sense strand
cgaaaucuccuggaacaau

SEQ ID NO: 880268 - RNA, 19 nt, Homo sapiens
  misc_RNA (1)...(19): siRNA sense strand
aacgaaaucuccuggaaca

SEQ ID NO: 880269 - RNA, 19 nt, Homo sapiens
  misc_RNA (1)...(19): siRNA sense strand
gaacugugaagcuguuugg

SEQ ID NO: 880270 - RNA, 19 nt, Homo sapiens
  misc_RNA (1)...(19): siRNA sense strand
uguaagaacccucaguuuc

SEQ ID NO: 880271 - RNA, 19 nt, Homo sapiens
  misc_RNA (1)...(19): siRNA sense strand
aauauguucuuccugacaa

SEQ ID NO: 880272 - RNA, 19 nt, Homo sapiens
  misc_RNA (1)...(19): siRNA sense strand
ucugggauguggaugaguu

SEQ ID NO: 880273 - RNA, 19 nt, Homo sapiens
  misc_RNA (1)...(19): siRNA sense strand
uaagaacccucaguuucag

SEQ ID NO: 880274 - RNA, 19 nt, Homo sapiens
  misc_RNA (1)...(19): siRNA sense strand
guuacggcgucuggagaua

SEQ ID NO: 880275 - RNA, 19 nt, Homo sapiens
  misc_RNA (1)...(19): siRNA sense strand
gcagaagagcaguucaagu

SEQ ID NO: 880276 - RNA, 19 nt, Homo sapiens
  misc_RNA (1)...(19): siRNA sense strand
gggcagaccauugcuguag

SEQ ID NO: 880277 - RNA, 19 nt, Homo sapiens
  misc_RNA (1)...(19): siRNA sense strand
ggagguacagugugagucu

SEQ ID NO: 880278 - RNA, 19 nt, Homo sapiens
  misc_RNA (1)...(19): siRNA sense strand
uggaugaguuagugugugu

SEQ ID NO: 880279 - RNA, 19 nt, Homo sapiens
  misc_RNA (1)...(19): siRNA sense strand
caaauggcaaugguuguau

SEQ ID NO: 880280 - RNA, 19 nt, Homo sapiens
  misc_RNA (1)...(19): siRNA sense strand
gauaguguggaccagcuuu

SEQ ID NO: 880281 - RNA, 19 nt, Homo sapiens
  misc_RNA (1)...(19): siRNA sense strand
caaagcagaagagcaguuc

SEQ ID NO: 880282 - RNA, 19 nt, Homo sapiens
  misc_RNA (1)...(19): siRNA sense strand
gggaugugaggacuacaaa

SEQ ID NO: 880283 - RNA, 19 nt, Homo sapiens
  misc_RNA (1)...(19): siRNA sense strand
ggagacaggggacaaacua

SEQ ID NO: 880284 - RNA, 19 nt, Homo sapiens
  misc_RNA (1)...(19): siRNA sense strand
gacacaccguuccaaagca

SEQ ID NO: 880285 - RNA, 19 nt, Homo sapiens
  misc_RNA (1)...(19): siRNA sense strand
cagcaagacgcgcgaguuc

SEQ ID NO: 880286 - RNA, 19 nt, Homo sapiens
  misc_RNA (1)...(19): siRNA sense strand
uuauugacauugcugaagu

SEQ ID NO: 880287 - RNA, 19 nt, Homo sapiens
  misc_RNA (1)...(19): siRNA sense strand
caacugcaucuguaucaag

SEQ ID NO: 880288 - RNA, 19 nt, Homo sapiens
  misc_RNA (1)...(19): siRNA sense strand
aggaugauguggugaccuu

SEQ ID NO: 880289 - RNA, 19 nt, Homo sapiens
  misc_RNA (1)...(19): siRNA sense strand
ccggaacugugaagcuguu

SEQ ID NO: 880290 - RNA, 19 nt, Homo sapiens
  misc_RNA (1)...(19): siRNA sense strand
ccaacugcaucuguaucaa

SEQ ID NO: 880291 - RNA, 19 nt, Homo sapiens
  misc_RNA (1)...(19): siRNA sense strand
uacggcgucuggagauaaa

SEQ ID NO: 880292 - RNA, 19 nt, Homo sapiens
  misc_RNA (1)...(19): siRNA sense strand
uugccacugugaacacuaa

SEQ ID NO: 880293 - RNA, 19 nt, Homo sapiens
  misc_RNA (1)...(19): siRNA sense strand
gauaaaaccauucgcaucu

SEQ ID NO: 880294 - RNA, 19 nt, Homo sapiens
  misc_RNA (1)...(19): siRNA sense strand
gaagugcagaugcuuuggu

SEQ ID NO: 880295 - RNA, 19 nt, Homo sapiens
  misc_RNA (1)...(19): siRNA sense strand
ccaaagcagaagagcaguu

SEQ ID NO: 880296 - RNA, 19 nt, Homo sapiens
  misc_RNA (1)...(19): siRNA sense strand
aaauggcaaugguuguauc

SEQ ID NO: 880297 - RNA, 19 nt, Homo sapiens
  misc_RNA (1)...(19): siRNA sense strand
cggaagaucauuuuauuga

SEQ ID NO: 880298 - RNA, 19 nt, Homo sapiens
  misc_RNA (1)...(19): siRNA sense strand
gaugaguuaguguguguuc

SEQ ID NO: 880299 - RNA, 19 nt, Homo sapiens
  misc_RNA (1)...(19): siRNA sense strand
ccuuccaacugcaucugua

SEQ ID NO: 880300 - RNA, 19 nt, Homo sapiens
  misc_RNA (1)...(19): siRNA sense strand
uccaaguaauccugaccua

SEQ ID NO: 880301 - RNA, 19 nt, Homo sapiens
  misc_RNA (1)...(19): siRNA sense strand
ccaaguaauccugaccuau

SEQ ID NO: 880302 - RNA, 19 nt, Homo sapiens
  misc_RNA (1)...(19): siRNA sense strand
caggaagugcagaugcuuu

SEQ ID NO: 880303 - RNA, 19 nt, Homo sapiens
  misc_RNA (1)...(19): siRNA sense strand
guaauccugaccuauuugu

SEQ ID NO: 880304 - RNA, 19 nt, Homo sapiens
  misc_RNA (1)...(19): siRNA sense strand
cuaaaggggagaacauuaa

SEQ ID NO: 880305 - RNA, 19 nt, Homo sapiens
  misc_RNA (1)...(19): siRNA sense strand
ggaacugugaagcuguuug

SEQ ID NO: 880306 - RNA, 19 nt, Homo sapiens
  misc_RNA (1)...(19): siRNA sense strand
caaagacggcaaauaugac

SEQ ID NO: 880307 - RNA, 19 nt, Homo sapiens
  misc_RNA (1)...(19): siRNA sense strand
aagagcaguucaaguucga

SEQ ID NO: 880308 - RNA, 19 nt, Homo sapiens
  misc_RNA (1)...(19): siRNA sense strand
gcaagacgcgcgaguuccu

SEQ ID NO: 880309 - RNA, 19 nt, Homo sapiens
  misc_RNA (1)...(19): siRNA sense strand
gaugugaggacuacaaaau

SEQ ID NO: 880310 - RNA, 19 nt, Homo sapiens
  misc_RNA (1)...(19): siRNA sense strand
ccugacaaauggcaauggu

SEQ ID NO: 880311 - RNA, 19 nt, Homo sapiens
  misc_RNA (1)...(19): siRNA sense strand
cgggaagccggaacuguga

SEQ ID NO: 880312 - RNA, 19 nt, Homo sapiens
  misc_RNA (1)...(19): siRNA sense strand
aaagacggcaaauaugaca

SEQ ID NO: 880313 - RNA, 19 nt, Homo sapiens
  misc_RNA (1)...(19): siRNA sense strand
guguggaccagcuuuguug

SEQ ID NO: 880314 - RNA, 19 nt, Homo sapiens
  misc_RNA (1)...(19): siRNA sense strand
ccuguaagaacccucaguu

SEQ ID NO: 880315 - RNA, 19 nt, Homo sapiens
  misc_RNA (1)...(19): siRNA sense strand
uaauauguucuuccugaca

SEQ ID NO: 880316 - RNA, 19 nt, Homo sapiens
  misc_RNA (1)...(19): siRNA sense strand
aaauagagcaccaagguua

SEQ ID NO: 880317 - RNA, 19 nt, Homo sapiens
  misc_RNA (1)...(19): siRNA sense strand
ggaaauagagcaccaaggu

SEQ ID NO: 880318 - RNA, 19 nt, Homo sapiens
  misc_RNA (1)...(19): siRNA sense strand
gugaagguauugugaguug

SEQ ID NO: 880319 - RNA, 19 nt, Homo sapiens
  misc_RNA (1)...(19): siRNA sense strand
guacagagaauauaacaca

SEQ ID NO: 880320 - RNA, 19 nt, Homo sapiens
  misc_RNA (1)...(19): siRNA sense strand
gcucaauccugcaaugugu

SEQ ID NO: 880321 - RNA, 19 nt, Homo sapiens
  misc_RNA (1)...(19): siRNA sense strand
cagagaauauaacacaaug

SEQ ID NO: 880322 - RNA, 19 nt, Homo sapiens
  misc_RNA (1)...(19): siRNA sense strand
caacuuguacagagaauau

SEQ ID NO: 880323 - RNA, 19 nt, Homo sapiens
  misc_RNA (1)...(19): siRNA sense strand
gaaauagagcaccaagguu

SEQ ID NO: 880324 - RNA, 19 nt, Homo sapiens
  misc_RNA (1)...(19): siRNA sense strand
ucaguuuccucguucuuaa

SEQ ID NO: 880325 - RNA, 19 nt, Homo sapiens
  misc_RNA (1)...(19): siRNA sense strand
gagaauagugcauugugaa

SEQ ID NO: 880326 - RNA, 19 nt, Homo sapiens
  misc_RNA (1)...(19): siRNA sense strand
gaaagugggagggaaauag

SEQ ID NO: 880327 - RNA, 19 nt, Homo sapiens
  misc_RNA (1)...(19): siRNA sense strand
agagaauagugcauuguga

SEQ ID NO: 880328 - RNA, 19 nt, Homo sapiens
  misc_RNA (1)...(19): siRNA sense strand
caaguacauuugggccuaa

SEQ ID NO: 880329 - RNA, 19 nt, Homo sapiens
  misc_RNA (1)...(19): siRNA sense strand
uaucuuaguucucccucuu

SEQ ID NO: 880330 - RNA, 19 nt, Homo sapiens
  misc_RNA (1)...(19): siRNA sense strand
gagagaauagugcauugug

SEQ ID NO: 880331 - RNA, 19 nt, Homo sapiens
  misc_RNA (1)...(19): siRNA sense strand
guacauuugggccuaaaga

SEQ ID NO: 880332 - RNA, 19 nt, Homo sapiens
  misc_RNA (1)...(19): siRNA sense strand
acauuugggccuaaagaua

SEQ ID NO: 880333 - RNA, 19 nt, Homo sapiens
  misc_RNA (1)...(19): siRNA sense strand
cauuugggccuaaagauau

SEQ ID NO: 880334 - RNA, 19 nt, Homo sapiens
  misc_RNA (1)...(19): siRNA sense strand
gggccucaguuuccucguu

SEQ ID NO: 880335 - RNA, 19 nt, Homo sapiens
  misc_RNA (1)...(19): siRNA sense strand
guguggagcugucauucug

SEQ ID NO: 880336 - RNA, 19 nt, Homo sapiens
  misc_RNA (1)...(19): siRNA sense strand
ccaacugcaucgcucaauc

SEQ ID NO: 880337 - RNA, 19 nt, Homo sapiens
  misc_RNA (1)...(19): siRNA sense strand
gcugaaagugggagggaaa

SEQ ID NO: 880338 - RNA, 19 nt, Homo sapiens
  misc_RNA (1)...(19): siRNA sense strand
uauaacacaauggcaagua

SEQ ID NO: 880339 - RNA, 19 nt, Homo sapiens
  misc_RNA (1)...(19): siRNA sense strand
ggucccugcuuugcauuug

SEQ ID NO: 880340 - RNA, 19 nt, Homo sapiens
  misc_RNA (1)...(19): siRNA sense strand
aauagugcauugugaaggu

SEQ ID NO: 880341 - RNA, 19 nt, Homo sapiens
  misc_RNA (1)...(19): siRNA sense strand
ggagagaauagugcauugu

SEQ ID NO: 880342 - RNA, 19 nt, Homo sapiens
  misc_RNA (1)...(19): siRNA sense strand
ugaaagugggagggaaaua

SEQ ID NO: 880343 - RNA, 19 nt, Homo sapiens
  misc_RNA (1)...(19): siRNA sense strand
aaagugggagggaaauaga

SEQ ID NO: 880344 - RNA, 19 nt, Homo sapiens
  misc_RNA (1)...(19): siRNA sense strand
aauagagcaccaagguuaa

SEQ ID NO: 880345 - RNA, 19 nt, Homo sapiens
  misc_RNA (1)...(19): siRNA sense strand
guuuccucguucuuaaaua

SEQ ID NO: 880346 - RNA, 19 nt, Homo sapiens
  misc_RNA (1)...(19): siRNA sense strand
ggugugugcucagguguac

SEQ ID NO: 880347 - RNA, 19 nt, Homo sapiens
  misc_RNA (1)...(19): siRNA sense strand
cauggaauaagccagaaug

SEQ ID NO: 880348 - RNA, 19 nt, Homo sapiens
  misc_RNA (1)...(19): siRNA sense strand
aagccagaaugcugaaagu

SEQ ID NO: 880349 - RNA, 19 nt, Homo sapiens
  misc_RNA (1)...(19): siRNA sense strand
uaacacaauggcaaguaca

SEQ ID NO: 880350 - RNA, 19 nt, Homo sapiens
  misc_RNA (1)...(19): siRNA sense strand
ucacaaagguccuccugua

SEQ ID NO: 880351 - RNA, 19 nt, Homo sapiens
  misc_RNA (1)...(19): siRNA sense strand
gaacaucaacuacaagaaa

SEQ ID NO: 880352 - RNA, 19 nt, Homo sapiens
  misc_RNA (1)...(19): siRNA sense strand
uaacuaugcugccauggua

SEQ ID NO: 880353 - RNA, 19 nt, Homo sapiens
  misc_RNA (1)...(19): siRNA sense strand
gggauuaucaucucaguua

SEQ ID NO: 880354 - RNA, 19 nt, Homo sapiens
  misc_RNA (1)...(19): siRNA sense strand
acagaugaauguacaauug

SEQ ID NO: 880355 - RNA, 19 nt, Homo sapiens
  misc_RNA (1)...(19): siRNA sense strand
gaaggaacaagaaauugaa

SEQ ID NO: 880356 - RNA, 19 nt, Homo sapiens
  misc_RNA (1)...(19): siRNA sense strand
ggaacaagaaauugaaaga

SEQ ID NO: 880357 - RNA, 19 nt, Homo sapiens
  misc_RNA (1)...(19): siRNA sense strand
ggauuaucaucucaguuaa

SEQ ID NO: 880358 - RNA, 19 nt, Homo sapiens
  misc_RNA (1)...(19): siRNA sense strand
gaucaucaaugggauuauc

SEQ ID NO: 880359 - RNA, 19 nt, Homo sapiens
  misc_RNA (1)...(19): siRNA sense strand
ugagaaggaacaagaaauu

SEQ ID NO: 880360 - RNA, 19 nt, Homo sapiens
  misc_RNA (1)...(19): siRNA sense strand
gaacggcaacucuuaaggu

SEQ ID NO: 880361 - RNA, 19 nt, Homo sapiens
  misc_RNA (1)...(19): siRNA sense strand
gcauggacuucuuggugaa

SEQ ID NO: 880362 - RNA, 19 nt, Homo sapiens
  misc_RNA (1)...(19): siRNA sense strand
uaccaugccuggaacauca

SEQ ID NO: 880363 - RNA, 19 nt, Homo sapiens
  misc_RNA (1)...(19): siRNA sense strand
gcucugggccugcugauuc

SEQ ID NO: 880364 - RNA, 19 nt, Homo sapiens
  misc_RNA (1)...(19): siRNA sense strand
gagaaggaacaagaaauug

SEQ ID NO: 880365 - RNA, 19 nt, Homo sapiens
  misc_RNA (1)...(19): siRNA sense strand
gcucugagaaggaacaaga

SEQ ID NO: 880366 - RNA, 19 nt, Homo sapiens
  misc_RNA (1)...(19): siRNA sense strand
gaggaugagcaaguucuua

SEQ ID NO: 880367 - RNA, 19 nt, Homo sapiens
  misc_RNA (1)...(19): siRNA sense strand
gaaaugggagaaugaagag

SEQ ID NO: 880368 - RNA, 19 nt, Homo sapiens
  misc_RNA (1)...(19): siRNA sense strand
ggaguucuuucaccacaag

SEQ ID NO: 880369 - RNA, 19 nt, Homo sapiens
  misc_RNA (1)...(19): siRNA sense strand
ccuggaacaucaacuacaa

SEQ ID NO: 880370 - RNA, 19 nt, Homo sapiens
  misc_RNA (1)...(19): siRNA sense strand
ucaaugggauuaucaucuc

SEQ ID NO: 880371 - RNA, 19 nt, Homo sapiens
  misc_RNA (1)...(19): siRNA sense strand
agaaggaacaagaaauuga

SEQ ID NO: 880372 - RNA, 19 nt, Homo sapiens
  misc_RNA (1)...(19): siRNA sense strand
cagcugcucugagaaggaa

SEQ ID NO: 880373 - RNA, 19 nt, Homo sapiens
  misc_RNA (1)...(19): siRNA sense strand
uacaagaaaugggagaaug

SEQ ID NO: 880374 - RNA, 19 nt, Homo sapiens
  misc_RNA (1)...(19): siRNA sense strand
ucagaacggcaacucuuaa

SEQ ID NO: 880375 - RNA, 19 nt, Homo sapiens
  misc_RNA (1)...(19): siRNA sense strand
agaaaugggagaaugaaga

SEQ ID NO: 880376 - RNA, 19 nt, Homo sapiens
  misc_RNA (1)...(19): siRNA sense strand
caagaaaugggagaaugaa

SEQ ID NO: 880377 - RNA, 19 nt, Homo sapiens
  misc_RNA (1)...(19): siRNA sense strand
acaagaaaugggagaauga

SEQ ID NO: 880378 - RNA, 19 nt, Homo sapiens
  misc_RNA (1)...(19): siRNA sense strand
gaacaagaaauugaaagac

SEQ ID NO: 880379 - RNA, 19 nt, Homo sapiens
  misc_RNA (1)...(19): siRNA sense strand
ggaacaucaacuacaagaa

SEQ ID NO: 880380 - RNA, 19 nt, Homo sapiens
  misc_RNA (1)...(19): siRNA sense strand
cgacaagaauaacuaugcu

SEQ ID NO: 880381 - RNA, 19 nt, Homo sapiens
  misc_RNA (1)...(19): siRNA sense strand
caaugggauuaucaucuca

SEQ ID NO: 880382 - RNA, 19 nt, Homo sapiens
  misc_RNA (1)...(19): siRNA sense strand
cgacagcauggacuucuug

SEQ ID NO: 880383 - RNA, 19 nt, Homo sapiens
  misc_RNA (1)...(19): siRNA sense strand
gcgacagcauggacuucuu

SEQ ID NO: 880384 - RNA, 19 nt, Homo sapiens
  misc_RNA (1)...(19): siRNA sense strand
uaucaucucaguuaagaca

SEQ ID NO: 880385 - RNA, 19 nt, Homo sapiens
  misc_RNA (1)...(19): siRNA sense strand
gcugagaggaugagcaagu

SEQ ID NO: 880386 - RNA, 19 nt, Homo sapiens
  misc_RNA (1)...(19): siRNA sense strand
guucuuucaccacaaguuu

SEQ ID NO: 880387 - RNA, 19 nt, Homo sapiens
  misc_RNA (1)...(19): siRNA sense strand
aggaugagcaaguucuuaa

SEQ ID NO: 880388 - RNA, 19 nt, Homo sapiens
  misc_RNA (1)...(19): siRNA sense strand
aacggcaacucuuaagguu

SEQ ID NO: 880389 - RNA, 19 nt, Homo sapiens
  misc_RNA (1)...(19): siRNA sense strand
gccaugguauuccacuaca

SEQ ID NO: 880390 - RNA, 19 nt, Homo sapiens
  misc_RNA (1)...(19): siRNA sense strand
cugagaggaugagcaaguu

SEQ ID NO: 880391 - RNA, 19 nt, Homo sapiens
  misc_RNA (1)...(19): siRNA sense strand
gaugagcaaguucuuaagg

SEQ ID NO: 880392 - RNA, 19 nt, Homo sapiens
  misc_RNA (1)...(19): siRNA sense strand
uccaggagcaccaguuuga

SEQ ID NO: 880393 - RNA, 19 nt, Homo sapiens
  misc_RNA (1)...(19): siRNA sense strand
caggcgaggucaucaucau

SEQ ID NO: 880394 - RNA, 19 nt, Homo sapiens
  misc_RNA (1)...(19): siRNA sense strand
ucauccagcccgacaagaa

SEQ ID NO: 880395 - RNA, 19 nt, Homo sapiens
  misc_RNA (1)...(19): siRNA sense strand
gaucauccagcccgacaag

SEQ ID NO: 880396 - RNA, 19 nt, Homo sapiens
  misc_RNA (1)...(19): siRNA sense strand
gcgaggucaucaucaucug

SEQ ID NO: 880397 - RNA, 19 nt, Homo sapiens
  misc_RNA (1)...(19): siRNA sense strand
cggaucaucaaugggauua

SEQ ID NO: 880398 - RNA, 19 nt, Homo sapiens
  misc_RNA (1)...(19): siRNA sense strand
guuccaggagcaccaguuu

SEQ ID NO: 880399 - RNA, 19 nt, Homo sapiens
  misc_RNA (1)...(19): siRNA sense strand
gagaggaugagcaaguucu

SEQ ID NO: 880400 - RNA, 19 nt, Homo sapiens
  misc_RNA (1)...(19): siRNA sense strand
uacaugagcaucaccaucu

SEQ ID NO: 880401 - RNA, 19 nt, Homo sapiens
  misc_RNA (1)...(19): siRNA sense strand
caucaucugcuuggugguu

SEQ ID NO: 880402 - RNA, 19 nt, Homo sapiens
  misc_RNA (1)...(19): siRNA sense strand
gauuaucaucucaguuaag

SEQ ID NO: 880403 - RNA, 19 nt, Homo sapiens
  misc_RNA (1)...(19): siRNA sense strand
cauccagcccgacaagaau

SEQ ID NO: 880404 - RNA, 19 nt, Homo sapiens
  misc_RNA (1)...(19): siRNA sense strand
acaugagcaucaccaucuu

SEQ ID NO: 880405 - RNA, 19 nt, Homo sapiens
  misc_RNA (1)...(19): siRNA sense strand
cgccaagauucaacaccuu

SEQ ID NO: 880406 - RNA, 19 nt, Homo sapiens
  misc_RNA (1)...(19): siRNA sense strand
uucagaacggcaacucuua

SEQ ID NO: 880407 - RNA, 19 nt, Homo sapiens
  misc_RNA (1)...(19): siRNA sense strand
ucaagcaccugcauguuug

SEQ ID NO: 880408 - RNA, 19 nt, Homo sapiens
  misc_RNA (1)...(19): siRNA sense strand
acagcaaacugcacuacaa

SEQ ID NO: 880409 - RNA, 19 nt, Homo sapiens
  misc_RNA (1)...(19): siRNA sense strand
caaacccaaucgcuacuuc

SEQ ID NO: 880410 - RNA, 19 nt, Homo sapiens
  misc_RNA (1)...(19): siRNA sense strand
ccagugagaccgacaagga

SEQ ID NO: 880411 - RNA, 19 nt, Homo sapiens
  misc_RNA (1)...(19): siRNA sense strand
gaccguuccugcccuacuu

SEQ ID NO: 880412 - RNA, 19 nt, Homo sapiens
  misc_RNA (1)...(19): siRNA sense strand
cagcaaacugcacuacaaa

SEQ ID NO: 880413 - RNA, 19 nt, Homo sapiens
  misc_RNA (1)...(19): siRNA sense strand
acgcaccgcucgcucuuca

SEQ ID NO: 880414 - RNA, 19 nt, Homo sapiens
  misc_RNA (1)...(19): siRNA sense strand
uucaagcaccugcauguuu

SEQ ID NO: 880415 - RNA, 19 nt, Homo sapiens
  misc_RNA (1)...(19): siRNA sense strand
gcaccgcucgcucuucaag

SEQ ID NO: 880416 - RNA, 19 nt, Homo sapiens
  misc_RNA (1)...(19): siRNA sense strand
cuugaacccugcgcccuuu

SEQ ID NO: 880417 - RNA, 19 nt, Homo sapiens
  misc_RNA (1)...(19): siRNA sense strand
gcaaacugcacuacaaacc

SEQ ID NO: 880418 - RNA, 19 nt, Homo sapiens
  misc_RNA (1)...(19): siRNA sense strand
ucggcgagcuccugaaaug

SEQ ID NO: 880419 - RNA, 19 nt, Homo sapiens
  misc_RNA (1)...(19): siRNA sense strand
gcagaacuuugugcccauu

SEQ ID NO: 880420 - RNA, 19 nt, Homo sapiens
  misc_RNA (1)...(19): siRNA sense strand
ucggcgagcuccugaaaug

SEQ ID NO: 880421 - RNA, 19 nt, Homo sapiens
  misc_RNA (1)...(19): siRNA sense strand
gcgagaaucaccagcuguu

SEQ ID NO: 880422 - RNA, 19 nt, Homo sapiens
  misc_RNA (1)...(19): siRNA sense strand
agaacuuugugcccauuga

SEQ ID NO: 880423 - RNA, 19 nt, Homo sapiens
  misc_RNA (1)...(19): siRNA sense strand
gccaaggccugugcaguac

SEQ ID NO: 880424 - RNA, 19 nt, Homo sapiens
  misc_RNA (1)...(19): siRNA sense strand
caaggccugugcaguacgu

SEQ ID NO: 880425 - RNA, 19 nt, Homo sapiens
  misc_RNA (1)...(19): siRNA sense strand
aaucaugcuccuccuagua

SEQ ID NO: 880426 - RNA, 19 nt, Homo sapiens
  misc_RNA (1)...(19): siRNA sense strand
gcugcuccauggacuugaa

SEQ ID NO: 880427 - RNA, 19 nt, Homo sapiens
  misc_RNA (1)...(19): siRNA sense strand
ugagcgggauguccagugu

SEQ ID NO: 880428 - RNA, 19 nt, Homo sapiens
  misc_RNA (1)...(19): siRNA sense strand
ccauggacuugaagaacau

SEQ ID NO: 880429 - RNA, 19 nt, Homo sapiens
  misc_RNA (1)...(19): siRNA sense strand
caaucaugcuccuccuagu

SEQ ID NO: 880430 - RNA, 19 nt, Homo sapiens
  misc_RNA (1)...(19): siRNA sense strand
uccauggacuugaagaaca

SEQ ID NO: 880431 - RNA, 19 nt, Homo sapiens
  misc_RNA (1)...(19): siRNA sense strand
ccacgcgagucucaaucau

SEQ ID NO: 880432 - RNA, 19 nt, Homo sapiens
  misc_RNA (1)...(19): siRNA sense strand
caccacaccuguccuugcu

SEQ ID NO: 880433 - RNA, 19 nt, Homo sapiens
  misc_RNA (1)...(19): siRNA sense strand
gaaacuaacuaccugaaga

SEQ ID NO: 880434 - RNA, 19 nt, Homo sapiens
  misc_RNA (1)...(19): siRNA sense strand
acaaggaacugacuucuga

SEQ ID NO: 880435 - RNA, 19 nt, Homo sapiens
  misc_RNA (1)...(19): siRNA sense strand
ugacagaaaugcugaaaca

SEQ ID NO: 880436 - RNA, 19 nt, Homo sapiens
  misc_RNA (1)...(19): siRNA sense strand
ugaaguugcucaugaaaug

SEQ ID NO: 880437 - RNA, 19 nt, Homo sapiens
  misc_RNA (1)...(19): siRNA sense strand
gaaauggaaaugacagaaa

SEQ ID NO: 880438 - RNA, 19 nt, Homo sapiens
  misc_RNA (1)...(19): siRNA sense strand
gaagaagaccauauucaug

SEQ ID NO: 880439 - RNA, 19 nt, Homo sapiens
  misc_RNA (1)...(19): siRNA sense strand
gacaguagccucaaggaaa

SEQ ID NO: 880440 - RNA, 19 nt, Homo sapiens
  misc_RNA (1)...(19): siRNA sense strand
ggaacugacuucugaaacu

SEQ ID NO: 880441 - RNA, 19 nt, Homo sapiens
  misc_RNA (1)...(19): siRNA sense strand
gaacugacuucugaaacug

SEQ ID NO: 880442 - RNA, 19 nt, Homo sapiens
  misc_RNA (1)...(19): siRNA sense strand
ccagugacccaauagaaua

SEQ ID NO: 880443 - RNA, 19 nt, Homo sapiens
  misc_RNA (1)...(19): siRNA sense strand
gaagaggugcuuuggaaau

SEQ ID NO: 880444 - RNA, 19 nt, Homo sapiens
  misc_RNA (1)...(19): siRNA sense strand
cucacuggcuuuaucauua

SEQ ID NO: 880445 - RNA, 19 nt, Homo sapiens
  misc_RNA (1)...(19): siRNA sense strand
caaaaugccacaagaaaua

SEQ ID NO: 880446 - RNA, 19 nt, Homo sapiens
  misc_RNA (1)...(19): siRNA sense strand
ggaagaguaucagauucaa

SEQ ID NO: 880447 - RNA, 19 nt, Homo sapiens
  misc_RNA (1)...(19): siRNA sense strand
gaaaacagcaaaagcaaaa

SEQ ID NO: 880448 - RNA, 19 nt, Homo sapiens
  misc_RNA (1)...(19): siRNA sense strand
uaaauuacaaggaggcuuu

SEQ ID NO: 880449 - RNA, 19 nt, Homo sapiens
  misc_RNA (1)...(19): siRNA sense strand
cugaagaggugcuuuggaa

SEQ ID NO: 880450 - RNA, 19 nt, Homo sapiens
  misc_RNA (1)...(19): siRNA sense strand
ccacgaagaagaccauauu

SEQ ID NO: 880451 - RNA, 19 nt, Homo sapiens
  misc_RNA (1)...(19): siRNA sense strand
ccagguacuuccagucuga

SEQ ID NO: 880452 - RNA, 19 nt, Homo sapiens
  misc_RNA (1)...(19): siRNA sense strand
acaguagccucaaggaaau

SEQ ID NO: 880453 - RNA, 19 nt, Homo sapiens
  misc_RNA (1)...(19): siRNA sense strand
aagaggugcuuuggaaauu

SEQ ID NO: 880454 - RNA, 19 nt, Homo sapiens
  misc_RNA (1)...(19): siRNA sense strand
aguaucagauucaacagaa

SEQ ID NO: 880455 - RNA, 19 nt, Homo sapiens
  misc_RNA (1)...(19): siRNA sense strand
aggaaugccucaacagguu

SEQ ID NO: 880456 - RNA, 19 nt, Homo sapiens
  misc_RNA (1)...(19): siRNA sense strand
cgaagaagaccauauucau

SEQ ID NO: 880457 - RNA, 19 nt, Homo sapiens
  misc_RNA (1)...(19): siRNA sense strand
ggaaauggaaaugacagaa

SEQ ID NO: 880458 - RNA, 19 nt, Homo sapiens
  misc_RNA (1)...(19): siRNA sense strand
gaccagaacuucaaaaugc

SEQ ID NO: 880459 - RNA, 19 nt, Homo sapiens
  misc_RNA (1)...(19): siRNA sense strand
gcugaaacaggaagaguau

SEQ ID NO: 880460 - RNA, 19 nt, Homo sapiens
  misc_RNA (1)...(19): siRNA sense strand
ucaaggaaauggaaaugac

SEQ ID NO: 880461 - RNA, 19 nt, Homo sapiens
  misc_RNA (1)...(19): siRNA sense strand
uggcagagguggcgaaggu

SEQ ID NO: 880462 - RNA, 19 nt, Homo sapiens
  misc_RNA (1)...(19): siRNA sense strand
caggaagaguaucagauuc

SEQ ID NO: 880463 - RNA, 19 nt, Homo sapiens
  misc_RNA (1)...(19): siRNA sense strand
acaggaagaguaucagauu

SEQ ID NO: 880464 - RNA, 19 nt, Homo sapiens
  misc_RNA (1)...(19): siRNA sense strand
ugaaacaggaagaguauca

SEQ ID NO: 880465 - RNA, 19 nt, Homo sapiens
  misc_RNA (1)...(19): siRNA sense strand
gcucacuggcuuuaucauu

SEQ ID NO: 880466 - RNA, 19 nt, Homo sapiens
  misc_RNA (1)...(19): siRNA sense strand
caggaggaauaugacagua

SEQ ID NO: 880467 - RNA, 19 nt, Homo sapiens
  misc_RNA (1)...(19): siRNA sense strand
ucacuggcuuuaucauuac

SEQ ID NO: 880468 - RNA, 19 nt, Homo sapiens
  misc_RNA (1)...(19): siRNA sense strand
gcaggaggaauaugacagu

SEQ ID NO: 880469 - RNA, 19 nt, Homo sapiens
  misc_RNA (1)...(19): siRNA sense strand
ugaaaagugucacaaggaa

SEQ ID NO: 880470 - RNA, 19 nt, Homo sapiens
  misc_RNA (1)...(19): siRNA sense strand
gcuuuaucauuacaggaaa

SEQ ID NO: 880471 - RNA, 19 nt, Homo sapiens
  misc_RNA (1)...(19): siRNA sense strand
gcccagugacccaauagaa

SEQ ID NO: 880472 - RNA, 19 nt, Homo sapiens
  misc_RNA (1)...(19): siRNA sense strand
ggaaacuaacuaccugaag

SEQ ID NO: 880473 - RNA, 19 nt, Homo sapiens
  misc_RNA (1)...(19): siRNA sense strand
ucaacagguuccuccuuca

SEQ ID NO: 880474 - RNA, 19 nt, Homo sapiens
  misc_RNA (1)...(19): siRNA sense strand
gaguaucagauucaacaga

SEQ ID NO: 880475 - RNA, 19 nt, Homo sapiens
  misc_RNA (1)...(19): siRNA sense strand
aaacaggaagaguaucaga

SEQ ID NO: 880476 - RNA, 19 nt, Homo sapiens
  misc_RNA (1)...(19): siRNA sense strand
caaggaggcuuuucagcau

SEQ ID NO: 880477 - RNA, 19 nt, Homo sapiens
  misc_RNA (1)...(19): siRNA sense strand
gagaauagggaaaagaaga

SEQ ID NO: 880478 - RNA, 19 nt, Homo sapiens
  misc_RNA (1)...(19): siRNA sense strand
agaggugcuuuggaaauug

SEQ ID NO: 880479 - RNA, 19 nt, Homo sapiens
  misc_RNA (1)...(19): siRNA sense strand
caaggaaauggaaaugaca

SEQ ID NO: 880480 - RNA, 19 nt, Homo sapiens
  misc_RNA (1)...(19): siRNA sense strand
ugacaguagccucaaggaa

SEQ ID NO: 880481 - RNA, 19 nt, Homo sapiens
  misc_RNA (1)...(19): siRNA sense strand
gaggugcuuuggaaauugc

SEQ ID NO: 880482 - RNA, 19 nt, Homo sapiens
  misc_RNA (1)...(19): siRNA sense strand
ggaaaacagcaaaagcaaa

SEQ ID NO: 880483 - RNA, 19 nt, Homo sapiens
  misc_RNA (1)...(19): siRNA sense strand
aagaguaucagauucaaca

SEQ ID NO: 880484 - RNA, 19 nt, Homo sapiens
  misc_RNA (1)...(19): siRNA sense strand
ugaagaggugcuuuggaaa

SEQ ID NO: 880485 - RNA, 19 nt, Homo sapiens
  misc_RNA (1)...(19): siRNA sense strand
ggcuuuaucauuacaggaa

SEQ ID NO: 880486 - RNA, 19 nt, Homo sapiens
  misc_RNA (1)...(19): siRNA sense strand
agaagaccauauucaugca

SEQ ID NO: 880487 - RNA, 19 nt, Homo sapiens
  misc_RNA (1)...(19): siRNA sense strand
aaagaagagaauagggaaa

SEQ ID NO: 880488 - RNA, 19 nt, Homo sapiens
  misc_RNA (1)...(19): siRNA sense strand
cagauugaccagaacuuca

SEQ ID NO: 880489 - RNA, 19 nt, Homo sapiens
  misc_RNA (1)...(19): siRNA sense strand
gaagagaauagggaaaaga

SEQ ID NO: 880490 - RNA, 19 nt, Homo sapiens
  misc_RNA (1)...(19): siRNA sense strand
ccuccuggcuccaaaucuc

SEQ ID NO: 880491 - RNA, 19 nt, Homo sapiens
  misc_RNA (1)...(19): siRNA sense strand
aaacuaacuaccugaagag

SEQ ID NO: 880492 - RNA, 19 nt, Homo sapiens
  misc_RNA (1)...(19): siRNA sense strand
ccagauugaccagaacuuc

SEQ ID NO: 880493 - RNA, 19 nt, Homo sapiens
  misc_RNA (1)...(19): siRNA sense strand
ggaacaagcuuaaacagaa

SEQ ID NO: 880494 - RNA, 19 nt, Homo sapiens
  misc_RNA (1)...(19): siRNA sense strand
gcacauguauuauaacaga

SEQ ID NO: 880495 - RNA, 19 nt, Homo sapiens
  misc_RNA (1)...(19): siRNA sense strand
gaacaagcuuaaacagaaa

SEQ ID NO: 880496 - RNA, 19 nt, Homo sapiens
  misc_RNA (1)...(19): siRNA sense strand
uaacagagauugguacaag

SEQ ID NO: 880497 - RNA, 19 nt, Homo sapiens
  misc_RNA (1)...(19): siRNA sense strand
cagaagcacauguauuaua

SEQ ID NO: 880498 - RNA, 19 nt, Homo sapiens
  misc_RNA (1)...(19): siRNA sense strand
cagaagaaauggcggacuu

SEQ ID NO: 880499 - RNA, 19 nt, Homo sapiens
  misc_RNA (1)...(19): siRNA sense strand
ggucagaaagcaacauuga

SEQ ID NO: 880500 - RNA, 19 nt, Homo sapiens
  misc_RNA (1)...(19): siRNA sense strand
gaaagucuugccaugauug

SEQ ID NO: 880501 - RNA, 19 nt, Homo sapiens
  misc_RNA (1)...(19): siRNA sense strand
ggacuucuacaaggaauuu

SEQ ID NO: 880502 - RNA, 19 nt, Homo sapiens
  misc_RNA (1)...(19): siRNA sense strand
uucagaagcacauguauua

SEQ ID NO: 880503 - RNA, 19 nt, Homo sapiens
  misc_RNA (1)...(19): siRNA sense strand
agaauggaaucaacaguuc

SEQ ID NO: 880504 - RNA, 19 nt, Homo sapiens
  misc_RNA (1)...(19): siRNA sense strand
ggaaaggauuuggaacaag

SEQ ID NO: 880505 - RNA, 19 nt, Homo sapiens
  misc_RNA (1)...(19): siRNA sense strand
ggauuuggaacaagcuuaa

SEQ ID NO: 880506 - RNA, 19 nt, Homo sapiens
  misc_RNA (1)...(19): siRNA sense strand
gacaagaaacacaagaaug

SEQ ID NO: 880507 - RNA, 19 nt, Homo sapiens
  misc_RNA (1)...(19): siRNA sense strand
ucagaaagcaacauugaau

SEQ ID NO: 880508 - RNA, 19 nt, Homo sapiens
  misc_RNA (1)...(19): siRNA sense strand
ccuucgaccuguucacuuu

SEQ ID NO: 880509 - RNA, 19 nt, Homo sapiens
  misc_RNA (1)...(19): siRNA sense strand
agaaagucuugccaugauu

SEQ ID NO: 880510 - RNA, 19 nt, Homo sapiens
  misc_RNA (1)...(19): siRNA sense strand
ucaagauucugcccuccaa

SEQ ID NO: 880511 - RNA, 19 nt, Homo sapiens
  misc_RNA (1)...(19): siRNA sense strand
acacaagaauggaaucaac

SEQ ID NO: 880512 - RNA, 19 nt, Homo sapiens
  misc_RNA (1)...(19): siRNA sense strand
uggaaaggauuuggaacaa

SEQ ID NO: 880513 - RNA, 19 nt, Homo sapiens
  misc_RNA (1)...(19): siRNA sense strand
ccagauaaauauucaaacc

SEQ ID NO: 880514 - RNA, 19 nt, Homo sapiens
  misc_RNA (1)...(19): siRNA sense strand
ugaaucaggucagaaagca

SEQ ID NO: 880515 - RNA, 19 nt, Homo sapiens
  misc_RNA (1)...(19): siRNA sense strand
acaagaaacacaagaaugg

SEQ ID NO: 880516 - RNA, 19 nt, Homo sapiens
  misc_RNA (1)...(19): siRNA sense strand
caagaaacacaagaaugga

SEQ ID NO: 880517 - RNA, 19 nt, Homo sapiens
  misc_RNA (1)...(19): siRNA sense strand
aagaauggaaucaacaguu

SEQ ID NO: 880518 - RNA, 19 nt, Homo sapiens
  misc_RNA (1)...(19): siRNA sense strand
gaaacacaagaauggaauc

SEQ ID NO: 880519 - RNA, 19 nt, Homo sapiens
  misc_RNA (1)...(19): siRNA sense strand
ggaacaaaagcuuagaaaa

SEQ ID NO: 880520 - RNA, 19 nt, Homo sapiens
  misc_RNA (1)...(19): siRNA sense strand
uggcggacuucuacaagga

SEQ ID NO: 880521 - RNA, 19 nt, Homo sapiens
  misc_RNA (1)...(19): siRNA sense strand
uaagacaagaaacacaaga

SEQ ID NO: 880522 - RNA, 19 nt, Homo sapiens
  misc_RNA (1)...(19): siRNA sense strand
agacaagaaacacaagaau

SEQ ID NO: 880523 - RNA, 19 nt, Homo sapiens
  misc_RNA (1)...(19): siRNA sense strand
gucuugccaugauuggaua

SEQ ID NO: 880524 - RNA, 19 nt, Homo sapiens
  misc_RNA (1)...(19): siRNA sense strand
caacaguucugggcaaacc

SEQ ID NO: 880525 - RNA, 19 nt, Homo sapiens
  misc_RNA (1)...(19): siRNA sense strand
gaaauggcggacuucuaca

SEQ ID NO: 880526 - RNA, 19 nt, Homo sapiens
  misc_RNA (1)...(19): siRNA sense strand
uggaacaagcuuaaacaga

SEQ ID NO: 880527 - RNA, 19 nt, Homo sapiens
  misc_RNA (1)...(19): siRNA sense strand
aagaaacacaagaauggaa

SEQ ID NO: 880528 - RNA, 19 nt, Homo sapiens
  misc_RNA (1)...(19): siRNA sense strand
agaaacacaagaauggaau

SEQ ID NO: 880529 - RNA, 19 nt, Homo sapiens
  misc_RNA (1)...(19): siRNA sense strand
gaaaaguggcccuggaaag

SEQ ID NO: 880530 - RNA, 19 nt, Homo sapiens
  misc_RNA (1)...(19): siRNA sense strand
ucaccuucuucaugggaaa

SEQ ID NO: 880531 - RNA, 19 nt, Homo sapiens
  misc_RNA (1)...(19): siRNA sense strand
gcggacuucuacaaggaau

SEQ ID NO: 880532 - RNA, 19 nt, Homo sapiens
  misc_RNA (1)...(19): siRNA sense strand
aaacacaagaauggaauca

SEQ ID NO: 880533 - RNA, 19 nt, Homo sapiens
  misc_RNA (1)...(19): siRNA sense strand
ugccaucaccuucuucaug

SEQ ID NO: 880534 - RNA, 19 nt, Homo sapiens
  misc_RNA (1)...(19): siRNA sense strand
gccugggccugagaacuga

SEQ ID NO: 880535 - RNA, 19 nt, Homo sapiens
  misc_RNA (1)...(19): siRNA sense strand
aagacaagaaacacaagaa

SEQ ID NO: 880536 - RNA, 19 nt, Homo sapiens
  misc_RNA (1)...(19): siRNA sense strand
ggaaaaguggcccuggaaa

SEQ ID NO: 880537 - RNA, 19 nt, Homo sapiens
  misc_RNA (1)...(19): siRNA sense strand
gaauggaaucaacaguucu

SEQ ID NO: 880538 - RNA, 19 nt, Homo sapiens
  misc_RNA (1)...(19): siRNA sense strand
cagcugggcauuagugaua

SEQ ID NO: 880539 - RNA, 19 nt, Homo sapiens
  misc_RNA (1)...(19): siRNA sense strand
gauaauggagggcucuuug

SEQ ID NO: 880540 - RNA, 19 nt, Homo sapiens
  misc_RNA (1)...(19): siRNA sense strand
gggagcagcugggcauuag

SEQ ID NO: 880541 - RNA, 19 nt, Homo sapiens
  misc_RNA (1)...(19): siRNA sense strand
gaggaugagcccacagaga

SEQ ID NO: 880542 - RNA, 19 nt, Homo sapiens
  misc_RNA (1)...(19): siRNA sense strand
gagcagcugggcauuagug

SEQ ID NO: 880543 - RNA, 19 nt, Homo sapiens
  misc_RNA (1)...(19): siRNA sense strand
aagcugaagcggaaauauu

SEQ ID NO: 880544 - RNA, 19 nt, Homo sapiens
  misc_RNA (1)...(19): siRNA sense strand
gaagcugaagcggaaauau

SEQ ID NO: 880545 - RNA, 19 nt, Homo sapiens
  misc_RNA (1)...(19): siRNA sense strand
ccucagcccuacccacaca

SEQ ID NO: 880546 - RNA, 19 nt, Homo sapiens
  misc_RNA (1)...(19): siRNA sense strand
caacgaggaggacgaggau

SEQ ID NO: 880547 - RNA, 19 nt, Homo sapiens
  misc_RNA (1)...(19): siRNA sense strand
ucaaggagaagaggacaga

SEQ ID NO: 880548 - RNA, 19 nt, Homo sapiens
  misc_RNA (1)...(19): siRNA sense strand
gcugaagcggaaauauuga

SEQ ID NO: 880549 - RNA, 19 nt, Homo sapiens
  misc_RNA (1)...(19): siRNA sense strand
uaauggagggcucuuugug

SEQ ID NO: 880550 - RNA, 19 nt, Homo sapiens
  misc_RNA (1)...(19): siRNA sense strand
aauggagggcucuuuguga

SEQ ID NO: 880551 - RNA, 19 nt, Homo sapiens
  misc_RNA (1)...(19): siRNA sense strand
gcuuaacaccagcgacuuc

SEQ ID NO: 880552 - RNA, 19 nt, Homo sapiens
  misc_RNA (1)...(19): siRNA sense strand
ggaugagcccacagagaca

SEQ ID NO: 880553 - RNA, 19 nt, Homo sapiens
  misc_RNA (1)...(19): siRNA sense strand
gccguugccuccacgacau

SEQ ID NO: 880554 - RNA, 19 nt, Homo sapiens
  misc_RNA (1)...(19): siRNA sense strand
gcacuccaauuggccauua

SEQ ID NO: 880555 - RNA, 19 nt, Homo sapiens
  misc_RNA (1)...(19): siRNA sense strand
guaucuaccucaucugugu

SEQ ID NO: 880556 - RNA, 19 nt, Homo sapiens
  misc_RNA (1)...(19): siRNA sense strand
gcugugcgcuaguuucaug

SEQ ID NO: 880557 - RNA, 19 nt, Homo sapiens
  misc_RNA (1)...(19): siRNA sense strand
gcgcacaguugccaucauc

SEQ ID NO: 880558 - RNA, 19 nt, Homo sapiens
  misc_RNA (1)...(19): siRNA sense strand
uggcguaucugaaccaucu

SEQ ID NO: 880559 - RNA, 19 nt, Homo sapiens
  misc_RNA (1)...(19): siRNA sense strand
cccagugccuuaccuguau

SEQ ID NO: 880560 - RNA, 19 nt, Homo sapiens
  misc_RNA (1)...(19): siRNA sense strand
cuucggaacugcugucauc

SEQ ID NO: 880561 - RNA, 19 nt, Homo sapiens
  misc_RNA (1)...(19): siRNA sense strand
gcgcuaguuucauguccuu

SEQ ID NO: 880562 - RNA, 19 nt, Homo sapiens
  misc_RNA (1)...(19): siRNA sense strand
ggcugaagguccguaugua

SEQ ID NO: 880563 - RNA, 19 nt, Homo sapiens
  misc_RNA (1)...(19): siRNA sense strand
gagagagugugggcaucuu

SEQ ID NO: 880564 - RNA, 19 nt, Homo sapiens
  misc_RNA (1)...(19): siRNA sense strand
uuaccuguauuucgacaug

SEQ ID NO: 880565 - RNA, 19 nt, Homo sapiens
  misc_RNA (1)...(19): siRNA sense strand
ugccuuaccuguauuucga

SEQ ID NO: 880566 - RNA, 19 nt, Homo sapiens
  misc_RNA (1)...(19): siRNA sense strand
ccagugccuuaccuguauu

SEQ ID NO: 880567 - RNA, 19 nt, Homo sapiens
  misc_RNA (1)...(19): siRNA sense strand
gcuaguuucauguccuuug

SEQ ID NO: 880568 - RNA, 19 nt, Homo sapiens
  misc_RNA (1)...(19): siRNA sense strand
gaggggagcugaugaucca

SEQ ID NO: 880569 - RNA, 19 nt, Homo sapiens
  misc_RNA (1)...(19): siRNA sense strand
gaccggcuggcguaucuga

SEQ ID NO: 880570 - RNA, 19 nt, Homo sapiens
  misc_RNA (1)...(19): siRNA sense strand
ggagagagugugggcaucu

SEQ ID NO: 880571 - RNA, 19 nt, Homo sapiens
  misc_RNA (1)...(19): siRNA sense strand
gcugaagguccguauguac

SEQ ID NO: 880572 - RNA, 19 nt, Homo sapiens
  misc_RNA (1)...(19): siRNA sense strand
gaugauccagcuguucuuc

SEQ ID NO: 880573 - RNA, 19 nt, Homo sapiens
  misc_RNA (1)...(19): siRNA sense strand
ccagaugaagcuccuugga

SEQ ID NO: 880574 - RNA, 19 nt, Homo sapiens
  misc_RNA (1)...(19): siRNA sense strand
gaaauccugugaugugaaa

SEQ ID NO: 880575 - RNA, 19 nt, Homo sapiens
  misc_RNA (1)...(19): siRNA sense strand
gaaagccgccucccaagaa

SEQ ID NO: 880576 - RNA, 19 nt, Homo sapiens
  misc_RNA (1)...(19): siRNA sense strand
gagaaauccugugauguga

SEQ ID NO: 880577 - RNA, 19 nt, Homo sapiens
  misc_RNA (1)...(19): siRNA sense strand
cgagaaauccugugaugug

SEQ ID NO: 880578 - RNA, 19 nt, Homo sapiens
  misc_RNA (1)...(19): siRNA sense strand
cacgagaaauccugugaug

SEQ ID NO: 880579 - RNA, 19 nt, Homo sapiens
  misc_RNA (1)...(19): siRNA sense strand
cagaacccguggaugugua

SEQ ID NO: 880580 - RNA, 19 nt, Homo sapiens
  misc_RNA (1)...(19): siRNA sense strand
gcccauaacguaucuguca

SEQ ID NO: 880581 - RNA, 19 nt, Homo sapiens
  misc_RNA (1)...(19): siRNA sense strand
guggauguguacagugauu

SEQ ID NO: 880582 - RNA, 19 nt, Homo sapiens
  misc_RNA (1)...(19): siRNA sense strand
uguguacagugauuggaua

SEQ ID NO: 880583 - RNA, 19 nt, Homo sapiens
  misc_RNA (1)...(19): siRNA sense strand
acaccggagucaucucuug

SEQ ID NO: 880584 - RNA, 19 nt, Homo sapiens
  misc_RNA (1)...(19): siRNA sense strand
guacagugauuggauagac

SEQ ID NO: 880585 - RNA, 19 nt, Homo sapiens
  misc_RNA (1)...(19): siRNA sense strand
cgaaagccgccucccaaga

SEQ ID NO: 880586 - RNA, 19 nt, Homo sapiens
  misc_RNA (1)...(19): siRNA sense strand
gaauuccagacgcccauaa

SEQ ID NO: 880587 - RNA, 19 nt, Homo sapiens
  misc_RNA (1)...(19): siRNA sense strand
ugucagaacccguggaugu

SEQ ID NO: 880588 - RNA, 19 nt, Homo sapiens
  misc_RNA (1)...(19): siRNA sense strand
ccguggauguguacaguga

SEQ ID NO: 880589 - RNA, 19 nt, Homo sapiens
  misc_RNA (1)...(19): siRNA sense strand
uccagacgcccauaacgua

SEQ ID NO: 880590 - RNA, 19 nt, Homo sapiens
  misc_RNA (1)...(19): siRNA sense strand
gcagaaagucaaaacgaaa

SEQ ID NO: 880591 - RNA, 19 nt, Homo sapiens
  misc_RNA (1)...(19): siRNA sense strand
caacaccggagucaucucu

SEQ ID NO: 880592 - RNA, 19 nt, Homo sapiens
  misc_RNA (1)...(19): siRNA sense strand
ggaauuccagacgcccaua

SEQ ID NO: 880593 - RNA, 19 nt, Homo sapiens
  misc_RNA (1)...(19): siRNA sense strand
ccgugugccuagaggaauu

SEQ ID NO: 880594 - RNA, 19 nt, Homo sapiens
  misc_RNA (1)...(19): siRNA sense strand
ccgcaacaccggagucauc

SEQ ID NO: 880595 - RNA, 19 nt, Homo sapiens
  misc_RNA (1)...(19): siRNA sense strand
ccagacgcccauaacguau

SEQ ID NO: 880596 - RNA, 19 nt, Homo sapiens
  misc_RNA (1)...(19): siRNA sense strand
ggaugaggcuuucuucaaa

SEQ ID NO: 880597 - RNA, 19 nt, Homo sapiens
  misc_RNA (1)...(19): siRNA sense strand
caaagaggauggagugaga

SEQ ID NO: 880598 - RNA, 19 nt, Homo sapiens
  misc_RNA (1)...(19): siRNA sense strand
agacacggcuuccugauug

SEQ ID NO: 880599 - RNA, 19 nt, Homo sapiens
  misc_RNA (1)...(19): siRNA sense strand
ggacugacaccauguucaa

SEQ ID NO: 880600 - RNA, 19 nt, Homo sapiens
  misc_RNA (1)...(19): siRNA sense strand
gaccaaggccuacgagaga

SEQ ID NO: 880601 - RNA, 19 nt, Homo sapiens
  misc_RNA (1)...(19): siRNA sense strand
ggagugagagacagccuaa

SEQ ID NO: 880602 - RNA, 19 nt, Homo sapiens
  misc_RNA (1)...(19): siRNA sense strand
gcagugccguccucucucu

SEQ ID NO: 880603 - RNA, 19 nt, Homo sapiens
  misc_RNA (1)...(19): siRNA sense strand
gaugaggcuuucuucaaac

SEQ ID NO: 880604 - RNA, 19 nt, Homo sapiens
  misc_RNA (1)...(19): siRNA sense strand
gcacggaagccuccagcau

SEQ ID NO: 880605 - RNA, 19 nt, Homo sapiens
  misc_RNA (1)...(19): siRNA sense strand
gggccaaggaugaggcuuu

SEQ ID NO: 880606 - RNA, 19 nt, Homo sapiens
  misc_RNA (1)...(19): siRNA sense strand
gaggcuuucuucaaacuac

SEQ ID NO: 880607 - RNA, 19 nt, Homo sapiens
  misc_RNA (1)...(19): siRNA sense strand
ccuaacaauuugccuccuu

SEQ ID NO: 880608 - RNA, 19 nt, Homo sapiens
  misc_RNA (1)...(19): siRNA sense strand
ggccaaggaugaggcuuuc

SEQ ID NO: 880609 - RNA, 19 nt, Homo sapiens
  misc_RNA (1)...(19): siRNA sense strand
gaggauggagugagagaca

SEQ ID NO: 880610 - RNA, 19 nt, Homo sapiens
  misc_RNA (1)...(19): siRNA sense strand
aaacuacugcccuugaugu

SEQ ID NO: 880611 - RNA, 19 nt, Homo sapiens
  misc_RNA (1)...(19): siRNA sense strand
ccaaggaugaggcuuucuu

SEQ ID NO: 880612 - RNA, 19 nt, Homo sapiens
  misc_RNA (1)...(19): siRNA sense strand
ugagagacagccuaagugu

SEQ ID NO: 880613 - RNA, 19 nt, Homo sapiens
  misc_RNA (1)...(19): siRNA sense strand
cagacacggcuuccugauu

SEQ ID NO: 880614 - RNA, 19 nt, Homo sapiens
  misc_RNA (1)...(19): siRNA sense strand
gccacacgcccuaaugaug

SEQ ID NO: 880615 - RNA, 19 nt, Homo sapiens
  misc_RNA (1)...(19): siRNA sense strand
caaacuacugcccuugaug

SEQ ID NO: 880616 - RNA, 19 nt, Homo sapiens
  misc_RNA (1)...(19): siRNA sense strand
aaagcagggccaaggauga

SEQ ID NO: 880617 - RNA, 19 nt, Homo sapiens
  misc_RNA (1)...(19): siRNA sense strand
gccguccucucucuucuag

SEQ ID NO: 880618 - RNA, 19 nt, Homo sapiens
  misc_RNA (1)...(19): siRNA sense strand
caaggaugaggcuuucuuc

SEQ ID NO: 880619 - RNA, 19 nt, Homo sapiens
  misc_RNA (1)...(19): siRNA sense strand
cguccucucucuucuaggu

SEQ ID NO: 880620 - RNA, 19 nt, Homo sapiens
  misc_RNA (1)...(19): siRNA sense strand
gugagagacagccuaagug

SEQ ID NO: 880621 - RNA, 19 nt, Homo sapiens
  misc_RNA (1)...(19): siRNA sense strand
gcagacacggcuuccugau

SEQ ID NO: 880622 - RNA, 19 nt, Homo sapiens
  misc_RNA (1)...(19): siRNA sense strand
aggaugaggcuuucuucaa

SEQ ID NO: 880623 - RNA, 19 nt, Homo sapiens
  misc_RNA (1)...(19): siRNA sense strand
gcuuccugauugcaccuaa

SEQ ID NO: 880624 - RNA, 19 nt, Homo sapiens
  misc_RNA (1)...(19): siRNA sense strand
gugcuuuucucucuaauaa

SEQ ID NO: 880625 - RNA, 19 nt, Homo sapiens
  misc_RNA (1)...(19): siRNA sense strand
caucuacuuugaaacaucu

SEQ ID NO: 880626 - RNA, 19 nt, Homo sapiens
  misc_RNA (1)...(19): siRNA sense strand
guugugcgcccauuucuca

SEQ ID NO: 880627 - RNA, 19 nt, Homo sapiens
  misc_RNA (1)...(19): siRNA sense strand
gcgcccauuucucagauca

SEQ ID NO: 880628 - RNA, 19 nt, Homo sapiens
  misc_RNA (1)...(19): siRNA sense strand
ggcgagaccaggagugaug

SEQ ID NO: 880629 - RNA, 19 nt, Homo sapiens
  misc_RNA (1)...(19): siRNA sense strand
gcccauuucucagaucaag

SEQ ID NO: 880630 - RNA, 19 nt, Homo sapiens
  misc_RNA (1)...(19): siRNA sense strand
ggccgaggcaggaagauuc

SEQ ID NO: 880631 - RNA, 19 nt, Homo sapiens
  misc_RNA (1)...(19): siRNA sense strand
ccauuucucagaucaagga

SEQ ID NO: 880632 - RNA, 19 nt, Homo sapiens
  misc_RNA (1)...(19): siRNA sense strand
gcaaaugugcuucaucuaa

SEQ ID NO: 880633 - RNA, 19 nt, Homo sapiens
  misc_RNA (1)...(19): siRNA sense strand
caagagaggucccaagcaa

SEQ ID NO: 880634 - RNA, 19 nt, Homo sapiens
  misc_RNA (1)...(19): siRNA sense strand
gaagccaucuugaacacaa

SEQ ID NO: 880635 - RNA, 19 nt, Homo sapiens
  misc_RNA (1)...(19): siRNA sense strand
gagaccaucugcccgagua

SEQ ID NO: 880636 - RNA, 19 nt, Homo sapiens
  misc_RNA (1)...(19): siRNA sense strand
ccaacaggcucacagagaa

SEQ ID NO: 880637 - RNA, 19 nt, Homo sapiens
  misc_RNA (1)...(19): siRNA sense strand
caaaugugcuucaucuaag

SEQ ID NO: 880638 - RNA, 19 nt, Homo sapiens
  misc_RNA (1)...(19): siRNA sense strand
uggcuaaccuggaguguga

SEQ ID NO: 880639 - RNA, 19 nt, Homo sapiens
  misc_RNA (1)...(19): siRNA sense strand
gaaguuagacaagaugguu

SEQ ID NO: 880640 - RNA, 19 nt, Homo sapiens
  misc_RNA (1)...(19): siRNA sense strand
gcuuucggcuggaggagua

SEQ ID NO: 880641 - RNA, 19 nt, Homo sapiens
  misc_RNA (1)...(19): siRNA sense strand
ccagggcagugauugacua

SEQ ID NO: 880642 - RNA, 19 nt, Homo sapiens
  misc_RNA (1)...(19): siRNA sense strand
gagcagucacuuacagaaa

SEQ ID NO: 880643 - RNA, 19 nt, Homo sapiens
  misc_RNA (1)...(19): siRNA sense strand
agagaaguguuguguggaa

SEQ ID NO: 880644 - RNA, 19 nt, Homo sapiens
  misc_RNA (1)...(19): siRNA sense strand
gagaaguguuguguggaaa

SEQ ID NO: 880645 - RNA, 19 nt, Homo sapiens
  misc_RNA (1)...(19): siRNA sense strand
gaaauccgacaacauccuu

SEQ ID NO: 880646 - RNA, 19 nt, Homo sapiens
  misc_RNA (1)...(19): siRNA sense strand
gcugcugccuggcugauga

SEQ ID NO: 880647 - RNA, 19 nt, Homo sapiens
  misc_RNA (1)...(19): siRNA sense strand
gccaguaccuuugugugaa

SEQ ID NO: 880648 - RNA, 19 nt, Homo sapiens
  misc_RNA (1)...(19): siRNA sense strand
ccgcaaaugugcuucaucu

SEQ ID NO: 880649 - RNA, 19 nt, Homo sapiens
  misc_RNA (1)...(19): siRNA sense strand
augaagaacuaucccugua

SEQ ID NO: 880650 - RNA, 19 nt, Homo sapiens
  misc_RNA (1)...(19): siRNA sense strand
caggagauccaggcaauuu

SEQ ID NO: 880651 - RNA, 19 nt, Homo sapiens
  misc_RNA (1)...(19): siRNA sense strand
gagcaucggccugcaguug

SEQ ID NO: 880652 - RNA, 19 nt, Homo sapiens
  misc_RNA (1)...(19): siRNA sense strand
gcacagagaccugaaaucc

SEQ ID NO: 880653 - RNA, 19 nt, Homo sapiens
  misc_RNA (1)...(19): siRNA sense strand
ggacgcuguuccucguuau

SEQ ID NO: 880654 - RNA, 19 nt, Homo sapiens
  misc_RNA (1)...(19): siRNA sense strand
ggagccaucgccuaugaaa

SEQ ID NO: 880655 - RNA, 19 nt, Homo sapiens
  misc_RNA (1)...(19): siRNA sense strand
cggacgcuguuccucguua

SEQ ID NO: 880656 - RNA, 19 nt, Homo sapiens
  misc_RNA (1)...(19): siRNA sense strand
gaaaucuucgggcuuguca

SEQ ID NO: 880657 - RNA, 19 nt, Homo sapiens
  misc_RNA (1)...(19): siRNA sense strand
gaccugaaauccgacaaca

SEQ ID NO: 880658 - RNA, 19 nt, Homo sapiens
  misc_RNA (1)...(19): siRNA sense strand
caucgccuaugaaaucuuc

SEQ ID NO: 880659 - RNA, 19 nt, Homo sapiens
  misc_RNA (1)...(19): siRNA sense strand
ugggagccaucgccuauga

SEQ ID NO: 880660 - RNA, 19 nt, Homo sapiens
  misc_RNA (1)...(19): siRNA sense strand
gggcagugauugacuacag

SEQ ID NO: 880661 - RNA, 19 nt, Homo sapiens
  misc_RNA (1)...(19): siRNA sense strand
gucaggagauccaggcaau

SEQ ID NO: 880662 - RNA, 19 nt, Homo sapiens
  misc_RNA (1)...(19): siRNA sense strand
ggagcagucacuuacagaa

SEQ ID NO: 880663 - RNA, 19 nt, Homo sapiens
  misc_RNA (1)...(19): siRNA sense strand
gcgagaggccagcaagaga

SEQ ID NO: 880664 - RNA, 19 nt, Homo sapiens
  misc_RNA (1)...(19): siRNA sense strand
gccaacaggcucacagaga

SEQ ID NO: 880665 - RNA, 19 nt, Homo sapiens
  misc_RNA (1)...(19): siRNA sense strand
ccgaguagccgcaaaugug

SEQ ID NO: 880666 - RNA, 19 nt, Homo sapiens
  misc_RNA (1)...(19): siRNA sense strand
auagggcaguccauuggua

SEQ ID NO: 880667 - RNA, 19 nt, Homo sapiens
  misc_RNA (1)...(19): siRNA sense strand
gcgaagccaucuugaacac

SEQ ID NO: 880668 - RNA, 19 nt, Homo sapiens
  misc_RNA (1)...(19): siRNA sense strand
uggaacaucucggcagguu

SEQ ID NO: 880669 - RNA, 19 nt, Homo sapiens
  misc_RNA (1)...(19): siRNA sense strand
ccugaaauccgacaacauc

SEQ ID NO: 880670 - RNA, 19 nt, Homo sapiens
  misc_RNA (1)...(19): siRNA sense strand
ggcuggugaucgcagauuu

SEQ ID NO: 880671 - RNA, 19 nt, Homo sapiens
  misc_RNA (1)...(19): siRNA sense strand
cggaaacggcugucugaug

SEQ ID NO: 880672 - RNA, 19 nt, Homo sapiens
  misc_RNA (1)...(19): siRNA sense strand
gaagccaccaugccuacau

SEQ ID NO: 880673 - RNA, 19 nt, Homo sapiens
  misc_RNA (1)...(19): siRNA sense strand
ccaagaggcucagcuaccu

SEQ ID NO: 880674 - RNA, 19 nt, Homo sapiens
  misc_RNA (1)...(19): siRNA sense strand
ccuguacccugcgccagua

SEQ ID NO: 880675 - RNA, 19 nt, Homo sapiens
  misc_RNA (1)...(19): siRNA sense strand
aagccaccaugccuacauu

SEQ ID NO: 880676 - RNA, 19 nt, Homo sapiens
  misc_RNA (1)...(19): siRNA sense strand
ggcggaaacggcugucuga

SEQ ID NO: 880677 - RNA, 19 nt, Homo sapiens
  misc_RNA (1)...(19): siRNA sense strand
cuaccaagaggcucagcua

SEQ ID NO: 880678 - RNA, 19 nt, Homo sapiens
  misc_RNA (1)...(19): siRNA sense strand
cagcgaagccaucuugaac

SEQ ID NO: 880679 - RNA, 19 nt, Homo sapiens
  misc_RNA (1)...(19): siRNA sense strand
guauggagcagucacuuac

SEQ ID NO: 880680 - RNA, 19 nt, Homo sapiens
  misc_RNA (1)...(19): siRNA sense strand
ccagcgaagccaucuugaa

SEQ ID NO: 880681 - RNA, 19 nt, Homo sapiens
  misc_RNA (1)...(19): siRNA sense strand
ggccugcaguugcccuuca

SEQ ID NO: 880682 - RNA, 19 nt, Homo sapiens
  misc_RNA (1)...(19): siRNA sense strand
gcgcacagagaccugaaau

SEQ ID NO: 880683 - RNA, 19 nt, Homo sapiens
  misc_RNA (1)...(19): siRNA sense strand
gcuugucaaucccuucuac

SEQ ID NO: 880684 - RNA, 19 nt, Homo sapiens
  misc_RNA (1)...(19): siRNA sense strand
gagaggucccaagcaacua

SEQ ID NO: 880685 - RNA, 19 nt, Homo sapiens
  misc_RNA (1)...(19): siRNA sense strand
aguauggagcagucacuua

SEQ ID NO: 880686 - RNA, 19 nt, Homo sapiens
  misc_RNA (1)...(19): siRNA sense strand
cauauucuagcccugaaga

SEQ ID NO: 880687 - RNA, 19 nt, Homo sapiens
  misc_RNA (1)...(19): siRNA sense strand
agccaucgccuaugaaauc

SEQ ID NO: 880688 - RNA, 19 nt, Homo sapiens
  misc_RNA (1)...(19): siRNA sense strand
gcagucacuuacagaaaau

SEQ ID NO: 880689 - RNA, 19 nt, Homo sapiens
  misc_RNA (1)...(19): siRNA sense strand
ccucuggggugaacauauu

SEQ ID NO: 880690 - RNA, 19 nt, Homo sapiens
  misc_RNA (1)...(19): siRNA sense strand
ccaguaccuuugugugaac

SEQ ID NO: 880691 - RNA, 19 nt, Homo sapiens
  misc_RNA (1)...(19): siRNA sense strand
ggucgacuacccugaugug

SEQ ID NO: 880692 - RNA, 19 nt, Homo sapiens
  misc_RNA (1)...(19): siRNA sense strand
gcuaaccuggagugugaaa

SEQ ID NO: 880693 - RNA, 19 nt, Homo sapiens
  misc_RNA (1)...(19): siRNA sense strand
caacaggcucacagagaag

SEQ ID NO: 880694 - RNA, 19 nt, Homo sapiens
  misc_RNA (1)...(19): siRNA sense strand
gcuggcuccuccaacaauc

SEQ ID NO: 880695 - RNA, 19 nt, Homo sapiens
  misc_RNA (1)...(19): siRNA sense strand
ggaaggcguggaccaucug

SEQ ID NO: 880696 - RNA, 19 nt, Homo sapiens
  misc_RNA (1)...(19): siRNA sense strand
uggaaggcguggaccaucu

SEQ ID NO: 880697 - RNA, 19 nt, Homo sapiens
  misc_RNA (1)...(19): siRNA sense strand
cgccaguaccuuuguguga

SEQ ID NO: 880698 - RNA, 19 nt, Homo sapiens
  misc_RNA (1)...(19): siRNA sense strand
uagggcaguccauugguaa

SEQ ID NO: 880699 - RNA, 19 nt, Homo sapiens
  misc_RNA (1)...(19): siRNA sense strand
caacuacgaugacuacuaa

SEQ ID NO: 880700 - RNA, 19 nt, Homo sapiens
  misc_RNA (1)...(19): siRNA sense strand
gaaauaaacucaagcugau

SEQ ID NO: 880701 - RNA, 19 nt, Homo sapiens
  misc_RNA (1)...(19): siRNA sense strand
uaacagagaucgaaaugga

SEQ ID NO: 880702 - RNA, 19 nt, Homo sapiens
  misc_RNA (1)...(19): siRNA sense strand
gaaauggacaugaauacua

SEQ ID NO: 880703 - RNA, 19 nt, Homo sapiens
  misc_RNA (1)...(19): siRNA sense strand
gaugaagacucugcaauug

SEQ ID NO: 880704 - RNA, 19 nt, Homo sapiens
  misc_RNA (1)...(19): siRNA sense strand
gacaucaccuauuggcuua

SEQ ID NO: 880705 - RNA, 19 nt, Homo sapiens
  misc_RNA (1)...(19): siRNA sense strand
uggcauaaguggaaauaaa

SEQ ID NO: 880706 - RNA, 19 nt, Homo sapiens
  misc_RNA (1)...(19): siRNA sense strand
gaagcgaaauuugaagaug

SEQ ID NO: 880707 - RNA, 19 nt, Homo sapiens
  misc_RNA (1)...(19): siRNA sense strand
ccuauuggcuuaacagaga

SEQ ID NO: 880708 - RNA, 19 nt, Homo sapiens
  misc_RNA (1)...(19): siRNA sense strand
gagaauaaagccaaagaau

SEQ ID NO: 880709 - RNA, 19 nt, Homo sapiens
  misc_RNA (1)...(19): siRNA sense strand
agacuaaaguggccguuga

SEQ ID NO: 880710 - RNA, 19 nt, Homo sapiens
  misc_RNA (1)...(19): siRNA sense strand
aagcgaaauuugaagauga

SEQ ID NO: 880711 - RNA, 19 nt, Homo sapiens
  misc_RNA (1)...(19): siRNA sense strand
aagcaccuguuccaacuaa

SEQ ID NO: 880712 - RNA, 19 nt, Homo sapiens
  misc_RNA (1)...(19): siRNA sense strand
ugacgaagcgaaauuugaa

SEQ ID NO: 880713 - RNA, 19 nt, Homo sapiens
  misc_RNA (1)...(19): siRNA sense strand
ugaagacucugcaauuggu

SEQ ID NO: 880714 - RNA, 19 nt, Homo sapiens
  misc_RNA (1)...(19): siRNA sense strand
cuacaugggcuuugacgaa

SEQ ID NO: 880715 - RNA, 19 nt, Homo sapiens
  misc_RNA (1)...(19): siRNA sense strand
caacgucacuaugaugaag

SEQ ID NO: 880716 - RNA, 19 nt, Homo sapiens
  misc_RNA (1)...(19): siRNA sense strand
ugaauacuauggcgauuac

SEQ ID NO: 880717 - RNA, 19 nt, Homo sapiens
  misc_RNA (1)...(19): siRNA sense strand
ugaugaagacucugcaauu

SEQ ID NO: 880718 - RNA, 19 nt, Homo sapiens
  misc_RNA (1)...(19): siRNA sense strand
uaaaguggccguugaugag

SEQ ID NO: 880719 - RNA, 19 nt, Homo sapiens
  misc_RNA (1)...(19): siRNA sense strand
gcaccuguuccaacuaaga

SEQ ID NO: 880720 - RNA, 19 nt, Homo sapiens
  misc_RNA (1)...(19): siRNA sense strand
ucacuaugaugaagacucu

SEQ ID NO: 880721 - RNA, 19 nt, Homo sapiens
  misc_RNA (1)...(19): siRNA sense strand
gcagugguaccagcaguuu

SEQ ID NO: 880722 - RNA, 19 nt, Homo sapiens
  misc_RNA (1)...(19): siRNA sense strand
cuaaaguggccguugauga

SEQ ID NO: 880723 - RNA, 19 nt, Homo sapiens
  misc_RNA (1)...(19): siRNA sense strand
gggcccagguggcauaagu

SEQ ID NO: 880724 - RNA, 19 nt, Homo sapiens
  misc_RNA (1)...(19): siRNA sense strand
gagccagcgucaacuacga

SEQ ID NO: 880725 - RNA, 19 nt, Homo sapiens
  misc_RNA (1)...(19): siRNA sense strand
ccagguggcauaaguggaa

SEQ ID NO: 880726 - RNA, 19 nt, Homo sapiens
  misc_RNA (1)...(19): siRNA sense strand
gaucgaaauggacaugaau

SEQ ID NO: 880727 - RNA, 19 nt, Homo sapiens
  misc_RNA (1)...(19): siRNA sense strand
ucaacuacgaugacuacua

SEQ ID NO: 880728 - RNA, 19 nt, Homo sapiens
  misc_RNA (1)...(19): siRNA sense strand
cuaccaacgucacuaugau

SEQ ID NO: 880729 - RNA, 19 nt, Homo sapiens
  misc_RNA (1)...(19): siRNA sense strand
ggccguugaugagaauaaa

SEQ ID NO: 880730 - RNA, 19 nt, Homo sapiens
  misc_RNA (1)...(19): siRNA sense strand
agaagcaccuguuccaacu

SEQ ID NO: 880731 - RNA, 19 nt, Homo sapiens
  misc_RNA (1)...(19): siRNA sense strand
gaagcaccuguuccaacua

SEQ ID NO: 880732 - RNA, 19 nt, Homo sapiens
  misc_RNA (1)...(19): siRNA sense strand
cuauggcgauuacuaccaa

SEQ ID NO: 880733 - RNA, 19 nt, Homo sapiens
  misc_RNA (1)...(19): siRNA sense strand
gguaccagcaguuucucua

SEQ ID NO: 880734 - RNA, 19 nt, Homo sapiens
  misc_RNA (1)...(19): siRNA sense strand
ugaugagaauaaagccaaa

SEQ ID NO: 880735 - RNA, 19 nt, Homo sapiens
  misc_RNA (1)...(19): siRNA sense strand
agaucgaaauggacaugaa

SEQ ID NO: 880736 - RNA, 19 nt, Homo sapiens
  misc_RNA (1)...(19): siRNA sense strand
ccagcaguuucucuacaug

SEQ ID NO: 880737 - RNA, 19 nt, Homo sapiens
  misc_RNA (1)...(19): siRNA sense strand
gguggcauaaguggaaaua

SEQ ID NO: 880738 - RNA, 19 nt, Homo sapiens
  misc_RNA (1)...(19): siRNA sense strand
gcauggagccagcgucaac

SEQ ID NO: 880739 - RNA, 19 nt, Homo sapiens
  misc_RNA (1)...(19): siRNA sense strand
caugaauacuauggcgauu

SEQ ID NO: 880740 - RNA, 19 nt, Homo sapiens
  misc_RNA (1)...(19): siRNA sense strand
ugagaauaaagccaaagaa

SEQ ID NO: 880741 - RNA, 19 nt, Homo sapiens
  misc_RNA (1)...(19): siRNA sense strand
aauacuauggcgauuacua

SEQ ID NO: 880742 - RNA, 19 nt, Homo sapiens
  misc_RNA (1)...(19): siRNA sense strand
uaccagcaguuucucuaca

SEQ ID NO: 880743 - RNA, 19 nt, Homo sapiens
  misc_RNA (1)...(19): siRNA sense strand
aaacgagaagcaccuguuc

SEQ ID NO: 880744 - RNA, 19 nt, Homo sapiens
  misc_RNA (1)...(19): siRNA sense strand
uaaagccaaagaauuccuu

SEQ ID NO: 880745 - RNA, 19 nt, Homo sapiens
  misc_RNA (1)...(19): siRNA sense strand
ggcauaaguggaaauaaac

SEQ ID NO: 880746 - RNA, 19 nt, Homo sapiens
  misc_RNA (1)...(19): siRNA sense strand
gcauaaguggaaauaaacu

SEQ ID NO: 880747 - RNA, 19 nt, Homo sapiens
  misc_RNA (1)...(19): siRNA sense strand
gagaucgaaauggacauga

SEQ ID NO: 880748 - RNA, 19 nt, Homo sapiens
  misc_RNA (1)...(19): siRNA sense strand
cgaagcgaaauuugaagau

SEQ ID NO: 880749 - RNA, 19 nt, Homo sapiens
  misc_RNA (1)...(19): siRNA sense strand
ccgaggugcagcaguggua

SEQ ID NO: 880750 - RNA, 19 nt, Homo sapiens
  misc_RNA (1)...(19): siRNA sense strand
gcacaaccugcaacuguaa

SEQ ID NO: 880751 - RNA, 19 nt, Homo sapiens
  misc_RNA (1)...(19): siRNA sense strand
caaaggaggcucagacaag

SEQ ID NO: 880752 - RNA, 19 nt, Homo sapiens
  misc_RNA (1)...(19): siRNA sense strand
gcaaaggaggcucagacaa

SEQ ID NO: 880753 - RNA, 19 nt, Homo sapiens
  misc_RNA (1)...(19): siRNA sense strand
aaaggaggcucagacaagu

SEQ ID NO: 880754 - RNA, 19 nt, Homo sapiens
  misc_RNA (1)...(19): siRNA sense strand
cugcaugucuggaggaauc

SEQ ID NO: 880755 - RNA, 19 nt, Homo sapiens
  misc_RNA (1)...(19): siRNA sense strand
gggaaugugucugcauguc

SEQ ID NO: 880756 - RNA, 19 nt, Homo sapiens
  misc_RNA (1)...(19): siRNA sense strand
ggaaugugucugcaugucu

SEQ ID NO: 880757 - RNA, 19 nt, Homo sapiens
  misc_RNA (1)...(19): siRNA sense strand
uguaaaacaugucggaaga

SEQ ID NO: 880758 - RNA, 19 nt, Homo sapiens
  misc_RNA (1)...(19): siRNA sense strand
gaaggcagcugcucagaaa

SEQ ID NO: 880759 - RNA, 19 nt, Homo sapiens
  misc_RNA (1)...(19): siRNA sense strand
ccacgaacaucaggaauua

SEQ ID NO: 880760 - RNA, 19 nt, Homo sapiens
  misc_RNA (1)...(19): siRNA sense strand
aaacagggcgucuuuauuu

SEQ ID NO: 880761 - RNA, 19 nt, Homo sapiens
  misc_RNA (1)...(19): siRNA sense strand
guaaagcucuucaccuaug

SEQ ID NO: 880762 - RNA, 19 nt, Homo sapiens
  misc_RNA (1)...(19): siRNA sense strand
ggcacacgcuccugaauuu

SEQ ID NO: 880763 - RNA, 19 nt, Homo sapiens
  misc_RNA (1)...(19): siRNA sense strand
acaagcaggugaccaagaa

SEQ ID NO: 880764 - RNA, 19 nt, Homo sapiens
  misc_RNA (1)...(19): siRNA sense strand
ucaccuauguaacuaugua

SEQ ID NO: 880765 - RNA, 19 nt, Homo sapiens
  misc_RNA (1)...(19): siRNA sense strand
gaagccguguucugauuau

SEQ ID NO: 880766 - RNA, 19 nt, Homo sapiens
  misc_RNA (1)...(19): siRNA sense strand
gcccugaccuucacugugu

SEQ ID NO: 880767 - RNA, 19 nt, Homo sapiens
  misc_RNA (1)...(19): siRNA sense strand
cuguaaagcucuucaccua

SEQ ID NO: 880768 - RNA, 19 nt, Homo sapiens
  misc_RNA (1)...(19): siRNA sense strand
gcccaaggguaaauugcua

SEQ ID NO: 880769 - RNA, 19 nt, Homo sapiens
  misc_RNA (1)...(19): siRNA sense strand
gcaucaaucgcaccaagua

SEQ ID NO: 880770 - RNA, 19 nt, Homo sapiens
  misc_RNA (1)...(19): siRNA sense strand
gaagguuccucagccaguu

SEQ ID NO: 880771 - RNA, 19 nt, Homo sapiens
  misc_RNA (1)...(19): siRNA sense strand
ccacaagccuucagcaaaa

SEQ ID NO: 880772 - RNA, 19 nt, Homo sapiens
  misc_RNA (1)...(19): siRNA sense strand
gaaauugcuucugggaaca

SEQ ID NO: 880773 - RNA, 19 nt, Homo sapiens
  misc_RNA (1)...(19): siRNA sense strand
ccaggaacaucuacaagca

SEQ ID NO: 880774 - RNA, 19 nt, Homo sapiens
  misc_RNA (1)...(19): siRNA sense strand
gcagaacgagcacucauuc

SEQ ID NO: 880775 - RNA, 19 nt, Homo sapiens
  misc_RNA (1)...(19): siRNA sense strand
cuugggaccuggauuuauu

SEQ ID NO: 880776 - RNA, 19 nt, Homo sapiens
  misc_RNA (1)...(19): siRNA sense strand
ggaaggcagcugcucagaa

SEQ ID NO: 880777 - RNA, 19 nt, Homo sapiens
  misc_RNA (1)...(19): siRNA sense strand
cagcagaggagcccgagua

SEQ ID NO: 880778 - RNA, 19 nt, Homo sapiens
  misc_RNA (1)...(19): siRNA sense strand
cacaggaucugaagacagu

SEQ ID NO: 880779 - RNA, 19 nt, Homo sapiens
  misc_RNA (1)...(19): siRNA sense strand
uuauugaccugcucagaga

SEQ ID NO: 880780 - RNA, 19 nt, Homo sapiens
  misc_RNA (1)...(19): siRNA sense strand
gaaaacagggcgucuuuau

SEQ ID NO: 880781 - RNA, 19 nt, Homo sapiens
  misc_RNA (1)...(19): siRNA sense strand
guaucaauguaaacaggaa

SEQ ID NO: 880782 - RNA, 19 nt, Homo sapiens
  misc_RNA (1)...(19): siRNA sense strand
uagaaggccugccguuugg

SEQ ID NO: 880783 - RNA, 19 nt, Homo sapiens
  misc_RNA (1)...(19): siRNA sense strand
gguacgagcugcgcacaca

SEQ ID NO: 880784 - RNA, 19 nt, Homo sapiens
  misc_RNA (1)...(19): siRNA sense strand
cagggcgucuuuauuuguu

SEQ ID NO: 880785 - RNA, 19 nt, Homo sapiens
  misc_RNA (1)...(19): siRNA sense strand
ggagugaccgccaggaaca

SEQ ID NO: 880786 - RNA, 19 nt, Homo sapiens
  misc_RNA (1)...(19): siRNA sense strand
cuagaaggccugccguuug

SEQ ID NO: 880787 - RNA, 19 nt, Homo sapiens
  misc_RNA (1)...(19): siRNA sense strand
gcuagaaggccugccguuu

SEQ ID NO: 880788 - RNA, 19 nt, Homo sapiens
  misc_RNA (1)...(19): siRNA sense strand
gaaccacucgcggcugaaa

SEQ ID NO: 880789 - RNA, 19 nt, Homo sapiens
  misc_RNA (1)...(19): siRNA sense strand
uuuccuaggcaacaaauua

SEQ ID NO: 880790 - RNA, 19 nt, Homo sapiens
  misc_RNA (1)...(19): siRNA sense strand
aguuggagcugcagaccua

SEQ ID NO: 880791 - RNA, 19 nt, Homo sapiens
  misc_RNA (1)...(19): siRNA sense strand
cggcugaaauccagaugug

SEQ ID NO: 880792 - RNA, 19 nt, Homo sapiens
  misc_RNA (1)...(19): siRNA sense strand
gagggaaggcugcgugcuu

SEQ ID NO: 880793 - RNA, 19 nt, Homo sapiens
  misc_RNA (1)...(19): siRNA sense strand
guucuugggaccuggauuu

SEQ ID NO: 880794 - RNA, 19 nt, Homo sapiens
  misc_RNA (1)...(19): siRNA sense strand
cgaguacgccuaccacauc

SEQ ID NO: 880795 - RNA, 19 nt, Homo sapiens
  misc_RNA (1)...(19): siRNA sense strand
ccacgccaguugccuguca

SEQ ID NO: 880796 - RNA, 19 nt, Homo sapiens
  misc_RNA (1)...(19): siRNA sense strand
uaaagcucuucaccuaugu

SEQ ID NO: 880797 - RNA, 19 nt, Homo sapiens
  misc_RNA (1)...(19): siRNA sense strand
gcucuucaccuauguaacu

SEQ ID NO: 880798 - RNA, 19 nt, Homo sapiens
  misc_RNA (1)...(19): siRNA sense strand
ggucaccuguguguacuuc

SEQ ID NO: 880799 - RNA, 19 nt, Homo sapiens
  misc_RNA (1)...(19): siRNA sense strand
ccucaucaacgucagcuuu

SEQ ID NO: 880800 - RNA, 19 nt, Homo sapiens
  misc_RNA (1)...(19): siRNA sense strand
gguuugaagaggucacuuu

SEQ ID NO: 880801 - RNA, 19 nt, Homo sapiens
  misc_RNA (1)...(19): siRNA sense strand
aacagggcgucuuuauuug

SEQ ID NO: 880802 - RNA, 19 nt, Homo sapiens
  misc_RNA (1)...(19): siRNA sense strand
gccacgaacaucaggaauu

SEQ ID NO: 880803 - RNA, 19 nt, Homo sapiens
  misc_RNA (1)...(19): siRNA sense strand
gccuacuccugccuucuuu

SEQ ID NO: 880804 - RNA, 19 nt, Homo sapiens
  misc_RNA (1)...(19): siRNA sense strand
gugcucggaugcagcucua

SEQ ID NO: 880805 - RNA, 19 nt, Homo sapiens
  misc_RNA (1)...(19): siRNA sense strand
gggcugacccucgaagaug

SEQ ID NO: 880806 - RNA, 19 nt, Homo sapiens
  misc_RNA (1)...(19): siRNA sense strand
cgacuuuccuaggcaacaa

SEQ ID NO: 880807 - RNA, 19 nt, Homo sapiens
  misc_RNA (1)...(19): siRNA sense strand
aaggguaaauugcuagaag

SEQ ID NO: 880808 - RNA, 19 nt, Homo sapiens
  misc_RNA (1)...(19): siRNA sense strand
uuuauuuguucccgacuuu

SEQ ID NO: 880809 - RNA, 19 nt, Homo sapiens
  misc_RNA (1)...(19): siRNA sense strand
caauguaaacaggaacgua

SEQ ID NO: 880810 - RNA, 19 nt, Homo sapiens
  misc_RNA (1)...(19): siRNA sense strand
ccaaggaggagaagguauc

SEQ ID NO: 880811 - RNA, 19 nt, Homo sapiens
  misc_RNA (1)...(19): siRNA sense strand
cuccugccuucuuucaaua

SEQ ID NO: 880812 - RNA, 19 nt, Homo sapiens
  misc_RNA (1)...(19): siRNA sense strand
acgaaacuacuguguggua

SEQ ID NO: 880813 - RNA, 19 nt, Homo sapiens
  misc_RNA (1)...(19): siRNA sense strand
cacagucccugcccuuugg

SEQ ID NO: 880814 - RNA, 19 nt, Homo sapiens
  misc_RNA (1)...(19): siRNA sense strand
gacacaggaucugaagaca

SEQ ID NO: 880815 - RNA, 19 nt, Homo sapiens
  misc_RNA (1)...(19): siRNA sense strand
acaccucacugugcaggaa

SEQ ID NO: 880816 - RNA, 19 nt, Homo sapiens
  misc_RNA (1)...(19): siRNA sense strand
cugccaugcucgucuguga

SEQ ID NO: 880817 - RNA, 19 nt, Homo sapiens
  misc_RNA (1)...(19): siRNA sense strand
cggcacacgcuccugaauu

SEQ ID NO: 880818 - RNA, 19 nt, Homo sapiens
  misc_RNA (1)...(19): siRNA sense strand
caacuuugcagcgcucaug

SEQ ID NO: 880819 - RNA, 19 nt, Homo sapiens
  misc_RNA (1)...(19): siRNA sense strand
acuccugccuucuuucaau

SEQ ID NO: 880820 - RNA, 19 nt, Homo sapiens
  misc_RNA (1)...(19): siRNA sense strand
acacagucccugcccuuug

SEQ ID NO: 880821 - RNA, 19 nt, Homo sapiens
  misc_RNA (1)...(19): siRNA sense strand
cgacacaggaucugaagac

SEQ ID NO: 880822 - RNA, 19 nt, Homo sapiens
  misc_RNA (1)...(19): siRNA sense strand
gaaauccagaugugcuucu

SEQ ID NO: 880823 - RNA, 19 nt, Homo sapiens
  misc_RNA (1)...(19): siRNA sense strand
aggaggagaagguaucuga

SEQ ID NO: 880824 - RNA, 19 nt, Homo sapiens
  misc_RNA (1)...(19): siRNA sense strand
gagcaaagggugggagaac

SEQ ID NO: 880825 - RNA, 19 nt, Homo sapiens
  misc_RNA (1)...(19): siRNA sense strand
cugcaucucuggugaaucc

SEQ ID NO: 880826 - RNA, 19 nt, Homo sapiens
  misc_RNA (1)...(19): siRNA sense strand
aauguaaacaggaacguau

SEQ ID NO: 880827 - RNA, 19 nt, Homo sapiens
  misc_RNA (1)...(19): siRNA sense strand
cuucaccuauguaacuaug

SEQ ID NO: 880828 - RNA, 19 nt, Homo sapiens
  misc_RNA (1)...(19): siRNA sense strand
uccacaagccuucagcaaa

SEQ ID NO: 880829 - RNA, 19 nt, Homo sapiens
  misc_RNA (1)...(19): siRNA sense strand
gcacacgcuccugaauuuc

SEQ ID NO: 880830 - RNA, 19 nt, Homo sapiens
  misc_RNA (1)...(19): siRNA sense strand
ggaaggcugcgugcuugug

SEQ ID NO: 880831 - RNA, 19 nt, Homo sapiens
  misc_RNA (1)...(19): siRNA sense strand
acaccacagucaccagaca

SEQ ID NO: 880832 - RNA, 19 nt, Homo sapiens
  misc_RNA (1)...(19): siRNA sense strand
uuaccuccgucuugcaauc

SEQ ID NO: 880833 - RNA, 19 nt, Homo sapiens
  misc_RNA (1)...(19): siRNA sense strand
ccuccgugcugcagaacga

SEQ ID NO: 880834 - RNA, 19 nt, Homo sapiens
  misc_RNA (1)...(19): siRNA sense strand
gcucacgcuuccgcaacuu

SEQ ID NO: 880835 - RNA, 19 nt, Homo sapiens
  misc_RNA (1)...(19): siRNA sense strand
ccuauguaacuauguauca

SEQ ID NO: 880836 - RNA, 19 nt, Homo sapiens
  misc_RNA (1)...(19): siRNA sense strand
gccgcuuccucacuguaaa

SEQ ID NO: 880837 - RNA, 19 nt, Homo sapiens
  misc_RNA (1)...(19): siRNA sense strand
gagccgcuuccucacugua

SEQ ID NO: 880838 - RNA, 19 nt, Homo sapiens
  misc_RNA (1)...(19): siRNA sense strand
cagcucuacacgaggauuu

SEQ ID NO: 880839 - RNA, 19 nt, Homo sapiens
  misc_RNA (1)...(19): siRNA sense strand
gacacagucccugcccuuu

SEQ ID NO: 880840 - RNA, 19 nt, Homo sapiens
  misc_RNA (1)...(19): siRNA sense strand
ccuucacgcuguuccuguu

SEQ ID NO: 880841 - RNA, 19 nt, Homo sapiens
  misc_RNA (1)...(19): siRNA sense strand
gcuggacggacaagaagug

SEQ ID NO: 880842 - RNA, 19 nt, Homo sapiens
  misc_RNA (1)...(19): siRNA sense strand
cagaaaacagggcgucuuu

SEQ ID NO: 880843 - RNA, 19 nt, Homo sapiens
  misc_RNA (1)...(19): siRNA sense strand
gacaaggucuucaaucaaa

SEQ ID NO: 880844 - RNA, 19 nt, Homo sapiens
  misc_RNA (1)...(19): siRNA sense strand
ugagaaaccuuacaaaugu

SEQ ID NO: 880845 - RNA, 19 nt, Homo sapiens
  misc_RNA (1)...(19): siRNA sense strand
gagagaagccuuacaaaug

SEQ ID NO: 880846 - RNA, 19 nt, Homo sapiens
  misc_RNA (1)...(19): siRNA sense strand
gcaguaaggucuucaguca

SEQ ID NO: 880847 - RNA, 19 nt, Homo sapiens
  misc_RNA (1)...(19): siRNA sense strand
gagagaagccuuacaaaug

SEQ ID NO: 880848 - RNA, 19 nt, Homo sapiens
  misc_RNA (1)...(19): siRNA sense strand
gagagaagccuuacaaaug

SEQ ID NO: 880849 - RNA, 19 nt, Homo sapiens
  misc_RNA (1)...(19): siRNA sense strand
ucacaaaugucaugaaugu

SEQ ID NO: 880850 - RNA, 19 nt, Homo sapiens
  misc_RNA (1)...(19): siRNA sense strand
gagagaagccucacaaaug

SEQ ID NO: 880851 - RNA, 19 nt, Homo sapiens
  misc_RNA (1)...(19): siRNA sense strand
aaagaaaucucaugagugu

SEQ ID NO: 880852 - RNA, 19 nt, Homo sapiens
  misc_RNA (1)...(19): siRNA sense strand
agagaaaccuuaugaaugu

SEQ ID NO: 880853 - RNA, 19 nt, Homo sapiens
  misc_RNA (1)...(19): siRNA sense strand
guucaaagcuugcacaaca

SEQ ID NO: 880854 - RNA, 19 nt, Homo sapiens
  misc_RNA (1)...(19): siRNA sense strand
gagagaaaccuuacaaaug

SEQ ID NO: 880855 - RNA, 19 nt, Homo sapiens
  misc_RNA (1)...(19): siRNA sense strand
gagagaaaccuuacaguug

SEQ ID NO: 880856 - RNA, 19 nt, Homo sapiens
  misc_RNA (1)...(19): siRNA sense strand
ggcaagaucuucacucaga

SEQ ID NO: 880857 - RNA, 19 nt, Homo sapiens
  misc_RNA (1)...(19): siRNA sense strand
caucauaccuuacaagaca

SEQ ID NO: 880858 - RNA, 19 nt, Homo sapiens
  misc_RNA (1)...(19): siRNA sense strand
gaaaucagaccuuauacga

SEQ ID NO: 880859 - RNA, 19 nt, Homo sapiens
  misc_RNA (1)...(19): siRNA sense strand
gagagaaaccuuaugaaug

SEQ ID NO: 880860 - RNA, 19 nt, Homo sapiens
  misc_RNA (1)...(19): siRNA sense strand
ugagaagccuuacaaaugu

SEQ ID NO: 880861 - RNA, 19 nt, Homo sapiens
  misc_RNA (1)...(19): siRNA sense strand
aaucaagcaucauaccuua

SEQ ID NO: 880862 - RNA, 19 nt, Homo sapiens
  misc_RNA (1)...(19): siRNA sense strand
ucagaaaucagaccuuaua

SEQ ID NO: 880863 - RNA, 19 nt, Homo sapiens
  misc_RNA (1)...(19): siRNA sense strand
uaaagaauguggcaaaguc

SEQ ID NO: 880864 - RNA, 19 nt, Homo sapiens
  misc_RNA (1)...(19): siRNA sense strand
uaaagaauguggcaagauc

SEQ ID NO: 880865 - RNA, 19 nt, Homo sapiens
  misc_RNA (1)...(19): siRNA sense strand
gaaaagaaaucucaugagu

SEQ ID NO: 880866 - RNA, 19 nt, Homo sapiens
  misc_RNA (1)...(19): siRNA sense strand
ggagagaaaccuuacaguu

SEQ ID NO: 880867 - RNA, 19 nt, Homo sapiens
  misc_RNA (1)...(19): siRNA sense strand
gcacagcguuuagagaguu

SEQ ID NO: 880868 - RNA, 19 nt, Homo sapiens
  misc_RNA (1)...(19): siRNA sense strand
caucagagaauucauacua

SEQ ID NO: 880869 - RNA, 19 nt, Homo sapiens
  misc_RNA (1)...(19): siRNA sense strand
ggagagaaaccuuacaaau

SEQ ID NO: 880870 - RNA, 19 nt, Homo sapiens
  misc_RNA (1)...(19): siRNA sense strand
ggagagaaaccuuaugaau

SEQ ID NO: 880871 - RNA, 19 nt, Homo sapiens
  misc_RNA (1)...(19): siRNA sense strand
agagaagccuuacaaaugu

SEQ ID NO: 880872 - RNA, 19 nt, Homo sapiens
  misc_RNA (1)...(19): siRNA sense strand
agagaagccuuacaaaugu

SEQ ID NO: 880873 - RNA, 19 nt, Homo sapiens
  misc_RNA (1)...(19): siRNA sense strand
agagaagccuuacaaaugu

SEQ ID NO: 880874 - RNA, 19 nt, Homo sapiens
  misc_RNA (1)...(19): siRNA sense strand
gacaaggucuuucgaagca

SEQ ID NO: 880875 - RNA, 19 nt, Homo sapiens
  misc_RNA (1)...(19): siRNA sense strand
gagaaaagccuuacaaaug

SEQ ID NO: 880876 - RNA, 19 nt, Homo sapiens
  misc_RNA (1)...(19): siRNA sense strand
ggagagaagccuuacaaau

SEQ ID NO: 880877 - RNA, 19 nt, Homo sapiens
  misc_RNA (1)...(19): siRNA sense strand
ggagagaagccuuacaaau

SEQ ID NO: 880878 - RNA, 19 nt, Homo sapiens
  misc_RNA (1)...(19): siRNA sense strand
ggagagaagccuuacaaau

SEQ ID NO: 880879 - RNA, 19 nt, Homo sapiens
  misc_RNA (1)...(19): siRNA sense strand
agagaagccucacaaaugu

SEQ ID NO: 880880 - RNA, 19 nt, Homo sapiens
  misc_RNA (1)...(19): siRNA sense strand
agagaaaccuuacaaaugc

SEQ ID NO: 880881 - RNA, 19 nt, Homo sapiens
  misc_RNA (1)...(19): siRNA sense strand
agagaaaccuuacaguugu

SEQ ID NO: 880882 - RNA, 19 nt, Homo sapiens
  misc_RNA (1)...(19): siRNA sense strand
gugacaaggucuucaauca

SEQ ID NO: 880883 - RNA, 19 nt, Homo sapiens
  misc_RNA (1)...(19): siRNA sense strand
gagagaggccuuacagaug

SEQ ID NO: 880884 - RNA, 19 nt, Homo sapiens
  misc_RNA (1)...(19): siRNA sense strand
ggagagaagccucacaaau

SEQ ID NO: 880885 - RNA, 19 nt, Homo sapiens
  misc_RNA (1)...(19): siRNA sense strand
ggagagaggccuuacagau

SEQ ID NO: 880886 - RNA, 19 nt, Homo sapiens
  misc_RNA (1)...(19): siRNA sense strand
agaaaucucaugaguguaa

SEQ ID NO: 880887 - RNA, 19 nt, Homo sapiens
  misc_RNA (1)...(19): siRNA sense strand
gugagaaaccuuacaaaug

SEQ ID NO: 880888 - RNA, 19 nt, Homo sapiens
  misc_RNA (1)...(19): siRNA sense strand
guacaagucuucucuaacc

SEQ ID NO: 880889 - RNA, 19 nt, Homo sapiens
  misc_RNA (1)...(19): siRNA sense strand
gagaaaccuuaugaaugua

SEQ ID NO: 880890 - RNA, 19 nt, Homo sapiens
  misc_RNA (1)...(19): siRNA sense strand
ggcaaggucuuuaaucaag

SEQ ID NO: 880891 - RNA, 19 nt, Homo sapiens
  misc_RNA (1)...(19): siRNA sense strand
ugaagaauguggcaaagca

SEQ ID NO: 880892 - RNA, 19 nt, Homo sapiens
  misc_RNA (1)...(19): siRNA sense strand
gaauucacauuggagagaa

SEQ ID NO: 880893 - RNA, 19 nt, Homo sapiens
  misc_RNA (1)...(19): siRNA sense strand
gcaagaucuucacucagaa

SEQ ID NO: 880894 - RNA, 19 nt, Homo sapiens
  misc_RNA (1)...(19): siRNA sense strand
gaugagaagccuuacaaau

SEQ ID NO: 880895 - RNA, 19 nt, Homo sapiens
  misc_RNA (1)...(19): siRNA sense strand
gcacaacaucaaagaauuc

SEQ ID NO: 880896 - RNA, 19 nt, Homo sapiens
  misc_RNA (1)...(19): siRNA sense strand
ucagagaauucauacuaga

SEQ ID NO: 880897 - RNA, 19 nt, Homo sapiens
  misc_RNA (1)...(19): siRNA sense strand
ucaaauugcacaccuugua

SEQ ID NO: 880898 - RNA, 19 nt, Homo sapiens
  misc_RNA (1)...(19): siRNA sense strand
gaaaucucaugaguguaaa

SEQ ID NO: 880899 - RNA, 19 nt, Homo sapiens
  misc_RNA (1)...(19): siRNA sense strand
acaaaugucaugaauguga

SEQ ID NO: 880900 - RNA, 19 nt, Homo sapiens
  misc_RNA (1)...(19): siRNA sense strand
ggcaagcucuucaguagca

SEQ ID NO: 880901 - RNA, 19 nt, Homo sapiens
  misc_RNA (1)...(19): siRNA sense strand
agagaggccuuacagaugu

SEQ ID NO: 880902 - RNA, 19 nt, Homo sapiens
  misc_RNA (1)...(19): siRNA sense strand
guggcaaggucuuuaauca

SEQ ID NO: 880903 - RNA, 19 nt, Homo sapiens
  misc_RNA (1)...(19): siRNA sense strand
acaaaugucaugaauguga

SEQ ID NO: 880904 - RNA, 19 nt, Homo sapiens
  misc_RNA (1)...(19): siRNA sense strand
gagaaaccuuacaaaugug

SEQ ID NO: 880905 - RNA, 19 nt, Homo sapiens
  misc_RNA (1)...(19): siRNA sense strand
ccucacaaaugucaugaau

SEQ ID NO: 880906 - RNA, 19 nt, Homo sapiens
  misc_RNA (1)...(19): siRNA sense strand
caccauagaauucacauug

SEQ ID NO: 880907 - RNA, 19 nt, Homo sapiens
  misc_RNA (1)...(19): siRNA sense strand
guggcaagcucuucaguag

SEQ ID NO: 880908 - RNA, 19 nt, Homo sapiens
  misc_RNA (1)...(19): siRNA sense strand
caucaaagaauucauacug

SEQ ID NO: 880909 - RNA, 19 nt, Homo sapiens
  misc_RNA (1)...(19): siRNA sense strand
ccauagaauucacauugga

SEQ ID NO: 880910 - RNA, 19 nt, Homo sapiens
  misc_RNA (1)...(19): siRNA sense strand
caucauagaauucauacug

SEQ ID NO: 880911 - RNA, 19 nt, Homo sapiens
  misc_RNA (1)...(19): siRNA sense strand
ucucuaaccagucaucaua

SEQ ID NO: 880912 - RNA, 19 nt, Homo sapiens
  misc_RNA (1)...(19): siRNA sense strand
gcaaagucuucagguacaa

SEQ ID NO: 880913 - RNA, 19 nt, Homo sapiens
  misc_RNA (1)...(19): siRNA sense strand
ggcaaagucuucagguaca

SEQ ID NO: 880914 - RNA, 19 nt, Homo sapiens
  misc_RNA (1)...(19): siRNA sense strand
caucaaagaauucauacug

SEQ ID NO: 880915 - RNA, 19 nt, Homo sapiens
  misc_RNA (1)...(19): siRNA sense strand
ggugagaaaccuuacaaau

SEQ ID NO: 880916 - RNA, 19 nt, Homo sapiens
  misc_RNA (1)...(19): siRNA sense strand
ggucuuuaaucaagcauca

SEQ ID NO: 880917 - RNA, 19 nt, Homo sapiens
  misc_RNA (1)...(19): siRNA sense strand
gaccuuauacgacaucgaa

SEQ ID NO: 880918 - RNA, 19 nt, Homo sapiens
  misc_RNA (1)...(19): siRNA sense strand
ccauucauaucuagcagaa

SEQ ID NO: 880919 - RNA, 19 nt, Homo sapiens
  misc_RNA (1)...(19): siRNA sense strand
gaaaauucauacaggagaa

SEQ ID NO: 880920 - RNA, 19 nt, Homo sapiens
  misc_RNA (1)...(19): siRNA sense strand
guggcaaagucuucaggua

SEQ ID NO: 880921 - RNA, 19 nt, Homo sapiens
  misc_RNA (1)...(19): siRNA sense strand
gcucuucaguagcaauuca

SEQ ID NO: 880922 - RNA, 19 nt, Homo sapiens
  misc_RNA (1)...(19): siRNA sense strand
ucacaauucugaccuugca

SEQ ID NO: 880923 - RNA, 19 nt, Homo sapiens
  misc_RNA (1)...(19): siRNA sense strand
ucucaugaguguaaagaau

SEQ ID NO: 880924 - RNA, 19 nt, Homo sapiens
  misc_RNA (1)...(19): siRNA sense strand
agaaaagccuuacaaaugu

SEQ ID NO: 880925 - RNA, 19 nt, Homo sapiens
  misc_RNA (1)...(19): siRNA sense strand
auucaaaccuuucacaaca

SEQ ID NO: 880926 - RNA, 19 nt, Homo sapiens
  misc_RNA (1)...(19): siRNA sense strand
ggucuucagucacaauucu

SEQ ID NO: 880927 - RNA, 19 nt, Homo sapiens
  misc_RNA (1)...(19): siRNA sense strand
ggucuucagucgcaguuca

SEQ ID NO: 880928 - RNA, 19 nt, Homo sapiens
  misc_RNA (1)...(19): siRNA sense strand
guggcaagaucuucacuca

SEQ ID NO: 880929 - RNA, 19 nt, Homo sapiens
  misc_RNA (1)...(19): siRNA sense strand
gcaauucaaaccuuucaca

SEQ ID NO: 880930 - RNA, 19 nt, Homo sapiens
  misc_RNA (1)...(19): siRNA sense strand
gagaaaccuuacaaaugca

SEQ ID NO: 880931 - RNA, 19 nt, Homo sapiens
  misc_RNA (1)...(19): siRNA sense strand
agucuucccucaccaauca

SEQ ID NO: 880932 - RNA, 19 nt, Homo sapiens
  misc_RNA (1)...(19): siRNA sense strand
guggagagaaaccuuauga

SEQ ID NO: 880933 - RNA, 19 nt, Homo sapiens
  misc_RNA (1)...(19): siRNA sense strand
gagaagccuuacaaauguc

SEQ ID NO: 880934 - RNA, 19 nt, Homo sapiens
  misc_RNA (1)...(19): siRNA sense strand
aguaaggucuucagucaca

SEQ ID NO: 880935 - RNA, 19 nt, Homo sapiens
  misc_RNA (1)...(19): siRNA sense strand
ggucuuuagucgccauuca

SEQ ID NO: 880936 - RNA, 19 nt, Homo sapiens
  misc_RNA (1)...(19): siRNA sense strand
caaggucuucaaucaaauu

SEQ ID NO: 880937 - RNA, 19 nt, Homo sapiens
  misc_RNA (1)...(19): siRNA sense strand
gagaagccuuacaaauguc

SEQ ID NO: 880938 - RNA, 19 nt, Homo sapiens
  misc_RNA (1)...(19): siRNA sense strand
guaaagaaugugacaaggu

SEQ ID NO: 880939 - RNA, 19 nt, Homo sapiens
  misc_RNA (1)...(19): siRNA sense strand
gcacagcaucagagaguuc

SEQ ID NO: 880940 - RNA, 19 nt, Homo sapiens
  misc_RNA (1)...(19): siRNA sense strand
gaauguggcaagaucuuca

SEQ ID NO: 880941 - RNA, 19 nt, Homo sapiens
  misc_RNA (1)...(19): siRNA sense strand
auacugaugagaagccuua

SEQ ID NO: 880942 - RNA, 19 nt, Homo sapiens
  misc_RNA (1)...(19): siRNA sense strand
uaguaaauguggcaaagca

SEQ ID NO: 880943 - RNA, 19 nt, Homo sapiens
  misc_RNA (1)...(19): siRNA sense strand
gcacgaagcugauguguuc

SEQ ID NO: 880944 - RNA, 19 nt, Homo sapiens
  misc_RNA (1)...(19): siRNA sense strand
caaggaauguggacaguua

SEQ ID NO: 880945 - RNA, 19 nt, Homo sapiens
  misc_RNA (1)...(19): siRNA sense strand
gaaaguaguuccuauagag

SEQ ID NO: 880946 - RNA, 19 nt, Homo sapiens
  misc_RNA (1)...(19): siRNA sense strand
ugauaaagcucaaauacga

SEQ ID NO: 880947 - RNA, 19 nt, Homo sapiens
  misc_RNA (1)...(19): siRNA sense strand
uuaaagggcugucagaaga

SEQ ID NO: 880948 - RNA, 19 nt, Homo sapiens
  misc_RNA (1)...(19): siRNA sense strand
gaggaaaacugcauauauu

SEQ ID NO: 880949 - RNA, 19 nt, Homo sapiens
  misc_RNA (1)...(19): siRNA sense strand
gaauguggacaguuacuaa

SEQ ID NO: 880950 - RNA, 19 nt, Homo sapiens
  misc_RNA (1)...(19): siRNA sense strand
gcaaaggaaggccaagaaa

SEQ ID NO: 880951 - RNA, 19 nt, Homo sapiens
  misc_RNA (1)...(19): siRNA sense strand
gaauuuggagacuuugaua

SEQ ID NO: 880952 - RNA, 19 nt, Homo sapiens
  misc_RNA (1)...(19): siRNA sense strand
cagaugaaauggaaaguag

SEQ ID NO: 880953 - RNA, 19 nt, Homo sapiens
  misc_RNA (1)...(19): siRNA sense strand
gacaguuacuaauaucuga

SEQ ID NO: 880954 - RNA, 19 nt, Homo sapiens
  misc_RNA (1)...(19): siRNA sense strand
ugaaagucuugguggauuu

SEQ ID NO: 880955 - RNA, 19 nt, Homo sapiens
  misc_RNA (1)...(19): siRNA sense strand
gaacagaugaaauggaaag

SEQ ID NO: 880956 - RNA, 19 nt, Homo sapiens
  misc_RNA (1)...(19): siRNA sense strand
uggaacagaugaaauggaa

SEQ ID NO: 880957 - RNA, 19 nt, Homo sapiens
  misc_RNA (1)...(19): siRNA sense strand
gaagauaccagguccacau

SEQ ID NO: 880958 - RNA, 19 nt, Homo sapiens
  misc_RNA (1)...(19): siRNA sense strand
gagcagaauuuggagacuu

SEQ ID NO: 880959 - RNA, 19 nt, Homo sapiens
  misc_RNA (1)...(19): siRNA sense strand
caagcucaguugaacagaa

SEQ ID NO: 880960 - RNA, 19 nt, Homo sapiens
  misc_RNA (1)...(19): siRNA sense strand
aaagggcugucagaagaua

SEQ ID NO: 880961 - RNA, 19 nt, Homo sapiens
  misc_RNA (1)...(19): siRNA sense strand
gaugaaauggaaaguaguu

SEQ ID NO: 880962 - RNA, 19 nt, Homo sapiens
  misc_RNA (1)...(19): siRNA sense strand
caacaucaagagcagaauu

SEQ ID NO: 880963 - RNA, 19 nt, Homo sapiens
  misc_RNA (1)...(19): siRNA sense strand
aagcucaguugaacagaaa

SEQ ID NO: 880964 - RNA, 19 nt, Homo sapiens
  misc_RNA (1)...(19): siRNA sense strand
aaacuguacuucaggagau

SEQ ID NO: 880965 - RNA, 19 nt, Homo sapiens
  misc_RNA (1)...(19): siRNA sense strand
cgaagcugauguguucuuu

SEQ ID NO: 880966 - RNA, 19 nt, Homo sapiens
  misc_RNA (1)...(19): siRNA sense strand
cauuauaagugcauguugu

SEQ ID NO: 880967 - RNA, 19 nt, Homo sapiens
  misc_RNA (1)...(19): siRNA sense strand
agauaggucuccacacaga

SEQ ID NO: 880968 - RNA, 19 nt, Homo sapiens
  misc_RNA (1)...(19): siRNA sense strand
gcaugauaaagcucaaaua

SEQ ID NO: 880969 - RNA, 19 nt, Homo sapiens
  misc_RNA (1)...(19): siRNA sense strand
aagcugauguguucuuugu

SEQ ID NO: 880970 - RNA, 19 nt, Homo sapiens
  misc_RNA (1)...(19): siRNA sense strand
caagaaaacugcacauaac

SEQ ID NO: 880971 - RNA, 19 nt, Homo sapiens
  misc_RNA (1)...(19): siRNA sense strand
caaauagagacaaggaaug

SEQ ID NO: 880972 - RNA, 19 nt, Homo sapiens
  misc_RNA (1)...(19): siRNA sense strand
uguggacaguuacuaauau

SEQ ID NO: 880973 - RNA, 19 nt, Homo sapiens
  misc_RNA (1)...(19): siRNA sense strand
ccacuaccacugugcauug

SEQ ID NO: 880974 - RNA, 19 nt, Homo sapiens
  misc_RNA (1)...(19): siRNA sense strand
ggacaguuacuaauaucug

SEQ ID NO: 880975 - RNA, 19 nt, Homo sapiens
  misc_RNA (1)...(19): siRNA sense strand
aguaguuccuauagagaua

SEQ ID NO: 880976 - RNA, 19 nt, Homo sapiens
  misc_RNA (1)...(19): siRNA sense strand
ccauggaacagaugaaaug

SEQ ID NO: 880977 - RNA, 19 nt, Homo sapiens
  misc_RNA (1)...(19): siRNA sense strand
ggaauguggacaguuacua

SEQ ID NO: 880978 - RNA, 19 nt, Homo sapiens
  misc_RNA (1)...(19): siRNA sense strand
gaagauguccaaaaggaaa

SEQ ID NO: 880979 - RNA, 19 nt, Homo sapiens
  misc_RNA (1)...(19): siRNA sense strand
ucaaauagagacaaggaau

SEQ ID NO: 880980 - RNA, 19 nt, Homo sapiens
  misc_RNA (1)...(19): siRNA sense strand
gcucacaacaacaucaaga

SEQ ID NO: 880981 - RNA, 19 nt, Homo sapiens
  misc_RNA (1)...(19): siRNA sense strand
aaagaaaagucgcaaagga

SEQ ID NO: 880982 - RNA, 19 nt, Homo sapiens
  misc_RNA (1)...(19): siRNA sense strand
uaagucaaauagagacaag

SEQ ID NO: 880983 - RNA, 19 nt, Homo sapiens
  misc_RNA (1)...(19): siRNA sense strand
cgagagaaaccuucacaag

SEQ ID NO: 880984 - RNA, 19 nt, Homo sapiens
  misc_RNA (1)...(19): siRNA sense strand
cuggagcccucaucaccua

SEQ ID NO: 880985 - RNA, 19 nt, Homo sapiens
  misc_RNA (1)...(19): siRNA sense strand
caaauacgagagaaaccuu

SEQ ID NO: 880986 - RNA, 19 nt, Homo sapiens
  misc_RNA (1)...(19): siRNA sense strand
agcagaauuuggagacuuu

SEQ ID NO: 880987 - RNA, 19 nt, Homo sapiens
  misc_RNA (1)...(19): siRNA sense strand
gacaaggaauguggacagu

SEQ ID NO: 880988 - RNA, 19 nt, Homo sapiens
  misc_RNA (1)...(19): siRNA sense strand
caugauaaagcucaaauac

SEQ ID NO: 880989 - RNA, 19 nt, Homo sapiens
  misc_RNA (1)...(19): siRNA sense strand
gaaaaugaagcacgaggaa

SEQ ID NO: 880990 - RNA, 19 nt, Homo sapiens
  misc_RNA (1)...(19): siRNA sense strand
caucugcuuugguaucauc

SEQ ID NO: 880991 - RNA, 19 nt, Homo sapiens
  misc_RNA (1)...(19): siRNA sense strand
agaagcagcccuagugaca

SEQ ID NO: 880992 - RNA, 19 nt, Homo sapiens
  misc_RNA (1)...(19): siRNA sense strand
cacagaagcagcccuagug

SEQ ID NO: 880993 - RNA, 19 nt, Homo sapiens
  misc_RNA (1)...(19): siRNA sense strand
gcagcugcccauuauaagu

SEQ ID NO: 880994 - RNA, 19 nt, Homo sapiens
  misc_RNA (1)...(19): siRNA sense strand
ucacaggacauaccacuac

SEQ ID NO: 880995 - RNA, 19 nt, Homo sapiens
  misc_RNA (1)...(19): siRNA sense strand
guggacaguuacuaauauc

SEQ ID NO: 880996 - RNA, 19 nt, Homo sapiens
  misc_RNA (1)...(19): siRNA sense strand
aaauagagacaaggaaugu

SEQ ID NO: 880997 - RNA, 19 nt, Homo sapiens
  misc_RNA (1)...(19): siRNA sense strand
cagcugcccauuauaagug

SEQ ID NO: 880998 - RNA, 19 nt, Homo sapiens
  misc_RNA (1)...(19): siRNA sense strand
gacauaccacuaccacugu

SEQ ID NO: 880999 - RNA, 19 nt, Homo sapiens
  misc_RNA (1)...(19): siRNA sense strand
gaagcugauguguucuuug

SEQ ID NO: 881000 - RNA, 19 nt, Homo sapiens
  misc_RNA (1)...(19): siRNA sense strand
aaauguggcuuuuguaagu

SEQ ID NO: 881001 - RNA, 19 nt, Homo sapiens
  misc_RNA (1)...(19): siRNA sense strand
cuacaagacagcgcaaaug

SEQ ID NO: 881002 - RNA, 19 nt, Homo sapiens
  misc_RNA (1)...(19): siRNA sense strand
ccucaucaccuaaaaguaa

SEQ ID NO: 881003 - RNA, 19 nt, Homo sapiens
  misc_RNA (1)...(19): siRNA sense strand
acaagaaaacugcacauaa

SEQ ID NO: 881004 - RNA, 19 nt, Homo sapiens
  misc_RNA (1)...(19): siRNA sense strand
gcacaguccagcucacaac

SEQ ID NO: 881005 - RNA, 19 nt, Homo sapiens
  misc_RNA (1)...(19): siRNA sense strand
acagaugaaauggaaagua

SEQ ID NO: 881006 - RNA, 19 nt, Homo sapiens
  misc_RNA (1)...(19): siRNA sense strand
caaaggaaggccaagaaaa

SEQ ID NO: 881007 - RNA, 19 nt, Homo sapiens
  misc_RNA (1)...(19): siRNA sense strand
ccauuguccuggagcaaca

SEQ ID NO: 881008 - RNA, 19 nt, Homo sapiens
  misc_RNA (1)...(19): siRNA sense strand
uacaagacagcgcaaaugu

SEQ ID NO: 881009 - RNA, 19 nt, Homo sapiens
  misc_RNA (1)...(19): siRNA sense strand
augaaagucuugguggauu

SEQ ID NO: 881010 - RNA, 19 nt, Homo sapiens
  misc_RNA (1)...(19): siRNA sense strand
aaaguaguuccuauagaga

SEQ ID NO: 881011 - RNA, 19 nt, Homo sapiens
  misc_RNA (1)...(19): siRNA sense strand
uggcagcgcaccauaagug

SEQ ID NO: 881012 - RNA, 19 nt, Homo sapiens
  misc_RNA (1)...(19): siRNA sense strand
acacucugauaaugaaagu

SEQ ID NO: 881013 - RNA, 19 nt, Homo sapiens
  misc_RNA (1)...(19): siRNA sense strand
gcucaaauacgagagaaac

SEQ ID NO: 881014 - RNA, 19 nt, Homo sapiens
  misc_RNA (1)...(19): siRNA sense strand
cgaggaaaacugcauauau

SEQ ID NO: 881015 - RNA, 19 nt, Homo sapiens
  misc_RNA (1)...(19): siRNA sense strand
gauaccagguccacauccu

SEQ ID NO: 881016 - RNA, 19 nt, Homo sapiens
  misc_RNA (1)...(19): siRNA sense strand
gaacuggagcccucaucac

SEQ ID NO: 881017 - RNA, 19 nt, Homo sapiens
  misc_RNA (1)...(19): siRNA sense strand
aacaucaagagcagaauuu

SEQ ID NO: 881018 - RNA, 19 nt, Homo sapiens
  misc_RNA (1)...(19): siRNA sense strand
gcacgaggaaaacugcaua

SEQ ID NO: 881019 - RNA, 19 nt, Homo sapiens
  misc_RNA (1)...(19): siRNA sense strand
ugacaccaggccuaaaugu

SEQ ID NO: 881020 - RNA, 19 nt, Homo sapiens
  misc_RNA (1)...(19): siRNA sense strand
ggagcccucaucaccuaaa

SEQ ID NO: 881021 - RNA, 19 nt, Homo sapiens
  misc_RNA (1)...(19): siRNA sense strand
ggaacagaugaaauggaaa

SEQ ID NO: 881022 - RNA, 19 nt, Homo sapiens
  misc_RNA (1)...(19): siRNA sense strand
gauaggucuccacacagaa

SEQ ID NO: 881023 - RNA, 19 nt, Homo sapiens
  misc_RNA (1)...(19): siRNA sense strand
cgcaaaggaaggccaagaa

SEQ ID NO: 881024 - RNA, 19 nt, Homo sapiens
  misc_RNA (1)...(19): siRNA sense strand
guaagucaaauagagacaa

SEQ ID NO: 881025 - RNA, 19 nt, Homo sapiens
  misc_RNA (1)...(19): siRNA sense strand
gacaccaggccuaaaugug

SEQ ID NO: 881026 - RNA, 19 nt, Homo sapiens
  misc_RNA (1)...(19): siRNA sense strand
acagaagcagcccuaguga

SEQ ID NO: 881027 - RNA, 19 nt, Homo sapiens
  misc_RNA (1)...(19): siRNA sense strand
uaaagggcugucagaagau

SEQ ID NO: 881028 - RNA, 19 nt, Homo sapiens
  misc_RNA (1)...(19): siRNA sense strand
gcacgaagcugauguguuc

SEQ ID NO: 881029 - RNA, 19 nt, Homo sapiens
  misc_RNA (1)...(19): siRNA sense strand
caaggaauguggacaguua

SEQ ID NO: 881030 - RNA, 19 nt, Homo sapiens
  misc_RNA (1)...(19): siRNA sense strand
gaaaguaguuccuauagag

SEQ ID NO: 881031 - RNA, 19 nt, Homo sapiens
  misc_RNA (1)...(19): siRNA sense strand
ugauaaagcucaaauacga

SEQ ID NO: 881032 - RNA, 19 nt, Homo sapiens
  misc_RNA (1)...(19): siRNA sense strand
uuaaagggcugucagaaga

SEQ ID NO: 881033 - RNA, 19 nt, Homo sapiens
  misc_RNA (1)...(19): siRNA sense strand
gaggaaaacugcauauauu

SEQ ID NO: 881034 - RNA, 19 nt, Homo sapiens
  misc_RNA (1)...(19): siRNA sense strand
gaauguggacaguuacuaa

SEQ ID NO: 881035 - RNA, 19 nt, Homo sapiens
  misc_RNA (1)...(19): siRNA sense strand
gcaaaggaaggccaagaaa

SEQ ID NO: 881036 - RNA, 19 nt, Homo sapiens
  misc_RNA (1)...(19): siRNA sense strand
gaauuuggagacuuugaua

SEQ ID NO: 881037 - RNA, 19 nt, Homo sapiens
  misc_RNA (1)...(19): siRNA sense strand
cagaugaaauggaaaguag

SEQ ID NO: 881038 - RNA, 19 nt, Homo sapiens
  misc_RNA (1)...(19): siRNA sense strand
gacaguuacuaauaucuga

SEQ ID NO: 881039 - RNA, 19 nt, Homo sapiens
  misc_RNA (1)...(19): siRNA sense strand
ugaaagucuugguggauuu

SEQ ID NO: 881040 - RNA, 19 nt, Homo sapiens
  misc_RNA (1)...(19): siRNA sense strand
gaacagaugaaauggaaag

SEQ ID NO: 881041 - RNA, 19 nt, Homo sapiens
  misc_RNA (1)...(19): siRNA sense strand
uggaacagaugaaauggaa

SEQ ID NO: 881042 - RNA, 19 nt, Homo sapiens
  misc_RNA (1)...(19): siRNA sense strand
gaagauaccagguccacau

SEQ ID NO: 881043 - RNA, 19 nt, Homo sapiens
  misc_RNA (1)...(19): siRNA sense strand
gagcagaauuuggagacuu

SEQ ID NO: 881044 - RNA, 19 nt, Homo sapiens
  misc_RNA (1)...(19): siRNA sense strand
caagcucaguugaacagaa

SEQ ID NO: 881045 - RNA, 19 nt, Homo sapiens
  misc_RNA (1)...(19): siRNA sense strand
aaagggcugucagaagaua

SEQ ID NO: 881046 - RNA, 19 nt, Homo sapiens
  misc_RNA (1)...(19): siRNA sense strand
gaugaaauggaaaguaguu

SEQ ID NO: 881047 - RNA, 19 nt, Homo sapiens
  misc_RNA (1)...(19): siRNA sense strand
caacaucaagagcagaauu

SEQ ID NO: 881048 - RNA, 19 nt, Homo sapiens
  misc_RNA (1)...(19): siRNA sense strand
aagcucaguugaacagaaa

SEQ ID NO: 881049 - RNA, 19 nt, Homo sapiens
  misc_RNA (1)...(19): siRNA sense strand
aaacuguacuucaggagau

SEQ ID NO: 881050 - RNA, 19 nt, Homo sapiens
  misc_RNA (1)...(19): siRNA sense strand
cgaagcugauguguucuuu

SEQ ID NO: 881051 - RNA, 19 nt, Homo sapiens
  misc_RNA (1)...(19): siRNA sense strand
cauuauaagugcauguugu

SEQ ID NO: 881052 - RNA, 19 nt, Homo sapiens
  misc_RNA (1)...(19): siRNA sense strand
agauaggucuccacacaga

SEQ ID NO: 881053 - RNA, 19 nt, Homo sapiens
  misc_RNA (1)...(19): siRNA sense strand
gcaugauaaagcucaaaua

SEQ ID NO: 881054 - RNA, 19 nt, Homo sapiens
  misc_RNA (1)...(19): siRNA sense strand
aagcugauguguucuuugu

SEQ ID NO: 881055 - RNA, 19 nt, Homo sapiens
  misc_RNA (1)...(19): siRNA sense strand
caagaaaacugcacauaac

SEQ ID NO: 881056 - RNA, 19 nt, Homo sapiens
  misc_RNA (1)...(19): siRNA sense strand
caaauagagacaaggaaug

SEQ ID NO: 881057 - RNA, 19 nt, Homo sapiens
  misc_RNA (1)...(19): siRNA sense strand
uguggacaguuacuaauau

SEQ ID NO: 881058 - RNA, 19 nt, Homo sapiens
  misc_RNA (1)...(19): siRNA sense strand
ccacuaccacugugcauug

SEQ ID NO: 881059 - RNA, 19 nt, Homo sapiens
  misc_RNA (1)...(19): siRNA sense strand
ggacaguuacuaauaucug

SEQ ID NO: 881060 - RNA, 19 nt, Homo sapiens
  misc_RNA (1)...(19): siRNA sense strand
aguaguuccuauagagaua

SEQ ID NO: 881061 - RNA, 19 nt, Homo sapiens
  misc_RNA (1)...(19): siRNA sense strand
ccauggaacagaugaaaug

SEQ ID NO: 881062 - RNA, 19 nt, Homo sapiens
  misc_RNA (1)...(19): siRNA sense strand
ggaauguggacaguuacua

SEQ ID NO: 881063 - RNA, 19 nt, Homo sapiens
  misc_RNA (1)...(19): siRNA sense strand
gaagauguccaaaaggaaa

SEQ ID NO: 881064 - RNA, 19 nt, Homo sapiens
  misc_RNA (1)...(19): siRNA sense strand
ucaaauagagacaaggaau

SEQ ID NO: 881065 - RNA, 19 nt, Homo sapiens
  misc_RNA (1)...(19): siRNA sense strand
gcucacaacaacaucaaga

SEQ ID NO: 881066 - RNA, 19 nt, Homo sapiens
  misc_RNA (1)...(19): siRNA sense strand
aaagaaaagucgcaaagga

SEQ ID NO: 881067 - RNA, 19 nt, Homo sapiens
  misc_RNA (1)...(19): siRNA sense strand
uaagucaaauagagacaag

SEQ ID NO: 881068 - RNA, 19 nt, Homo sapiens
  misc_RNA (1)...(19): siRNA sense strand
cgagagaaaccuucacaag

SEQ ID NO: 881069 - RNA, 19 nt, Homo sapiens
  misc_RNA (1)...(19): siRNA sense strand
cuggagcccucaucaccua

SEQ ID NO: 881070 - RNA, 19 nt, Homo sapiens
  misc_RNA (1)...(19): siRNA sense strand
caaauacgagagaaaccuu

SEQ ID NO: 881071 - RNA, 19 nt, Homo sapiens
  misc_RNA (1)...(19): siRNA sense strand
agcagaauuuggagacuuu

SEQ ID NO: 881072 - RNA, 19 nt, Homo sapiens
  misc_RNA (1)...(19): siRNA sense strand
gacaaggaauguggacagu

SEQ ID NO: 881073 - RNA, 19 nt, Homo sapiens
  misc_RNA (1)...(19): siRNA sense strand
caugauaaagcucaaauac

SEQ ID NO: 881074 - RNA, 19 nt, Homo sapiens
  misc_RNA (1)...(19): siRNA sense strand
gaaaaugaagcacgaggaa

SEQ ID NO: 881075 - RNA, 19 nt, Homo sapiens
  misc_RNA (1)...(19): siRNA sense strand
caucugcuuugguaucauc

SEQ ID NO: 881076 - RNA, 19 nt, Homo sapiens
  misc_RNA (1)...(19): siRNA sense strand
agaagcagcccuagugaca

SEQ ID NO: 881077 - RNA, 19 nt, Homo sapiens
  misc_RNA (1)...(19): siRNA sense strand
cacagaagcagcccuagug

SEQ ID NO: 881078 - RNA, 19 nt, Homo sapiens
  misc_RNA (1)...(19): siRNA sense strand
gcagcugcccauuauaagu

SEQ ID NO: 881079 - RNA, 19 nt, Homo sapiens
  misc_RNA (1)...(19): siRNA sense strand
ucacaggacauaccacuac

SEQ ID NO: 881080 - RNA, 19 nt, Homo sapiens
  misc_RNA (1)...(19): siRNA sense strand
guggacaguuacuaauauc

SEQ ID NO: 881081 - RNA, 19 nt, Homo sapiens
  misc_RNA (1)...(19): siRNA sense strand
aaauagagacaaggaaugu

SEQ ID NO: 881082 - RNA, 19 nt, Homo sapiens
  misc_RNA (1)...(19): siRNA sense strand
cagcugcccauuauaagug

SEQ ID NO: 881083 - RNA, 19 nt, Homo sapiens
  misc_RNA (1)...(19): siRNA sense strand
gacauaccacuaccacugu

SEQ ID NO: 881084 - RNA, 19 nt, Homo sapiens
  misc_RNA (1)...(19): siRNA sense strand
gaagcugauguguucuuug

SEQ ID NO: 881085 - RNA, 19 nt, Homo sapiens
  misc_RNA (1)...(19): siRNA sense strand
aaauguggcuuuuguaagu

SEQ ID NO: 881086 - RNA, 19 nt, Homo sapiens
  misc_RNA (1)...(19): siRNA sense strand
cuacaagacagcgcaaaug

SEQ ID NO: 881087 - RNA, 19 nt, Homo sapiens
  misc_RNA (1)...(19): siRNA sense strand
ccucaucaccuaaaaguaa

SEQ ID NO: 881088 - RNA, 19 nt, Homo sapiens
  misc_RNA (1)...(19): siRNA sense strand
acaagaaaacugcacauaa

SEQ ID NO: 881089 - RNA, 19 nt, Homo sapiens
  misc_RNA (1)...(19): siRNA sense strand
gcacaguccagcucacaac

SEQ ID NO: 881090 - RNA, 19 nt, Homo sapiens
  misc_RNA (1)...(19): siRNA sense strand
acagaugaaauggaaagua

SEQ ID NO: 881091 - RNA, 19 nt, Homo sapiens
  misc_RNA (1)...(19): siRNA sense strand
caaaggaaggccaagaaaa

SEQ ID NO: 881092 - RNA, 19 nt, Homo sapiens
  misc_RNA (1)...(19): siRNA sense strand
ccauuguccuggagcaaca

SEQ ID NO: 881093 - RNA, 19 nt, Homo sapiens
  misc_RNA (1)...(19): siRNA sense strand
uacaagacagcgcaaaugu

SEQ ID NO: 881094 - RNA, 19 nt, Homo sapiens
  misc_RNA (1)...(19): siRNA sense strand
augaaagucuugguggauu

SEQ ID NO: 881095 - RNA, 19 nt, Homo sapiens
  misc_RNA (1)...(19): siRNA sense strand
aaaguaguuccuauagaga

SEQ ID NO: 881096 - RNA, 19 nt, Homo sapiens
  misc_RNA (1)...(19): siRNA sense strand
uggcagcgcaccauaagug

SEQ ID NO: 881097 - RNA, 19 nt, Homo sapiens
  misc_RNA (1)...(19): siRNA sense strand
acacucugauaaugaaagu

SEQ ID NO: 881098 - RNA, 19 nt, Homo sapiens
  misc_RNA (1)...(19): siRNA sense strand
gcucaaauacgagagaaac

SEQ ID NO: 881099 - RNA, 19 nt, Homo sapiens
  misc_RNA (1)...(19): siRNA sense strand
cgaggaaaacugcauauau

SEQ ID NO: 881100 - RNA, 19 nt, Homo sapiens
  misc_RNA (1)...(19): siRNA sense strand
gauaccagguccacauccu

SEQ ID NO: 881101 - RNA, 19 nt, Homo sapiens
  misc_RNA (1)...(19): siRNA sense strand
gaacuggagcccucaucac

SEQ ID NO: 881102 - RNA, 19 nt, Homo sapiens
  misc_RNA (1)...(19): siRNA sense strand
aacaucaagagcagaauuu

SEQ ID NO: 881103 - RNA, 19 nt, Homo sapiens
  misc_RNA (1)...(19): siRNA sense strand
gcacgaggaaaacugcaua

SEQ ID NO: 881104 - RNA, 19 nt, Homo sapiens
  misc_RNA (1)...(19): siRNA sense strand
ugacaccaggccuaaaugu

SEQ ID NO: 881105 - RNA, 19 nt, Homo sapiens
  misc_RNA (1)...(19): siRNA sense strand
ggagcccucaucaccuaaa

SEQ ID NO: 881106 - RNA, 19 nt, Homo sapiens
  misc_RNA (1)...(19): siRNA sense strand
ggaacagaugaaauggaaa

SEQ ID NO: 881107 - RNA, 19 nt, Homo sapiens
  misc_RNA (1)...(19): siRNA sense strand
gauaggucuccacacagaa

SEQ ID NO: 881108 - RNA, 19 nt, Homo sapiens
  misc_RNA (1)...(19): siRNA sense strand
cgcaaaggaaggccaagaa

SEQ ID NO: 881109 - RNA, 19 nt, Homo sapiens
  misc_RNA (1)...(19): siRNA sense strand
guaagucaaauagagacaa

SEQ ID NO: 881110 - RNA, 19 nt, Homo sapiens
  misc_RNA (1)...(19): siRNA sense strand
gacaccaggccuaaaugug

SEQ ID NO: 881111 - RNA, 19 nt, Homo sapiens
  misc_RNA (1)...(19): siRNA sense strand
acagaagcagcccuaguga

SEQ ID NO: 881112 - RNA, 19 nt, Homo sapiens
  misc_RNA (1)...(19): siRNA sense strand
uaaagggcugucagaagau

SEQ ID NO: 881113 - RNA, 19 nt, Homo sapiens
  misc_RNA (1)...(19): siRNA sense strand
ggacaaagaagaacaaaua

SEQ ID NO: 881114 - RNA, 19 nt, Homo sapiens
  misc_RNA (1)...(19): siRNA sense strand
ggacagacagggcugguua

SEQ ID NO: 881115 - RNA, 19 nt, Homo sapiens
  misc_RNA (1)...(19): siRNA sense strand
gaggagauguccagcuuga

SEQ ID NO: 881116 - RNA, 19 nt, Homo sapiens
  misc_RNA (1)...(19): siRNA sense strand
gaaacauccuugguaccua

SEQ ID NO: 881117 - RNA, 19 nt, Homo sapiens
  misc_RNA (1)...(19): siRNA sense strand
agacagggcugguuaaacu

SEQ ID NO: 881118 - RNA, 19 nt, Homo sapiens
  misc_RNA (1)...(19): siRNA sense strand
gaaggucgccaucaagauc

SEQ ID NO: 881119 - RNA, 19 nt, Homo sapiens
  misc_RNA (1)...(19): siRNA sense strand
caaggaggcccgaaaguuc

SEQ ID NO: 881120 - RNA, 19 nt, Homo sapiens
  misc_RNA (1)...(19): siRNA sense strand
aaauauuccucgugcuaaa

SEQ ID NO: 881121 - RNA, 19 nt, Homo sapiens
  misc_RNA (1)...(19): siRNA sense strand
ggagaucgccauccugaag

SEQ ID NO: 881122 - RNA, 19 nt, Homo sapiens
  misc_RNA (1)...(19): siRNA sense strand
ucuacgagaacaagaaaua

SEQ ID NO: 881123 - RNA, 19 nt, Homo sapiens
  misc_RNA (1)...(19): siRNA sense strand
caaauauuccucgugcuaa

SEQ ID NO: 881124 - RNA, 19 nt, Homo sapiens
  misc_RNA (1)...(19): siRNA sense strand
ggaacuucaucuccuugga

SEQ ID NO: 881125 - RNA, 19 nt, Homo sapiens
  misc_RNA (1)...(19): siRNA sense strand
acaaauauuccucgugcua

SEQ ID NO: 881126 - RNA, 19 nt, Homo sapiens
  misc_RNA (1)...(19): siRNA sense strand
ccaaggaggcccgaaaguu

SEQ ID NO: 881127 - RNA, 19 nt, Homo sapiens
  misc_RNA (1)...(19): siRNA sense strand
gucagaaggucgccaucaa

SEQ ID NO: 881128 - RNA, 19 nt, Homo sapiens
  misc_RNA (1)...(19): siRNA sense strand
cggagucggugcugaugaa

SEQ ID NO: 881129 - RNA, 19 nt, Homo sapiens
  misc_RNA (1)...(19): siRNA sense strand
gaaauauuuguaccugguu

SEQ ID NO: 881130 - RNA, 19 nt, Homo sapiens
  misc_RNA (1)...(19): siRNA sense strand
gagcaaauucagaaacauc

SEQ ID NO: 881131 - RNA, 19 nt, Homo sapiens
  misc_RNA (1)...(19): siRNA sense strand
gaccagagcggaaguccau

SEQ ID NO: 881132 - RNA, 19 nt, Homo sapiens
  misc_RNA (1)...(19): siRNA sense strand
agacaucguccaugccuuu

SEQ ID NO: 881133 - RNA, 19 nt, Homo sapiens
  misc_RNA (1)...(19): siRNA sense strand
ccacuucauuccuccagau

SEQ ID NO: 881134 - RNA, 19 nt, Homo sapiens
  misc_RNA (1)...(19): siRNA sense strand
cagaaggucgccaucaaga

SEQ ID NO: 881135 - RNA, 19 nt, Homo sapiens
  misc_RNA (1)...(19): siRNA sense strand
ggagaagacgcugggcaaa

SEQ ID NO: 881136 - RNA, 19 nt, Homo sapiens
  misc_RNA (1)...(19): siRNA sense strand
cugaggagauguccagcuu

SEQ ID NO: 881137 - RNA, 19 nt, Homo sapiens
  misc_RNA (1)...(19): siRNA sense strand
ggggugagcuauucgacua

SEQ ID NO: 881138 - RNA, 19 nt, Homo sapiens
  misc_RNA (1)...(19): siRNA sense strand
uggagcaaauucagaaaca

SEQ ID NO: 881139 - RNA, 19 nt, Homo sapiens
  misc_RNA (1)...(19): siRNA sense strand
ccucuaagcagcccaagga

SEQ ID NO: 881140 - RNA, 19 nt, Homo sapiens
  misc_RNA (1)...(19): siRNA sense strand
ggagcaaauucagaaacau

SEQ ID NO: 881141 - RNA, 19 nt, Homo sapiens
  misc_RNA (1)...(19): siRNA sense strand
cgagaacaagaaauauuug

SEQ ID NO: 881142 - RNA, 19 nt, Homo sapiens
  misc_RNA (1)...(19): siRNA sense strand
gaaaguucuuccgccagau

SEQ ID NO: 881143 - RNA, 19 nt, Homo sapiens
  misc_RNA (1)...(19): siRNA sense strand
gcagugaggaggagaacca

SEQ ID NO: 881144 - RNA, 19 nt, Homo sapiens
  misc_RNA (1)...(19): siRNA sense strand
agaagacgcugggcaaagg

SEQ ID NO: 881145 - RNA, 19 nt, Homo sapiens
  misc_RNA (1)...(19): siRNA sense strand
gaaccaagaaaagaugaua

SEQ ID NO: 881146 - RNA, 19 nt, Homo sapiens
  misc_RNA (1)...(19): siRNA sense strand
ggagacugacgcccaagga

SEQ ID NO: 881147 - RNA, 19 nt, Homo sapiens
  misc_RNA (1)...(19): siRNA sense strand
gugaggaggagaaccaaga

SEQ ID NO: 881148 - RNA, 19 nt, Homo sapiens
  misc_RNA (1)...(19): siRNA sense strand
ugucugcgcuggacuucug

SEQ ID NO: 881149 - RNA, 19 nt, Homo sapiens
  misc_RNA (1)...(19): siRNA sense strand
gagaagacgcugggcaaag

SEQ ID NO: 881150 - RNA, 19 nt, Homo sapiens
  misc_RNA (1)...(19): siRNA sense strand
gaggaggagaaccaagaaa

SEQ ID NO: 881151 - RNA, 19 nt, Homo sapiens
  misc_RNA (1)...(19): siRNA sense strand
guaaagaaggggagacuga

SEQ ID NO: 881152 - RNA, 19 nt, Homo sapiens
  misc_RNA (1)...(19): siRNA sense strand
caucguccaugccuuucug

SEQ ID NO: 881153 - RNA, 19 nt, Homo sapiens
  misc_RNA (1)...(19): siRNA sense strand
cccaaggaguccggucuuu

SEQ ID NO: 881154 - RNA, 19 nt, Homo sapiens
  misc_RNA (1)...(19): siRNA sense strand
ccacaugccccacuucauu

SEQ ID NO: 881155 - RNA, 19 nt, Homo sapiens
  misc_RNA (1)...(19): siRNA sense strand
guggagcuguggagucauc

SEQ ID NO: 881156 - RNA, 19 nt, Homo sapiens
  misc_RNA (1)...(19): siRNA sense strand
gacagacagggcugguuaa

SEQ ID NO: 881157 - RNA, 19 nt, Homo sapiens
  misc_RNA (1)...(19): siRNA sense strand
cuaaaggacaaaccucuca

SEQ ID NO: 881158 - RNA, 19 nt, Homo sapiens
  misc_RNA (1)...(19): siRNA sense strand
gaagacgcugggcaaagga

SEQ ID NO: 881159 - RNA, 19 nt, Homo sapiens
  misc_RNA (1)...(19): siRNA sense strand
ccauggaaguccugagcau

SEQ ID NO: 881160 - RNA, 19 nt, Homo sapiens
  misc_RNA (1)...(19): siRNA sense strand
caaauucagaaacauccuu

SEQ ID NO: 881161 - RNA, 19 nt, Homo sapiens
  misc_RNA (1)...(19): siRNA sense strand
gcuguggagucauccucuu

SEQ ID NO: 881162 - RNA, 19 nt, Homo sapiens
  misc_RNA (1)...(19): siRNA sense strand
caaagcagacaucguccau

SEQ ID NO: 881163 - RNA, 19 nt, Homo sapiens
  misc_RNA (1)...(19): siRNA sense strand
ccagcacgcccaauaugug

SEQ ID NO: 881164 - RNA, 19 nt, Homo sapiens
  misc_RNA (1)...(19): siRNA sense strand
uccugaagcucaucgaaca

SEQ ID NO: 881165 - RNA, 19 nt, Homo sapiens
  misc_RNA (1)...(19): siRNA sense strand
gagaucccguagcgucagu

SEQ ID NO: 881166 - RNA, 19 nt, Homo sapiens
  misc_RNA (1)...(19): siRNA sense strand
ccuaucggcuggagaagac

SEQ ID NO: 881167 - RNA, 19 nt, Homo sapiens
  misc_RNA (1)...(19): siRNA sense strand
aaaguucuuccgccagauu

SEQ ID NO: 881168 - RNA, 19 nt, Homo sapiens
  misc_RNA (1)...(19): siRNA sense strand
cauccgcauugcagacuuc

SEQ ID NO: 881169 - RNA, 19 nt, Homo sapiens
  misc_RNA (1)...(19): siRNA sense strand
ugccacagcuacuccaucu

SEQ ID NO: 881170 - RNA, 19 nt, Homo sapiens
  misc_RNA (1)...(19): siRNA sense strand
ggucagaaggucgccauca

SEQ ID NO: 881171 - RNA, 19 nt, Homo sapiens
  misc_RNA (1)...(19): siRNA sense strand
aaaccucucagcagcauca

SEQ ID NO: 881172 - RNA, 19 nt, Homo sapiens
  misc_RNA (1)...(19): siRNA sense strand
cuucaucuccuuggacaaa

SEQ ID NO: 881173 - RNA, 19 nt, Homo sapiens
  misc_RNA (1)...(19): siRNA sense strand
uggcaucacugggcugcuu

SEQ ID NO: 881174 - RNA, 19 nt, Homo sapiens
  misc_RNA (1)...(19): siRNA sense strand
gaagguggagcgggagauc

SEQ ID NO: 881175 - RNA, 19 nt, Homo sapiens
  misc_RNA (1)...(19): siRNA sense strand
gcucaucgaacacccacau

SEQ ID NO: 881176 - RNA, 19 nt, Homo sapiens
  misc_RNA (1)...(19): siRNA sense strand
ucaucuccuuggacaaaga

SEQ ID NO: 881177 - RNA, 19 nt, Homo sapiens
  misc_RNA (1)...(19): siRNA sense strand
ggaguccggucuuuuccuu

SEQ ID NO: 881178 - RNA, 19 nt, Homo sapiens
  misc_RNA (1)...(19): siRNA sense strand
acaaaccucucagcagcau

SEQ ID NO: 881179 - RNA, 19 nt, Homo sapiens
  misc_RNA (1)...(19): siRNA sense strand
cgucuacgagaacaagaaa

SEQ ID NO: 881180 - RNA, 19 nt, Homo sapiens
  misc_RNA (1)...(19): siRNA sense strand
agaagcuccuggccaccaa

SEQ ID NO: 881181 - RNA, 19 nt, Homo sapiens
  misc_RNA (1)...(19): siRNA sense strand
uccgucaccuucacucuca

SEQ ID NO: 881182 - RNA, 19 nt, Homo sapiens
  misc_RNA (1)...(19): siRNA sense strand
caucgaacacccacauguc

SEQ ID NO: 881183 - RNA, 19 nt, Homo sapiens
  misc_RNA (1)...(19): siRNA sense strand
ugaggaggagaaccaagaa

SEQ ID NO: 881184 - RNA, 19 nt, Homo sapiens
  misc_RNA (1)...(19): siRNA sense strand
acacccacauguccucaag

SEQ ID NO: 881185 - RNA, 19 nt, Homo sapiens
  misc_RNA (1)...(19): siRNA sense strand
uagagagcauggcaucacu

SEQ ID NO: 881186 - RNA, 19 nt, Homo sapiens
  misc_RNA (1)...(19): siRNA sense strand
uucagaaacauccuuggua

SEQ ID NO: 881187 - RNA, 19 nt, Homo sapiens
  misc_RNA (1)...(19): siRNA sense strand
agucggugcugaugaaggu

SEQ ID NO: 881188 - RNA, 19 nt, Homo sapiens
  misc_RNA (1)...(19): siRNA sense strand
gcccuuugaugacgacaac

SEQ ID NO: 881189 - RNA, 19 nt, Homo sapiens
  misc_RNA (1)...(19): siRNA sense strand
ccgagaaccugcuuuugga

SEQ ID NO: 881190 - RNA, 19 nt, Homo sapiens
  misc_RNA (1)...(19): siRNA sense strand
cuacgagaacaagaaauau

SEQ ID NO: 881191 - RNA, 19 nt, Homo sapiens
  misc_RNA (1)...(19): siRNA sense strand
ggaaugaccuuaagaagaa

SEQ ID NO: 881192 - RNA, 19 nt, Homo sapiens
  misc_RNA (1)...(19): siRNA sense strand
gcacagaaaucaagaaugg

SEQ ID NO: 881193 - RNA, 19 nt, Homo sapiens
  misc_RNA (1)...(19): siRNA sense strand
gaagaggaaugaccuuaag

SEQ ID NO: 881194 - RNA, 19 nt, Homo sapiens
  misc_RNA (1)...(19): siRNA sense strand
ggacgagacuggagagaca

SEQ ID NO: 881195 - RNA, 19 nt, Homo sapiens
  misc_RNA (1)...(19): siRNA sense strand
ucacagaucuauccguaug

SEQ ID NO: 881196 - RNA, 19 nt, Homo sapiens
  misc_RNA (1)...(19): siRNA sense strand
aaaguaaggccaucuauga

SEQ ID NO: 881197 - RNA, 19 nt, Homo sapiens
  misc_RNA (1)...(19): siRNA sense strand
ggaagaggaaugaccuuaa

SEQ ID NO: 881198 - RNA, 19 nt, Homo sapiens
  misc_RNA (1)...(19): siRNA sense strand
gacaaguacuuccacauca

SEQ ID NO: 881199 - RNA, 19 nt, Homo sapiens
  misc_RNA (1)...(19): siRNA sense strand
gcgugaaacugcccaaaga

SEQ ID NO: 881200 - RNA, 19 nt, Homo sapiens
  misc_RNA (1)...(19): siRNA sense strand
ucaagugcuucgucuguaa

SEQ ID NO: 881201 - RNA, 19 nt, Homo sapiens
  misc_RNA (1)...(19): siRNA sense strand
gaagacagaaacaaggaaa

SEQ ID NO: 881202 - RNA, 19 nt, Homo sapiens
  misc_RNA (1)...(19): siRNA sense strand
guggugagauccuggacua

SEQ ID NO: 881203 - RNA, 19 nt, Homo sapiens
  misc_RNA (1)...(19): siRNA sense strand
ggacaaguacuuccacauc

SEQ ID NO: 881204 - RNA, 19 nt, Homo sapiens
  misc_RNA (1)...(19): siRNA sense strand
gaacugaagacagaaacaa

SEQ ID NO: 881205 - RNA, 19 nt, Homo sapiens
  misc_RNA (1)...(19): siRNA sense strand
aaaccgaauucgcgugaaa

SEQ ID NO: 881206 - RNA, 19 nt, Homo sapiens
  misc_RNA (1)...(19): siRNA sense strand
gaaugcaugugccagaagu

SEQ ID NO: 881207 - RNA, 19 nt, Homo sapiens
  misc_RNA (1)...(19): siRNA sense strand
gcagacacaaggaccaauu

SEQ ID NO: 881208 - RNA, 19 nt, Homo sapiens
  misc_RNA (1)...(19): siRNA sense strand
gugggaagcuccugaaugc

SEQ ID NO: 881209 - RNA, 19 nt, Homo sapiens
  misc_RNA (1)...(19): siRNA sense strand
guaaggccaucuaugacau

SEQ ID NO: 881210 - RNA, 19 nt, Homo sapiens
  misc_RNA (1)...(19): siRNA sense strand
agccagaacugaagacaga

SEQ ID NO: 881211 - RNA, 19 nt, Homo sapiens
  misc_RNA (1)...(19): siRNA sense strand
gaagcuuggaccaggauaa

SEQ ID NO: 881212 - RNA, 19 nt, Homo sapiens
  misc_RNA (1)...(19): siRNA sense strand
gaaugaccuuaagaagaaa

SEQ ID NO: 881213 - RNA, 19 nt, Homo sapiens
  misc_RNA (1)...(19): siRNA sense strand
gauaacaggaagcagaaga

SEQ ID NO: 881214 - RNA, 19 nt, Homo sapiens
  misc_RNA (1)...(19): siRNA sense strand
acaaguacuuccacaucaa

SEQ ID NO: 881215 - RNA, 19 nt, Homo sapiens
  misc_RNA (1)...(19): siRNA sense strand
ugacagcugugagaaauac

SEQ ID NO: 881216 - RNA, 19 nt, Homo sapiens
  misc_RNA (1)...(19): siRNA sense strand
caggaaguguuugggauga

SEQ ID NO: 881217 - RNA, 19 nt, Homo sapiens
  misc_RNA (1)...(19): siRNA sense strand
caacacgugugggaaugug

SEQ ID NO: 881218 - RNA, 19 nt, Homo sapiens
  misc_RNA (1)...(19): siRNA sense strand
ccucagagagcaucauuuc

SEQ ID NO: 881219 - RNA, 19 nt, Homo sapiens
  misc_RNA (1)...(19): siRNA sense strand
ugugacagcugugagaaau

SEQ ID NO: 881220 - RNA, 19 nt, Homo sapiens
  misc_RNA (1)...(19): siRNA sense strand
gaaacaaggaaaccagaac

SEQ ID NO: 881221 - RNA, 19 nt, Homo sapiens
  misc_RNA (1)...(19): siRNA sense strand
cgacaugaucuccuacuca

SEQ ID NO: 881222 - RNA, 19 nt, Homo sapiens
  misc_RNA (1)...(19): siRNA sense strand
ggccagauguuugcagaag

SEQ ID NO: 881223 - RNA, 19 nt, Homo sapiens
  misc_RNA (1)...(19): siRNA sense strand
gcagaaggcgaagagaugu

SEQ ID NO: 881224 - RNA, 19 nt, Homo sapiens
  misc_RNA (1)...(19): siRNA sense strand
gcaugugccagaaguguuc

SEQ ID NO: 881225 - RNA, 19 nt, Homo sapiens
  misc_RNA (1)...(19): siRNA sense strand
caagcuugguggugagauc

SEQ ID NO: 881226 - RNA, 19 nt, Homo sapiens
  misc_RNA (1)...(19): siRNA sense strand
gcugcgaccaguucauuga

SEQ ID NO: 881227 - RNA, 19 nt, Homo sapiens
  misc_RNA (1)...(19): siRNA sense strand
aggaaugaccuuaagaaga

SEQ ID NO: 881228 - RNA, 19 nt, Homo sapiens
  misc_RNA (1)...(19): siRNA sense strand
gaggaaugaccuuaagaag

SEQ ID NO: 881229 - RNA, 19 nt, Homo sapiens
  misc_RNA (1)...(19): siRNA sense strand
caucaagugcuucgucugu

SEQ ID NO: 881230 - RNA, 19 nt, Homo sapiens
  misc_RNA (1)...(19): siRNA sense strand
ccgaguacaucagcaagga

SEQ ID NO: 881231 - RNA, 19 nt, Homo sapiens
  misc_RNA (1)...(19): siRNA sense strand
gacaagcagccagaacuga

SEQ ID NO: 881232 - RNA, 19 nt, Homo sapiens
  misc_RNA (1)...(19): siRNA sense strand
caagugcuucgucuguaaa

SEQ ID NO: 881233 - RNA, 19 nt, Homo sapiens
  misc_RNA (1)...(19): siRNA sense strand
agaggaaugaccuuaagaa

SEQ ID NO: 881234 - RNA, 19 nt, Homo sapiens
  misc_RNA (1)...(19): siRNA sense strand
cuacugcgaagcugacuau

SEQ ID NO: 881235 - RNA, 19 nt, Homo sapiens
  misc_RNA (1)...(19): siRNA sense strand
acaagcagccagaacugaa

SEQ ID NO: 881236 - RNA, 19 nt, Homo sapiens
  misc_RNA (1)...(19): siRNA sense strand
caucgucacaaaccgaauu

SEQ ID NO: 881237 - RNA, 19 nt, Homo sapiens
  misc_RNA (1)...(19): siRNA sense strand
ucuccgagccgugugauuu

SEQ ID NO: 881238 - RNA, 19 nt, Homo sapiens
  misc_RNA (1)...(19): siRNA sense strand
ccagaacugaagacagaaa

SEQ ID NO: 881239 - RNA, 19 nt, Homo sapiens
  misc_RNA (1)...(19): siRNA sense strand
ucccagggccuccgaaguu

SEQ ID NO: 881240 - RNA, 19 nt, Homo sapiens
  misc_RNA (1)...(19): siRNA sense strand
uggaagaggaaugaccuua

SEQ ID NO: 881241 - RNA, 19 nt, Homo sapiens
  misc_RNA (1)...(19): siRNA sense strand
gagacuggagagacacuug

SEQ ID NO: 881242 - RNA, 19 nt, Homo sapiens
  misc_RNA (1)...(19): siRNA sense strand
gcuccugaaugccgaguac

SEQ ID NO: 881243 - RNA, 19 nt, Homo sapiens
  misc_RNA (1)...(19): siRNA sense strand
cagaaggcgaagagaugua

SEQ ID NO: 881244 - RNA, 19 nt, Homo sapiens
  misc_RNA (1)...(19): siRNA sense strand
aaaccagaacuuccucaga

SEQ ID NO: 881245 - RNA, 19 nt, Homo sapiens
  misc_RNA (1)...(19): siRNA sense strand
cagcugcgaccaguucauu

SEQ ID NO: 881246 - RNA, 19 nt, Homo sapiens
  misc_RNA (1)...(19): siRNA sense strand
cgacaagcagccagaacug

SEQ ID NO: 881247 - RNA, 19 nt, Homo sapiens
  misc_RNA (1)...(19): siRNA sense strand
caaaccgaauucgcgugaa

SEQ ID NO: 881248 - RNA, 19 nt, Homo sapiens
  misc_RNA (1)...(19): siRNA sense strand
gaacuuccucagagagcau

SEQ ID NO: 881249 - RNA, 19 nt, Homo sapiens
  misc_RNA (1)...(19): siRNA sense strand
gggcugcggcacagaaauc

SEQ ID NO: 881250 - RNA, 19 nt, Homo sapiens
  misc_RNA (1)...(19): siRNA sense strand
gggacagcuuucacucaca

SEQ ID NO: 881251 - RNA, 19 nt, Homo sapiens
  misc_RNA (1)...(19): siRNA sense strand
ggugagauccuggacuaca

SEQ ID NO: 881252 - RNA, 19 nt, Homo sapiens
  misc_RNA (1)...(19): siRNA sense strand
acaaggaaaccagaacuuc

SEQ ID NO: 881253 - RNA, 19 nt, Homo sapiens
  misc_RNA (1)...(19): siRNA sense strand
cuucaagguuccuccaucu

SEQ ID NO: 881254 - RNA, 19 nt, Homo sapiens
  misc_RNA (1)...(19): siRNA sense strand
cugcgaagcugacuaucac

SEQ ID NO: 881255 - RNA, 19 nt, Homo sapiens
  misc_RNA (1)...(19): siRNA sense strand
ggaaugcaugugccagaag

SEQ ID NO: 881256 - RNA, 19 nt, Homo sapiens
  misc_RNA (1)...(19): siRNA sense strand
gugacagcugugagaaaua

SEQ ID NO: 881257 - RNA, 19 nt, Homo sapiens
  misc_RNA (1)...(19): siRNA sense strand
caaguacuuccacaucaag

SEQ ID NO: 881258 - RNA, 19 nt, Homo sapiens
  misc_RNA (1)...(19): siRNA sense strand
gugcaacacgugugggaau

SEQ ID NO: 881259 - RNA, 19 nt, Homo sapiens
  misc_RNA (1)...(19): siRNA sense strand
ggacuuggcagcccuuccu

SEQ ID NO: 881260 - RNA, 19 nt, Homo sapiens
  misc_RNA (1)...(19): siRNA sense strand
gugagauccuggacuacag

SEQ ID NO: 881261 - RNA, 19 nt, Homo sapiens
  misc_RNA (1)...(19): siRNA sense strand
cuccgagccgugugauuua

SEQ ID NO: 881262 - RNA, 19 nt, Homo sapiens
  misc_RNA (1)...(19): siRNA sense strand
agaaacaaggaaaccagaa

SEQ ID NO: 881263 - RNA, 19 nt, Homo sapiens
  misc_RNA (1)...(19): siRNA sense strand
caggugcggccagauguuu

SEQ ID NO: 881264 - RNA, 19 nt, Homo sapiens
  misc_RNA (1)...(19): siRNA sense strand
gcacuugggcuguuuuaag

SEQ ID NO: 881265 - RNA, 19 nt, Homo sapiens
  misc_RNA (1)...(19): siRNA sense strand
gcaacacgugugggaaugu

SEQ ID NO: 881266 - RNA, 19 nt, Homo sapiens
  misc_RNA (1)...(19): siRNA sense strand
ggaagcuuggaccaggaua

SEQ ID NO: 881267 - RNA, 19 nt, Homo sapiens
  misc_RNA (1)...(19): siRNA sense strand
gggaccgagugaccuucaa

SEQ ID NO: 881268 - RNA, 19 nt, Homo sapiens
  misc_RNA (1)...(19): siRNA sense strand
aggaaugcaugugccagaa

SEQ ID NO: 881269 - RNA, 19 nt, Homo sapiens
  misc_RNA (1)...(19): siRNA sense strand
gaagagagaccauuaggaa

SEQ ID NO: 881270 - RNA, 19 nt, Homo sapiens
  misc_RNA (1)...(19): siRNA sense strand
ccaaugcguugucuuauuu

SEQ ID NO: 881271 - RNA, 19 nt, Homo sapiens
  misc_RNA (1)...(19): siRNA sense strand
ggaggagccugugcaaaua

SEQ ID NO: 881272 - RNA, 19 nt, Homo sapiens
  misc_RNA (1)...(19): siRNA sense strand
gggcaagccuucaaauauu

SEQ ID NO: 881273 - RNA, 19 nt, Homo sapiens
  misc_RNA (1)...(19): siRNA sense strand
gagagaagcccuuugaaug

SEQ ID NO: 881274 - RNA, 19 nt, Homo sapiens
  misc_RNA (1)...(19): siRNA sense strand
ggucagucuucacaucuua

SEQ ID NO: 881275 - RNA, 19 nt, Homo sapiens
  misc_RNA (1)...(19): siRNA sense strand
gcaaauacaggaugcuuga

SEQ ID NO: 881276 - RNA, 19 nt, Homo sapiens
  misc_RNA (1)...(19): siRNA sense strand
ggagaggcauccugugaau

SEQ ID NO: 881277 - RNA, 19 nt, Homo sapiens
  misc_RNA (1)...(19): siRNA sense strand
gggagacccuaucaaugua

SEQ ID NO: 881278 - RNA, 19 nt, Homo sapiens
  misc_RNA (1)...(19): siRNA sense strand
gauaaauccuaugcaugua

SEQ ID NO: 881279 - RNA, 19 nt, Homo sapiens
  misc_RNA (1)...(19): siRNA sense strand
gcagagaagugcuuugacu

SEQ ID NO: 881280 - RNA, 19 nt, Homo sapiens
  misc_RNA (1)...(19): siRNA sense strand
ggagagaagccauuugaau

SEQ ID NO: 881281 - RNA, 19 nt, Homo sapiens
  misc_RNA (1)...(19): siRNA sense strand
gaaggccgcuaugcagauu

SEQ ID NO: 881282 - RNA, 19 nt, Homo sapiens
  misc_RNA (1)...(19): siRNA sense strand
agauacagcucugaccuua

SEQ ID NO: 881283 - RNA, 19 nt, Homo sapiens
  misc_RNA (1)...(19): siRNA sense strand
gucaagagauuagaaauuc

SEQ ID NO: 881284 - RNA, 19 nt, Homo sapiens
  misc_RNA (1)...(19): siRNA sense strand
gagaugugaugcuggagaa

SEQ ID NO: 881285 - RNA, 19 nt, Homo sapiens
  misc_RNA (1)...(19): siRNA sense strand
gagagaaaccauaugaaug

SEQ ID NO: 881286 - RNA, 19 nt, Homo sapiens
  misc_RNA (1)...(19): siRNA sense strand
guguaaagauugugggaaa

SEQ ID NO: 881287 - RNA, 19 nt, Homo sapiens
  misc_RNA (1)...(19): siRNA sense strand
ggagagaagcccuuugaau

SEQ ID NO: 881288 - RNA, 19 nt, Homo sapiens
  misc_RNA (1)...(19): siRNA sense strand
gagaagcccuacgagugua

SEQ ID NO: 881289 - RNA, 19 nt, Homo sapiens
  misc_RNA (1)...(19): siRNA sense strand
ggagagaagcccuaugugu

SEQ ID NO: 881290 - RNA, 19 nt, Homo sapiens
  misc_RNA (1)...(19): siRNA sense strand
ggacaaaguggaggaagaa

SEQ ID NO: 881291 - RNA, 19 nt, Homo sapiens
  misc_RNA (1)...(19): siRNA sense strand
uaacagcauugaaccacuu

SEQ ID NO: 881292 - RNA, 19 nt, Homo sapiens
  misc_RNA (1)...(19): siRNA sense strand
gcaaagagcagagccaaag

SEQ ID NO: 881293 - RNA, 19 nt, Homo sapiens
  misc_RNA (1)...(19): siRNA sense strand
ccagagagaaaccauauga

SEQ ID NO: 881294 - RNA, 19 nt, Homo sapiens
  misc_RNA (1)...(19): siRNA sense strand
gaggaacuuuaaccugauu

SEQ ID NO: 881295 - RNA, 19 nt, Homo sapiens
  misc_RNA (1)...(19): siRNA sense strand
ccagagugcccaccuaauu

SEQ ID NO: 881296 - RNA, 19 nt, Homo sapiens
  misc_RNA (1)...(19): siRNA sense strand
gcaauuccuagccaagaua

SEQ ID NO: 881297 - RNA, 19 nt, Homo sapiens
  misc_RNA (1)...(19): siRNA sense strand
cugggaaucucaacuuaaa

SEQ ID NO: 881298 - RNA, 19 nt, Homo sapiens
  misc_RNA (1)...(19): siRNA sense strand
gcauguaacaaaugugaaa

SEQ ID NO: 881299 - RNA, 19 nt, Homo sapiens
  misc_RNA (1)...(19): siRNA sense strand
cagagauccuguccauuga

SEQ ID NO: 881300 - RNA, 19 nt, Homo sapiens
  misc_RNA (1)...(19): siRNA sense strand
gagauccuguccauugaug

SEQ ID NO: 881301 - RNA, 19 nt, Homo sapiens
  misc_RNA (1)...(19): siRNA sense strand
ggucuugagucgucuuuca

SEQ ID NO: 881302 - RNA, 19 nt, Homo sapiens
  misc_RNA (1)...(19): siRNA sense strand
gagaagcccuuugaaugca

SEQ ID NO: 881303 - RNA, 19 nt, Homo sapiens
  misc_RNA (1)...(19): siRNA sense strand
ggcaagccuucaaauauuc

SEQ ID NO: 881304 - RNA, 19 nt, Homo sapiens
  misc_RNA (1)...(19): siRNA sense strand
gccugggaaucucaacuua

SEQ ID NO: 881305 - RNA, 19 nt, Homo sapiens
  misc_RNA (1)...(19): siRNA sense strand
gugcagaaccucaguguca

SEQ ID NO: 881306 - RNA, 19 nt, Homo sapiens
  misc_RNA (1)...(19): siRNA sense strand
agaggagccuguauagaga

SEQ ID NO: 881307 - RNA, 19 nt, Homo sapiens
  misc_RNA (1)...(19): siRNA sense strand
gaacucacacuggagagaa

SEQ ID NO: 881308 - RNA, 19 nt, Homo sapiens
  misc_RNA (1)...(19): siRNA sense strand
gaacgugcacaagaggaua

SEQ ID NO: 881309 - RNA, 19 nt, Homo sapiens
  misc_RNA (1)...(19): siRNA sense strand
gaacucacacuggagagaa

SEQ ID NO: 881310 - RNA, 19 nt, Homo sapiens
  misc_RNA (1)...(19): siRNA sense strand
cgacacaugagaacccaua

SEQ ID NO: 881311 - RNA, 19 nt, Homo sapiens
  misc_RNA (1)...(19): siRNA sense strand
auacagcucugaccuuauc

SEQ ID NO: 881312 - RNA, 19 nt, Homo sapiens
  misc_RNA (1)...(19): siRNA sense strand
gcacagcuccucacucacu

SEQ ID NO: 881313 - RNA, 19 nt, Homo sapiens
  misc_RNA (1)...(19): siRNA sense strand
aggcacagcuccucacuca

SEQ ID NO: 881314 - RNA, 19 nt, Homo sapiens
  misc_RNA (1)...(19): siRNA sense strand
caagauacuuuuacagaga

SEQ ID NO: 881315 - RNA, 19 nt, Homo sapiens
  misc_RNA (1)...(19): siRNA sense strand
ggaaagccuucagggaaca

SEQ ID NO: 881316 - RNA, 19 nt, Homo sapiens
  misc_RNA (1)...(19): siRNA sense strand
gaccuuaucaggcaugaga

SEQ ID NO: 881317 - RNA, 19 nt, Homo sapiens
  misc_RNA (1)...(19): siRNA sense strand
cagaggagccuguauagag

SEQ ID NO: 881318 - RNA, 19 nt, Homo sapiens
  misc_RNA (1)...(19): siRNA sense strand
ggaagagagaccauuagga

SEQ ID NO: 881319 - RNA, 19 nt, Homo sapiens
  misc_RNA (1)...(19): siRNA sense strand
agggaacacucuucacuga

SEQ ID NO: 881320 - RNA, 19 nt, Homo sapiens
  misc_RNA (1)...(19): siRNA sense strand
cccaaugcguugucuuauu

SEQ ID NO: 881321 - RNA, 19 nt, Homo sapiens
  misc_RNA (1)...(19): siRNA sense strand
gaacuugagaaaccuuuua

SEQ ID NO: 881322 - RNA, 19 nt, Homo sapiens
  misc_RNA (1)...(19): siRNA sense strand
ggacgagcacucaucugaa

SEQ ID NO: 881323 - RNA, 19 nt, Homo sapiens
  misc_RNA (1)...(19): siRNA sense strand
acacaucugcgaacccaua

SEQ ID NO: 881324 - RNA, 19 nt, Homo sapiens
  misc_RNA (1)...(19): siRNA sense strand
ccagucaccuuugcagaug

SEQ ID NO: 881325 - RNA, 19 nt, Homo sapiens
  misc_RNA (1)...(19): siRNA sense strand
gacgagcacucaucugaac

SEQ ID NO: 881326 - RNA, 19 nt, Homo sapiens
  misc_RNA (1)...(19): siRNA sense strand
gaagagagggagacaccau

SEQ ID NO: 881327 - RNA, 19 nt, Homo sapiens
  misc_RNA (1)...(19): siRNA sense strand
ggagacccuaucaauguaa

SEQ ID NO: 881328 - RNA, 19 nt, Homo sapiens
  misc_RNA (1)...(19): siRNA sense strand
caucugaacgugcacaaga

SEQ ID NO: 881329 - RNA, 19 nt, Homo sapiens
  misc_RNA (1)...(19): siRNA sense strand
ggaaaaccuucacgaggaa

SEQ ID NO: 881330 - RNA, 19 nt, Homo sapiens
  misc_RNA (1)...(19): siRNA sense strand
gaaugucaagagauuagaa

SEQ ID NO: 881331 - RNA, 19 nt, Homo sapiens
  misc_RNA (1)...(19): siRNA sense strand
gugggaagagagaccauua

SEQ ID NO: 881332 - RNA, 19 nt, Homo sapiens
  misc_RNA (1)...(19): siRNA sense strand
cgggagacccuaucaaugu

SEQ ID NO: 881333 - RNA, 19 nt, Homo sapiens
  misc_RNA (1)...(19): siRNA sense strand
cuucacaucuuauuguaca

SEQ ID NO: 881334 - RNA, 19 nt, Homo sapiens
  misc_RNA (1)...(19): siRNA sense strand
cggaggagccugugcaaau

SEQ ID NO: 881335 - RNA, 19 nt, Homo sapiens
  misc_RNA (1)...(19): siRNA sense strand
agagagaaaccauaugaau

SEQ ID NO: 881336 - RNA, 19 nt, Homo sapiens
  misc_RNA (1)...(19): siRNA sense strand
gcuggugcccuccauagaa

SEQ ID NO: 881337 - RNA, 19 nt, Homo sapiens
  misc_RNA (1)...(19): siRNA sense strand
ccucaucccucaggaaaca

SEQ ID NO: 881338 - RNA, 19 nt, Homo sapiens
  misc_RNA (1)...(19): siRNA sense strand
gugggcaagccuucaaaua

SEQ ID NO: 881339 - RNA, 19 nt, Homo sapiens
  misc_RNA (1)...(19): siRNA sense strand
cagagugcccaccuaauug

SEQ ID NO: 881340 - RNA, 19 nt, Homo sapiens
  misc_RNA (1)...(19): siRNA sense strand
gagagggagacaccauuga

SEQ ID NO: 881341 - RNA, 19 nt, Homo sapiens
  misc_RNA (1)...(19): siRNA sense strand
caucuuauuguacauguga

SEQ ID NO: 881342 - RNA, 19 nt, Homo sapiens
  misc_RNA (1)...(19): siRNA sense strand
gaacccauaccagagagaa

SEQ ID NO: 881343 - RNA, 19 nt, Homo sapiens
  misc_RNA (1)...(19): siRNA sense strand
cuacgaguguaaagauugu

SEQ ID NO: 881344 - RNA, 19 nt, Homo sapiens
  misc_RNA (1)...(19): siRNA sense strand
ggcaauuccuagccaagau

SEQ ID NO: 881345 - RNA, 19 nt, Homo sapiens
  misc_RNA (1)...(19): siRNA sense strand
gcuccucacucacuguaca

SEQ ID NO: 881346 - RNA, 19 nt, Homo sapiens
  misc_RNA (1)...(19): siRNA sense strand
gagacccuaucaauguaau

SEQ ID NO: 881347 - RNA, 19 nt, Homo sapiens
  misc_RNA (1)...(19): siRNA sense strand
gagaaaccauaugaaugca

SEQ ID NO: 881348 - RNA, 19 nt, Homo sapiens
  misc_RNA (1)...(19): siRNA sense strand
ugggcaagccuucaaauau

SEQ ID NO: 881349 - RNA, 19 nt, Homo sapiens
  misc_RNA (1)...(19): siRNA sense strand
auaaugaacuugagaaacc

SEQ ID NO: 881350 - RNA, 19 nt, Homo sapiens
  misc_RNA (1)...(19): siRNA sense strand
acaggaaccagucaccuuu

SEQ ID NO: 881351 - RNA, 19 nt, Homo sapiens
  misc_RNA (1)...(19): siRNA sense strand
ggaaacaugcaaggacuca

SEQ ID NO: 881352 - RNA, 19 nt, Homo sapiens
  misc_RNA (1)...(19): siRNA sense strand
cgaggaacuuuaaccugau

SEQ ID NO: 881353 - RNA, 19 nt, Homo sapiens
  misc_RNA (1)...(19): siRNA sense strand
ccagaagaauggguguuuc

SEQ ID NO: 881354 - RNA, 19 nt, Homo sapiens
  misc_RNA (1)...(19): siRNA sense strand
caacuuaaacccgaagagu

SEQ ID NO: 881355 - RNA, 19 nt, Homo sapiens
  misc_RNA (1)...(19): siRNA sense strand
ggacucacaguggcaagaa

SEQ ID NO: 881356 - RNA, 19 nt, Homo sapiens
  misc_RNA (1)...(19): siRNA sense strand
gcacaagaggauacacaca

SEQ ID NO: 881357 - RNA, 19 nt, Homo sapiens
  misc_RNA (1)...(19): siRNA sense strand
gaacccauaccggagagaa

SEQ ID NO: 881358 - RNA, 19 nt, Homo sapiens
  misc_RNA (1)...(19): siRNA sense strand
caacugugcaaacccaaug

SEQ ID NO: 881359 - RNA, 19 nt, Homo sapiens
  misc_RNA (1)...(19): siRNA sense strand
gagccuguauagagaugug

SEQ ID NO: 881360 - RNA, 19 nt, Homo sapiens
  misc_RNA (1)...(19): siRNA sense strand
acucagaggagccuguaua

SEQ ID NO: 881361 - RNA, 19 nt, Homo sapiens
  misc_RNA (1)...(19): siRNA sense strand
ccggagagaagccauuuga

SEQ ID NO: 881362 - RNA, 19 nt, Homo sapiens
  misc_RNA (1)...(19): siRNA sense strand
gucuucacaucuuauugua

SEQ ID NO: 881363 - RNA, 19 nt, Homo sapiens
  misc_RNA (1)...(19): siRNA sense strand
uaaauccuaugcauguaac

SEQ ID NO: 881364 - RNA, 19 nt, Homo sapiens
  misc_RNA (1)...(19): siRNA sense strand
cggacgagcacucaucuga

SEQ ID NO: 881365 - RNA, 19 nt, Homo sapiens
  misc_RNA (1)...(19): siRNA sense strand
agagaaaccauaugaaugc

SEQ ID NO: 881366 - RNA, 19 nt, Homo sapiens
  misc_RNA (1)...(19): siRNA sense strand
cugugaaugucaagagauu

SEQ ID NO: 881367 - RNA, 19 nt, Homo sapiens
  misc_RNA (1)...(19): siRNA sense strand
gggcgagccuuuggucagu

SEQ ID NO: 881368 - RNA, 19 nt, Homo sapiens
  misc_RNA (1)...(19): siRNA sense strand
ggauguggccguggaguuc

SEQ ID NO: 881369 - RNA, 19 nt, Homo sapiens
  misc_RNA (1)...(19): siRNA sense strand
ggaagaagaugaagacuau

SEQ ID NO: 881370 - RNA, 19 nt, Homo sapiens
  misc_RNA (1)...(19): siRNA sense strand
gaagacagauaucaagaaa

SEQ ID NO: 881371 - RNA, 19 nt, Homo sapiens
  misc_RNA (1)...(19): siRNA sense strand
cauaauaguuugcccauuu

SEQ ID NO: 881372 - RNA, 19 nt, Homo sapiens
  misc_RNA (1)...(19): siRNA sense strand
ggaaggaaccaccaguuua

SEQ ID NO: 881373 - RNA, 19 nt, Homo sapiens
  misc_RNA (1)...(19): siRNA sense strand
ugaagacuaucgagaauuu

SEQ ID NO: 881374 - RNA, 19 nt, Homo sapiens
  misc_RNA (1)...(19): siRNA sense strand
gaaagccggagaugaaaua

SEQ ID NO: 881375 - RNA, 19 nt, Homo sapiens
  misc_RNA (1)...(19): siRNA sense strand
uaaaggagaugaaccuaga

SEQ ID NO: 881376 - RNA, 19 nt, Homo sapiens
  misc_RNA (1)...(19): siRNA sense strand
gauaauaguuuccaguaca

SEQ ID NO: 881377 - RNA, 19 nt, Homo sapiens
  misc_RNA (1)...(19): siRNA sense strand
cauagaggguuuaaagaaa

SEQ ID NO: 881378 - RNA, 19 nt, Homo sapiens
  misc_RNA (1)...(19): siRNA sense strand
acaaaugucuucuauguca

SEQ ID NO: 881379 - RNA, 19 nt, Homo sapiens
  misc_RNA (1)...(19): siRNA sense strand
gaaggaaccaccaguuuau

SEQ ID NO: 881380 - RNA, 19 nt, Homo sapiens
  misc_RNA (1)...(19): siRNA sense strand
gaucagaggaggaauaaug

SEQ ID NO: 881381 - RNA, 19 nt, Homo sapiens
  misc_RNA (1)...(19): siRNA sense strand
gagcaaugguacuuagaaa

SEQ ID NO: 881382 - RNA, 19 nt, Homo sapiens
  misc_RNA (1)...(19): siRNA sense strand
ggaagaccauagaggguuu

SEQ ID NO: 881383 - RNA, 19 nt, Homo sapiens
  misc_RNA (1)...(19): siRNA sense strand
gagacguucugccaagaua

SEQ ID NO: 881384 - RNA, 19 nt, Homo sapiens
  misc_RNA (1)...(19): siRNA sense strand
gcacaguuccagaaaguaa

SEQ ID NO: 881385 - RNA, 19 nt, Homo sapiens
  misc_RNA (1)...(19): siRNA sense strand
gaugaagacuaucgagaau

SEQ ID NO: 881386 - RNA, 19 nt, Homo sapiens
  misc_RNA (1)...(19): siRNA sense strand
ggauaucucuaccauguca

SEQ ID NO: 881387 - RNA, 19 nt, Homo sapiens
  misc_RNA (1)...(19): siRNA sense strand
gagaauuuccucagaagaa

SEQ ID NO: 881388 - RNA, 19 nt, Homo sapiens
  misc_RNA (1)...(19): siRNA sense strand
agaaagaauuugugucaga

SEQ ID NO: 881389 - RNA, 19 nt, Homo sapiens
  misc_RNA (1)...(19): siRNA sense strand
gaaacuuuguggcuggaaa

SEQ ID NO: 881390 - RNA, 19 nt, Homo sapiens
  misc_RNA (1)...(19): siRNA sense strand
caugaugacuccuuaagug

SEQ ID NO: 881391 - RNA, 19 nt, Homo sapiens
  misc_RNA (1)...(19): siRNA sense strand
gccaggaaguacuacauaa

SEQ ID NO: 881392 - RNA, 19 nt, Homo sapiens
  misc_RNA (1)...(19): siRNA sense strand
ggaaacaacuucguucacu

SEQ ID NO: 881393 - RNA, 19 nt, Homo sapiens
  misc_RNA (1)...(19): siRNA sense strand
ggaugaagaugagaagaau

SEQ ID NO: 881394 - RNA, 19 nt, Homo sapiens
  misc_RNA (1)...(19): siRNA sense strand
gagcagaaggucucuaaga

SEQ ID NO: 881395 - RNA, 19 nt, Homo sapiens
  misc_RNA (1)...(19): siRNA sense strand
ugaaauagaugagccaagu

SEQ ID NO: 881396 - RNA, 19 nt, Homo sapiens
  misc_RNA (1)...(19): siRNA sense strand
caguguaucuggccuuaaa

SEQ ID NO: 881397 - RNA, 19 nt, Homo sapiens
  misc_RNA (1)...(19): siRNA sense strand
gcaaugguacuuagaaauc

SEQ ID NO: 881398 - RNA, 19 nt, Homo sapiens
  misc_RNA (1)...(19): siRNA sense strand
cgugagaguugcuccagua

SEQ ID NO: 881399 - RNA, 19 nt, Homo sapiens
  misc_RNA (1)...(19): siRNA sense strand
gaauaaugaggaacuggua

SEQ ID NO: 881400 - RNA, 19 nt, Homo sapiens
  misc_RNA (1)...(19): siRNA sense strand
ggaagacagauaucaagaa

SEQ ID NO: 881401 - RNA, 19 nt, Homo sapiens
  misc_RNA (1)...(19): siRNA sense strand
gaggaggaauaaugaggaa

SEQ ID NO: 881402 - RNA, 19 nt, Homo sapiens
  misc_RNA (1)...(19): siRNA sense strand
gaaccuagagucaaagagu

SEQ ID NO: 881403 - RNA, 19 nt, Homo sapiens
  misc_RNA (1)...(19): siRNA sense strand
gaugacuccuuaagugguu

SEQ ID NO: 881404 - RNA, 19 nt, Homo sapiens
  misc_RNA (1)...(19): siRNA sense strand
uggcagggaugaaguauca

SEQ ID NO: 881405 - RNA, 19 nt, Homo sapiens
  misc_RNA (1)...(19): siRNA sense strand
ugggauaucucuaccaugu

SEQ ID NO: 881406 - RNA, 19 nt, Homo sapiens
  misc_RNA (1)...(19): siRNA sense strand
cccaaagacuaaucauaaa

SEQ ID NO: 881407 - RNA, 19 nt, Homo sapiens
  misc_RNA (1)...(19): siRNA sense strand
gaaaagcugaugaagauaa

SEQ ID NO: 881408 - RNA, 19 nt, Homo sapiens
  misc_RNA (1)...(19): siRNA sense strand
gaggagcaaugguacuuag

SEQ ID NO: 881409 - RNA, 19 nt, Homo sapiens
  misc_RNA (1)...(19): siRNA sense strand
ggagaugaaccuagaguca

SEQ ID NO: 881410 - RNA, 19 nt, Homo sapiens
  misc_RNA (1)...(19): siRNA sense strand
gggaaaggcuccgaacagu

SEQ ID NO: 881411 - RNA, 19 nt, Homo sapiens
  misc_RNA (1)...(19): siRNA sense strand
ccauagaggguuuaaagaa

SEQ ID NO: 881412 - RNA, 19 nt, Homo sapiens
  misc_RNA (1)...(19): siRNA sense strand
gaccauagaggguuuaaag

SEQ ID NO: 881413 - RNA, 19 nt, Homo sapiens
  misc_RNA (1)...(19): siRNA sense strand
cagcacaguuccagaaagu

SEQ ID NO: 881414 - RNA, 19 nt, Homo sapiens
  misc_RNA (1)...(19): siRNA sense strand
ucaccagcaucaugggaua

SEQ ID NO: 881415 - RNA, 19 nt, Homo sapiens
  misc_RNA (1)...(19): siRNA sense strand
agaugaaccuagagucaaa

SEQ ID NO: 881416 - RNA, 19 nt, Homo sapiens
  misc_RNA (1)...(19): siRNA sense strand
gagcugagucuuagaguag

SEQ ID NO: 881417 - RNA, 19 nt, Homo sapiens
  misc_RNA (1)...(19): siRNA sense strand
aaaucuaccuacuggauga

SEQ ID NO: 881418 - RNA, 19 nt, Homo sapiens
  misc_RNA (1)...(19): siRNA sense strand
ggaaggaucagaggaggaa

SEQ ID NO: 881419 - RNA, 19 nt, Homo sapiens
  misc_RNA (1)...(19): siRNA sense strand
uaaagcagcggcagcaaga

SEQ ID NO: 881420 - RNA, 19 nt, Homo sapiens
  misc_RNA (1)...(19): siRNA sense strand
gaggacugguucguuguaa

SEQ ID NO: 881421 - RNA, 19 nt, Homo sapiens
  misc_RNA (1)...(19): siRNA sense strand
ucagaaagaauuuguguca

SEQ ID NO: 881422 - RNA, 19 nt, Homo sapiens
  misc_RNA (1)...(19): siRNA sense strand
ggaaaggcuccgaacaguu

SEQ ID NO: 881423 - RNA, 19 nt, Homo sapiens
  misc_RNA (1)...(19): siRNA sense strand
caggaaauguuuacuuguc

SEQ ID NO: 881424 - RNA, 19 nt, Homo sapiens
  misc_RNA (1)...(19): siRNA sense strand
gagaguugcuccaguagcu

SEQ ID NO: 881425 - RNA, 19 nt, Homo sapiens
  misc_RNA (1)...(19): siRNA sense strand
ggaaguacuacauaaaugg

SEQ ID NO: 881426 - RNA, 19 nt, Homo sapiens
  misc_RNA (1)...(19): siRNA sense strand
uaucgagaauuuccucaga

SEQ ID NO: 881427 - RNA, 19 nt, Homo sapiens
  misc_RNA (1)...(19): siRNA sense strand
agagaguggugucaaguau

SEQ ID NO: 881428 - RNA, 19 nt, Homo sapiens
  misc_RNA (1)...(19): siRNA sense strand
ggacagccagagugcuuaa

SEQ ID NO: 881429 - RNA, 19 nt, Homo sapiens
  misc_RNA (1)...(19): siRNA sense strand
gggccuauauccuucuuuc

SEQ ID NO: 881430 - RNA, 19 nt, Homo sapiens
  misc_RNA (1)...(19): siRNA sense strand
ggagcaaugguacuuagaa

SEQ ID NO: 881431 - RNA, 19 nt, Homo sapiens
  misc_RNA (1)...(19): siRNA sense strand
ggaggagcaaugguacuua

SEQ ID NO: 881432 - RNA, 19 nt, Homo sapiens
  misc_RNA (1)...(19): siRNA sense strand
ggauaauaguuuccaguac

SEQ ID NO: 881433 - RNA, 19 nt, Homo sapiens
  misc_RNA (1)...(19): siRNA sense strand
ccugggcucuuguacauug

SEQ ID NO: 881434 - RNA, 19 nt, Homo sapiens
  misc_RNA (1)...(19): siRNA sense strand
gaaguacuacauaaaugga

SEQ ID NO: 881435 - RNA, 19 nt, Homo sapiens
  misc_RNA (1)...(19): siRNA sense strand
ccugaaaugucaccacugu

SEQ ID NO: 881436 - RNA, 19 nt, Homo sapiens
  misc_RNA (1)...(19): siRNA sense strand
ggaaauguuuacuugucau

SEQ ID NO: 881437 - RNA, 19 nt, Homo sapiens
  misc_RNA (1)...(19): siRNA sense strand
caagccagcugcuacuucu

SEQ ID NO: 881438 - RNA, 19 nt, Homo sapiens
  misc_RNA (1)...(19): siRNA sense strand
agcagaaggucucuaagaa

SEQ ID NO: 881439 - RNA, 19 nt, Homo sapiens
  misc_RNA (1)...(19): siRNA sense strand
cgaagggucagguggagua

SEQ ID NO: 881440 - RNA, 19 nt, Homo sapiens
  misc_RNA (1)...(19): siRNA sense strand
ggaggaagcaacggccuaa

SEQ ID NO: 881441 - RNA, 19 nt, Homo sapiens
  misc_RNA (1)...(19): siRNA sense strand
agaguggugucaaguauca

SEQ ID NO: 881442 - RNA, 19 nt, Homo sapiens
  misc_RNA (1)...(19): siRNA sense strand
cugcugaacuggccaagga

SEQ ID NO: 881443 - RNA, 19 nt, Homo sapiens
  misc_RNA (1)...(19): siRNA sense strand
gugaaccagugagugauuu

SEQ ID NO: 881444 - RNA, 19 nt, Homo sapiens
  misc_RNA (1)...(19): siRNA sense strand
gcagaaggucucuaagaag

SEQ ID NO: 881445 - RNA, 19 nt, Homo sapiens
  misc_RNA (1)...(19): siRNA sense strand
caccugggcucuuguacau

SEQ ID NO: 881446 - RNA, 19 nt, Homo sapiens
  misc_RNA (1)...(19): siRNA sense strand
ccaggaaguacuacauaaa

SEQ ID NO: 881447 - RNA, 19 nt, Homo sapiens
  misc_RNA (1)...(19): siRNA sense strand
gaaaagaugacccugaaau

SEQ ID NO: 881448 - RNA, 19 nt, Homo sapiens
  misc_RNA (1)...(19): siRNA sense strand
aggcuggacuugcauauca

SEQ ID NO: 881449 - RNA, 19 nt, Homo sapiens
  misc_RNA (1)...(19): siRNA sense strand
ggucagagcaugggccuau

SEQ ID NO: 881450 - RNA, 19 nt, Homo sapiens
  misc_RNA (1)...(19): siRNA sense strand
guacuuagaaaucguugau

SEQ ID NO: 881451 - RNA, 19 nt, Homo sapiens
  misc_RNA (1)...(19): siRNA sense strand
agagcugagucuuagagua

SEQ ID NO: 881452 - RNA, 19 nt, Homo sapiens
  misc_RNA (1)...(19): siRNA sense strand
cauaaauggaagacagaua

SEQ ID NO: 881453 - RNA, 19 nt, Homo sapiens
  misc_RNA (1)...(19): siRNA sense strand
ggagcuggccucugcugaa

SEQ ID NO: 881454 - RNA, 19 nt, Homo sapiens
  misc_RNA (1)...(19): siRNA sense strand
cugccaagauagcuguaua

SEQ ID NO: 881455 - RNA, 19 nt, Homo sapiens
  misc_RNA (1)...(19): siRNA sense strand
gagaugaaccuagagucaa

SEQ ID NO: 881456 - RNA, 19 nt, Homo sapiens
  misc_RNA (1)...(19): siRNA sense strand
gaucgugggagcuaagaau

SEQ ID NO: 881457 - RNA, 19 nt, Homo sapiens
  misc_RNA (1)...(19): siRNA sense strand
cauaaacgaggaaggaaau

SEQ ID NO: 881458 - RNA, 19 nt, Homo sapiens
  misc_RNA (1)...(19): siRNA sense strand
gcagcagccuggcauugag

SEQ ID NO: 881459 - RNA, 19 nt, Homo sapiens
  misc_RNA (1)...(19): siRNA sense strand
caggaaguacuacauaaau

SEQ ID NO: 881460 - RNA, 19 nt, Homo sapiens
  misc_RNA (1)...(19): siRNA sense strand
aaagaugacccugaaaugu

SEQ ID NO: 881461 - RNA, 19 nt, Homo sapiens
  misc_RNA (1)...(19): siRNA sense strand
uaaagagacugggaaagcu

SEQ ID NO: 881462 - RNA, 19 nt, Homo sapiens
  misc_RNA (1)...(19): siRNA sense strand
agcaggaaauguuuacuug

SEQ ID NO: 881463 - RNA, 19 nt, Homo sapiens
  misc_RNA (1)...(19): siRNA sense strand
gaagaccauagaggguuua

SEQ ID NO: 881464 - RNA, 19 nt, Homo sapiens
  misc_RNA (1)...(19): siRNA sense strand
gaagaugagaagaaucaag

SEQ ID NO: 881465 - RNA, 19 nt, Homo sapiens
  misc_RNA (1)...(19): siRNA sense strand
ggacccagugcuccauaaa

SEQ ID NO: 881466 - RNA, 19 nt, Homo sapiens
  misc_RNA (1)...(19): siRNA sense strand
ggugucaaguaucacauca

SEQ ID NO: 881467 - RNA, 19 nt, Homo sapiens
  misc_RNA (1)...(19): siRNA sense strand
aggaaguacuacauaaaug

SEQ ID NO: 881468 - RNA, 19 nt, Homo sapiens
  misc_RNA (1)...(19): siRNA sense strand
aaauagaugagccaaguga

SEQ ID NO: 881469 - RNA, 19 nt, Homo sapiens
  misc_RNA (1)...(19): siRNA sense strand
gcccuuggcuucauuguuu

SEQ ID NO: 881470 - RNA, 19 nt, Homo sapiens
  misc_RNA (1)...(19): siRNA sense strand
uauaugaacuggagaaaga

SEQ ID NO: 881471 - RNA, 19 nt, Homo sapiens
  misc_RNA (1)...(19): siRNA sense strand
caagaugacuggaaacuag

SEQ ID NO: 881472 - RNA, 19 nt, Homo sapiens
  misc_RNA (1)...(19): siRNA sense strand
ggaccaaauuccauucaaa

SEQ ID NO: 881473 - RNA, 19 nt, Homo sapiens
  misc_RNA (1)...(19): siRNA sense strand
caacaagacccucauauuc

SEQ ID NO: 881474 - RNA, 19 nt, Homo sapiens
  misc_RNA (1)...(19): siRNA sense strand
uaagagaagucguuuaaag

SEQ ID NO: 881475 - RNA, 19 nt, Homo sapiens
  misc_RNA (1)...(19): siRNA sense strand
uagaacagauugcaaagaa

SEQ ID NO: 881476 - RNA, 19 nt, Homo sapiens
  misc_RNA (1)...(19): siRNA sense strand
ggaaagaugcucagagaga

SEQ ID NO: 881477 - RNA, 19 nt, Homo sapiens
  misc_RNA (1)...(19): siRNA sense strand
gcaacaagacccucauauu

SEQ ID NO: 881478 - RNA, 19 nt, Homo sapiens
  misc_RNA (1)...(19): siRNA sense strand
gaagaggaagggcaaguuu

SEQ ID NO: 881479 - RNA, 19 nt, Homo sapiens
  misc_RNA (1)...(19): siRNA sense strand
gaacacagucuuucgacaa

SEQ ID NO: 881480 - RNA, 19 nt, Homo sapiens
  misc_RNA (1)...(19): siRNA sense strand
caacugggccgugcagaua

SEQ ID NO: 881481 - RNA, 19 nt, Homo sapiens
  misc_RNA (1)...(19): siRNA sense strand
gagagagaauccugcagaa

SEQ ID NO: 881482 - RNA, 19 nt, Homo sapiens
  misc_RNA (1)...(19): siRNA sense strand
gcaggccucucccaacuug

SEQ ID NO: 881483 - RNA, 19 nt, Homo sapiens
  misc_RNA (1)...(19): siRNA sense strand
gaaacgagagggaaucuuc

SEQ ID NO: 881484 - RNA, 19 nt, Homo sapiens
  misc_RNA (1)...(19): siRNA sense strand
gaaagaaugcuggcaacaa

SEQ ID NO: 881485 - RNA, 19 nt, Homo sapiens
  misc_RNA (1)...(19): siRNA sense strand
ugagauggcuccuacgaau

SEQ ID NO: 881486 - RNA, 19 nt, Homo sapiens
  misc_RNA (1)...(19): siRNA sense strand
gaagagauagaacaugaug

SEQ ID NO: 881487 - RNA, 19 nt, Homo sapiens
  misc_RNA (1)...(19): siRNA sense strand
aaacauagaccaucacauc

SEQ ID NO: 881488 - RNA, 19 nt, Homo sapiens
  misc_RNA (1)...(19): siRNA sense strand
gaacagauugcaaagaaag

SEQ ID NO: 881489 - RNA, 19 nt, Homo sapiens
  misc_RNA (1)...(19): siRNA sense strand
uugaagagauagaacauga

SEQ ID NO: 881490 - RNA, 19 nt, Homo sapiens
  misc_RNA (1)...(19): siRNA sense strand
gaccacaucccacccaauu

SEQ ID NO: 881491 - RNA, 19 nt, Homo sapiens
  misc_RNA (1)...(19): siRNA sense strand
caguuuaccuucagauuuc

SEQ ID NO: 881492 - RNA, 19 nt, Homo sapiens
  misc_RNA (1)...(19): siRNA sense strand
ggagaaagaauuccugucu

SEQ ID NO: 881493 - RNA, 19 nt, Homo sapiens
  misc_RNA (1)...(19): siRNA sense strand
gagcacagcaggcaccuau

SEQ ID NO: 881494 - RNA, 19 nt, Homo sapiens
  misc_RNA (1)...(19): siRNA sense strand
ccaacuggugcaacuauua

SEQ ID NO: 881495 - RNA, 19 nt, Homo sapiens
  misc_RNA (1)...(19): siRNA sense strand
gaaaggauaagaccucucu

SEQ ID NO: 881496 - RNA, 19 nt, Homo sapiens
  misc_RNA (1)...(19): siRNA sense strand
ggacaucgaaucaguuuac

SEQ ID NO: 881497 - RNA, 19 nt, Homo sapiens
  misc_RNA (1)...(19): siRNA sense strand
aaagaaugcuggcaacaag

SEQ ID NO: 881498 - RNA, 19 nt, Homo sapiens
  misc_RNA (1)...(19): siRNA sense strand
caugcaagaugacuggaaa

SEQ ID NO: 881499 - RNA, 19 nt, Homo sapiens
  misc_RNA (1)...(19): siRNA sense strand
gaaacuugccgucuuccuu

SEQ ID NO: 881500 - RNA, 19 nt, Homo sapiens
  misc_RNA (1)...(19): siRNA sense strand
ugggaaagaugcucagaga

SEQ ID NO: 881501 - RNA, 19 nt, Homo sapiens
  misc_RNA (1)...(19): siRNA sense strand
uaaacucacuuugcccauu

SEQ ID NO: 881502 - RNA, 19 nt, Homo sapiens
  misc_RNA (1)...(19): siRNA sense strand
gagauggcuccuacgaaua

SEQ ID NO: 881503 - RNA, 19 nt, Homo sapiens
  misc_RNA (1)...(19): siRNA sense strand
ccauacaguugacuucaga

SEQ ID NO: 881504 - RNA, 19 nt, Homo sapiens
  misc_RNA (1)...(19): siRNA sense strand
uugccaagcucaugaaaga

SEQ ID NO: 881505 - RNA, 19 nt, Homo sapiens
  misc_RNA (1)...(19): siRNA sense strand
agaagaauuugaggaugua

SEQ ID NO: 881506 - RNA, 19 nt, Homo sapiens
  misc_RNA (1)...(19): siRNA sense strand
cgaauagucugaguagauc

SEQ ID NO: 881507 - RNA, 19 nt, Homo sapiens
  misc_RNA (1)...(19): siRNA sense strand
gcaagaugacuggaaacua

SEQ ID NO: 881508 - RNA, 19 nt, Homo sapiens
  misc_RNA (1)...(19): siRNA sense strand
ccaaggaagagaagaagaa

SEQ ID NO: 881509 - RNA, 19 nt, Homo sapiens
  misc_RNA (1)...(19): siRNA sense strand
aagaagaauuugaggaugu

SEQ ID NO: 881510 - RNA, 19 nt, Homo sapiens
  misc_RNA (1)...(19): siRNA sense strand
gaagggcaaguuuaagaga

SEQ ID NO: 881511 - RNA, 19 nt, Homo sapiens
  misc_RNA (1)...(19): siRNA sense strand
ccucagagagcuucauaaa

SEQ ID NO: 881512 - RNA, 19 nt, Homo sapiens
  misc_RNA (1)...(19): siRNA sense strand
gcagauggacagugaagau

SEQ ID NO: 881513 - RNA, 19 nt, Homo sapiens
  misc_RNA (1)...(19): siRNA sense strand
ggaacuuaacauucugaua

SEQ ID NO: 881514 - RNA, 19 nt, Homo sapiens
  misc_RNA (1)...(19): siRNA sense strand
ugaucuaccucuugggaaa

SEQ ID NO: 881515 - RNA, 19 nt, Homo sapiens
  misc_RNA (1)...(19): siRNA sense strand
caaauaaaauugccuaguc

SEQ ID NO: 881516 - RNA, 19 nt, Homo sapiens
  misc_RNA (1)...(19): siRNA sense strand
ugaaagauagaacagauug

SEQ ID NO: 881517 - RNA, 19 nt, Homo sapiens
  misc_RNA (1)...(19): siRNA sense strand
gaccaaauuccauucaaau

SEQ ID NO: 881518 - RNA, 19 nt, Homo sapiens
  misc_RNA (1)...(19): siRNA sense strand
aaacucacuuugcccauuc

SEQ ID NO: 881519 - RNA, 19 nt, Homo sapiens
  misc_RNA (1)...(19): siRNA sense strand
gggaaggaacacagucuuu

SEQ ID NO: 881520 - RNA, 19 nt, Homo sapiens
  misc_RNA (1)...(19): siRNA sense strand
agaggaagggcaaguuuaa

SEQ ID NO: 881521 - RNA, 19 nt, Homo sapiens
  misc_RNA (1)...(19): siRNA sense strand
caacuggugcaacuauuau

SEQ ID NO: 881522 - RNA, 19 nt, Homo sapiens
  misc_RNA (1)...(19): siRNA sense strand
ggaaggaacacagucuuuc

SEQ ID NO: 881523 - RNA, 19 nt, Homo sapiens
  misc_RNA (1)...(19): siRNA sense strand
ucaguuuaccuucagauuu

SEQ ID NO: 881524 - RNA, 19 nt, Homo sapiens
  misc_RNA (1)...(19): siRNA sense strand
ugacuggaaacuagaaauu

SEQ ID NO: 881525 - RNA, 19 nt, Homo sapiens
  misc_RNA (1)...(19): siRNA sense strand
ccaugugccuucauuacug

SEQ ID NO: 881526 - RNA, 19 nt, Homo sapiens
  misc_RNA (1)...(19): siRNA sense strand
gauuguaguguaucaagaa

SEQ ID NO: 881527 - RNA, 19 nt, Homo sapiens
  misc_RNA (1)...(19): siRNA sense strand
cuacauugaucuaccucuu

SEQ ID NO: 881528 - RNA, 19 nt, Homo sapiens
  misc_RNA (1)...(19): siRNA sense strand
caggagaagcccaagguaa

SEQ ID NO: 881529 - RNA, 19 nt, Homo sapiens
  misc_RNA (1)...(19): siRNA sense strand
gagcgggaacuuaacauuc

SEQ ID NO: 881530 - RNA, 19 nt, Homo sapiens
  misc_RNA (1)...(19): siRNA sense strand
gaguugagaacaaaggaaa

SEQ ID NO: 881531 - RNA, 19 nt, Homo sapiens
  misc_RNA (1)...(19): siRNA sense strand
cuucauuacuggauguuga

SEQ ID NO: 881532 - RNA, 19 nt, Homo sapiens
  misc_RNA (1)...(19): siRNA sense strand
cauagaccaucacaucaca

SEQ ID NO: 881533 - RNA, 19 nt, Homo sapiens
  misc_RNA (1)...(19): siRNA sense strand
gagaugcucacuccggauu

SEQ ID NO: 881534 - RNA, 19 nt, Homo sapiens
  misc_RNA (1)...(19): siRNA sense strand
auucugauauuccagcuaa

SEQ ID NO: 881535 - RNA, 19 nt, Homo sapiens
  misc_RNA (1)...(19): siRNA sense strand
ucauauucguccaucguuu

SEQ ID NO: 881536 - RNA, 19 nt, Homo sapiens
  misc_RNA (1)...(19): siRNA sense strand
ccaaggagagaacuaaauc

SEQ ID NO: 881537 - RNA, 19 nt, Homo sapiens
  misc_RNA (1)...(19): siRNA sense strand
caugugggaauguaccuua

SEQ ID NO: 881538 - RNA, 19 nt, Homo sapiens
  misc_RNA (1)...(19): siRNA sense strand
gaagaaacgagagggaauc

SEQ ID NO: 881539 - RNA, 19 nt, Homo sapiens
  misc_RNA (1)...(19): siRNA sense strand
gaccucagagagcuucaua

SEQ ID NO: 881540 - RNA, 19 nt, Homo sapiens
  misc_RNA (1)...(19): siRNA sense strand
gaccucaaguccagcaaca

SEQ ID NO: 881541 - RNA, 19 nt, Homo sapiens
  misc_RNA (1)...(19): siRNA sense strand
agaacagauugcaaagaaa

SEQ ID NO: 881542 - RNA, 19 nt, Homo sapiens
  misc_RNA (1)...(19): siRNA sense strand
ggagcgggaacuuaacauu

SEQ ID NO: 881543 - RNA, 19 nt, Homo sapiens
  misc_RNA (1)...(19): siRNA sense strand
gaaucaguuuaccuucaga

SEQ ID NO: 881544 - RNA, 19 nt, Homo sapiens
  misc_RNA (1)...(19): siRNA sense strand
gggaccaaauuccauucaa

SEQ ID NO: 881545 - RNA, 19 nt, Homo sapiens
  misc_RNA (1)...(19): siRNA sense strand
guccaucguuugccuuaau

SEQ ID NO: 881546 - RNA, 19 nt, Homo sapiens
  misc_RNA (1)...(19): siRNA sense strand
caucacagacggaccaugu

SEQ ID NO: 881547 - RNA, 19 nt, Homo sapiens
  misc_RNA (1)...(19): siRNA sense strand
caacaguccuuggucaacu

SEQ ID NO: 881548 - RNA, 19 nt, Homo sapiens
  misc_RNA (1)...(19): siRNA sense strand
caucgaaucaguuuaccuu

SEQ ID NO: 881549 - RNA, 19 nt, Homo sapiens
  misc_RNA (1)...(19): siRNA sense strand
ccaagcucaugaaagaaug

SEQ ID NO: 881550 - RNA, 19 nt, Homo sapiens
  misc_RNA (1)...(19): siRNA sense strand
caccuucuuucuccacaaa

SEQ ID NO: 881551 - RNA, 19 nt, Homo sapiens
  misc_RNA (1)...(19): siRNA sense strand
caaggaagagaagaagaaa

SEQ ID NO: 881552 - RNA, 19 nt, Homo sapiens
  misc_RNA (1)...(19): siRNA sense strand
ucgaaucaguuuaccuuca

SEQ ID NO: 881553 - RNA, 19 nt, Homo sapiens
  misc_RNA (1)...(19): siRNA sense strand
aggagaagcccaagguaaa

SEQ ID NO: 881554 - RNA, 19 nt, Homo sapiens
  misc_RNA (1)...(19): siRNA sense strand
cagcggacaugugggaaug

SEQ ID NO: 881555 - RNA, 19 nt, Homo sapiens
  misc_RNA (1)...(19): siRNA sense strand
aaacggagucagcucugua

SEQ ID NO: 881556 - RNA, 19 nt, Homo sapiens
  misc_RNA (1)...(19): siRNA sense strand
agauagaacagauugcaaa

SEQ ID NO: 881557 - RNA, 19 nt, Homo sapiens
  misc_RNA (1)...(19): siRNA sense strand
aagaggaagggcaaguuua

SEQ ID NO: 881558 - RNA, 19 nt, Homo sapiens
  misc_RNA (1)...(19): siRNA sense strand
acuggaaacuagaaauuca

SEQ ID NO: 881559 - RNA, 19 nt, Homo sapiens
  misc_RNA (1)...(19): siRNA sense strand
cgaaucaguuuaccuucag

SEQ ID NO: 881560 - RNA, 19 nt, Homo sapiens
  misc_RNA (1)...(19): siRNA sense strand
gaagucguuuaaagcucaa

SEQ ID NO: 881561 - RNA, 19 nt, Homo sapiens
  misc_RNA (1)...(19): siRNA sense strand
gagaagcccaagguaaaga

SEQ ID NO: 881562 - RNA, 19 nt, Homo sapiens
  misc_RNA (1)...(19): siRNA sense strand
cuagucaggccuacauuga

SEQ ID NO: 881563 - RNA, 19 nt, Homo sapiens
  misc_RNA (1)...(19): siRNA sense strand
ccucaaguccagcaacauu

SEQ ID NO: 881564 - RNA, 19 nt, Homo sapiens
  misc_RNA (1)...(19): siRNA sense strand
gcacaggaccaccaaaaug

SEQ ID NO: 881565 - RNA, 19 nt, Homo sapiens
  misc_RNA (1)...(19): siRNA sense strand
gugcaggccucucccaacu

SEQ ID NO: 881566 - RNA, 19 nt, Homo sapiens
  misc_RNA (1)...(19): siRNA sense strand
gcacagcaggcaccuaugc

SEQ ID NO: 881567 - RNA, 19 nt, Homo sapiens
  misc_RNA (1)...(19): siRNA sense strand
acaagaagaauuugaggau

SEQ ID NO: 881568 - RNA, 19 nt, Homo sapiens
  misc_RNA (1)...(19): siRNA sense strand
gaaggaacacagucuuucg

SEQ ID NO: 881569 - RNA, 19 nt, Homo sapiens
  misc_RNA (1)...(19): siRNA sense strand
ggagaaggcugaagugauu

SEQ ID NO: 881570 - RNA, 19 nt, Homo sapiens
  misc_RNA (1)...(19): siRNA sense strand
gaacaagaacuccaauaaa

SEQ ID NO: 881571 - RNA, 19 nt, Homo sapiens
  misc_RNA (1)...(19): siRNA sense strand
guaaucagcacaaagaaua

SEQ ID NO: 881572 - RNA, 19 nt, Homo sapiens
  misc_RNA (1)...(19): siRNA sense strand
guacacugcuuaucauuau

SEQ ID NO: 881573 - RNA, 19 nt, Homo sapiens
  misc_RNA (1)...(19): siRNA sense strand
gaacaaaucacaagacagu

SEQ ID NO: 881574 - RNA, 19 nt, Homo sapiens
  misc_RNA (1)...(19): siRNA sense strand
ggauucaccuuauggaaga

SEQ ID NO: 881575 - RNA, 19 nt, Homo sapiens
  misc_RNA (1)...(19): siRNA sense strand
gcuguucccuugccuauga

SEQ ID NO: 881576 - RNA, 19 nt, Homo sapiens
  misc_RNA (1)...(19): siRNA sense strand
gugauuauguugugucuga

SEQ ID NO: 881577 - RNA, 19 nt, Homo sapiens
  misc_RNA (1)...(19): siRNA sense strand
gaacuuccuguaccacaua

SEQ ID NO: 881578 - RNA, 19 nt, Homo sapiens
  misc_RNA (1)...(19): siRNA sense strand
acaaggauguucccacaaa

SEQ ID NO: 881579 - RNA, 19 nt, Homo sapiens
  misc_RNA (1)...(19): siRNA sense strand
caugggaaauggauucaaa

SEQ ID NO: 881580 - RNA, 19 nt, Homo sapiens
  misc_RNA (1)...(19): siRNA sense strand
gaacaucaugggaaugcua

SEQ ID NO: 881581 - RNA, 19 nt, Homo sapiens
  misc_RNA (1)...(19): siRNA sense strand
gaagauacagguuugagau

SEQ ID NO: 881582 - RNA, 19 nt, Homo sapiens
  misc_RNA (1)...(19): siRNA sense strand
uaagcaauauaacguguga

SEQ ID NO: 881583 - RNA, 19 nt, Homo sapiens
  misc_RNA (1)...(19): siRNA sense strand
gagaacaagaacuccaaua

SEQ ID NO: 881584 - RNA, 19 nt, Homo sapiens
  misc_RNA (1)...(19): siRNA sense strand
cccaagaacugaauauaca

SEQ ID NO: 881585 - RNA, 19 nt, Homo sapiens
  misc_RNA (1)...(19): siRNA sense strand
caauauaacgugugacuca

SEQ ID NO: 881586 - RNA, 19 nt, Homo sapiens
  misc_RNA (1)...(19): siRNA sense strand
agaacaagaacuccaauaa

SEQ ID NO: 881587 - RNA, 19 nt, Homo sapiens
  misc_RNA (1)...(19): siRNA sense strand
caaaggaucgcauuacaca

SEQ ID NO: 881588 - RNA, 19 nt, Homo sapiens
  misc_RNA (1)...(19): siRNA sense strand
uagaagucauuuacacuga

SEQ ID NO: 881589 - RNA, 19 nt, Homo sapiens
  misc_RNA (1)...(19): siRNA sense strand
acaaguugauggugauuau

SEQ ID NO: 881590 - RNA, 19 nt, Homo sapiens
  misc_RNA (1)...(19): siRNA sense strand
gcagccaucugucaaggau

SEQ ID NO: 881591 - RNA, 19 nt, Homo sapiens
  misc_RNA (1)...(19): siRNA sense strand
uagcagagauggaagaacu

SEQ ID NO: 881592 - RNA, 19 nt, Homo sapiens
  misc_RNA (1)...(19): siRNA sense strand
gaaagaucccagcugcaaa

SEQ ID NO: 881593 - RNA, 19 nt, Homo sapiens
  misc_RNA (1)...(19): siRNA sense strand
gcaggacgcaugcuuaagu

SEQ ID NO: 881594 - RNA, 19 nt, Homo sapiens
  misc_RNA (1)...(19): siRNA sense strand
uaucaguguuggacguuaa

SEQ ID NO: 881595 - RNA, 19 nt, Homo sapiens
  misc_RNA (1)...(19): siRNA sense strand
gcagcgccuuccucaacua

SEQ ID NO: 881596 - RNA, 19 nt, Homo sapiens
  misc_RNA (1)...(19): siRNA sense strand
gaauggagugaaauuauag

SEQ ID NO: 881597 - RNA, 19 nt, Homo sapiens
  misc_RNA (1)...(19): siRNA sense strand
ggaagauacagguuugaga

SEQ ID NO: 881598 - RNA, 19 nt, Homo sapiens
  misc_RNA (1)...(19): siRNA sense strand
uauggaagauacagguuug

SEQ ID NO: 881599 - RNA, 19 nt, Homo sapiens
  misc_RNA (1)...(19): siRNA sense strand
cugcagcacugaauucaau

SEQ ID NO: 881600 - RNA, 19 nt, Homo sapiens
  misc_RNA (1)...(19): siRNA sense strand
ggacuucuacuguauguac

SEQ ID NO: 881601 - RNA, 19 nt, Homo sapiens
  misc_RNA (1)...(19): siRNA sense strand
guauguacacugcuuauca

SEQ ID NO: 881602 - RNA, 19 nt, Homo sapiens
  misc_RNA (1)...(19): siRNA sense strand
gcgccuuccucaacuaaau

SEQ ID NO: 881603 - RNA, 19 nt, Homo sapiens
  misc_RNA (1)...(19): siRNA sense strand
uauaacgugugacucauuc

SEQ ID NO: 881604 - RNA, 19 nt, Homo sapiens
  misc_RNA (1)...(19): siRNA sense strand
gcagaaaucacuggucauc

SEQ ID NO: 881605 - RNA, 19 nt, Homo sapiens
  misc_RNA (1)...(19): siRNA sense strand
caggacgcaugcuuaaguu

SEQ ID NO: 881606 - RNA, 19 nt, Homo sapiens
  misc_RNA (1)...(19): siRNA sense strand
acaagaaagagaacaagaa

SEQ ID NO: 881607 - RNA, 19 nt, Homo sapiens
  misc_RNA (1)...(19): siRNA sense strand
agaaaucacuggucaucag

SEQ ID NO: 881608 - RNA, 19 nt, Homo sapiens
  misc_RNA (1)...(19): siRNA sense strand
agauacagguuugagauug

SEQ ID NO: 881609 - RNA, 19 nt, Homo sapiens
  misc_RNA (1)...(19): siRNA sense strand
gcaccgcagacuauucaaa

SEQ ID NO: 881610 - RNA, 19 nt, Homo sapiens
  misc_RNA (1)...(19): siRNA sense strand
gcaaaugcaaagaaagauc

SEQ ID NO: 881611 - RNA, 19 nt, Homo sapiens
  misc_RNA (1)...(19): siRNA sense strand
agccaucugucaaggauaa

SEQ ID NO: 881612 - RNA, 19 nt, Homo sapiens
  misc_RNA (1)...(19): siRNA sense strand
ugaauucaauacuggaaag

SEQ ID NO: 881613 - RNA, 19 nt, Homo sapiens
  misc_RNA (1)...(19): siRNA sense strand
gauacagguuugagauugc

SEQ ID NO: 881614 - RNA, 19 nt, Homo sapiens
  misc_RNA (1)...(19): siRNA sense strand
ccauggcucuccuaucagu

SEQ ID NO: 881615 - RNA, 19 nt, Homo sapiens
  misc_RNA (1)...(19): siRNA sense strand
caucagcucaugaguuugu

SEQ ID NO: 881616 - RNA, 19 nt, Homo sapiens
  misc_RNA (1)...(19): siRNA sense strand
caagaaagagaacaagaac

SEQ ID NO: 881617 - RNA, 19 nt, Homo sapiens
  misc_RNA (1)...(19): siRNA sense strand
gaagauggggugcugguuu

SEQ ID NO: 881618 - RNA, 19 nt, Homo sapiens
  misc_RNA (1)...(19): siRNA sense strand
uguacacugcuuaucauua

SEQ ID NO: 881619 - RNA, 19 nt, Homo sapiens
  misc_RNA (1)...(19): siRNA sense strand
acaagacaguggcauagca

SEQ ID NO: 881620 - RNA, 19 nt, Homo sapiens
  misc_RNA (1)...(19): siRNA sense strand
agaaagagaacaagaacuc

SEQ ID NO: 881621 - RNA, 19 nt, Homo sapiens
  misc_RNA (1)...(19): siRNA sense strand
ugcaaaaccuguaauauca

SEQ ID NO: 881622 - RNA, 19 nt, Homo sapiens
  misc_RNA (1)...(19): siRNA sense strand
gcauagcagagauggaaga

SEQ ID NO: 881623 - RNA, 19 nt, Homo sapiens
  misc_RNA (1)...(19): siRNA sense strand
ucgagaacaucaugggaau

SEQ ID NO: 881624 - RNA, 19 nt, Homo sapiens
  misc_RNA (1)...(19): siRNA sense strand
uauguacacugcuuaucau

SEQ ID NO: 881625 - RNA, 19 nt, Homo sapiens
  misc_RNA (1)...(19): siRNA sense strand
agaaagaucccagcugcaa

SEQ ID NO: 881626 - RNA, 19 nt, Homo sapiens
  misc_RNA (1)...(19): siRNA sense strand
gggaucaccaggagaugaa

SEQ ID NO: 881627 - RNA, 19 nt, Homo sapiens
  misc_RNA (1)...(19): siRNA sense strand
gcccaagaacugaauauac

SEQ ID NO: 881628 - RNA, 19 nt, Homo sapiens
  misc_RNA (1)...(19): siRNA sense strand
gaucaccaggagaugaauu

SEQ ID NO: 881629 - RNA, 19 nt, Homo sapiens
  misc_RNA (1)...(19): siRNA sense strand
ugugacucauucaagauuu

SEQ ID NO: 881630 - RNA, 19 nt, Homo sapiens
  misc_RNA (1)...(19): siRNA sense strand
ggacgcaugcuuaaguuuu

SEQ ID NO: 881631 - RNA, 19 nt, Homo sapiens
  misc_RNA (1)...(19): siRNA sense strand
gcuaugcagccaucuguca

SEQ ID NO: 881632 - RNA, 19 nt, Homo sapiens
  misc_RNA (1)...(19): siRNA sense strand
acacugacccuguggaucu

SEQ ID NO: 881633 - RNA, 19 nt, Homo sapiens
  misc_RNA (1)...(19): siRNA sense strand
ggagaugaauuuuguaagc

SEQ ID NO: 881634 - RNA, 19 nt, Homo sapiens
  misc_RNA (1)...(19): siRNA sense strand
ggaucgcauuacacacuau

SEQ ID NO: 881635 - RNA, 19 nt, Homo sapiens
  misc_RNA (1)...(19): siRNA sense strand
uaaccccaauacuaacuua

SEQ ID NO: 881636 - RNA, 19 nt, Homo sapiens
  misc_RNA (1)...(19): siRNA sense strand
gcucuccuaucaguggaaa

SEQ ID NO: 881637 - RNA, 19 nt, Homo sapiens
  misc_RNA (1)...(19): siRNA sense strand
aaaucaaaggaucgcauua

SEQ ID NO: 881638 - RNA, 19 nt, Homo sapiens
  misc_RNA (1)...(19): siRNA sense strand
aagauggggugcugguuua

SEQ ID NO: 881639 - RNA, 19 nt, Homo sapiens
  misc_RNA (1)...(19): siRNA sense strand
gaucgcauuacacacuauu

SEQ ID NO: 881640 - RNA, 19 nt, Homo sapiens
  misc_RNA (1)...(19): siRNA sense strand
ucaacaagaaagagaacaa

SEQ ID NO: 881641 - RNA, 19 nt, Homo sapiens
  misc_RNA (1)...(19): siRNA sense strand
uggcauagcagagauggaa

SEQ ID NO: 881642 - RNA, 19 nt, Homo sapiens
  misc_RNA (1)...(19): siRNA sense strand
gaccucaacaagaaagaga

SEQ ID NO: 881643 - RNA, 19 nt, Homo sapiens
  misc_RNA (1)...(19): siRNA sense strand
gugacucauucaagauuuc

SEQ ID NO: 881644 - RNA, 19 nt, Homo sapiens
  misc_RNA (1)...(19): siRNA sense strand
uaacgugugacucauucaa

SEQ ID NO: 881645 - RNA, 19 nt, Homo sapiens
  misc_RNA (1)...(19): siRNA sense strand
gagaacaucaugggaaugc

SEQ ID NO: 881646 - RNA, 19 nt, Homo sapiens
  misc_RNA (1)...(19): siRNA sense strand
cugaauggagugaaauuau

SEQ ID NO: 881647 - RNA, 19 nt, Homo sapiens
  misc_RNA (1)...(19): siRNA sense strand
ugauggugauuauguugug

SEQ ID NO: 881648 - RNA, 19 nt, Homo sapiens
  misc_RNA (1)...(19): siRNA sense strand
uguaccacauaacaucaaa

SEQ ID NO: 881649 - RNA, 19 nt, Homo sapiens
  misc_RNA (1)...(19): siRNA sense strand
gacaguggcauagcagaga

SEQ ID NO: 881650 - RNA, 19 nt, Homo sapiens
  misc_RNA (1)...(19): siRNA sense strand
guucaucuaacacaauugu

SEQ ID NO: 881651 - RNA, 19 nt, Homo sapiens
  misc_RNA (1)...(19): siRNA sense strand
caacaagaaagagaacaag

SEQ ID NO: 881652 - RNA, 19 nt, Homo sapiens
  misc_RNA (1)...(19): siRNA sense strand
caaaauugguggcaaaagc

SEQ ID NO: 881653 - RNA, 19 nt, Homo sapiens
  misc_RNA (1)...(19): siRNA sense strand
gaaagccaccccaggauuc

SEQ ID NO: 881654 - RNA, 19 nt, Homo sapiens
  misc_RNA (1)...(19): siRNA sense strand
ucugaauggagugaaauua

SEQ ID NO: 881655 - RNA, 19 nt, Homo sapiens
  misc_RNA (1)...(19): siRNA sense strand
gugucugaauggagugaaa

SEQ ID NO: 881656 - RNA, 19 nt, Homo sapiens
  misc_RNA (1)...(19): siRNA sense strand
gcucaugaguuugucuacu

SEQ ID NO: 881657 - RNA, 19 nt, Homo sapiens
  misc_RNA (1)...(19): siRNA sense strand
ggaaagccaccccaggauu

SEQ ID NO: 881658 - RNA, 19 nt, Homo sapiens
  misc_RNA (1)...(19): siRNA sense strand
caaggauguucccacaaaa

SEQ ID NO: 881659 - RNA, 19 nt, Homo sapiens
  misc_RNA (1)...(19): siRNA sense strand
gauggugauuauguugugu

SEQ ID NO: 881660 - RNA, 19 nt, Homo sapiens
  misc_RNA (1)...(19): siRNA sense strand
cucaugaguuugucuacug

SEQ ID NO: 881661 - RNA, 19 nt, Homo sapiens
  misc_RNA (1)...(19): siRNA sense strand
ucacaagacaguggcauag

SEQ ID NO: 881662 - RNA, 19 nt, Homo sapiens
  misc_RNA (1)...(19): siRNA sense strand
acgugugacucauucaaga

SEQ ID NO: 881663 - RNA, 19 nt, Homo sapiens
  misc_RNA (1)...(19): siRNA sense strand
aggaucgcauuacacacua

SEQ ID NO: 881664 - RNA, 19 nt, Homo sapiens
  misc_RNA (1)...(19): siRNA sense strand
aagauacagguuugagauu

SEQ ID NO: 881665 - RNA, 19 nt, Homo sapiens
  misc_RNA (1)...(19): siRNA sense strand
caaaaccuguaauaucagu

SEQ ID NO: 881666 - RNA, 19 nt, Homo sapiens
  misc_RNA (1)...(19): siRNA sense strand
gaccuguacagaagaagau

SEQ ID NO: 881667 - RNA, 19 nt, Homo sapiens
  misc_RNA (1)...(19): siRNA sense strand
uccuaucaguggaaaauua

SEQ ID NO: 881668 - RNA, 19 nt, Homo sapiens
  misc_RNA (1)...(19): siRNA sense strand
cagcugcagcacugaauuc

SEQ ID NO: 881669 - RNA, 19 nt, Homo sapiens
  misc_RNA (1)...(19): siRNA sense strand
ggagaaggcugaagugauu

SEQ ID NO: 881670 - RNA, 19 nt, Homo sapiens
  misc_RNA (1)...(19): siRNA sense strand
gaacaagaacuccaauaaa

SEQ ID NO: 881671 - RNA, 19 nt, Homo sapiens
  misc_RNA (1)...(19): siRNA sense strand
guaaucagcacaaagaaua

SEQ ID NO: 881672 - RNA, 19 nt, Homo sapiens
  misc_RNA (1)...(19): siRNA sense strand
guacacugcuuaucauuau

SEQ ID NO: 881673 - RNA, 19 nt, Homo sapiens
  misc_RNA (1)...(19): siRNA sense strand
gaacaaaucacaagacagu

SEQ ID NO: 881674 - RNA, 19 nt, Homo sapiens
  misc_RNA (1)...(19): siRNA sense strand
ggauucaccuuauggaaga

SEQ ID NO: 881675 - RNA, 19 nt, Homo sapiens
  misc_RNA (1)...(19): siRNA sense strand
gcuguucccuugccuauga

SEQ ID NO: 881676 - RNA, 19 nt, Homo sapiens
  misc_RNA (1)...(19): siRNA sense strand
gugauuauguugugucuga

SEQ ID NO: 881677 - RNA, 19 nt, Homo sapiens
  misc_RNA (1)...(19): siRNA sense strand
gaacuuccuguaccacaua

SEQ ID NO: 881678 - RNA, 19 nt, Homo sapiens
  misc_RNA (1)...(19): siRNA sense strand
acaaggauguucccacaaa

SEQ ID NO: 881679 - RNA, 19 nt, Homo sapiens
  misc_RNA (1)...(19): siRNA sense strand
caugggaaauggauucaaa

SEQ ID NO: 881680 - RNA, 19 nt, Homo sapiens
  misc_RNA (1)...(19): siRNA sense strand
gaacaucaugggaaugcua

SEQ ID NO: 881681 - RNA, 19 nt, Homo sapiens
  misc_RNA (1)...(19): siRNA sense strand
gaagauacagguuugagau

SEQ ID NO: 881682 - RNA, 19 nt, Homo sapiens
  misc_RNA (1)...(19): siRNA sense strand
uaagcaauauaacguguga

SEQ ID NO: 881683 - RNA, 19 nt, Homo sapiens
  misc_RNA (1)...(19): siRNA sense strand
gagaacaagaacuccaaua

SEQ ID NO: 881684 - RNA, 19 nt, Homo sapiens
  misc_RNA (1)...(19): siRNA sense strand
cccaagaacugaauauaca

SEQ ID NO: 881685 - RNA, 19 nt, Homo sapiens
  misc_RNA (1)...(19): siRNA sense strand
caauauaacgugugacuca

SEQ ID NO: 881686 - RNA, 19 nt, Homo sapiens
  misc_RNA (1)...(19): siRNA sense strand
agaacaagaacuccaauaa

SEQ ID NO: 881687 - RNA, 19 nt, Homo sapiens
  misc_RNA (1)...(19): siRNA sense strand
caaaggaucgcauuacaca

SEQ ID NO: 881688 - RNA, 19 nt, Homo sapiens
  misc_RNA (1)...(19): siRNA sense strand
uagaagucauuuacacuga

SEQ ID NO: 881689 - RNA, 19 nt, Homo sapiens
  misc_RNA (1)...(19): siRNA sense strand
acaaguugauggugauuau

SEQ ID NO: 881690 - RNA, 19 nt, Homo sapiens
  misc_RNA (1)...(19): siRNA sense strand
gcagccaucugucaaggau

SEQ ID NO: 881691 - RNA, 19 nt, Homo sapiens
  misc_RNA (1)...(19): siRNA sense strand
uagcagagauggaagaacu

SEQ ID NO: 881692 - RNA, 19 nt, Homo sapiens
  misc_RNA (1)...(19): siRNA sense strand
gaaagaucccagcugcaaa

SEQ ID NO: 881693 - RNA, 19 nt, Homo sapiens
  misc_RNA (1)...(19): siRNA sense strand
gcaggacgcaugcuuaagu

SEQ ID NO: 881694 - RNA, 19 nt, Homo sapiens
  misc_RNA (1)...(19): siRNA sense strand
uaucaguguuggacguuaa

SEQ ID NO: 881695 - RNA, 19 nt, Homo sapiens
  misc_RNA (1)...(19): siRNA sense strand
gcagcgccuuccucaacua

SEQ ID NO: 881696 - RNA, 19 nt, Homo sapiens
  misc_RNA (1)...(19): siRNA sense strand
gaauggagugaaauuauag

SEQ ID NO: 881697 - RNA, 19 nt, Homo sapiens
  misc_RNA (1)...(19): siRNA sense strand
ggaagauacagguuugaga

SEQ ID NO: 881698 - RNA, 19 nt, Homo sapiens
  misc_RNA (1)...(19): siRNA sense strand
uauggaagauacagguuug

SEQ ID NO: 881699 - RNA, 19 nt, Homo sapiens
  misc_RNA (1)...(19): siRNA sense strand
cugcagcacugaauucaau

SEQ ID NO: 881700 - RNA, 19 nt, Homo sapiens
  misc_RNA (1)...(19): siRNA sense strand
ggacuucuacuguauguac

SEQ ID NO: 881701 - RNA, 19 nt, Homo sapiens
  misc_RNA (1)...(19): siRNA sense strand
guauguacacugcuuauca

SEQ ID NO: 881702 - RNA, 19 nt, Homo sapiens
  misc_RNA (1)...(19): siRNA sense strand
gcgccuuccucaacuaaau

SEQ ID NO: 881703 - RNA, 19 nt, Homo sapiens
  misc_RNA (1)...(19): siRNA sense strand
uauaacgugugacucauuc

SEQ ID NO: 881704 - RNA, 19 nt, Homo sapiens
  misc_RNA (1)...(19): siRNA sense strand
gcagaaaucacuggucauc

SEQ ID NO: 881705 - RNA, 19 nt, Homo sapiens
  misc_RNA (1)...(19): siRNA sense strand
caggacgcaugcuuaaguu

SEQ ID NO: 881706 - RNA, 19 nt, Homo sapiens
  misc_RNA (1)...(19): siRNA sense strand
acaagaaagagaacaagaa

SEQ ID NO: 881707 - RNA, 19 nt, Homo sapiens
  misc_RNA (1)...(19): siRNA sense strand
agaaaucacuggucaucag

SEQ ID NO: 881708 - RNA, 19 nt, Homo sapiens
  misc_RNA (1)...(19): siRNA sense strand
agauacagguuugagauug

SEQ ID NO: 881709 - RNA, 19 nt, Homo sapiens
  misc_RNA (1)...(19): siRNA sense strand
gcaccgcagacuauucaaa

SEQ ID NO: 881710 - RNA, 19 nt, Homo sapiens
  misc_RNA (1)...(19): siRNA sense strand
gcaaaugcaaagaaagauc

SEQ ID NO: 881711 - RNA, 19 nt, Homo sapiens
  misc_RNA (1)...(19): siRNA sense strand
agccaucugucaaggauaa

SEQ ID NO: 881712 - RNA, 19 nt, Homo sapiens
  misc_RNA (1)...(19): siRNA sense strand
ugaauucaauacuggaaag

SEQ ID NO: 881713 - RNA, 19 nt, Homo sapiens
  misc_RNA (1)...(19): siRNA sense strand
gauacagguuugagauugc

SEQ ID NO: 881714 - RNA, 19 nt, Homo sapiens
  misc_RNA (1)...(19): siRNA sense strand
ccauggcucuccuaucagu

SEQ ID NO: 881715 - RNA, 19 nt, Homo sapiens
  misc_RNA (1)...(19): siRNA sense strand
caucagcucaugaguuugu

SEQ ID NO: 881716 - RNA, 19 nt, Homo sapiens
  misc_RNA (1)...(19): siRNA sense strand
caagaaagagaacaagaac

SEQ ID NO: 881717 - RNA, 19 nt, Homo sapiens
  misc_RNA (1)...(19): siRNA sense strand
gaagauggggugcugguuu

SEQ ID NO: 881718 - RNA, 19 nt, Homo sapiens
  misc_RNA (1)...(19): siRNA sense strand
uguacacugcuuaucauua

SEQ ID NO: 881719 - RNA, 19 nt, Homo sapiens
  misc_RNA (1)...(19): siRNA sense strand
acaagacaguggcauagca

SEQ ID NO: 881720 - RNA, 19 nt, Homo sapiens
  misc_RNA (1)...(19): siRNA sense strand
agaaagagaacaagaacuc

SEQ ID NO: 881721 - RNA, 19 nt, Homo sapiens
  misc_RNA (1)...(19): siRNA sense strand
ugcaaaaccuguaauauca

SEQ ID NO: 881722 - RNA, 19 nt, Homo sapiens
  misc_RNA (1)...(19): siRNA sense strand
gcauagcagagauggaaga

SEQ ID NO: 881723 - RNA, 19 nt, Homo sapiens
  misc_RNA (1)...(19): siRNA sense strand
ucgagaacaucaugggaau

SEQ ID NO: 881724 - RNA, 19 nt, Homo sapiens
  misc_RNA (1)...(19): siRNA sense strand
uauguacacugcuuaucau

SEQ ID NO: 881725 - RNA, 19 nt, Homo sapiens
  misc_RNA (1)...(19): siRNA sense strand
agaaagaucccagcugcaa

SEQ ID NO: 881726 - RNA, 19 nt, Homo sapiens
  misc_RNA (1)...(19): siRNA sense strand
gggaucaccaggagaugaa

SEQ ID NO: 881727 - RNA, 19 nt, Homo sapiens
  misc_RNA (1)...(19): siRNA sense strand
gcccaagaacugaauauac

SEQ ID NO: 881728 - RNA, 19 nt, Homo sapiens
  misc_RNA (1)...(19): siRNA sense strand
gaucaccaggagaugaauu

SEQ ID NO: 881729 - RNA, 19 nt, Homo sapiens
  misc_RNA (1)...(19): siRNA sense strand
ugugacucauucaagauuu

SEQ ID NO: 881730 - RNA, 19 nt, Homo sapiens
  misc_RNA (1)...(19): siRNA sense strand
ggacgcaugcuuaaguuuu

SEQ ID NO: 881731 - RNA, 19 nt, Homo sapiens
  misc_RNA (1)...(19): siRNA sense strand
gcuaugcagccaucuguca

SEQ ID NO: 881732 - RNA, 19 nt, Homo sapiens
  misc_RNA (1)...(19): siRNA sense strand
acacugacccuguggaucu

SEQ ID NO: 881733 - RNA, 19 nt, Homo sapiens
  misc_RNA (1)...(19): siRNA sense strand
ggagaugaauuuuguaagc

SEQ ID NO: 881734 - RNA, 19 nt, Homo sapiens
  misc_RNA (1)...(19): siRNA sense strand
ggaucgcauuacacacuau

SEQ ID NO: 881735 - RNA, 19 nt, Homo sapiens
  misc_RNA (1)...(19): siRNA sense strand
uaaccccaauacuaacuua

SEQ ID NO: 881736 - RNA, 19 nt, Homo sapiens
  misc_RNA (1)...(19): siRNA sense strand
gcucuccuaucaguggaaa

SEQ ID NO: 881737 - RNA, 19 nt, Homo sapiens
  misc_RNA (1)...(19): siRNA sense strand
aaaucaaaggaucgcauua

SEQ ID NO: 881738 - RNA, 19 nt, Homo sapiens
  misc_RNA (1)...(19): siRNA sense strand
aagauggggugcugguuua

SEQ ID NO: 881739 - RNA, 19 nt, Homo sapiens
  misc_RNA (1)...(19): siRNA sense strand
gaucgcauuacacacuauu

SEQ ID NO: 881740 - RNA, 19 nt, Homo sapiens
  misc_RNA (1)...(19): siRNA sense strand
ucaacaagaaagagaacaa

SEQ ID NO: 881741 - RNA, 19 nt, Homo sapiens
  misc_RNA (1)...(19): siRNA sense strand
uggcauagcagagauggaa

SEQ ID NO: 881742 - RNA, 19 nt, Homo sapiens
  misc_RNA (1)...(19): siRNA sense strand
gaccucaacaagaaagaga

SEQ ID NO: 881743 - RNA, 19 nt, Homo sapiens
  misc_RNA (1)...(19): siRNA sense strand
gugacucauucaagauuuc

SEQ ID NO: 881744 - RNA, 19 nt, Homo sapiens
  misc_RNA (1)...(19): siRNA sense strand
uaacgugugacucauucaa

SEQ ID NO: 881745 - RNA, 19 nt, Homo sapiens
  misc_RNA (1)...(19): siRNA sense strand
gagaacaucaugggaaugc

SEQ ID NO: 881746 - RNA, 19 nt, Homo sapiens
  misc_RNA (1)...(19): siRNA sense strand
cugaauggagugaaauuau

SEQ ID NO: 881747 - RNA, 19 nt, Homo sapiens
  misc_RNA (1)...(19): siRNA sense strand
ugauggugauuauguugug

SEQ ID NO: 881748 - RNA, 19 nt, Homo sapiens
  misc_RNA (1)...(19): siRNA sense strand
uguaccacauaacaucaaa

SEQ ID NO: 881749 - RNA, 19 nt, Homo sapiens
  misc_RNA (1)...(19): siRNA sense strand
gacaguggcauagcagaga

SEQ ID NO: 881750 - RNA, 19 nt, Homo sapiens
  misc_RNA (1)...(19): siRNA sense strand
guucaucuaacacaauugu

SEQ ID NO: 881751 - RNA, 19 nt, Homo sapiens
  misc_RNA (1)...(19): siRNA sense strand
caacaagaaagagaacaag

SEQ ID NO: 881752 - RNA, 19 nt, Homo sapiens
  misc_RNA (1)...(19): siRNA sense strand
caaaauugguggcaaaagc

SEQ ID NO: 881753 - RNA, 19 nt, Homo sapiens
  misc_RNA (1)...(19): siRNA sense strand
gaaagccaccccaggauuc

SEQ ID NO: 881754 - RNA, 19 nt, Homo sapiens
  misc_RNA (1)...(19): siRNA sense strand
ucugaauggagugaaauua

SEQ ID NO: 881755 - RNA, 19 nt, Homo sapiens
  misc_RNA (1)...(19): siRNA sense strand
gugucugaauggagugaaa

SEQ ID NO: 881756 - RNA, 19 nt, Homo sapiens
  misc_RNA (1)...(19): siRNA sense strand
gcucaugaguuugucuacu

SEQ ID NO: 881757 - RNA, 19 nt, Homo sapiens
  misc_RNA (1)...(19): siRNA sense strand
ggaaagccaccccaggauu

SEQ ID NO: 881758 - RNA, 19 nt, Homo sapiens
  misc_RNA (1)...(19): siRNA sense strand
caaggauguucccacaaaa

SEQ ID NO: 881759 - RNA, 19 nt, Homo sapiens
  misc_RNA (1)...(19): siRNA sense strand
gauggugauuauguugugu

SEQ ID NO: 881760 - RNA, 19 nt, Homo sapiens
  misc_RNA (1)...(19): siRNA sense strand
cucaugaguuugucuacug

SEQ ID NO: 881761 - RNA, 19 nt, Homo sapiens
  misc_RNA (1)...(19): siRNA sense strand
ucacaagacaguggcauag

SEQ ID NO: 881762 - RNA, 19 nt, Homo sapiens
  misc_RNA (1)...(19): siRNA sense strand
acgugugacucauucaaga

SEQ ID NO: 881763 - RNA, 19 nt, Homo sapiens
  misc_RNA (1)...(19): siRNA sense strand
aggaucgcauuacacacua

SEQ ID NO: 881764 - RNA, 19 nt, Homo sapiens
  misc_RNA (1)...(19): siRNA sense strand
aagauacagguuugagauu

SEQ ID NO: 881765 - RNA, 19 nt, Homo sapiens
  misc_RNA (1)...(19): siRNA sense strand
caaaaccuguaauaucagu

SEQ ID NO: 881766 - RNA, 19 nt, Homo sapiens
  misc_RNA (1)...(19): siRNA sense strand
gaccuguacagaagaagau

SEQ ID NO: 881767 - RNA, 19 nt, Homo sapiens
  misc_RNA (1)...(19): siRNA sense strand
uccuaucaguggaaaauua

SEQ ID NO: 881768 - RNA, 19 nt, Homo sapiens
  misc_RNA (1)...(19): siRNA sense strand
cagcugcagcacugaauuc

SEQ ID NO: 881769 - RNA, 19 nt, Homo sapiens
  misc_RNA (1)...(19): siRNA sense strand
gaacagcucuucucaucaa

SEQ ID NO: 881770 - RNA, 19 nt, Homo sapiens
  misc_RNA (1)...(19): siRNA sense strand
ucagaaaucuucauccaaa

SEQ ID NO: 881771 - RNA, 19 nt, Homo sapiens
  misc_RNA (1)...(19): siRNA sense strand
ugaaggagauauuccagua

SEQ ID NO: 881772 - RNA, 19 nt, Homo sapiens
  misc_RNA (1)...(19): siRNA sense strand
gaaugaagcagaaauggaa

SEQ ID NO: 881773 - RNA, 19 nt, Homo sapiens
  misc_RNA (1)...(19): siRNA sense strand
ucagagccgucccaaauaa

SEQ ID NO: 881774 - RNA, 19 nt, Homo sapiens
  misc_RNA (1)...(19): siRNA sense strand
ggaacgaagucgcacagaa

SEQ ID NO: 881775 - RNA, 19 nt, Homo sapiens
  misc_RNA (1)...(19): siRNA sense strand
agaaggaacuggauagguu

SEQ ID NO: 881776 - RNA, 19 nt, Homo sapiens
  misc_RNA (1)...(19): siRNA sense strand
gugcuggagugcagaaaua

SEQ ID NO: 881777 - RNA, 19 nt, Homo sapiens
  misc_RNA (1)...(19): siRNA sense strand
uaacgccgaugccacagua

SEQ ID NO: 881778 - RNA, 19 nt, Homo sapiens
  misc_RNA (1)...(19): siRNA sense strand
ugaaguccauuucuaguga

SEQ ID NO: 881779 - RNA, 19 nt, Homo sapiens
  misc_RNA (1)...(19): siRNA sense strand
gcacguuccugcacuaucu

SEQ ID NO: 881780 - RNA, 19 nt, Homo sapiens
  misc_RNA (1)...(19): siRNA sense strand
gagcagaggccuccagaga

SEQ ID NO: 881781 - RNA, 19 nt, Homo sapiens
  misc_RNA (1)...(19): siRNA sense strand
cauccaaacugaacgaaga

SEQ ID NO: 881782 - RNA, 19 nt, Homo sapiens
  misc_RNA (1)...(19): siRNA sense strand
cagaggaaauugcaagaga

SEQ ID NO: 881783 - RNA, 19 nt, Homo sapiens
  misc_RNA (1)...(19): siRNA sense strand
aaacgugaaugaagcagaa

SEQ ID NO: 881784 - RNA, 19 nt, Homo sapiens
  misc_RNA (1)...(19): siRNA sense strand
caaaggaagcaucaugaaa

SEQ ID NO: 881785 - RNA, 19 nt, Homo sapiens
  misc_RNA (1)...(19): siRNA sense strand
ccacgaagaagaucaagaa

SEQ ID NO: 881786 - RNA, 19 nt, Homo sapiens
  misc_RNA (1)...(19): siRNA sense strand
gaacgaagucgcacagaag

SEQ ID NO: 881787 - RNA, 19 nt, Homo sapiens
  misc_RNA (1)...(19): siRNA sense strand
agaaagcucuagaaauuag

SEQ ID NO: 881788 - RNA, 19 nt, Homo sapiens
  misc_RNA (1)...(19): siRNA sense strand
aagcagaaauggaagaaau

SEQ ID NO: 881789 - RNA, 19 nt, Homo sapiens
  misc_RNA (1)...(19): siRNA sense strand
gaucccagccucucaagaa

SEQ ID NO: 881790 - RNA, 19 nt, Homo sapiens
  misc_RNA (1)...(19): siRNA sense strand
ucagaagcccgaaggguua

SEQ ID NO: 881791 - RNA, 19 nt, Homo sapiens
  misc_RNA (1)...(19): siRNA sense strand
gaaaagaaagcucuagaaa

SEQ ID NO: 881792 - RNA, 19 nt, Homo sapiens
  misc_RNA (1)...(19): siRNA sense strand
gaaggaacuggauagguuu

SEQ ID NO: 881793 - RNA, 19 nt, Homo sapiens
  misc_RNA (1)...(19): siRNA sense strand
gcggagacuuuguugaaau

SEQ ID NO: 881794 - RNA, 19 nt, Homo sapiens
  misc_RNA (1)...(19): siRNA sense strand
caagugagcccgaggaaca

SEQ ID NO: 881795 - RNA, 19 nt, Homo sapiens
  misc_RNA (1)...(19): siRNA sense strand
gaacaaaguggcgcuguca

SEQ ID NO: 881796 - RNA, 19 nt, Homo sapiens
  misc_RNA (1)...(19): siRNA sense strand
gcacuacccagaggaaauu

SEQ ID NO: 881797 - RNA, 19 nt, Homo sapiens
  misc_RNA (1)...(19): siRNA sense strand
ugagugauguccaguuuca

SEQ ID NO: 881798 - RNA, 19 nt, Homo sapiens
  misc_RNA (1)...(19): siRNA sense strand
uccaguaugugaacaauga

SEQ ID NO: 881799 - RNA, 19 nt, Homo sapiens
  misc_RNA (1)...(19): siRNA sense strand
aggccgagcuuucugaauu

SEQ ID NO: 881800 - RNA, 19 nt, Homo sapiens
  misc_RNA (1)...(19): siRNA sense strand
gcagagaauugcgaaagca

SEQ ID NO: 881801 - RNA, 19 nt, Homo sapiens
  misc_RNA (1)...(19): siRNA sense strand
gcgaaagcuucuccaggaa

SEQ ID NO: 881802 - RNA, 19 nt, Homo sapiens
  misc_RNA (1)...(19): siRNA sense strand
gaaagcagggccgagaauu

SEQ ID NO: 881803 - RNA, 19 nt, Homo sapiens
  misc_RNA (1)...(19): siRNA sense strand
guccugauguucccagaaa

SEQ ID NO: 881804 - RNA, 19 nt, Homo sapiens
  misc_RNA (1)...(19): siRNA sense strand
gcagaagccgugacuguuc

SEQ ID NO: 881805 - RNA, 19 nt, Homo sapiens
  misc_RNA (1)...(19): siRNA sense strand
ggagaaggaagcagagaau

SEQ ID NO: 881806 - RNA, 19 nt, Homo sapiens
  misc_RNA (1)...(19): siRNA sense strand
ggagcuagaacaaaccaaa

SEQ ID NO: 881807 - RNA, 19 nt, Homo sapiens
  misc_RNA (1)...(19): siRNA sense strand
ccugagugauguccaguuu

SEQ ID NO: 881808 - RNA, 19 nt, Homo sapiens
  misc_RNA (1)...(19): siRNA sense strand
gcgaacaggugccuauugc

SEQ ID NO: 881809 - RNA, 19 nt, Homo sapiens
  misc_RNA (1)...(19): siRNA sense strand
gaacagcaggccgagcuuu

SEQ ID NO: 881810 - RNA, 19 nt, Homo sapiens
  misc_RNA (1)...(19): siRNA sense strand
cgaagucgcacagaaguuu

SEQ ID NO: 881811 - RNA, 19 nt, Homo sapiens
  misc_RNA (1)...(19): siRNA sense strand
ccaaggaccacgaagaaga

SEQ ID NO: 881812 - RNA, 19 nt, Homo sapiens
  misc_RNA (1)...(19): siRNA sense strand
ggaggaagcggagacuuug

SEQ ID NO: 881813 - RNA, 19 nt, Homo sapiens
  misc_RNA (1)...(19): siRNA sense strand
gugcuaaucggaagaagaa

SEQ ID NO: 881814 - RNA, 19 nt, Homo sapiens
  misc_RNA (1)...(19): siRNA sense strand
acgaacagcucuucucauc

SEQ ID NO: 881815 - RNA, 19 nt, Homo sapiens
  misc_RNA (1)...(19): siRNA sense strand
gggacaagguggaggagau

SEQ ID NO: 881816 - RNA, 19 nt, Homo sapiens
  misc_RNA (1)...(19): siRNA sense strand
cccacaaguucgugcuuua

SEQ ID NO: 881817 - RNA, 19 nt, Homo sapiens
  misc_RNA (1)...(19): siRNA sense strand
ggaaauugcaagagaaguc

SEQ ID NO: 881818 - RNA, 19 nt, Homo sapiens
  misc_RNA (1)...(19): siRNA sense strand
aggcagagcugaggcagaa

SEQ ID NO: 881819 - RNA, 19 nt, Homo sapiens
  misc_RNA (1)...(19): siRNA sense strand
gaaauccaaggaccacgaa

SEQ ID NO: 881820 - RNA, 19 nt, Homo sapiens
  misc_RNA (1)...(19): siRNA sense strand
agacgccggugcugaagaa

SEQ ID NO: 881821 - RNA, 19 nt, Homo sapiens
  misc_RNA (1)...(19): siRNA sense strand
agaggaaauugcaagagaa

SEQ ID NO: 881822 - RNA, 19 nt, Homo sapiens
  misc_RNA (1)...(19): siRNA sense strand
ucucagagccgucccaaau

SEQ ID NO: 881823 - RNA, 19 nt, Homo sapiens
  misc_RNA (1)...(19): siRNA sense strand
gaggguggcaguccgguuu

SEQ ID NO: 881824 - RNA, 19 nt, Homo sapiens
  misc_RNA (1)...(19): siRNA sense strand
gaaggaagcagagaauugc

SEQ ID NO: 881825 - RNA, 19 nt, Homo sapiens
  misc_RNA (1)...(19): siRNA sense strand
gaccuaacccagucaaauc

SEQ ID NO: 881826 - RNA, 19 nt, Homo sapiens
  misc_RNA (1)...(19): siRNA sense strand
aaagcagggccgagaauuu

SEQ ID NO: 881827 - RNA, 19 nt, Homo sapiens
  misc_RNA (1)...(19): siRNA sense strand
gaaguccauuucuagugau

SEQ ID NO: 881828 - RNA, 19 nt, Homo sapiens
  misc_RNA (1)...(19): siRNA sense strand
gaagguggagcggaacuga

SEQ ID NO: 881829 - RNA, 19 nt, Homo sapiens
  misc_RNA (1)...(19): siRNA sense strand
cuccaggccucaaugauga

SEQ ID NO: 881830 - RNA, 19 nt, Homo sapiens
  misc_RNA (1)...(19): siRNA sense strand
aaaggaagcaucaugaaag

SEQ ID NO: 881831 - RNA, 19 nt, Homo sapiens
  misc_RNA (1)...(19): siRNA sense strand
gcccacaaguucgugcuuu

SEQ ID NO: 881832 - RNA, 19 nt, Homo sapiens
  misc_RNA (1)...(19): siRNA sense strand
ucccagagcccaccaagaa

SEQ ID NO: 881833 - RNA, 19 nt, Homo sapiens
  misc_RNA (1)...(19): siRNA sense strand
agaaggaagcagagaauug

SEQ ID NO: 881834 - RNA, 19 nt, Homo sapiens
  misc_RNA (1)...(19): siRNA sense strand
ggaagcaucaugaaagcau

SEQ ID NO: 881835 - RNA, 19 nt, Homo sapiens
  misc_RNA (1)...(19): siRNA sense strand
ggaacuggauagguuugga

SEQ ID NO: 881836 - RNA, 19 nt, Homo sapiens
  misc_RNA (1)...(19): siRNA sense strand
cuagugauccucuggaaga

SEQ ID NO: 881837 - RNA, 19 nt, Homo sapiens
  misc_RNA (1)...(19): siRNA sense strand
cgaagaagaucaagaaaac

SEQ ID NO: 881838 - RNA, 19 nt, Homo sapiens
  misc_RNA (1)...(19): siRNA sense strand
gaaaucuucauccaaacug

SEQ ID NO: 881839 - RNA, 19 nt, Homo sapiens
  misc_RNA (1)...(19): siRNA sense strand
ccacagguuuggcgugagu

SEQ ID NO: 881840 - RNA, 19 nt, Homo sapiens
  misc_RNA (1)...(19): siRNA sense strand
gaacaaaccaaaaugaagu

SEQ ID NO: 881841 - RNA, 19 nt, Homo sapiens
  misc_RNA (1)...(19): siRNA sense strand
caucaaaggaagcaucaug

SEQ ID NO: 881842 - RNA, 19 nt, Homo sapiens
  misc_RNA (1)...(19): siRNA sense strand
gagaaggaagcagagaauu

SEQ ID NO: 881843 - RNA, 19 nt, Homo sapiens
  misc_RNA (1)...(19): siRNA sense strand
ggccgagcuuucugaauuc

SEQ ID NO: 881844 - RNA, 19 nt, Homo sapiens
  misc_RNA (1)...(19): siRNA sense strand
caaacugaacgaagaagau

SEQ ID NO: 881845 - RNA, 19 nt, Homo sapiens
  misc_RNA (1)...(19): siRNA sense strand
ggaagcggagacuuuguug

SEQ ID NO: 881846 - RNA, 19 nt, Homo sapiens
  misc_RNA (1)...(19): siRNA sense strand
aagcggagacuuuguugaa

SEQ ID NO: 881847 - RNA, 19 nt, Homo sapiens
  misc_RNA (1)...(19): siRNA sense strand
ucaaaggaagcaucaugaa

SEQ ID NO: 881848 - RNA, 19 nt, Homo sapiens
  misc_RNA (1)...(19): siRNA sense strand
cagcagaagccgugacugu

SEQ ID NO: 881849 - RNA, 19 nt, Homo sapiens
  misc_RNA (1)...(19): siRNA sense strand
ggaccacgaagaagaucaa

SEQ ID NO: 881850 - RNA, 19 nt, Homo sapiens
  misc_RNA (1)...(19): siRNA sense strand
accagaaggugcugcugua

SEQ ID NO: 881851 - RNA, 19 nt, Homo sapiens
  misc_RNA (1)...(19): siRNA sense strand
gccacaguauuccauuaug

SEQ ID NO: 881852 - RNA, 19 nt, Homo sapiens
  misc_RNA (1)...(19): siRNA sense strand
gaagcggagacuuuguuga

SEQ ID NO: 881853 - RNA, 19 nt, Homo sapiens
  misc_RNA (1)...(19): siRNA sense strand
aaggagauauuccaguaca

SEQ ID NO: 881854 - RNA, 19 nt, Homo sapiens
  misc_RNA (1)...(19): siRNA sense strand
gcccgcuccucauccagua

SEQ ID NO: 881855 - RNA, 19 nt, Homo sapiens
  misc_RNA (1)...(19): siRNA sense strand
agacuuuguugaaauccaa

SEQ ID NO: 881856 - RNA, 19 nt, Homo sapiens
  misc_RNA (1)...(19): siRNA sense strand
caaggaccacgaagaagau

SEQ ID NO: 881857 - RNA, 19 nt, Homo sapiens
  misc_RNA (1)...(19): siRNA sense strand
agaaggugcugcuguacca

SEQ ID NO: 881858 - RNA, 19 nt, Homo sapiens
  misc_RNA (1)...(19): siRNA sense strand
uccuugagcucacagaguu

SEQ ID NO: 881859 - RNA, 19 nt, Homo sapiens
  misc_RNA (1)...(19): siRNA sense strand
gcuuuacgcccacaaguuc

SEQ ID NO: 881860 - RNA, 19 nt, Homo sapiens
  misc_RNA (1)...(19): siRNA sense strand
ucucagaaaucuucaucca

SEQ ID NO: 881861 - RNA, 19 nt, Homo sapiens
  misc_RNA (1)...(19): siRNA sense strand
gaagcagaaauggaagaaa

SEQ ID NO: 881862 - RNA, 19 nt, Homo sapiens
  misc_RNA (1)...(19): siRNA sense strand
ggacaagguggaggagaug

SEQ ID NO: 881863 - RNA, 19 nt, Homo sapiens
  misc_RNA (1)...(19): siRNA sense strand
cggagacuuuguugaaauc

SEQ ID NO: 881864 - RNA, 19 nt, Homo sapiens
  misc_RNA (1)...(19): siRNA sense strand
gcaaaccaugggaggagaa

SEQ ID NO: 881865 - RNA, 19 nt, Homo sapiens
  misc_RNA (1)...(19): siRNA sense strand
gaucucagaaaucuucauc

SEQ ID NO: 881866 - RNA, 19 nt, Homo sapiens
  misc_RNA (1)...(19): siRNA sense strand
ugaaugaagcagaaaugga

SEQ ID NO: 881867 - RNA, 19 nt, Homo sapiens
  misc_RNA (1)...(19): siRNA sense strand
ugaagaaggaacuggauag

SEQ ID NO: 881868 - RNA, 19 nt, Homo sapiens
  misc_RNA (1)...(19): siRNA sense strand
gagcuccagaucucagaaa

SEQ ID NO: 881869 - RNA, 19 nt, Homo sapiens
  misc_RNA (1)...(19): siRNA sense strand
ggucauaacuccagcuaua

SEQ ID NO: 881870 - RNA, 19 nt, Homo sapiens
  misc_RNA (1)...(19): siRNA sense strand
gacaaaggcuucaaagauu

SEQ ID NO: 881871 - RNA, 19 nt, Homo sapiens
  misc_RNA (1)...(19): siRNA sense strand
gaaagcagcuauguagaaa

SEQ ID NO: 881872 - RNA, 19 nt, Homo sapiens
  misc_RNA (1)...(19): siRNA sense strand
gcacagacauccucaacug

SEQ ID NO: 881873 - RNA, 19 nt, Homo sapiens
  misc_RNA (1)...(19): siRNA sense strand
ggacaaaggcuucaaagau

SEQ ID NO: 881874 - RNA, 19 nt, Homo sapiens
  misc_RNA (1)...(19): siRNA sense strand
acaaaggcuucaaagauua

SEQ ID NO: 881875 - RNA, 19 nt, Homo sapiens
  misc_RNA (1)...(19): siRNA sense strand
ggagaggucugugccguuu

SEQ ID NO: 881876 - RNA, 19 nt, Homo sapiens
  misc_RNA (1)...(19): siRNA sense strand
cgucagaacacauacauua

SEQ ID NO: 881877 - RNA, 19 nt, Homo sapiens
  misc_RNA (1)...(19): siRNA sense strand
caagaagguugcggucaua

SEQ ID NO: 881878 - RNA, 19 nt, Homo sapiens
  misc_RNA (1)...(19): siRNA sense strand
ugaccaagcugcccucaug

SEQ ID NO: 881879 - RNA, 19 nt, Homo sapiens
  misc_RNA (1)...(19): siRNA sense strand
gcagcuauguagaaaugaa

SEQ ID NO: 881880 - RNA, 19 nt, Homo sapiens
  misc_RNA (1)...(19): siRNA sense strand
ggucaccacugcaaugaau

SEQ ID NO: 881881 - RNA, 19 nt, Homo sapiens
  misc_RNA (1)...(19): siRNA sense strand
ccagaaagcagcuauguag

SEQ ID NO: 881882 - RNA, 19 nt, Homo sapiens
  misc_RNA (1)...(19): siRNA sense strand
ucaaaggaaucagguguga

SEQ ID NO: 881883 - RNA, 19 nt, Homo sapiens
  misc_RNA (1)...(19): siRNA sense strand
aagcagcuauguagaaaug

SEQ ID NO: 881884 - RNA, 19 nt, Homo sapiens
  misc_RNA (1)...(19): siRNA sense strand
ccauauuccuggucauuau

SEQ ID NO: 881885 - RNA, 19 nt, Homo sapiens
  misc_RNA (1)...(19): siRNA sense strand
gaagucgccugugcacaug

SEQ ID NO: 881886 - RNA, 19 nt, Homo sapiens
  misc_RNA (1)...(19): siRNA sense strand
guagauggcuccuguaccu

SEQ ID NO: 881887 - RNA, 19 nt, Homo sapiens
  misc_RNA (1)...(19): siRNA sense strand
gggcugaacugcagugaac

SEQ ID NO: 881888 - RNA, 19 nt, Homo sapiens
  misc_RNA (1)...(19): siRNA sense strand
ggauagacgucagaacaca

SEQ ID NO: 881889 - RNA, 19 nt, Homo sapiens
  misc_RNA (1)...(19): siRNA sense strand
gaaguugagcccacaguca

SEQ ID NO: 881890 - RNA, 19 nt, Homo sapiens
  misc_RNA (1)...(19): siRNA sense strand
ccaagaagguugcggucau

SEQ ID NO: 881891 - RNA, 19 nt, Homo sapiens
  misc_RNA (1)...(19): siRNA sense strand
gugagugccucccaggauu

SEQ ID NO: 881892 - RNA, 19 nt, Homo sapiens
  misc_RNA (1)...(19): siRNA sense strand
gcaacacugugagcagaga

SEQ ID NO: 881893 - RNA, 19 nt, Homo sapiens
  misc_RNA (1)...(19): siRNA sense strand
agaaagcagcuauguagaa

SEQ ID NO: 881894 - RNA, 19 nt, Homo sapiens
  misc_RNA (1)...(19): siRNA sense strand
ccaggaaccuuuggcuaug

SEQ ID NO: 881895 - RNA, 19 nt, Homo sapiens
  misc_RNA (1)...(19): siRNA sense strand
gaauccgugugcaguucua

SEQ ID NO: 881896 - RNA, 19 nt, Homo sapiens
  misc_RNA (1)...(19): siRNA sense strand
caacugcucguccaucugu

SEQ ID NO: 881897 - RNA, 19 nt, Homo sapiens
  misc_RNA (1)...(19): siRNA sense strand
agacagagcccugccaaug

SEQ ID NO: 881898 - RNA, 19 nt, Homo sapiens
  misc_RNA (1)...(19): siRNA sense strand
ggugucagcagcuauguga

SEQ ID NO: 881899 - RNA, 19 nt, Homo sapiens
  misc_RNA (1)...(19): siRNA sense strand
caaugaauccugcccuguu

SEQ ID NO: 881900 - RNA, 19 nt, Homo sapiens
  misc_RNA (1)...(19): siRNA sense strand
gcuauauccagaaugcaua

SEQ ID NO: 881901 - RNA, 19 nt, Homo sapiens
  misc_RNA (1)...(19): siRNA sense strand
guacuuguuccuugaauag

SEQ ID NO: 881902 - RNA, 19 nt, Homo sapiens
  misc_RNA (1)...(19): siRNA sense strand
gugcuuuccuggauggauu

SEQ ID NO: 881903 - RNA, 19 nt, Homo sapiens
  misc_RNA (1)...(19): siRNA sense strand
caucagcugccacccagua

SEQ ID NO: 881904 - RNA, 19 nt, Homo sapiens
  misc_RNA (1)...(19): siRNA sense strand
ccagaaugcauacgaccua

SEQ ID NO: 881905 - RNA, 19 nt, Homo sapiens
  misc_RNA (1)...(19): siRNA sense strand
gaacugcagccaggauugu

SEQ ID NO: 881906 - RNA, 19 nt, Homo sapiens
  misc_RNA (1)...(19): siRNA sense strand
gaagguugcggucauaacu

SEQ ID NO: 881907 - RNA, 19 nt, Homo sapiens
  misc_RNA (1)...(19): siRNA sense strand
ucuaguacuuguuccuuga

SEQ ID NO: 881908 - RNA, 19 nt, Homo sapiens
  misc_RNA (1)...(19): siRNA sense strand
gcaguucuaguacuuguuc

SEQ ID NO: 881909 - RNA, 19 nt, Homo sapiens
  misc_RNA (1)...(19): siRNA sense strand
aaugaauccugcccuguug

SEQ ID NO: 881910 - RNA, 19 nt, Homo sapiens
  misc_RNA (1)...(19): siRNA sense strand
ccagcuauauccagaaugc

SEQ ID NO: 881911 - RNA, 19 nt, Homo sapiens
  misc_RNA (1)...(19): siRNA sense strand
ggacugcacccugccaugu

SEQ ID NO: 881912 - RNA, 19 nt, Homo sapiens
  misc_RNA (1)...(19): siRNA sense strand
ccuaggaacagccauauuc

SEQ ID NO: 881913 - RNA, 19 nt, Homo sapiens
  misc_RNA (1)...(19): siRNA sense strand
ccugcaagcuuccagaaag

SEQ ID NO: 881914 - RNA, 19 nt, Homo sapiens
  misc_RNA (1)...(19): siRNA sense strand
cugaaucccuacaccaaga

SEQ ID NO: 881915 - RNA, 19 nt, Homo sapiens
  misc_RNA (1)...(19): siRNA sense strand
ggacccuuaugccagagaa

SEQ ID NO: 881916 - RNA, 19 nt, Homo sapiens
  misc_RNA (1)...(19): siRNA sense strand
ccacaucagcggcaucugu

SEQ ID NO: 881917 - RNA, 19 nt, Homo sapiens
  misc_RNA (1)...(19): siRNA sense strand
gccauauuccuggucauua

SEQ ID NO: 881918 - RNA, 19 nt, Homo sapiens
  misc_RNA (1)...(19): siRNA sense strand
uggcuggacuggacucuuc

SEQ ID NO: 881919 - RNA, 19 nt, Homo sapiens
  misc_RNA (1)...(19): siRNA sense strand
aagcugcccucaugaugga

SEQ ID NO: 881920 - RNA, 19 nt, Homo sapiens
  misc_RNA (1)...(19): siRNA sense strand
uaugaccuccucccaguaa

SEQ ID NO: 881921 - RNA, 19 nt, Homo sapiens
  misc_RNA (1)...(19): siRNA sense strand
cagacauccucaacugguu

SEQ ID NO: 881922 - RNA, 19 nt, Homo sapiens
  misc_RNA (1)...(19): siRNA sense strand
ggaauggauagacgucaga

SEQ ID NO: 881923 - RNA, 19 nt, Homo sapiens
  misc_RNA (1)...(19): siRNA sense strand
cccaggacaagcaaucuua

SEQ ID NO: 881924 - RNA, 19 nt, Homo sapiens
  misc_RNA (1)...(19): siRNA sense strand
ggauuguccuugccaccau

SEQ ID NO: 881925 - RNA, 19 nt, Homo sapiens
  misc_RNA (1)...(19): siRNA sense strand
gugcaguucuaguacuugu

SEQ ID NO: 881926 - RNA, 19 nt, Homo sapiens
  misc_RNA (1)...(19): siRNA sense strand
guaugccagugucagaaug

SEQ ID NO: 881927 - RNA, 19 nt, Homo sapiens
  misc_RNA (1)...(19): siRNA sense strand
gcacaccccuucgaucaga

SEQ ID NO: 881928 - RNA, 19 nt, Homo sapiens
  misc_RNA (1)...(19): siRNA sense strand
ccaggacaagcaaucuuaa

SEQ ID NO: 881929 - RNA, 19 nt, Homo sapiens
  misc_RNA (1)...(19): siRNA sense strand
gacagagcccugccaaugg

SEQ ID NO: 881930 - RNA, 19 nt, Homo sapiens
  misc_RNA (1)...(19): siRNA sense strand
gcacauuugggcugaacug

SEQ ID NO: 881931 - RNA, 19 nt, Homo sapiens
  misc_RNA (1)...(19): siRNA sense strand
ugaagucgccugugcacau

SEQ ID NO: 881932 - RNA, 19 nt, Homo sapiens
  misc_RNA (1)...(19): siRNA sense strand
ggacauuuggccagaacug

SEQ ID NO: 881933 - RNA, 19 nt, Homo sapiens
  misc_RNA (1)...(19): siRNA sense strand
ugaacaacuccaccuguga

SEQ ID NO: 881934 - RNA, 19 nt, Homo sapiens
  misc_RNA (1)...(19): siRNA sense strand
aguacuuguuccuugaaua

SEQ ID NO: 881935 - RNA, 19 nt, Homo sapiens
  misc_RNA (1)...(19): siRNA sense strand
ccaagcugcccucaugaug

SEQ ID NO: 881936 - RNA, 19 nt, Homo sapiens
  misc_RNA (1)...(19): siRNA sense strand
ccuugcaccugucagaaug

SEQ ID NO: 881937 - RNA, 19 nt, Homo sapiens
  misc_RNA (1)...(19): siRNA sense strand
auagacgucagaacacaua

SEQ ID NO: 881938 - RNA, 19 nt, Homo sapiens
  misc_RNA (1)...(19): siRNA sense strand
aagaauccgugugcaguuc

SEQ ID NO: 881939 - RNA, 19 nt, Homo sapiens
  misc_RNA (1)...(19): siRNA sense strand
cuaccuaggaacagccaua

SEQ ID NO: 881940 - RNA, 19 nt, Homo sapiens
  misc_RNA (1)...(19): siRNA sense strand
caacuccaccugugaccau

SEQ ID NO: 881941 - RNA, 19 nt, Homo sapiens
  misc_RNA (1)...(19): siRNA sense strand
ccuugucgacaucuaauaa

SEQ ID NO: 881942 - RNA, 19 nt, Homo sapiens
  misc_RNA (1)...(19): siRNA sense strand
gugugcaguucuaguacuu

SEQ ID NO: 881943 - RNA, 19 nt, Homo sapiens
  misc_RNA (1)...(19): siRNA sense strand
aaagaauccgugugcaguu

SEQ ID NO: 881944 - RNA, 19 nt, Homo sapiens
  misc_RNA (1)...(19): siRNA sense strand
gaccaagcugcccucauga

SEQ ID NO: 881945 - RNA, 19 nt, Homo sapiens
  misc_RNA (1)...(19): siRNA sense strand
cccaggaaccuuuggcuau

SEQ ID NO: 881946 - RNA, 19 nt, Homo sapiens
  misc_RNA (1)...(19): siRNA sense strand
cagaaagcagcuauguaga

SEQ ID NO: 881947 - RNA, 19 nt, Homo sapiens
  misc_RNA (1)...(19): siRNA sense strand
gucagaacacauacauuau

SEQ ID NO: 881948 - RNA, 19 nt, Homo sapiens
  misc_RNA (1)...(19): siRNA sense strand
gaauggauagacgucagaa

SEQ ID NO: 881949 - RNA, 19 nt, Homo sapiens
  misc_RNA (1)...(19): siRNA sense strand
ggaugaccagcaccgacua

SEQ ID NO: 881950 - RNA, 19 nt, Homo sapiens
  misc_RNA (1)...(19): siRNA sense strand
aucuguagcuguaacaaug

SEQ ID NO: 881951 - RNA, 19 nt, Homo sapiens
  misc_RNA (1)...(19): siRNA sense strand
cauccuugucgacaucuaa

SEQ ID NO: 881952 - RNA, 19 nt, Homo sapiens
  misc_RNA (1)...(19): siRNA sense strand
acccuuacgccacaauuaa

SEQ ID NO: 881953 - RNA, 19 nt, Homo sapiens
  misc_RNA (1)...(19): siRNA sense strand
cucaggugcuuguggaaug

SEQ ID NO: 881954 - RNA, 19 nt, Homo sapiens
  misc_RNA (1)...(19): siRNA sense strand
aaucaggugugaccaagcu

SEQ ID NO: 881955 - RNA, 19 nt, Homo sapiens
  misc_RNA (1)...(19): siRNA sense strand
cuaugugagugcaugaaca

SEQ ID NO: 881956 - RNA, 19 nt, Homo sapiens
  misc_RNA (1)...(19): siRNA sense strand
ggaugggagcugcgagugu

SEQ ID NO: 881957 - RNA, 19 nt, Homo sapiens
  misc_RNA (1)...(19): siRNA sense strand
gcccuggcuucaaaggaau

SEQ ID NO: 881958 - RNA, 19 nt, Homo sapiens
  misc_RNA (1)...(19): siRNA sense strand
cagaacugcagccaggauu

SEQ ID NO: 881959 - RNA, 19 nt, Homo sapiens
  misc_RNA (1)...(19): siRNA sense strand
caaaggcuucaaagauuac

SEQ ID NO: 881960 - RNA, 19 nt, Homo sapiens
  misc_RNA (1)...(19): siRNA sense strand
acaccugccaugaggauga

SEQ ID NO: 881961 - RNA, 19 nt, Homo sapiens
  misc_RNA (1)...(19): siRNA sense strand
caucaugcuccuguuauuc

SEQ ID NO: 881962 - RNA, 19 nt, Homo sapiens
  misc_RNA (1)...(19): siRNA sense strand
cuggauggauuggcaagga

SEQ ID NO: 881963 - RNA, 19 nt, Homo sapiens
  misc_RNA (1)...(19): siRNA sense strand
uacacacgaugcacagaca

SEQ ID NO: 881964 - RNA, 19 nt, Homo sapiens
  misc_RNA (1)...(19): siRNA sense strand
uaugugagugcaugaacaa

SEQ ID NO: 881965 - RNA, 19 nt, Homo sapiens
  misc_RNA (1)...(19): siRNA sense strand
ggucaggacucuacuguaa

SEQ ID NO: 881966 - RNA, 19 nt, Homo sapiens
  misc_RNA (1)...(19): siRNA sense strand
ucaaguaacugcucccuaa

SEQ ID NO: 881967 - RNA, 19 nt, Homo sapiens
  misc_RNA (1)...(19): siRNA sense strand
caacaggaaugucuaugaa

SEQ ID NO: 881968 - RNA, 19 nt, Homo sapiens
  misc_RNA (1)...(19): siRNA sense strand
gcacugacauucuaaacug

SEQ ID NO: 881969 - RNA, 19 nt, Homo sapiens
  misc_RNA (1)...(19): siRNA sense strand
cauaugaccucccaaagaa

SEQ ID NO: 881970 - RNA, 19 nt, Homo sapiens
  misc_RNA (1)...(19): siRNA sense strand
ucacaucccuugucauuau

SEQ ID NO: 881971 - RNA, 19 nt, Homo sapiens
  misc_RNA (1)...(19): siRNA sense strand
gagcugcacugacauucua

SEQ ID NO: 881972 - RNA, 19 nt, Homo sapiens
  misc_RNA (1)...(19): siRNA sense strand
cuacuggcauuguucauua

SEQ ID NO: 881973 - RNA, 19 nt, Homo sapiens
  misc_RNA (1)...(19): siRNA sense strand
gaacccauaugccacuauu

SEQ ID NO: 881974 - RNA, 19 nt, Homo sapiens
  misc_RNA (1)...(19): siRNA sense strand
ccacugugcugauaaaugu

SEQ ID NO: 881975 - RNA, 19 nt, Homo sapiens
  misc_RNA (1)...(19): siRNA sense strand
gaaugucuaugaaguugaa

SEQ ID NO: 881976 - RNA, 19 nt, Homo sapiens
  misc_RNA (1)...(19): siRNA sense strand
ggacugcacugggacauug

SEQ ID NO: 881977 - RNA, 19 nt, Homo sapiens
  misc_RNA (1)...(19): siRNA sense strand
gagcagagaugcccuuguc

SEQ ID NO: 881978 - RNA, 19 nt, Homo sapiens
  misc_RNA (1)...(19): siRNA sense strand
gagauguccucuaggguuu

SEQ ID NO: 881979 - RNA, 19 nt, Homo sapiens
  misc_RNA (1)...(19): siRNA sense strand
ggacuugacagaagcuaua

SEQ ID NO: 881980 - RNA, 19 nt, Homo sapiens
  misc_RNA (1)...(19): siRNA sense strand
gcacugauaugccaauguc

SEQ ID NO: 881981 - RNA, 19 nt, Homo sapiens
  misc_RNA (1)...(19): siRNA sense strand
gagcagggcaccuauggua

SEQ ID NO: 881982 - RNA, 19 nt, Homo sapiens
  misc_RNA (1)...(19): siRNA sense strand
ggacucuacuguaaugaga

SEQ ID NO: 881983 - RNA, 19 nt, Homo sapiens
  misc_RNA (1)...(19): siRNA sense strand
gguaacgacugucaucaga

SEQ ID NO: 881984 - RNA, 19 nt, Homo sapiens
  misc_RNA (1)...(19): siRNA sense strand
gaaguugaaccuacaguga

SEQ ID NO: 881985 - RNA, 19 nt, Homo sapiens
  misc_RNA (1)...(19): siRNA sense strand
ggucagguguccacuguga

SEQ ID NO: 881986 - RNA, 19 nt, Homo sapiens
  misc_RNA (1)...(19): siRNA sense strand
uaacgacugucaucagaga

SEQ ID NO: 881987 - RNA, 19 nt, Homo sapiens
  misc_RNA (1)...(19): siRNA sense strand
ugggaaagcuacucaguga

SEQ ID NO: 881988 - RNA, 19 nt, Homo sapiens
  misc_RNA (1)...(19): siRNA sense strand
gaaccuacagugaguguug

SEQ ID NO: 881989 - RNA, 19 nt, Homo sapiens
  misc_RNA (1)...(19): siRNA sense strand
ucaacgagcucggugcuuu

SEQ ID NO: 881990 - RNA, 19 nt, Homo sapiens
  misc_RNA (1)...(19): siRNA sense strand
ucaagcugguguuaucaua

SEQ ID NO: 881991 - RNA, 19 nt, Homo sapiens
  misc_RNA (1)...(19): siRNA sense strand
caucaccucugaaucuuga

SEQ ID NO: 881992 - RNA, 19 nt, Homo sapiens
  misc_RNA (1)...(19): siRNA sense strand
ggucgucaaugcagauuau

SEQ ID NO: 881993 - RNA, 19 nt, Homo sapiens
  misc_RNA (1)...(19): siRNA sense strand
gaaugccagugccauaaug

SEQ ID NO: 881994 - RNA, 19 nt, Homo sapiens
  misc_RNA (1)...(19): siRNA sense strand
ugacugcucucaaccaugu

SEQ ID NO: 881995 - RNA, 19 nt, Homo sapiens
  misc_RNA (1)...(19): siRNA sense strand
ugccugagcuuuauuuguu

SEQ ID NO: 881996 - RNA, 19 nt, Homo sapiens
  misc_RNA (1)...(19): siRNA sense strand
gggcuuuggcuguaacuua

SEQ ID NO: 881997 - RNA, 19 nt, Homo sapiens
  misc_RNA (1)...(19): siRNA sense strand
uaaaagaccugggaaagaa

SEQ ID NO: 881998 - RNA, 19 nt, Homo sapiens
  misc_RNA (1)...(19): siRNA sense strand
caucaucauucuuguccua

SEQ ID NO: 881999 - RNA, 19 nt, Homo sapiens
  misc_RNA (1)...(19): siRNA sense strand
ggcuuuggcuguaacuuaa

SEQ ID NO: 882000 - RNA, 19 nt, Homo sapiens
  misc_RNA (1)...(19): siRNA sense strand
caagaaugccagugccaua

SEQ ID NO: 882001 - RNA, 19 nt, Homo sapiens
  misc_RNA (1)...(19): siRNA sense strand
gauuauaccauuucaggaa

SEQ ID NO: 882002 - RNA, 19 nt, Homo sapiens
  misc_RNA (1)...(19): siRNA sense strand
ggaaaucugaacagcuuaa

SEQ ID NO: 882003 - RNA, 19 nt, Homo sapiens
  misc_RNA (1)...(19): siRNA sense strand
gcaggcaucaucauucuug

SEQ ID NO: 882004 - RNA, 19 nt, Homo sapiens
  misc_RNA (1)...(19): siRNA sense strand
uaucauaguuggaaaucug

SEQ ID NO: 882005 - RNA, 19 nt, Homo sapiens
  misc_RNA (1)...(19): siRNA sense strand
ucaggacucuacuguaaug

SEQ ID NO: 882006 - RNA, 19 nt, Homo sapiens
  misc_RNA (1)...(19): siRNA sense strand
ggagguagcagcagcaaca

SEQ ID NO: 882007 - RNA, 19 nt, Homo sapiens
  misc_RNA (1)...(19): siRNA sense strand
ugaagacccuaaugugugu

SEQ ID NO: 882008 - RNA, 19 nt, Homo sapiens
  misc_RNA (1)...(19): siRNA sense strand
gacauguucuccuggauuc

SEQ ID NO: 882009 - RNA, 19 nt, Homo sapiens
  misc_RNA (1)...(19): siRNA sense strand
caacuguuugugaaucuua

SEQ ID NO: 882010 - RNA, 19 nt, Homo sapiens
  misc_RNA (1)...(19): siRNA sense strand
gaaccuaugggauaaacug

SEQ ID NO: 882011 - RNA, 19 nt, Homo sapiens
  misc_RNA (1)...(19): siRNA sense strand
gagaugcccuugucaaaau

SEQ ID NO: 882012 - RNA, 19 nt, Homo sapiens
  misc_RNA (1)...(19): siRNA sense strand
gcagagaucaauaacucaa

SEQ ID NO: 882013 - RNA, 19 nt, Homo sapiens
  misc_RNA (1)...(19): siRNA sense strand
cauaugcagagaucaauaa

SEQ ID NO: 882014 - RNA, 19 nt, Homo sapiens
  misc_RNA (1)...(19): siRNA sense strand
gugguuauguggagaugaa

SEQ ID NO: 882015 - RNA, 19 nt, Homo sapiens
  misc_RNA (1)...(19): siRNA sense strand
gauaugugauugucugaac

SEQ ID NO: 882016 - RNA, 19 nt, Homo sapiens
  misc_RNA (1)...(19): siRNA sense strand
ucacgucacuggagaaugc

SEQ ID NO: 882017 - RNA, 19 nt, Homo sapiens
  misc_RNA (1)...(19): siRNA sense strand
gcagagaugcccuugucaa

SEQ ID NO: 882018 - RNA, 19 nt, Homo sapiens
  misc_RNA (1)...(19): siRNA sense strand
caacuucagccaacaggaa

SEQ ID NO: 882019 - RNA, 19 nt, Homo sapiens
  misc_RNA (1)...(19): siRNA sense strand
ugaucaagcugguguuauc

SEQ ID NO: 882020 - RNA, 19 nt, Homo sapiens
  misc_RNA (1)...(19): siRNA sense strand
gcgcaagucucaguguugu

SEQ ID NO: 882021 - RNA, 19 nt, Homo sapiens
  misc_RNA (1)...(19): siRNA sense strand
ccauaugaccucccaaaga

SEQ ID NO: 882022 - RNA, 19 nt, Homo sapiens
  misc_RNA (1)...(19): siRNA sense strand
ccugagcuuuauuuguuua

SEQ ID NO: 882023 - RNA, 19 nt, Homo sapiens
  misc_RNA (1)...(19): siRNA sense strand
caucauucuuguccuaguu

SEQ ID NO: 882024 - RNA, 19 nt, Homo sapiens
  misc_RNA (1)...(19): siRNA sense strand
ggagcgagaugugaucaag

SEQ ID NO: 882025 - RNA, 19 nt, Homo sapiens
  misc_RNA (1)...(19): siRNA sense strand
gggacagcaucaccucuga

SEQ ID NO: 882026 - RNA, 19 nt, Homo sapiens
  misc_RNA (1)...(19): siRNA sense strand
ucaguguuguccuggauuu

SEQ ID NO: 882027 - RNA, 19 nt, Homo sapiens
  misc_RNA (1)...(19): siRNA sense strand
uaaacaugguccacagugu

SEQ ID NO: 882028 - RNA, 19 nt, Homo sapiens
  misc_RNA (1)...(19): siRNA sense strand
ccaacaggaaugucuauga

SEQ ID NO: 882029 - RNA, 19 nt, Homo sapiens
  misc_RNA (1)...(19): siRNA sense strand
gacacaagcagaagggaaa

SEQ ID NO: 882030 - RNA, 19 nt, Homo sapiens
  misc_RNA (1)...(19): siRNA sense strand
gaagggagcgagaugugau

SEQ ID NO: 882031 - RNA, 19 nt, Homo sapiens
  misc_RNA (1)...(19): siRNA sense strand
ccacauuucugggcagugu

SEQ ID NO: 882032 - RNA, 19 nt, Homo sapiens
  misc_RNA (1)...(19): siRNA sense strand
cauaugccacuauuaaaga

SEQ ID NO: 882033 - RNA, 19 nt, Homo sapiens
  misc_RNA (1)...(19): siRNA sense strand
cagagaugcccuugucaaa

SEQ ID NO: 882034 - RNA, 19 nt, Homo sapiens
  misc_RNA (1)...(19): siRNA sense strand
uaaagacccaccuguacuu

SEQ ID NO: 882035 - RNA, 19 nt, Homo sapiens
  misc_RNA (1)...(19): siRNA sense strand
gcaaugguggaaacgcuaa

SEQ ID NO: 882036 - RNA, 19 nt, Homo sapiens
  misc_RNA (1)...(19): siRNA sense strand
gaucuuuguccuccuggua

SEQ ID NO: 882037 - RNA, 19 nt, Homo sapiens
  misc_RNA (1)...(19): siRNA sense strand
caagaggacaguggaggua

SEQ ID NO: 882038 - RNA, 19 nt, Homo sapiens
  misc_RNA (1)...(19): siRNA sense strand
acaggaaugucuaugaagu

SEQ ID NO: 882039 - RNA, 19 nt, Homo sapiens
  misc_RNA (1)...(19): siRNA sense strand
ggaaagcuacucagugacu

SEQ ID NO: 882040 - RNA, 19 nt, Homo sapiens
  misc_RNA (1)...(19): siRNA sense strand
guacuugccgcacuggauu

SEQ ID NO: 882041 - RNA, 19 nt, Homo sapiens
  misc_RNA (1)...(19): siRNA sense strand
ccuaugggauaaacuguuc

SEQ ID NO: 882042 - RNA, 19 nt, Homo sapiens
  misc_RNA (1)...(19): siRNA sense strand
cagcaucaccucugaaucu

SEQ ID NO: 882043 - RNA, 19 nt, Homo sapiens
  misc_RNA (1)...(19): siRNA sense strand
ucacagcaaugguggaaac

SEQ ID NO: 882044 - RNA, 19 nt, Homo sapiens
  misc_RNA (1)...(19): siRNA sense strand
ucaagcaugccagcaguua

SEQ ID NO: 882045 - RNA, 19 nt, Homo sapiens
  misc_RNA (1)...(19): siRNA sense strand
uuggaaaucugaacagcuu

SEQ ID NO: 882046 - RNA, 19 nt, Homo sapiens
  misc_RNA (1)...(19): siRNA sense strand
ggaagggagcgagauguga

SEQ ID NO: 882047 - RNA, 19 nt, Homo sapiens
  misc_RNA (1)...(19): siRNA sense strand
cuacugcacucagagaugu

SEQ ID NO: 882048 - RNA, 19 nt, Homo sapiens
  misc_RNA (1)...(19): siRNA sense strand
gaucaauaacucaacuuca

SEQ ID NO: 882049 - RNA, 19 nt, Homo sapiens
  misc_RNA (1)...(19): siRNA sense strand
uauuaaagacccaccugua

SEQ ID NO: 882050 - RNA, 19 nt, Homo sapiens
  misc_RNA (1)...(19): siRNA sense strand
gagaacccauaugccacua

SEQ ID NO: 882051 - RNA, 19 nt, Homo sapiens
  misc_RNA (1)...(19): siRNA sense strand
ugauaaauguguccauggu

SEQ ID NO: 882052 - RNA, 19 nt, Homo sapiens
  misc_RNA (1)...(19): siRNA sense strand
uacacgagcugcacugaca

SEQ ID NO: 882053 - RNA, 19 nt, Homo sapiens
  misc_RNA (1)...(19): siRNA sense strand
gcacguacgggcugaacug

SEQ ID NO: 882054 - RNA, 19 nt, Homo sapiens
  misc_RNA (1)...(19): siRNA sense strand
guggacgggucuuguacuu

SEQ ID NO: 882055 - RNA, 19 nt, Homo sapiens
  misc_RNA (1)...(19): siRNA sense strand
gcaagagucauacccacau

SEQ ID NO: 882056 - RNA, 19 nt, Homo sapiens
  misc_RNA (1)...(19): siRNA sense strand
ggaaaagauugugcacuga

SEQ ID NO: 882057 - RNA, 19 nt, Homo sapiens
  misc_RNA (1)...(19): siRNA sense strand
gggcucuacugcacucaga

SEQ ID NO: 882058 - RNA, 19 nt, Homo sapiens
  misc_RNA (1)...(19): siRNA sense strand
acagaucuugucaguguua

SEQ ID NO: 882059 - RNA, 19 nt, Homo sapiens
  misc_RNA (1)...(19): siRNA sense strand
gcucuacggcaucaaaugu

SEQ ID NO: 882060 - RNA, 19 nt, Homo sapiens
  misc_RNA (1)...(19): siRNA sense strand
cagcagcagcagugaauga

SEQ ID NO: 882061 - RNA, 19 nt, Homo sapiens
  misc_RNA (1)...(19): siRNA sense strand
gaacagucacaucccuugu

SEQ ID NO: 882062 - RNA, 19 nt, Homo sapiens
  misc_RNA (1)...(19): siRNA sense strand
agacccaccuguacuuauc

SEQ ID NO: 882063 - RNA, 19 nt, Homo sapiens
  misc_RNA (1)...(19): siRNA sense strand
ucugggaaccuaugggaua

SEQ ID NO: 882064 - RNA, 19 nt, Homo sapiens
  misc_RNA (1)...(19): siRNA sense strand
gguuauuucuuugaacuca

SEQ ID NO: 882065 - RNA, 19 nt, Homo sapiens
  misc_RNA (1)...(19): siRNA sense strand
ggaaguaccugcccacaua

SEQ ID NO: 882066 - RNA, 19 nt, Homo sapiens
  misc_RNA (1)...(19): siRNA sense strand
ggaagcagauuaugaggua

SEQ ID NO: 882067 - RNA, 19 nt, Homo sapiens
  misc_RNA (1)...(19): siRNA sense strand
guacaaacccugaaauuaa

SEQ ID NO: 882068 - RNA, 19 nt, Homo sapiens
  misc_RNA (1)...(19): siRNA sense strand
ggaauggcaucauaucuuu

SEQ ID NO: 882069 - RNA, 19 nt, Homo sapiens
  misc_RNA (1)...(19): siRNA sense strand
ggaagacacugauuaccua

SEQ ID NO: 882070 - RNA, 19 nt, Homo sapiens
  misc_RNA (1)...(19): siRNA sense strand
gcaagaaguucccauguau

SEQ ID NO: 882071 - RNA, 19 nt, Homo sapiens
  misc_RNA (1)...(19): siRNA sense strand
gaaccaagagccagaaaua

SEQ ID NO: 882072 - RNA, 19 nt, Homo sapiens
  misc_RNA (1)...(19): siRNA sense strand
gcaagaaguucccauguau

SEQ ID NO: 882073 - RNA, 19 nt, Homo sapiens
  misc_RNA (1)...(19): siRNA sense strand
gcaagaaguucccauguau

SEQ ID NO: 882074 - RNA, 19 nt, Homo sapiens
  misc_RNA (1)...(19): siRNA sense strand
gcaagaaguucccauguau

SEQ ID NO: 882075 - RNA, 19 nt, Homo sapiens
  misc_RNA (1)...(19): siRNA sense strand
gaucucggcucaccaaauu

SEQ ID NO: 882076 - RNA, 19 nt, Homo sapiens
  misc_RNA (1)...(19): siRNA sense strand
caagaagacuccaugugua

SEQ ID NO: 882077 - RNA, 19 nt, Homo sapiens
  misc_RNA (1)...(19): siRNA sense strand
gcuagaagcucucaugugu

SEQ ID NO: 882078 - RNA, 19 nt, Homo sapiens
  misc_RNA (1)...(19): siRNA sense strand
gcaagaaguucccaugugu

SEQ ID NO: 882079 - RNA, 19 nt, Homo sapiens
  misc_RNA (1)...(19): siRNA sense strand
gcaagaaguucccaugugu

SEQ ID NO: 882080 - RNA, 19 nt, Homo sapiens
  misc_RNA (1)...(19): siRNA sense strand
gcaagaaguucccacaugu

SEQ ID NO: 882081 - RNA, 19 nt, Homo sapiens
  misc_RNA (1)...(19): siRNA sense strand
gaccauauaucgaaaguuc

SEQ ID NO: 882082 - RNA, 19 nt, Homo sapiens
  misc_RNA (1)...(19): siRNA sense strand
gaaguaaagcaacaaguaa

SEQ ID NO: 882083 - RNA, 19 nt, Homo sapiens
  misc_RNA (1)...(19): siRNA sense strand
ggacagacccugaaucuag

SEQ ID NO: 882084 - RNA, 19 nt, Homo sapiens
  misc_RNA (1)...(19): siRNA sense strand
caaguaauauccacgaguu

SEQ ID NO: 882085 - RNA, 19 nt, Homo sapiens
  misc_RNA (1)...(19): siRNA sense strand
gaagacgagugauuucaug

SEQ ID NO: 882086 - RNA, 19 nt, Homo sapiens
  misc_RNA (1)...(19): siRNA sense strand
ggcaagaaguucccaugua

SEQ ID NO: 882087 - RNA, 19 nt, Homo sapiens
  misc_RNA (1)...(19): siRNA sense strand
ggcaagaaguucccaugua

SEQ ID NO: 882088 - RNA, 19 nt, Homo sapiens
  misc_RNA (1)...(19): siRNA sense strand
ggcaagaaguucccaugua

SEQ ID NO: 882089 - RNA, 19 nt, Homo sapiens
  misc_RNA (1)...(19): siRNA sense strand
ggcaagaaguucccaugua

SEQ ID NO: 882090 - RNA, 19 nt, Homo sapiens
  misc_RNA (1)...(19): siRNA sense strand
guacagauccuauauccaa

SEQ ID NO: 882091 - RNA, 19 nt, Homo sapiens
  misc_RNA (1)...(19): siRNA sense strand
gcaacacccuagaagauga

SEQ ID NO: 882092 - RNA, 19 nt, Homo sapiens
  misc_RNA (1)...(19): siRNA sense strand
gcaagaagacuccaugugu

SEQ ID NO: 882093 - RNA, 19 nt, Homo sapiens
  misc_RNA (1)...(19): siRNA sense strand
auaaaggaauggcaucaua

SEQ ID NO: 882094 - RNA, 19 nt, Homo sapiens
  misc_RNA (1)...(19): siRNA sense strand
gaaucuaggcaagaaauua

SEQ ID NO: 882095 - RNA, 19 nt, Homo sapiens
  misc_RNA (1)...(19): siRNA sense strand
gcauaacugucuugggauu

SEQ ID NO: 882096 - RNA, 19 nt, Homo sapiens
  misc_RNA (1)...(19): siRNA sense strand
gcgagaaguucccguguau

SEQ ID NO: 882097 - RNA, 19 nt, Homo sapiens
  misc_RNA (1)...(19): siRNA sense strand
gagcagccaggcagaaaua

SEQ ID NO: 882098 - RNA, 19 nt, Homo sapiens
  misc_RNA (1)...(19): siRNA sense strand
gggcauguuugaaagcuuu

SEQ ID NO: 882099 - RNA, 19 nt, Homo sapiens
  misc_RNA (1)...(19): siRNA sense strand
gggaacgccuaguuugaaa

SEQ ID NO: 882100 - RNA, 19 nt, Homo sapiens
  misc_RNA (1)...(19): siRNA sense strand
gaagacagggcuccagcua

SEQ ID NO: 882101 - RNA, 19 nt, Homo sapiens
  misc_RNA (1)...(19): siRNA sense strand
ggcaagaaguucccacaug

SEQ ID NO: 882102 - RNA, 19 nt, Homo sapiens
  misc_RNA (1)...(19): siRNA sense strand
agaaguacuugcaaucuga

SEQ ID NO: 882103 - RNA, 19 nt, Homo sapiens
  misc_RNA (1)...(19): siRNA sense strand
ugaaguaaagcaacaagua

SEQ ID NO: 882104 - RNA, 19 nt, Homo sapiens
  misc_RNA (1)...(19): siRNA sense strand
gcgagaaguucccaugugu

SEQ ID NO: 882105 - RNA, 19 nt, Homo sapiens
  misc_RNA (1)...(19): siRNA sense strand
aaagcuaccugguguacaa

SEQ ID NO: 882106 - RNA, 19 nt, Homo sapiens
  misc_RNA (1)...(19): siRNA sense strand
ggcaagaaauuauguguac

SEQ ID NO: 882107 - RNA, 19 nt, Homo sapiens
  misc_RNA (1)...(19): siRNA sense strand
gagauugaaugcagcaaca

SEQ ID NO: 882108 - RNA, 19 nt, Homo sapiens
  misc_RNA (1)...(19): siRNA sense strand
uauuauggcugaaccaaga

SEQ ID NO: 882109 - RNA, 19 nt, Homo sapiens
  misc_RNA (1)...(19): siRNA sense strand
ccagagggcauguuugaaa

SEQ ID NO: 882110 - RNA, 19 nt, Homo sapiens
  misc_RNA (1)...(19): siRNA sense strand
caagaaguucccauguaua

SEQ ID NO: 882111 - RNA, 19 nt, Homo sapiens
  misc_RNA (1)...(19): siRNA sense strand
ccucgcagcuuguaaaucu

SEQ ID NO: 882112 - RNA, 19 nt, Homo sapiens
  misc_RNA (1)...(19): siRNA sense strand
caugagcaguggagagauu

SEQ ID NO: 882113 - RNA, 19 nt, Homo sapiens
  misc_RNA (1)...(19): siRNA sense strand
acacugaaaucuuaaaggu

SEQ ID NO: 882114 - RNA, 19 nt, Homo sapiens
  misc_RNA (1)...(19): siRNA sense strand
caagaaguucccauguaua

SEQ ID NO: 882115 - RNA, 19 nt, Homo sapiens
  misc_RNA (1)...(19): siRNA sense strand
caagaaguucccauguaua

SEQ ID NO: 882116 - RNA, 19 nt, Homo sapiens
  misc_RNA (1)...(19): siRNA sense strand
caagaaguucccauguaua

SEQ ID NO: 882117 - RNA, 19 nt, Homo sapiens
  misc_RNA (1)...(19): siRNA sense strand
ggcaagaaguucccaugug

SEQ ID NO: 882118 - RNA, 19 nt, Homo sapiens
  misc_RNA (1)...(19): siRNA sense strand
gcagacaguaugagcauga

SEQ ID NO: 882119 - RNA, 19 nt, Homo sapiens
  misc_RNA (1)...(19): siRNA sense strand
uagaagcucucauguguac

SEQ ID NO: 882120 - RNA, 19 nt, Homo sapiens
  misc_RNA (1)...(19): siRNA sense strand
ggcaagaaguucccaugug

SEQ ID NO: 882121 - RNA, 19 nt, Homo sapiens
  misc_RNA (1)...(19): siRNA sense strand
ggcgagaaguucccgugua

SEQ ID NO: 882122 - RNA, 19 nt, Homo sapiens
  misc_RNA (1)...(19): siRNA sense strand
ggauuugcaugcguuuauu

SEQ ID NO: 882123 - RNA, 19 nt, Homo sapiens
  misc_RNA (1)...(19): siRNA sense strand
caucagaaguacuugcaau

SEQ ID NO: 882124 - RNA, 19 nt, Homo sapiens
  misc_RNA (1)...(19): siRNA sense strand
caagaaguucccacaugua

SEQ ID NO: 882125 - RNA, 19 nt, Homo sapiens
  misc_RNA (1)...(19): siRNA sense strand
gagcaugaccaguggagaa

SEQ ID NO: 882126 - RNA, 19 nt, Homo sapiens
  misc_RNA (1)...(19): siRNA sense strand
ugucucagauauugguaua

SEQ ID NO: 882127 - RNA, 19 nt, Homo sapiens
  misc_RNA (1)...(19): siRNA sense strand
gagaaguucccauguguuc

SEQ ID NO: 882128 - RNA, 19 nt, Homo sapiens
  misc_RNA (1)...(19): siRNA sense strand
gcaggaagcagauuaugag

SEQ ID NO: 882129 - RNA, 19 nt, Homo sapiens
  misc_RNA (1)...(19): siRNA sense strand
ccagccaggccuucauuua

SEQ ID NO: 882130 - RNA, 19 nt, Homo sapiens
  misc_RNA (1)...(19): siRNA sense strand
uguacaaacccugaaauua

SEQ ID NO: 882131 - RNA, 19 nt, Homo sapiens
  misc_RNA (1)...(19): siRNA sense strand
gcaaggauuugugggaagu

SEQ ID NO: 882132 - RNA, 19 nt, Homo sapiens
  misc_RNA (1)...(19): siRNA sense strand
ggacaaacaaguaauaucc

SEQ ID NO: 882133 - RNA, 19 nt, Homo sapiens
  misc_RNA (1)...(19): siRNA sense strand
gaagacacugauuaccuaa

SEQ ID NO: 882134 - RNA, 19 nt, Homo sapiens
  misc_RNA (1)...(19): siRNA sense strand
gcgggucuacucacucuua

SEQ ID NO: 882135 - RNA, 19 nt, Homo sapiens
  misc_RNA (1)...(19): siRNA sense strand
gaagcucucauguguacaa

SEQ ID NO: 882136 - RNA, 19 nt, Homo sapiens
  misc_RNA (1)...(19): siRNA sense strand
gaagaaguucccauguguu

SEQ ID NO: 882137 - RNA, 19 nt, Homo sapiens
  misc_RNA (1)...(19): siRNA sense strand
aaacgaaggcucaagaaca

SEQ ID NO: 882138 - RNA, 19 nt, Homo sapiens
  misc_RNA (1)...(19): siRNA sense strand
ggaggacugucaagauguc

SEQ ID NO: 882139 - RNA, 19 nt, Homo sapiens
  misc_RNA (1)...(19): siRNA sense strand
aacgaaggcucaagaacaa

SEQ ID NO: 882140 - RNA, 19 nt, Homo sapiens
  misc_RNA (1)...(19): siRNA sense strand
gagaaguucccguguauac

SEQ ID NO: 882141 - RNA, 19 nt, Homo sapiens
  misc_RNA (1)...(19): siRNA sense strand
guacacacgcugaaaucaa

SEQ ID NO: 882142 - RNA, 19 nt, Homo sapiens
  misc_RNA (1)...(19): siRNA sense strand
guacaggccaugaauccaa

SEQ ID NO: 882143 - RNA, 19 nt, Homo sapiens
  misc_RNA (1)...(19): siRNA sense strand
gguauacuccagaaucuug

SEQ ID NO: 882144 - RNA, 19 nt, Homo sapiens
  misc_RNA (1)...(19): siRNA sense strand
uuugaaagcuuuagguaca

SEQ ID NO: 882145 - RNA, 19 nt, Homo sapiens
  misc_RNA (1)...(19): siRNA sense strand
uagaacacaucacguccaa

SEQ ID NO: 882146 - RNA, 19 nt, Homo sapiens
  misc_RNA (1)...(19): siRNA sense strand
ccucagggcuagcuguguu

SEQ ID NO: 882147 - RNA, 19 nt, Homo sapiens
  misc_RNA (1)...(19): siRNA sense strand
acacacuccuagccuguuu

SEQ ID NO: 882148 - RNA, 19 nt, Homo sapiens
  misc_RNA (1)...(19): siRNA sense strand
gcaccugccuagcugucaa

SEQ ID NO: 882149 - RNA, 19 nt, Homo sapiens
  misc_RNA (1)...(19): siRNA sense strand
aaaauuaccuguagcaaca

SEQ ID NO: 882150 - RNA, 19 nt, Homo sapiens
  misc_RNA (1)...(19): siRNA sense strand
caagaaguucccaugugua

SEQ ID NO: 882151 - RNA, 19 nt, Homo sapiens
  misc_RNA (1)...(19): siRNA sense strand
caagaaguucccaugugua

SEQ ID NO: 882152 - RNA, 19 nt, Homo sapiens
  misc_RNA (1)...(19): siRNA sense strand
ugagagguuugcaaggauu

SEQ ID NO: 882153 - RNA, 19 nt, Homo sapiens
  misc_RNA (1)...(19): siRNA sense strand
uaaaggaauggcaucauau

SEQ ID NO: 882154 - RNA, 19 nt, Homo sapiens
  misc_RNA (1)...(19): siRNA sense strand
ccuaaucuaugacacuugu

SEQ ID NO: 882155 - RNA, 19 nt, Homo sapiens
  misc_RNA (1)...(19): siRNA sense strand
cagcaacacccuagaagau

SEQ ID NO: 882156 - RNA, 19 nt, Homo sapiens
  misc_RNA (1)...(19): siRNA sense strand
gcagcaacacccuagaaga

SEQ ID NO: 882157 - RNA, 19 nt, Homo sapiens
  misc_RNA (1)...(19): siRNA sense strand
gcaagaaauuauguguaca

SEQ ID NO: 882158 - RNA, 19 nt, Homo sapiens
  misc_RNA (1)...(19): siRNA sense strand
gaugccauguguugucuca

SEQ ID NO: 882159 - RNA, 19 nt, Homo sapiens
  misc_RNA (1)...(19): siRNA sense strand
acaaaugcuuaucguccua

SEQ ID NO: 882160 - RNA, 19 nt, Homo sapiens
  misc_RNA (1)...(19): siRNA sense strand
caagaacaacagggagaua

SEQ ID NO: 882161 - RNA, 19 nt, Homo sapiens
  misc_RNA (1)...(19): siRNA sense strand
gcuuugugcugccucuuga

SEQ ID NO: 882162 - RNA, 19 nt, Homo sapiens
  misc_RNA (1)...(19): siRNA sense strand
uacacacgcugaaaucaau

SEQ ID NO: 882163 - RNA, 19 nt, Homo sapiens
  misc_RNA (1)...(19): siRNA sense strand
gaaguucccauauguacag

SEQ ID NO: 882164 - RNA, 19 nt, Homo sapiens
  misc_RNA (1)...(19): siRNA sense strand
ccaggaagcagacaguaug

SEQ ID NO: 882165 - RNA, 19 nt, Homo sapiens
  misc_RNA (1)...(19): siRNA sense strand
gcaagagccgcuggacgua

SEQ ID NO: 882166 - RNA, 19 nt, Homo sapiens
  misc_RNA (1)...(19): siRNA sense strand
gcgaggagggcaaguacaa

SEQ ID NO: 882167 - RNA, 19 nt, Homo sapiens
  misc_RNA (1)...(19): siRNA sense strand
gggcaagguuaaggagaag

SEQ ID NO: 882168 - RNA, 19 nt, Homo sapiens
  misc_RNA (1)...(19): siRNA sense strand
gcuacggcacugagaccua

SEQ ID NO: 882169 - RNA, 19 nt, Homo sapiens
  misc_RNA (1)...(19): siRNA sense strand
ggggcaagguuaaggagaa

SEQ ID NO: 882170 - RNA, 19 nt, Homo sapiens
  misc_RNA (1)...(19): siRNA sense strand
gcaagguuaaggagaaggu

SEQ ID NO: 882171 - RNA, 19 nt, Homo sapiens
  misc_RNA (1)...(19): siRNA sense strand
agagugugcccuaccauca

SEQ ID NO: 882172 - RNA, 19 nt, Homo sapiens
  misc_RNA (1)...(19): siRNA sense strand
gcaagagccgcuggacgua

SEQ ID NO: 882173 - RNA, 19 nt, Homo sapiens
  misc_RNA (1)...(19): siRNA sense strand
gcgaggagggcaaguacaa

SEQ ID NO: 882174 - RNA, 19 nt, Homo sapiens
  misc_RNA (1)...(19): siRNA sense strand
gggcaagguuaaggagaag

SEQ ID NO: 882175 - RNA, 19 nt, Homo sapiens
  misc_RNA (1)...(19): siRNA sense strand
gcuacggcacugagaccua

SEQ ID NO: 882176 - RNA, 19 nt, Homo sapiens
  misc_RNA (1)...(19): siRNA sense strand
ggggcaagguuaaggagaa

SEQ ID NO: 882177 - RNA, 19 nt, Homo sapiens
  misc_RNA (1)...(19): siRNA sense strand
gcaagguuaaggagaaggu

SEQ ID NO: 882178 - RNA, 19 nt, Homo sapiens
  misc_RNA (1)...(19): siRNA sense strand
agagugugcccuaccauca

SEQ ID NO: 882179 - RNA, 19 nt, Homo sapiens
  misc_RNA (1)...(19): siRNA sense strand
gcaacaaucuccuuagaaa

SEQ ID NO: 882180 - RNA, 19 nt, Homo sapiens
  misc_RNA (1)...(19): siRNA sense strand
ggaaguggaugaaauggua

SEQ ID NO: 882181 - RNA, 19 nt, Homo sapiens
  misc_RNA (1)...(19): siRNA sense strand
gaaggaagguggcagaauc

SEQ ID NO: 882182 - RNA, 19 nt, Homo sapiens
  misc_RNA (1)...(19): siRNA sense strand
gaaccaaacugcacuggau

SEQ ID NO: 882183 - RNA, 19 nt, Homo sapiens
  misc_RNA (1)...(19): siRNA sense strand
agaagaagcuaaacaagaa

SEQ ID NO: 882184 - RNA, 19 nt, Homo sapiens
  misc_RNA (1)...(19): siRNA sense strand
ccgagaagcucaacaacua

SEQ ID NO: 882185 - RNA, 19 nt, Homo sapiens
  misc_RNA (1)...(19): siRNA sense strand
uuacacagcuucagugaug

SEQ ID NO: 882186 - RNA, 19 nt, Homo sapiens
  misc_RNA (1)...(19): siRNA sense strand
ggaagccagucuccuacua

SEQ ID NO: 882187 - RNA, 19 nt, Homo sapiens
  misc_RNA (1)...(19): siRNA sense strand
gcaagaagaagcuaaacaa

SEQ ID NO: 882188 - RNA, 19 nt, Homo sapiens
  misc_RNA (1)...(19): siRNA sense strand
ugaaggcgcugaccuacaa

SEQ ID NO: 882189 - RNA, 19 nt, Homo sapiens
  misc_RNA (1)...(19): siRNA sense strand
uggagaagcuguugaagga

SEQ ID NO: 882190 - RNA, 19 nt, Homo sapiens
  misc_RNA (1)...(19): siRNA sense strand
gagcugagcacaccaagga

SEQ ID NO: 882191 - RNA, 19 nt, Homo sapiens
  misc_RNA (1)...(19): siRNA sense strand
ucacgaugcugcucaugaa

SEQ ID NO: 882192 - RNA, 19 nt, Homo sapiens
  misc_RNA (1)...(19): siRNA sense strand
gaagccgucucccuccaaa

SEQ ID NO: 882193 - RNA, 19 nt, Homo sapiens
  misc_RNA (1)...(19): siRNA sense strand
gcagaaucguguccucgaa

SEQ ID NO: 882194 - RNA, 19 nt, Homo sapiens
  misc_RNA (1)...(19): siRNA sense strand
gagcuggacugcaccaagu

SEQ ID NO: 882195 - RNA, 19 nt, Homo sapiens
  misc_RNA (1)...(19): siRNA sense strand
ucaacuccauggucaguaa

SEQ ID NO: 882196 - RNA, 19 nt, Homo sapiens
  misc_RNA (1)...(19): siRNA sense strand
gcgauuuccucucagaaga

SEQ ID NO: 882197 - RNA, 19 nt, Homo sapiens
  misc_RNA (1)...(19): siRNA sense strand
ggacucuggugcugaggaa

SEQ ID NO: 882198 - RNA, 19 nt, Homo sapiens
  misc_RNA (1)...(19): siRNA sense strand
ugaaggagcgguuugcaaa

SEQ ID NO: 882199 - RNA, 19 nt, Homo sapiens
  misc_RNA (1)...(19): siRNA sense strand
ccuacuaccugcacacuau

SEQ ID NO: 882200 - RNA, 19 nt, Homo sapiens
  misc_RNA (1)...(19): siRNA sense strand
ccaaagcccgcaagaagaa

SEQ ID NO: 882201 - RNA, 19 nt, Homo sapiens
  misc_RNA (1)...(19): siRNA sense strand
gagcagccaccgugaagaa

SEQ ID NO: 882202 - RNA, 19 nt, Homo sapiens
  misc_RNA (1)...(19): siRNA sense strand
ggagagaagagcagugaga

SEQ ID NO: 882203 - RNA, 19 nt, Homo sapiens
  misc_RNA (1)...(19): siRNA sense strand
gaucagcauuguggagcua

SEQ ID NO: 882204 - RNA, 19 nt, Homo sapiens
  misc_RNA (1)...(19): siRNA sense strand
gaccgacgacgaccuguuu

SEQ ID NO: 882205 - RNA, 19 nt, Homo sapiens
  misc_RNA (1)...(19): siRNA sense strand
uggaugaaaugguauggaa

SEQ ID NO: 882206 - RNA, 19 nt, Homo sapiens
  misc_RNA (1)...(19): siRNA sense strand
gagcggaagcccaagaaga

SEQ ID NO: 882207 - RNA, 19 nt, Homo sapiens
  misc_RNA (1)...(19): siRNA sense strand
gcaccauacuugaaaacua

SEQ ID NO: 882208 - RNA, 19 nt, Homo sapiens
  misc_RNA (1)...(19): siRNA sense strand
caacugcaaacaucacuau

SEQ ID NO: 882209 - RNA, 19 nt, Homo sapiens
  misc_RNA (1)...(19): siRNA sense strand
gcaccacgcagcccaugaa

SEQ ID NO: 882210 - RNA, 19 nt, Homo sapiens
  misc_RNA (1)...(19): siRNA sense strand
aguagaaacuugagugaca

SEQ ID NO: 882211 - RNA, 19 nt, Homo sapiens
  misc_RNA (1)...(19): siRNA sense strand
gcaugcagaauacacauug

SEQ ID NO: 882212 - RNA, 19 nt, Homo sapiens
  misc_RNA (1)...(19): siRNA sense strand
ccagaugauugaugagauc

SEQ ID NO: 882213 - RNA, 19 nt, Homo sapiens
  misc_RNA (1)...(19): siRNA sense strand
cgaugggucugugaagaaa

SEQ ID NO: 882214 - RNA, 19 nt, Homo sapiens
  misc_RNA (1)...(19): siRNA sense strand
gcucggacgccaacccuuu

SEQ ID NO: 882215 - RNA, 19 nt, Homo sapiens
  misc_RNA (1)...(19): siRNA sense strand
gugcucgaauugagagaaa

SEQ ID NO: 882216 - RNA, 19 nt, Homo sapiens
  misc_RNA (1)...(19): siRNA sense strand
aagaagaagcuaaacaaga

SEQ ID NO: 882217 - RNA, 19 nt, Homo sapiens
  misc_RNA (1)...(19): siRNA sense strand
gaccgcaccauacuugaaa

SEQ ID NO: 882218 - RNA, 19 nt, Homo sapiens
  misc_RNA (1)...(19): siRNA sense strand
gaccauggaccgcgaguuc

SEQ ID NO: 882219 - RNA, 19 nt, Homo sapiens
  misc_RNA (1)...(19): siRNA sense strand
gagagaagagcagugagaa

SEQ ID NO: 882220 - RNA, 19 nt, Homo sapiens
  misc_RNA (1)...(19): siRNA sense strand
gaacuucagaauaaacagu

SEQ ID NO: 882221 - RNA, 19 nt, Homo sapiens
  misc_RNA (1)...(19): siRNA sense strand
uggcccagaugauugauga

SEQ ID NO: 882222 - RNA, 19 nt, Homo sapiens
  misc_RNA (1)...(19): siRNA sense strand
gaccuacaacgaccugauu

SEQ ID NO: 882223 - RNA, 19 nt, Homo sapiens
  misc_RNA (1)...(19): siRNA sense strand
uggaugagcugggugugaa

SEQ ID NO: 882224 - RNA, 19 nt, Homo sapiens
  misc_RNA (1)...(19): siRNA sense strand
gccaggagaaggagaagaa

SEQ ID NO: 882225 - RNA, 19 nt, Homo sapiens
  misc_RNA (1)...(19): siRNA sense strand
caagcucgcuauggagaau

SEQ ID NO: 882226 - RNA, 19 nt, Homo sapiens
  misc_RNA (1)...(19): siRNA sense strand
gaagccaagaggaggauug

SEQ ID NO: 882227 - RNA, 19 nt, Homo sapiens
  misc_RNA (1)...(19): siRNA sense strand
ccaccagacugaccaacuc

SEQ ID NO: 882228 - RNA, 19 nt, Homo sapiens
  misc_RNA (1)...(19): siRNA sense strand
guagaaacuugagugacau

SEQ ID NO: 882229 - RNA, 19 nt, Homo sapiens
  misc_RNA (1)...(19): siRNA sense strand
gccaagaggaggauugugu

SEQ ID NO: 882230 - RNA, 19 nt, Homo sapiens
  misc_RNA (1)...(19): siRNA sense strand
cgaugcugcucaugaaauc

SEQ ID NO: 882231 - RNA, 19 nt, Homo sapiens
  misc_RNA (1)...(19): siRNA sense strand
gccaccaacugcaaacauc

SEQ ID NO: 882232 - RNA, 19 nt, Homo sapiens
  misc_RNA (1)...(19): siRNA sense strand
uugcaacaaucuccuuaga

SEQ ID NO: 882233 - RNA, 19 nt, Homo sapiens
  misc_RNA (1)...(19): siRNA sense strand
ggaggauuguguucaccau

SEQ ID NO: 882234 - RNA, 19 nt, Homo sapiens
  misc_RNA (1)...(19): siRNA sense strand
ugacaucggcaccaucaug

SEQ ID NO: 882235 - RNA, 19 nt, Homo sapiens
  misc_RNA (1)...(19): siRNA sense strand
ggaugaaaugguauggaaa

SEQ ID NO: 882236 - RNA, 19 nt, Homo sapiens
  misc_RNA (1)...(19): siRNA sense strand
ucacuauggcgucgagaaa

SEQ ID NO: 882237 - RNA, 19 nt, Homo sapiens
  misc_RNA (1)...(19): siRNA sense strand
ucaggaaguggaugaaaug

SEQ ID NO: 882238 - RNA, 19 nt, Homo sapiens
  misc_RNA (1)...(19): siRNA sense strand
gauuccggcuucucagauc

SEQ ID NO: 882239 - RNA, 19 nt, Homo sapiens
  misc_RNA (1)...(19): siRNA sense strand
caagaagaagcuaaacaag

SEQ ID NO: 882240 - RNA, 19 nt, Homo sapiens
  misc_RNA (1)...(19): siRNA sense strand
gagaucaggaggcuguuuc

SEQ ID NO: 882241 - RNA, 19 nt, Homo sapiens
  misc_RNA (1)...(19): siRNA sense strand
ccgaaaaccuuggaaaaug

SEQ ID NO: 882242 - RNA, 19 nt, Homo sapiens
  misc_RNA (1)...(19): siRNA sense strand
cuucuagaguccuucaaga

SEQ ID NO: 882243 - RNA, 19 nt, Homo sapiens
  misc_RNA (1)...(19): siRNA sense strand
gcacacuacuccccacuca

SEQ ID NO: 882244 - RNA, 19 nt, Homo sapiens
  misc_RNA (1)...(19): siRNA sense strand
ccaagaggaggauuguguu

SEQ ID NO: 882245 - RNA, 19 nt, Homo sapiens
  misc_RNA (1)...(19): siRNA sense strand
gaugaaaugguauggaaaa

SEQ ID NO: 882246 - RNA, 19 nt, Homo sapiens
  misc_RNA (1)...(19): siRNA sense strand
gccacaaccucuucaucuc

SEQ ID NO: 882247 - RNA, 19 nt, Homo sapiens
  misc_RNA (1)...(19): siRNA sense strand
ccgcggaccugaguuuaca

SEQ ID NO: 882248 - RNA, 19 nt, Homo sapiens
  misc_RNA (1)...(19): siRNA sense strand
ggagaucaggaggcuguuu

SEQ ID NO: 882249 - RNA, 19 nt, Homo sapiens
  misc_RNA (1)...(19): siRNA sense strand
cgaguguuauauuugugaa

SEQ ID NO: 882250 - RNA, 19 nt, Homo sapiens
  misc_RNA (1)...(19): siRNA sense strand
gaauggccacaaccucuuc

SEQ ID NO: 882251 - RNA, 19 nt, Homo sapiens
  misc_RNA (1)...(19): siRNA sense strand
gugagaagggccugagaga

SEQ ID NO: 882252 - RNA, 19 nt, Homo sapiens
  misc_RNA (1)...(19): siRNA sense strand
ccacgcagcccaugaagcu

SEQ ID NO: 882253 - RNA, 19 nt, Homo sapiens
  misc_RNA (1)...(19): siRNA sense strand
cagcagcgcgagagcaaga

SEQ ID NO: 882254 - RNA, 19 nt, Homo sapiens
  misc_RNA (1)...(19): siRNA sense strand
gaagccagucuccuacuac

SEQ ID NO: 882255 - RNA, 19 nt, Homo sapiens
  misc_RNA (1)...(19): siRNA sense strand
gaaguggaugaaaugguau

SEQ ID NO: 882256 - RNA, 19 nt, Homo sapiens
  misc_RNA (1)...(19): siRNA sense strand
gugcugcagucgcuguuca

SEQ ID NO: 882257 - RNA, 19 nt, Homo sapiens
  misc_RNA (1)...(19): siRNA sense strand
ggccacaaccucuucaucu

SEQ ID NO: 882258 - RNA, 19 nt, Homo sapiens
  misc_RNA (1)...(19): siRNA sense strand
caacaaucuccuuagaaag

SEQ ID NO: 882259 - RNA, 19 nt, Homo sapiens
  misc_RNA (1)...(19): siRNA sense strand
gaagaagcuaaacaagaag

SEQ ID NO: 882260 - RNA, 19 nt, Homo sapiens
  misc_RNA (1)...(19): siRNA sense strand
gcuauggagaauuacguuu

SEQ ID NO: 882261 - RNA, 19 nt, Homo sapiens
  misc_RNA (1)...(19): siRNA sense strand
cagaaucguguccucgaaa

SEQ ID NO: 882262 - RNA, 19 nt, Homo sapiens
  misc_RNA (1)...(19): siRNA sense strand
cgaccuguuuguggacuug

SEQ ID NO: 882263 - RNA, 19 nt, Homo sapiens
  misc_RNA (1)...(19): siRNA sense strand
aggauuguguucaccauca

SEQ ID NO: 882264 - RNA, 19 nt, Homo sapiens
  misc_RNA (1)...(19): siRNA sense strand
caagaggaggauuguguuc

SEQ ID NO: 882265 - RNA, 19 nt, Homo sapiens
  misc_RNA (1)...(19): siRNA sense strand
caccauacuugaaaacuau

SEQ ID NO: 882266 - RNA, 19 nt, Homo sapiens
  misc_RNA (1)...(19): siRNA sense strand
cagaauaaacaguagaaac

SEQ ID NO: 882267 - RNA, 19 nt, Homo sapiens
  misc_RNA (1)...(19): siRNA sense strand
ccaaguaugcggagaccau

SEQ ID NO: 882268 - RNA, 19 nt, Homo sapiens
  misc_RNA (1)...(19): siRNA sense strand
ucaauagcagcaaguggaa

SEQ ID NO: 882269 - RNA, 19 nt, Homo sapiens
  misc_RNA (1)...(19): siRNA sense strand
ccucaagaauggccacaac

SEQ ID NO: 882270 - RNA, 19 nt, Homo sapiens
  misc_RNA (1)...(19): siRNA sense strand
aauugacuaugacaccaaa

SEQ ID NO: 882271 - RNA, 19 nt, Homo sapiens
  misc_RNA (1)...(19): siRNA sense strand
cgaaaaccuuggaaaaugg

SEQ ID NO: 882272 - RNA, 19 nt, Homo sapiens
  misc_RNA (1)...(19): siRNA sense strand
agaagcuguugaaggagaa

SEQ ID NO: 882273 - RNA, 19 nt, Homo sapiens
  misc_RNA (1)...(19): siRNA sense strand
cuacaacgaccugauucaa

SEQ ID NO: 882274 - RNA, 19 nt, Homo sapiens
  misc_RNA (1)...(19): siRNA sense strand
cgaccgcaccauacuugaa

SEQ ID NO: 882275 - RNA, 19 nt, Homo sapiens
  misc_RNA (1)...(19): siRNA sense strand
gaccgcgaguucaggaagu

SEQ ID NO: 882276 - RNA, 19 nt, Homo sapiens
  misc_RNA (1)...(19): siRNA sense strand
caagcucccggucagcauu

SEQ ID NO: 882277 - RNA, 19 nt, Homo sapiens
  misc_RNA (1)...(19): siRNA sense strand
ccacaaccucuucaucucu

SEQ ID NO: 882278 - RNA, 19 nt, Homo sapiens
  misc_RNA (1)...(19): siRNA sense strand
aagaaggagcggccucuga

SEQ ID NO: 882279 - RNA, 19 nt, Homo sapiens
  misc_RNA (1)...(19): siRNA sense strand
gcauuucucucuccacugu

SEQ ID NO: 882280 - RNA, 19 nt, Homo sapiens
  misc_RNA (1)...(19): siRNA sense strand
auaaggacguggugaauga

SEQ ID NO: 882281 - RNA, 19 nt, Homo sapiens
  misc_RNA (1)...(19): siRNA sense strand
caagaaggcagacacaaga

SEQ ID NO: 882282 - RNA, 19 nt, Homo sapiens
  misc_RNA (1)...(19): siRNA sense strand
ccaagccgauguuuguuau

SEQ ID NO: 882283 - RNA, 19 nt, Homo sapiens
  misc_RNA (1)...(19): siRNA sense strand
ccaccaagccgauguuugu

SEQ ID NO: 882284 - RNA, 19 nt, Homo sapiens
  misc_RNA (1)...(19): siRNA sense strand
caguggacauucuuccuuu

SEQ ID NO: 882285 - RNA, 19 nt, Homo sapiens
  misc_RNA (1)...(19): siRNA sense strand
gaucuuccuggccaaauuu

SEQ ID NO: 882286 - RNA, 19 nt, Homo sapiens
  misc_RNA (1)...(19): siRNA sense strand
gcuagcccauucugacuug

SEQ ID NO: 882287 - RNA, 19 nt, Homo sapiens
  misc_RNA (1)...(19): siRNA sense strand
ugaauggcgucuuuaccaa

SEQ ID NO: 882288 - RNA, 19 nt, Homo sapiens
  misc_RNA (1)...(19): siRNA sense strand
ggacauucuuccuuugcau

SEQ ID NO: 882289 - RNA, 19 nt, Homo sapiens
  misc_RNA (1)...(19): siRNA sense strand
gcacaugugacuacaagca

SEQ ID NO: 882290 - RNA, 19 nt, Homo sapiens
  misc_RNA (1)...(19): siRNA sense strand
ggaggccacgcccagauuu

SEQ ID NO: 882291 - RNA, 19 nt, Homo sapiens
  misc_RNA (1)...(19): siRNA sense strand
cauucugacuugaugugua

SEQ ID NO: 882292 - RNA, 19 nt, Homo sapiens
  misc_RNA (1)...(19): siRNA sense strand
gauaaggacguggugaaug

SEQ ID NO: 882293 - RNA, 19 nt, Homo sapiens
  misc_RNA (1)...(19): siRNA sense strand
aagccgauguuuguuauug

SEQ ID NO: 882294 - RNA, 19 nt, Homo sapiens
  misc_RNA (1)...(19): siRNA sense strand
gagguucugugccuuucug

SEQ ID NO: 882295 - RNA, 19 nt, Homo sapiens
  misc_RNA (1)...(19): siRNA sense strand
cgauguuuguuauugcauu

SEQ ID NO: 882296 - RNA, 19 nt, Homo sapiens
  misc_RNA (1)...(19): siRNA sense strand
gcacugucccgcacaugug

SEQ ID NO: 882297 - RNA, 19 nt, Homo sapiens
  misc_RNA (1)...(19): siRNA sense strand
gggauaaggacguggugaa

SEQ ID NO: 882298 - RNA, 19 nt, Homo sapiens
  misc_RNA (1)...(19): siRNA sense strand
ugaucuuccuggccaaauu

SEQ ID NO: 882299 - RNA, 19 nt, Homo sapiens
  misc_RNA (1)...(19): siRNA sense strand
ggauaaggacguggugaau

SEQ ID NO: 882300 - RNA, 19 nt, Homo sapiens
  misc_RNA (1)...(19): siRNA sense strand
ccgcacaugugacuacaag

SEQ ID NO: 882301 - RNA, 19 nt, Homo sapiens
  misc_RNA (1)...(19): siRNA sense strand
cgucuuuaccaacacaaua

SEQ ID NO: 882302 - RNA, 19 nt, Homo sapiens
  misc_RNA (1)...(19): siRNA sense strand
cagggaaguuacacugcuu

SEQ ID NO: 882303 - RNA, 19 nt, Homo sapiens
  misc_RNA (1)...(19): siRNA sense strand
gcucugaauggcgucuuua

SEQ ID NO: 882304 - RNA, 19 nt, Homo sapiens
  misc_RNA (1)...(19): siRNA sense strand
guucugugccuuucuguca

SEQ ID NO: 882305 - RNA, 19 nt, Homo sapiens
  misc_RNA (1)...(19): siRNA sense strand
ucaagaaggcagacacaag

SEQ ID NO: 882306 - RNA, 19 nt, Homo sapiens
  misc_RNA (1)...(19): siRNA sense strand
gacauucuuccuuugcauu

SEQ ID NO: 882307 - RNA, 19 nt, Homo sapiens
  misc_RNA (1)...(19): siRNA sense strand
cacaagagacagcagacaa

SEQ ID NO: 882308 - RNA, 19 nt, Homo sapiens
  misc_RNA (1)...(19): siRNA sense strand
gugaaugagggccgaaaga

SEQ ID NO: 882309 - RNA, 19 nt, Homo sapiens
  misc_RNA (1)...(19): siRNA sense strand
gucuuuaccaacacaauaa

SEQ ID NO: 882310 - RNA, 19 nt, Homo sapiens
  misc_RNA (1)...(19): siRNA sense strand
ggcucugaauggcgucuuu

SEQ ID NO: 882311 - RNA, 19 nt, Homo sapiens
  misc_RNA (1)...(19): siRNA sense strand
ccaguggacauucuuccuu

SEQ ID NO: 882312 - RNA, 19 nt, Homo sapiens
  misc_RNA (1)...(19): siRNA sense strand
acguggaggcggaguauuu

SEQ ID NO: 882313 - RNA, 19 nt, Homo sapiens
  misc_RNA (1)...(19): siRNA sense strand
accaagccgauguuuguua

SEQ ID NO: 882314 - RNA, 19 nt, Homo sapiens
  misc_RNA (1)...(19): siRNA sense strand
gccgauguuuguuauugca

SEQ ID NO: 882315 - RNA, 19 nt, Homo sapiens
  misc_RNA (1)...(19): siRNA sense strand
gccuugcccuggcucugaa

SEQ ID NO: 882316 - RNA, 19 nt, Homo sapiens
  misc_RNA (1)...(19): siRNA sense strand
gggaaaucuuggagguucu

SEQ ID NO: 882317 - RNA, 19 nt, Homo sapiens
  misc_RNA (1)...(19): siRNA sense strand
uaccgcugcuucccugaug

SEQ ID NO: 882318 - RNA, 19 nt, Homo sapiens
  misc_RNA (1)...(19): siRNA sense strand
aauggcgucuuuaccaaca

SEQ ID NO: 882319 - RNA, 19 nt, Homo sapiens
  misc_RNA (1)...(19): siRNA sense strand
acaaggccgugggaaaucu

SEQ ID NO: 882320 - RNA, 19 nt, Homo sapiens
  misc_RNA (1)...(19): siRNA sense strand
gggaagaacugugugauug

SEQ ID NO: 882321 - RNA, 19 nt, Homo sapiens
  misc_RNA (1)...(19): siRNA sense strand
caacaagucugaguacauc

SEQ ID NO: 882322 - RNA, 19 nt, Homo sapiens
  misc_RNA (1)...(19): siRNA sense strand
caaagucagucgccaguca

SEQ ID NO: 882323 - RNA, 19 nt, Homo sapiens
  misc_RNA (1)...(19): siRNA sense strand
gaaaagucguagugucaua

SEQ ID NO: 882324 - RNA, 19 nt, Homo sapiens
  misc_RNA (1)...(19): siRNA sense strand
ggacgucauuguguuguga

SEQ ID NO: 882325 - RNA, 19 nt, Homo sapiens
  misc_RNA (1)...(19): siRNA sense strand
ggucaacgcagcacagauu

SEQ ID NO: 882326 - RNA, 19 nt, Homo sapiens
  misc_RNA (1)...(19): siRNA sense strand
cagcacagauugguuccua

SEQ ID NO: 882327 - RNA, 19 nt, Homo sapiens
  misc_RNA (1)...(19): siRNA sense strand
gccgauguguguugaaaga

SEQ ID NO: 882328 - RNA, 19 nt, Homo sapiens
  misc_RNA (1)...(19): siRNA sense strand
cagauugguuccuauguuc

SEQ ID NO: 882329 - RNA, 19 nt, Homo sapiens
  misc_RNA (1)...(19): siRNA sense strand
gaaagacugcugcaaaauu

SEQ ID NO: 882330 - RNA, 19 nt, Homo sapiens
  misc_RNA (1)...(19): siRNA sense strand
gcacagauugguuccuaug

SEQ ID NO: 882331 - RNA, 19 nt, Homo sapiens
  misc_RNA (1)...(19): siRNA sense strand
guugaaagacugcugcaaa

SEQ ID NO: 882332 - RNA, 19 nt, Homo sapiens
  misc_RNA (1)...(19): siRNA sense strand
gugaugaaugacuguauua

SEQ ID NO: 882333 - RNA, 19 nt, Homo sapiens
  misc_RNA (1)...(19): siRNA sense strand
acagauugguuccuauguu

SEQ ID NO: 882334 - RNA, 19 nt, Homo sapiens
  misc_RNA (1)...(19): siRNA sense strand
gaggggaucuggcaaaugu

SEQ ID NO: 882335 - RNA, 19 nt, Homo sapiens
  misc_RNA (1)...(19): siRNA sense strand
gagcuacuaccagaaguuu

SEQ ID NO: 882336 - RNA, 19 nt, Homo sapiens
  misc_RNA (1)...(19): siRNA sense strand
gacggcaucugggaacaaa

SEQ ID NO: 882337 - RNA, 19 nt, Homo sapiens
  misc_RNA (1)...(19): siRNA sense strand
gcgccgauguguguugaaa

SEQ ID NO: 882338 - RNA, 19 nt, Homo sapiens
  misc_RNA (1)...(19): siRNA sense strand
gguguugcauucuuuccuu

SEQ ID NO: 882339 - RNA, 19 nt, Homo sapiens
  misc_RNA (1)...(19): siRNA sense strand
gaugaaugacuguauuauc

SEQ ID NO: 882340 - RNA, 19 nt, Homo sapiens
  misc_RNA (1)...(19): siRNA sense strand
ugugaugaaugacuguauu

SEQ ID NO: 882341 - RNA, 19 nt, Homo sapiens
  misc_RNA (1)...(19): siRNA sense strand
aguauuaccuccagaaacu

SEQ ID NO: 882342 - RNA, 19 nt, Homo sapiens
  misc_RNA (1)...(19): siRNA sense strand
ggccaccauucaagaaguu

SEQ ID NO: 882343 - RNA, 19 nt, Homo sapiens
  misc_RNA (1)...(19): siRNA sense strand
gaaguucagcaaagguguu

SEQ ID NO: 882344 - RNA, 19 nt, Homo sapiens
  misc_RNA (1)...(19): siRNA sense strand
ucaagaaguucagcaaagg

SEQ ID NO: 882345 - RNA, 19 nt, Homo sapiens
  misc_RNA (1)...(19): siRNA sense strand
ggaucuggcaaauguaaga

SEQ ID NO: 882346 - RNA, 19 nt, Homo sapiens
  misc_RNA (1)...(19): siRNA sense strand
caagagcuacuaccagaag

SEQ ID NO: 882347 - RNA, 19 nt, Homo sapiens
  misc_RNA (1)...(19): siRNA sense strand
ggaagaacugugugauugg

SEQ ID NO: 882348 - RNA, 19 nt, Homo sapiens
  misc_RNA (1)...(19): siRNA sense strand
guaagaguuggacgucauu

SEQ ID NO: 882349 - RNA, 19 nt, Homo sapiens
  misc_RNA (1)...(19): siRNA sense strand
uaaggccaccauucaagaa

SEQ ID NO: 882350 - RNA, 19 nt, Homo sapiens
  misc_RNA (1)...(19): siRNA sense strand
ugauugacgucaccaagag

SEQ ID NO: 882351 - RNA, 19 nt, Homo sapiens
  misc_RNA (1)...(19): siRNA sense strand
aaagacugcugcaaaauuc

SEQ ID NO: 882352 - RNA, 19 nt, Homo sapiens
  misc_RNA (1)...(19): siRNA sense strand
gucauaaggccaccauuca

SEQ ID NO: 882353 - RNA, 19 nt, Homo sapiens
  misc_RNA (1)...(19): siRNA sense strand
gcaaaauucuugacaacac

SEQ ID NO: 882354 - RNA, 19 nt, Homo sapiens
  misc_RNA (1)...(19): siRNA sense strand
ucuggcaaauguaagaguu

SEQ ID NO: 882355 - RNA, 19 nt, Homo sapiens
  misc_RNA (1)...(19): siRNA sense strand
gcauucuuuccuuuacaua

SEQ ID NO: 882356 - RNA, 19 nt, Homo sapiens
  misc_RNA (1)...(19): siRNA sense strand
uguaagaguuggacgucau

SEQ ID NO: 882357 - RNA, 19 nt, Homo sapiens
  misc_RNA (1)...(19): siRNA sense strand
accauucacugucuucuca

SEQ ID NO: 882358 - RNA, 19 nt, Homo sapiens
  misc_RNA (1)...(19): siRNA sense strand
ggaagauuguguggucaac

SEQ ID NO: 882359 - RNA, 19 nt, Homo sapiens
  misc_RNA (1)...(19): siRNA sense strand
guguugcauucuuuccuuu

SEQ ID NO: 882360 - RNA, 19 nt, Homo sapiens
  misc_RNA (1)...(19): siRNA sense strand
cauaaggccaccauucaag

SEQ ID NO: 882361 - RNA, 19 nt, Homo sapiens
  misc_RNA (1)...(19): siRNA sense strand
ucauaaggccaccauucaa

SEQ ID NO: 882362 - RNA, 19 nt, Homo sapiens
  misc_RNA (1)...(19): siRNA sense strand
ccaugucuuuauugaggaa

SEQ ID NO: 882363 - RNA, 19 nt, Homo sapiens
  misc_RNA (1)...(19): siRNA sense strand
gaguuggacgucauugugu

SEQ ID NO: 882364 - RNA, 19 nt, Homo sapiens
  misc_RNA (1)...(19): siRNA sense strand
uucaagaaguucagcaaag

SEQ ID NO: 882365 - RNA, 19 nt, Homo sapiens
  misc_RNA (1)...(19): siRNA sense strand
augaaugacuguauuaucc

SEQ ID NO: 882366 - RNA, 19 nt, Homo sapiens
  misc_RNA (1)...(19): siRNA sense strand
ucuugacaacacaguauua

SEQ ID NO: 882367 - RNA, 19 nt, Homo sapiens
  misc_RNA (1)...(19): siRNA sense strand
gagacggcaucugggaaca

SEQ ID NO: 882368 - RNA, 19 nt, Homo sapiens
  misc_RNA (1)...(19): siRNA sense strand
ugucauaaggccaccauuc

SEQ ID NO: 882369 - RNA, 19 nt, Homo sapiens
  misc_RNA (1)...(19): siRNA sense strand
caaaauucuugacaacaca

SEQ ID NO: 882370 - RNA, 19 nt, Homo sapiens
  misc_RNA (1)...(19): siRNA sense strand
uugaaagacugcugcaaaa

SEQ ID NO: 882371 - RNA, 19 nt, Homo sapiens
  misc_RNA (1)...(19): siRNA sense strand
cgauguguguugaaagacu

SEQ ID NO: 882372 - RNA, 19 nt, Homo sapiens
  misc_RNA (1)...(19): siRNA sense strand
caacgcagcacagauuggu

SEQ ID NO: 882373 - RNA, 19 nt, Homo sapiens
  misc_RNA (1)...(19): siRNA sense strand
ugggaagaacugugugauu

SEQ ID NO: 882374 - RNA, 19 nt, Homo sapiens
  misc_RNA (1)...(19): siRNA sense strand
ucuacaacaagucugagua

SEQ ID NO: 882375 - RNA, 19 nt, Homo sapiens
  misc_RNA (1)...(19): siRNA sense strand
ccaagagcuacuaccagaa

SEQ ID NO: 882376 - RNA, 19 nt, Homo sapiens
  misc_RNA (1)...(19): siRNA sense strand
guuccaccauucacugucu

SEQ ID NO: 882377 - RNA, 19 nt, Homo sapiens
  misc_RNA (1)...(19): siRNA sense strand
ugacaacacaguauuaccu

SEQ ID NO: 882378 - RNA, 19 nt, Homo sapiens
  misc_RNA (1)...(19): siRNA sense strand
gaacugaagauccgagagu

SEQ ID NO: 882379 - RNA, 19 nt, Homo sapiens
  misc_RNA (1)...(19): siRNA sense strand
ccgcaucuccgacgacuuu

SEQ ID NO: 882380 - RNA, 19 nt, Homo sapiens
  misc_RNA (1)...(19): siRNA sense strand
ggacugcugcaacgacaug

SEQ ID NO: 882381 - RNA, 19 nt, Homo sapiens
  misc_RNA (1)...(19): siRNA sense strand
aacugaagauccgagagua

SEQ ID NO: 882382 - RNA, 19 nt, Homo sapiens
  misc_RNA (1)...(19): siRNA sense strand
ccaaagagcuucaacagua

SEQ ID NO: 882383 - RNA, 19 nt, Homo sapiens
  misc_RNA (1)...(19): siRNA sense strand
gaaaggaaauguauuaagg

SEQ ID NO: 882384 - RNA, 19 nt, Homo sapiens
  misc_RNA (1)...(19): siRNA sense strand
aaaguucgcugcauagaaa

SEQ ID NO: 882385 - RNA, 19 nt, Homo sapiens
  misc_RNA (1)...(19): siRNA sense strand
gaacagcggcucacaggaa

SEQ ID NO: 882386 - RNA, 19 nt, Homo sapiens
  misc_RNA (1)...(19): siRNA sense strand
ggagaccaguguaaauuug

SEQ ID NO: 882387 - RNA, 19 nt, Homo sapiens
  misc_RNA (1)...(19): siRNA sense strand
gaaagaaucgaugaugaaa

SEQ ID NO: 882388 - RNA, 19 nt, Homo sapiens
  misc_RNA (1)...(19): siRNA sense strand
gaaguaaggacuaugaugu

SEQ ID NO: 882389 - RNA, 19 nt, Homo sapiens
  misc_RNA (1)...(19): siRNA sense strand
ggaaacaaaggaucaaaug

SEQ ID NO: 882390 - RNA, 19 nt, Homo sapiens
  misc_RNA (1)...(19): siRNA sense strand
caaccaacauacaguggaa

SEQ ID NO: 882391 - RNA, 19 nt, Homo sapiens
  misc_RNA (1)...(19): siRNA sense strand
caagaaguaaggacuauga

SEQ ID NO: 882392 - RNA, 19 nt, Homo sapiens
  misc_RNA (1)...(19): siRNA sense strand
ccagagaaauggcaaaugc

SEQ ID NO: 882393 - RNA, 19 nt, Homo sapiens
  misc_RNA (1)...(19): siRNA sense strand
guacauacaagccagagaa

SEQ ID NO: 882394 - RNA, 19 nt, Homo sapiens
  misc_RNA (1)...(19): siRNA sense strand
ggaagaggaugguaaaccu

SEQ ID NO: 882395 - RNA, 19 nt, Homo sapiens
  misc_RNA (1)...(19): siRNA sense strand
gaagaaacacaagaagaga

SEQ ID NO: 882396 - RNA, 19 nt, Homo sapiens
  misc_RNA (1)...(19): siRNA sense strand
cgaaagaaucgaugaugaa

SEQ ID NO: 882397 - RNA, 19 nt, Homo sapiens
  misc_RNA (1)...(19): siRNA sense strand
guaaggacuaugauguaua

SEQ ID NO: 882398 - RNA, 19 nt, Homo sapiens
  misc_RNA (1)...(19): siRNA sense strand
uagacacucugcaauauca

SEQ ID NO: 882399 - RNA, 19 nt, Homo sapiens
  misc_RNA (1)...(19): siRNA sense strand
aagagaagcagcagcauuu

SEQ ID NO: 882400 - RNA, 19 nt, Homo sapiens
  misc_RNA (1)...(19): siRNA sense strand
gaugguaaaccuaaagaga

SEQ ID NO: 882401 - RNA, 19 nt, Homo sapiens
  misc_RNA (1)...(19): siRNA sense strand
ccugaagaaucuacaaaga

SEQ ID NO: 882402 - RNA, 19 nt, Homo sapiens
  misc_RNA (1)...(19): siRNA sense strand
gaagaggaugguaaaccua

SEQ ID NO: 882403 - RNA, 19 nt, Homo sapiens
  misc_RNA (1)...(19): siRNA sense strand
gcauucaucaaccaacaua

SEQ ID NO: 882404 - RNA, 19 nt, Homo sapiens
  misc_RNA (1)...(19): siRNA sense strand
ggugaaaacugucuguauu

SEQ ID NO: 882405 - RNA, 19 nt, Homo sapiens
  misc_RNA (1)...(19): siRNA sense strand
caaagagcuucaacaguac

SEQ ID NO: 882406 - RNA, 19 nt, Homo sapiens
  misc_RNA (1)...(19): siRNA sense strand
gggagaccaguguaaauuu

SEQ ID NO: 882407 - RNA, 19 nt, Homo sapiens
  misc_RNA (1)...(19): siRNA sense strand
acgaaagaaucgaugauga

SEQ ID NO: 882408 - RNA, 19 nt, Homo sapiens
  misc_RNA (1)...(19): siRNA sense strand
gagaagcagcagcauuuga

SEQ ID NO: 882409 - RNA, 19 nt, Homo sapiens
  misc_RNA (1)...(19): siRNA sense strand
uacagaaguugaagaaaca

SEQ ID NO: 882410 - RNA, 19 nt, Homo sapiens
  misc_RNA (1)...(19): siRNA sense strand
uaaagcuggucacaagaau

SEQ ID NO: 882411 - RNA, 19 nt, Homo sapiens
  misc_RNA (1)...(19): siRNA sense strand
cauacaagccagagaaaug

SEQ ID NO: 882412 - RNA, 19 nt, Homo sapiens
  misc_RNA (1)...(19): siRNA sense strand
gaaagaaggaguaaaagau

SEQ ID NO: 882413 - RNA, 19 nt, Homo sapiens
  misc_RNA (1)...(19): siRNA sense strand
gaaauagauacagaaguug

SEQ ID NO: 882414 - RNA, 19 nt, Homo sapiens
  misc_RNA (1)...(19): siRNA sense strand
gaauuguuggcuaaaguuu

SEQ ID NO: 882415 - RNA, 19 nt, Homo sapiens
  misc_RNA (1)...(19): siRNA sense strand
ucuuaaagcuggucacaag

SEQ ID NO: 882416 - RNA, 19 nt, Homo sapiens
  misc_RNA (1)...(19): siRNA sense strand
cacggacucugacgaaaga

SEQ ID NO: 882417 - RNA, 19 nt, Homo sapiens
  misc_RNA (1)...(19): siRNA sense strand
ucacaagaauggcaaacag

SEQ ID NO: 882418 - RNA, 19 nt, Homo sapiens
  misc_RNA (1)...(19): siRNA sense strand
gaaucgaugaugaaauaga

SEQ ID NO: 882419 - RNA, 19 nt, Homo sapiens
  misc_RNA (1)...(19): siRNA sense strand
aacaaaggaucaaaugcuu

SEQ ID NO: 882420 - RNA, 19 nt, Homo sapiens
  misc_RNA (1)...(19): siRNA sense strand
auacagaaguugaagaaac

SEQ ID NO: 882421 - RNA, 19 nt, Homo sapiens
  misc_RNA (1)...(19): siRNA sense strand
agucaggaaucagaagaua

SEQ ID NO: 882422 - RNA, 19 nt, Homo sapiens
  misc_RNA (1)...(19): siRNA sense strand
ugaucaugaugcagagaua

SEQ ID NO: 882423 - RNA, 19 nt, Homo sapiens
  misc_RNA (1)...(19): siRNA sense strand
caagaauuguuggcuaaag

SEQ ID NO: 882424 - RNA, 19 nt, Homo sapiens
  misc_RNA (1)...(19): siRNA sense strand
gcaaacagaagaaaaugaa

SEQ ID NO: 882425 - RNA, 19 nt, Homo sapiens
  misc_RNA (1)...(19): siRNA sense strand
gcauuugagucaggcauuc

SEQ ID NO: 882426 - RNA, 19 nt, Homo sapiens
  misc_RNA (1)...(19): siRNA sense strand
agaaacacaagaagagaaa

SEQ ID NO: 882427 - RNA, 19 nt, Homo sapiens
  misc_RNA (1)...(19): siRNA sense strand
ugaagaaacacaagaagag

SEQ ID NO: 882428 - RNA, 19 nt, Homo sapiens
  misc_RNA (1)...(19): siRNA sense strand
gucuguauuugcauaauga

SEQ ID NO: 882429 - RNA, 19 nt, Homo sapiens
  misc_RNA (1)...(19): siRNA sense strand
aaacuggagugcgagcaaa

SEQ ID NO: 882430 - RNA, 19 nt, Homo sapiens
  misc_RNA (1)...(19): siRNA sense strand
uaagggagaccaguguaaa

SEQ ID NO: 882431 - RNA, 19 nt, Homo sapiens
  misc_RNA (1)...(19): siRNA sense strand
gaaacaaaggaucaaaugc

SEQ ID NO: 882432 - RNA, 19 nt, Homo sapiens
  misc_RNA (1)...(19): siRNA sense strand
ucaggaaucagaagauaau

SEQ ID NO: 882433 - RNA, 19 nt, Homo sapiens
  misc_RNA (1)...(19): siRNA sense strand
gccuggcccuggaaacaaa

SEQ ID NO: 882434 - RNA, 19 nt, Homo sapiens
  misc_RNA (1)...(19): siRNA sense strand
gagaccaguguaaauuuga

SEQ ID NO: 882435 - RNA, 19 nt, Homo sapiens
  misc_RNA (1)...(19): siRNA sense strand
auaaugauaucugcaguca

SEQ ID NO: 882436 - RNA, 19 nt, Homo sapiens
  misc_RNA (1)...(19): siRNA sense strand
gcagucaggaaucagaaga

SEQ ID NO: 882437 - RNA, 19 nt, Homo sapiens
  misc_RNA (1)...(19): siRNA sense strand
aaagagaagcagcagcauu

SEQ ID NO: 882438 - RNA, 19 nt, Homo sapiens
  misc_RNA (1)...(19): siRNA sense strand
ccacaggcugcuaaacaaa

SEQ ID NO: 882439 - RNA, 19 nt, Homo sapiens
  misc_RNA (1)...(19): siRNA sense strand
uuuagacacucugcaauau

SEQ ID NO: 882440 - RNA, 19 nt, Homo sapiens
  misc_RNA (1)...(19): siRNA sense strand
cccacaggcugcuaaacaa

SEQ ID NO: 882441 - RNA, 19 nt, Homo sapiens
  misc_RNA (1)...(19): siRNA sense strand
aaacggccacggacucuga

SEQ ID NO: 882442 - RNA, 19 nt, Homo sapiens
  misc_RNA (1)...(19): siRNA sense strand
aagaauuguuggcuaaagu

SEQ ID NO: 882443 - RNA, 19 nt, Homo sapiens
  misc_RNA (1)...(19): siRNA sense strand
uaucugcagucaggaauca

SEQ ID NO: 882444 - RNA, 19 nt, Homo sapiens
  misc_RNA (1)...(19): siRNA sense strand
caguguaaauuugaucaug

SEQ ID NO: 882445 - RNA, 19 nt, Homo sapiens
  misc_RNA (1)...(19): siRNA sense strand
gaugaaauagauacagaag

SEQ ID NO: 882446 - RNA, 19 nt, Homo sapiens
  misc_RNA (1)...(19): siRNA sense strand
aaacaaaggaucaaaugcu

SEQ ID NO: 882447 - RNA, 19 nt, Homo sapiens
  misc_RNA (1)...(19): siRNA sense strand
gaaaaugaagcgaaaaugg

SEQ ID NO: 882448 - RNA, 19 nt, Homo sapiens
  misc_RNA (1)...(19): siRNA sense strand
agaagaaaaugaagcgaaa

SEQ ID NO: 882449 - RNA, 19 nt, Homo sapiens
  misc_RNA (1)...(19): siRNA sense strand
acaagaauggcaaacagaa

SEQ ID NO: 882450 - RNA, 19 nt, Homo sapiens
  misc_RNA (1)...(19): siRNA sense strand
acaaagaaagaaggaguaa

SEQ ID NO: 882451 - RNA, 19 nt, Homo sapiens
  misc_RNA (1)...(19): siRNA sense strand
cugaagaaucuacaaagaa

SEQ ID NO: 882452 - RNA, 19 nt, Homo sapiens
  misc_RNA (1)...(19): siRNA sense strand
aaguaaggacuaugaugua

SEQ ID NO: 882453 - RNA, 19 nt, Homo sapiens
  misc_RNA (1)...(19): siRNA sense strand
gaacgcaagggaaaacaaa

SEQ ID NO: 882454 - RNA, 19 nt, Homo sapiens
  misc_RNA (1)...(19): siRNA sense strand
ggacucugacgaaagaauc

SEQ ID NO: 882455 - RNA, 19 nt, Homo sapiens
  misc_RNA (1)...(19): siRNA sense strand
gaauggcaaacagaagaaa

SEQ ID NO: 882456 - RNA, 19 nt, Homo sapiens
  misc_RNA (1)...(19): siRNA sense strand
uuaaagcuggucacaagaa

SEQ ID NO: 882457 - RNA, 19 nt, Homo sapiens
  misc_RNA (1)...(19): siRNA sense strand
aguaaggacuaugauguau

SEQ ID NO: 882458 - RNA, 19 nt, Homo sapiens
  misc_RNA (1)...(19): siRNA sense strand
gacgaaagaaucgaugaug

SEQ ID NO: 882459 - RNA, 19 nt, Homo sapiens
  misc_RNA (1)...(19): siRNA sense strand
caaagaaagaaggaguaaa

SEQ ID NO: 882460 - RNA, 19 nt, Homo sapiens
  misc_RNA (1)...(19): siRNA sense strand
ggcaaaugcugcucaaccu

SEQ ID NO: 882461 - RNA, 19 nt, Homo sapiens
  misc_RNA (1)...(19): siRNA sense strand
aauguuaucagggagaaua

SEQ ID NO: 882462 - RNA, 19 nt, Homo sapiens
  misc_RNA (1)...(19): siRNA sense strand
gcagagauagaaaagaaaa

SEQ ID NO: 882463 - RNA, 19 nt, Homo sapiens
  misc_RNA (1)...(19): siRNA sense strand
aagaggaugguaaaccuaa

SEQ ID NO: 882464 - RNA, 19 nt, Homo sapiens
  misc_RNA (1)...(19): siRNA sense strand
acaggaagaggaugguaaa

SEQ ID NO: 882465 - RNA, 19 nt, Homo sapiens
  misc_RNA (1)...(19): siRNA sense strand
aagaauggcaaacagaaga

SEQ ID NO: 882466 - RNA, 19 nt, Homo sapiens
  misc_RNA (1)...(19): siRNA sense strand
gaaguugaagaaacacaag

SEQ ID NO: 882467 - RNA, 19 nt, Homo sapiens
  misc_RNA (1)...(19): siRNA sense strand
agauacagaaguugaagaa

SEQ ID NO: 882468 - RNA, 19 nt, Homo sapiens
  misc_RNA (1)...(19): siRNA sense strand
gaagaaucuacaaagaaag

SEQ ID NO: 882469 - RNA, 19 nt, Homo sapiens
  misc_RNA (1)...(19): siRNA sense strand
gcauaaugaauauccuugu

SEQ ID NO: 882470 - RNA, 19 nt, Homo sapiens
  misc_RNA (1)...(19): siRNA sense strand
uacaaagaaagaaggagua

SEQ ID NO: 882471 - RNA, 19 nt, Homo sapiens
  misc_RNA (1)...(19): siRNA sense strand
aaaugcugcucaaccugaa

SEQ ID NO: 882472 - RNA, 19 nt, Homo sapiens
  misc_RNA (1)...(19): siRNA sense strand
ugaaaacugucuguauuug

SEQ ID NO: 882473 - RNA, 19 nt, Homo sapiens
  misc_RNA (1)...(19): siRNA sense strand
ugguaaaccuaaagagaag

SEQ ID NO: 882474 - RNA, 19 nt, Homo sapiens
  misc_RNA (1)...(19): siRNA sense strand
agaggaugguaaaccuaaa

SEQ ID NO: 882475 - RNA, 19 nt, Homo sapiens
  misc_RNA (1)...(19): siRNA sense strand
aaucaagaaguaaggacua

SEQ ID NO: 882476 - RNA, 19 nt, Homo sapiens
  misc_RNA (1)...(19): siRNA sense strand
uuaagggagaccaguguaa

SEQ ID NO: 882477 - RNA, 19 nt, Homo sapiens
  misc_RNA (1)...(19): siRNA sense strand
gauacagaaguugaagaaa

SEQ ID NO: 882478 - RNA, 19 nt, Homo sapiens
  misc_RNA (1)...(19): siRNA sense strand
cacaggaagaggaugguaa

SEQ ID NO: 882479 - RNA, 19 nt, Homo sapiens
  misc_RNA (1)...(19): siRNA sense strand
aaauuuagacacucugcaa

SEQ ID NO: 882480 - RNA, 19 nt, Homo sapiens
  misc_RNA (1)...(19): siRNA sense strand
gccacggacucugacgaaa

SEQ ID NO: 882481 - RNA, 19 nt, Homo sapiens
  misc_RNA (1)...(19): siRNA sense strand
ugucuguauuugcauaaug

SEQ ID NO: 882482 - RNA, 19 nt, Homo sapiens
  misc_RNA (1)...(19): siRNA sense strand
ggacgcugcuucuacauaa

SEQ ID NO: 882483 - RNA, 19 nt, Homo sapiens
  misc_RNA (1)...(19): siRNA sense strand
gcaaagggcuucagaucug

SEQ ID NO: 882484 - RNA, 19 nt, Homo sapiens
  misc_RNA (1)...(19): siRNA sense strand
gaacaaugauguccugcaa

SEQ ID NO: 882485 - RNA, 19 nt, Homo sapiens
  misc_RNA (1)...(19): siRNA sense strand
gaagagaccgcccuuacaa

SEQ ID NO: 882486 - RNA, 19 nt, Homo sapiens
  misc_RNA (1)...(19): siRNA sense strand
gaaggucgguuagauuugg

SEQ ID NO: 882487 - RNA, 19 nt, Homo sapiens
  misc_RNA (1)...(19): siRNA sense strand
caagaaggucgguuagauu

SEQ ID NO: 882488 - RNA, 19 nt, Homo sapiens
  misc_RNA (1)...(19): siRNA sense strand
cuacauaaauucacugacu

SEQ ID NO: 882489 - RNA, 19 nt, Homo sapiens
  misc_RNA (1)...(19): siRNA sense strand
gagcagugccucucucaga

SEQ ID NO: 882490 - RNA, 19 nt, Homo sapiens
  misc_RNA (1)...(19): siRNA sense strand
uaaaagaggucuagaugug

SEQ ID NO: 882491 - RNA, 19 nt, Homo sapiens
  misc_RNA (1)...(19): siRNA sense strand
ggacacagacccugaagag

SEQ ID NO: 882492 - RNA, 19 nt, Homo sapiens
  misc_RNA (1)...(19): siRNA sense strand
gggccgaaguuguuucaug

SEQ ID NO: 882493 - RNA, 19 nt, Homo sapiens
  misc_RNA (1)...(19): siRNA sense strand
ggaaggaccaagcggaaga

SEQ ID NO: 882494 - RNA, 19 nt, Homo sapiens
  misc_RNA (1)...(19): siRNA sense strand
gcagugccucucucagaua

SEQ ID NO: 882495 - RNA, 19 nt, Homo sapiens
  misc_RNA (1)...(19): siRNA sense strand
gcaggugucucuggcugaa

SEQ ID NO: 882496 - RNA, 19 nt, Homo sapiens
  misc_RNA (1)...(19): siRNA sense strand
gcauugcugcuguggauaa

SEQ ID NO: 882497 - RNA, 19 nt, Homo sapiens
  misc_RNA (1)...(19): siRNA sense strand
gaacagccaggacaagaag

SEQ ID NO: 882498 - RNA, 19 nt, Homo sapiens
  misc_RNA (1)...(19): siRNA sense strand
acaagaaggucgguuagau

SEQ ID NO: 882499 - RNA, 19 nt, Homo sapiens
  misc_RNA (1)...(19): siRNA sense strand
cccagcagccuauaugaua

SEQ ID NO: 882500 - RNA, 19 nt, Homo sapiens
  misc_RNA (1)...(19): siRNA sense strand
cacagacccugaagaggaa

SEQ ID NO: 882501 - RNA, 19 nt, Homo sapiens
  misc_RNA (1)...(19): siRNA sense strand
ggugauagcacacucagau

SEQ ID NO: 882502 - RNA, 19 nt, Homo sapiens
  misc_RNA (1)...(19): siRNA sense strand
gcccaaccaugacacucua

SEQ ID NO: 882503 - RNA, 19 nt, Homo sapiens
  misc_RNA (1)...(19): siRNA sense strand
ugccaaagcccaaccauga

SEQ ID NO: 882504 - RNA, 19 nt, Homo sapiens
  misc_RNA (1)...(19): siRNA sense strand
ucucucagauacaagaauu

SEQ ID NO: 882505 - RNA, 19 nt, Homo sapiens
  misc_RNA (1)...(19): siRNA sense strand
gagacacggugcccagcuu

SEQ ID NO: 882506 - RNA, 19 nt, Homo sapiens
  misc_RNA (1)...(19): siRNA sense strand
aagaaggucgguuagauuu

SEQ ID NO: 882507 - RNA, 19 nt, Homo sapiens
  misc_RNA (1)...(19): siRNA sense strand
cucuaugccuuuacuuaua

SEQ ID NO: 882508 - RNA, 19 nt, Homo sapiens
  misc_RNA (1)...(19): siRNA sense strand
caacuucaccagccucuuc

SEQ ID NO: 882509 - RNA, 19 nt, Homo sapiens
  misc_RNA (1)...(19): siRNA sense strand
gaaccgcgugcgcaacaaa

SEQ ID NO: 882510 - RNA, 19 nt, Homo sapiens
  misc_RNA (1)...(19): siRNA sense strand
agucggagcugguguccaa

SEQ ID NO: 882511 - RNA, 19 nt, Homo sapiens
  misc_RNA (1)...(19): siRNA sense strand
ggcgcaagcucaggaagaa

SEQ ID NO: 882512 - RNA, 19 nt, Homo sapiens
  misc_RNA (1)...(19): siRNA sense strand
ugauagcacacucagauaa

SEQ ID NO: 882513 - RNA, 19 nt, Homo sapiens
  misc_RNA (1)...(19): siRNA sense strand
agauguggauggcauuuau

SEQ ID NO: 882514 - RNA, 19 nt, Homo sapiens
  misc_RNA (1)...(19): siRNA sense strand
caaccugggaauuguguuu

SEQ ID NO: 882515 - RNA, 19 nt, Homo sapiens
  misc_RNA (1)...(19): siRNA sense strand
gaauuaauaggcucaaugc

SEQ ID NO: 882516 - RNA, 19 nt, Homo sapiens
  misc_RNA (1)...(19): siRNA sense strand
gaagaggaacaaugauguc

SEQ ID NO: 882517 - RNA, 19 nt, Homo sapiens
  misc_RNA (1)...(19): siRNA sense strand
ggacaagaaggucgguuag

SEQ ID NO: 882518 - RNA, 19 nt, Homo sapiens
  misc_RNA (1)...(19): siRNA sense strand
ccgaaguuguuucaugguu

SEQ ID NO: 882519 - RNA, 19 nt, Homo sapiens
  misc_RNA (1)...(19): siRNA sense strand
ggccagagcaggagacauc

SEQ ID NO: 882520 - RNA, 19 nt, Homo sapiens
  misc_RNA (1)...(19): siRNA sense strand
gguuagauuuggacaguac

SEQ ID NO: 882521 - RNA, 19 nt, Homo sapiens
  misc_RNA (1)...(19): siRNA sense strand
gauaaaagaggucuagaug

SEQ ID NO: 882522 - RNA, 19 nt, Homo sapiens
  misc_RNA (1)...(19): siRNA sense strand
ucgagcggcugguuagaug

SEQ ID NO: 882523 - RNA, 19 nt, Homo sapiens
  misc_RNA (1)...(19): siRNA sense strand
ucagauaagaaucgcauga

SEQ ID NO: 882524 - RNA, 19 nt, Homo sapiens
  misc_RNA (1)...(19): siRNA sense strand
ccagcucugugcccucuau

SEQ ID NO: 882525 - RNA, 19 nt, Homo sapiens
  misc_RNA (1)...(19): siRNA sense strand
gcgaagagaccgcccuuac

SEQ ID NO: 882526 - RNA, 19 nt, Homo sapiens
  misc_RNA (1)...(19): siRNA sense strand
gauagcacacucagauaag

SEQ ID NO: 882527 - RNA, 19 nt, Homo sapiens
  misc_RNA (1)...(19): siRNA sense strand
gacgcugcuucuacauaaa

SEQ ID NO: 882528 - RNA, 19 nt, Homo sapiens
  misc_RNA (1)...(19): siRNA sense strand
gugauagcacacucagaua

SEQ ID NO: 882529 - RNA, 19 nt, Homo sapiens
  misc_RNA (1)...(19): siRNA sense strand
gguguucggcugccaguug

SEQ ID NO: 882530 - RNA, 19 nt, Homo sapiens
  misc_RNA (1)...(19): siRNA sense strand
cgaagagaccgcccuuaca

SEQ ID NO: 882531 - RNA, 19 nt, Homo sapiens
  misc_RNA (1)...(19): siRNA sense strand
ugaagaggaacaaugaugu

SEQ ID NO: 882532 - RNA, 19 nt, Homo sapiens
  misc_RNA (1)...(19): siRNA sense strand
gagcagccuccuccacuuc

SEQ ID NO: 882533 - RNA, 19 nt, Homo sapiens
  misc_RNA (1)...(19): siRNA sense strand
aggaagacuugccgucaga

SEQ ID NO: 882534 - RNA, 19 nt, Homo sapiens
  misc_RNA (1)...(19): siRNA sense strand
ggacuccugggccgaaguu

SEQ ID NO: 882535 - RNA, 19 nt, Homo sapiens
  misc_RNA (1)...(19): siRNA sense strand
agauaagaaucgcaugaca

SEQ ID NO: 882536 - RNA, 19 nt, Homo sapiens
  misc_RNA (1)...(19): siRNA sense strand
cugcauugcugcuguggau

SEQ ID NO: 882537 - RNA, 19 nt, Homo sapiens
  misc_RNA (1)...(19): siRNA sense strand
ccucuaugccuuuacuuau

SEQ ID NO: 882538 - RNA, 19 nt, Homo sapiens
  misc_RNA (1)...(19): siRNA sense strand
gugccucucucagauacaa

SEQ ID NO: 882539 - RNA, 19 nt, Homo sapiens
  misc_RNA (1)...(19): siRNA sense strand
cagaacagccaggacaaga

SEQ ID NO: 882540 - RNA, 19 nt, Homo sapiens
  misc_RNA (1)...(19): siRNA sense strand
gacaagaaggucgguuaga

SEQ ID NO: 882541 - RNA, 19 nt, Homo sapiens
  misc_RNA (1)...(19): siRNA sense strand
ucuaugccuuuacuuauac

SEQ ID NO: 882542 - RNA, 19 nt, Homo sapiens
  misc_RNA (1)...(19): siRNA sense strand
ggcaaagggcuucagaucu

SEQ ID NO: 882543 - RNA, 19 nt, Homo sapiens
  misc_RNA (1)...(19): siRNA sense strand
ccaaagcccaaccaugaca

SEQ ID NO: 882544 - RNA, 19 nt, Homo sapiens
  misc_RNA (1)...(19): siRNA sense strand
guacugagugggaugacau

SEQ ID NO: 882545 - RNA, 19 nt, Homo sapiens
  misc_RNA (1)...(19): siRNA sense strand
gcagucggaccacgagaca

SEQ ID NO: 882546 - RNA, 19 nt, Homo sapiens
  misc_RNA (1)...(19): siRNA sense strand
cgucuugggugguguuaac

SEQ ID NO: 882547 - RNA, 19 nt, Homo sapiens
  misc_RNA (1)...(19): siRNA sense strand
gggcgcaagcucaggaaga

SEQ ID NO: 882548 - RNA, 19 nt, Homo sapiens
  misc_RNA (1)...(19): siRNA sense strand
gaagacuugccgucagaag

SEQ ID NO: 882549 - RNA, 19 nt, Homo sapiens
  misc_RNA (1)...(19): siRNA sense strand
agaauuaauaggcucaaug

SEQ ID NO: 882550 - RNA, 19 nt, Homo sapiens
  misc_RNA (1)...(19): siRNA sense strand
ucuggacgcugcuucuaca

SEQ ID NO: 882551 - RNA, 19 nt, Homo sapiens
  misc_RNA (1)...(19): siRNA sense strand
gcucaacaugaccaagauu

SEQ ID NO: 882552 - RNA, 19 nt, Homo sapiens
  misc_RNA (1)...(19): siRNA sense strand
auagcacacucagauaaga

SEQ ID NO: 882553 - RNA, 19 nt, Homo sapiens
  misc_RNA (1)...(19): siRNA sense strand
aggacaagaaggucgguua

SEQ ID NO: 882554 - RNA, 19 nt, Homo sapiens
  misc_RNA (1)...(19): siRNA sense strand
gaguccaacuaccgucauc

SEQ ID NO: 882555 - RNA, 19 nt, Homo sapiens
  misc_RNA (1)...(19): siRNA sense strand
uagauguggauggcauuua

SEQ ID NO: 882556 - RNA, 19 nt, Homo sapiens
  misc_RNA (1)...(19): siRNA sense strand
agaacagccaggacaagaa

SEQ ID NO: 882557 - RNA, 19 nt, Homo sapiens
  misc_RNA (1)...(19): siRNA sense strand
gaaggaccaagcggaagau

SEQ ID NO: 882558 - RNA, 19 nt, Homo sapiens
  misc_RNA (1)...(19): siRNA sense strand
uagcacacucagauaagaa

SEQ ID NO: 882559 - RNA, 19 nt, Homo sapiens
  misc_RNA (1)...(19): siRNA sense strand
agucgggucugcucaacau

SEQ ID NO: 882560 - RNA, 19 nt, Homo sapiens
  misc_RNA (1)...(19): siRNA sense strand
aagagaccgcccuuacaaa

SEQ ID NO: 882561 - RNA, 19 nt, Homo sapiens
  misc_RNA (1)...(19): siRNA sense strand
ucgguuagauuuggacagu

SEQ ID NO: 882562 - RNA, 19 nt, Homo sapiens
  misc_RNA (1)...(19): siRNA sense strand
cauugcugcuguggauaaa

SEQ ID NO: 882563 - RNA, 19 nt, Homo sapiens
  misc_RNA (1)...(19): siRNA sense strand
agagaccgcccuuacaaag

SEQ ID NO: 882564 - RNA, 19 nt, Homo sapiens
  misc_RNA (1)...(19): siRNA sense strand
cagaaccgcgugcgcaaca

SEQ ID NO: 882565 - RNA, 19 nt, Homo sapiens
  misc_RNA (1)...(19): siRNA sense strand
gcuccgagaccagguguuc

SEQ ID NO: 882566 - RNA, 19 nt, Homo sapiens
  misc_RNA (1)...(19): siRNA sense strand
gggcaaaccuuuaguaauu

SEQ ID NO: 882567 - RNA, 19 nt, Homo sapiens
  misc_RNA (1)...(19): siRNA sense strand
gagaggaacuguuugacuu

SEQ ID NO: 882568 - RNA, 19 nt, Homo sapiens
  misc_RNA (1)...(19): siRNA sense strand
gggaaagccuucacugauu

SEQ ID NO: 882569 - RNA, 19 nt, Homo sapiens
  misc_RNA (1)...(19): siRNA sense strand
gaacacucaugccuuaaga

SEQ ID NO: 882570 - RNA, 19 nt, Homo sapiens
  misc_RNA (1)...(19): siRNA sense strand
gagagaccauauacucaua

SEQ ID NO: 882571 - RNA, 19 nt, Homo sapiens
  misc_RNA (1)...(19): siRNA sense strand
caggagaacuuacuuuaga

SEQ ID NO: 882572 - RNA, 19 nt, Homo sapiens
  misc_RNA (1)...(19): siRNA sense strand
cagagaauguguaagaauu

SEQ ID NO: 882573 - RNA, 19 nt, Homo sapiens
  misc_RNA (1)...(19): siRNA sense strand
ggagaaaccauauaaggaa

SEQ ID NO: 882574 - RNA, 19 nt, Homo sapiens
  misc_RNA (1)...(19): siRNA sense strand
gaggaacuguuugacuuua

SEQ ID NO: 882575 - RNA, 19 nt, Homo sapiens
  misc_RNA (1)...(19): siRNA sense strand
ggaaagccuucacugauuc

SEQ ID NO: 882576 - RNA, 19 nt, Homo sapiens
  misc_RNA (1)...(19): siRNA sense strand
ugagaagccuuaucaaugu

SEQ ID NO: 882577 - RNA, 19 nt, Homo sapiens
  misc_RNA (1)...(19): siRNA sense strand
gagaagccuuaucaaugua

SEQ ID NO: 882578 - RNA, 19 nt, Homo sapiens
  misc_RNA (1)...(19): siRNA sense strand
cgucauaucuuacucaaca

SEQ ID NO: 882579 - RNA, 19 nt, Homo sapiens
  misc_RNA (1)...(19): siRNA sense strand
uaaugaauguggcaaagaa

SEQ ID NO: 882580 - RNA, 19 nt, Homo sapiens
  misc_RNA (1)...(19): siRNA sense strand
gggcaagccuucaguaucu

SEQ ID NO: 882581 - RNA, 19 nt, Homo sapiens
  misc_RNA (1)...(19): siRNA sense strand
gaauguggcaaagaauuua

SEQ ID NO: 882582 - RNA, 19 nt, Homo sapiens
  misc_RNA (1)...(19): siRNA sense strand
gaaugugggcaaaccuuua

SEQ ID NO: 882583 - RNA, 19 nt, Homo sapiens
  misc_RNA (1)...(19): siRNA sense strand
gcaccuuagucaacauaaa

SEQ ID NO: 882584 - RNA, 19 nt, Homo sapiens
  misc_RNA (1)...(19): siRNA sense strand
gcuaacucuucacaucuua

SEQ ID NO: 882585 - RNA, 19 nt, Homo sapiens
  misc_RNA (1)...(19): siRNA sense strand
ggagaggccauauaaaugu

SEQ ID NO: 882586 - RNA, 19 nt, Homo sapiens
  misc_RNA (1)...(19): siRNA sense strand
gagaugugaugcuggagaa

SEQ ID NO: 882587 - RNA, 19 nt, Homo sapiens
  misc_RNA (1)...(19): siRNA sense strand
cgacaucuaagaagucaua

SEQ ID NO: 882588 - RNA, 19 nt, Homo sapiens
  misc_RNA (1)...(19): siRNA sense strand
gaacggcccuuugaauguc

SEQ ID NO: 882589 - RNA, 19 nt, Homo sapiens
  misc_RNA (1)...(19): siRNA sense strand
ggcaaagaauuuacuuguu

SEQ ID NO: 882590 - RNA, 19 nt, Homo sapiens
  misc_RNA (1)...(19): siRNA sense strand
gggaaacccuucacugagu

SEQ ID NO: 882591 - RNA, 19 nt, Homo sapiens
  misc_RNA (1)...(19): siRNA sense strand
ggagaacuauaagaaucua

SEQ ID NO: 882592 - RNA, 19 nt, Homo sapiens
  misc_RNA (1)...(19): siRNA sense strand
agaaaacccucuaucuuua

SEQ ID NO: 882593 - RNA, 19 nt, Homo sapiens
  misc_RNA (1)...(19): siRNA sense strand
gagaaaccauauaaggaau

SEQ ID NO: 882594 - RNA, 19 nt, Homo sapiens
  misc_RNA (1)...(19): siRNA sense strand
ggagagagaccauauacuc

SEQ ID NO: 882595 - RNA, 19 nt, Homo sapiens
  misc_RNA (1)...(19): siRNA sense strand
ccucaugccuuacugaaug

SEQ ID NO: 882596 - RNA, 19 nt, Homo sapiens
  misc_RNA (1)...(19): siRNA sense strand
gaaaccauauaaggaaugu

SEQ ID NO: 882597 - RNA, 19 nt, Homo sapiens
  misc_RNA (1)...(19): siRNA sense strand
gaccauauacucauaagga

SEQ ID NO: 882598 - RNA, 19 nt, Homo sapiens
  misc_RNA (1)...(19): siRNA sense strand
caagaaaacuagccaaaau

SEQ ID NO: 882599 - RNA, 19 nt, Homo sapiens
  misc_RNA (1)...(19): siRNA sense strand
aguaauuccucaugccuua

SEQ ID NO: 882600 - RNA, 19 nt, Homo sapiens
  misc_RNA (1)...(19): siRNA sense strand
gugagaagccuuaucaaug

SEQ ID NO: 882601 - RNA, 19 nt, Homo sapiens
  misc_RNA (1)...(19): siRNA sense strand
gagaaaagccuuaugaaug

SEQ ID NO: 882602 - RNA, 19 nt, Homo sapiens
  misc_RNA (1)...(19): siRNA sense strand
gcugggugguugacaaauu

SEQ ID NO: 882603 - RNA, 19 nt, Homo sapiens
  misc_RNA (1)...(19): siRNA sense strand
gagaaaccauauaaaugca

SEQ ID NO: 882604 - RNA, 19 nt, Homo sapiens
  misc_RNA (1)...(19): siRNA sense strand
ggauguggcuguggacuuc

SEQ ID NO: 882605 - RNA, 19 nt, Homo sapiens
  misc_RNA (1)...(19): siRNA sense strand
cugggugguugacaaauua

SEQ ID NO: 882606 - RNA, 19 nt, Homo sapiens
  misc_RNA (1)...(19): siRNA sense strand
gauugggagagucauauua

SEQ ID NO: 882607 - RNA, 19 nt, Homo sapiens
  misc_RNA (1)...(19): siRNA sense strand
cacaggagaacuuacuuua

SEQ ID NO: 882608 - RNA, 19 nt, Homo sapiens
  misc_RNA (1)...(19): siRNA sense strand
caucaggccuuacaguaca

SEQ ID NO: 882609 - RNA, 19 nt, Homo sapiens
  misc_RNA (1)...(19): siRNA sense strand
gggagaggccauauaaaug

SEQ ID NO: 882610 - RNA, 19 nt, Homo sapiens
  misc_RNA (1)...(19): siRNA sense strand
gcagacucauccuggugua

SEQ ID NO: 882611 - RNA, 19 nt, Homo sapiens
  misc_RNA (1)...(19): siRNA sense strand
ggagaacuuacuuuagaaa

SEQ ID NO: 882612 - RNA, 19 nt, Homo sapiens
  misc_RNA (1)...(19): siRNA sense strand
ucagagaaacuuauacaga

SEQ ID NO: 882613 - RNA, 19 nt, Homo sapiens
  misc_RNA (1)...(19): siRNA sense strand
ggucagcaccucagcagaa

SEQ ID NO: 882614 - RNA, 19 nt, Homo sapiens
  misc_RNA (1)...(19): siRNA sense strand
ggaaugugggcaaaccuuu

SEQ ID NO: 882615 - RNA, 19 nt, Homo sapiens
  misc_RNA (1)...(19): siRNA sense strand
gaagucauaguguggagaa

SEQ ID NO: 882616 - RNA, 19 nt, Homo sapiens
  misc_RNA (1)...(19): siRNA sense strand
cauaguagaguguuaccua

SEQ ID NO: 882617 - RNA, 19 nt, Homo sapiens
  misc_RNA (1)...(19): siRNA sense strand
caagaaaacucacacucaa

SEQ ID NO: 882618 - RNA, 19 nt, Homo sapiens
  misc_RNA (1)...(19): siRNA sense strand
ccucagagaauguguaaga

SEQ ID NO: 882619 - RNA, 19 nt, Homo sapiens
  misc_RNA (1)...(19): siRNA sense strand
ggaguggacuuugcuggau

SEQ ID NO: 882620 - RNA, 19 nt, Homo sapiens
  misc_RNA (1)...(19): siRNA sense strand
cagcaccucagcagaauuu

SEQ ID NO: 882621 - RNA, 19 nt, Homo sapiens
  misc_RNA (1)...(19): siRNA sense strand
caugcaaacucaagaugga

SEQ ID NO: 882622 - RNA, 19 nt, Homo sapiens
  misc_RNA (1)...(19): siRNA sense strand
acucaugccuuaagacuca

SEQ ID NO: 882623 - RNA, 19 nt, Homo sapiens
  misc_RNA (1)...(19): siRNA sense strand
cagaaaacccucuaucuuu

SEQ ID NO: 882624 - RNA, 19 nt, Homo sapiens
  misc_RNA (1)...(19): siRNA sense strand
ugaauguggcaaagaauuu

SEQ ID NO: 882625 - RNA, 19 nt, Homo sapiens
  misc_RNA (1)...(19): siRNA sense strand
gagagagaccauauacuca

SEQ ID NO: 882626 - RNA, 19 nt, Homo sapiens
  misc_RNA (1)...(19): siRNA sense strand
gccaacaucuacaucuugu

SEQ ID NO: 882627 - RNA, 19 nt, Homo sapiens
  misc_RNA (1)...(19): siRNA sense strand
ugggagagucauauuaaua

SEQ ID NO: 882628 - RNA, 19 nt, Homo sapiens
  misc_RNA (1)...(19): siRNA sense strand
agaaaagccuuaugaaugu

SEQ ID NO: 882629 - RNA, 19 nt, Homo sapiens
  misc_RNA (1)...(19): siRNA sense strand
guagaguguuaccuauaga

SEQ ID NO: 882630 - RNA, 19 nt, Homo sapiens
  misc_RNA (1)...(19): siRNA sense strand
agagaaacuuauacagaga

SEQ ID NO: 882631 - RNA, 19 nt, Homo sapiens
  misc_RNA (1)...(19): siRNA sense strand
cuuccuaacuguaaucaau

SEQ ID NO: 882632 - RNA, 19 nt, Homo sapiens
  misc_RNA (1)...(19): siRNA sense strand
caucuaagaagucauagug

SEQ ID NO: 882633 - RNA, 19 nt, Homo sapiens
  misc_RNA (1)...(19): siRNA sense strand
ggugagaagccuuaucaau

SEQ ID NO: 882634 - RNA, 19 nt, Homo sapiens
  misc_RNA (1)...(19): siRNA sense strand
caucuuacuguacauauga

SEQ ID NO: 882635 - RNA, 19 nt, Homo sapiens
  misc_RNA (1)...(19): siRNA sense strand
gaaaagccuuaugaaugua

SEQ ID NO: 882636 - RNA, 19 nt, Homo sapiens
  misc_RNA (1)...(19): siRNA sense strand
ccagaucuugcuaaacaua

SEQ ID NO: 882637 - RNA, 19 nt, Homo sapiens
  misc_RNA (1)...(19): siRNA sense strand
acugagucgucauaucuua

SEQ ID NO: 882638 - RNA, 19 nt, Homo sapiens
  misc_RNA (1)...(19): siRNA sense strand
ccauauaaaugcagugacu

SEQ ID NO: 882639 - RNA, 19 nt, Homo sapiens
  misc_RNA (1)...(19): siRNA sense strand
ggaguaugucgaaaccuuu

SEQ ID NO: 882640 - RNA, 19 nt, Homo sapiens
  misc_RNA (1)...(19): siRNA sense strand
caucaggucuuauaaaaca

SEQ ID NO: 882641 - RNA, 19 nt, Homo sapiens
  misc_RNA (1)...(19): siRNA sense strand
gacuuuaaccaaugugaaa

SEQ ID NO: 882642 - RNA, 19 nt, Homo sapiens
  misc_RNA (1)...(19): siRNA sense strand
aaacacaggcgaacucaca

SEQ ID NO: 882643 - RNA, 19 nt, Homo sapiens
  misc_RNA (1)...(19): siRNA sense strand
agacuuagaacuagaggaa

SEQ ID NO: 882644 - RNA, 19 nt, Homo sapiens
  misc_RNA (1)...(19): siRNA sense strand
gugggaaacccuucacuga

SEQ ID NO: 882645 - RNA, 19 nt, Homo sapiens
  misc_RNA (1)...(19): siRNA sense strand
cagccaacaucuacaucuu

SEQ ID NO: 882646 - RNA, 19 nt, Homo sapiens
  misc_RNA (1)...(19): siRNA sense strand
ggaacuguuugacuuuaac

SEQ ID NO: 882647 - RNA, 19 nt, Homo sapiens
  misc_RNA (1)...(19): siRNA sense strand
ggcaaaccuuuaguaauuc

SEQ ID NO: 882648 - RNA, 19 nt, Homo sapiens
  misc_RNA (1)...(19): siRNA sense strand
uauaaggaaugugggcaaa

SEQ ID NO: 882649 - RNA, 19 nt, Homo sapiens
  misc_RNA (1)...(19): siRNA sense strand
gagaggccauauaaauguc

SEQ ID NO: 882650 - RNA, 19 nt, Homo sapiens
  misc_RNA (1)...(19): siRNA sense strand
agauacuccucgcaccuua

SEQ ID NO: 882651 - RNA, 19 nt, Homo sapiens
  misc_RNA (1)...(19): siRNA sense strand
guagauugggagagucaua

SEQ ID NO: 882652 - RNA, 19 nt, Homo sapiens
  misc_RNA (1)...(19): siRNA sense strand
ccucacaccucagagaaug

SEQ ID NO: 882653 - RNA, 19 nt, Homo sapiens
  misc_RNA (1)...(19): siRNA sense strand
aaacucacacucaagagaa

SEQ ID NO: 882654 - RNA, 19 nt, Homo sapiens
  misc_RNA (1)...(19): siRNA sense strand
ucacaggagaacuuacuuu

SEQ ID NO: 882655 - RNA, 19 nt, Homo sapiens
  misc_RNA (1)...(19): siRNA sense strand
gugaacggcccuuugaaug

SEQ ID NO: 882656 - RNA, 19 nt, Homo sapiens
  misc_RNA (1)...(19): siRNA sense strand
gggagagucauauuaauac

SEQ ID NO: 882657 - RNA, 19 nt, Homo sapiens
  misc_RNA (1)...(19): siRNA sense strand
gaacuuccuaacuguaauc

SEQ ID NO: 882658 - RNA, 19 nt, Homo sapiens
  misc_RNA (1)...(19): siRNA sense strand
cuggagaacuauaagaauc

SEQ ID NO: 882659 - RNA, 19 nt, Homo sapiens
  misc_RNA (1)...(19): siRNA sense strand
cuucacaucuuacuguaca

SEQ ID NO: 882660 - RNA, 19 nt, Homo sapiens
  misc_RNA (1)...(19): siRNA sense strand
ucucaaaacucaacauuca

SEQ ID NO: 882661 - RNA, 19 nt, Homo sapiens
  misc_RNA (1)...(19): siRNA sense strand
ucacugagucgucauaucu

SEQ ID NO: 882662 - RNA, 19 nt, Homo sapiens
  misc_RNA (1)...(19): siRNA sense strand
ggaucaaacucagagaaac

SEQ ID NO: 882663 - RNA, 19 nt, Homo sapiens
  misc_RNA (1)...(19): siRNA sense strand
ggugaacggcccuuugaau

SEQ ID NO: 882664 - RNA, 19 nt, Homo sapiens
  misc_RNA (1)...(19): siRNA sense strand
ccagugugguggaaaugga

SEQ ID NO: 882665 - RNA, 19 nt, Homo sapiens
  misc_RNA (1)...(19): siRNA sense strand
gagaccauauacucauaag

SEQ ID NO: 882666 - RNA, 19 nt, Homo sapiens
  misc_RNA (1)...(19): siRNA sense strand
gaugagagaugauuacuuc

SEQ ID NO: 882667 - RNA, 19 nt, Homo sapiens
  misc_RNA (1)...(19): siRNA sense strand
gcaagaagcaugaauguga

SEQ ID NO: 882668 - RNA, 19 nt, Homo sapiens
  misc_RNA (1)...(19): siRNA sense strand
gaaggaggcuggcaagaag

SEQ ID NO: 882669 - RNA, 19 nt, Homo sapiens
  misc_RNA (1)...(19): siRNA sense strand
agaaagaacuacaggauau

SEQ ID NO: 882670 - RNA, 19 nt, Homo sapiens
  misc_RNA (1)...(19): siRNA sense strand
gagaaagaacuacaggaua

SEQ ID NO: 882671 - RNA, 19 nt, Homo sapiens
  misc_RNA (1)...(19): siRNA sense strand
gggcauuaauggcaagaaa

SEQ ID NO: 882672 - RNA, 19 nt, Homo sapiens
  misc_RNA (1)...(19): siRNA sense strand
gaaacaugcugcccuucau

SEQ ID NO: 882673 - RNA, 19 nt, Homo sapiens
  misc_RNA (1)...(19): siRNA sense strand
gggccagccugucauggua

SEQ ID NO: 882674 - RNA, 19 nt, Homo sapiens
  misc_RNA (1)...(19): siRNA sense strand
gaacucgcagugcagauuu

SEQ ID NO: 882675 - RNA, 19 nt, Homo sapiens
  misc_RNA (1)...(19): siRNA sense strand
cagauuugguuugagaaua

SEQ ID NO: 882676 - RNA, 19 nt, Homo sapiens
  misc_RNA (1)...(19): siRNA sense strand
gugcagauuugguuugaga

SEQ ID NO: 882677 - RNA, 19 nt, Homo sapiens
  misc_RNA (1)...(19): siRNA sense strand
ggaccaguguagccaguau

SEQ ID NO: 882678 - RNA, 19 nt, Homo sapiens
  misc_RNA (1)...(19): siRNA sense strand
gaauagaagagccaaaugg

SEQ ID NO: 882679 - RNA, 19 nt, Homo sapiens
  misc_RNA (1)...(19): siRNA sense strand
gcuauggugcugucgcuua

SEQ ID NO: 882680 - RNA, 19 nt, Homo sapiens
  misc_RNA (1)...(19): siRNA sense strand
gaacuacaggauaugaaug

SEQ ID NO: 882681 - RNA, 19 nt, Homo sapiens
  misc_RNA (1)...(19): siRNA sense strand
gagaauagaagagccaaau

SEQ ID NO: 882682 - RNA, 19 nt, Homo sapiens
  misc_RNA (1)...(19): siRNA sense strand
gcaugaaugugacugaacu

SEQ ID NO: 882683 - RNA, 19 nt, Homo sapiens
  misc_RNA (1)...(19): siRNA sense strand
cggcagcgauggcaacguu

SEQ ID NO: 882684 - RNA, 19 nt, Homo sapiens
  misc_RNA (1)...(19): siRNA sense strand
caguguagccaguauauga

SEQ ID NO: 882685 - RNA, 19 nt, Homo sapiens
  misc_RNA (1)...(19): siRNA sense strand
gccaguauaugaccagcuu

SEQ ID NO: 882686 - RNA, 19 nt, Homo sapiens
  misc_RNA (1)...(19): siRNA sense strand
uacaggauaugaaugcuau

SEQ ID NO: 882687 - RNA, 19 nt, Homo sapiens
  misc_RNA (1)...(19): siRNA sense strand
uaucgugccuucuuucaca

SEQ ID NO: 882688 - RNA, 19 nt, Homo sapiens
  misc_RNA (1)...(19): siRNA sense strand
gaaccugggcagcaguauu

SEQ ID NO: 882689 - RNA, 19 nt, Homo sapiens
  misc_RNA (1)...(19): siRNA sense strand
gaaagaacuacaggauaug

SEQ ID NO: 882690 - RNA, 19 nt, Homo sapiens
  misc_RNA (1)...(19): siRNA sense strand
caucagagggcauuaaugg

SEQ ID NO: 882691 - RNA, 19 nt, Homo sapiens
  misc_RNA (1)...(19): siRNA sense strand
cgaaggaggcuggcaagaa

SEQ ID NO: 882692 - RNA, 19 nt, Homo sapiens
  misc_RNA (1)...(19): siRNA sense strand
gaagcaugaaugugacuga

SEQ ID NO: 882693 - RNA, 19 nt, Homo sapiens
  misc_RNA (1)...(19): siRNA sense strand
cgagaaagaacuacaggau

SEQ ID NO: 882694 - RNA, 19 nt, Homo sapiens
  misc_RNA (1)...(19): siRNA sense strand
gcauuaauggcaagaaaca

SEQ ID NO: 882695 - RNA, 19 nt, Homo sapiens
  misc_RNA (1)...(19): siRNA sense strand
cgacgacgagaaagaacua

SEQ ID NO: 882696 - RNA, 19 nt, Homo sapiens
  misc_RNA (1)...(19): siRNA sense strand
agauuugguuugagaauag

SEQ ID NO: 882697 - RNA, 19 nt, Homo sapiens
  misc_RNA (1)...(19): siRNA sense strand
ggagacaucagagggcauu

SEQ ID NO: 882698 - RNA, 19 nt, Homo sapiens
  misc_RNA (1)...(19): siRNA sense strand
caaagaggaggaagaggau

SEQ ID NO: 882699 - RNA, 19 nt, Homo sapiens
  misc_RNA (1)...(19): siRNA sense strand
gcagugcagauuugguuug

SEQ ID NO: 882700 - RNA, 19 nt, Homo sapiens
  misc_RNA (1)...(19): siRNA sense strand
gcagauuugguuugagaau

SEQ ID NO: 882701 - RNA, 19 nt, Homo sapiens
  misc_RNA (1)...(19): siRNA sense strand
aaccgcagcugaggccaua

SEQ ID NO: 882702 - RNA, 19 nt, Homo sapiens
  misc_RNA (1)...(19): siRNA sense strand
uuacugaagaggucaaaga

SEQ ID NO: 882703 - RNA, 19 nt, Homo sapiens
  misc_RNA (1)...(19): siRNA sense strand
cauaacggcacccuuguuc

SEQ ID NO: 882704 - RNA, 19 nt, Homo sapiens
  misc_RNA (1)...(19): siRNA sense strand
cagugcagauuugguuuga

SEQ ID NO: 882705 - RNA, 19 nt, Homo sapiens
  misc_RNA (1)...(19): siRNA sense strand
cggaguuccuggccaccua

SEQ ID NO: 882706 - RNA, 19 nt, Homo sapiens
  misc_RNA (1)...(19): siRNA sense strand
gcccaaggcggagaagaaa

SEQ ID NO: 882707 - RNA, 19 nt, Homo sapiens
  misc_RNA (1)...(19): siRNA sense strand
aaagaacuacaggauauga

SEQ ID NO: 882708 - RNA, 19 nt, Homo sapiens
  misc_RNA (1)...(19): siRNA sense strand
ucagcgggaugagagauga

SEQ ID NO: 882709 - RNA, 19 nt, Homo sapiens
  misc_RNA (1)...(19): siRNA sense strand
uaacggcacccuuguucau

SEQ ID NO: 882710 - RNA, 19 nt, Homo sapiens
  misc_RNA (1)...(19): siRNA sense strand
gacaucagagggcauuaau

SEQ ID NO: 882711 - RNA, 19 nt, Homo sapiens
  misc_RNA (1)...(19): siRNA sense strand
ccaaauggaggagacauca

SEQ ID NO: 882712 - RNA, 19 nt, Homo sapiens
  misc_RNA (1)...(19): siRNA sense strand
gcagcgauggcaacguuga

SEQ ID NO: 882713 - RNA, 19 nt, Homo sapiens
  misc_RNA (1)...(19): siRNA sense strand
ggaugagagaugauuacuu

SEQ ID NO: 882714 - RNA, 19 nt, Homo sapiens
  misc_RNA (1)...(19): siRNA sense strand
gauuugguuugagaauaga

SEQ ID NO: 882715 - RNA, 19 nt, Homo sapiens
  misc_RNA (1)...(19): siRNA sense strand
gcgggaugagagaugauua

SEQ ID NO: 882716 - RNA, 19 nt, Homo sapiens
  misc_RNA (1)...(19): siRNA sense strand
gaccaguguagccaguaua

SEQ ID NO: 882717 - RNA, 19 nt, Homo sapiens
  misc_RNA (1)...(19): siRNA sense strand
aaauggaggagacaucaga

SEQ ID NO: 882718 - RNA, 19 nt, Homo sapiens
  misc_RNA (1)...(19): siRNA sense strand
aagcaugaaugugacugaa

SEQ ID NO: 882719 - RNA, 19 nt, Homo sapiens
  misc_RNA (1)...(19): siRNA sense strand
cuacaggauaugaaugcua

SEQ ID NO: 882720 - RNA, 19 nt, Homo sapiens
  misc_RNA (1)...(19): siRNA sense strand
ggucaaagaggaggaagag

SEQ ID NO: 882721 - RNA, 19 nt, Homo sapiens
  misc_RNA (1)...(19): siRNA sense strand
aauagaagagccaaaugga

SEQ ID NO: 882722 - RNA, 19 nt, Homo sapiens
  misc_RNA (1)...(19): siRNA sense strand
agacaucagagggcauuaa

SEQ ID NO: 882723 - RNA, 19 nt, Homo sapiens
  misc_RNA (1)...(19): siRNA sense strand
ugcugucgcuuacugaaga

SEQ ID NO: 882724 - RNA, 19 nt, Homo sapiens
  misc_RNA (1)...(19): siRNA sense strand
agaaacaugcugcccuuca

SEQ ID NO: 882725 - RNA, 19 nt, Homo sapiens
  misc_RNA (1)...(19): siRNA sense strand
ugaacucgcagugcagauu

SEQ ID NO: 882726 - RNA, 19 nt, Homo sapiens
  misc_RNA (1)...(19): siRNA sense strand
ugagagaugauuacuucug

SEQ ID NO: 882727 - RNA, 19 nt, Homo sapiens
  misc_RNA (1)...(19): siRNA sense strand
gcgagcaguuccccaguga

SEQ ID NO: 882728 - RNA, 19 nt, Homo sapiens
  misc_RNA (1)...(19): siRNA sense strand
ccauaacggcacccuuguu

SEQ ID NO: 882729 - RNA, 19 nt, Homo sapiens
  misc_RNA (1)...(19): siRNA sense strand
agaacuacaggauaugaau

SEQ ID NO: 882730 - RNA, 19 nt, Homo sapiens
  misc_RNA (1)...(19): siRNA sense strand
aggcacagcagcaggagaa

SEQ ID NO: 882731 - RNA, 19 nt, Homo sapiens
  misc_RNA (1)...(19): siRNA sense strand
ucaugcuucuuccaccuau

SEQ ID NO: 882732 - RNA, 19 nt, Homo sapiens
  misc_RNA (1)...(19): siRNA sense strand
gcacauaauucacuggauu

SEQ ID NO: 882733 - RNA, 19 nt, Homo sapiens
  misc_RNA (1)...(19): siRNA sense strand
ggagagguuucuacaggaa

SEQ ID NO: 882734 - RNA, 19 nt, Homo sapiens
  misc_RNA (1)...(19): siRNA sense strand
ccacgaacauugucaccuu

SEQ ID NO: 882735 - RNA, 19 nt, Homo sapiens
  misc_RNA (1)...(19): siRNA sense strand
uagcaaaucaggucuauca

SEQ ID NO: 882736 - RNA, 19 nt, Homo sapiens
  misc_RNA (1)...(19): siRNA sense strand
ugcaaaggguuaugacaaa

SEQ ID NO: 882737 - RNA, 19 nt, Homo sapiens
  misc_RNA (1)...(19): siRNA sense strand
cagauggaguucuagcaaa

SEQ ID NO: 882738 - RNA, 19 nt, Homo sapiens
  misc_RNA (1)...(19): siRNA sense strand
guagaagggcacauaauuc

SEQ ID NO: 882739 - RNA, 19 nt, Homo sapiens
  misc_RNA (1)...(19): siRNA sense strand
ugaaagcaaagccucauuu

SEQ ID NO: 882740 - RNA, 19 nt, Homo sapiens
  misc_RNA (1)...(19): siRNA sense strand
cacgaacauugucaccuua

SEQ ID NO: 882741 - RNA, 19 nt, Homo sapiens
  misc_RNA (1)...(19): siRNA sense strand
gcuuagucaucuauuggua

SEQ ID NO: 882742 - RNA, 19 nt, Homo sapiens
  misc_RNA (1)...(19): siRNA sense strand
ugagagacuugcuucuaga

SEQ ID NO: 882743 - RNA, 19 nt, Homo sapiens
  misc_RNA (1)...(19): siRNA sense strand
ucacuggauugaaagcaaa

SEQ ID NO: 882744 - RNA, 19 nt, Homo sapiens
  misc_RNA (1)...(19): siRNA sense strand
gcaaaucaggucuaucagu

SEQ ID NO: 882745 - RNA, 19 nt, Homo sapiens
  misc_RNA (1)...(19): siRNA sense strand
aagaucagcuucgugcaaa

SEQ ID NO: 882746 - RNA, 19 nt, Homo sapiens
  misc_RNA (1)...(19): siRNA sense strand
gagcuacuggaauagauuu

SEQ ID NO: 882747 - RNA, 19 nt, Homo sapiens
  misc_RNA (1)...(19): siRNA sense strand
uagaagggcacauaauuca

SEQ ID NO: 882748 - RNA, 19 nt, Homo sapiens
  misc_RNA (1)...(19): siRNA sense strand
acaaguaccaguugcugua

SEQ ID NO: 882749 - RNA, 19 nt, Homo sapiens
  misc_RNA (1)...(19): siRNA sense strand
gcugagagacuugcuucua

SEQ ID NO: 882750 - RNA, 19 nt, Homo sapiens
  misc_RNA (1)...(19): siRNA sense strand
uguagaagggcacauaauu

SEQ ID NO: 882751 - RNA, 19 nt, Homo sapiens
  misc_RNA (1)...(19): siRNA sense strand
gugcaaaggguuaugacaa

SEQ ID NO: 882752 - RNA, 19 nt, Homo sapiens
  misc_RNA (1)...(19): siRNA sense strand
gaacauugucaccuuaugc

SEQ ID NO: 882753 - RNA, 19 nt, Homo sapiens
  misc_RNA (1)...(19): siRNA sense strand
gcaaaggguuaugacaaaa

SEQ ID NO: 882754 - RNA, 19 nt, Homo sapiens
  misc_RNA (1)...(19): siRNA sense strand
gaagggcacauaauucacu

SEQ ID NO: 882755 - RNA, 19 nt, Homo sapiens
  misc_RNA (1)...(19): siRNA sense strand
agauggaguucuagcaaau

SEQ ID NO: 882756 - RNA, 19 nt, Homo sapiens
  misc_RNA (1)...(19): siRNA sense strand
caaaacaccagacuucauu

SEQ ID NO: 882757 - RNA, 19 nt, Homo sapiens
  misc_RNA (1)...(19): siRNA sense strand
gaaacuccacccuccaagu

SEQ ID NO: 882758 - RNA, 19 nt, Homo sapiens
  misc_RNA (1)...(19): siRNA sense strand
caucaagcaugccauuggu

SEQ ID NO: 882759 - RNA, 19 nt, Homo sapiens
  misc_RNA (1)...(19): siRNA sense strand
ggagcuacuggaauagauu

SEQ ID NO: 882760 - RNA, 19 nt, Homo sapiens
  misc_RNA (1)...(19): siRNA sense strand
cgaacauugucaccuuaug

SEQ ID NO: 882761 - RNA, 19 nt, Homo sapiens
  misc_RNA (1)...(19): siRNA sense strand
cugagagacuugcuucuag

SEQ ID NO: 882762 - RNA, 19 nt, Homo sapiens
  misc_RNA (1)...(19): siRNA sense strand
ccuccaagucuauuauaaa

SEQ ID NO: 882763 - RNA, 19 nt, Homo sapiens
  misc_RNA (1)...(19): siRNA sense strand
gucuaucagugcauuguga

SEQ ID NO: 882764 - RNA, 19 nt, Homo sapiens
  misc_RNA (1)...(19): siRNA sense strand
uuagucaucuauugguaug

SEQ ID NO: 882765 - RNA, 19 nt, Homo sapiens
  misc_RNA (1)...(19): siRNA sense strand
ccagauggaguucuagcaa

SEQ ID NO: 882766 - RNA, 19 nt, Homo sapiens
  misc_RNA (1)...(19): siRNA sense strand
cuacgggacccuucucaga

SEQ ID NO: 882767 - RNA, 19 nt, Homo sapiens
  misc_RNA (1)...(19): siRNA sense strand
caggcuuagucaucuauug

SEQ ID NO: 882768 - RNA, 19 nt, Homo sapiens
  misc_RNA (1)...(19): siRNA sense strand
ggccaggcuuagucaucua

SEQ ID NO: 882769 - RNA, 19 nt, Homo sapiens
  misc_RNA (1)...(19): siRNA sense strand
uucuggagcuacuggaaua

SEQ ID NO: 882770 - RNA, 19 nt, Homo sapiens
  misc_RNA (1)...(19): siRNA sense strand
cuaccugcaugaccaguuc

SEQ ID NO: 882771 - RNA, 19 nt, Homo sapiens
  misc_RNA (1)...(19): siRNA sense strand
gcuguagaagggcacauaa

SEQ ID NO: 882772 - RNA, 19 nt, Homo sapiens
  misc_RNA (1)...(19): siRNA sense strand
aaaccuguccuuccuagau

SEQ ID NO: 882773 - RNA, 19 nt, Homo sapiens
  misc_RNA (1)...(19): siRNA sense strand
gggccaggcuuagucaucu

SEQ ID NO: 882774 - RNA, 19 nt, Homo sapiens
  misc_RNA (1)...(19): siRNA sense strand
acgggacccuucucagauu

SEQ ID NO: 882775 - RNA, 19 nt, Homo sapiens
  misc_RNA (1)...(19): siRNA sense strand
ucaggucuaucagugcauu

SEQ ID NO: 882776 - RNA, 19 nt, Homo sapiens
  misc_RNA (1)...(19): siRNA sense strand
caucuauugguauggauuu

SEQ ID NO: 882777 - RNA, 19 nt, Homo sapiens
  misc_RNA (1)...(19): siRNA sense strand
cuauugguauggauuuauc

SEQ ID NO: 882778 - RNA, 19 nt, Homo sapiens
  misc_RNA (1)...(19): siRNA sense strand
ccacccuccaagucuauua

SEQ ID NO: 882779 - RNA, 19 nt, Homo sapiens
  misc_RNA (1)...(19): siRNA sense strand
uagauuugggccaggcuua

SEQ ID NO: 882780 - RNA, 19 nt, Homo sapiens
  misc_RNA (1)...(19): siRNA sense strand
ucuagcaaaucaggucuau

SEQ ID NO: 882781 - RNA, 19 nt, Homo sapiens
  misc_RNA (1)...(19): siRNA sense strand
cccuccaagucuauuauaa

SEQ ID NO: 882782 - RNA, 19 nt, Homo sapiens
  misc_RNA (1)...(19): siRNA sense strand
aguaccaguugcuguagaa

SEQ ID NO: 882783 - RNA, 19 nt, Homo sapiens
  misc_RNA (1)...(19): siRNA sense strand
ggcuuauacuggagagguu

SEQ ID NO: 882784 - RNA, 19 nt, Homo sapiens
  misc_RNA (1)...(19): siRNA sense strand
ugacaaaacaccagacuuc

SEQ ID NO: 882785 - RNA, 19 nt, Homo sapiens
  misc_RNA (1)...(19): siRNA sense strand
aaacuccacccuccaaguc

SEQ ID NO: 882786 - RNA, 19 nt, Homo sapiens
  misc_RNA (1)...(19): siRNA sense strand
gugaacgacugcuguuacg

SEQ ID NO: 882787 - RNA, 19 nt, Homo sapiens
  misc_RNA (1)...(19): siRNA sense strand
aaccuguccuuccuagaug

SEQ ID NO: 882788 - RNA, 19 nt, Homo sapiens
  misc_RNA (1)...(19): siRNA sense strand
cacauaauucacuggauug

SEQ ID NO: 882789 - RNA, 19 nt, Homo sapiens
  misc_RNA (1)...(19): siRNA sense strand
ccaccacgccuaccugcau

SEQ ID NO: 882790 - RNA, 19 nt, Homo sapiens
  misc_RNA (1)...(19): siRNA sense strand
acuccacccuccaagucua

SEQ ID NO: 882791 - RNA, 19 nt, Homo sapiens
  misc_RNA (1)...(19): siRNA sense strand
gaacaccucugccgaacuu

SEQ ID NO: 882792 - RNA, 19 nt, Homo sapiens
  misc_RNA (1)...(19): siRNA sense strand
aaacagaagugaugaaguu

SEQ ID NO: 882793 - RNA, 19 nt, Homo sapiens
  misc_RNA (1)...(19): siRNA sense strand
ggaauaaagaguuugcuua

SEQ ID NO: 882794 - RNA, 19 nt, Homo sapiens
  misc_RNA (1)...(19): siRNA sense strand
gaaacacucugaaaucaca

SEQ ID NO: 882795 - RNA, 19 nt, Homo sapiens
  misc_RNA (1)...(19): siRNA sense strand
ggagauguaucaacagaau

SEQ ID NO: 882796 - RNA, 19 nt, Homo sapiens
  misc_RNA (1)...(19): siRNA sense strand
gaagagcgacugagaagga

SEQ ID NO: 882797 - RNA, 19 nt, Homo sapiens
  misc_RNA (1)...(19): siRNA sense strand
gagaaggaaaucaacaaua

SEQ ID NO: 882798 - RNA, 19 nt, Homo sapiens
  misc_RNA (1)...(19): siRNA sense strand
cgaaggucaucaaauuuaa

SEQ ID NO: 882799 - RNA, 19 nt, Homo sapiens
  misc_RNA (1)...(19): siRNA sense strand
gggaaacacucugaaauca

SEQ ID NO: 882800 - RNA, 19 nt, Homo sapiens
  misc_RNA (1)...(19): siRNA sense strand
gcaacauccucauuguauu

SEQ ID NO: 882801 - RNA, 19 nt, Homo sapiens
  misc_RNA (1)...(19): siRNA sense strand
gugaugaaguugacaaaga

SEQ ID NO: 882802 - RNA, 19 nt, Homo sapiens
  misc_RNA (1)...(19): siRNA sense strand
acucgaaggucaucaaauu

SEQ ID NO: 882803 - RNA, 19 nt, Homo sapiens
  misc_RNA (1)...(19): siRNA sense strand
gcagcagcauuaacccuuu

SEQ ID NO: 882804 - RNA, 19 nt, Homo sapiens
  misc_RNA (1)...(19): siRNA sense strand
uaaagacgguguugagagu

SEQ ID NO: 882805 - RNA, 19 nt, Homo sapiens
  misc_RNA (1)...(19): siRNA sense strand
ggauacuuguaaccaauuu

SEQ ID NO: 882806 - RNA, 19 nt, Homo sapiens
  misc_RNA (1)...(19): siRNA sense strand
caaagaagagcgacugaga

SEQ ID NO: 882807 - RNA, 19 nt, Homo sapiens
  misc_RNA (1)...(19): siRNA sense strand
guacucugguauacacuuu

SEQ ID NO: 882808 - RNA, 19 nt, Homo sapiens
  misc_RNA (1)...(19): siRNA sense strand
ugauacaacuggugaacuu

SEQ ID NO: 882809 - RNA, 19 nt, Homo sapiens
  misc_RNA (1)...(19): siRNA sense strand
ucgaaggucaucaaauuua

SEQ ID NO: 882810 - RNA, 19 nt, Homo sapiens
  misc_RNA (1)...(19): siRNA sense strand
cauccucccuuccaugauu

SEQ ID NO: 882811 - RNA, 19 nt, Homo sapiens
  misc_RNA (1)...(19): siRNA sense strand
uaaugaguguggacaggua

SEQ ID NO: 882812 - RNA, 19 nt, Homo sapiens
  misc_RNA (1)...(19): siRNA sense strand
guuauuaccucuccaucug

SEQ ID NO: 882813 - RNA, 19 nt, Homo sapiens
  misc_RNA (1)...(19): siRNA sense strand
agaaacgucugccucaaau

SEQ ID NO: 882814 - RNA, 19 nt, Homo sapiens
  misc_RNA (1)...(19): siRNA sense strand
gaaggaaaucaacaauaug

SEQ ID NO: 882815 - RNA, 19 nt, Homo sapiens
  misc_RNA (1)...(19): siRNA sense strand
ggcaacauccucauuguau

SEQ ID NO: 882816 - RNA, 19 nt, Homo sapiens
  misc_RNA (1)...(19): siRNA sense strand
gguauacacuuuauuugac

SEQ ID NO: 882817 - RNA, 19 nt, Homo sapiens
  misc_RNA (1)...(19): siRNA sense strand
guagugccaucaugacugu

SEQ ID NO: 882818 - RNA, 19 nt, Homo sapiens
  misc_RNA (1)...(19): siRNA sense strand
guccaaccauuucgacuga

SEQ ID NO: 882819 - RNA, 19 nt, Homo sapiens
  misc_RNA (1)...(19): siRNA sense strand
ugauugggauuaucuguuc

SEQ ID NO: 882820 - RNA, 19 nt, Homo sapiens
  misc_RNA (1)...(19): siRNA sense strand
ugaugaaguugacaaagau

SEQ ID NO: 882821 - RNA, 19 nt, Homo sapiens
  misc_RNA (1)...(19): siRNA sense strand
caacauccucauuguauuc

SEQ ID NO: 882822 - RNA, 19 nt, Homo sapiens
  misc_RNA (1)...(19): siRNA sense strand
aaacagucccugacaucua

SEQ ID NO: 882823 - RNA, 19 nt, Homo sapiens
  misc_RNA (1)...(19): siRNA sense strand
gacgauguacucugguaua

SEQ ID NO: 882824 - RNA, 19 nt, Homo sapiens
  misc_RNA (1)...(19): siRNA sense strand
gaacaagguacaagaccau

SEQ ID NO: 882825 - RNA, 19 nt, Homo sapiens
  misc_RNA (1)...(19): siRNA sense strand
cgacugacacguuggagaa

SEQ ID NO: 882826 - RNA, 19 nt, Homo sapiens
  misc_RNA (1)...(19): siRNA sense strand
gggccucucugcaccauca

SEQ ID NO: 882827 - RNA, 19 nt, Homo sapiens
  misc_RNA (1)...(19): siRNA sense strand
gaagugaugaaguugacaa

SEQ ID NO: 882828 - RNA, 19 nt, Homo sapiens
  misc_RNA (1)...(19): siRNA sense strand
cgacugagaaggaaaucaa

SEQ ID NO: 882829 - RNA, 19 nt, Homo sapiens
  misc_RNA (1)...(19): siRNA sense strand
gaugccagaugcugcaauc

SEQ ID NO: 882830 - RNA, 19 nt, Homo sapiens
  misc_RNA (1)...(19): siRNA sense strand
ccuucuauguggguuauua

SEQ ID NO: 882831 - RNA, 19 nt, Homo sapiens
  misc_RNA (1)...(19): siRNA sense strand
guaaccaauuugccuguag

SEQ ID NO: 882832 - RNA, 19 nt, Homo sapiens
  misc_RNA (1)...(19): siRNA sense strand
gauacaacuggugaacuua

SEQ ID NO: 882833 - RNA, 19 nt, Homo sapiens
  misc_RNA (1)...(19): siRNA sense strand
aacagucccugacaucuau

SEQ ID NO: 882834 - RNA, 19 nt, Homo sapiens
  misc_RNA (1)...(19): siRNA sense strand
guacuuugcccucguccaa

SEQ ID NO: 882835 - RNA, 19 nt, Homo sapiens
  misc_RNA (1)...(19): siRNA sense strand
caaccuggcuguggcugau

SEQ ID NO: 882836 - RNA, 19 nt, Homo sapiens
  misc_RNA (1)...(19): siRNA sense strand
agaauaaggaugccagaug

SEQ ID NO: 882837 - RNA, 19 nt, Homo sapiens
  misc_RNA (1)...(19): siRNA sense strand
gagauguaucaacagaaua

SEQ ID NO: 882838 - RNA, 19 nt, Homo sapiens
  misc_RNA (1)...(19): siRNA sense strand
uaaccaauuugccuguagu

SEQ ID NO: 882839 - RNA, 19 nt, Homo sapiens
  misc_RNA (1)...(19): siRNA sense strand
gaauccauuucaugcaucu

SEQ ID NO: 882840 - RNA, 19 nt, Homo sapiens
  misc_RNA (1)...(19): siRNA sense strand
aaagaagagcgacugagaa

SEQ ID NO: 882841 - RNA, 19 nt, Homo sapiens
  misc_RNA (1)...(19): siRNA sense strand
gauuugguccacauaguug

SEQ ID NO: 882842 - RNA, 19 nt, Homo sapiens
  misc_RNA (1)...(19): siRNA sense strand
aacaaauccuggaauaaag

SEQ ID NO: 882843 - RNA, 19 nt, Homo sapiens
  misc_RNA (1)...(19): siRNA sense strand
gcaaucccaguguaccaaa

SEQ ID NO: 882844 - RNA, 19 nt, Homo sapiens
  misc_RNA (1)...(19): siRNA sense strand
ugggagauguaucaacaga

SEQ ID NO: 882845 - RNA, 19 nt, Homo sapiens
  misc_RNA (1)...(19): siRNA sense strand
uggaaugccuuuucuuauu

SEQ ID NO: 882846 - RNA, 19 nt, Homo sapiens
  misc_RNA (1)...(19): siRNA sense strand
gaguugugcuuuugauuug

SEQ ID NO: 882847 - RNA, 19 nt, Homo sapiens
  misc_RNA (1)...(19): siRNA sense strand
cuugggagauguaucaaca

SEQ ID NO: 882848 - RNA, 19 nt, Homo sapiens
  misc_RNA (1)...(19): siRNA sense strand
ccacacuggccuucuaugu

SEQ ID NO: 882849 - RNA, 19 nt, Homo sapiens
  misc_RNA (1)...(19): siRNA sense strand
ccagugugguggauacagu

SEQ ID NO: 882850 - RNA, 19 nt, Homo sapiens
  misc_RNA (1)...(19): siRNA sense strand
acaaauccuggaauaaaga

SEQ ID NO: 882851 - RNA, 19 nt, Homo sapiens
  misc_RNA (1)...(19): siRNA sense strand
ccucaaauccaaagaagag

SEQ ID NO: 882852 - RNA, 19 nt, Homo sapiens
  misc_RNA (1)...(19): siRNA sense strand
ggaucaauuugggccuuug

SEQ ID NO: 882853 - RNA, 19 nt, Homo sapiens
  misc_RNA (1)...(19): siRNA sense strand
caacuggugaacuuacaga

SEQ ID NO: 882854 - RNA, 19 nt, Homo sapiens
  misc_RNA (1)...(19): siRNA sense strand
cagaagugaugaaguugac

SEQ ID NO: 882855 - RNA, 19 nt, Homo sapiens
  misc_RNA (1)...(19): siRNA sense strand
gcuauacuugggagaugua

SEQ ID NO: 882856 - RNA, 19 nt, Homo sapiens
  misc_RNA (1)...(19): siRNA sense strand
aagacgguguugagaguug

SEQ ID NO: 882857 - RNA, 19 nt, Homo sapiens
  misc_RNA (1)...(19): siRNA sense strand
ccaaccauuucgacugaca

SEQ ID NO: 882858 - RNA, 19 nt, Homo sapiens
  misc_RNA (1)...(19): siRNA sense strand
gagcgacugagaaggaaau

SEQ ID NO: 882859 - RNA, 19 nt, Homo sapiens
  misc_RNA (1)...(19): siRNA sense strand
uacaagaccauccggauca

SEQ ID NO: 882860 - RNA, 19 nt, Homo sapiens
  misc_RNA (1)...(19): siRNA sense strand
ccauuucgacugacacguu

SEQ ID NO: 882861 - RNA, 19 nt, Homo sapiens
  misc_RNA (1)...(19): siRNA sense strand
uuucaugcaucuuguugga

SEQ ID NO: 882862 - RNA, 19 nt, Homo sapiens
  misc_RNA (1)...(19): siRNA sense strand
gcauuaacccuuuucucua

SEQ ID NO: 882863 - RNA, 19 nt, Homo sapiens
  misc_RNA (1)...(19): siRNA sense strand
cugacgauguacucuggua

SEQ ID NO: 882864 - RNA, 19 nt, Homo sapiens
  misc_RNA (1)...(19): siRNA sense strand
gaccauccggaucaauuug

SEQ ID NO: 882865 - RNA, 19 nt, Homo sapiens
  misc_RNA (1)...(19): siRNA sense strand
ggagaacaagguacaagac

SEQ ID NO: 882866 - RNA, 19 nt, Homo sapiens
  misc_RNA (1)...(19): siRNA sense strand
gguagucuuuauccugagu

SEQ ID NO: 882867 - RNA, 19 nt, Homo sapiens
  misc_RNA (1)...(19): siRNA sense strand
agaccauccggaucaauuu

SEQ ID NO: 882868 - RNA, 19 nt, Homo sapiens
  misc_RNA (1)...(19): siRNA sense strand
ccuggauacuuguaaccaa

SEQ ID NO: 882869 - RNA, 19 nt, Homo sapiens
  misc_RNA (1)...(19): siRNA sense strand
acucugguauacacuuuau

SEQ ID NO: 882870 - RNA, 19 nt, Homo sapiens
  misc_RNA (1)...(19): siRNA sense strand
caaauuuaaagacgguguu

SEQ ID NO: 882871 - RNA, 19 nt, Homo sapiens
  misc_RNA (1)...(19): siRNA sense strand
guuggaaugccuuuucuua

SEQ ID NO: 882872 - RNA, 19 nt, Homo sapiens
  misc_RNA (1)...(19): siRNA sense strand
uaugggaaacacucugaaa

SEQ ID NO: 882873 - RNA, 19 nt, Homo sapiens
  misc_RNA (1)...(19): siRNA sense strand
ugagaaggaaaucaacaau

SEQ ID NO: 882874 - RNA, 19 nt, Homo sapiens
  misc_RNA (1)...(19): siRNA sense strand
ggccuucuauguggguuau

SEQ ID NO: 882875 - RNA, 19 nt, Homo sapiens
  misc_RNA (1)...(19): siRNA sense strand
ggucaucaaauuuaaagac

SEQ ID NO: 882876 - RNA, 19 nt, Homo sapiens
  misc_RNA (1)...(19): siRNA sense strand
ccucauuguauucacuaua

SEQ ID NO: 882877 - RNA, 19 nt, Homo sapiens
  misc_RNA (1)...(19): siRNA sense strand
uguaaccaauuugccugua

SEQ ID NO: 882878 - RNA, 19 nt, Homo sapiens
  misc_RNA (1)...(19): siRNA sense strand
cuggauacuuguaaccaau

SEQ ID NO: 882879 - RNA, 19 nt, Homo sapiens
  misc_RNA (1)...(19): siRNA sense strand
ugggaaacacucugaaauc

SEQ ID NO: 882880 - RNA, 19 nt, Homo sapiens
  misc_RNA (1)...(19): siRNA sense strand
aagaagagcgacugagaag

SEQ ID NO: 882881 - RNA, 19 nt, Homo sapiens
  misc_RNA (1)...(19): siRNA sense strand
uggcaacauccucauugua

SEQ ID NO: 882882 - RNA, 19 nt, Homo sapiens
  misc_RNA (1)...(19): siRNA sense strand
ugauuugguccacauaguu

SEQ ID NO: 882883 - RNA, 19 nt, Homo sapiens
  misc_RNA (1)...(19): siRNA sense strand
gaacuuacagauggaacag

SEQ ID NO: 882884 - RNA, 19 nt, Homo sapiens
  misc_RNA (1)...(19): siRNA sense strand
uguaucaacagaauaagga

SEQ ID NO: 882885 - RNA, 19 nt, Homo sapiens
  misc_RNA (1)...(19): siRNA sense strand
uugggcagcuuccuuuauc

SEQ ID NO: 882886 - RNA, 19 nt, Homo sapiens
  misc_RNA (1)...(19): siRNA sense strand
aagaccauccggaucaauu

SEQ ID NO: 882887 - RNA, 19 nt, Homo sapiens
  misc_RNA (1)...(19): siRNA sense strand
ggaaacacucugaaaucac

SEQ ID NO: 882888 - RNA, 19 nt, Homo sapiens
  misc_RNA (1)...(19): siRNA sense strand
gauugggauuaucuguuca

SEQ ID NO: 882889 - RNA, 19 nt, Homo sapiens
  misc_RNA (1)...(19): siRNA sense strand
aaggaaaucaacaauaugg

SEQ ID NO: 882890 - RNA, 19 nt, Homo sapiens
  misc_RNA (1)...(19): siRNA sense strand
cuccaucugucucagcuau

SEQ ID NO: 882891 - RNA, 19 nt, Homo sapiens
  misc_RNA (1)...(19): siRNA sense strand
gaagauaccuuuauagaga

SEQ ID NO: 882892 - RNA, 19 nt, Homo sapiens
  misc_RNA (1)...(19): siRNA sense strand
gagaagagcauguuuauga

SEQ ID NO: 882893 - RNA, 19 nt, Homo sapiens
  misc_RNA (1)...(19): siRNA sense strand
gauggaagauaccuuuaua

SEQ ID NO: 882894 - RNA, 19 nt, Homo sapiens
  misc_RNA (1)...(19): siRNA sense strand
gcaauggaauuucauaaug

SEQ ID NO: 882895 - RNA, 19 nt, Homo sapiens
  misc_RNA (1)...(19): siRNA sense strand
uaaauggacucguaagaaa

SEQ ID NO: 882896 - RNA, 19 nt, Homo sapiens
  misc_RNA (1)...(19): siRNA sense strand
cuaaauaaauggacucgua

SEQ ID NO: 882897 - RNA, 19 nt, Homo sapiens
  misc_RNA (1)...(19): siRNA sense strand
ggaaggguguuuaaacuau

SEQ ID NO: 882898 - RNA, 19 nt, Homo sapiens
  misc_RNA (1)...(19): siRNA sense strand
ggaaguggaucacgggaaa

SEQ ID NO: 882899 - RNA, 19 nt, Homo sapiens
  misc_RNA (1)...(19): siRNA sense strand
caacguauguuuacuguag

SEQ ID NO: 882900 - RNA, 19 nt, Homo sapiens
  misc_RNA (1)...(19): siRNA sense strand
agaauaggcugcaaacuug

SEQ ID NO: 882901 - RNA, 19 nt, Homo sapiens
  misc_RNA (1)...(19): siRNA sense strand
gaacacgucuucagaacca

SEQ ID NO: 882902 - RNA, 19 nt, Homo sapiens
  misc_RNA (1)...(19): siRNA sense strand
gcugcaaacuugucuauug

SEQ ID NO: 882903 - RNA, 19 nt, Homo sapiens
  misc_RNA (1)...(19): siRNA sense strand
guagaagccuaugauauug

SEQ ID NO: 882904 - RNA, 19 nt, Homo sapiens
  misc_RNA (1)...(19): siRNA sense strand
gcaaucagcccuuacuuca

SEQ ID NO: 882905 - RNA, 19 nt, Homo sapiens
  misc_RNA (1)...(19): siRNA sense strand
caaaugaccugagagaagu

SEQ ID NO: 882906 - RNA, 19 nt, Homo sapiens
  misc_RNA (1)...(19): siRNA sense strand
gaaggacaguugacagaca

SEQ ID NO: 882907 - RNA, 19 nt, Homo sapiens
  misc_RNA (1)...(19): siRNA sense strand
ugaaugugcuguugcuaaa

SEQ ID NO: 882908 - RNA, 19 nt, Homo sapiens
  misc_RNA (1)...(19): siRNA sense strand
gcagugaggucuccaucga

SEQ ID NO: 882909 - RNA, 19 nt, Homo sapiens
  misc_RNA (1)...(19): siRNA sense strand
cuaaguauaugaucaguca

SEQ ID NO: 882910 - RNA, 19 nt, Homo sapiens
  misc_RNA (1)...(19): siRNA sense strand
gaaguugggauucuuguau

SEQ ID NO: 882911 - RNA, 19 nt, Homo sapiens
  misc_RNA (1)...(19): siRNA sense strand
uaaggugguuugagcauga

SEQ ID NO: 882912 - RNA, 19 nt, Homo sapiens
  misc_RNA (1)...(19): siRNA sense strand
gaagagcauguuuaugaaa

SEQ ID NO: 882913 - RNA, 19 nt, Homo sapiens
  misc_RNA (1)...(19): siRNA sense strand
gaaggguguuuaaacuaug

SEQ ID NO: 882914 - RNA, 19 nt, Homo sapiens
  misc_RNA (1)...(19): siRNA sense strand
aaucggaggucguguuuau

SEQ ID NO: 882915 - RNA, 19 nt, Homo sapiens
  misc_RNA (1)...(19): siRNA sense strand
ccagaacaaacuccauuua

SEQ ID NO: 882916 - RNA, 19 nt, Homo sapiens
  misc_RNA (1)...(19): siRNA sense strand
ccuaugauauugagcuaaa

SEQ ID NO: 882917 - RNA, 19 nt, Homo sapiens
  misc_RNA (1)...(19): siRNA sense strand
aaucagcccuuacuucaga

SEQ ID NO: 882918 - RNA, 19 nt, Homo sapiens
  misc_RNA (1)...(19): siRNA sense strand
uguagaagccuaugauauu

SEQ ID NO: 882919 - RNA, 19 nt, Homo sapiens
  misc_RNA (1)...(19): siRNA sense strand
cagaauaggcugcaaacuu

SEQ ID NO: 882920 - RNA, 19 nt, Homo sapiens
  misc_RNA (1)...(19): siRNA sense strand
uaugaucauuccaccaaua

SEQ ID NO: 882921 - RNA, 19 nt, Homo sapiens
  misc_RNA (1)...(19): siRNA sense strand
cagugacgauuuaaaugua

SEQ ID NO: 882922 - RNA, 19 nt, Homo sapiens
  misc_RNA (1)...(19): siRNA sense strand
ucgaauaguugguguugaa

SEQ ID NO: 882923 - RNA, 19 nt, Homo sapiens
  misc_RNA (1)...(19): siRNA sense strand
ggaaugacugcuucugaaa

SEQ ID NO: 882924 - RNA, 19 nt, Homo sapiens
  misc_RNA (1)...(19): siRNA sense strand
uaaguauacuagacaguga

SEQ ID NO: 882925 - RNA, 19 nt, Homo sapiens
  misc_RNA (1)...(19): siRNA sense strand
caccaaagaacaagaguuu

SEQ ID NO: 882926 - RNA, 19 nt, Homo sapiens
  misc_RNA (1)...(19): siRNA sense strand
ccauaaauccauaccuuaa

SEQ ID NO: 882927 - RNA, 19 nt, Homo sapiens
  misc_RNA (1)...(19): siRNA sense strand
acaaagagaagaucuaugu

SEQ ID NO: 882928 - RNA, 19 nt, Homo sapiens
  misc_RNA (1)...(19): siRNA sense strand
acuagacagugacgauuua

SEQ ID NO: 882929 - RNA, 19 nt, Homo sapiens
  misc_RNA (1)...(19): siRNA sense strand
gagcaugaacagaaugaaa

SEQ ID NO: 882930 - RNA, 19 nt, Homo sapiens
  misc_RNA (1)...(19): siRNA sense strand
gcaaucggaggucguguuu

SEQ ID NO: 882931 - RNA, 19 nt, Homo sapiens
  misc_RNA (1)...(19): siRNA sense strand
agaccaaugugcuaaguau

SEQ ID NO: 882932 - RNA, 19 nt, Homo sapiens
  misc_RNA (1)...(19): siRNA sense strand
gggagaaacucacuaaaau

SEQ ID NO: 882933 - RNA, 19 nt, Homo sapiens
  misc_RNA (1)...(19): siRNA sense strand
agaagagcauguuuaugaa

SEQ ID NO: 882934 - RNA, 19 nt, Homo sapiens
  misc_RNA (1)...(19): siRNA sense strand
caacugauaaguauacuag

SEQ ID NO: 882935 - RNA, 19 nt, Homo sapiens
  misc_RNA (1)...(19): siRNA sense strand
gacaaaagaccaacugaua

SEQ ID NO: 882936 - RNA, 19 nt, Homo sapiens
  misc_RNA (1)...(19): siRNA sense strand
ggagaucgaucaaaagaau

SEQ ID NO: 882937 - RNA, 19 nt, Homo sapiens
  misc_RNA (1)...(19): siRNA sense strand
ccagaguuauucuuacaga

SEQ ID NO: 882938 - RNA, 19 nt, Homo sapiens
  misc_RNA (1)...(19): siRNA sense strand
gaugggagaaacucacuaa

SEQ ID NO: 882939 - RNA, 19 nt, Homo sapiens
  misc_RNA (1)...(19): siRNA sense strand
cacaaacacucaggaaaga

SEQ ID NO: 882940 - RNA, 19 nt, Homo sapiens
  misc_RNA (1)...(19): siRNA sense strand
acacagaggcuuggaauga

SEQ ID NO: 882941 - RNA, 19 nt, Homo sapiens
  misc_RNA (1)...(19): siRNA sense strand
gcauguuuaugaaagcauu

SEQ ID NO: 882942 - RNA, 19 nt, Homo sapiens
  misc_RNA (1)...(19): siRNA sense strand
ggaaaucaucaacguaugu

SEQ ID NO: 882943 - RNA, 19 nt, Homo sapiens
  misc_RNA (1)...(19): siRNA sense strand
caaggacucuaucuacuac

SEQ ID NO: 882944 - RNA, 19 nt, Homo sapiens
  misc_RNA (1)...(19): siRNA sense strand
ucagauccauguucacuag

SEQ ID NO: 882945 - RNA, 19 nt, Homo sapiens
  misc_RNA (1)...(19): siRNA sense strand
guccauaaauccauaccuu

SEQ ID NO: 882946 - RNA, 19 nt, Homo sapiens
  misc_RNA (1)...(19): siRNA sense strand
gcaguauucuuaagcaacu

SEQ ID NO: 882947 - RNA, 19 nt, Homo sapiens
  misc_RNA (1)...(19): siRNA sense strand
gcaaacagugccuugucua

SEQ ID NO: 882948 - RNA, 19 nt, Homo sapiens
  misc_RNA (1)...(19): siRNA sense strand
ugaacagaaugaaagagaa

SEQ ID NO: 882949 - RNA, 19 nt, Homo sapiens
  misc_RNA (1)...(19): siRNA sense strand
ccagauuccuuccauccaa

SEQ ID NO: 882950 - RNA, 19 nt, Homo sapiens
  misc_RNA (1)...(19): siRNA sense strand
gccuacacuuccagaguua

SEQ ID NO: 882951 - RNA, 19 nt, Homo sapiens
  misc_RNA (1)...(19): siRNA sense strand
gcuggaaccuguggaaauc

SEQ ID NO: 882952 - RNA, 19 nt, Homo sapiens
  misc_RNA (1)...(19): siRNA sense strand
gggcuuagcagcuguauac

SEQ ID NO: 882953 - RNA, 19 nt, Homo sapiens
  misc_RNA (1)...(19): siRNA sense strand
guacaaagagaagaucuau

SEQ ID NO: 882954 - RNA, 19 nt, Homo sapiens
  misc_RNA (1)...(19): siRNA sense strand
uaaaaucuguugagugcua

SEQ ID NO: 882955 - RNA, 19 nt, Homo sapiens
  misc_RNA (1)...(19): siRNA sense strand
aaagaccaacugauaagua

SEQ ID NO: 882956 - RNA, 19 nt, Homo sapiens
  misc_RNA (1)...(19): siRNA sense strand
aacaagaguuucuccaguu

SEQ ID NO: 882957 - RNA, 19 nt, Homo sapiens
  misc_RNA (1)...(19): siRNA sense strand
uggaaugacugcuucugaa

SEQ ID NO: 882958 - RNA, 19 nt, Homo sapiens
  misc_RNA (1)...(19): siRNA sense strand
caacaccaauggcuguaca

SEQ ID NO: 882959 - RNA, 19 nt, Homo sapiens
  misc_RNA (1)...(19): siRNA sense strand
gccaaaagcuguguagaaa

SEQ ID NO: 882960 - RNA, 19 nt, Homo sapiens
  misc_RNA (1)...(19): siRNA sense strand
gaaaauuccaccucaguuu

SEQ ID NO: 882961 - RNA, 19 nt, Homo sapiens
  misc_RNA (1)...(19): siRNA sense strand
ggaagauaccuuuauagag

SEQ ID NO: 882962 - RNA, 19 nt, Homo sapiens
  misc_RNA (1)...(19): siRNA sense strand
gaacagaaugaaagagaag

SEQ ID NO: 882963 - RNA, 19 nt, Homo sapiens
  misc_RNA (1)...(19): siRNA sense strand
gacagacauuguaguggaa

SEQ ID NO: 882964 - RNA, 19 nt, Homo sapiens
  misc_RNA (1)...(19): siRNA sense strand
cagaacaaacuccauuuau

SEQ ID NO: 882965 - RNA, 19 nt, Homo sapiens
  misc_RNA (1)...(19): siRNA sense strand
gaaaucaucaacguauguu

SEQ ID NO: 882966 - RNA, 19 nt, Homo sapiens
  misc_RNA (1)...(19): siRNA sense strand
caauggaauuucauaaugc

SEQ ID NO: 882967 - RNA, 19 nt, Homo sapiens
  misc_RNA (1)...(19): siRNA sense strand
gaaacucacuaaaaucugu

SEQ ID NO: 882968 - RNA, 19 nt, Homo sapiens
  misc_RNA (1)...(19): siRNA sense strand
ccaaaugaccugagagaag

SEQ ID NO: 882969 - RNA, 19 nt, Homo sapiens
  misc_RNA (1)...(19): siRNA sense strand
ucacaggaaggguguuuaa

SEQ ID NO: 882970 - RNA, 19 nt, Homo sapiens
  misc_RNA (1)...(19): siRNA sense strand
acagugccuugucuagaua

SEQ ID NO: 882971 - RNA, 19 nt, Homo sapiens
  misc_RNA (1)...(19): siRNA sense strand
aagaccaacugauaaguau

SEQ ID NO: 882972 - RNA, 19 nt, Homo sapiens
  misc_RNA (1)...(19): siRNA sense strand
ccaaugugcuaaguauaug

SEQ ID NO: 882973 - RNA, 19 nt, Homo sapiens
  misc_RNA (1)...(19): siRNA sense strand
caggaaggguguuuaaacu

SEQ ID NO: 882974 - RNA, 19 nt, Homo sapiens
  misc_RNA (1)...(19): siRNA sense strand
ccacaaacacucaggaaag

SEQ ID NO: 882975 - RNA, 19 nt, Homo sapiens
  misc_RNA (1)...(19): siRNA sense strand
cuucugaaaugaucauaug

SEQ ID NO: 882976 - RNA, 19 nt, Homo sapiens
  misc_RNA (1)...(19): siRNA sense strand
acaagaguuucuccaguug

SEQ ID NO: 882977 - RNA, 19 nt, Homo sapiens
  misc_RNA (1)...(19): siRNA sense strand
ucaaaacaauguacgauga

SEQ ID NO: 882978 - RNA, 19 nt, Homo sapiens
  misc_RNA (1)...(19): siRNA sense strand
ggacucuaucuacuacaua

SEQ ID NO: 882979 - RNA, 19 nt, Homo sapiens
  misc_RNA (1)...(19): siRNA sense strand
gaugccaguugcaauggaa

SEQ ID NO: 882980 - RNA, 19 nt, Homo sapiens
  misc_RNA (1)...(19): siRNA sense strand
gaaugacugcuucugaaau

SEQ ID NO: 882981 - RNA, 19 nt, Homo sapiens
  misc_RNA (1)...(19): siRNA sense strand
caaaagcuguguagaaaag

SEQ ID NO: 882982 - RNA, 19 nt, Homo sapiens
  misc_RNA (1)...(19): siRNA sense strand
aaugacugcuucugaaaug

SEQ ID NO: 882983 - RNA, 19 nt, Homo sapiens
  misc_RNA (1)...(19): siRNA sense strand
caugugaucaguccauaaa

SEQ ID NO: 882984 - RNA, 19 nt, Homo sapiens
  misc_RNA (1)...(19): siRNA sense strand
gaucauuccaccaauagau

SEQ ID NO: 882985 - RNA, 19 nt, Homo sapiens
  misc_RNA (1)...(19): siRNA sense strand
uuacagaggccaauguuca

SEQ ID NO: 882986 - RNA, 19 nt, Homo sapiens
  misc_RNA (1)...(19): siRNA sense strand
acaaggacucuaucuacua

SEQ ID NO: 882987 - RNA, 19 nt, Homo sapiens
  misc_RNA (1)...(19): siRNA sense strand
uagcagcuguauacaagga

SEQ ID NO: 882988 - RNA, 19 nt, Homo sapiens
  misc_RNA (1)...(19): siRNA sense strand
gaagaucuauguuuuacag

SEQ ID NO: 882989 - RNA, 19 nt, Homo sapiens
  misc_RNA (1)...(19): siRNA sense strand
gguuugagcaugaacagaa

SEQ ID NO: 882990 - RNA, 19 nt, Homo sapiens
  misc_RNA (1)...(19): siRNA sense strand
cuuagcagcuguauacaag

SEQ ID NO: 882991 - RNA, 19 nt, Homo sapiens
  misc_RNA (1)...(19): siRNA sense strand
gcucccaccucccaaauua

SEQ ID NO: 882992 - RNA, 19 nt, Homo sapiens
  misc_RNA (1)...(19): siRNA sense strand
ucacgaagauaaugaagaa

SEQ ID NO: 882993 - RNA, 19 nt, Homo sapiens
  misc_RNA (1)...(19): siRNA sense strand
gcaaagauuucugucaguu

SEQ ID NO: 882994 - RNA, 19 nt, Homo sapiens
  misc_RNA (1)...(19): siRNA sense strand
gaaauccuguguucuguca

SEQ ID NO: 882995 - RNA, 19 nt, Homo sapiens
  misc_RNA (1)...(19): siRNA sense strand
caauauggcuguggaaguu

SEQ ID NO: 882996 - RNA, 19 nt, Homo sapiens
  misc_RNA (1)...(19): siRNA sense strand
gcacccauguuucgaaaga

SEQ ID NO: 882997 - RNA, 19 nt, Homo sapiens
  misc_RNA (1)...(19): siRNA sense strand
guaaauuccucaucuaugc

SEQ ID NO: 882998 - RNA, 19 nt, Homo sapiens
  misc_RNA (1)...(19): siRNA sense strand
cgaguaaauuccucaucua

SEQ ID NO: 882999 - RNA, 19 nt, Homo sapiens
  misc_RNA (1)...(19): siRNA sense strand
ggcacgaaauccucaauau

SEQ ID NO: 883000 - RNA, 19 nt, Homo sapiens
  misc_RNA (1)...(19): siRNA sense strand
aaagauuucugucaguuuc

SEQ ID NO: 883001 - RNA, 19 nt, Homo sapiens
  misc_RNA (1)...(19): siRNA sense strand
acgagaauauggaaacauu

SEQ ID NO: 883002 - RNA, 19 nt, Homo sapiens
  misc_RNA (1)...(19): siRNA sense strand
ugucaacauucuccaguuu

SEQ ID NO: 883003 - RNA, 19 nt, Homo sapiens
  misc_RNA (1)...(19): siRNA sense strand
ucaacauucuccaguuuau

SEQ ID NO: 883004 - RNA, 19 nt, Homo sapiens
  misc_RNA (1)...(19): siRNA sense strand
gcacgaaauccucaauauc

SEQ ID NO: 883005 - RNA, 19 nt, Homo sapiens
  misc_RNA (1)...(19): siRNA sense strand
ccaccucccaaauuaaaua

SEQ ID NO: 883006 - RNA, 19 nt, Homo sapiens
  misc_RNA (1)...(19): siRNA sense strand
gcaaccacauuuggacaga

SEQ ID NO: 883007 - RNA, 19 nt, Homo sapiens
  misc_RNA (1)...(19): siRNA sense strand
gcugauggcaaccacauuu

SEQ ID NO: 883008 - RNA, 19 nt, Homo sapiens
  misc_RNA (1)...(19): siRNA sense strand
auaucgaaaugccagauua

SEQ ID NO: 883009 - RNA, 19 nt, Homo sapiens
  misc_RNA (1)...(19): siRNA sense strand
caaagauuucugucaguuu

SEQ ID NO: 883010 - RNA, 19 nt, Homo sapiens
  misc_RNA (1)...(19): siRNA sense strand
uaaaaucgcacccauguuu

SEQ ID NO: 883011 - RNA, 19 nt, Homo sapiens
  misc_RNA (1)...(19): siRNA sense strand
gaguaaauuccucaucuau

SEQ ID NO: 883012 - RNA, 19 nt, Homo sapiens
  misc_RNA (1)...(19): siRNA sense strand
gagcagcgcaggacacaca

SEQ ID NO: 883013 - RNA, 19 nt, Homo sapiens
  misc_RNA (1)...(19): siRNA sense strand
caacauucuccaguuuaua

SEQ ID NO: 883014 - RNA, 19 nt, Homo sapiens
  misc_RNA (1)...(19): siRNA sense strand
caaacuggauggccacaac

SEQ ID NO: 883015 - RNA, 19 nt, Homo sapiens
  misc_RNA (1)...(19): siRNA sense strand
gagaaacguguguggaguu

SEQ ID NO: 883016 - RNA, 19 nt, Homo sapiens
  misc_RNA (1)...(19): siRNA sense strand
gggcacgaaauccucaaua

SEQ ID NO: 883017 - RNA, 19 nt, Homo sapiens
  misc_RNA (1)...(19): siRNA sense strand
ugucuuugcuccaauaugg

SEQ ID NO: 883018 - RNA, 19 nt, Homo sapiens
  misc_RNA (1)...(19): siRNA sense strand
ccgaguaaauuccucaucu

SEQ ID NO: 883019 - RNA, 19 nt, Homo sapiens
  misc_RNA (1)...(19): siRNA sense strand
acaggucacuagaguuaga

SEQ ID NO: 883020 - RNA, 19 nt, Homo sapiens
  misc_RNA (1)...(19): siRNA sense strand
ggacuucaacccgaguaaa

SEQ ID NO: 883021 - RNA, 19 nt, Homo sapiens
  misc_RNA (1)...(19): siRNA sense strand
cagcgcaggacacacauaa

SEQ ID NO: 883022 - RNA, 19 nt, Homo sapiens
  misc_RNA (1)...(19): siRNA sense strand
ccuuaagacuggacaagau

SEQ ID NO: 883023 - RNA, 19 nt, Homo sapiens
  misc_RNA (1)...(19): siRNA sense strand
uugaaguucuggucuguga

SEQ ID NO: 883024 - RNA, 19 nt, Homo sapiens
  misc_RNA (1)...(19): siRNA sense strand
ucaugccgcuguucuuugu

SEQ ID NO: 883025 - RNA, 19 nt, Homo sapiens
  misc_RNA (1)...(19): siRNA sense strand
gaaguucuggucugugaca

SEQ ID NO: 883026 - RNA, 19 nt, Homo sapiens
  misc_RNA (1)...(19): siRNA sense strand
gacagaaucgagagaggaa

SEQ ID NO: 883027 - RNA, 19 nt, Homo sapiens
  misc_RNA (1)...(19): siRNA sense strand
uuaaagccauguugauugc

SEQ ID NO: 883028 - RNA, 19 nt, Homo sapiens
  misc_RNA (1)...(19): siRNA sense strand
caaccacauuuggacagaa

SEQ ID NO: 883029 - RNA, 19 nt, Homo sapiens
  misc_RNA (1)...(19): siRNA sense strand
gucaacauucuccaguuua

SEQ ID NO: 883030 - RNA, 19 nt, Homo sapiens
  misc_RNA (1)...(19): siRNA sense strand
guuuaaagccauguugauu

SEQ ID NO: 883031 - RNA, 19 nt, Homo sapiens
  misc_RNA (1)...(19): siRNA sense strand
ggcugucuuugcuccaaua

SEQ ID NO: 883032 - RNA, 19 nt, Homo sapiens
  misc_RNA (1)...(19): siRNA sense strand
cgagagaggaagccauuuc

SEQ ID NO: 883033 - RNA, 19 nt, Homo sapiens
  misc_RNA (1)...(19): siRNA sense strand
gcauccacuugcucuuguu

SEQ ID NO: 883034 - RNA, 19 nt, Homo sapiens
  misc_RNA (1)...(19): siRNA sense strand
gaguuuaaagccauguuga

SEQ ID NO: 883035 - RNA, 19 nt, Homo sapiens
  misc_RNA (1)...(19): siRNA sense strand
ggaguuuaaagccauguug

SEQ ID NO: 883036 - RNA, 19 nt, Homo sapiens
  misc_RNA (1)...(19): siRNA sense strand
uuacugggcugucuuugcu

SEQ ID NO: 883037 - RNA, 19 nt, Homo sapiens
  misc_RNA (1)...(19): siRNA sense strand
cuucuuacauuugagauuc

SEQ ID NO: 883038 - RNA, 19 nt, Homo sapiens
  misc_RNA (1)...(19): siRNA sense strand
gugguccucuacuacauug

SEQ ID NO: 883039 - RNA, 19 nt, Homo sapiens
  misc_RNA (1)...(19): siRNA sense strand
ggcauccacuugcucuugu

SEQ ID NO: 883040 - RNA, 19 nt, Homo sapiens
  misc_RNA (1)...(19): siRNA sense strand
aguuagaaauccuguguuc

SEQ ID NO: 883041 - RNA, 19 nt, Homo sapiens
  misc_RNA (1)...(19): siRNA sense strand
gacuucaacccgaguaaau

SEQ ID NO: 883042 - RNA, 19 nt, Homo sapiens
  misc_RNA (1)...(19): siRNA sense strand
ucgcacccauguuucgaaa

SEQ ID NO: 883043 - RNA, 19 nt, Homo sapiens
  misc_RNA (1)...(19): siRNA sense strand
cgagaauauggaaacauuu

SEQ ID NO: 883044 - RNA, 19 nt, Homo sapiens
  misc_RNA (1)...(19): siRNA sense strand
guuggagccucaguuggaa

SEQ ID NO: 883045 - RNA, 19 nt, Homo sapiens
  misc_RNA (1)...(19): siRNA sense strand
gauggcaaccacauuugga

SEQ ID NO: 883046 - RNA, 19 nt, Homo sapiens
  misc_RNA (1)...(19): siRNA sense strand
gcaggacacacauaaccau

SEQ ID NO: 883047 - RNA, 19 nt, Homo sapiens
  misc_RNA (1)...(19): siRNA sense strand
gagagaggaagccauuucu

SEQ ID NO: 883048 - RNA, 19 nt, Homo sapiens
  misc_RNA (1)...(19): siRNA sense strand
gaguuacugggcugucuuu

SEQ ID NO: 883049 - RNA, 19 nt, Homo sapiens
  misc_RNA (1)...(19): siRNA sense strand
cacuugcucuuguugaugu

SEQ ID NO: 883050 - RNA, 19 nt, Homo sapiens
  misc_RNA (1)...(19): siRNA sense strand
gggcauccacuugcucuug

SEQ ID NO: 883051 - RNA, 19 nt, Homo sapiens
  misc_RNA (1)...(19): siRNA sense strand
cacgaaauccucaauaucg

SEQ ID NO: 883052 - RNA, 19 nt, Homo sapiens
  misc_RNA (1)...(19): siRNA sense strand
uuuaaagccauguugauug

SEQ ID NO: 883053 - RNA, 19 nt, Homo sapiens
  misc_RNA (1)...(19): siRNA sense strand
aaacauuuccuaugaucuc

SEQ ID NO: 883054 - RNA, 19 nt, Homo sapiens
  misc_RNA (1)...(19): siRNA sense strand
ucugucaguuucugcuuga

SEQ ID NO: 883055 - RNA, 19 nt, Homo sapiens
  misc_RNA (1)...(19): siRNA sense strand
auauggcuguggaaguuaa

SEQ ID NO: 883056 - RNA, 19 nt, Homo sapiens
  misc_RNA (1)...(19): siRNA sense strand
gcagcgcaggacacacaua

SEQ ID NO: 883057 - RNA, 19 nt, Homo sapiens
  misc_RNA (1)...(19): siRNA sense strand
cacuggcccuggcuuguug

SEQ ID NO: 883058 - RNA, 19 nt, Homo sapiens
  misc_RNA (1)...(19): siRNA sense strand
gcugcuggcccuucguuug

SEQ ID NO: 883059 - RNA, 19 nt, Homo sapiens
  misc_RNA (1)...(19): siRNA sense strand
gcaucauacaguggaguua

SEQ ID NO: 883060 - RNA, 19 nt, Homo sapiens
  misc_RNA (1)...(19): siRNA sense strand
gccuggugguccucuacua

SEQ ID NO: 883061 - RNA, 19 nt, Homo sapiens
  misc_RNA (1)...(19): siRNA sense strand
acgaaauccucaauaucga

SEQ ID NO: 883062 - RNA, 19 nt, Homo sapiens
  misc_RNA (1)...(19): siRNA sense strand
cuacgagaauauggaaaca

SEQ ID NO: 883063 - RNA, 19 nt, Homo sapiens
  misc_RNA (1)...(19): siRNA sense strand
gcccuggcuuguugugugu

SEQ ID NO: 883064 - RNA, 19 nt, Homo sapiens
  misc_RNA (1)...(19): siRNA sense strand
guugauguuugaaguucug

SEQ ID NO: 883065 - RNA, 19 nt, Homo sapiens
  misc_RNA (1)...(19): siRNA sense strand
ccacuggcccuggcuuguu

SEQ ID NO: 883066 - RNA, 19 nt, Homo sapiens
  misc_RNA (1)...(19): siRNA sense strand
ccaauauggcuguggaagu

SEQ ID NO: 883067 - RNA, 19 nt, Homo sapiens
  misc_RNA (1)...(19): siRNA sense strand
cgaagauaaugaagaaacc

SEQ ID NO: 883068 - RNA, 19 nt, Homo sapiens
  misc_RNA (1)...(19): siRNA sense strand
ggugguccucuacuacauu

SEQ ID NO: 883069 - RNA, 19 nt, Homo sapiens
  misc_RNA (1)...(19): siRNA sense strand
ucacuagaguuagaaaucc

SEQ ID NO: 883070 - RNA, 19 nt, Homo sapiens
  misc_RNA (1)...(19): siRNA sense strand
ccucccaaauuaaauaucg

SEQ ID NO: 883071 - RNA, 19 nt, Homo sapiens
  misc_RNA (1)...(19): siRNA sense strand
ggaguuacugggcugucuu

SEQ ID NO: 883072 - RNA, 19 nt, Homo sapiens
  misc_RNA (1)...(19): siRNA sense strand
ucccaccucccaaauuaaa

SEQ ID NO: 883073 - RNA, 19 nt, Homo sapiens
  misc_RNA (1)...(19): siRNA sense strand
gaaggccaggguggucauu

SEQ ID NO: 883074 - RNA, 19 nt, Homo sapiens
  misc_RNA (1)...(19): siRNA sense strand
cgcaaagauuucugucagu

SEQ ID NO: 883075 - RNA, 19 nt, Homo sapiens
  misc_RNA (1)...(19): siRNA sense strand
agauucugcugguucacaa

SEQ ID NO: 883076 - RNA, 19 nt, Homo sapiens
  misc_RNA (1)...(19): siRNA sense strand
gagauucugcugguucaca

SEQ ID NO: 883077 - RNA, 19 nt, Homo sapiens
  misc_RNA (1)...(19): siRNA sense strand
uguugcagcuugcguuugg

SEQ ID NO: 883078 - RNA, 19 nt, Homo sapiens
  misc_RNA (1)...(19): siRNA sense strand
augccgcuguucuuuguuu

SEQ ID NO: 883079 - RNA, 19 nt, Homo sapiens
  misc_RNA (1)...(19): siRNA sense strand
guuugaaguucuggucugu

SEQ ID NO: 883080 - RNA, 19 nt, Homo sapiens
  misc_RNA (1)...(19): siRNA sense strand
caacagugauguaacuauu

SEQ ID NO: 883081 - RNA, 19 nt, Homo sapiens
  misc_RNA (1)...(19): siRNA sense strand
caacaaugaugacaacuuc

SEQ ID NO: 883082 - RNA, 19 nt, Homo sapiens
  misc_RNA (1)...(19): siRNA sense strand
ucauaagccugggaaguuu

SEQ ID NO: 883083 - RNA, 19 nt, Homo sapiens
  misc_RNA (1)...(19): siRNA sense strand
ggaagucaagagcaaguuu

SEQ ID NO: 883084 - RNA, 19 nt, Homo sapiens
  misc_RNA (1)...(19): siRNA sense strand
cugggaaguuugaagauuu

SEQ ID NO: 883085 - RNA, 19 nt, Homo sapiens
  misc_RNA (1)...(19): siRNA sense strand
ugauguaacuauuggcuau

SEQ ID NO: 883086 - RNA, 19 nt, Homo sapiens
  misc_RNA (1)...(19): siRNA sense strand
ucucagaccuugcgauucu

SEQ ID NO: 883087 - RNA, 19 nt, Homo sapiens
  misc_RNA (1)...(19): siRNA sense strand
gaagucaagagcaaguuug

SEQ ID NO: 883088 - RNA, 19 nt, Homo sapiens
  misc_RNA (1)...(19): siRNA sense strand
ggagagcgaugaggacaac

SEQ ID NO: 883089 - RNA, 19 nt, Homo sapiens
  misc_RNA (1)...(19): siRNA sense strand
guuugaagauuucuacaag

SEQ ID NO: 883090 - RNA, 19 nt, Homo sapiens
  misc_RNA (1)...(19): siRNA sense strand
gaaccgaaguuuucacaag

SEQ ID NO: 883091 - RNA, 19 nt, Homo sapiens
  misc_RNA (1)...(19): siRNA sense strand
gaaguuugaagauuucuac

SEQ ID NO: 883092 - RNA, 19 nt, Homo sapiens
  misc_RNA (1)...(19): siRNA sense strand
gagaccugcugcccaucaa

SEQ ID NO: 883093 - RNA, 19 nt, Homo sapiens
  misc_RNA (1)...(19): siRNA sense strand
gucauaagccugggaaguu

SEQ ID NO: 883094 - RNA, 19 nt, Homo sapiens
  misc_RNA (1)...(19): siRNA sense strand
ccugggaaguuugaagauu

SEQ ID NO: 883095 - RNA, 19 nt, Homo sapiens
  misc_RNA (1)...(19): siRNA sense strand
gcagcgcaguggaagucaa

SEQ ID NO: 883096 - RNA, 19 nt, Homo sapiens
  misc_RNA (1)...(19): siRNA sense strand
ggaaguuugaagauuucua

SEQ ID NO: 883097 - RNA, 19 nt, Homo sapiens
  misc_RNA (1)...(19): siRNA sense strand
caacagccacaaccucauc

SEQ ID NO: 883098 - RNA, 19 nt, Homo sapiens
  misc_RNA (1)...(19): siRNA sense strand
caguggaagucaagagcaa

SEQ ID NO: 883099 - RNA, 19 nt, Homo sapiens
  misc_RNA (1)...(19): siRNA sense strand
ggagaccugcugcccauca

SEQ ID NO: 883100 - RNA, 19 nt, Homo sapiens
  misc_RNA (1)...(19): siRNA sense strand
acagugauguaacuauugg

SEQ ID NO: 883101 - RNA, 19 nt, Homo sapiens
  misc_RNA (1)...(19): siRNA sense strand
ucaacaaugaugacaacuu

SEQ ID NO: 883102 - RNA, 19 nt, Homo sapiens
  misc_RNA (1)...(19): siRNA sense strand
ugggaaguuugaagauuuc

SEQ ID NO: 883103 - RNA, 19 nt, Homo sapiens
  misc_RNA (1)...(19): siRNA sense strand
cuucaucucgcgcauggua

SEQ ID NO: 883104 - RNA, 19 nt, Homo sapiens
  misc_RNA (1)...(19): siRNA sense strand
ccaacagugauguaacuau

SEQ ID NO: 883105 - RNA, 19 nt, Homo sapiens
  misc_RNA (1)...(19): siRNA sense strand
ccaggucacggacaugaug

SEQ ID NO: 883106 - RNA, 19 nt, Homo sapiens
  misc_RNA (1)...(19): siRNA sense strand
guugugcacacccaccaua

SEQ ID NO: 883107 - RNA, 19 nt, Homo sapiens
  misc_RNA (1)...(19): siRNA sense strand
acuauuggcuaugcagaug

SEQ ID NO: 883108 - RNA, 19 nt, Homo sapiens
  misc_RNA (1)...(19): siRNA sense strand
gugcacacccaccauaucu

SEQ ID NO: 883109 - RNA, 19 nt, Homo sapiens
  misc_RNA (1)...(19): siRNA sense strand
ucagggucuucauccagaa

SEQ ID NO: 883110 - RNA, 19 nt, Homo sapiens
  misc_RNA (1)...(19): siRNA sense strand
ggaggugaacggcauugag

SEQ ID NO: 883111 - RNA, 19 nt, Homo sapiens
  misc_RNA (1)...(19): siRNA sense strand
ggcgguuucuagugcaaau

SEQ ID NO: 883112 - RNA, 19 nt, Homo sapiens
  misc_RNA (1)...(19): siRNA sense strand
ggacauggaugacuauaca

SEQ ID NO: 883113 - RNA, 19 nt, Homo sapiens
  misc_RNA (1)...(19): siRNA sense strand
ggacagagaccuuugaaga

SEQ ID NO: 883114 - RNA, 19 nt, Homo sapiens
  misc_RNA (1)...(19): siRNA sense strand
gagauugacucuaaagaug

SEQ ID NO: 883115 - RNA, 19 nt, Homo sapiens
  misc_RNA (1)...(19): siRNA sense strand
caucaucgcuuucccuuug

SEQ ID NO: 883116 - RNA, 19 nt, Homo sapiens
  misc_RNA (1)...(19): siRNA sense strand
ggaaacagcaagagauuga

SEQ ID NO: 883117 - RNA, 19 nt, Homo sapiens
  misc_RNA (1)...(19): siRNA sense strand
gcaccacgaugaugacaau

SEQ ID NO: 883118 - RNA, 19 nt, Homo sapiens
  misc_RNA (1)...(19): siRNA sense strand
gaagaaaacccuuuacuug

SEQ ID NO: 883119 - RNA, 19 nt, Homo sapiens
  misc_RNA (1)...(19): siRNA sense strand
gaagagaagcuuggaguga

SEQ ID NO: 883120 - RNA, 19 nt, Homo sapiens
  misc_RNA (1)...(19): siRNA sense strand
acaaugguguuccaaguuu

SEQ ID NO: 883121 - RNA, 19 nt, Homo sapiens
  misc_RNA (1)...(19): siRNA sense strand
gaaaaugccuuggauugaa

SEQ ID NO: 883122 - RNA, 19 nt, Homo sapiens
  misc_RNA (1)...(19): siRNA sense strand
ccacauaacgaaaggaauu

SEQ ID NO: 883123 - RNA, 19 nt, Homo sapiens
  misc_RNA (1)...(19): siRNA sense strand
ugccuuggauugaauauaa

SEQ ID NO: 883124 - RNA, 19 nt, Homo sapiens
  misc_RNA (1)...(19): siRNA sense strand
caaugguguuccaaguuua

SEQ ID NO: 883125 - RNA, 19 nt, Homo sapiens
  misc_RNA (1)...(19): siRNA sense strand
ccagagcggugaccaagau

SEQ ID NO: 883126 - RNA, 19 nt, Homo sapiens
  misc_RNA (1)...(19): siRNA sense strand
gacacucacucuuugauuc

SEQ ID NO: 883127 - RNA, 19 nt, Homo sapiens
  misc_RNA (1)...(19): siRNA sense strand
ugaucaaccuugccaugua

SEQ ID NO: 883128 - RNA, 19 nt, Homo sapiens
  misc_RNA (1)...(19): siRNA sense strand
acagagaccuuugaagaug

SEQ ID NO: 883129 - RNA, 19 nt, Homo sapiens
  misc_RNA (1)...(19): siRNA sense strand
agaaggacaugcggucuuu

SEQ ID NO: 883130 - RNA, 19 nt, Homo sapiens
  misc_RNA (1)...(19): siRNA sense strand
uaccguaucagaacuauuu

SEQ ID NO: 883131 - RNA, 19 nt, Homo sapiens
  misc_RNA (1)...(19): siRNA sense strand
gaucaaccuugccauguac

SEQ ID NO: 883132 - RNA, 19 nt, Homo sapiens
  misc_RNA (1)...(19): siRNA sense strand
uaauugacuuucuggaaga

SEQ ID NO: 883133 - RNA, 19 nt, Homo sapiens
  misc_RNA (1)...(19): siRNA sense strand
cgaaaggaauugugaaacg

SEQ ID NO: 883134 - RNA, 19 nt, Homo sapiens
  misc_RNA (1)...(19): siRNA sense strand
cagagaccuuugaagauga

SEQ ID NO: 883135 - RNA, 19 nt, Homo sapiens
  misc_RNA (1)...(19): siRNA sense strand
gacaauaccaucuaugagu

SEQ ID NO: 883136 - RNA, 19 nt, Homo sapiens
  misc_RNA (1)...(19): siRNA sense strand
ggacacucacucuuugauu

SEQ ID NO: 883137 - RNA, 19 nt, Homo sapiens
  misc_RNA (1)...(19): siRNA sense strand
guuuaucuccuuucuguuu

SEQ ID NO: 883138 - RNA, 19 nt, Homo sapiens
  misc_RNA (1)...(19): siRNA sense strand
aagagaagcuuggagugaa

SEQ ID NO: 883139 - RNA, 19 nt, Homo sapiens
  misc_RNA (1)...(19): siRNA sense strand
gaagcuuggagugaauuua

SEQ ID NO: 883140 - RNA, 19 nt, Homo sapiens
  misc_RNA (1)...(19): siRNA sense strand
gaagaugagggagcagaaa

SEQ ID NO: 883141 - RNA, 19 nt, Homo sapiens
  misc_RNA (1)...(19): siRNA sense strand
gagcagcgaaggcagcaaa

SEQ ID NO: 883142 - RNA, 19 nt, Homo sapiens
  misc_RNA (1)...(19): siRNA sense strand
gaggauaaggaggaaauuu

SEQ ID NO: 883143 - RNA, 19 nt, Homo sapiens
  misc_RNA (1)...(19): siRNA sense strand
ggauuacggugggaucaug

SEQ ID NO: 883144 - RNA, 19 nt, Homo sapiens
  misc_RNA (1)...(19): siRNA sense strand
ggcccaagcuuuccacucu

SEQ ID NO: 883145 - RNA, 19 nt, Homo sapiens
  misc_RNA (1)...(19): siRNA sense strand
ccacgaacagugcaaguga

SEQ ID NO: 883146 - RNA, 19 nt, Homo sapiens
  misc_RNA (1)...(19): siRNA sense strand
aaguuuaucuccuuucugu

SEQ ID NO: 883147 - RNA, 19 nt, Homo sapiens
  misc_RNA (1)...(19): siRNA sense strand
gacagagaccuuugaagau

SEQ ID NO: 883148 - RNA, 19 nt, Homo sapiens
  misc_RNA (1)...(19): siRNA sense strand
gagaggauaaggaggaaau

SEQ ID NO: 883149 - RNA, 19 nt, Homo sapiens
  misc_RNA (1)...(19): siRNA sense strand
cauaauugacuuucuggaa

SEQ ID NO: 883150 - RNA, 19 nt, Homo sapiens
  misc_RNA (1)...(19): siRNA sense strand
guuccaaguuuaucuccuu

SEQ ID NO: 883151 - RNA, 19 nt, Homo sapiens
  misc_RNA (1)...(19): siRNA sense strand
ugacgccacugucuuugga

SEQ ID NO: 883152 - RNA, 19 nt, Homo sapiens
  misc_RNA (1)...(19): siRNA sense strand
ggacaugcggucuuuagca

SEQ ID NO: 883153 - RNA, 19 nt, Homo sapiens
  misc_RNA (1)...(19): siRNA sense strand
gccaguggguggacaaucu

SEQ ID NO: 883154 - RNA, 19 nt, Homo sapiens
  misc_RNA (1)...(19): siRNA sense strand
ccgaacggcugaucaaagg

SEQ ID NO: 883155 - RNA, 19 nt, Homo sapiens
  misc_RNA (1)...(19): siRNA sense strand
cacgaacuccuggucauua

SEQ ID NO: 883156 - RNA, 19 nt, Homo sapiens
  misc_RNA (1)...(19): siRNA sense strand
cauguacugugagaggaua

SEQ ID NO: 883157 - RNA, 19 nt, Homo sapiens
  misc_RNA (1)...(19): siRNA sense strand
gaaggacaugcggucuuua

SEQ ID NO: 883158 - RNA, 19 nt, Homo sapiens
  misc_RNA (1)...(19): siRNA sense strand
ccaaguuuaucuccuuucu

SEQ ID NO: 883159 - RNA, 19 nt, Homo sapiens
  misc_RNA (1)...(19): siRNA sense strand
ggaagaaaacccuuuacuu

SEQ ID NO: 883160 - RNA, 19 nt, Homo sapiens
  misc_RNA (1)...(19): siRNA sense strand
aagcuuggagugaauuuaa

SEQ ID NO: 883161 - RNA, 19 nt, Homo sapiens
  misc_RNA (1)...(19): siRNA sense strand
ggaaaacucucugcucaag

SEQ ID NO: 883162 - RNA, 19 nt, Homo sapiens
  misc_RNA (1)...(19): siRNA sense strand
ccuuggcccucaugaaaga

SEQ ID NO: 883163 - RNA, 19 nt, Homo sapiens
  misc_RNA (1)...(19): siRNA sense strand
gagaaggacaugcggucuu

SEQ ID NO: 883164 - RNA, 19 nt, Homo sapiens
  misc_RNA (1)...(19): siRNA sense strand
agauuuacaugcugaugga

SEQ ID NO: 883165 - RNA, 19 nt, Homo sapiens
  misc_RNA (1)...(19): siRNA sense strand
uaggaaacagcaagagauu

SEQ ID NO: 883166 - RNA, 19 nt, Homo sapiens
  misc_RNA (1)...(19): siRNA sense strand
ggaaaaugccuuggauuga

SEQ ID NO: 883167 - RNA, 19 nt, Homo sapiens
  misc_RNA (1)...(19): siRNA sense strand
ggaaccagagcaucuccuu

SEQ ID NO: 883168 - RNA, 19 nt, Homo sapiens
  misc_RNA (1)...(19): siRNA sense strand
cgaggaagagauuuacaug

SEQ ID NO: 883169 - RNA, 19 nt, Homo sapiens
  misc_RNA (1)...(19): siRNA sense strand
uaacgaaaggaauugugaa

SEQ ID NO: 883170 - RNA, 19 nt, Homo sapiens
  misc_RNA (1)...(19): siRNA sense strand
agagaagcuuggagugaau

SEQ ID NO: 883171 - RNA, 19 nt, Homo sapiens
  misc_RNA (1)...(19): siRNA sense strand
aggaagagauuuacaugcu

SEQ ID NO: 883172 - RNA, 19 nt, Homo sapiens
  misc_RNA (1)...(19): siRNA sense strand
aaccuuggcccucaugaaa

SEQ ID NO: 883173 - RNA, 19 nt, Homo sapiens
  misc_RNA (1)...(19): siRNA sense strand
ucaaugagacccggaagau

SEQ ID NO: 883174 - RNA, 19 nt, Homo sapiens
  misc_RNA (1)...(19): siRNA sense strand
ggguggacaaucucaauga

SEQ ID NO: 883175 - RNA, 19 nt, Homo sapiens
  misc_RNA (1)...(19): siRNA sense strand
ugacuuaccguaucagaac

SEQ ID NO: 883176 - RNA, 19 nt, Homo sapiens
  misc_RNA (1)...(19): siRNA sense strand
gggaaaaugccuuggauug

SEQ ID NO: 883177 - RNA, 19 nt, Homo sapiens
  misc_RNA (1)...(19): siRNA sense strand
gagaagcuuggagugaauu

SEQ ID NO: 883178 - RNA, 19 nt, Homo sapiens
  misc_RNA (1)...(19): siRNA sense strand
acuggacacucacucuuug

SEQ ID NO: 883179 - RNA, 19 nt, Homo sapiens
  misc_RNA (1)...(19): siRNA sense strand
gugagaggauaaggaggaa

SEQ ID NO: 883180 - RNA, 19 nt, Homo sapiens
  misc_RNA (1)...(19): siRNA sense strand
gaccuuaccagggacaaga

SEQ ID NO: 883181 - RNA, 19 nt, Homo sapiens
  misc_RNA (1)...(19): siRNA sense strand
uggcugacuuaccguauca

SEQ ID NO: 883182 - RNA, 19 nt, Homo sapiens
  misc_RNA (1)...(19): siRNA sense strand
uccgaucccugguggaaga

SEQ ID NO: 883183 - RNA, 19 nt, Homo sapiens
  misc_RNA (1)...(19): siRNA sense strand
ccacgaacuccuggucauu

SEQ ID NO: 883184 - RNA, 19 nt, Homo sapiens
  misc_RNA (1)...(19): siRNA sense strand
ugcaagaccuaacaauggu

SEQ ID NO: 883185 - RNA, 19 nt, Homo sapiens
  misc_RNA (1)...(19): siRNA sense strand
ccagagcaucuccuucuuc

SEQ ID NO: 883186 - RNA, 19 nt, Homo sapiens
  misc_RNA (1)...(19): siRNA sense strand
ggauaaggaggaaauuuug

SEQ ID NO: 883187 - RNA, 19 nt, Homo sapiens
  misc_RNA (1)...(19): siRNA sense strand
ucaaaggugagcugaucaa

SEQ ID NO: 883188 - RNA, 19 nt, Homo sapiens
  misc_RNA (1)...(19): siRNA sense strand
gcccaagcuuuccacucuu

SEQ ID NO: 883189 - RNA, 19 nt, Homo sapiens
  misc_RNA (1)...(19): siRNA sense strand
uuuacaugcugauggagaa

SEQ ID NO: 883190 - RNA, 19 nt, Homo sapiens
  misc_RNA (1)...(19): siRNA sense strand
acucucugcucaagggaaa

SEQ ID NO: 883191 - RNA, 19 nt, Homo sapiens
  misc_RNA (1)...(19): siRNA sense strand
ugacuauacagaccacgaa

SEQ ID NO: 883192 - RNA, 19 nt, Homo sapiens
  misc_RNA (1)...(19): siRNA sense strand
gauugacucuaaagaugcu

SEQ ID NO: 883193 - RNA, 19 nt, Homo sapiens
  misc_RNA (1)...(19): siRNA sense strand
gcugcuggauuuuagcuuu

SEQ ID NO: 883194 - RNA, 19 nt, Homo sapiens
  misc_RNA (1)...(19): siRNA sense strand
gcagggcuuuugggugaua

SEQ ID NO: 883195 - RNA, 19 nt, Homo sapiens
  misc_RNA (1)...(19): siRNA sense strand
gcuauuauuuugcaucagu

SEQ ID NO: 883196 - RNA, 19 nt, Homo sapiens
  misc_RNA (1)...(19): siRNA sense strand
gcuccgaucccugguggaa

SEQ ID NO: 883197 - RNA, 19 nt, Homo sapiens
  misc_RNA (1)...(19): siRNA sense strand
aagaaaacccuuuacuuga

SEQ ID NO: 883198 - RNA, 19 nt, Homo sapiens
  misc_RNA (1)...(19): siRNA sense strand
cugcugagguggguugugu

SEQ ID NO: 883199 - RNA, 19 nt, Homo sapiens
  misc_RNA (1)...(19): siRNA sense strand
uggaggagcacuucuacug

SEQ ID NO: 883200 - RNA, 19 nt, Homo sapiens
  misc_RNA (1)...(19): siRNA sense strand
auaacgaaaggaauuguga

SEQ ID NO: 883201 - RNA, 19 nt, Homo sapiens
  misc_RNA (1)...(19): siRNA sense strand
gacccgaacggcugaucaa

SEQ ID NO: 883202 - RNA, 19 nt, Homo sapiens
  misc_RNA (1)...(19): siRNA sense strand
caaugagacccggaagaug

SEQ ID NO: 883203 - RNA, 19 nt, Homo sapiens
  misc_RNA (1)...(19): siRNA sense strand
gacucuaaagaugcuauua

SEQ ID NO: 883204 - RNA, 19 nt, Homo sapiens
  misc_RNA (1)...(19): siRNA sense strand
cccggaagaugcucucucu

SEQ ID NO: 883205 - RNA, 19 nt, Homo sapiens
  misc_RNA (1)...(19): siRNA sense strand
gccuuggauugaauauaau

SEQ ID NO: 883206 - RNA, 19 nt, Homo sapiens
  misc_RNA (1)...(19): siRNA sense strand
ugaagaugagggagcagaa

SEQ ID NO: 883207 - RNA, 19 nt, Homo sapiens
  misc_RNA (1)...(19): siRNA sense strand
uugcaagaccuaacaaugg

SEQ ID NO: 883208 - RNA, 19 nt, Homo sapiens
  misc_RNA (1)...(19): siRNA sense strand
acaccccgcugcuggauuu

SEQ ID NO: 883209 - RNA, 19 nt, Homo sapiens
  misc_RNA (1)...(19): siRNA sense strand
ccacgaugaugacaauacc

SEQ ID NO: 883210 - RNA, 19 nt, Homo sapiens
  misc_RNA (1)...(19): siRNA sense strand
aacgaaaggaauugugaaa

SEQ ID NO: 883211 - RNA, 19 nt, Homo sapiens
  misc_RNA (1)...(19): siRNA sense strand
uggaugagcuggaguauga

SEQ ID NO: 883212 - RNA, 19 nt, Homo sapiens
  misc_RNA (1)...(19): siRNA sense strand
caacagcauugcagccaaa

SEQ ID NO: 883213 - RNA, 19 nt, Homo sapiens
  misc_RNA (1)...(19): siRNA sense strand
gaagagaacaccaacaucu

SEQ ID NO: 883214 - RNA, 19 nt, Homo sapiens
  misc_RNA (1)...(19): siRNA sense strand
cuacaacccucuucucuca

SEQ ID NO: 883215 - RNA, 19 nt, Homo sapiens
  misc_RNA (1)...(19): siRNA sense strand
ugaagaagcggaacaagaa

SEQ ID NO: 883216 - RNA, 19 nt, Homo sapiens
  misc_RNA (1)...(19): siRNA sense strand
gaggagcaguacaaaguga

SEQ ID NO: 883217 - RNA, 19 nt, Homo sapiens
  misc_RNA (1)...(19): siRNA sense strand
acaagaagauccuggacaa

SEQ ID NO: 883218 - RNA, 19 nt, Homo sapiens
  misc_RNA (1)...(19): siRNA sense strand
gggaugacuuccuggauga

SEQ ID NO: 883219 - RNA, 19 nt, Homo sapiens
  misc_RNA (1)...(19): siRNA sense strand
gacaucaccuucgagcaua

SEQ ID NO: 883220 - RNA, 19 nt, Homo sapiens
  misc_RNA (1)...(19): siRNA sense strand
gaccgcaucauccagauua

SEQ ID NO: 883221 - RNA, 19 nt, Homo sapiens
  misc_RNA (1)...(19): siRNA sense strand
uaaggcaccuggaauucaa

SEQ ID NO: 883222 - RNA, 19 nt, Homo sapiens
  misc_RNA (1)...(19): siRNA sense strand
caaucagccaugaguauua

SEQ ID NO: 883223 - RNA, 19 nt, Homo sapiens
  misc_RNA (1)...(19): siRNA sense strand
gaauucaagugccgcaaca

SEQ ID NO: 883224 - RNA, 19 nt, Homo sapiens
  misc_RNA (1)...(19): siRNA sense strand
aggaggaccugggcauuua

SEQ ID NO: 883225 - RNA, 19 nt, Homo sapiens
  misc_RNA (1)...(19): siRNA sense strand
guaaaucccaacagcauug

SEQ ID NO: 883226 - RNA, 19 nt, Homo sapiens
  misc_RNA (1)...(19): siRNA sense strand
gaaagcccgugcccugaag

SEQ ID NO: 883227 - RNA, 19 nt, Homo sapiens
  misc_RNA (1)...(19): siRNA sense strand
gagaucggcugcugaaagc

SEQ ID NO: 883228 - RNA, 19 nt, Homo sapiens
  misc_RNA (1)...(19): siRNA sense strand
gaggaggaccugggcauuu

SEQ ID NO: 883229 - RNA, 19 nt, Homo sapiens
  misc_RNA (1)...(19): siRNA sense strand
ucacggaugaggaguauga

SEQ ID NO: 883230 - RNA, 19 nt, Homo sapiens
  misc_RNA (1)...(19): siRNA sense strand
gaggagcgcagcgguauga

SEQ ID NO: 883231 - RNA, 19 nt, Homo sapiens
  misc_RNA (1)...(19): siRNA sense strand
gccggcaacuccaacuuga

SEQ ID NO: 883232 - RNA, 19 nt, Homo sapiens
  misc_RNA (1)...(19): siRNA sense strand
gcgcaaguuuggccugcaa

SEQ ID NO: 883233 - RNA, 19 nt, Homo sapiens
  misc_RNA (1)...(19): siRNA sense strand
gacuuuggcucugagaaug

SEQ ID NO: 883234 - RNA, 19 nt, Homo sapiens
  misc_RNA (1)...(19): siRNA sense strand
aaucagccaugaguauuau

SEQ ID NO: 883235 - RNA, 19 nt, Homo sapiens
  misc_RNA (1)...(19): siRNA sense strand
gagcuaaggcaccuggaau

SEQ ID NO: 883236 - RNA, 19 nt, Homo sapiens
  misc_RNA (1)...(19): siRNA sense strand
aagcugggccugaugguuu

SEQ ID NO: 883237 - RNA, 19 nt, Homo sapiens
  misc_RNA (1)...(19): siRNA sense strand
ggagguggagcuguauaaa

SEQ ID NO: 883238 - RNA, 19 nt, Homo sapiens
  misc_RNA (1)...(19): siRNA sense strand
cgacaucaccuucgagcau

SEQ ID NO: 883239 - RNA, 19 nt, Homo sapiens
  misc_RNA (1)...(19): siRNA sense strand
ggaagccugcgcaaguuug

SEQ ID NO: 883240 - RNA, 19 nt, Homo sapiens
  misc_RNA (1)...(19): siRNA sense strand
ccaaucagccaugaguauu

SEQ ID NO: 883241 - RNA, 19 nt, Homo sapiens
  misc_RNA (1)...(19): siRNA sense strand
agaagauccuggacaacug

SEQ ID NO: 883242 - RNA, 19 nt, Homo sapiens
  misc_RNA (1)...(19): siRNA sense strand
ccagcuggaccuccucuuu

SEQ ID NO: 883243 - RNA, 19 nt, Homo sapiens
  misc_RNA (1)...(19): siRNA sense strand
ggaagagaacaccaacauc

SEQ ID NO: 883244 - RNA, 19 nt, Homo sapiens
  misc_RNA (1)...(19): siRNA sense strand
ggaggcagaccgcuuggau

SEQ ID NO: 883245 - RNA, 19 nt, Homo sapiens
  misc_RNA (1)...(19): siRNA sense strand
gagccgggacuuccauuuc

SEQ ID NO: 883246 - RNA, 19 nt, Homo sapiens
  misc_RNA (1)...(19): siRNA sense strand
caagcugucucaggagcaa

SEQ ID NO: 883247 - RNA, 19 nt, Homo sapiens
  misc_RNA (1)...(19): siRNA sense strand
gguaaaucccaacagcauu

SEQ ID NO: 883248 - RNA, 19 nt, Homo sapiens
  misc_RNA (1)...(19): siRNA sense strand
ggacaagcugggccugaug

SEQ ID NO: 883249 - RNA, 19 nt, Homo sapiens
  misc_RNA (1)...(19): siRNA sense strand
augaggagguggagcugua

SEQ ID NO: 883250 - RNA, 19 nt, Homo sapiens
  misc_RNA (1)...(19): siRNA sense strand
gggacaagcugggccugau

SEQ ID NO: 883251 - RNA, 19 nt, Homo sapiens
  misc_RNA (1)...(19): siRNA sense strand
gcggugagcgagaugaaga

SEQ ID NO: 883252 - RNA, 19 nt, Homo sapiens
  misc_RNA (1)...(19): siRNA sense strand
cgcauggaguggaaaguga

SEQ ID NO: 883253 - RNA, 19 nt, Homo sapiens
  misc_RNA (1)...(19): siRNA sense strand
cggaggagcaguacaaagu

SEQ ID NO: 883254 - RNA, 19 nt, Homo sapiens
  misc_RNA (1)...(19): siRNA sense strand
ggaggagcaguacaaagug

SEQ ID NO: 883255 - RNA, 19 nt, Homo sapiens
  misc_RNA (1)...(19): siRNA sense strand
cgggaagccugcgcaaguu

SEQ ID NO: 883256 - RNA, 19 nt, Homo sapiens
  misc_RNA (1)...(19): siRNA sense strand
gaagaagcggaacaagaag

SEQ ID NO: 883257 - RNA, 19 nt, Homo sapiens
  misc_RNA (1)...(19): siRNA sense strand
gagcgugugggcccugaaa

SEQ ID NO: 883258 - RNA, 19 nt, Homo sapiens
  misc_RNA (1)...(19): siRNA sense strand
ccagcgagcccaagaagca

SEQ ID NO: 883259 - RNA, 19 nt, Homo sapiens
  misc_RNA (1)...(19): siRNA sense strand
gggaagccugcgcaaguuu

SEQ ID NO: 883260 - RNA, 19 nt, Homo sapiens
  misc_RNA (1)...(19): siRNA sense strand
gaggagguggagcuguaua

SEQ ID NO: 883261 - RNA, 19 nt, Homo sapiens
  misc_RNA (1)...(19): siRNA sense strand
gcaaggaggagcggaagca

SEQ ID NO: 883262 - RNA, 19 nt, Homo sapiens
  misc_RNA (1)...(19): siRNA sense strand
gcuaaggcaccuggaauuc

SEQ ID NO: 883263 - RNA, 19 nt, Homo sapiens
  misc_RNA (1)...(19): siRNA sense strand
ggagcuaaggcaccuggaa

SEQ ID NO: 883264 - RNA, 19 nt, Homo sapiens
  misc_RNA (1)...(19): siRNA sense strand
gcugcgugcucguaaacug

SEQ ID NO: 883265 - RNA, 19 nt, Homo sapiens
  misc_RNA (1)...(19): siRNA sense strand
cgagaucggcugcugaaag

SEQ ID NO: 883266 - RNA, 19 nt, Homo sapiens
  misc_RNA (1)...(19): siRNA sense strand
gcauggaguggaaagugaa

SEQ ID NO: 883267 - RNA, 19 nt, Homo sapiens
  misc_RNA (1)...(19): siRNA sense strand
agaaaccggaggagcagua

SEQ ID NO: 883268 - RNA, 19 nt, Homo sapiens
  misc_RNA (1)...(19): siRNA sense strand
ucaagugccaccuggagaa

SEQ ID NO: 883269 - RNA, 19 nt, Homo sapiens
  misc_RNA (1)...(19): siRNA sense strand
ugacuuccuggaugacuuu

SEQ ID NO: 883270 - RNA, 19 nt, Homo sapiens
  misc_RNA (1)...(19): siRNA sense strand
aggcagaccgcuuggauga

SEQ ID NO: 883271 - RNA, 19 nt, Homo sapiens
  misc_RNA (1)...(19): siRNA sense strand
ugaaagcccgugcccugaa

SEQ ID NO: 883272 - RNA, 19 nt, Homo sapiens
  misc_RNA (1)...(19): siRNA sense strand
ugagggagaccgcaucauc

SEQ ID NO: 883273 - RNA, 19 nt, Homo sapiens
  misc_RNA (1)...(19): siRNA sense strand
gagaccgcaucauccagau

SEQ ID NO: 883274 - RNA, 19 nt, Homo sapiens
  misc_RNA (1)...(19): siRNA sense strand
agaccgacaucaccuucga

SEQ ID NO: 883275 - RNA, 19 nt, Homo sapiens
  misc_RNA (1)...(19): siRNA sense strand
ggaggaccugggcauuuau

SEQ ID NO: 883276 - RNA, 19 nt, Homo sapiens
  misc_RNA (1)...(19): siRNA sense strand
cgagagcacccggaacgaa

SEQ ID NO: 883277 - RNA, 19 nt, Homo sapiens
  misc_RNA (1)...(19): siRNA sense strand
ugacuuuggcucugagaau

SEQ ID NO: 883278 - RNA, 19 nt, Homo sapiens
  misc_RNA (1)...(19): siRNA sense strand
uggaugacuuuggcucuga

SEQ ID NO: 883279 - RNA, 19 nt, Homo sapiens
  misc_RNA (1)...(19): siRNA sense strand
ggagagguaaaucccaaca

SEQ ID NO: 883280 - RNA, 19 nt, Homo sapiens
  misc_RNA (1)...(19): siRNA sense strand
gcuuggaugagcuggagua

SEQ ID NO: 883281 - RNA, 19 nt, Homo sapiens
  misc_RNA (1)...(19): siRNA sense strand
cagcuggaccuccucuuuc

SEQ ID NO: 883282 - RNA, 19 nt, Homo sapiens
  misc_RNA (1)...(19): siRNA sense strand
ggaccugggcauuuauguc

SEQ ID NO: 883283 - RNA, 19 nt, Homo sapiens
  misc_RNA (1)...(19): siRNA sense strand
acaacccucuucucucagu

SEQ ID NO: 883284 - RNA, 19 nt, Homo sapiens
  misc_RNA (1)...(19): siRNA sense strand
gcccugaaagcagcccuua

SEQ ID NO: 883285 - RNA, 19 nt, Homo sapiens
  misc_RNA (1)...(19): siRNA sense strand
ggagcaguacaaagugaug

SEQ ID NO: 883286 - RNA, 19 nt, Homo sapiens
  misc_RNA (1)...(19): siRNA sense strand
gcacucagaccgacaucac

SEQ ID NO: 883287 - RNA, 19 nt, Homo sapiens
  misc_RNA (1)...(19): siRNA sense strand
cauccagauuaacggugua

SEQ ID NO: 883288 - RNA, 19 nt, Homo sapiens
  misc_RNA (1)...(19): siRNA sense strand
auucaagugccgcaacaua

SEQ ID NO: 883289 - RNA, 19 nt, Homo sapiens
  misc_RNA (1)...(19): siRNA sense strand
gcgcauggaguggaaagug

SEQ ID NO: 883290 - RNA, 19 nt, Homo sapiens
  misc_RNA (1)...(19): siRNA sense strand
ucagccaugaguauuauga

SEQ ID NO: 883291 - RNA, 19 nt, Homo sapiens
  misc_RNA (1)...(19): siRNA sense strand
ccagcagcccggaaacgaa

SEQ ID NO: 883292 - RNA, 19 nt, Homo sapiens
  misc_RNA (1)...(19): siRNA sense strand
agccgggacuuccauuuca

SEQ ID NO: 883293 - RNA, 19 nt, Homo sapiens
  misc_RNA (1)...(19): siRNA sense strand
cuaaggcaccuggaauuca

SEQ ID NO: 883294 - RNA, 19 nt, Homo sapiens
  misc_RNA (1)...(19): siRNA sense strand
gagguggagcuguauaaaa

SEQ ID NO: 883295 - RNA, 19 nt, Homo sapiens
  misc_RNA (1)...(19): siRNA sense strand
cccaaucagccaugaguau

SEQ ID NO: 883296 - RNA, 19 nt, Homo sapiens
  misc_RNA (1)...(19): siRNA sense strand
caccagcgccuacaacacu

SEQ ID NO: 883297 - RNA, 19 nt, Homo sapiens
  misc_RNA (1)...(19): siRNA sense strand
gaggaccugggcauuuaug

SEQ ID NO: 883298 - RNA, 19 nt, Homo sapiens
  misc_RNA (1)...(19): siRNA sense strand
gagcauggguguccuagug

SEQ ID NO: 883299 - RNA, 19 nt, Homo sapiens
  misc_RNA (1)...(19): siRNA sense strand
ggaaggggcuggcuggauu

SEQ ID NO: 883300 - RNA, 19 nt, Homo sapiens
  misc_RNA (1)...(19): siRNA sense strand
gagaagucguugagaucuu

SEQ ID NO: 883301 - RNA, 19 nt, Homo sapiens
  misc_RNA (1)...(19): siRNA sense strand
gagaugugauccugguguu

SEQ ID NO: 883302 - RNA, 19 nt, Homo sapiens
  misc_RNA (1)...(19): siRNA sense strand
ggagaagcagcaucuguug

SEQ ID NO: 883303 - RNA, 19 nt, Homo sapiens
  misc_RNA (1)...(19): siRNA sense strand
cugcauaucugggcacuga

SEQ ID NO: 883304 - RNA, 19 nt, Homo sapiens
  misc_RNA (1)...(19): siRNA sense strand
gagcugccuucauccaugu

SEQ ID NO: 883305 - RNA, 19 nt, Homo sapiens
  misc_RNA (1)...(19): siRNA sense strand
caagggcguugacuucaca

SEQ ID NO: 883306 - RNA, 19 nt, Homo sapiens
  misc_RNA (1)...(19): siRNA sense strand
cguccgagcugccuucauc

SEQ ID NO: 883307 - RNA, 19 nt, Homo sapiens
  misc_RNA (1)...(19): siRNA sense strand
gaugugauccugguguuga

SEQ ID NO: 883308 - RNA, 19 nt, Homo sapiens
  misc_RNA (1)...(19): siRNA sense strand
agaagucguugagaucuug

SEQ ID NO: 883309 - RNA, 19 nt, Homo sapiens
  misc_RNA (1)...(19): siRNA sense strand
gaccuggccuggacuugca

SEQ ID NO: 883310 - RNA, 19 nt, Homo sapiens
  misc_RNA (1)...(19): siRNA sense strand
ccauccagaucgaggacua

SEQ ID NO: 883311 - RNA, 19 nt, Homo sapiens
  misc_RNA (1)...(19): siRNA sense strand
gcugugaacaucauaaugg

SEQ ID NO: 883312 - RNA, 19 nt, Homo sapiens
  misc_RNA (1)...(19): siRNA sense strand
ucacugccaugcucagaag

SEQ ID NO: 883313 - RNA, 19 nt, Homo sapiens
  misc_RNA (1)...(19): siRNA sense strand
caugugaucggcgacuuua

SEQ ID NO: 883314 - RNA, 19 nt, Homo sapiens
  misc_RNA (1)...(19): siRNA sense strand
ggacuacucggaggacaug

SEQ ID NO: 883315 - RNA, 19 nt, Homo sapiens
  misc_RNA (1)...(19): siRNA sense strand
caucugcaccuucgucuuc

SEQ ID NO: 883316 - RNA, 19 nt, Homo sapiens
  misc_RNA (1)...(19): siRNA sense strand
ccuaguggcagccuauauu

SEQ ID NO: 883317 - RNA, 19 nt, Homo sapiens
  misc_RNA (1)...(19): siRNA sense strand
ggacaaccuugaccauccu

SEQ ID NO: 883318 - RNA, 19 nt, Homo sapiens
  misc_RNA (1)...(19): siRNA sense strand
ccaaccagcaggaggagaa

SEQ ID NO: 883319 - RNA, 19 nt, Homo sapiens
  misc_RNA (1)...(19): siRNA sense strand
gcagagcauggguguccua

SEQ ID NO: 883320 - RNA, 19 nt, Homo sapiens
  misc_RNA (1)...(19): siRNA sense strand
gaucggagaagucguugag

SEQ ID NO: 883321 - RNA, 19 nt, Homo sapiens
  misc_RNA (1)...(19): siRNA sense strand
cuaguggcagccuauauuu

SEQ ID NO: 883322 - RNA, 19 nt, Homo sapiens
  misc_RNA (1)...(19): siRNA sense strand
ccaaggagaagcagcaucu

SEQ ID NO: 883323 - RNA, 19 nt, Homo sapiens
  misc_RNA (1)...(19): siRNA sense strand
ucggagaagucguugagau

SEQ ID NO: 883324 - RNA, 19 nt, Homo sapiens
  misc_RNA (1)...(19): siRNA sense strand
gcccuggucucuguacugu

SEQ ID NO: 883325 - RNA, 19 nt, Homo sapiens
  misc_RNA (1)...(19): siRNA sense strand
ugggagcccuggucucugu

SEQ ID NO: 883326 - RNA, 19 nt, Homo sapiens
  misc_RNA (1)...(19): siRNA sense strand
ggagaagucguugagaucu

SEQ ID NO: 883327 - RNA, 19 nt, Homo sapiens
  misc_RNA (1)...(19): siRNA sense strand
gcaccuucgucuucuccau

SEQ ID NO: 883328 - RNA, 19 nt, Homo sapiens
  misc_RNA (1)...(19): siRNA sense strand
agaagcagcaucuguugga

SEQ ID NO: 883329 - RNA, 19 nt, Homo sapiens
  misc_RNA (1)...(19): siRNA sense strand
caugaucggagaagucguu

SEQ ID NO: 883330 - RNA, 19 nt, Homo sapiens
  misc_RNA (1)...(19): siRNA sense strand
ccauugcucagaauacaga

SEQ ID NO: 883331 - RNA, 19 nt, Homo sapiens
  misc_RNA (1)...(19): siRNA sense strand
ucaagccagaauacaagua

SEQ ID NO: 883332 - RNA, 19 nt, Homo sapiens
  misc_RNA (1)...(19): siRNA sense strand
ggucauacacgggaucucu

SEQ ID NO: 883333 - RNA, 19 nt, Homo sapiens
  misc_RNA (1)...(19): siRNA sense strand
caucgccauugcucagaau

SEQ ID NO: 883334 - RNA, 19 nt, Homo sapiens
  misc_RNA (1)...(19): siRNA sense strand
ggcccagccuguucugucu

SEQ ID NO: 883335 - RNA, 19 nt, Homo sapiens
  misc_RNA (1)...(19): siRNA sense strand
ccaucugccuguuguucau

SEQ ID NO: 883336 - RNA, 19 nt, Homo sapiens
  misc_RNA (1)...(19): siRNA sense strand
cgccauugcucagaauaca

SEQ ID NO: 883337 - RNA, 19 nt, Homo sapiens
  misc_RNA (1)...(19): siRNA sense strand
ggacuugcaggccauugag

SEQ ID NO: 883338 - RNA, 19 nt, Homo sapiens
  misc_RNA (1)...(19): siRNA sense strand
gcugaucucuggggacuau

SEQ ID NO: 883339 - RNA, 19 nt, Homo sapiens
  misc_RNA (1)...(19): siRNA sense strand
aggagaagcagcaucuguu

SEQ ID NO: 883340 - RNA, 19 nt, Homo sapiens
  misc_RNA (1)...(19): siRNA sense strand
ugugaucggcgacuuuaug

SEQ ID NO: 883341 - RNA, 19 nt, Homo sapiens
  misc_RNA (1)...(19): siRNA sense strand
ccaugugaucggcgacuuu

SEQ ID NO: 883342 - RNA, 19 nt, Homo sapiens
  misc_RNA (1)...(19): siRNA sense strand
gcugcgcuguggcugugaa

SEQ ID NO: 883343 - RNA, 19 nt, Homo sapiens
  misc_RNA (1)...(19): siRNA sense strand
ccacugagaucauagacua

SEQ ID NO: 883344 - RNA, 19 nt, Homo sapiens
  misc_RNA (1)...(19): siRNA sense strand
gaauuggacuuccuggauu

SEQ ID NO: 883345 - RNA, 19 nt, Homo sapiens
  misc_RNA (1)...(19): siRNA sense strand
gagcagggaucuccaggaa

SEQ ID NO: 883346 - RNA, 19 nt, Homo sapiens
  misc_RNA (1)...(19): siRNA sense strand
gggagaaccuggagaacaa

SEQ ID NO: 883347 - RNA, 19 nt, Homo sapiens
  misc_RNA (1)...(19): siRNA sense strand
gcagggaucuccaggaauc

SEQ ID NO: 883348 - RNA, 19 nt, Homo sapiens
  misc_RNA (1)...(19): siRNA sense strand
gaagggugaucuaggagaa

SEQ ID NO: 883349 - RNA, 19 nt, Homo sapiens
  misc_RNA (1)...(19): siRNA sense strand
gauuaagggugaccaagga

SEQ ID NO: 883350 - RNA, 19 nt, Homo sapiens
  misc_RNA (1)...(19): siRNA sense strand
ugagaagggugaucuagga

SEQ ID NO: 883351 - RNA, 19 nt, Homo sapiens
  misc_RNA (1)...(19): siRNA sense strand
ucaaggagaaccaggcuua

SEQ ID NO: 883352 - RNA, 19 nt, Homo sapiens
  misc_RNA (1)...(19): siRNA sense strand
gaagaagcacgcagggaaa

SEQ ID NO: 883353 - RNA, 19 nt, Homo sapiens
  misc_RNA (1)...(19): siRNA sense strand
gcucagaaauccuaugaac

SEQ ID NO: 883354 - RNA, 19 nt, Homo sapiens
  misc_RNA (1)...(19): siRNA sense strand
gggagagccuggaccaaga

SEQ ID NO: 883355 - RNA, 19 nt, Homo sapiens
  misc_RNA (1)...(19): siRNA sense strand
caaggugaaucaggaacua

SEQ ID NO: 883356 - RNA, 19 nt, Homo sapiens
  misc_RNA (1)...(19): siRNA sense strand
gaggaucgccgcucucgaa

SEQ ID NO: 883357 - RNA, 19 nt, Homo sapiens
  misc_RNA (1)...(19): siRNA sense strand
acaggguccuucuaucaua

SEQ ID NO: 883358 - RNA, 19 nt, Homo sapiens
  misc_RNA (1)...(19): siRNA sense strand
ucaagacuauggugcaaga

SEQ ID NO: 883359 - RNA, 19 nt, Homo sapiens
  misc_RNA (1)...(19): siRNA sense strand
aaauaagaaucgcaagaga

SEQ ID NO: 883360 - RNA, 19 nt, Homo sapiens
  misc_RNA (1)...(19): siRNA sense strand
caaccuccacgaagccuua

SEQ ID NO: 883361 - RNA, 19 nt, Homo sapiens
  misc_RNA (1)...(19): siRNA sense strand
gggagccaauggaaugaaa

SEQ ID NO: 883362 - RNA, 19 nt, Homo sapiens
  misc_RNA (1)...(19): siRNA sense strand
ucagaaauccuaugaacau

SEQ ID NO: 883363 - RNA, 19 nt, Homo sapiens
  misc_RNA (1)...(19): siRNA sense strand
gaucaaggagccacugaga

SEQ ID NO: 883364 - RNA, 19 nt, Homo sapiens
  misc_RNA (1)...(19): siRNA sense strand
uggaucaccucaagacuau

SEQ ID NO: 883365 - RNA, 19 nt, Homo sapiens
  misc_RNA (1)...(19): siRNA sense strand
ggacaaaaggguucuauug

SEQ ID NO: 883366 - RNA, 19 nt, Homo sapiens
  misc_RNA (1)...(19): siRNA sense strand
gggagacgcuggagagaac

SEQ ID NO: 883367 - RNA, 19 nt, Homo sapiens
  misc_RNA (1)...(19): siRNA sense strand
ccacaggguccuucuauca

SEQ ID NO: 883368 - RNA, 19 nt, Homo sapiens
  misc_RNA (1)...(19): siRNA sense strand
aauuggacuuccuggauua

SEQ ID NO: 883369 - RNA, 19 nt, Homo sapiens
  misc_RNA (1)...(19): siRNA sense strand
acagaggauuaccaccuua

SEQ ID NO: 883370 - RNA, 19 nt, Homo sapiens
  misc_RNA (1)...(19): siRNA sense strand
agacuauggugcaagagaa

SEQ ID NO: 883371 - RNA, 19 nt, Homo sapiens
  misc_RNA (1)...(19): siRNA sense strand
gcaguaggacagaauggaa

SEQ ID NO: 883372 - RNA, 19 nt, Homo sapiens
  misc_RNA (1)...(19): siRNA sense strand
gaucgccgcucucgaaucc

SEQ ID NO: 883373 - RNA, 19 nt, Homo sapiens
  misc_RNA (1)...(19): siRNA sense strand
cggguugccuggagcagua

SEQ ID NO: 883374 - RNA, 19 nt, Homo sapiens
  misc_RNA (1)...(19): siRNA sense strand
gaucagcagcucauuaaac

SEQ ID NO: 883375 - RNA, 19 nt, Homo sapiens
  misc_RNA (1)...(19): siRNA sense strand
caaaggagaaagaggugaa

SEQ ID NO: 883376 - RNA, 19 nt, Homo sapiens
  misc_RNA (1)...(19): siRNA sense strand
ggguacagaugguccuaug

SEQ ID NO: 883377 - RNA, 19 nt, Homo sapiens
  misc_RNA (1)...(19): siRNA sense strand
uaagggagaaccuggagaa

SEQ ID NO: 883378 - RNA, 19 nt, Homo sapiens
  misc_RNA (1)...(19): siRNA sense strand
ggaccaaaggguacagaug

SEQ ID NO: 883379 - RNA, 19 nt, Homo sapiens
  misc_RNA (1)...(19): siRNA sense strand
ucaaggagccacugagauc

SEQ ID NO: 883380 - RNA, 19 nt, Homo sapiens
  misc_RNA (1)...(19): siRNA sense strand
caacggcaaccuccacgaa

SEQ ID NO: 883381 - RNA, 19 nt, Homo sapiens
  misc_RNA (1)...(19): siRNA sense strand
gguaagagaggccgaagag

SEQ ID NO: 883382 - RNA, 19 nt, Homo sapiens
  misc_RNA (1)...(19): siRNA sense strand
ggaccaagagggcccuaug

SEQ ID NO: 883383 - RNA, 19 nt, Homo sapiens
  misc_RNA (1)...(19): siRNA sense strand
gaagccuuacagaggauua

SEQ ID NO: 883384 - RNA, 19 nt, Homo sapiens
  misc_RNA (1)...(19): siRNA sense strand
ggaacuagaggcccaaagg

SEQ ID NO: 883385 - RNA, 19 nt, Homo sapiens
  misc_RNA (1)...(19): siRNA sense strand
cugaucagcagcucauuaa

SEQ ID NO: 883386 - RNA, 19 nt, Homo sapiens
  misc_RNA (1)...(19): siRNA sense strand
uacagaggauuaccaccuu

SEQ ID NO: 883387 - RNA, 19 nt, Homo sapiens
  misc_RNA (1)...(19): siRNA sense strand
gaagcacgcagggaaagga

SEQ ID NO: 883388 - RNA, 19 nt, Homo sapiens
  misc_RNA (1)...(19): siRNA sense strand
ggauuaccaccuuaacugu

SEQ ID NO: 883389 - RNA, 19 nt, Homo sapiens
  misc_RNA (1)...(19): siRNA sense strand
aauaagaaucgcaagagaa

SEQ ID NO: 883390 - RNA, 19 nt, Homo sapiens
  misc_RNA (1)...(19): siRNA sense strand
uauuggagcaccuggaauu

SEQ ID NO: 883391 - RNA, 19 nt, Homo sapiens
  misc_RNA (1)...(19): siRNA sense strand
uuaccagguuuaccaggaa

SEQ ID NO: 883392 - RNA, 19 nt, Homo sapiens
  misc_RNA (1)...(19): siRNA sense strand
gaccuaggaugguguuucc

SEQ ID NO: 883393 - RNA, 19 nt, Homo sapiens
  misc_RNA (1)...(19): siRNA sense strand
ggacucaaaggcucaaagg

SEQ ID NO: 883394 - RNA, 19 nt, Homo sapiens
  misc_RNA (1)...(19): siRNA sense strand
ggaauaccaggaccuaagg

SEQ ID NO: 883395 - RNA, 19 nt, Homo sapiens
  misc_RNA (1)...(19): siRNA sense strand
acaaaaggguucuauugga

SEQ ID NO: 883396 - RNA, 19 nt, Homo sapiens
  misc_RNA (1)...(19): siRNA sense strand
gaucaccucaagacuaugg

SEQ ID NO: 883397 - RNA, 19 nt, Homo sapiens
  misc_RNA (1)...(19): siRNA sense strand
ggagagccuggucuugaug

SEQ ID NO: 883398 - RNA, 19 nt, Homo sapiens
  misc_RNA (1)...(19): siRNA sense strand
cagaggauuaccaccuuaa

SEQ ID NO: 883399 - RNA, 19 nt, Homo sapiens
  misc_RNA (1)...(19): siRNA sense strand
aggagccacugagaucaua

SEQ ID NO: 883400 - RNA, 19 nt, Homo sapiens
  misc_RNA (1)...(19): siRNA sense strand
aaacaaggugaaucaggaa

SEQ ID NO: 883401 - RNA, 19 nt, Homo sapiens
  misc_RNA (1)...(19): siRNA sense strand
ccagggaaacgagguaaga

SEQ ID NO: 883402 - RNA, 19 nt, Homo sapiens
  misc_RNA (1)...(19): siRNA sense strand
ggaccuaggaugguguuuc

SEQ ID NO: 883403 - RNA, 19 nt, Homo sapiens
  misc_RNA (1)...(19): siRNA sense strand
uggagagccuggucuugau

SEQ ID NO: 883404 - RNA, 19 nt, Homo sapiens
  misc_RNA (1)...(19): siRNA sense strand
ggagagcagggacucaaag

SEQ ID NO: 883405 - RNA, 19 nt, Homo sapiens
  misc_RNA (1)...(19): siRNA sense strand
ggacuacaagggccaaagg

SEQ ID NO: 883406 - RNA, 19 nt, Homo sapiens
  misc_RNA (1)...(19): siRNA sense strand
ccucaagacuauggugcaa

SEQ ID NO: 883407 - RNA, 19 nt, Homo sapiens
  misc_RNA (1)...(19): siRNA sense strand
ccaggaaucccaggaaugg

SEQ ID NO: 883408 - RNA, 19 nt, Homo sapiens
  misc_RNA (1)...(19): siRNA sense strand
uaagggagaacaaggugau

SEQ ID NO: 883409 - RNA, 19 nt, Homo sapiens
  misc_RNA (1)...(19): siRNA sense strand
gcaggucccaaaggagaaa

SEQ ID NO: 883410 - RNA, 19 nt, Homo sapiens
  misc_RNA (1)...(19): siRNA sense strand
ggaaagccaggagaacaag

SEQ ID NO: 883411 - RNA, 19 nt, Homo sapiens
  misc_RNA (1)...(19): siRNA sense strand
cguggugucuugccuguac

SEQ ID NO: 883412 - RNA, 19 nt, Homo sapiens
  misc_RNA (1)...(19): siRNA sense strand
gacuauggugcaagagaaa

SEQ ID NO: 883413 - RNA, 19 nt, Homo sapiens
  misc_RNA (1)...(19): siRNA sense strand
ggagcaguaggacagaaug

SEQ ID NO: 883414 - RNA, 19 nt, Homo sapiens
  misc_RNA (1)...(19): siRNA sense strand
auucaucugcugccugaua

SEQ ID NO: 883415 - RNA, 19 nt, Homo sapiens
  misc_RNA (1)...(19): siRNA sense strand
ccagguaugacaggugaaa

SEQ ID NO: 883416 - RNA, 19 nt, Homo sapiens
  misc_RNA (1)...(19): siRNA sense strand
cuggaucaccucaagacua

SEQ ID NO: 883417 - RNA, 19 nt, Homo sapiens
  misc_RNA (1)...(19): siRNA sense strand
gagccacugagaucauaga

SEQ ID NO: 883418 - RNA, 19 nt, Homo sapiens
  misc_RNA (1)...(19): siRNA sense strand
ggguuucucucugcugauc

SEQ ID NO: 883419 - RNA, 19 nt, Homo sapiens
  misc_RNA (1)...(19): siRNA sense strand
guccacaggguccuucuau

SEQ ID NO: 883420 - RNA, 19 nt, Homo sapiens
  misc_RNA (1)...(19): siRNA sense strand
auaagaaucgcaagagaag

SEQ ID NO: 883421 - RNA, 19 nt, Homo sapiens
  misc_RNA (1)...(19): siRNA sense strand
caggaaagccaggagaaca

SEQ ID NO: 883422 - RNA, 19 nt, Homo sapiens
  misc_RNA (1)...(19): siRNA sense strand
ggugaucagggaccuagga

SEQ ID NO: 883423 - RNA, 19 nt, Homo sapiens
  misc_RNA (1)...(19): siRNA sense strand
gauggagagccuggucuug

SEQ ID NO: 883424 - RNA, 19 nt, Homo sapiens
  misc_RNA (1)...(19): siRNA sense strand
ggaccucaaggacuacaag

SEQ ID NO: 883425 - RNA, 19 nt, Homo sapiens
  misc_RNA (1)...(19): siRNA sense strand
gaggauuaccaccuuaacu

SEQ ID NO: 883426 - RNA, 19 nt, Homo sapiens
  misc_RNA (1)...(19): siRNA sense strand
caaggagccacugagauca

SEQ ID NO: 883427 - RNA, 19 nt, Homo sapiens
  misc_RNA (1)...(19): siRNA sense strand
aguaggacagaauggaaua

SEQ ID NO: 883428 - RNA, 19 nt, Homo sapiens
  misc_RNA (1)...(19): siRNA sense strand
auuaccaccuuaacuguca

SEQ ID NO: 883429 - RNA, 19 nt, Homo sapiens
  misc_RNA (1)...(19): siRNA sense strand
gaccaagagggcccuaugg

SEQ ID NO: 883430 - RNA, 19 nt, Homo sapiens
  misc_RNA (1)...(19): siRNA sense strand
gccuguaccugggugugaa

SEQ ID NO: 883431 - RNA, 19 nt, Homo sapiens
  misc_RNA (1)...(19): siRNA sense strand
ccacugagaucauagacua

SEQ ID NO: 883432 - RNA, 19 nt, Homo sapiens
  misc_RNA (1)...(19): siRNA sense strand
gaauuggacuuccuggauu

SEQ ID NO: 883433 - RNA, 19 nt, Homo sapiens
  misc_RNA (1)...(19): siRNA sense strand
gagcagggaucuccaggaa

SEQ ID NO: 883434 - RNA, 19 nt, Homo sapiens
  misc_RNA (1)...(19): siRNA sense strand
gggagaaccuggagaacaa

SEQ ID NO: 883435 - RNA, 19 nt, Homo sapiens
  misc_RNA (1)...(19): siRNA sense strand
gcagggaucuccaggaauc

SEQ ID NO: 883436 - RNA, 19 nt, Homo sapiens
  misc_RNA (1)...(19): siRNA sense strand
gaagggugaucuaggagaa

SEQ ID NO: 883437 - RNA, 19 nt, Homo sapiens
  misc_RNA (1)...(19): siRNA sense strand
gauuaagggugaccaagga

SEQ ID NO: 883438 - RNA, 19 nt, Homo sapiens
  misc_RNA (1)...(19): siRNA sense strand
ugagaagggugaucuagga

SEQ ID NO: 883439 - RNA, 19 nt, Homo sapiens
  misc_RNA (1)...(19): siRNA sense strand
ucaaggagaaccaggcuua

SEQ ID NO: 883440 - RNA, 19 nt, Homo sapiens
  misc_RNA (1)...(19): siRNA sense strand
gaagaagcacgcagggaaa

SEQ ID NO: 883441 - RNA, 19 nt, Homo sapiens
  misc_RNA (1)...(19): siRNA sense strand
gcucagaaauccuaugaac

SEQ ID NO: 883442 - RNA, 19 nt, Homo sapiens
  misc_RNA (1)...(19): siRNA sense strand
gggagagccuggaccaaga

SEQ ID NO: 883443 - RNA, 19 nt, Homo sapiens
  misc_RNA (1)...(19): siRNA sense strand
caaggugaaucaggaacua

SEQ ID NO: 883444 - RNA, 19 nt, Homo sapiens
  misc_RNA (1)...(19): siRNA sense strand
gaggaucgccgcucucgaa

SEQ ID NO: 883445 - RNA, 19 nt, Homo sapiens
  misc_RNA (1)...(19): siRNA sense strand
acaggguccuucuaucaua

SEQ ID NO: 883446 - RNA, 19 nt, Homo sapiens
  misc_RNA (1)...(19): siRNA sense strand
ucaagacuauggugcaaga

SEQ ID NO: 883447 - RNA, 19 nt, Homo sapiens
  misc_RNA (1)...(19): siRNA sense strand
aaauaagaaucgcaagaga

SEQ ID NO: 883448 - RNA, 19 nt, Homo sapiens
  misc_RNA (1)...(19): siRNA sense strand
caaccuccacgaagccuua

SEQ ID NO: 883449 - RNA, 19 nt, Homo sapiens
  misc_RNA (1)...(19): siRNA sense strand
gggagccaauggaaugaaa

SEQ ID NO: 883450 - RNA, 19 nt, Homo sapiens
  misc_RNA (1)...(19): siRNA sense strand
ucagaaauccuaugaacau

SEQ ID NO: 883451 - RNA, 19 nt, Homo sapiens
  misc_RNA (1)...(19): siRNA sense strand
gaucaaggagccacugaga

SEQ ID NO: 883452 - RNA, 19 nt, Homo sapiens
  misc_RNA (1)...(19): siRNA sense strand
uggaucaccucaagacuau

SEQ ID NO: 883453 - RNA, 19 nt, Homo sapiens
  misc_RNA (1)...(19): siRNA sense strand
ggacaaaaggguucuauug

SEQ ID NO: 883454 - RNA, 19 nt, Homo sapiens
  misc_RNA (1)...(19): siRNA sense strand
gggagacgcuggagagaac

SEQ ID NO: 883455 - RNA, 19 nt, Homo sapiens
  misc_RNA (1)...(19): siRNA sense strand
ccacaggguccuucuauca

SEQ ID NO: 883456 - RNA, 19 nt, Homo sapiens
  misc_RNA (1)...(19): siRNA sense strand
aauuggacuuccuggauua

SEQ ID NO: 883457 - RNA, 19 nt, Homo sapiens
  misc_RNA (1)...(19): siRNA sense strand
acagaggauuaccaccuua

SEQ ID NO: 883458 - RNA, 19 nt, Homo sapiens
  misc_RNA (1)...(19): siRNA sense strand
agacuauggugcaagagaa

SEQ ID NO: 883459 - RNA, 19 nt, Homo sapiens
  misc_RNA (1)...(19): siRNA sense strand
gcaguaggacagaauggaa

SEQ ID NO: 883460 - RNA, 19 nt, Homo sapiens
  misc_RNA (1)...(19): siRNA sense strand
gaucgccgcucucgaaucc

SEQ ID NO: 883461 - RNA, 19 nt, Homo sapiens
  misc_RNA (1)...(19): siRNA sense strand
cggguugccuggagcagua

SEQ ID NO: 883462 - RNA, 19 nt, Homo sapiens
  misc_RNA (1)...(19): siRNA sense strand
gaucagcagcucauuaaac

SEQ ID NO: 883463 - RNA, 19 nt, Homo sapiens
  misc_RNA (1)...(19): siRNA sense strand
caaaggagaaagaggugaa

SEQ ID NO: 883464 - RNA, 19 nt, Homo sapiens
  misc_RNA (1)...(19): siRNA sense strand
ggguacagaugguccuaug

SEQ ID NO: 883465 - RNA, 19 nt, Homo sapiens
  misc_RNA (1)...(19): siRNA sense strand
uaagggagaaccuggagaa

SEQ ID NO: 883466 - RNA, 19 nt, Homo sapiens
  misc_RNA (1)...(19): siRNA sense strand
ggaccaaaggguacagaug

SEQ ID NO: 883467 - RNA, 19 nt, Homo sapiens
  misc_RNA (1)...(19): siRNA sense strand
ucaaggagccacugagauc

SEQ ID NO: 883468 - RNA, 19 nt, Homo sapiens
  misc_RNA (1)...(19): siRNA sense strand
caacggcaaccuccacgaa

SEQ ID NO: 883469 - RNA, 19 nt, Homo sapiens
  misc_RNA (1)...(19): siRNA sense strand
gguaagagaggccgaagag

SEQ ID NO: 883470 - RNA, 19 nt, Homo sapiens
  misc_RNA (1)...(19): siRNA sense strand
ggaccaagagggcccuaug

SEQ ID NO: 883471 - RNA, 19 nt, Homo sapiens
  misc_RNA (1)...(19): siRNA sense strand
gaagccuuacagaggauua

SEQ ID NO: 883472 - RNA, 19 nt, Homo sapiens
  misc_RNA (1)...(19): siRNA sense strand
ggaacuagaggcccaaagg

SEQ ID NO: 883473 - RNA, 19 nt, Homo sapiens
  misc_RNA (1)...(19): siRNA sense strand
cugaucagcagcucauuaa

SEQ ID NO: 883474 - RNA, 19 nt, Homo sapiens
  misc_RNA (1)...(19): siRNA sense strand
uacagaggauuaccaccuu

SEQ ID NO: 883475 - RNA, 19 nt, Homo sapiens
  misc_RNA (1)...(19): siRNA sense strand
gaagcacgcagggaaagga

SEQ ID NO: 883476 - RNA, 19 nt, Homo sapiens
  misc_RNA (1)...(19): siRNA sense strand
ggauuaccaccuuaacugu

SEQ ID NO: 883477 - RNA, 19 nt, Homo sapiens
  misc_RNA (1)...(19): siRNA sense strand
aauaagaaucgcaagagaa

SEQ ID NO: 883478 - RNA, 19 nt, Homo sapiens
  misc_RNA (1)...(19): siRNA sense strand
uauuggagcaccuggaauu

SEQ ID NO: 883479 - RNA, 19 nt, Homo sapiens
  misc_RNA (1)...(19): siRNA sense strand
uuaccagguuuaccaggaa

SEQ ID NO: 883480 - RNA, 19 nt, Homo sapiens
  misc_RNA (1)...(19): siRNA sense strand
gaccuaggaugguguuucc

SEQ ID NO: 883481 - RNA, 19 nt, Homo sapiens
  misc_RNA (1)...(19): siRNA sense strand
ggacucaaaggcucaaagg

SEQ ID NO: 883482 - RNA, 19 nt, Homo sapiens
  misc_RNA (1)...(19): siRNA sense strand
ggaauaccaggaccuaagg

SEQ ID NO: 883483 - RNA, 19 nt, Homo sapiens
  misc_RNA (1)...(19): siRNA sense strand
acaaaaggguucuauugga

SEQ ID NO: 883484 - RNA, 19 nt, Homo sapiens
  misc_RNA (1)...(19): siRNA sense strand
gaucaccucaagacuaugg

SEQ ID NO: 883485 - RNA, 19 nt, Homo sapiens
  misc_RNA (1)...(19): siRNA sense strand
ggagagccuggucuugaug

SEQ ID NO: 883486 - RNA, 19 nt, Homo sapiens
  misc_RNA (1)...(19): siRNA sense strand
cagaggauuaccaccuuaa

SEQ ID NO: 883487 - RNA, 19 nt, Homo sapiens
  misc_RNA (1)...(19): siRNA sense strand
aggagccacugagaucaua

SEQ ID NO: 883488 - RNA, 19 nt, Homo sapiens
  misc_RNA (1)...(19): siRNA sense strand
aaacaaggugaaucaggaa

SEQ ID NO: 883489 - RNA, 19 nt, Homo sapiens
  misc_RNA (1)...(19): siRNA sense strand
ccagggaaacgagguaaga

SEQ ID NO: 883490 - RNA, 19 nt, Homo sapiens
  misc_RNA (1)...(19): siRNA sense strand
ggaccuaggaugguguuuc

SEQ ID NO: 883491 - RNA, 19 nt, Homo sapiens
  misc_RNA (1)...(19): siRNA sense strand
uggagagccuggucuugau

SEQ ID NO: 883492 - RNA, 19 nt, Homo sapiens
  misc_RNA (1)...(19): siRNA sense strand
ggagagcagggacucaaag

SEQ ID NO: 883493 - RNA, 19 nt, Homo sapiens
  misc_RNA (1)...(19): siRNA sense strand
ggacuacaagggccaaagg

SEQ ID NO: 883494 - RNA, 19 nt, Homo sapiens
  misc_RNA (1)...(19): siRNA sense strand
ccucaagacuauggugcaa

SEQ ID NO: 883495 - RNA, 19 nt, Homo sapiens
  misc_RNA (1)...(19): siRNA sense strand
ccaggaaucccaggaaugg

SEQ ID NO: 883496 - RNA, 19 nt, Homo sapiens
  misc_RNA (1)...(19): siRNA sense strand
uaagggagaacaaggugau

SEQ ID NO: 883497 - RNA, 19 nt, Homo sapiens
  misc_RNA (1)...(19): siRNA sense strand
gcaggucccaaaggagaaa

SEQ ID NO: 883498 - RNA, 19 nt, Homo sapiens
  misc_RNA (1)...(19): siRNA sense strand
ggaaagccaggagaacaag

SEQ ID NO: 883499 - RNA, 19 nt, Homo sapiens
  misc_RNA (1)...(19): siRNA sense strand
cguggugucuugccuguac

SEQ ID NO: 883500 - RNA, 19 nt, Homo sapiens
  misc_RNA (1)...(19): siRNA sense strand
gacuauggugcaagagaaa

SEQ ID NO: 883501 - RNA, 19 nt, Homo sapiens
  misc_RNA (1)...(19): siRNA sense strand
ggagcaguaggacagaaug

SEQ ID NO: 883502 - RNA, 19 nt, Homo sapiens
  misc_RNA (1)...(19): siRNA sense strand
auucaucugcugccugaua

SEQ ID NO: 883503 - RNA, 19 nt, Homo sapiens
  misc_RNA (1)...(19): siRNA sense strand
ccagguaugacaggugaaa

SEQ ID NO: 883504 - RNA, 19 nt, Homo sapiens
  misc_RNA (1)...(19): siRNA sense strand
cuggaucaccucaagacua

SEQ ID NO: 883505 - RNA, 19 nt, Homo sapiens
  misc_RNA (1)...(19): siRNA sense strand
gagccacugagaucauaga

SEQ ID NO: 883506 - RNA, 19 nt, Homo sapiens
  misc_RNA (1)...(19): siRNA sense strand
ggguuucucucugcugauc

SEQ ID NO: 883507 - RNA, 19 nt, Homo sapiens
  misc_RNA (1)...(19): siRNA sense strand
guccacaggguccuucuau

SEQ ID NO: 883508 - RNA, 19 nt, Homo sapiens
  misc_RNA (1)...(19): siRNA sense strand
auaagaaucgcaagagaag

SEQ ID NO: 883509 - RNA, 19 nt, Homo sapiens
  misc_RNA (1)...(19): siRNA sense strand
caggaaagccaggagaaca

SEQ ID NO: 883510 - RNA, 19 nt, Homo sapiens
  misc_RNA (1)...(19): siRNA sense strand
ggugaucagggaccuagga

SEQ ID NO: 883511 - RNA, 19 nt, Homo sapiens
  misc_RNA (1)...(19): siRNA sense strand
gauggagagccuggucuug

SEQ ID NO: 883512 - RNA, 19 nt, Homo sapiens
  misc_RNA (1)...(19): siRNA sense strand
ggaccucaaggacuacaag

SEQ ID NO: 883513 - RNA, 19 nt, Homo sapiens
  misc_RNA (1)...(19): siRNA sense strand
gaggauuaccaccuuaacu

SEQ ID NO: 883514 - RNA, 19 nt, Homo sapiens
  misc_RNA (1)...(19): siRNA sense strand
caaggagccacugagauca

SEQ ID NO: 883515 - RNA, 19 nt, Homo sapiens
  misc_RNA (1)...(19): siRNA sense strand
aguaggacagaauggaaua

SEQ ID NO: 883516 - RNA, 19 nt, Homo sapiens
  misc_RNA (1)...(19): siRNA sense strand
auuaccaccuuaacuguca

SEQ ID NO: 883517 - RNA, 19 nt, Homo sapiens
  misc_RNA (1)...(19): siRNA sense strand
gaccaagagggcccuaugg

SEQ ID NO: 883518 - RNA, 19 nt, Homo sapiens
  misc_RNA (1)...(19): siRNA sense strand
gccuguaccugggugugaa

SEQ ID NO: 883519 - RNA, 19 nt, Homo sapiens
  misc_RNA (1)...(19): siRNA sense strand
caggaaggcucauaaagaa

SEQ ID NO: 883520 - RNA, 19 nt, Homo sapiens
  misc_RNA (1)...(19): siRNA sense strand
ugaggaugcuggcuacuua

SEQ ID NO: 883521 - RNA, 19 nt, Homo sapiens
  misc_RNA (1)...(19): siRNA sense strand
auaaagaacucucaaagga

SEQ ID NO: 883522 - RNA, 19 nt, Homo sapiens
  misc_RNA (1)...(19): siRNA sense strand
gcaggaaggcucauaaaga

SEQ ID NO: 883523 - RNA, 19 nt, Homo sapiens
  misc_RNA (1)...(19): siRNA sense strand
cacagaaacuuccaacuug

SEQ ID NO: 883524 - RNA, 19 nt, Homo sapiens
  misc_RNA (1)...(19): siRNA sense strand
gaugcuggcuacuuaaaga

SEQ ID NO: 883525 - RNA, 19 nt, Homo sapiens
  misc_RNA (1)...(19): siRNA sense strand
ucaaaaggcugaaagguuu

SEQ ID NO: 883526 - RNA, 19 nt, Homo sapiens
  misc_RNA (1)...(19): siRNA sense strand
ccacagaaacuuccaacuu

SEQ ID NO: 883527 - RNA, 19 nt, Homo sapiens
  misc_RNA (1)...(19): siRNA sense strand
gugcaucucuuccgacucu

SEQ ID NO: 883528 - RNA, 19 nt, Homo sapiens
  misc_RNA (1)...(19): siRNA sense strand
ggaggagcccaacgcguuu

SEQ ID NO: 883529 - RNA, 19 nt, Homo sapiens
  misc_RNA (1)...(19): siRNA sense strand
ccacguacaaguaugaguu

SEQ ID NO: 883530 - RNA, 19 nt, Homo sapiens
  misc_RNA (1)...(19): siRNA sense strand
ggaguccacguacaaguau

SEQ ID NO: 883531 - RNA, 19 nt, Homo sapiens
  misc_RNA (1)...(19): siRNA sense strand
ggaaggcucauaaagaacu

SEQ ID NO: 883532 - RNA, 19 nt, Homo sapiens
  misc_RNA (1)...(19): siRNA sense strand
gcaggugcagcgaagauga

SEQ ID NO: 883533 - RNA, 19 nt, Homo sapiens
  misc_RNA (1)...(19): siRNA sense strand
ccagggccaugagaaguug

SEQ ID NO: 883534 - RNA, 19 nt, Homo sapiens
  misc_RNA (1)...(19): siRNA sense strand
ggacugcgugggaguuugu

SEQ ID NO: 883535 - RNA, 19 nt, Homo sapiens
  misc_RNA (1)...(19): siRNA sense strand
agugggagaucgccaacaa

SEQ ID NO: 883536 - RNA, 19 nt, Homo sapiens
  misc_RNA (1)...(19): siRNA sense strand
gaggaugcuggcuacuuaa

SEQ ID NO: 883537 - RNA, 19 nt, Homo sapiens
  misc_RNA (1)...(19): siRNA sense strand
cauaaagaacucucaaagg

SEQ ID NO: 883538 - RNA, 19 nt, Homo sapiens
  misc_RNA (1)...(19): siRNA sense strand
ucauaaagaacucucaaag

SEQ ID NO: 883539 - RNA, 19 nt, Homo sapiens
  misc_RNA (1)...(19): siRNA sense strand
gaaggcucauaaagaacuc

SEQ ID NO: 883540 - RNA, 19 nt, Homo sapiens
  misc_RNA (1)...(19): siRNA sense strand
gcucauaaagaacucucaa

SEQ ID NO: 883541 - RNA, 19 nt, Homo sapiens
  misc_RNA (1)...(19): siRNA sense strand
uacacgaggcccacagaaa

SEQ ID NO: 883542 - RNA, 19 nt, Homo sapiens
  misc_RNA (1)...(19): siRNA sense strand
ucuacgcgcugacguucga

SEQ ID NO: 883543 - RNA, 19 nt, Homo sapiens
  misc_RNA (1)...(19): siRNA sense strand
uaaagaccccagaagaaaa

SEQ ID NO: 883544 - RNA, 19 nt, Homo sapiens
  misc_RNA (1)...(19): siRNA sense strand
acacgaggcccacagaaac

SEQ ID NO: 883545 - RNA, 19 nt, Homo sapiens
  misc_RNA (1)...(19): siRNA sense strand
gcagugggaccagguagag

SEQ ID NO: 883546 - RNA, 19 nt, Homo sapiens
  misc_RNA (1)...(19): siRNA sense strand
ggagaaaggugggaacaua

SEQ ID NO: 883547 - RNA, 19 nt, Homo sapiens
  misc_RNA (1)...(19): siRNA sense strand
gcagugaaguugacagauu

SEQ ID NO: 883548 - RNA, 19 nt, Homo sapiens
  misc_RNA (1)...(19): siRNA sense strand
gaagcagaauuaagucaaa

SEQ ID NO: 883549 - RNA, 19 nt, Homo sapiens
  misc_RNA (1)...(19): siRNA sense strand
uaacagccauggugauuga

SEQ ID NO: 883550 - RNA, 19 nt, Homo sapiens
  misc_RNA (1)...(19): siRNA sense strand
gaucacauguccuugaaug

SEQ ID NO: 883551 - RNA, 19 nt, Homo sapiens
  misc_RNA (1)...(19): siRNA sense strand
gaacauacaauuggagauu

SEQ ID NO: 883552 - RNA, 19 nt, Homo sapiens
  misc_RNA (1)...(19): siRNA sense strand
gaacagcuccuuucuuucu

SEQ ID NO: 883553 - RNA, 19 nt, Homo sapiens
  misc_RNA (1)...(19): siRNA sense strand
gguauggaguuguggauuu

SEQ ID NO: 883554 - RNA, 19 nt, Homo sapiens
  misc_RNA (1)...(19): siRNA sense strand
uugaacagcuccuuucuuu

SEQ ID NO: 883555 - RNA, 19 nt, Homo sapiens
  misc_RNA (1)...(19): siRNA sense strand
guauggaguuguggauuua

SEQ ID NO: 883556 - RNA, 19 nt, Homo sapiens
  misc_RNA (1)...(19): siRNA sense strand
caacccagcucccagguau

SEQ ID NO: 883557 - RNA, 19 nt, Homo sapiens
  misc_RNA (1)...(19): siRNA sense strand
ggagggcauucauuucaaa

SEQ ID NO: 883558 - RNA, 19 nt, Homo sapiens
  misc_RNA (1)...(19): siRNA sense strand
gacaaagcaucaagagaga

SEQ ID NO: 883559 - RNA, 19 nt, Homo sapiens
  misc_RNA (1)...(19): siRNA sense strand
gaauugcuacuguguauga

SEQ ID NO: 883560 - RNA, 19 nt, Homo sapiens
  misc_RNA (1)...(19): siRNA sense strand
gauaucaucagcuaccuaa

SEQ ID NO: 883561 - RNA, 19 nt, Homo sapiens
  misc_RNA (1)...(19): siRNA sense strand
cagugaaguugacagauuu

SEQ ID NO: 883562 - RNA, 19 nt, Homo sapiens
  misc_RNA (1)...(19): siRNA sense strand
uggcagauaucaucagcua

SEQ ID NO: 883563 - RNA, 19 nt, Homo sapiens
  misc_RNA (1)...(19): siRNA sense strand
gggaucacauguccuugaa

SEQ ID NO: 883564 - RNA, 19 nt, Homo sapiens
  misc_RNA (1)...(19): siRNA sense strand
gaauuaagucaaacaagga

SEQ ID NO: 883565 - RNA, 19 nt, Homo sapiens
  misc_RNA (1)...(19): siRNA sense strand
ccauuucagucaucaagaa

SEQ ID NO: 883566 - RNA, 19 nt, Homo sapiens
  misc_RNA (1)...(19): siRNA sense strand
caagagagaccuccagagu

SEQ ID NO: 883567 - RNA, 19 nt, Homo sapiens
  misc_RNA (1)...(19): siRNA sense strand
ggccgucucugugauauug

SEQ ID NO: 883568 - RNA, 19 nt, Homo sapiens
  misc_RNA (1)...(19): siRNA sense strand
agacaaauguacacagauc

SEQ ID NO: 883569 - RNA, 19 nt, Homo sapiens
  misc_RNA (1)...(19): siRNA sense strand
ugaaugagaugaguacagu

SEQ ID NO: 883570 - RNA, 19 nt, Homo sapiens
  misc_RNA (1)...(19): siRNA sense strand
uaauguggcugagguugaa

SEQ ID NO: 883571 - RNA, 19 nt, Homo sapiens
  misc_RNA (1)...(19): siRNA sense strand
ggagaauggaugagccuaa

SEQ ID NO: 883572 - RNA, 19 nt, Homo sapiens
  misc_RNA (1)...(19): siRNA sense strand
gagaauggaugagccuaag

SEQ ID NO: 883573 - RNA, 19 nt, Homo sapiens
  misc_RNA (1)...(19): siRNA sense strand
gcaacuggcagauaucauc

SEQ ID NO: 883574 - RNA, 19 nt, Homo sapiens
  misc_RNA (1)...(19): siRNA sense strand
uugcuacuguguaugaaua

SEQ ID NO: 883575 - RNA, 19 nt, Homo sapiens
  misc_RNA (1)...(19): siRNA sense strand
guuguucccuugacagaga

SEQ ID NO: 883576 - RNA, 19 nt, Homo sapiens
  misc_RNA (1)...(19): siRNA sense strand
gagugaugaugaaguuaga

SEQ ID NO: 883577 - RNA, 19 nt, Homo sapiens
  misc_RNA (1)...(19): siRNA sense strand
ucccuuagcccacgacaua

SEQ ID NO: 883578 - RNA, 19 nt, Homo sapiens
  misc_RNA (1)...(19): siRNA sense strand
ucacaggguuacaccaaau

SEQ ID NO: 883579 - RNA, 19 nt, Homo sapiens
  misc_RNA (1)...(19): siRNA sense strand
ugagguugaagcagaauua

SEQ ID NO: 883580 - RNA, 19 nt, Homo sapiens
  misc_RNA (1)...(19): siRNA sense strand
aaacaaggacaaagcauca

SEQ ID NO: 883581 - RNA, 19 nt, Homo sapiens
  misc_RNA (1)...(19): siRNA sense strand
caccagcccucagaucauu

SEQ ID NO: 883582 - RNA, 19 nt, Homo sapiens
  misc_RNA (1)...(19): siRNA sense strand
ugaguacagucuccauuuc

SEQ ID NO: 883583 - RNA, 19 nt, Homo sapiens
  misc_RNA (1)...(19): siRNA sense strand
aaucucaaccgcucccuua

SEQ ID NO: 883584 - RNA, 19 nt, Homo sapiens
  misc_RNA (1)...(19): siRNA sense strand
ccuaacagcugccaguuuu

SEQ ID NO: 883585 - RNA, 19 nt, Homo sapiens
  misc_RNA (1)...(19): siRNA sense strand
gaaaggugggaacauacaa

SEQ ID NO: 883586 - RNA, 19 nt, Homo sapiens
  misc_RNA (1)...(19): siRNA sense strand
auagacaaauguacacaga

SEQ ID NO: 883587 - RNA, 19 nt, Homo sapiens
  misc_RNA (1)...(19): siRNA sense strand
gcagaauuaagucaaacaa

SEQ ID NO: 883588 - RNA, 19 nt, Homo sapiens
  misc_RNA (1)...(19): siRNA sense strand
aggaauugcuacuguguau

SEQ ID NO: 883589 - RNA, 19 nt, Homo sapiens
  misc_RNA (1)...(19): siRNA sense strand
caucaaaacugaaaaucug

SEQ ID NO: 883590 - RNA, 19 nt, Homo sapiens
  misc_RNA (1)...(19): siRNA sense strand
gaugaugaaguuagaguuc

SEQ ID NO: 883591 - RNA, 19 nt, Homo sapiens
  misc_RNA (1)...(19): siRNA sense strand
cacauguccuugaaugaga

SEQ ID NO: 883592 - RNA, 19 nt, Homo sapiens
  misc_RNA (1)...(19): siRNA sense strand
gguugaagcagaauuaagu

SEQ ID NO: 883593 - RNA, 19 nt, Homo sapiens
  misc_RNA (1)...(19): siRNA sense strand
gcagcauauuauagacaaa

SEQ ID NO: 883594 - RNA, 19 nt, Homo sapiens
  misc_RNA (1)...(19): siRNA sense strand
ggagugaugaugaaguuag

SEQ ID NO: 883595 - RNA, 19 nt, Homo sapiens
  misc_RNA (1)...(19): siRNA sense strand
gagcaggacagugguaugu

SEQ ID NO: 883596 - RNA, 19 nt, Homo sapiens
  misc_RNA (1)...(19): siRNA sense strand
gcagggccgucucugugau

SEQ ID NO: 883597 - RNA, 19 nt, Homo sapiens
  misc_RNA (1)...(19): siRNA sense strand
gaggaauugcuacugugua

SEQ ID NO: 883598 - RNA, 19 nt, Homo sapiens
  misc_RNA (1)...(19): siRNA sense strand
ucggagugaugaugaaguu

SEQ ID NO: 883599 - RNA, 19 nt, Homo sapiens
  misc_RNA (1)...(19): siRNA sense strand
uuagugcugugcuggauau

SEQ ID NO: 883600 - RNA, 19 nt, Homo sapiens
  misc_RNA (1)...(19): siRNA sense strand
ucagaucauugaaccaagu

SEQ ID NO: 883601 - RNA, 19 nt, Homo sapiens
  misc_RNA (1)...(19): siRNA sense strand
gaugaguacagucuccauu

SEQ ID NO: 883602 - RNA, 19 nt, Homo sapiens
  misc_RNA (1)...(19): siRNA sense strand
gaauggaugagccuaagca

SEQ ID NO: 883603 - RNA, 19 nt, Homo sapiens
  misc_RNA (1)...(19): siRNA sense strand
ugagccaucuaaaccaguu

SEQ ID NO: 883604 - RNA, 19 nt, Homo sapiens
  misc_RNA (1)...(19): siRNA sense strand
gaguagugcagaggaagua

SEQ ID NO: 883605 - RNA, 19 nt, Homo sapiens
  misc_RNA (1)...(19): siRNA sense strand
ggaggaauugcuacugugu

SEQ ID NO: 883606 - RNA, 19 nt, Homo sapiens
  misc_RNA (1)...(19): siRNA sense strand
uagaacugcuuuggugguu

SEQ ID NO: 883607 - RNA, 19 nt, Homo sapiens
  misc_RNA (1)...(19): siRNA sense strand
gcaacccagcucccaggua

SEQ ID NO: 883608 - RNA, 19 nt, Homo sapiens
  misc_RNA (1)...(19): siRNA sense strand
gaguacagucuccauuuca

SEQ ID NO: 883609 - RNA, 19 nt, Homo sapiens
  misc_RNA (1)...(19): siRNA sense strand
aauuggagauuccugacuu

SEQ ID NO: 883610 - RNA, 19 nt, Homo sapiens
  misc_RNA (1)...(19): siRNA sense strand
ucaagaacccuacuguuuu

SEQ ID NO: 883611 - RNA, 19 nt, Homo sapiens
  misc_RNA (1)...(19): siRNA sense strand
aucaagaacccuacuguuu

SEQ ID NO: 883612 - RNA, 19 nt, Homo sapiens
  misc_RNA (1)...(19): siRNA sense strand
uaucaucagcuaccuaaca

SEQ ID NO: 883613 - RNA, 19 nt, Homo sapiens
  misc_RNA (1)...(19): siRNA sense strand
gagaaaggugggaacauac

SEQ ID NO: 883614 - RNA, 19 nt, Homo sapiens
  misc_RNA (1)...(19): siRNA sense strand
ggagaagaugggaguagug

SEQ ID NO: 883615 - RNA, 19 nt, Homo sapiens
  misc_RNA (1)...(19): siRNA sense strand
uagaguucuuggagcagua

SEQ ID NO: 883616 - RNA, 19 nt, Homo sapiens
  misc_RNA (1)...(19): siRNA sense strand
ugaugaaguuagaguucuu

SEQ ID NO: 883617 - RNA, 19 nt, Homo sapiens
  misc_RNA (1)...(19): siRNA sense strand
caaggacaaagcaucaaga

SEQ ID NO: 883618 - RNA, 19 nt, Homo sapiens
  misc_RNA (1)...(19): siRNA sense strand
caucaagaacccuacuguu

SEQ ID NO: 883619 - RNA, 19 nt, Homo sapiens
  misc_RNA (1)...(19): siRNA sense strand
gugggaacauacaauugga

SEQ ID NO: 883620 - RNA, 19 nt, Homo sapiens
  misc_RNA (1)...(19): siRNA sense strand
gagguugaagcagaauuaa

SEQ ID NO: 883621 - RNA, 19 nt, Homo sapiens
  misc_RNA (1)...(19): siRNA sense strand
agacacagagccagaagug

SEQ ID NO: 883622 - RNA, 19 nt, Homo sapiens
  misc_RNA (1)...(19): siRNA sense strand
caacuggcagauaucauca

SEQ ID NO: 883623 - RNA, 19 nt, Homo sapiens
  misc_RNA (1)...(19): siRNA sense strand
gauaucagagagcuaaguc

SEQ ID NO: 883624 - RNA, 19 nt, Homo sapiens
  misc_RNA (1)...(19): siRNA sense strand
ggugggaacauacaauugg

SEQ ID NO: 883625 - RNA, 19 nt, Homo sapiens
  misc_RNA (1)...(19): siRNA sense strand
gagagacacagagccagaa

SEQ ID NO: 883626 - RNA, 19 nt, Homo sapiens
  misc_RNA (1)...(19): siRNA sense strand
gccaacaagcagugaaguu

SEQ ID NO: 883627 - RNA, 19 nt, Homo sapiens
  misc_RNA (1)...(19): siRNA sense strand
gcuccuuucuuucuguuac

SEQ ID NO: 883628 - RNA, 19 nt, Homo sapiens
  misc_RNA (1)...(19): siRNA sense strand
uggagggcauucauuucaa

SEQ ID NO: 883629 - RNA, 19 nt, Homo sapiens
  misc_RNA (1)...(19): siRNA sense strand
guacacaucaaaacugaaa

SEQ ID NO: 883630 - RNA, 19 nt, Homo sapiens
  misc_RNA (1)...(19): siRNA sense strand
ugaagcagaauuaagucaa

SEQ ID NO: 883631 - RNA, 19 nt, Homo sapiens
  misc_RNA (1)...(19): siRNA sense strand
ucugugauauuguggucaa

SEQ ID NO: 883632 - RNA, 19 nt, Homo sapiens
  misc_RNA (1)...(19): siRNA sense strand
guaacagccauggugauug

SEQ ID NO: 883633 - RNA, 19 nt, Homo sapiens
  misc_RNA (1)...(19): siRNA sense strand
ggcuugggccugagaauca

SEQ ID NO: 883634 - RNA, 19 nt, Homo sapiens
  misc_RNA (1)...(19): siRNA sense strand
ugcagcauauuauagacaa

SEQ ID NO: 883635 - RNA, 19 nt, Homo sapiens
  misc_RNA (1)...(19): siRNA sense strand
gcaguguuguucccuugac

SEQ ID NO: 883636 - RNA, 19 nt, Homo sapiens
  misc_RNA (1)...(19): siRNA sense strand
gguuagugcugugcuggau

SEQ ID NO: 883637 - RNA, 19 nt, Homo sapiens
  misc_RNA (1)...(19): siRNA sense strand
cuuagcccacgacauaaua

SEQ ID NO: 883638 - RNA, 19 nt, Homo sapiens
  misc_RNA (1)...(19): siRNA sense strand
cagcuccuuucuuucuguu

SEQ ID NO: 883639 - RNA, 19 nt, Homo sapiens
  misc_RNA (1)...(19): siRNA sense strand
ggauuuagaacugcuuugg

SEQ ID NO: 883640 - RNA, 19 nt, Homo sapiens
  misc_RNA (1)...(19): siRNA sense strand
cagccauggugauugauac

SEQ ID NO: 883641 - RNA, 19 nt, Homo sapiens
  misc_RNA (1)...(19): siRNA sense strand
gaugaaguuagaguucuug

SEQ ID NO: 883642 - RNA, 19 nt, Homo sapiens
  misc_RNA (1)...(19): siRNA sense strand
gugcugugcuggauaucag

SEQ ID NO: 883643 - RNA, 19 nt, Homo sapiens
  misc_RNA (1)...(19): siRNA sense strand
ggcugagguugaagcagaa

SEQ ID NO: 883644 - RNA, 19 nt, Homo sapiens
  misc_RNA (1)...(19): siRNA sense strand
ccucagaucauugaaccaa

SEQ ID NO: 883645 - RNA, 19 nt, Homo sapiens
  misc_RNA (1)...(19): siRNA sense strand
gggucggagugaugaugaa

SEQ ID NO: 883646 - RNA, 19 nt, Homo sapiens
  misc_RNA (1)...(19): siRNA sense strand
gaaucaacgucuacuacaa

SEQ ID NO: 883647 - RNA, 19 nt, Homo sapiens
  misc_RNA (1)...(19): siRNA sense strand
aagaggagaucgauggaua

SEQ ID NO: 883648 - RNA, 19 nt, Homo sapiens
  misc_RNA (1)...(19): siRNA sense strand
caacaugaacgaccuggua

SEQ ID NO: 883649 - RNA, 19 nt, Homo sapiens
  misc_RNA (1)...(19): siRNA sense strand
ggaggaagcuuuugaggau

SEQ ID NO: 883650 - RNA, 19 nt, Homo sapiens
  misc_RNA (1)...(19): siRNA sense strand
ccugacaacuucaucuuug

SEQ ID NO: 883651 - RNA, 19 nt, Homo sapiens
  misc_RNA (1)...(19): siRNA sense strand
gggaagugaucagcgauga

SEQ ID NO: 883652 - RNA, 19 nt, Homo sapiens
  misc_RNA (1)...(19): siRNA sense strand
gagcaguucucagccaugu

SEQ ID NO: 883653 - RNA, 19 nt, Homo sapiens
  misc_RNA (1)...(19): siRNA sense strand
caagauccgugaggaguuc

SEQ ID NO: 883654 - RNA, 19 nt, Homo sapiens
  misc_RNA (1)...(19): siRNA sense strand
ccagaucggcaccaaguuu

SEQ ID NO: 883655 - RNA, 19 nt, Homo sapiens
  misc_RNA (1)...(19): siRNA sense strand
ggaaccagaucggcaccaa

SEQ ID NO: 883656 - RNA, 19 nt, Homo sapiens
  misc_RNA (1)...(19): siRNA sense strand
acaacgaggcgcucuauga

SEQ ID NO: 883657 - RNA, 19 nt, Homo sapiens
  misc_RNA (1)...(19): siRNA sense strand
gagaaucaacgucuacuac

SEQ ID NO: 883658 - RNA, 19 nt, Homo sapiens
  misc_RNA (1)...(19): siRNA sense strand
gcaguucucagccauguuc

SEQ ID NO: 883659 - RNA, 19 nt, Homo sapiens
  misc_RNA (1)...(19): siRNA sense strand
agucaucgucucagaaaua

SEQ ID NO: 883660 - RNA, 19 nt, Homo sapiens
  misc_RNA (1)...(19): siRNA sense strand
gggaacaacugggcgaaag

SEQ ID NO: 883661 - RNA, 19 nt, Homo sapiens
  misc_RNA (1)...(19): siRNA sense strand
gcaagauccgugaggaguu

SEQ ID NO: 883662 - RNA, 19 nt, Homo sapiens
  misc_RNA (1)...(19): siRNA sense strand
uggaguggauucccaacaa

SEQ ID NO: 883663 - RNA, 19 nt, Homo sapiens
  misc_RNA (1)...(19): siRNA sense strand
caucgucucagaaauaugu

SEQ ID NO: 883664 - RNA, 19 nt, Homo sapiens
  misc_RNA (1)...(19): siRNA sense strand
gugagggcauggaugaaau

SEQ ID NO: 883665 - RNA, 19 nt, Homo sapiens
  misc_RNA (1)...(19): siRNA sense strand
gaacaccuucagcgucaug

SEQ ID NO: 883666 - RNA, 19 nt, Homo sapiens
  misc_RNA (1)...(19): siRNA sense strand
ggugagggcauggaugaaa

SEQ ID NO: 883667 - RNA, 19 nt, Homo sapiens
  misc_RNA (1)...(19): siRNA sense strand
gucaucgucucagaaauau

SEQ ID NO: 883668 - RNA, 19 nt, Homo sapiens
  misc_RNA (1)...(19): siRNA sense strand
ggaagaggagaucgaugga

SEQ ID NO: 883669 - RNA, 19 nt, Homo sapiens
  misc_RNA (1)...(19): siRNA sense strand
ggaguggauucccaacaac

SEQ ID NO: 883670 - RNA, 19 nt, Homo sapiens
  misc_RNA (1)...(19): siRNA sense strand
gagcucacccagcagaugu

SEQ ID NO: 883671 - RNA, 19 nt, Homo sapiens
  misc_RNA (1)...(19): siRNA sense strand
ggagagaaucaacgucuac

SEQ ID NO: 883672 - RNA, 19 nt, Homo sapiens
  misc_RNA (1)...(19): siRNA sense strand
caacgucuacuacaaugag

SEQ ID NO: 883673 - RNA, 19 nt, Homo sapiens
  misc_RNA (1)...(19): siRNA sense strand
uaagaacagcagcuacuuc

SEQ ID NO: 883674 - RNA, 19 nt, Homo sapiens
  misc_RNA (1)...(19): siRNA sense strand
guaagaacagcagcuacuu

SEQ ID NO: 883675 - RNA, 19 nt, Homo sapiens
  misc_RNA (1)...(19): siRNA sense strand
uggagagaaucaacgucua

SEQ ID NO: 883676 - RNA, 19 nt, Homo sapiens
  misc_RNA (1)...(19): siRNA sense strand
ggagguggacgagcagaug

SEQ ID NO: 883677 - RNA, 19 nt, Homo sapiens
  misc_RNA (1)...(19): siRNA sense strand
gcgcaucuccgagcaguuc

SEQ ID NO: 883678 - RNA, 19 nt, Homo sapiens
  misc_RNA (1)...(19): siRNA sense strand
cgacaacgaggcgcucuau

SEQ ID NO: 883679 - RNA, 19 nt, Homo sapiens
  misc_RNA (1)...(19): siRNA sense strand
gcauggaugaaauggaguu

SEQ ID NO: 883680 - RNA, 19 nt, Homo sapiens
  misc_RNA (1)...(19): siRNA sense strand
caacgaggcgcucuaugac

SEQ ID NO: 883681 - RNA, 19 nt, Homo sapiens
  misc_RNA (1)...(19): siRNA sense strand
gaagaggagaucgauggau

SEQ ID NO: 883682 - RNA, 19 nt, Homo sapiens
  misc_RNA (1)...(19): siRNA sense strand
aaucaacgucuacuacaau

SEQ ID NO: 883683 - RNA, 19 nt, Homo sapiens
  misc_RNA (1)...(19): siRNA sense strand
acgaggcgcucuaugacau

SEQ ID NO: 883684 - RNA, 19 nt, Homo sapiens
  misc_RNA (1)...(19): siRNA sense strand
ucaccgaggcggagagcaa

SEQ ID NO: 883685 - RNA, 19 nt, Homo sapiens
  misc_RNA (1)...(19): siRNA sense strand
gccugacaacuucaucuuu

SEQ ID NO: 883686 - RNA, 19 nt, Homo sapiens
  misc_RNA (1)...(19): siRNA sense strand
uauccgaguaccagcagua

SEQ ID NO: 883687 - RNA, 19 nt, Homo sapiens
  misc_RNA (1)...(19): siRNA sense strand
gcaagcuggcggugaacau

SEQ ID NO: 883688 - RNA, 19 nt, Homo sapiens
  misc_RNA (1)...(19): siRNA sense strand
agaauacagacgagaccua

SEQ ID NO: 883689 - RNA, 19 nt, Homo sapiens
  misc_RNA (1)...(19): siRNA sense strand
cgggugagggcauggauga

SEQ ID NO: 883690 - RNA, 19 nt, Homo sapiens
  misc_RNA (1)...(19): siRNA sense strand
gagucaucgucucagaaau

SEQ ID NO: 883691 - RNA, 19 nt, Homo sapiens
  misc_RNA (1)...(19): siRNA sense strand
cgcugcagcuggagagaau

SEQ ID NO: 883692 - RNA, 19 nt, Homo sapiens
  misc_RNA (1)...(19): siRNA sense strand
gcuaccagcuggaacauga

SEQ ID NO: 883693 - RNA, 19 nt, Homo sapiens
  misc_RNA (1)...(19): siRNA sense strand
uaacaaccaugcucaagug

SEQ ID NO: 883694 - RNA, 19 nt, Homo sapiens
  misc_RNA (1)...(19): siRNA sense strand
gcccacacaucuucuuuga

SEQ ID NO: 883695 - RNA, 19 nt, Homo sapiens
  misc_RNA (1)...(19): siRNA sense strand
gagaagauccgcccacaca

SEQ ID NO: 883696 - RNA, 19 nt, Homo sapiens
  misc_RNA (1)...(19): siRNA sense strand
caaccacuaugaccuguuc

SEQ ID NO: 883697 - RNA, 19 nt, Homo sapiens
  misc_RNA (1)...(19): siRNA sense strand
ggaacagcccgaucugcua

SEQ ID NO: 883698 - RNA, 19 nt, Homo sapiens
  misc_RNA (1)...(19): siRNA sense strand
ucaacaguaucaaccacua

SEQ ID NO: 883699 - RNA, 19 nt, Homo sapiens
  misc_RNA (1)...(19): siRNA sense strand
gaagauccgcccacacauc

SEQ ID NO: 883700 - RNA, 19 nt, Homo sapiens
  misc_RNA (1)...(19): siRNA sense strand
gcuggaacaugagaacgaa

SEQ ID NO: 883701 - RNA, 19 nt, Homo sapiens
  misc_RNA (1)...(19): siRNA sense strand
guagguugcagaagaaguu

SEQ ID NO: 883702 - RNA, 19 nt, Homo sapiens
  misc_RNA (1)...(19): siRNA sense strand
acaccaaccucuacuuguc

SEQ ID NO: 883703 - RNA, 19 nt, Homo sapiens
  misc_RNA (1)...(19): siRNA sense strand
ccaagaagaaacccaaauc

SEQ ID NO: 883704 - RNA, 19 nt, Homo sapiens
  misc_RNA (1)...(19): siRNA sense strand
cgggagcuguacccugaua

SEQ ID NO: 883705 - RNA, 19 nt, Homo sapiens
  misc_RNA (1)...(19): siRNA sense strand
gacaucguccucaugacua

SEQ ID NO: 883706 - RNA, 19 nt, Homo sapiens
  misc_RNA (1)...(19): siRNA sense strand
cagcagggaugugguugug

SEQ ID NO: 883707 - RNA, 19 nt, Homo sapiens
  misc_RNA (1)...(19): siRNA sense strand
cuggguagguugcagaaga

SEQ ID NO: 883708 - RNA, 19 nt, Homo sapiens
  misc_RNA (1)...(19): siRNA sense strand
ucacaccaaccucuacuug

SEQ ID NO: 883709 - RNA, 19 nt, Homo sapiens
  misc_RNA (1)...(19): siRNA sense strand
cggcuggagugcccaauuc

SEQ ID NO: 883710 - RNA, 19 nt, Homo sapiens
  misc_RNA (1)...(19): siRNA sense strand
gcgagaagccauugaugag

SEQ ID NO: 883711 - RNA, 19 nt, Homo sapiens
  misc_RNA (1)...(19): siRNA sense strand
ccucaugacuaacaaccau

SEQ ID NO: 883712 - RNA, 19 nt, Homo sapiens
  misc_RNA (1)...(19): siRNA sense strand
gugaggacgucuucgacau

SEQ ID NO: 883713 - RNA, 19 nt, Homo sapiens
  misc_RNA (1)...(19): siRNA sense strand
acaucguccucaugacuaa

SEQ ID NO: 883714 - RNA, 19 nt, Homo sapiens
  misc_RNA (1)...(19): siRNA sense strand
aucgagagguucugcauga

SEQ ID NO: 883715 - RNA, 19 nt, Homo sapiens
  misc_RNA (1)...(19): siRNA sense strand
caacaguaucaaccacuau

SEQ ID NO: 883716 - RNA, 19 nt, Homo sapiens
  misc_RNA (1)...(19): siRNA sense strand
uggguagguugcagaagaa

SEQ ID NO: 883717 - RNA, 19 nt, Homo sapiens
  misc_RNA (1)...(19): siRNA sense strand
gauccgcccacacaucuuc

SEQ ID NO: 883718 - RNA, 19 nt, Homo sapiens
  misc_RNA (1)...(19): siRNA sense strand
acgaggagcagcagaucua

SEQ ID NO: 883719 - RNA, 19 nt, Homo sapiens
  misc_RNA (1)...(19): siRNA sense strand
cuucuuugaugaccagaug

SEQ ID NO: 883720 - RNA, 19 nt, Homo sapiens
  misc_RNA (1)...(19): siRNA sense strand
caagaagaaacccaaaucg

SEQ ID NO: 883721 - RNA, 19 nt, Homo sapiens
  misc_RNA (1)...(19): siRNA sense strand
ugagaaggcccacgagaac

SEQ ID NO: 883722 - RNA, 19 nt, Homo sapiens
  misc_RNA (1)...(19): siRNA sense strand
gcccaagccucagaaugca

SEQ ID NO: 883723 - RNA, 19 nt, Homo sapiens
  misc_RNA (1)...(19): siRNA sense strand
gggaggaagccaagauuuu

SEQ ID NO: 883724 - RNA, 19 nt, Homo sapiens
  misc_RNA (1)...(19): siRNA sense strand
agacagaugaagccuuguu

SEQ ID NO: 883725 - RNA, 19 nt, Homo sapiens
  misc_RNA (1)...(19): siRNA sense strand
gagcuguacccugauagug

SEQ ID NO: 883726 - RNA, 19 nt, Homo sapiens
  misc_RNA (1)...(19): siRNA sense strand
cuggagugcccaauucgua

SEQ ID NO: 883727 - RNA, 19 nt, Homo sapiens
  misc_RNA (1)...(19): siRNA sense strand
cgacaucguccucaugacu

SEQ ID NO: 883728 - RNA, 19 nt, Homo sapiens
  misc_RNA (1)...(19): siRNA sense strand
gcagucaccaucgcugugu

SEQ ID NO: 883729 - RNA, 19 nt, Homo sapiens
  misc_RNA (1)...(19): siRNA sense strand
ggacgaggagcagcagauc

SEQ ID NO: 883730 - RNA, 19 nt, Homo sapiens
  misc_RNA (1)...(19): siRNA sense strand
agaaggcccacgagaacaa

SEQ ID NO: 883731 - RNA, 19 nt, Homo sapiens
  misc_RNA (1)...(19): siRNA sense strand
gagaaggcccacgagaaca

SEQ ID NO: 883732 - RNA, 19 nt, Homo sapiens
  misc_RNA (1)...(19): siRNA sense strand
ggaccgauucuucgagcau

SEQ ID NO: 883733 - RNA, 19 nt, Homo sapiens
  misc_RNA (1)...(19): siRNA sense strand
caugagaacgaacccuuca

SEQ ID NO: 883734 - RNA, 19 nt, Homo sapiens
  misc_RNA (1)...(19): siRNA sense strand
gcccaauucguaccuacuu

SEQ ID NO: 883735 - RNA, 19 nt, Homo sapiens
  misc_RNA (1)...(19): siRNA sense strand
uggaggcacuggguagguu

SEQ ID NO: 883736 - RNA, 19 nt, Homo sapiens
  misc_RNA (1)...(19): siRNA sense strand
gcagcugccaccaucuuca

SEQ ID NO: 883737 - RNA, 19 nt, Homo sapiens
  misc_RNA (1)...(19): siRNA sense strand
gguguccgccucaucaaca

SEQ ID NO: 883738 - RNA, 19 nt, Homo sapiens
  misc_RNA (1)...(19): siRNA sense strand
gggccagccuucccuuuug

SEQ ID NO: 883739 - RNA, 19 nt, Homo sapiens
  misc_RNA (1)...(19): siRNA sense strand
cccaauucguaccuacuug

SEQ ID NO: 883740 - RNA, 19 nt, Homo sapiens
  misc_RNA (1)...(19): siRNA sense strand
cuaacaaccaugcucaagu

SEQ ID NO: 883741 - RNA, 19 nt, Homo sapiens
  misc_RNA (1)...(19): siRNA sense strand
ugagaacgaacccuucagu

SEQ ID NO: 883742 - RNA, 19 nt, Homo sapiens
  misc_RNA (1)...(19): siRNA sense strand
gacagaugaagccuuguuc

SEQ ID NO: 883743 - RNA, 19 nt, Homo sapiens
  misc_RNA (1)...(19): siRNA sense strand
ugcgagaagccauugauga

SEQ ID NO: 883744 - RNA, 19 nt, Homo sapiens
  misc_RNA (1)...(19): siRNA sense strand
ggagcuguacccugauagu

SEQ ID NO: 883745 - RNA, 19 nt, Homo sapiens
  misc_RNA (1)...(19): siRNA sense strand
ggaaauagauucucaugau

SEQ ID NO: 883746 - RNA, 19 nt, Homo sapiens
  misc_RNA (1)...(19): siRNA sense strand
gcagagaggugcacgugua

SEQ ID NO: 883747 - RNA, 19 nt, Homo sapiens
  misc_RNA (1)...(19): siRNA sense strand
caagauggguuugaacaua

SEQ ID NO: 883748 - RNA, 19 nt, Homo sapiens
  misc_RNA (1)...(19): siRNA sense strand
agaaggcgaugaaggauua

SEQ ID NO: 883749 - RNA, 19 nt, Homo sapiens
  misc_RNA (1)...(19): siRNA sense strand
gaaauagauucucaugaug

SEQ ID NO: 883750 - RNA, 19 nt, Homo sapiens
  misc_RNA (1)...(19): siRNA sense strand
agaaagauguugggaauaa

SEQ ID NO: 883751 - RNA, 19 nt, Homo sapiens
  misc_RNA (1)...(19): siRNA sense strand
gaacgucucuuccaaaaug

SEQ ID NO: 883752 - RNA, 19 nt, Homo sapiens
  misc_RNA (1)...(19): siRNA sense strand
gcacguguaugaauauauc

SEQ ID NO: 883753 - RNA, 19 nt, Homo sapiens
  misc_RNA (1)...(19): siRNA sense strand
gaaagauguugggaauaaa

SEQ ID NO: 883754 - RNA, 19 nt, Homo sapiens
  misc_RNA (1)...(19): siRNA sense strand
uggcagcucugggauauua

SEQ ID NO: 883755 - RNA, 19 nt, Homo sapiens
  misc_RNA (1)...(19): siRNA sense strand
ggagaacacuaaagagaag

SEQ ID NO: 883756 - RNA, 19 nt, Homo sapiens
  misc_RNA (1)...(19): siRNA sense strand
ugagaaagauguugggaau

SEQ ID NO: 883757 - RNA, 19 nt, Homo sapiens
  misc_RNA (1)...(19): siRNA sense strand
gcacugcccugcaccaagu

SEQ ID NO: 883758 - RNA, 19 nt, Homo sapiens
  misc_RNA (1)...(19): siRNA sense strand
aagagaagauucaaccaaa

SEQ ID NO: 883759 - RNA, 19 nt, Homo sapiens
  misc_RNA (1)...(19): siRNA sense strand
gcgcaauccucaacucuuc

SEQ ID NO: 883760 - RNA, 19 nt, Homo sapiens
  misc_RNA (1)...(19): siRNA sense strand
agacggagcugugccacua

SEQ ID NO: 883761 - RNA, 19 nt, Homo sapiens
  misc_RNA (1)...(19): siRNA sense strand
aagauggguuugaacauaa

SEQ ID NO: 883762 - RNA, 19 nt, Homo sapiens
  misc_RNA (1)...(19): siRNA sense strand
gcgaggaaauagauucuca

SEQ ID NO: 883763 - RNA, 19 nt, Homo sapiens
  misc_RNA (1)...(19): siRNA sense strand
ggaggaugacgacuacuuu

SEQ ID NO: 883764 - RNA, 19 nt, Homo sapiens
  misc_RNA (1)...(19): siRNA sense strand
ccuguucacuccauauauu

SEQ ID NO: 883765 - RNA, 19 nt, Homo sapiens
  misc_RNA (1)...(19): siRNA sense strand
gagaggugcacguguauga

SEQ ID NO: 883766 - RNA, 19 nt, Homo sapiens
  misc_RNA (1)...(19): siRNA sense strand
cuggagaccugcagaaaug

SEQ ID NO: 883767 - RNA, 19 nt, Homo sapiens
  misc_RNA (1)...(19): siRNA sense strand
gagaaggagccacguguug

SEQ ID NO: 883768 - RNA, 19 nt, Homo sapiens
  misc_RNA (1)...(19): siRNA sense strand
ccauacgcaucauuaauuc

SEQ ID NO: 883769 - RNA, 19 nt, Homo sapiens
  misc_RNA (1)...(19): siRNA sense strand
aaaccacacuugaagcaau

SEQ ID NO: 883770 - RNA, 19 nt, Homo sapiens
  misc_RNA (1)...(19): siRNA sense strand
caaccaaacccaccaucuu

SEQ ID NO: 883771 - RNA, 19 nt, Homo sapiens
  misc_RNA (1)...(19): siRNA sense strand
ccauauuccgcaaaucuua

SEQ ID NO: 883772 - RNA, 19 nt, Homo sapiens
  misc_RNA (1)...(19): siRNA sense strand
ccacccagccgguuccuuu

SEQ ID NO: 883773 - RNA, 19 nt, Homo sapiens
  misc_RNA (1)...(19): siRNA sense strand
ggaggcgggugaagaagag

SEQ ID NO: 883774 - RNA, 19 nt, Homo sapiens
  misc_RNA (1)...(19): siRNA sense strand
caggagaacacuaaagaga

SEQ ID NO: 883775 - RNA, 19 nt, Homo sapiens
  misc_RNA (1)...(19): siRNA sense strand
caucauuaauucgcagauu

SEQ ID NO: 883776 - RNA, 19 nt, Homo sapiens
  misc_RNA (1)...(19): siRNA sense strand
gcaauggagacaacgaaug

SEQ ID NO: 883777 - RNA, 19 nt, Homo sapiens
  misc_RNA (1)...(19): siRNA sense strand
gaaggagccacguguugga

SEQ ID NO: 883778 - RNA, 19 nt, Homo sapiens
  misc_RNA (1)...(19): siRNA sense strand
gagaaagauguugggaaua

SEQ ID NO: 883779 - RNA, 19 nt, Homo sapiens
  misc_RNA (1)...(19): siRNA sense strand
agauuuaacucugcuccua

SEQ ID NO: 883780 - RNA, 19 nt, Homo sapiens
  misc_RNA (1)...(19): siRNA sense strand
gaggaaauagauucucaug

SEQ ID NO: 883781 - RNA, 19 nt, Homo sapiens
  misc_RNA (1)...(19): siRNA sense strand
uauggcagcucugggauau

SEQ ID NO: 883782 - RNA, 19 nt, Homo sapiens
  misc_RNA (1)...(19): siRNA sense strand
ucacuucauugacaguuca

SEQ ID NO: 883783 - RNA, 19 nt, Homo sapiens
  misc_RNA (1)...(19): siRNA sense strand
gugcacguguaugaauaua

SEQ ID NO: 883784 - RNA, 19 nt, Homo sapiens
  misc_RNA (1)...(19): siRNA sense strand
gaacacuaaagagaagauu

SEQ ID NO: 883785 - RNA, 19 nt, Homo sapiens
  misc_RNA (1)...(19): siRNA sense strand
gguuugaacauaaagaguu

SEQ ID NO: 883786 - RNA, 19 nt, Homo sapiens
  misc_RNA (1)...(19): siRNA sense strand
aaagagaagauucaaccaa

SEQ ID NO: 883787 - RNA, 19 nt, Homo sapiens
  misc_RNA (1)...(19): siRNA sense strand
guaccacccacuacucuau

SEQ ID NO: 883788 - RNA, 19 nt, Homo sapiens
  misc_RNA (1)...(19): siRNA sense strand
guauaaagacgucauuuug

SEQ ID NO: 883789 - RNA, 19 nt, Homo sapiens
  misc_RNA (1)...(19): siRNA sense strand
gcaccaaguccagucauuc

SEQ ID NO: 883790 - RNA, 19 nt, Homo sapiens
  misc_RNA (1)...(19): siRNA sense strand
ccaccauacgcaucauuaa

SEQ ID NO: 883791 - RNA, 19 nt, Homo sapiens
  misc_RNA (1)...(19): siRNA sense strand
gaaacccaaaucagccauu

SEQ ID NO: 883792 - RNA, 19 nt, Homo sapiens
  misc_RNA (1)...(19): siRNA sense strand
gaaaccacacuugaagcaa

SEQ ID NO: 883793 - RNA, 19 nt, Homo sapiens
  misc_RNA (1)...(19): siRNA sense strand
gaggugcacguguaugaau

SEQ ID NO: 883794 - RNA, 19 nt, Homo sapiens
  misc_RNA (1)...(19): siRNA sense strand
cauauuccgcaaaucuuaa

SEQ ID NO: 883795 - RNA, 19 nt, Homo sapiens
  misc_RNA (1)...(19): siRNA sense strand
gaugcgguuuugagauuua

SEQ ID NO: 883796 - RNA, 19 nt, Homo sapiens
  misc_RNA (1)...(19): siRNA sense strand
acacuaaagagaagauuca

SEQ ID NO: 883797 - RNA, 19 nt, Homo sapiens
  misc_RNA (1)...(19): siRNA sense strand
caaaucuuaaccuguggua

SEQ ID NO: 883798 - RNA, 19 nt, Homo sapiens
  misc_RNA (1)...(19): siRNA sense strand
agauggguuugaacauaaa

SEQ ID NO: 883799 - RNA, 19 nt, Homo sapiens
  misc_RNA (1)...(19): siRNA sense strand
agaggaggcgggugaagaa

SEQ ID NO: 883800 - RNA, 19 nt, Homo sapiens
  misc_RNA (1)...(19): siRNA sense strand
agccaucacuucauugaca

SEQ ID NO: 883801 - RNA, 19 nt, Homo sapiens
  misc_RNA (1)...(19): siRNA sense strand
uacacgugguuaugagaaa

SEQ ID NO: 883802 - RNA, 19 nt, Homo sapiens
  misc_RNA (1)...(19): siRNA sense strand
gaagcaauggagacaacga

SEQ ID NO: 883803 - RNA, 19 nt, Homo sapiens
  misc_RNA (1)...(19): siRNA sense strand
ccagccaucacuucauuga

SEQ ID NO: 883804 - RNA, 19 nt, Homo sapiens
  misc_RNA (1)...(19): siRNA sense strand
accauacgcaucauuaauu

SEQ ID NO: 883805 - RNA, 19 nt, Homo sapiens
  misc_RNA (1)...(19): siRNA sense strand
gcagaaggcgaugaaggau

SEQ ID NO: 883806 - RNA, 19 nt, Homo sapiens
  misc_RNA (1)...(19): siRNA sense strand
aggugcacguguaugaaua

SEQ ID NO: 883807 - RNA, 19 nt, Homo sapiens
  misc_RNA (1)...(19): siRNA sense strand
cagaaggcgaugaaggauu

SEQ ID NO: 883808 - RNA, 19 nt, Homo sapiens
  misc_RNA (1)...(19): siRNA sense strand
caauggagacaacgaaugc

SEQ ID NO: 883809 - RNA, 19 nt, Homo sapiens
  misc_RNA (1)...(19): siRNA sense strand
accacgagcuguacuacga

SEQ ID NO: 883810 - RNA, 19 nt, Homo sapiens
  misc_RNA (1)...(19): siRNA sense strand
cgucagagaaacccaaauc

SEQ ID NO: 883811 - RNA, 19 nt, Homo sapiens
  misc_RNA (1)...(19): siRNA sense strand
aaucuuaaccugugguaca

SEQ ID NO: 883812 - RNA, 19 nt, Homo sapiens
  misc_RNA (1)...(19): siRNA sense strand
caccauacgcaucauuaau

SEQ ID NO: 883813 - RNA, 19 nt, Homo sapiens
  misc_RNA (1)...(19): siRNA sense strand
acaaccuguucacuccaua

SEQ ID NO: 883814 - RNA, 19 nt, Homo sapiens
  misc_RNA (1)...(19): siRNA sense strand
aaccacacuugaagcaaug

SEQ ID NO: 883815 - RNA, 19 nt, Homo sapiens
  misc_RNA (1)...(19): siRNA sense strand
ggagacaacgaaugcuuuu

SEQ ID NO: 883816 - RNA, 19 nt, Homo sapiens
  misc_RNA (1)...(19): siRNA sense strand
gccacuaccacgagcugua

SEQ ID NO: 883817 - RNA, 19 nt, Homo sapiens
  misc_RNA (1)...(19): siRNA sense strand
cagaggaggcgggugaaga

SEQ ID NO: 883818 - RNA, 19 nt, Homo sapiens
  misc_RNA (1)...(19): siRNA sense strand
aggagaacacuaaagagaa

SEQ ID NO: 883819 - RNA, 19 nt, Homo sapiens
  misc_RNA (1)...(19): siRNA sense strand
aaccaaacccaccaucuuc

SEQ ID NO: 883820 - RNA, 19 nt, Homo sapiens
  misc_RNA (1)...(19): siRNA sense strand
agagaagauucaaccaaac

SEQ ID NO: 883821 - RNA, 19 nt, Homo sapiens
  misc_RNA (1)...(19): siRNA sense strand
uggagacaacgaaugcuuu

SEQ ID NO: 883822 - RNA, 19 nt, Homo sapiens
  misc_RNA (1)...(19): siRNA sense strand
uccaggagaacacuaaaga

SEQ ID NO: 883823 - RNA, 19 nt, Homo sapiens
  misc_RNA (1)...(19): siRNA sense strand
caaccuguucacuccauau

SEQ ID NO: 883824 - RNA, 19 nt, Homo sapiens
  misc_RNA (1)...(19): siRNA sense strand
ccagccgguuccuuucaug

SEQ ID NO: 883825 - RNA, 19 nt, Homo sapiens
  misc_RNA (1)...(19): siRNA sense strand
cuacacgugguuaugagaa

SEQ ID NO: 883826 - RNA, 19 nt, Homo sapiens
  misc_RNA (1)...(19): siRNA sense strand
ggugcacguguaugaauau

SEQ ID NO: 883827 - RNA, 19 nt, Homo sapiens
  misc_RNA (1)...(19): siRNA sense strand
aaucagccauuuuacauuc

SEQ ID NO: 883828 - RNA, 19 nt, Homo sapiens
  misc_RNA (1)...(19): siRNA sense strand
gaaaggaaguucacuaaua

SEQ ID NO: 883829 - RNA, 19 nt, Homo sapiens
  misc_RNA (1)...(19): siRNA sense strand
gaauugcacuugugacuua

SEQ ID NO: 883830 - RNA, 19 nt, Homo sapiens
  misc_RNA (1)...(19): siRNA sense strand
agaaugaccucuuagaaua

SEQ ID NO: 883831 - RNA, 19 nt, Homo sapiens
  misc_RNA (1)...(19): siRNA sense strand
ggaacuaucuucaaacugu

SEQ ID NO: 883832 - RNA, 19 nt, Homo sapiens
  misc_RNA (1)...(19): siRNA sense strand
gaacaaaggauuuacaaca

SEQ ID NO: 883833 - RNA, 19 nt, Homo sapiens
  misc_RNA (1)...(19): siRNA sense strand
guccuuaccugauaauaua

SEQ ID NO: 883834 - RNA, 19 nt, Homo sapiens
  misc_RNA (1)...(19): siRNA sense strand
ggacagaacaugccaauuc

SEQ ID NO: 883835 - RNA, 19 nt, Homo sapiens
  misc_RNA (1)...(19): siRNA sense strand
acaacaagcuugagauauu

SEQ ID NO: 883836 - RNA, 19 nt, Homo sapiens
  misc_RNA (1)...(19): siRNA sense strand
ggaaccgucuugucaauga

SEQ ID NO: 883837 - RNA, 19 nt, Homo sapiens
  misc_RNA (1)...(19): siRNA sense strand
ugacaagacuguauccaaa

SEQ ID NO: 883838 - RNA, 19 nt, Homo sapiens
  misc_RNA (1)...(19): siRNA sense strand
cguaagcuccuuucaauua

SEQ ID NO: 883839 - RNA, 19 nt, Homo sapiens
  misc_RNA (1)...(19): siRNA sense strand
caacaggauugcagucauu

SEQ ID NO: 883840 - RNA, 19 nt, Homo sapiens
  misc_RNA (1)...(19): siRNA sense strand
gacguaagcuccuuucaau

SEQ ID NO: 883841 - RNA, 19 nt, Homo sapiens
  misc_RNA (1)...(19): siRNA sense strand
gcuguacccuucuauguuu

SEQ ID NO: 883842 - RNA, 19 nt, Homo sapiens
  misc_RNA (1)...(19): siRNA sense strand
gaaggaaggagacccagua

SEQ ID NO: 883843 - RNA, 19 nt, Homo sapiens
  misc_RNA (1)...(19): siRNA sense strand
gaaguucacuaauaucucu

SEQ ID NO: 883844 - RNA, 19 nt, Homo sapiens
  misc_RNA (1)...(19): siRNA sense strand
ccaaagaaacucuaccuaa

SEQ ID NO: 883845 - RNA, 19 nt, Homo sapiens
  misc_RNA (1)...(19): siRNA sense strand
caacaacaagcuugagaua

SEQ ID NO: 883846 - RNA, 19 nt, Homo sapiens
  misc_RNA (1)...(19): siRNA sense strand
caacaagcuugagauauug

SEQ ID NO: 883847 - RNA, 19 nt, Homo sapiens
  misc_RNA (1)...(19): siRNA sense strand
caaagaaacucuaccuaac

SEQ ID NO: 883848 - RNA, 19 nt, Homo sapiens
  misc_RNA (1)...(19): siRNA sense strand
gaauggcaauuaccuugaa

SEQ ID NO: 883849 - RNA, 19 nt, Homo sapiens
  misc_RNA (1)...(19): siRNA sense strand
uaucgaaucuaucagcuuu

SEQ ID NO: 883850 - RNA, 19 nt, Homo sapiens
  misc_RNA (1)...(19): siRNA sense strand
gaauguaaacugccaagaa

SEQ ID NO: 883851 - RNA, 19 nt, Homo sapiens
  misc_RNA (1)...(19): siRNA sense strand
ggccaugucuacaacuaua

SEQ ID NO: 883852 - RNA, 19 nt, Homo sapiens
  misc_RNA (1)...(19): siRNA sense strand
caaaggauuuacaacaguu

SEQ ID NO: 883853 - RNA, 19 nt, Homo sapiens
  misc_RNA (1)...(19): siRNA sense strand
caaacugucuauaagaaug

SEQ ID NO: 883854 - RNA, 19 nt, Homo sapiens
  misc_RNA (1)...(19): siRNA sense strand
caaaggcugucaccuacaa

SEQ ID NO: 883855 - RNA, 19 nt, Homo sapiens
  misc_RNA (1)...(19): siRNA sense strand
caaaggacaggcaaaguuu

SEQ ID NO: 883856 - RNA, 19 nt, Homo sapiens
  misc_RNA (1)...(19): siRNA sense strand
ccacugagcugcuagaaaa

SEQ ID NO: 883857 - RNA, 19 nt, Homo sapiens
  misc_RNA (1)...(19): siRNA sense strand
acaauggucugaauguaaa

SEQ ID NO: 883858 - RNA, 19 nt, Homo sapiens
  misc_RNA (1)...(19): siRNA sense strand
ucaaagugcucauccugaa

SEQ ID NO: 883859 - RNA, 19 nt, Homo sapiens
  misc_RNA (1)...(19): siRNA sense strand
aauguaaacugccaagaaa

SEQ ID NO: 883860 - RNA, 19 nt, Homo sapiens
  misc_RNA (1)...(19): siRNA sense strand
gagacccaguagccuauua

SEQ ID NO: 883861 - RNA, 19 nt, Homo sapiens
  misc_RNA (1)...(19): siRNA sense strand
gacaauggucugaauguaa

SEQ ID NO: 883862 - RNA, 19 nt, Homo sapiens
  misc_RNA (1)...(19): siRNA sense strand
gaccuuugaugcuuugauu

SEQ ID NO: 883863 - RNA, 19 nt, Homo sapiens
  misc_RNA (1)...(19): siRNA sense strand
acagggaacuaucuucaaa

SEQ ID NO: 883864 - RNA, 19 nt, Homo sapiens
  misc_RNA (1)...(19): siRNA sense strand
caaccacccuuuacugcaa

SEQ ID NO: 883865 - RNA, 19 nt, Homo sapiens
  misc_RNA (1)...(19): siRNA sense strand
ugggagagauugucuguga

SEQ ID NO: 883866 - RNA, 19 nt, Homo sapiens
  misc_RNA (1)...(19): siRNA sense strand
auacaguucuuuggacuua

SEQ ID NO: 883867 - RNA, 19 nt, Homo sapiens
  misc_RNA (1)...(19): siRNA sense strand
ucucagagcucagacaaug

SEQ ID NO: 883868 - RNA, 19 nt, Homo sapiens
  misc_RNA (1)...(19): siRNA sense strand
caagaaaggaaguucacua

SEQ ID NO: 883869 - RNA, 19 nt, Homo sapiens
  misc_RNA (1)...(19): siRNA sense strand
cgacuacaauuacaucagu

SEQ ID NO: 883870 - RNA, 19 nt, Homo sapiens
  misc_RNA (1)...(19): siRNA sense strand
caucuuaucugucuguuuu

SEQ ID NO: 883871 - RNA, 19 nt, Homo sapiens
  misc_RNA (1)...(19): siRNA sense strand
uggaucagcucccggcuuu

SEQ ID NO: 883872 - RNA, 19 nt, Homo sapiens
  misc_RNA (1)...(19): siRNA sense strand
gagaacaaaggauuuacaa

SEQ ID NO: 883873 - RNA, 19 nt, Homo sapiens
  misc_RNA (1)...(19): siRNA sense strand
gaaccgucuugucaaugaa

SEQ ID NO: 883874 - RNA, 19 nt, Homo sapiens
  misc_RNA (1)...(19): siRNA sense strand
gggaauaggcuaaaaguaa

SEQ ID NO: 883875 - RNA, 19 nt, Homo sapiens
  misc_RNA (1)...(19): siRNA sense strand
gagcugcuguaucaaaaua

SEQ ID NO: 883876 - RNA, 19 nt, Homo sapiens
  misc_RNA (1)...(19): siRNA sense strand
uaucaacugugagaacaaa

SEQ ID NO: 883877 - RNA, 19 nt, Homo sapiens
  misc_RNA (1)...(19): siRNA sense strand
ggaauaccaacaacuuaga

SEQ ID NO: 883878 - RNA, 19 nt, Homo sapiens
  misc_RNA (1)...(19): siRNA sense strand
caaugaaucacaauacaga

SEQ ID NO: 883879 - RNA, 19 nt, Homo sapiens
  misc_RNA (1)...(19): siRNA sense strand
uuaagccucugaccuuuga

SEQ ID NO: 883880 - RNA, 19 nt, Homo sapiens
  misc_RNA (1)...(19): siRNA sense strand
ucaaaggacaggcaaaguu

SEQ ID NO: 883881 - RNA, 19 nt, Homo sapiens
  misc_RNA (1)...(19): siRNA sense strand
gaacauauuggagggauca

SEQ ID NO: 883882 - RNA, 19 nt, Homo sapiens
  misc_RNA (1)...(19): siRNA sense strand
ggaauaggcuaaaaguaau

SEQ ID NO: 883883 - RNA, 19 nt, Homo sapiens
  misc_RNA (1)...(19): siRNA sense strand
gaaaauccauggaauugca

SEQ ID NO: 883884 - RNA, 19 nt, Homo sapiens
  misc_RNA (1)...(19): siRNA sense strand
cugcaagaguucagcuaua

SEQ ID NO: 883885 - RNA, 19 nt, Homo sapiens
  misc_RNA (1)...(19): siRNA sense strand
gacugcaucucaacaacaa

SEQ ID NO: 883886 - RNA, 19 nt, Homo sapiens
  misc_RNA (1)...(19): siRNA sense strand
agccugagcugcuguauca

SEQ ID NO: 883887 - RNA, 19 nt, Homo sapiens
  misc_RNA (1)...(19): siRNA sense strand
cuagacaccauaacuguuu

SEQ ID NO: 883888 - RNA, 19 nt, Homo sapiens
  misc_RNA (1)...(19): siRNA sense strand
ggagagauugucugugaga

SEQ ID NO: 883889 - RNA, 19 nt, Homo sapiens
  misc_RNA (1)...(19): siRNA sense strand
caggaauaccaacaacuua

SEQ ID NO: 883890 - RNA, 19 nt, Homo sapiens
  misc_RNA (1)...(19): siRNA sense strand
ugaggugacuugcgaaucu

SEQ ID NO: 883891 - RNA, 19 nt, Homo sapiens
  misc_RNA (1)...(19): siRNA sense strand
ggacuuacugcacuuagga

SEQ ID NO: 883892 - RNA, 19 nt, Homo sapiens
  misc_RNA (1)...(19): siRNA sense strand
gcugucaccuacaaugaau

SEQ ID NO: 883893 - RNA, 19 nt, Homo sapiens
  misc_RNA (1)...(19): siRNA sense strand
aagcuaagccgcaaucaga

SEQ ID NO: 883894 - RNA, 19 nt, Homo sapiens
  misc_RNA (1)...(19): siRNA sense strand
aagaaaggaaguucacuaa

SEQ ID NO: 883895 - RNA, 19 nt, Homo sapiens
  misc_RNA (1)...(19): siRNA sense strand
uaacagggaacuaucuuca

SEQ ID NO: 883896 - RNA, 19 nt, Homo sapiens
  misc_RNA (1)...(19): siRNA sense strand
cacaccugcuuacacaaua

SEQ ID NO: 883897 - RNA, 19 nt, Homo sapiens
  misc_RNA (1)...(19): siRNA sense strand
ccagacagcccaaacuugu

SEQ ID NO: 883898 - RNA, 19 nt, Homo sapiens
  misc_RNA (1)...(19): siRNA sense strand
ugacuuacuuccucucaag

SEQ ID NO: 883899 - RNA, 19 nt, Homo sapiens
  misc_RNA (1)...(19): siRNA sense strand
cuucgguccuuaccugaua

SEQ ID NO: 883900 - RNA, 19 nt, Homo sapiens
  misc_RNA (1)...(19): siRNA sense strand
aaauuaagccucugaccuu

SEQ ID NO: 883901 - RNA, 19 nt, Homo sapiens
  misc_RNA (1)...(19): siRNA sense strand
ccugaaaacucucaaaaga

SEQ ID NO: 883902 - RNA, 19 nt, Homo sapiens
  misc_RNA (1)...(19): siRNA sense strand
gaaaacguacugaauauca

SEQ ID NO: 883903 - RNA, 19 nt, Homo sapiens
  misc_RNA (1)...(19): siRNA sense strand
gagcuugcaauaucucuau

SEQ ID NO: 883904 - RNA, 19 nt, Homo sapiens
  misc_RNA (1)...(19): siRNA sense strand
ccaacgcggugacucuuca

SEQ ID NO: 883905 - RNA, 19 nt, Homo sapiens
  misc_RNA (1)...(19): siRNA sense strand
ccaggaauaccaacaacuu

SEQ ID NO: 883906 - RNA, 19 nt, Homo sapiens
  misc_RNA (1)...(19): siRNA sense strand
ggacuguaccugugacauc

SEQ ID NO: 883907 - RNA, 19 nt, Homo sapiens
  misc_RNA (1)...(19): siRNA sense strand
acaaaggauuuacaacagu

SEQ ID NO: 883908 - RNA, 19 nt, Homo sapiens
  misc_RNA (1)...(19): siRNA sense strand
aaaccgaccaguccaaaga

SEQ ID NO: 883909 - RNA, 19 nt, Homo sapiens
  misc_RNA (1)...(19): siRNA sense strand
guccaaaggcugucaccua

SEQ ID NO: 883910 - RNA, 19 nt, Homo sapiens
  misc_RNA (1)...(19): siRNA sense strand
gcaauguguuccgcuuugu

SEQ ID NO: 883911 - RNA, 19 nt, Homo sapiens
  misc_RNA (1)...(19): siRNA sense strand
aaagaaacucuaccuaaca

SEQ ID NO: 883912 - RNA, 19 nt, Homo sapiens
  misc_RNA (1)...(19): siRNA sense strand
aaccaagacagaaucaaua

SEQ ID NO: 883913 - RNA, 19 nt, Homo sapiens
  misc_RNA (1)...(19): siRNA sense strand
acaccugcuuacacaauaa

SEQ ID NO: 883914 - RNA, 19 nt, Homo sapiens
  misc_RNA (1)...(19): siRNA sense strand
caguaugggucuuacaaca

SEQ ID NO: 883915 - RNA, 19 nt, Homo sapiens
  misc_RNA (1)...(19): siRNA sense strand
uccacugucugucuuaauu

SEQ ID NO: 883916 - RNA, 19 nt, Homo sapiens
  misc_RNA (1)...(19): siRNA sense strand
gaaguuccacugucugucu

SEQ ID NO: 883917 - RNA, 19 nt, Homo sapiens
  misc_RNA (1)...(19): siRNA sense strand
gucaaugaaucacaauaca

SEQ ID NO: 883918 - RNA, 19 nt, Homo sapiens
  misc_RNA (1)...(19): siRNA sense strand
gcugaaagacuggacagaa

SEQ ID NO: 883919 - RNA, 19 nt, Homo sapiens
  misc_RNA (1)...(19): siRNA sense strand
ggagggaucauggagauuc

SEQ ID NO: 883920 - RNA, 19 nt, Homo sapiens
  misc_RNA (1)...(19): siRNA sense strand
auauggaacucccaggaaa

SEQ ID NO: 883921 - RNA, 19 nt, Homo sapiens
  misc_RNA (1)...(19): siRNA sense strand
gaauaucaacugugagaac

SEQ ID NO: 883922 - RNA, 19 nt, Homo sapiens
  misc_RNA (1)...(19): siRNA sense strand
ccaucuacaugcagaagga

SEQ ID NO: 883923 - RNA, 19 nt, Homo sapiens
  misc_RNA (1)...(19): siRNA sense strand
gaaucacaauacagacaca

SEQ ID NO: 883924 - RNA, 19 nt, Homo sapiens
  misc_RNA (1)...(19): siRNA sense strand
gacuguaccugugacauca

SEQ ID NO: 883925 - RNA, 19 nt, Homo sapiens
  misc_RNA (1)...(19): siRNA sense strand
gaucagcucccggcuuuca

SEQ ID NO: 883926 - RNA, 19 nt, Homo sapiens
  misc_RNA (1)...(19): siRNA sense strand
uuacugcacuuaggaaaca

SEQ ID NO: 883927 - RNA, 19 nt, Homo sapiens
  misc_RNA (1)...(19): siRNA sense strand
gagggaucauggagauuca

SEQ ID NO: 883928 - RNA, 19 nt, Homo sapiens
  misc_RNA (1)...(19): siRNA sense strand
gaaaggaaguucacuaaua

SEQ ID NO: 883929 - RNA, 19 nt, Homo sapiens
  misc_RNA (1)...(19): siRNA sense strand
gaauugcacuugugacuua

SEQ ID NO: 883930 - RNA, 19 nt, Homo sapiens
  misc_RNA (1)...(19): siRNA sense strand
agaaugaccucuuagaaua

SEQ ID NO: 883931 - RNA, 19 nt, Homo sapiens
  misc_RNA (1)...(19): siRNA sense strand
ggaacuaucuucaaacugu

SEQ ID NO: 883932 - RNA, 19 nt, Homo sapiens
  misc_RNA (1)...(19): siRNA sense strand
gaacaaaggauuuacaaca

SEQ ID NO: 883933 - RNA, 19 nt, Homo sapiens
  misc_RNA (1)...(19): siRNA sense strand
guccuuaccugauaauaua

SEQ ID NO: 883934 - RNA, 19 nt, Homo sapiens
  misc_RNA (1)...(19): siRNA sense strand
ggacagaacaugccaauuc

SEQ ID NO: 883935 - RNA, 19 nt, Homo sapiens
  misc_RNA (1)...(19): siRNA sense strand
acaacaagcuugagauauu

SEQ ID NO: 883936 - RNA, 19 nt, Homo sapiens
  misc_RNA (1)...(19): siRNA sense strand
ggaaccgucuugucaauga

SEQ ID NO: 883937 - RNA, 19 nt, Homo sapiens
  misc_RNA (1)...(19): siRNA sense strand
ugacaagacuguauccaaa

SEQ ID NO: 883938 - RNA, 19 nt, Homo sapiens
  misc_RNA (1)...(19): siRNA sense strand
cguaagcuccuuucaauua

SEQ ID NO: 883939 - RNA, 19 nt, Homo sapiens
  misc_RNA (1)...(19): siRNA sense strand
caacaggauugcagucauu

SEQ ID NO: 883940 - RNA, 19 nt, Homo sapiens
  misc_RNA (1)...(19): siRNA sense strand
gacguaagcuccuuucaau

SEQ ID NO: 883941 - RNA, 19 nt, Homo sapiens
  misc_RNA (1)...(19): siRNA sense strand
gcuguacccuucuauguuu

SEQ ID NO: 883942 - RNA, 19 nt, Homo sapiens
  misc_RNA (1)...(19): siRNA sense strand
gaaggaaggagacccagua

SEQ ID NO: 883943 - RNA, 19 nt, Homo sapiens
  misc_RNA (1)...(19): siRNA sense strand
gaaguucacuaauaucucu

SEQ ID NO: 883944 - RNA, 19 nt, Homo sapiens
  misc_RNA (1)...(19): siRNA sense strand
ccaaagaaacucuaccuaa

SEQ ID NO: 883945 - RNA, 19 nt, Homo sapiens
  misc_RNA (1)...(19): siRNA sense strand
caacaacaagcuugagaua

SEQ ID NO: 883946 - RNA, 19 nt, Homo sapiens
  misc_RNA (1)...(19): siRNA sense strand
caacaagcuugagauauug

SEQ ID NO: 883947 - RNA, 19 nt, Homo sapiens
  misc_RNA (1)...(19): siRNA sense strand
caaagaaacucuaccuaac

SEQ ID NO: 883948 - RNA, 19 nt, Homo sapiens
  misc_RNA (1)...(19): siRNA sense strand
gaauggcaauuaccuugaa

SEQ ID NO: 883949 - RNA, 19 nt, Homo sapiens
  misc_RNA (1)...(19): siRNA sense strand
uaucgaaucuaucagcuuu

SEQ ID NO: 883950 - RNA, 19 nt, Homo sapiens
  misc_RNA (1)...(19): siRNA sense strand
gaauguaaacugccaagaa

SEQ ID NO: 883951 - RNA, 19 nt, Homo sapiens
  misc_RNA (1)...(19): siRNA sense strand
ggccaugucuacaacuaua

SEQ ID NO: 883952 - RNA, 19 nt, Homo sapiens
  misc_RNA (1)...(19): siRNA sense strand
caaaggauuuacaacaguu

SEQ ID NO: 883953 - RNA, 19 nt, Homo sapiens
  misc_RNA (1)...(19): siRNA sense strand
caaacugucuauaagaaug

SEQ ID NO: 883954 - RNA, 19 nt, Homo sapiens
  misc_RNA (1)...(19): siRNA sense strand
caaaggcugucaccuacaa

SEQ ID NO: 883955 - RNA, 19 nt, Homo sapiens
  misc_RNA (1)...(19): siRNA sense strand
caaaggacaggcaaaguuu

SEQ ID NO: 883956 - RNA, 19 nt, Homo sapiens
  misc_RNA (1)...(19): siRNA sense strand
ccacugagcugcuagaaaa

SEQ ID NO: 883957 - RNA, 19 nt, Homo sapiens
  misc_RNA (1)...(19): siRNA sense strand
acaauggucugaauguaaa

SEQ ID NO: 883958 - RNA, 19 nt, Homo sapiens
  misc_RNA (1)...(19): siRNA sense strand
ucaaagugcucauccugaa

SEQ ID NO: 883959 - RNA, 19 nt, Homo sapiens
  misc_RNA (1)...(19): siRNA sense strand
aauguaaacugccaagaaa

SEQ ID NO: 883960 - RNA, 19 nt, Homo sapiens
  misc_RNA (1)...(19): siRNA sense strand
gagacccaguagccuauua

SEQ ID NO: 883961 - RNA, 19 nt, Homo sapiens
  misc_RNA (1)...(19): siRNA sense strand
gacaauggucugaauguaa

SEQ ID NO: 883962 - RNA, 19 nt, Homo sapiens
  misc_RNA (1)...(19): siRNA sense strand
gaccuuugaugcuuugauu

SEQ ID NO: 883963 - RNA, 19 nt, Homo sapiens
  misc_RNA (1)...(19): siRNA sense strand
acagggaacuaucuucaaa

SEQ ID NO: 883964 - RNA, 19 nt, Homo sapiens
  misc_RNA (1)...(19): siRNA sense strand
caaccacccuuuacugcaa

SEQ ID NO: 883965 - RNA, 19 nt, Homo sapiens
  misc_RNA (1)...(19): siRNA sense strand
ugggagagauugucuguga

SEQ ID NO: 883966 - RNA, 19 nt, Homo sapiens
  misc_RNA (1)...(19): siRNA sense strand
auacaguucuuuggacuua

SEQ ID NO: 883967 - RNA, 19 nt, Homo sapiens
  misc_RNA (1)...(19): siRNA sense strand
ucucagagcucagacaaug

SEQ ID NO: 883968 - RNA, 19 nt, Homo sapiens
  misc_RNA (1)...(19): siRNA sense strand
caagaaaggaaguucacua

SEQ ID NO: 883969 - RNA, 19 nt, Homo sapiens
  misc_RNA (1)...(19): siRNA sense strand
cgacuacaauuacaucagu

SEQ ID NO: 883970 - RNA, 19 nt, Homo sapiens
  misc_RNA (1)...(19): siRNA sense strand
caucuuaucugucuguuuu

SEQ ID NO: 883971 - RNA, 19 nt, Homo sapiens
  misc_RNA (1)...(19): siRNA sense strand
uggaucagcucccggcuuu

SEQ ID NO: 883972 - RNA, 19 nt, Homo sapiens
  misc_RNA (1)...(19): siRNA sense strand
gagaacaaaggauuuacaa

SEQ ID NO: 883973 - RNA, 19 nt, Homo sapiens
  misc_RNA (1)...(19): siRNA sense strand
gaaccgucuugucaaugaa

SEQ ID NO: 883974 - RNA, 19 nt, Homo sapiens
  misc_RNA (1)...(19): siRNA sense strand
gggaauaggcuaaaaguaa

SEQ ID NO: 883975 - RNA, 19 nt, Homo sapiens
  misc_RNA (1)...(19): siRNA sense strand
gagcugcuguaucaaaaua

SEQ ID NO: 883976 - RNA, 19 nt, Homo sapiens
  misc_RNA (1)...(19): siRNA sense strand
uaucaacugugagaacaaa

SEQ ID NO: 883977 - RNA, 19 nt, Homo sapiens
  misc_RNA (1)...(19): siRNA sense strand
ggaauaccaacaacuuaga

SEQ ID NO: 883978 - RNA, 19 nt, Homo sapiens
  misc_RNA (1)...(19): siRNA sense strand
caaugaaucacaauacaga

SEQ ID NO: 883979 - RNA, 19 nt, Homo sapiens
  misc_RNA (1)...(19): siRNA sense strand
uuaagccucugaccuuuga

SEQ ID NO: 883980 - RNA, 19 nt, Homo sapiens
  misc_RNA (1)...(19): siRNA sense strand
ucaaaggacaggcaaaguu

SEQ ID NO: 883981 - RNA, 19 nt, Homo sapiens
  misc_RNA (1)...(19): siRNA sense strand
gaacauauuggagggauca

SEQ ID NO: 883982 - RNA, 19 nt, Homo sapiens
  misc_RNA (1)...(19): siRNA sense strand
ggaauaggcuaaaaguaau

SEQ ID NO: 883983 - RNA, 19 nt, Homo sapiens
  misc_RNA (1)...(19): siRNA sense strand
gaaaauccauggaauugca

SEQ ID NO: 883984 - RNA, 19 nt, Homo sapiens
  misc_RNA (1)...(19): siRNA sense strand
cugcaagaguucagcuaua

SEQ ID NO: 883985 - RNA, 19 nt, Homo sapiens
  misc_RNA (1)...(19): siRNA sense strand
gacugcaucucaacaacaa

SEQ ID NO: 883986 - RNA, 19 nt, Homo sapiens
  misc_RNA (1)...(19): siRNA sense strand
agccugagcugcuguauca

SEQ ID NO: 883987 - RNA, 19 nt, Homo sapiens
  misc_RNA (1)...(19): siRNA sense strand
cuagacaccauaacuguuu

SEQ ID NO: 883988 - RNA, 19 nt, Homo sapiens
  misc_RNA (1)...(19): siRNA sense strand
ggagagauugucugugaga

SEQ ID NO: 883989 - RNA, 19 nt, Homo sapiens
  misc_RNA (1)...(19): siRNA sense strand
caggaauaccaacaacuua

SEQ ID NO: 883990 - RNA, 19 nt, Homo sapiens
  misc_RNA (1)...(19): siRNA sense strand
ugaggugacuugcgaaucu

SEQ ID NO: 883991 - RNA, 19 nt, Homo sapiens
  misc_RNA (1)...(19): siRNA sense strand
ggacuuacugcacuuagga

SEQ ID NO: 883992 - RNA, 19 nt, Homo sapiens
  misc_RNA (1)...(19): siRNA sense strand
gcugucaccuacaaugaau

SEQ ID NO: 883993 - RNA, 19 nt, Homo sapiens
  misc_RNA (1)...(19): siRNA sense strand
aagcuaagccgcaaucaga

SEQ ID NO: 883994 - RNA, 19 nt, Homo sapiens
  misc_RNA (1)...(19): siRNA sense strand
aagaaaggaaguucacuaa

SEQ ID NO: 883995 - RNA, 19 nt, Homo sapiens
  misc_RNA (1)...(19): siRNA sense strand
uaacagggaacuaucuuca

SEQ ID NO: 883996 - RNA, 19 nt, Homo sapiens
  misc_RNA (1)...(19): siRNA sense strand
cacaccugcuuacacaaua

SEQ ID NO: 883997 - RNA, 19 nt, Homo sapiens
  misc_RNA (1)...(19): siRNA sense strand
ccagacagcccaaacuugu

SEQ ID NO: 883998 - RNA, 19 nt, Homo sapiens
  misc_RNA (1)...(19): siRNA sense strand
ugacuuacuuccucucaag

SEQ ID NO: 883999 - RNA, 19 nt, Homo sapiens
  misc_RNA (1)...(19): siRNA sense strand
cuucgguccuuaccugaua

SEQ ID NO: 884000 - RNA, 19 nt, Homo sapiens
  misc_RNA (1)...(19): siRNA sense strand
aaauuaagccucugaccuu

SEQ ID NO: 884001 - RNA, 19 nt, Homo sapiens
  misc_RNA (1)...(19): siRNA sense strand
ccugaaaacucucaaaaga

SEQ ID NO: 884002 - RNA, 19 nt, Homo sapiens
  misc_RNA (1)...(19): siRNA sense strand
gaaaacguacugaauauca

SEQ ID NO: 884003 - RNA, 19 nt, Homo sapiens
  misc_RNA (1)...(19): siRNA sense strand
gagcuugcaauaucucuau

SEQ ID NO: 884004 - RNA, 19 nt, Homo sapiens
  misc_RNA (1)...(19): siRNA sense strand
ccaacgcggugacucuuca

SEQ ID NO: 884005 - RNA, 19 nt, Homo sapiens
  misc_RNA (1)...(19): siRNA sense strand
ccaggaauaccaacaacuu

SEQ ID NO: 884006 - RNA, 19 nt, Homo sapiens
  misc_RNA (1)...(19): siRNA sense strand
ggacuguaccugugacauc

SEQ ID NO: 884007 - RNA, 19 nt, Homo sapiens
  misc_RNA (1)...(19): siRNA sense strand
acaaaggauuuacaacagu

SEQ ID NO: 884008 - RNA, 19 nt, Homo sapiens
  misc_RNA (1)...(19): siRNA sense strand
aaaccgaccaguccaaaga

SEQ ID NO: 884009 - RNA, 19 nt, Homo sapiens
  misc_RNA (1)...(19): siRNA sense strand
guccaaaggcugucaccua

SEQ ID NO: 884010 - RNA, 19 nt, Homo sapiens
  misc_RNA (1)...(19): siRNA sense strand
gcaauguguuccgcuuugu

SEQ ID NO: 884011 - RNA, 19 nt, Homo sapiens
  misc_RNA (1)...(19): siRNA sense strand
aaagaaacucuaccuaaca

SEQ ID NO: 884012 - RNA, 19 nt, Homo sapiens
  misc_RNA (1)...(19): siRNA sense strand
aaccaagacagaaucaaua

SEQ ID NO: 884013 - RNA, 19 nt, Homo sapiens
  misc_RNA (1)...(19): siRNA sense strand
acaccugcuuacacaauaa

SEQ ID NO: 884014 - RNA, 19 nt, Homo sapiens
  misc_RNA (1)...(19): siRNA sense strand
caguaugggucuuacaaca

SEQ ID NO: 884015 - RNA, 19 nt, Homo sapiens
  misc_RNA (1)...(19): siRNA sense strand
uccacugucugucuuaauu

SEQ ID NO: 884016 - RNA, 19 nt, Homo sapiens
  misc_RNA (1)...(19): siRNA sense strand
gaaguuccacugucugucu

SEQ ID NO: 884017 - RNA, 19 nt, Homo sapiens
  misc_RNA (1)...(19): siRNA sense strand
gucaaugaaucacaauaca

SEQ ID NO: 884018 - RNA, 19 nt, Homo sapiens
  misc_RNA (1)...(19): siRNA sense strand
gcugaaagacuggacagaa

SEQ ID NO: 884019 - RNA, 19 nt, Homo sapiens
  misc_RNA (1)...(19): siRNA sense strand
ggagggaucauggagauuc

SEQ ID NO: 884020 - RNA, 19 nt, Homo sapiens
  misc_RNA (1)...(19): siRNA sense strand
auauggaacucccaggaaa

SEQ ID NO: 884021 - RNA, 19 nt, Homo sapiens
  misc_RNA (1)...(19): siRNA sense strand
gaauaucaacugugagaac

SEQ ID NO: 884022 - RNA, 19 nt, Homo sapiens
  misc_RNA (1)...(19): siRNA sense strand
ccaucuacaugcagaagga

SEQ ID NO: 884023 - RNA, 19 nt, Homo sapiens
  misc_RNA (1)...(19): siRNA sense strand
gaaucacaauacagacaca

SEQ ID NO: 884024 - RNA, 19 nt, Homo sapiens
  misc_RNA (1)...(19): siRNA sense strand
gacuguaccugugacauca

SEQ ID NO: 884025 - RNA, 19 nt, Homo sapiens
  misc_RNA (1)...(19): siRNA sense strand
gaucagcucccggcuuuca

SEQ ID NO: 884026 - RNA, 19 nt, Homo sapiens
  misc_RNA (1)...(19): siRNA sense strand
uuacugcacuuaggaaaca

SEQ ID NO: 884027 - RNA, 19 nt, Homo sapiens
  misc_RNA (1)...(19): siRNA sense strand
gagggaucauggagauuca

SEQ ID NO: 884028 - RNA, 19 nt, Homo sapiens
  misc_RNA (1)...(19): siRNA sense strand
ggaaagaggaggaggaaga

SEQ ID NO: 884029 - RNA, 19 nt, Homo sapiens
  misc_RNA (1)...(19): siRNA sense strand
caacauuucucuugcagau

SEQ ID NO: 884030 - RNA, 19 nt, Homo sapiens
  misc_RNA (1)...(19): siRNA sense strand
gaugaugaaugcugacaug

SEQ ID NO: 884031 - RNA, 19 nt, Homo sapiens
  misc_RNA (1)...(19): siRNA sense strand
gaugaaugcugacauggau

SEQ ID NO: 884032 - RNA, 19 nt, Homo sapiens
  misc_RNA (1)...(19): siRNA sense strand
ugacauggaugcaguugau

SEQ ID NO: 884033 - RNA, 19 nt, Homo sapiens
  misc_RNA (1)...(19): siRNA sense strand
caugucagcuucuaguguu

SEQ ID NO: 884034 - RNA, 19 nt, Homo sapiens
  misc_RNA (1)...(19): siRNA sense strand
ucaaacaacugacacaaaa

SEQ ID NO: 884035 - RNA, 19 nt, Homo sapiens
  misc_RNA (1)...(19): siRNA sense strand
acauuucucuugcagauga

SEQ ID NO: 884036 - RNA, 19 nt, Homo sapiens
  misc_RNA (1)...(19): siRNA sense strand
cauagaccauuccucaaga

SEQ ID NO: 884037 - RNA, 19 nt, Homo sapiens
  misc_RNA (1)...(19): siRNA sense strand
cagaugacauagaccauuc

SEQ ID NO: 884038 - RNA, 19 nt, Homo sapiens
  misc_RNA (1)...(19): siRNA sense strand
gaagaaaaucugaagcuaa

SEQ ID NO: 884039 - RNA, 19 nt, Homo sapiens
  misc_RNA (1)...(19): siRNA sense strand
ggaugcaguugaugcugaa

SEQ ID NO: 884040 - RNA, 19 nt, Homo sapiens
  misc_RNA (1)...(19): siRNA sense strand
ggaagaaaaucugaagcua

SEQ ID NO: 884041 - RNA, 19 nt, Homo sapiens
  misc_RNA (1)...(19): siRNA sense strand
aagaguagaugcaguuaag

SEQ ID NO: 884042 - RNA, 19 nt, Homo sapiens
  misc_RNA (1)...(19): siRNA sense strand
gcaagaguagaugcaguua

SEQ ID NO: 884043 - RNA, 19 nt, Homo sapiens
  misc_RNA (1)...(19): siRNA sense strand
gaacuccaacacacacuug

SEQ ID NO: 884044 - RNA, 19 nt, Homo sapiens
  misc_RNA (1)...(19): siRNA sense strand
uagaugcaguuaaggaaga

SEQ ID NO: 884045 - RNA, 19 nt, Homo sapiens
  misc_RNA (1)...(19): siRNA sense strand
gcagaugacauagaccauu

SEQ ID NO: 884046 - RNA, 19 nt, Homo sapiens
  misc_RNA (1)...(19): siRNA sense strand
gaggaagacagcacacuca

SEQ ID NO: 884047 - RNA, 19 nt, Homo sapiens
  misc_RNA (1)...(19): siRNA sense strand
gaaaaucucaugucagcuu

SEQ ID NO: 884048 - RNA, 19 nt, Homo sapiens
  misc_RNA (1)...(19): siRNA sense strand
caagaguagaugcaguuaa

SEQ ID NO: 884049 - RNA, 19 nt, Homo sapiens
  misc_RNA (1)...(19): siRNA sense strand
gcacacucaccaacauuuc

SEQ ID NO: 884050 - RNA, 19 nt, Homo sapiens
  misc_RNA (1)...(19): siRNA sense strand
gaguagaugcaguuaagga

SEQ ID NO: 884051 - RNA, 19 nt, Homo sapiens
  misc_RNA (1)...(19): siRNA sense strand
caacacacacuugaagauc

SEQ ID NO: 884052 - RNA, 19 nt, Homo sapiens
  misc_RNA (1)...(19): siRNA sense strand
guucuuggacaauauauag

SEQ ID NO: 884053 - RNA, 19 nt, Homo sapiens
  misc_RNA (1)...(19): siRNA sense strand
uacccaagaugaugaaugc

SEQ ID NO: 884054 - RNA, 19 nt, Homo sapiens
  misc_RNA (1)...(19): siRNA sense strand
uuaaucaaguguuggaacu

SEQ ID NO: 884055 - RNA, 19 nt, Homo sapiens
  misc_RNA (1)...(19): siRNA sense strand
aaucucaugucagcuucua

SEQ ID NO: 884056 - RNA, 19 nt, Homo sapiens
  misc_RNA (1)...(19): siRNA sense strand
ccaacacacacuugaagau

SEQ ID NO: 884057 - RNA, 19 nt, Homo sapiens
  misc_RNA (1)...(19): siRNA sense strand
gaaagaggaggaggaagac

SEQ ID NO: 884058 - RNA, 19 nt, Homo sapiens
  misc_RNA (1)...(19): siRNA sense strand
gcuaaaaucagaaaaccaa

SEQ ID NO: 884059 - RNA, 19 nt, Homo sapiens
  misc_RNA (1)...(19): siRNA sense strand
auagaccauuccucaagaa

SEQ ID NO: 884060 - RNA, 19 nt, Homo sapiens
  misc_RNA (1)...(19): siRNA sense strand
ggaacuccaacacacacuu

SEQ ID NO: 884061 - RNA, 19 nt, Homo sapiens
  misc_RNA (1)...(19): siRNA sense strand
aaaguuuguuacccaagau

SEQ ID NO: 884062 - RNA, 19 nt, Homo sapiens
  misc_RNA (1)...(19): siRNA sense strand
acagcacacucaccaacau

SEQ ID NO: 884063 - RNA, 19 nt, Homo sapiens
  misc_RNA (1)...(19): siRNA sense strand
caaguggaacuggaggaaa

SEQ ID NO: 884064 - RNA, 19 nt, Homo sapiens
  misc_RNA (1)...(19): siRNA sense strand
acacacacuugaagaucuc

SEQ ID NO: 884065 - RNA, 19 nt, Homo sapiens
  misc_RNA (1)...(19): siRNA sense strand
gacauagaccauuccucaa

SEQ ID NO: 884066 - RNA, 19 nt, Homo sapiens
  misc_RNA (1)...(19): siRNA sense strand
caccaacauuucucuugca

SEQ ID NO: 884067 - RNA, 19 nt, Homo sapiens
  misc_RNA (1)...(19): siRNA sense strand
cagcacacucaccaacauu

SEQ ID NO: 884068 - RNA, 19 nt, Homo sapiens
  misc_RNA (1)...(19): siRNA sense strand
caggaaagaggaggaggaa

SEQ ID NO: 884069 - RNA, 19 nt, Homo sapiens
  misc_RNA (1)...(19): siRNA sense strand
gacagcacacucaccaaca

SEQ ID NO: 884070 - RNA, 19 nt, Homo sapiens
  misc_RNA (1)...(19): siRNA sense strand
gaacagaagaucauuaaga

SEQ ID NO: 884071 - RNA, 19 nt, Homo sapiens
  misc_RNA (1)...(19): siRNA sense strand
ugaaggagauauugucaga

SEQ ID NO: 884072 - RNA, 19 nt, Homo sapiens
  misc_RNA (1)...(19): siRNA sense strand
gaaauuggaaucuguucuu

SEQ ID NO: 884073 - RNA, 19 nt, Homo sapiens
  misc_RNA (1)...(19): siRNA sense strand
ccagagcgcuuaccaguac

SEQ ID NO: 884074 - RNA, 19 nt, Homo sapiens
  misc_RNA (1)...(19): siRNA sense strand
uaucauuggugucuccuaa

SEQ ID NO: 884075 - RNA, 19 nt, Homo sapiens
  misc_RNA (1)...(19): siRNA sense strand
cagaacagaagaucauuaa

SEQ ID NO: 884076 - RNA, 19 nt, Homo sapiens
  misc_RNA (1)...(19): siRNA sense strand
guggugacauuguaucauu

SEQ ID NO: 884077 - RNA, 19 nt, Homo sapiens
  misc_RNA (1)...(19): siRNA sense strand
gaugcagccuucuuugaau

SEQ ID NO: 884078 - RNA, 19 nt, Homo sapiens
  misc_RNA (1)...(19): siRNA sense strand
ggacacaguuuugacagua

SEQ ID NO: 884079 - RNA, 19 nt, Homo sapiens
  misc_RNA (1)...(19): siRNA sense strand
ccagaacagaagaucauua

SEQ ID NO: 884080 - RNA, 19 nt, Homo sapiens
  misc_RNA (1)...(19): siRNA sense strand
gauauugucagaaccauag

SEQ ID NO: 884081 - RNA, 19 nt, Homo sapiens
  misc_RNA (1)...(19): siRNA sense strand
ggucacaucuggguugaag

SEQ ID NO: 884082 - RNA, 19 nt, Homo sapiens
  misc_RNA (1)...(19): siRNA sense strand
ggcagugacuuucuuggau

SEQ ID NO: 884083 - RNA, 19 nt, Homo sapiens
  misc_RNA (1)...(19): siRNA sense strand
gcgcuuaccaguacagaga

SEQ ID NO: 884084 - RNA, 19 nt, Homo sapiens
  misc_RNA (1)...(19): siRNA sense strand
aacagaagaucauuaagag

SEQ ID NO: 884085 - RNA, 19 nt, Homo sapiens
  misc_RNA (1)...(19): siRNA sense strand
caucgaugcagccuucuuu

SEQ ID NO: 884086 - RNA, 19 nt, Homo sapiens
  misc_RNA (1)...(19): siRNA sense strand
cgaugcagccuucuuugaa

SEQ ID NO: 884087 - RNA, 19 nt, Homo sapiens
  misc_RNA (1)...(19): siRNA sense strand
acuggaaagugaggaauuu

SEQ ID NO: 884088 - RNA, 19 nt, Homo sapiens
  misc_RNA (1)...(19): siRNA sense strand
agugauugcucuugaagga

SEQ ID NO: 884089 - RNA, 19 nt, Homo sapiens
  misc_RNA (1)...(19): siRNA sense strand
acagagagaagaggaauga

SEQ ID NO: 884090 - RNA, 19 nt, Homo sapiens
  misc_RNA (1)...(19): siRNA sense strand
aaaccgguaugucaaaguc

SEQ ID NO: 884091 - RNA, 19 nt, Homo sapiens
  misc_RNA (1)...(19): siRNA sense strand
gaucaucauggacacaguu

SEQ ID NO: 884092 - RNA, 19 nt, Homo sapiens
  misc_RNA (1)...(19): siRNA sense strand
ggagauauugucagaacca

SEQ ID NO: 884093 - RNA, 19 nt, Homo sapiens
  misc_RNA (1)...(19): siRNA sense strand
ggaaagugaggaauuuuga

SEQ ID NO: 884094 - RNA, 19 nt, Homo sapiens
  misc_RNA (1)...(19): siRNA sense strand
aaggagauauugucagaac

SEQ ID NO: 884095 - RNA, 19 nt, Homo sapiens
  misc_RNA (1)...(19): siRNA sense strand
caucaaggccuuuuguaaa

SEQ ID NO: 884096 - RNA, 19 nt, Homo sapiens
  misc_RNA (1)...(19): siRNA sense strand
agaagaucauuaagagagu

SEQ ID NO: 884097 - RNA, 19 nt, Homo sapiens
  misc_RNA (1)...(19): siRNA sense strand
caucuggguugaaggugau

SEQ ID NO: 884098 - RNA, 19 nt, Homo sapiens
  misc_RNA (1)...(19): siRNA sense strand
guacagagagaagaggaau

SEQ ID NO: 884099 - RNA, 19 nt, Homo sapiens
  misc_RNA (1)...(19): siRNA sense strand
gcucuugaaggagauauug

SEQ ID NO: 884100 - RNA, 19 nt, Homo sapiens
  misc_RNA (1)...(19): siRNA sense strand
aaauuggaaucuguucuuc

SEQ ID NO: 884101 - RNA, 19 nt, Homo sapiens
  misc_RNA (1)...(19): siRNA sense strand
gaaggagauauugucagaa

SEQ ID NO: 884102 - RNA, 19 nt, Homo sapiens
  misc_RNA (1)...(19): siRNA sense strand
gagauauugucagaaccau

SEQ ID NO: 884103 - RNA, 19 nt, Homo sapiens
  misc_RNA (1)...(19): siRNA sense strand
gcuuaccaguacagagaga

SEQ ID NO: 884104 - RNA, 19 nt, Homo sapiens
  misc_RNA (1)...(19): siRNA sense strand
aagggugggugaaaagaua

SEQ ID NO: 884105 - RNA, 19 nt, Homo sapiens
  misc_RNA (1)...(19): siRNA sense strand
ucagaaccauaggacacaa

SEQ ID NO: 884106 - RNA, 19 nt, Homo sapiens
  misc_RNA (1)...(19): siRNA sense strand
gacacaguuuugacaguaa

SEQ ID NO: 884107 - RNA, 19 nt, Homo sapiens
  misc_RNA (1)...(19): siRNA sense strand
ggucgccuguguggcaaga

SEQ ID NO: 884108 - RNA, 19 nt, Homo sapiens
  misc_RNA (1)...(19): siRNA sense strand
agugaggaauuuugaagua

SEQ ID NO: 884109 - RNA, 19 nt, Homo sapiens
  misc_RNA (1)...(19): siRNA sense strand
gaaagugaggaauuuugaa

SEQ ID NO: 884110 - RNA, 19 nt, Homo sapiens
  misc_RNA (1)...(19): siRNA sense strand
ucauuggugucuccuaaaa

SEQ ID NO: 884111 - RNA, 19 nt, Homo sapiens
  misc_RNA (1)...(19): siRNA sense strand
ucacaucuggguugaaggu

SEQ ID NO: 884112 - RNA, 19 nt, Homo sapiens
  misc_RNA (1)...(19): siRNA sense strand
gcacagcacuggugaagaa

SEQ ID NO: 884113 - RNA, 19 nt, Homo sapiens
  misc_RNA (1)...(19): siRNA sense strand
gauagggucuccuguauug

SEQ ID NO: 884114 - RNA, 19 nt, Homo sapiens
  misc_RNA (1)...(19): siRNA sense strand
ccaaagacgucaagaagaa

SEQ ID NO: 884115 - RNA, 19 nt, Homo sapiens
  misc_RNA (1)...(19): siRNA sense strand
gaugaggaguacauuuaua

SEQ ID NO: 884116 - RNA, 19 nt, Homo sapiens
  misc_RNA (1)...(19): siRNA sense strand
ucucagagcccaacacuua

SEQ ID NO: 884117 - RNA, 19 nt, Homo sapiens
  misc_RNA (1)...(19): siRNA sense strand
gaugagcccugcauaaagu

SEQ ID NO: 884118 - RNA, 19 nt, Homo sapiens
  misc_RNA (1)...(19): siRNA sense strand
gaaaugcacagacaaggaa

SEQ ID NO: 884119 - RNA, 19 nt, Homo sapiens
  misc_RNA (1)...(19): siRNA sense strand
gcagaugacccaaaugaga

SEQ ID NO: 884120 - RNA, 19 nt, Homo sapiens
  misc_RNA (1)...(19): siRNA sense strand
aaacugagcaaccuaauga

SEQ ID NO: 884121 - RNA, 19 nt, Homo sapiens
  misc_RNA (1)...(19): siRNA sense strand
gaagaaaggagcaaguuag

SEQ ID NO: 884122 - RNA, 19 nt, Homo sapiens
  misc_RNA (1)...(19): siRNA sense strand
ugacagaguuggaugacuu

SEQ ID NO: 884123 - RNA, 19 nt, Homo sapiens
  misc_RNA (1)...(19): siRNA sense strand
ggacagaagcugaggugaa

SEQ ID NO: 884124 - RNA, 19 nt, Homo sapiens
  misc_RNA (1)...(19): siRNA sense strand
gagcagaagcugaaggaaa

SEQ ID NO: 884125 - RNA, 19 nt, Homo sapiens
  misc_RNA (1)...(19): siRNA sense strand
acaaucaccugcacuucua

SEQ ID NO: 884126 - RNA, 19 nt, Homo sapiens
  misc_RNA (1)...(19): siRNA sense strand
caaaugagagagaaucuga

SEQ ID NO: 884127 - RNA, 19 nt, Homo sapiens
  misc_RNA (1)...(19): siRNA sense strand
gaugaaugccgaugugauu

SEQ ID NO: 884128 - RNA, 19 nt, Homo sapiens
  misc_RNA (1)...(19): siRNA sense strand
gaaggagcaucugaaggaa

SEQ ID NO: 884129 - RNA, 19 nt, Homo sapiens
  misc_RNA (1)...(19): siRNA sense strand
aaaggaaacccuacugaaa

SEQ ID NO: 884130 - RNA, 19 nt, Homo sapiens
  misc_RNA (1)...(19): siRNA sense strand
gagaaucaccaccgucaaa

SEQ ID NO: 884131 - RNA, 19 nt, Homo sapiens
  misc_RNA (1)...(19): siRNA sense strand
cagaagaguucaccuacga

SEQ ID NO: 884132 - RNA, 19 nt, Homo sapiens
  misc_RNA (1)...(19): siRNA sense strand
cgaaggagcaucugaagga

SEQ ID NO: 884133 - RNA, 19 nt, Homo sapiens
  misc_RNA (1)...(19): siRNA sense strand
gaggaguacauuuauauga

SEQ ID NO: 884134 - RNA, 19 nt, Homo sapiens
  misc_RNA (1)...(19): siRNA sense strand
gacagaagcugaggugaag

SEQ ID NO: 884135 - RNA, 19 nt, Homo sapiens
  misc_RNA (1)...(19): siRNA sense strand
ccagagggcuacuaugaag

SEQ ID NO: 884136 - RNA, 19 nt, Homo sapiens
  misc_RNA (1)...(19): siRNA sense strand
gcccaacacuuacaucgau

SEQ ID NO: 884137 - RNA, 19 nt, Homo sapiens
  misc_RNA (1)...(19): siRNA sense strand
gaaacgggagcuaaaggaa

SEQ ID NO: 884138 - RNA, 19 nt, Homo sapiens
  misc_RNA (1)...(19): siRNA sense strand
uaaugaaucugggcaggaa

SEQ ID NO: 884139 - RNA, 19 nt, Homo sapiens
  misc_RNA (1)...(19): siRNA sense strand
gcacuguacuccagaaagc

SEQ ID NO: 884140 - RNA, 19 nt, Homo sapiens
  misc_RNA (1)...(19): siRNA sense strand
cuacugaaaugcacagaca

SEQ ID NO: 884141 - RNA, 19 nt, Homo sapiens
  misc_RNA (1)...(19): siRNA sense strand
gaggauccuucccugagaa

SEQ ID NO: 884142 - RNA, 19 nt, Homo sapiens
  misc_RNA (1)...(19): siRNA sense strand
gcaacagaaugcagagucu

SEQ ID NO: 884143 - RNA, 19 nt, Homo sapiens
  misc_RNA (1)...(19): siRNA sense strand
cagaugagcccugcauaaa

SEQ ID NO: 884144 - RNA, 19 nt, Homo sapiens
  misc_RNA (1)...(19): siRNA sense strand
gagcacaagcugaagauca

SEQ ID NO: 884145 - RNA, 19 nt, Homo sapiens
  misc_RNA (1)...(19): siRNA sense strand
ugaacaaagugaccaucaa

SEQ ID NO: 884146 - RNA, 19 nt, Homo sapiens
  misc_RNA (1)...(19): siRNA sense strand
caaccacacucaagaacag

SEQ ID NO: 884147 - RNA, 19 nt, Homo sapiens
  misc_RNA (1)...(19): siRNA sense strand
uaaaggaaacccuacugaa

SEQ ID NO: 884148 - RNA, 19 nt, Homo sapiens
  misc_RNA (1)...(19): siRNA sense strand
gcucagcuccggaaagaga

SEQ ID NO: 884149 - RNA, 19 nt, Homo sapiens
  misc_RNA (1)...(19): siRNA sense strand
gagaaggagaggcuugaaa

SEQ ID NO: 884150 - RNA, 19 nt, Homo sapiens
  misc_RNA (1)...(19): siRNA sense strand
gcauaaaguguccagagaa

SEQ ID NO: 884151 - RNA, 19 nt, Homo sapiens
  misc_RNA (1)...(19): siRNA sense strand
ccagaugagcccugcauaa

SEQ ID NO: 884152 - RNA, 19 nt, Homo sapiens
  misc_RNA (1)...(19): siRNA sense strand
gcccucagcuggacgugaa

SEQ ID NO: 884153 - RNA, 19 nt, Homo sapiens
  misc_RNA (1)...(19): siRNA sense strand
gaagaucacaccgaugaau

SEQ ID NO: 884154 - RNA, 19 nt, Homo sapiens
  misc_RNA (1)...(19): siRNA sense strand
gagaagaaaggagcaaguu

SEQ ID NO: 884155 - RNA, 19 nt, Homo sapiens
  misc_RNA (1)...(19): siRNA sense strand
cugaugaggaguacauuua

SEQ ID NO: 884156 - RNA, 19 nt, Homo sapiens
  misc_RNA (1)...(19): siRNA sense strand
ccgauagggucuccuguau

SEQ ID NO: 884157 - RNA, 19 nt, Homo sapiens
  misc_RNA (1)...(19): siRNA sense strand
ggaguacauuuauaugaac

SEQ ID NO: 884158 - RNA, 19 nt, Homo sapiens
  misc_RNA (1)...(19): siRNA sense strand
agaagaaaggagcaaguua

SEQ ID NO: 884159 - RNA, 19 nt, Homo sapiens
  misc_RNA (1)...(19): siRNA sense strand
gaacaaagugaccaucaac

SEQ ID NO: 884160 - RNA, 19 nt, Homo sapiens
  misc_RNA (1)...(19): siRNA sense strand
agauauagcugagaaguac

SEQ ID NO: 884161 - RNA, 19 nt, Homo sapiens
  misc_RNA (1)...(19): siRNA sense strand
guacaaagcccuggaacag

SEQ ID NO: 884162 - RNA, 19 nt, Homo sapiens
  misc_RNA (1)...(19): siRNA sense strand
gcagcagcgucauucacaa

SEQ ID NO: 884163 - RNA, 19 nt, Homo sapiens
  misc_RNA (1)...(19): siRNA sense strand
ucauggaggugaaggacaa

SEQ ID NO: 884164 - RNA, 19 nt, Homo sapiens
  misc_RNA (1)...(19): siRNA sense strand
agcagaagcugaaggaaau

SEQ ID NO: 884165 - RNA, 19 nt, Homo sapiens
  misc_RNA (1)...(19): siRNA sense strand
agacagacccagaagaguu

SEQ ID NO: 884166 - RNA, 19 nt, Homo sapiens
  misc_RNA (1)...(19): siRNA sense strand
aggaaacccuacugaaaug

SEQ ID NO: 884167 - RNA, 19 nt, Homo sapiens
  misc_RNA (1)...(19): siRNA sense strand
uaugacacaucccucaaug

SEQ ID NO: 884168 - RNA, 19 nt, Homo sapiens
  misc_RNA (1)...(19): siRNA sense strand
cagagaaccugggagaaca

SEQ ID NO: 884169 - RNA, 19 nt, Homo sapiens
  misc_RNA (1)...(19): siRNA sense strand
gccaggaggagcuguauga

SEQ ID NO: 884170 - RNA, 19 nt, Homo sapiens
  misc_RNA (1)...(19): siRNA sense strand
ugagcaaccuaaugaaucu

SEQ ID NO: 884171 - RNA, 19 nt, Homo sapiens
  misc_RNA (1)...(19): siRNA sense strand
caagacagacccagaagag

SEQ ID NO: 884172 - RNA, 19 nt, Homo sapiens
  misc_RNA (1)...(19): siRNA sense strand
ugaaggacaaccugaagaa

SEQ ID NO: 884173 - RNA, 19 nt, Homo sapiens
  misc_RNA (1)...(19): siRNA sense strand
gaaagagaaacgggagcua

SEQ ID NO: 884174 - RNA, 19 nt, Homo sapiens
  misc_RNA (1)...(19): siRNA sense strand
gcagcucugugucaucaag

SEQ ID NO: 884175 - RNA, 19 nt, Homo sapiens
  misc_RNA (1)...(19): siRNA sense strand
cauaaaguguccagagaac

SEQ ID NO: 884176 - RNA, 19 nt, Homo sapiens
  misc_RNA (1)...(19): siRNA sense strand
ucacaccugucaaguccuu

SEQ ID NO: 884177 - RNA, 19 nt, Homo sapiens
  misc_RNA (1)...(19): siRNA sense strand
ccugucggcuucagaguau

SEQ ID NO: 884178 - RNA, 19 nt, Homo sapiens
  misc_RNA (1)...(19): siRNA sense strand
ggaagaaggagcacaagcu

SEQ ID NO: 884179 - RNA, 19 nt, Homo sapiens
  misc_RNA (1)...(19): siRNA sense strand
gagaagcaagugcggaaga

SEQ ID NO: 884180 - RNA, 19 nt, Homo sapiens
  misc_RNA (1)...(19): siRNA sense strand
gcagcgucauucacaagga

SEQ ID NO: 884181 - RNA, 19 nt, Homo sapiens
  misc_RNA (1)...(19): siRNA sense strand
caaagugaccaucaacaag

SEQ ID NO: 884182 - RNA, 19 nt, Homo sapiens
  misc_RNA (1)...(19): siRNA sense strand
aaagagaaacgggagcuaa

SEQ ID NO: 884183 - RNA, 19 nt, Homo sapiens
  misc_RNA (1)...(19): siRNA sense strand
gaaugccgaugugauugug

SEQ ID NO: 884184 - RNA, 19 nt, Homo sapiens
  misc_RNA (1)...(19): siRNA sense strand
agaaggagcacaagcugaa

SEQ ID NO: 884185 - RNA, 19 nt, Homo sapiens
  misc_RNA (1)...(19): siRNA sense strand
aaccagauauagcugagaa

SEQ ID NO: 884186 - RNA, 19 nt, Homo sapiens
  misc_RNA (1)...(19): siRNA sense strand
uggcucagcuccggaaaga

SEQ ID NO: 884187 - RNA, 19 nt, Homo sapiens
  misc_RNA (1)...(19): siRNA sense strand
gguggagccuaccgaggaa

SEQ ID NO: 884188 - RNA, 19 nt, Homo sapiens
  misc_RNA (1)...(19): siRNA sense strand
cagauauagcugagaagua

SEQ ID NO: 884189 - RNA, 19 nt, Homo sapiens
  misc_RNA (1)...(19): siRNA sense strand
cuacgaguccuacgaugaa

SEQ ID NO: 884190 - RNA, 19 nt, Homo sapiens
  misc_RNA (1)...(19): siRNA sense strand
ccaaggaaugggagaagaa

SEQ ID NO: 884191 - RNA, 19 nt, Homo sapiens
  misc_RNA (1)...(19): siRNA sense strand
ccagaaagccaaggaaugg

SEQ ID NO: 884192 - RNA, 19 nt, Homo sapiens
  misc_RNA (1)...(19): siRNA sense strand
aaggaaacccuacugaaau

SEQ ID NO: 884193 - RNA, 19 nt, Homo sapiens
  misc_RNA (1)...(19): siRNA sense strand
aagcagcucugugucauca

SEQ ID NO: 884194 - RNA, 19 nt, Homo sapiens
  misc_RNA (1)...(19): siRNA sense strand
agaagcaagugcggaagaa

SEQ ID NO: 884195 - RNA, 19 nt, Homo sapiens
  misc_RNA (1)...(19): siRNA sense strand
cuaaaggaaacccuacuga

SEQ ID NO: 884196 - RNA, 19 nt, Homo sapiens
  misc_RNA (1)...(19): siRNA sense strand
aaacgggagcuaaaggaaa

SEQ ID NO: 884197 - RNA, 19 nt, Homo sapiens
  misc_RNA (1)...(19): siRNA sense strand
gauccuucccugagaauca

SEQ ID NO: 884198 - RNA, 19 nt, Homo sapiens
  misc_RNA (1)...(19): siRNA sense strand
aaaccaaagacgucaagaa

SEQ ID NO: 884199 - RNA, 19 nt, Homo sapiens
  misc_RNA (1)...(19): siRNA sense strand
cugaagaucacaccgauga

SEQ ID NO: 884200 - RNA, 19 nt, Homo sapiens
  misc_RNA (1)...(19): siRNA sense strand
ccaagcagcucugugucau

SEQ ID NO: 884201 - RNA, 19 nt, Homo sapiens
  misc_RNA (1)...(19): siRNA sense strand
caaggaaugggagaagaaa

SEQ ID NO: 884202 - RNA, 19 nt, Homo sapiens
  misc_RNA (1)...(19): siRNA sense strand
gccaaggaaugggagaaga

SEQ ID NO: 884203 - RNA, 19 nt, Homo sapiens
  misc_RNA (1)...(19): siRNA sense strand
ugcauaaaguguccagaga

SEQ ID NO: 884204 - RNA, 19 nt, Homo sapiens
  misc_RNA (1)...(19): siRNA sense strand
uuggaugacuuccucaaga

SEQ ID NO: 884205 - RNA, 19 nt, Homo sapiens
  misc_RNA (1)...(19): siRNA sense strand
acaaagugaccaucaacaa

SEQ ID NO: 884206 - RNA, 19 nt, Homo sapiens
  misc_RNA (1)...(19): siRNA sense strand
caaagacgucaagaagaaa

SEQ ID NO: 884207 - RNA, 19 nt, Homo sapiens
  misc_RNA (1)...(19): siRNA sense strand
gcaaccacacucaagaaca

SEQ ID NO: 884208 - RNA, 19 nt, Homo sapiens
  misc_RNA (1)...(19): siRNA sense strand
uggcgagccuggagcagaa

SEQ ID NO: 884209 - RNA, 19 nt, Homo sapiens
  misc_RNA (1)...(19): siRNA sense strand
gaugacuuccucaagauuc

SEQ ID NO: 884210 - RNA, 19 nt, Homo sapiens
  misc_RNA (1)...(19): siRNA sense strand
ggaagaaauccaccucacu

SEQ ID NO: 884211 - RNA, 19 nt, Homo sapiens
  misc_RNA (1)...(19): siRNA sense strand
caaacugagcaaccuaaug

SEQ ID NO: 884212 - RNA, 19 nt, Homo sapiens
  misc_RNA (1)...(19): siRNA sense strand
ggaacucgcuggucaucua

SEQ ID NO: 884213 - RNA, 19 nt, Homo sapiens
  misc_RNA (1)...(19): siRNA sense strand
ggacaacgccccucucuga

SEQ ID NO: 884214 - RNA, 19 nt, Homo sapiens
  misc_RNA (1)...(19): siRNA sense strand
gcugguacgugacgguguu

SEQ ID NO: 884215 - RNA, 19 nt, Homo sapiens
  misc_RNA (1)...(19): siRNA sense strand
ggaccgugaccaacuucua

SEQ ID NO: 884216 - RNA, 19 nt, Homo sapiens
  misc_RNA (1)...(19): siRNA sense strand
acaaccugcuggcgcugua

SEQ ID NO: 884217 - RNA, 19 nt, Homo sapiens
  misc_RNA (1)...(19): siRNA sense strand
gcucgugccgcucuucuuc

SEQ ID NO: 884218 - RNA, 19 nt, Homo sapiens
  misc_RNA (1)...(19): siRNA sense strand
gaacucgcuggucaucuac

SEQ ID NO: 884219 - RNA, 19 nt, Homo sapiens
  misc_RNA (1)...(19): siRNA sense strand
cuuaagaccugggcucacu

SEQ ID NO: 884220 - RNA, 19 nt, Homo sapiens
  misc_RNA (1)...(19): siRNA sense strand
gaccgugaccaacuucuac

SEQ ID NO: 884221 - RNA, 19 nt, Homo sapiens
  misc_RNA (1)...(19): siRNA sense strand
ccaagaagcuggaggagua

SEQ ID NO: 884222 - RNA, 19 nt, Homo sapiens
  misc_RNA (1)...(19): siRNA sense strand
ugaaagagaguaugcauua

SEQ ID NO: 884223 - RNA, 19 nt, Homo sapiens
  misc_RNA (1)...(19): siRNA sense strand
gcaagacuaucaacuccua

SEQ ID NO: 884224 - RNA, 19 nt, Homo sapiens
  misc_RNA (1)...(19): siRNA sense strand
agaaggagcgcaacaguua

SEQ ID NO: 884225 - RNA, 19 nt, Homo sapiens
  misc_RNA (1)...(19): siRNA sense strand
gcacaucacuaaccacuac

SEQ ID NO: 884226 - RNA, 19 nt, Homo sapiens
  misc_RNA (1)...(19): siRNA sense strand
ccauggagauguacaaaga

SEQ ID NO: 884227 - RNA, 19 nt, Homo sapiens
  misc_RNA (1)...(19): siRNA sense strand
gagcuggccuucugcaaga

SEQ ID NO: 884228 - RNA, 19 nt, Homo sapiens
  misc_RNA (1)...(19): siRNA sense strand
ccaaggccauugaggagua

SEQ ID NO: 884229 - RNA, 19 nt, Homo sapiens
  misc_RNA (1)...(19): siRNA sense strand
gggauaggcuaaggaguaa

SEQ ID NO: 884230 - RNA, 19 nt, Homo sapiens
  misc_RNA (1)...(19): siRNA sense strand
ggagauguacaaagaguuu

SEQ ID NO: 884231 - RNA, 19 nt, Homo sapiens
  misc_RNA (1)...(19): siRNA sense strand
gagcaugaguggaccaaca

SEQ ID NO: 884232 - RNA, 19 nt, Homo sapiens
  misc_RNA (1)...(19): siRNA sense strand
ccaaacagaagaucauuga

SEQ ID NO: 884233 - RNA, 19 nt, Homo sapiens
  misc_RNA (1)...(19): siRNA sense strand
aggaagaacugaagaagga

SEQ ID NO: 884234 - RNA, 19 nt, Homo sapiens
  misc_RNA (1)...(19): siRNA sense strand
gaaagagaguaugcauuag

SEQ ID NO: 884235 - RNA, 19 nt, Homo sapiens
  misc_RNA (1)...(19): siRNA sense strand
gcuuggcucuugaccauga

SEQ ID NO: 884236 - RNA, 19 nt, Homo sapiens
  misc_RNA (1)...(19): siRNA sense strand
ugcagaagauggugauuga

SEQ ID NO: 884237 - RNA, 19 nt, Homo sapiens
  misc_RNA (1)...(19): siRNA sense strand
caugaacgcgcaguuguua

SEQ ID NO: 884238 - RNA, 19 nt, Homo sapiens
  misc_RNA (1)...(19): siRNA sense strand
gaagaaggagcgcaacagu

SEQ ID NO: 884239 - RNA, 19 nt, Homo sapiens
  misc_RNA (1)...(19): siRNA sense strand
ggacaacgagcaccucauc

SEQ ID NO: 884240 - RNA, 19 nt, Homo sapiens
  misc_RNA (1)...(19): siRNA sense strand
gagcauaguauccaaacug

SEQ ID NO: 884241 - RNA, 19 nt, Homo sapiens
  misc_RNA (1)...(19): siRNA sense strand
agaagauggugauugagaa

SEQ ID NO: 884242 - RNA, 19 nt, Homo sapiens
  misc_RNA (1)...(19): siRNA sense strand
caucagcgccucccucuuc

SEQ ID NO: 884243 - RNA, 19 nt, Homo sapiens
  misc_RNA (1)...(19): siRNA sense strand
gaaggaccacgcagagaug

SEQ ID NO: 884244 - RNA, 19 nt, Homo sapiens
  misc_RNA (1)...(19): siRNA sense strand
cugcgaaucuccaccaaga

SEQ ID NO: 884245 - RNA, 19 nt, Homo sapiens
  misc_RNA (1)...(19): siRNA sense strand
ggacagcccagaacugaag

SEQ ID NO: 884246 - RNA, 19 nt, Homo sapiens
  misc_RNA (1)...(19): siRNA sense strand
ccaacgagccugaucuuca

SEQ ID NO: 884247 - RNA, 19 nt, Homo sapiens
  misc_RNA (1)...(19): siRNA sense strand
gcacugagcaccccaggua

SEQ ID NO: 884248 - RNA, 19 nt, Homo sapiens
  misc_RNA (1)...(19): siRNA sense strand
gcucaagacggacaauguu

SEQ ID NO: 884249 - RNA, 19 nt, Homo sapiens
  misc_RNA (1)...(19): siRNA sense strand
cugccaagcugggaaguuu

SEQ ID NO: 884250 - RNA, 19 nt, Homo sapiens
  misc_RNA (1)...(19): siRNA sense strand
caacgagcaccucaucuuc

SEQ ID NO: 884251 - RNA, 19 nt, Homo sapiens
  misc_RNA (1)...(19): siRNA sense strand
gagcucagccaagcagaaa

SEQ ID NO: 884252 - RNA, 19 nt, Homo sapiens
  misc_RNA (1)...(19): siRNA sense strand
acaagaagaagaagaagga

SEQ ID NO: 884253 - RNA, 19 nt, Homo sapiens
  misc_RNA (1)...(19): siRNA sense strand
cagaagauggugauugaga

SEQ ID NO: 884254 - RNA, 19 nt, Homo sapiens
  misc_RNA (1)...(19): siRNA sense strand
uuuccggucugauagauuu

SEQ ID NO: 884255 - RNA, 19 nt, Homo sapiens
  misc_RNA (1)...(19): siRNA sense strand
gcaaggaggaauacauguc

SEQ ID NO: 884256 - RNA, 19 nt, Homo sapiens
  misc_RNA (1)...(19): siRNA sense strand
agaagcuggugcuggagua

SEQ ID NO: 884257 - RNA, 19 nt, Homo sapiens
  misc_RNA (1)...(19): siRNA sense strand
gcagagcauaguauccaaa

SEQ ID NO: 884258 - RNA, 19 nt, Homo sapiens
  misc_RNA (1)...(19): siRNA sense strand
ggaguugaaagagguguuu

SEQ ID NO: 884259 - RNA, 19 nt, Homo sapiens
  misc_RNA (1)...(19): siRNA sense strand
cagcaaggaggaauacaug

SEQ ID NO: 884260 - RNA, 19 nt, Homo sapiens
  misc_RNA (1)...(19): siRNA sense strand
agggauaggcuaaggagua

SEQ ID NO: 884261 - RNA, 19 nt, Homo sapiens
  misc_RNA (1)...(19): siRNA sense strand
gcacgggcaaggugaagga

SEQ ID NO: 884262 - RNA, 19 nt, Homo sapiens
  misc_RNA (1)...(19): siRNA sense strand
gagcggugcaucccaacaa

SEQ ID NO: 884263 - RNA, 19 nt, Homo sapiens
  misc_RNA (1)...(19): siRNA sense strand
gaacgcgcaguuguuagaa

SEQ ID NO: 884264 - RNA, 19 nt, Homo sapiens
  misc_RNA (1)...(19): siRNA sense strand
ccgcuuggcucuugaccau

SEQ ID NO: 884265 - RNA, 19 nt, Homo sapiens
  misc_RNA (1)...(19): siRNA sense strand
gcacaagcagggcccuuca

SEQ ID NO: 884266 - RNA, 19 nt, Homo sapiens
  misc_RNA (1)...(19): siRNA sense strand
gagcagagcauaguaucca

SEQ ID NO: 884267 - RNA, 19 nt, Homo sapiens
  misc_RNA (1)...(19): siRNA sense strand
ucgccaaggucacccagaa

SEQ ID NO: 884268 - RNA, 19 nt, Homo sapiens
  misc_RNA (1)...(19): siRNA sense strand
caacuccuacugugucuuc

SEQ ID NO: 884269 - RNA, 19 nt, Homo sapiens
  misc_RNA (1)...(19): siRNA sense strand
agaacacacuggccaccaa

SEQ ID NO: 884270 - RNA, 19 nt, Homo sapiens
  misc_RNA (1)...(19): siRNA sense strand
caucugcccuggugcacau

SEQ ID NO: 884271 - RNA, 19 nt, Homo sapiens
  misc_RNA (1)...(19): siRNA sense strand
uaugagacccuguucaagu

SEQ ID NO: 884272 - RNA, 19 nt, Homo sapiens
  misc_RNA (1)...(19): siRNA sense strand
gcccgcagcucgaguuacu

SEQ ID NO: 884273 - RNA, 19 nt, Homo sapiens
  misc_RNA (1)...(19): siRNA sense strand
gcacuucgaguuccacaac

SEQ ID NO: 884274 - RNA, 19 nt, Homo sapiens
  misc_RNA (1)...(19): siRNA sense strand
ccacagggauaggcuaagg

SEQ ID NO: 884275 - RNA, 19 nt, Homo sapiens
  misc_RNA (1)...(19): siRNA sense strand
gcgucggccucaccugauu

SEQ ID NO: 884276 - RNA, 19 nt, Homo sapiens
  misc_RNA (1)...(19): siRNA sense strand
gcagcaaggaggaauacau

SEQ ID NO: 884277 - RNA, 19 nt, Homo sapiens
  misc_RNA (1)...(19): siRNA sense strand
gauagauuucacccgguua

SEQ ID NO: 884278 - RNA, 19 nt, Homo sapiens
  misc_RNA (1)...(19): siRNA sense strand
ugaacgcgcaguuguuaga

SEQ ID NO: 884279 - RNA, 19 nt, Homo sapiens
  misc_RNA (1)...(19): siRNA sense strand
cuaggugaguucaucaaag

SEQ ID NO: 884280 - RNA, 19 nt, Homo sapiens
  misc_RNA (1)...(19): siRNA sense strand
agaagcgcauugccucguu

SEQ ID NO: 884281 - RNA, 19 nt, Homo sapiens
  misc_RNA (1)...(19): siRNA sense strand
ggaggaagaacugaagaag

SEQ ID NO: 884282 - RNA, 19 nt, Homo sapiens
  misc_RNA (1)...(19): siRNA sense strand
gcgaaucuccaccaagaag

SEQ ID NO: 884283 - RNA, 19 nt, Homo sapiens
  misc_RNA (1)...(19): siRNA sense strand
gaucuuuccggucugauag

SEQ ID NO: 884284 - RNA, 19 nt, Homo sapiens
  misc_RNA (1)...(19): siRNA sense strand
gaaguggaucccagcaagu

SEQ ID NO: 884285 - RNA, 19 nt, Homo sapiens
  misc_RNA (1)...(19): siRNA sense strand
ccgacaagaagaagaagaa

SEQ ID NO: 884286 - RNA, 19 nt, Homo sapiens
  misc_RNA (1)...(19): siRNA sense strand
ugauguccguggaggaaga

SEQ ID NO: 884287 - RNA, 19 nt, Homo sapiens
  misc_RNA (1)...(19): siRNA sense strand
gggagaccgacaagaagaa

SEQ ID NO: 884288 - RNA, 19 nt, Homo sapiens
  misc_RNA (1)...(19): siRNA sense strand
aggaguaccucaagcuagu

SEQ ID NO: 884289 - RNA, 19 nt, Homo sapiens
  misc_RNA (1)...(19): siRNA sense strand
gaagauggugauugagaac

SEQ ID NO: 884290 - RNA, 19 nt, Homo sapiens
  misc_RNA (1)...(19): siRNA sense strand
ggcggcaguucguggagaa

SEQ ID NO: 884291 - RNA, 19 nt, Homo sapiens
  misc_RNA (1)...(19): siRNA sense strand
ggaccacgcagagaugcaa

SEQ ID NO: 884292 - RNA, 19 nt, Homo sapiens
  misc_RNA (1)...(19): siRNA sense strand
gaccaugaacgcgcaguug

SEQ ID NO: 884293 - RNA, 19 nt, Homo sapiens
  misc_RNA (1)...(19): siRNA sense strand
uaggugaguucaucaaagc

SEQ ID NO: 884294 - RNA, 19 nt, Homo sapiens
  misc_RNA (1)...(19): siRNA sense strand
acaacgagcaccucaucuu

SEQ ID NO: 884295 - RNA, 19 nt, Homo sapiens
  misc_RNA (1)...(19): siRNA sense strand
cgggcaaggugaaggacuu

SEQ ID NO: 884296 - RNA, 19 nt, Homo sapiens
  misc_RNA (1)...(19): siRNA sense strand
acgcgcaguuguuagaaga

SEQ ID NO: 884297 - RNA, 19 nt, Homo sapiens
  misc_RNA (1)...(19): siRNA sense strand
caucaaagcgcuguaugag

SEQ ID NO: 884298 - RNA, 19 nt, Homo sapiens
  misc_RNA (1)...(19): siRNA sense strand
gggcgagcacuucgaguuc

SEQ ID NO: 884299 - RNA, 19 nt, Homo sapiens
  misc_RNA (1)...(19): siRNA sense strand
agaccgacaagaagaagaa

SEQ ID NO: 884300 - RNA, 19 nt, Homo sapiens
  misc_RNA (1)...(19): siRNA sense strand
augagacccuguucaagug

SEQ ID NO: 884301 - RNA, 19 nt, Homo sapiens
  misc_RNA (1)...(19): siRNA sense strand
ccuggacgaugugcucuau

SEQ ID NO: 884302 - RNA, 19 nt, Homo sapiens
  misc_RNA (1)...(19): siRNA sense strand
ccaugaacgcgcaguuguu

SEQ ID NO: 884303 - RNA, 19 nt, Homo sapiens
  misc_RNA (1)...(19): siRNA sense strand
cgaucuuuccggucugaua

SEQ ID NO: 884304 - RNA, 19 nt, Homo sapiens
  misc_RNA (1)...(19): siRNA sense strand
ggcaguucguggagaagug

SEQ ID NO: 884305 - RNA, 19 nt, Homo sapiens
  misc_RNA (1)...(19): siRNA sense strand
ggaccugccagccaagaag

SEQ ID NO: 884306 - RNA, 19 nt, Homo sapiens
  misc_RNA (1)...(19): siRNA sense strand
cagggcaaccucaagaugu

SEQ ID NO: 884307 - RNA, 19 nt, Homo sapiens
  misc_RNA (1)...(19): siRNA sense strand
ggcaucaucagcagguuga

SEQ ID NO: 884308 - RNA, 19 nt, Homo sapiens
  misc_RNA (1)...(19): siRNA sense strand
uggcggugcugcaggacaa

SEQ ID NO: 884309 - RNA, 19 nt, Homo sapiens
  misc_RNA (1)...(19): siRNA sense strand
ccagggcaaccucaagaug

SEQ ID NO: 884310 - RNA, 19 nt, Homo sapiens
  misc_RNA (1)...(19): siRNA sense strand
ucauugaugcccaggagaa

SEQ ID NO: 884311 - RNA, 19 nt, Homo sapiens
  misc_RNA (1)...(19): siRNA sense strand
agaaggaccacgcagagau

SEQ ID NO: 884312 - RNA, 19 nt, Homo sapiens
  misc_RNA (1)...(19): siRNA sense strand
gauaggcuaaggaguaagg

SEQ ID NO: 884313 - RNA, 19 nt, Homo sapiens
  misc_RNA (1)...(19): siRNA sense strand
gauggugauugagaacgau

SEQ ID NO: 884314 - RNA, 19 nt, Homo sapiens
  misc_RNA (1)...(19): siRNA sense strand
gaaggagcgcaacaguuac

SEQ ID NO: 884315 - RNA, 19 nt, Homo sapiens
  misc_RNA (1)...(19): siRNA sense strand
aagaaggagcgcaacaguu

SEQ ID NO: 884316 - RNA, 19 nt, Homo sapiens
  misc_RNA (1)...(19): siRNA sense strand
gaagccaacgagccugauc

SEQ ID NO: 884317 - RNA, 19 nt, Homo sapiens
  misc_RNA (1)...(19): siRNA sense strand
gcuggagcagagcauagua

SEQ ID NO: 884318 - RNA, 19 nt, Homo sapiens
  misc_RNA (1)...(19): siRNA sense strand
gacuaucaacuccuacugu

SEQ ID NO: 884319 - RNA, 19 nt, Homo sapiens
  misc_RNA (1)...(19): siRNA sense strand
gcaccagggcaaccucaag

SEQ ID NO: 884320 - RNA, 19 nt, Homo sapiens
  misc_RNA (1)...(19): siRNA sense strand
gcugaaagagaguaugcau

SEQ ID NO: 884321 - RNA, 19 nt, Homo sapiens
  misc_RNA (1)...(19): siRNA sense strand
gaugauaccucuggcaaua

SEQ ID NO: 884322 - RNA, 19 nt, Homo sapiens
  misc_RNA (1)...(19): siRNA sense strand
gaagggugauucuaauauu

SEQ ID NO: 884323 - RNA, 19 nt, Homo sapiens
  misc_RNA (1)...(19): siRNA sense strand
gaagacggcuuucaagaca

SEQ ID NO: 884324 - RNA, 19 nt, Homo sapiens
  misc_RNA (1)...(19): siRNA sense strand
cagaaagccuugaagauga

SEQ ID NO: 884325 - RNA, 19 nt, Homo sapiens
  misc_RNA (1)...(19): siRNA sense strand
uaacuccgcuucugauugu

SEQ ID NO: 884326 - RNA, 19 nt, Homo sapiens
  misc_RNA (1)...(19): siRNA sense strand
gguauucuaugguuauaug

SEQ ID NO: 884327 - RNA, 19 nt, Homo sapiens
  misc_RNA (1)...(19): siRNA sense strand
aaucaugacuggccauuug

SEQ ID NO: 884328 - RNA, 19 nt, Homo sapiens
  misc_RNA (1)...(19): siRNA sense strand
caccaugacaccugaauua

SEQ ID NO: 884329 - RNA, 19 nt, Homo sapiens
  misc_RNA (1)...(19): siRNA sense strand
gcaauaggaccaaaugcuu

SEQ ID NO: 884330 - RNA, 19 nt, Homo sapiens
  misc_RNA (1)...(19): siRNA sense strand
uaauuugcuuugcaccuua

SEQ ID NO: 884331 - RNA, 19 nt, Homo sapiens
  misc_RNA (1)...(19): siRNA sense strand
aaaacgagcugugauauuu

SEQ ID NO: 884332 - RNA, 19 nt, Homo sapiens
  misc_RNA (1)...(19): siRNA sense strand
gcagggguauuccuaauuu

SEQ ID NO: 884333 - RNA, 19 nt, Homo sapiens
  misc_RNA (1)...(19): siRNA sense strand
ggugaaguccaaugaaauu

SEQ ID NO: 884334 - RNA, 19 nt, Homo sapiens
  misc_RNA (1)...(19): siRNA sense strand
caccuuaucauuucaguuu

SEQ ID NO: 884335 - RNA, 19 nt, Homo sapiens
  misc_RNA (1)...(19): siRNA sense strand
caagacaagauuugcauga

SEQ ID NO: 884336 - RNA, 19 nt, Homo sapiens
  misc_RNA (1)...(19): siRNA sense strand
caugacaccugaauuaugc

SEQ ID NO: 884337 - RNA, 19 nt, Homo sapiens
  misc_RNA (1)...(19): siRNA sense strand
guucuuuccuugccacuga

SEQ ID NO: 884338 - RNA, 19 nt, Homo sapiens
  misc_RNA (1)...(19): siRNA sense strand
aaacagaaagccuugaaga

SEQ ID NO: 884339 - RNA, 19 nt, Homo sapiens
  misc_RNA (1)...(19): siRNA sense strand
caauaggaccaaaugcuuu

SEQ ID NO: 884340 - RNA, 19 nt, Homo sapiens
  misc_RNA (1)...(19): siRNA sense strand
aaacgagcugugauauuua

SEQ ID NO: 884341 - RNA, 19 nt, Homo sapiens
  misc_RNA (1)...(19): siRNA sense strand
gaucuucuacuacuugaau

SEQ ID NO: 884342 - RNA, 19 nt, Homo sapiens
  misc_RNA (1)...(19): siRNA sense strand
gagcugugauauuuaugau

SEQ ID NO: 884343 - RNA, 19 nt, Homo sapiens
  misc_RNA (1)...(19): siRNA sense strand
gcuuugcaccuuaucauuu

SEQ ID NO: 884344 - RNA, 19 nt, Homo sapiens
  misc_RNA (1)...(19): siRNA sense strand
gaugaccauuggcgaguug

SEQ ID NO: 884345 - RNA, 19 nt, Homo sapiens
  misc_RNA (1)...(19): siRNA sense strand
agccauugcugacuuacua

SEQ ID NO: 884346 - RNA, 19 nt, Homo sapiens
  misc_RNA (1)...(19): siRNA sense strand
guuucuaccugaaguaugu

SEQ ID NO: 884347 - RNA, 19 nt, Homo sapiens
  misc_RNA (1)...(19): siRNA sense strand
gaggaucuucuacuacuug

SEQ ID NO: 884348 - RNA, 19 nt, Homo sapiens
  misc_RNA (1)...(19): siRNA sense strand
acagaaagccuugaagaug

SEQ ID NO: 884349 - RNA, 19 nt, Homo sapiens
  misc_RNA (1)...(19): siRNA sense strand
gaaauaugaccuguacauc

SEQ ID NO: 884350 - RNA, 19 nt, Homo sapiens
  misc_RNA (1)...(19): siRNA sense strand
ggucucauagggaauauau

SEQ ID NO: 884351 - RNA, 19 nt, Homo sapiens
  misc_RNA (1)...(19): siRNA sense strand
aaauaugaccuguacauca

SEQ ID NO: 884352 - RNA, 19 nt, Homo sapiens
  misc_RNA (1)...(19): siRNA sense strand
cacugaggaucuucuacua

SEQ ID NO: 884353 - RNA, 19 nt, Homo sapiens
  misc_RNA (1)...(19): siRNA sense strand
agacaagauuugcaugaca

SEQ ID NO: 884354 - RNA, 19 nt, Homo sapiens
  misc_RNA (1)...(19): siRNA sense strand
ucuacuacuugaaucauga

SEQ ID NO: 884355 - RNA, 19 nt, Homo sapiens
  misc_RNA (1)...(19): siRNA sense strand
agucugaauucaugucuug

SEQ ID NO: 884356 - RNA, 19 nt, Homo sapiens
  misc_RNA (1)...(19): siRNA sense strand
cuggugaaguccaaugaaa

SEQ ID NO: 884357 - RNA, 19 nt, Homo sapiens
  misc_RNA (1)...(19): siRNA sense strand
caucugccuugccugugua

SEQ ID NO: 884358 - RNA, 19 nt, Homo sapiens
  misc_RNA (1)...(19): siRNA sense strand
gauggagacaauacagauu

SEQ ID NO: 884359 - RNA, 19 nt, Homo sapiens
  misc_RNA (1)...(19): siRNA sense strand
cuaauuugcuuugcaccuu

SEQ ID NO: 884360 - RNA, 19 nt, Homo sapiens
  misc_RNA (1)...(19): siRNA sense strand
cugauuguccuauauugua

SEQ ID NO: 884361 - RNA, 19 nt, Homo sapiens
  misc_RNA (1)...(19): siRNA sense strand
guaacuccgcuucugauug

SEQ ID NO: 884362 - RNA, 19 nt, Homo sapiens
  misc_RNA (1)...(19): siRNA sense strand
cgaguugauuggguuugua

SEQ ID NO: 884363 - RNA, 19 nt, Homo sapiens
  misc_RNA (1)...(19): siRNA sense strand
ccaguccguuguuaugaug

SEQ ID NO: 884364 - RNA, 19 nt, Homo sapiens
  misc_RNA (1)...(19): siRNA sense strand
augauaaacuuagccauug

SEQ ID NO: 884365 - RNA, 19 nt, Homo sapiens
  misc_RNA (1)...(19): siRNA sense strand
uugcuagucugaauucaug

SEQ ID NO: 884366 - RNA, 19 nt, Homo sapiens
  misc_RNA (1)...(19): siRNA sense strand
agaaagccuugaagaugau

SEQ ID NO: 884367 - RNA, 19 nt, Homo sapiens
  misc_RNA (1)...(19): siRNA sense strand
gaucuuggagagaaacaga

SEQ ID NO: 884368 - RNA, 19 nt, Homo sapiens
  misc_RNA (1)...(19): siRNA sense strand
gaguugauuggguuuguaa

SEQ ID NO: 884369 - RNA, 19 nt, Homo sapiens
  misc_RNA (1)...(19): siRNA sense strand
aauaugaccuguacaucag

SEQ ID NO: 884370 - RNA, 19 nt, Homo sapiens
  misc_RNA (1)...(19): siRNA sense strand
gugaaguccaaugaaauua

SEQ ID NO: 884371 - RNA, 19 nt, Homo sapiens
  misc_RNA (1)...(19): siRNA sense strand
cuuagccauugcugacuua

SEQ ID NO: 884372 - RNA, 19 nt, Homo sapiens
  misc_RNA (1)...(19): siRNA sense strand
cauacagcuuccaccauga

SEQ ID NO: 884373 - RNA, 19 nt, Homo sapiens
  misc_RNA (1)...(19): siRNA sense strand
aacgagcugugauauuuau

SEQ ID NO: 884374 - RNA, 19 nt, Homo sapiens
  misc_RNA (1)...(19): siRNA sense strand
ccaggucucauagggaaua

SEQ ID NO: 884375 - RNA, 19 nt, Homo sapiens
  misc_RNA (1)...(19): siRNA sense strand
uagauuuccuggugaaguc

SEQ ID NO: 884376 - RNA, 19 nt, Homo sapiens
  misc_RNA (1)...(19): siRNA sense strand
gaaacagaaagccuugaag

SEQ ID NO: 884377 - RNA, 19 nt, Homo sapiens
  misc_RNA (1)...(19): siRNA sense strand
ggaagacgguuuuaucacu

SEQ ID NO: 884378 - RNA, 19 nt, Homo sapiens
  misc_RNA (1)...(19): siRNA sense strand
ggccuggucucugcauguu

SEQ ID NO: 884379 - RNA, 19 nt, Homo sapiens
  misc_RNA (1)...(19): siRNA sense strand
uuccaugacugcaaacaga

SEQ ID NO: 884380 - RNA, 19 nt, Homo sapiens
  misc_RNA (1)...(19): siRNA sense strand
caauacagauuuucgauac

SEQ ID NO: 884381 - RNA, 19 nt, Homo sapiens
  misc_RNA (1)...(19): siRNA sense strand
ccaugacaccugaauuaug

SEQ ID NO: 884382 - RNA, 19 nt, Homo sapiens
  misc_RNA (1)...(19): siRNA sense strand
gcgaguugauuggguuugu

SEQ ID NO: 884383 - RNA, 19 nt, Homo sapiens
  misc_RNA (1)...(19): siRNA sense strand
cauacacugucauucuugu

SEQ ID NO: 884384 - RNA, 19 nt, Homo sapiens
  misc_RNA (1)...(19): siRNA sense strand
ucgcuuccaugacugcaaa

SEQ ID NO: 884385 - RNA, 19 nt, Homo sapiens
  misc_RNA (1)...(19): siRNA sense strand
gauuuugguuucucaugua

SEQ ID NO: 884386 - RNA, 19 nt, Homo sapiens
  misc_RNA (1)...(19): siRNA sense strand
gaaucaugacuggccauuu

SEQ ID NO: 884387 - RNA, 19 nt, Homo sapiens
  misc_RNA (1)...(19): siRNA sense strand
gggugauucuaauauuuca

SEQ ID NO: 884388 - RNA, 19 nt, Homo sapiens
  misc_RNA (1)...(19): siRNA sense strand
ggguauuccuaauuugcuu

SEQ ID NO: 884389 - RNA, 19 nt, Homo sapiens
  misc_RNA (1)...(19): siRNA sense strand
gcuucugauuguccuauau

SEQ ID NO: 884390 - RNA, 19 nt, Homo sapiens
  misc_RNA (1)...(19): siRNA sense strand
agaaauaugaccuguacau

SEQ ID NO: 884391 - RNA, 19 nt, Homo sapiens
  misc_RNA (1)...(19): siRNA sense strand
caggccagauggagacaau

SEQ ID NO: 884392 - RNA, 19 nt, Homo sapiens
  misc_RNA (1)...(19): siRNA sense strand
gugaguaaccauacagcuu

SEQ ID NO: 884393 - RNA, 19 nt, Homo sapiens
  misc_RNA (1)...(19): siRNA sense strand
cauugugucuugcuagucu

SEQ ID NO: 884394 - RNA, 19 nt, Homo sapiens
  misc_RNA (1)...(19): siRNA sense strand
ucuguggcauugugucuug

SEQ ID NO: 884395 - RNA, 19 nt, Homo sapiens
  misc_RNA (1)...(19): siRNA sense strand
cgagcugugauauuuauga

SEQ ID NO: 884396 - RNA, 19 nt, Homo sapiens
  misc_RNA (1)...(19): siRNA sense strand
gaccuguacaucagcauug

SEQ ID NO: 884397 - RNA, 19 nt, Homo sapiens
  misc_RNA (1)...(19): siRNA sense strand
gaccauuggcgaguugauu

SEQ ID NO: 884398 - RNA, 19 nt, Homo sapiens
  misc_RNA (1)...(19): siRNA sense strand
guuguuaugaugaccauug

SEQ ID NO: 884399 - RNA, 19 nt, Homo sapiens
  misc_RNA (1)...(19): siRNA sense strand
caucagugugcgacgauuu

SEQ ID NO: 884400 - RNA, 19 nt, Homo sapiens
  misc_RNA (1)...(19): siRNA sense strand
agaaacagaaagccuugaa

SEQ ID NO: 884401 - RNA, 19 nt, Homo sapiens
  misc_RNA (1)...(19): siRNA sense strand
uauuagcccuguggguauu

SEQ ID NO: 884402 - RNA, 19 nt, Homo sapiens
  misc_RNA (1)...(19): siRNA sense strand
ccucagaaccagugaugau

SEQ ID NO: 884403 - RNA, 19 nt, Homo sapiens
  misc_RNA (1)...(19): siRNA sense strand
ccgaagacggcuuucaaga

SEQ ID NO: 884404 - RNA, 19 nt, Homo sapiens
  misc_RNA (1)...(19): siRNA sense strand
gaaacaaaacgagcuguga

SEQ ID NO: 884405 - RNA, 19 nt, Homo sapiens
  misc_RNA (1)...(19): siRNA sense strand
gccuugaagaugauucuaa

SEQ ID NO: 884406 - RNA, 19 nt, Homo sapiens
  misc_RNA (1)...(19): siRNA sense strand
gcaucagugugcgacgauu

SEQ ID NO: 884407 - RNA, 19 nt, Homo sapiens
  misc_RNA (1)...(19): siRNA sense strand
cgaagacggcuuucaagac

SEQ ID NO: 884408 - RNA, 19 nt, Homo sapiens
  misc_RNA (1)...(19): siRNA sense strand
ggcauugugucuugcuagu

SEQ ID NO: 884409 - RNA, 19 nt, Homo sapiens
  misc_RNA (1)...(19): siRNA sense strand
ucaucugccuugccugugu

SEQ ID NO: 884410 - RNA, 19 nt, Homo sapiens
  misc_RNA (1)...(19): siRNA sense strand
uguggguauucuaugguua

SEQ ID NO: 884411 - RNA, 19 nt, Homo sapiens
  misc_RNA (1)...(19): siRNA sense strand
ugaggaucuucuacuacuu

SEQ ID NO: 884412 - RNA, 19 nt, Homo sapiens
  misc_RNA (1)...(19): siRNA sense strand
cuuugcaccuuaucauuuc

SEQ ID NO: 884413 - RNA, 19 nt, Homo sapiens
  misc_RNA (1)...(19): siRNA sense strand
ugacugcaaacagaaauau

SEQ ID NO: 884414 - RNA, 19 nt, Homo sapiens
  misc_RNA (1)...(19): siRNA sense strand
cugaggaucuucuacuacu

SEQ ID NO: 884415 - RNA, 19 nt, Homo sapiens
  misc_RNA (1)...(19): siRNA sense strand
aauaucccauggcccaaga

SEQ ID NO: 884416 - RNA, 19 nt, Homo sapiens
  misc_RNA (1)...(19): siRNA sense strand
caaaacgagcugugauauu

SEQ ID NO: 884417 - RNA, 19 nt, Homo sapiens
  misc_RNA (1)...(19): siRNA sense strand
agacggcuuucaagacaag

SEQ ID NO: 884418 - RNA, 19 nt, Homo sapiens
  misc_RNA (1)...(19): siRNA sense strand
ccuugccuguguacucuuu

SEQ ID NO: 884419 - RNA, 19 nt, Homo sapiens
  misc_RNA (1)...(19): siRNA sense strand
ccagucauauacuacuuuu

SEQ ID NO: 884420 - RNA, 19 nt, Homo sapiens
  misc_RNA (1)...(19): siRNA sense strand
ugauaccucuggcaauagg

SEQ ID NO: 884421 - RNA, 19 nt, Homo sapiens
  misc_RNA (1)...(19): siRNA sense strand
gaucauaacuggaauaaga

SEQ ID NO: 884422 - RNA, 19 nt, Homo sapiens
  misc_RNA (1)...(19): siRNA sense strand
gagcucagauuucuuggaa

SEQ ID NO: 884423 - RNA, 19 nt, Homo sapiens
  misc_RNA (1)...(19): siRNA sense strand
guauaguccuuaugucuuu

SEQ ID NO: 884424 - RNA, 19 nt, Homo sapiens
  misc_RNA (1)...(19): siRNA sense strand
gcucagacggccuuucuua

SEQ ID NO: 884425 - RNA, 19 nt, Homo sapiens
  misc_RNA (1)...(19): siRNA sense strand
gaagaaaguuggaaaagau

SEQ ID NO: 884426 - RNA, 19 nt, Homo sapiens
  misc_RNA (1)...(19): siRNA sense strand
ucacaggccuggaugaugu

SEQ ID NO: 884427 - RNA, 19 nt, Homo sapiens
  misc_RNA (1)...(19): siRNA sense strand
ucugggagcucucuucauu

SEQ ID NO: 884428 - RNA, 19 nt, Homo sapiens
  misc_RNA (1)...(19): siRNA sense strand
ggaaacaagcagacccuuu

SEQ ID NO: 884429 - RNA, 19 nt, Homo sapiens
  misc_RNA (1)...(19): siRNA sense strand
ucaggcaggucauagguuu

SEQ ID NO: 884430 - RNA, 19 nt, Homo sapiens
  misc_RNA (1)...(19): siRNA sense strand
uaagaauacuguccuccuu

SEQ ID NO: 884431 - RNA, 19 nt, Homo sapiens
  misc_RNA (1)...(19): siRNA sense strand
guaggaauucugucuauug

SEQ ID NO: 884432 - RNA, 19 nt, Homo sapiens
  misc_RNA (1)...(19): siRNA sense strand
gcagugaugaggacauuga

SEQ ID NO: 884433 - RNA, 19 nt, Homo sapiens
  misc_RNA (1)...(19): siRNA sense strand
ggaauaagaggacuaugca

SEQ ID NO: 884434 - RNA, 19 nt, Homo sapiens
  misc_RNA (1)...(19): siRNA sense strand
ucaccguguuucuuucaua

SEQ ID NO: 884435 - RNA, 19 nt, Homo sapiens
  misc_RNA (1)...(19): siRNA sense strand
gaaacaagcagacccuuuu

SEQ ID NO: 884436 - RNA, 19 nt, Homo sapiens
  misc_RNA (1)...(19): siRNA sense strand
gggcauguauaguccuuau

SEQ ID NO: 884437 - RNA, 19 nt, Homo sapiens
  misc_RNA (1)...(19): siRNA sense strand
ugggagcucucuucauuug

SEQ ID NO: 884438 - RNA, 19 nt, Homo sapiens
  misc_RNA (1)...(19): siRNA sense strand
gggcagugaugaggacauu

SEQ ID NO: 884439 - RNA, 19 nt, Homo sapiens
  misc_RNA (1)...(19): siRNA sense strand
ggagcucucuucauuugag

SEQ ID NO: 884440 - RNA, 19 nt, Homo sapiens
  misc_RNA (1)...(19): siRNA sense strand
gguaggaauucugucuauu

SEQ ID NO: 884441 - RNA, 19 nt, Homo sapiens
  misc_RNA (1)...(19): siRNA sense strand
gcauguauaguccuuaugu

SEQ ID NO: 884442 - RNA, 19 nt, Homo sapiens
  misc_RNA (1)...(19): siRNA sense strand
gcuggacaguauucaaguu

SEQ ID NO: 884443 - RNA, 19 nt, Homo sapiens
  misc_RNA (1)...(19): siRNA sense strand
uaagaggacuaugcaaugg

SEQ ID NO: 884444 - RNA, 19 nt, Homo sapiens
  misc_RNA (1)...(19): siRNA sense strand
uaggaauucugucuauugu

SEQ ID NO: 884445 - RNA, 19 nt, Homo sapiens
  misc_RNA (1)...(19): siRNA sense strand
uaaagccaguggaguucaa

SEQ ID NO: 884446 - RNA, 19 nt, Homo sapiens
  misc_RNA (1)...(19): siRNA sense strand
ggaaugcagagucagauca

SEQ ID NO: 884447 - RNA, 19 nt, Homo sapiens
  misc_RNA (1)...(19): siRNA sense strand
ggucauagguuuuggaucu

SEQ ID NO: 884448 - RNA, 19 nt, Homo sapiens
  misc_RNA (1)...(19): siRNA sense strand
ggacauugagccacuacug

SEQ ID NO: 884449 - RNA, 19 nt, Homo sapiens
  misc_RNA (1)...(19): siRNA sense strand
gaagcuggacaguauucaa

SEQ ID NO: 884450 - RNA, 19 nt, Homo sapiens
  misc_RNA (1)...(19): siRNA sense strand
caguaaagccaguggaguu

SEQ ID NO: 884451 - RNA, 19 nt, Homo sapiens
  misc_RNA (1)...(19): siRNA sense strand
gggaucauaacuggaauaa

SEQ ID NO: 884452 - RNA, 19 nt, Homo sapiens
  misc_RNA (1)...(19): siRNA sense strand
gcaucaccguguuucuuuc

SEQ ID NO: 884453 - RNA, 19 nt, Homo sapiens
  misc_RNA (1)...(19): siRNA sense strand
cagacggccuuucuuagca

SEQ ID NO: 884454 - RNA, 19 nt, Homo sapiens
  misc_RNA (1)...(19): siRNA sense strand
uccugaagcuggacaguau

SEQ ID NO: 884455 - RNA, 19 nt, Homo sapiens
  misc_RNA (1)...(19): siRNA sense strand
ucuacugucuuacuaaucu

SEQ ID NO: 884456 - RNA, 19 nt, Homo sapiens
  misc_RNA (1)...(19): siRNA sense strand
ggaaaagauucuacugucu

SEQ ID NO: 884457 - RNA, 19 nt, Homo sapiens
  misc_RNA (1)...(19): siRNA sense strand
agauucuacugucuuacua

SEQ ID NO: 884458 - RNA, 19 nt, Homo sapiens
  misc_RNA (1)...(19): siRNA sense strand
cugguugccuuauucauuc

SEQ ID NO: 884459 - RNA, 19 nt, Homo sapiens
  misc_RNA (1)...(19): siRNA sense strand
gaauaagaggacuaugcaa

SEQ ID NO: 884460 - RNA, 19 nt, Homo sapiens
  misc_RNA (1)...(19): siRNA sense strand
ugaagaaaguuggaaaaga

SEQ ID NO: 884461 - RNA, 19 nt, Homo sapiens
  misc_RNA (1)...(19): siRNA sense strand
aauaagaggacuaugcaau

SEQ ID NO: 884462 - RNA, 19 nt, Homo sapiens
  misc_RNA (1)...(19): siRNA sense strand
agagucagaucagcaagga

SEQ ID NO: 884463 - RNA, 19 nt, Homo sapiens
  misc_RNA (1)...(19): siRNA sense strand
gcuuccagaugcuccaguu

SEQ ID NO: 884464 - RNA, 19 nt, Homo sapiens
  misc_RNA (1)...(19): siRNA sense strand
ugguaggaauucugucuau

SEQ ID NO: 884465 - RNA, 19 nt, Homo sapiens
  misc_RNA (1)...(19): siRNA sense strand
gauucuacugucuuacuaa

SEQ ID NO: 884466 - RNA, 19 nt, Homo sapiens
  misc_RNA (1)...(19): siRNA sense strand
gcaucacguuuccggcaau

SEQ ID NO: 884467 - RNA, 19 nt, Homo sapiens
  misc_RNA (1)...(19): siRNA sense strand
auaagaggacuaugcaaug

SEQ ID NO: 884468 - RNA, 19 nt, Homo sapiens
  misc_RNA (1)...(19): siRNA sense strand
ggcuucauauucuacaugu

SEQ ID NO: 884469 - RNA, 19 nt, Homo sapiens
  misc_RNA (1)...(19): siRNA sense strand
gcuaugguaggaauucugu

SEQ ID NO: 884470 - RNA, 19 nt, Homo sapiens
  misc_RNA (1)...(19): siRNA sense strand
cuucauauucuacauguuc

SEQ ID NO: 884471 - RNA, 19 nt, Homo sapiens
  misc_RNA (1)...(19): siRNA sense strand
uaaucugcaucaccguguu

SEQ ID NO: 884472 - RNA, 19 nt, Homo sapiens
  misc_RNA (1)...(19): siRNA sense strand
ucugguugccuuauucauu

SEQ ID NO: 884473 - RNA, 19 nt, Homo sapiens
  misc_RNA (1)...(19): siRNA sense strand
uugcagcauucauagcuau

SEQ ID NO: 884474 - RNA, 19 nt, Homo sapiens
  misc_RNA (1)...(19): siRNA sense strand
ugaggacauugagccacua

SEQ ID NO: 884475 - RNA, 19 nt, Homo sapiens
  misc_RNA (1)...(19): siRNA sense strand
gagaucauuaggaaauaag

SEQ ID NO: 884476 - RNA, 19 nt, Homo sapiens
  misc_RNA (1)...(19): siRNA sense strand
ugcaucaccguguuucuuu

SEQ ID NO: 884477 - RNA, 19 nt, Homo sapiens
  misc_RNA (1)...(19): siRNA sense strand
gagccacuacugcaagaca

SEQ ID NO: 884478 - RNA, 19 nt, Homo sapiens
  misc_RNA (1)...(19): siRNA sense strand
caccguguuucuuucauac

SEQ ID NO: 884479 - RNA, 19 nt, Homo sapiens
  misc_RNA (1)...(19): siRNA sense strand
ggagagagcugguggagua

SEQ ID NO: 884480 - RNA, 19 nt, Homo sapiens
  misc_RNA (1)...(19): siRNA sense strand
gauaaugcauggcaaguuu

SEQ ID NO: 884481 - RNA, 19 nt, Homo sapiens
  misc_RNA (1)...(19): siRNA sense strand
ugaagagguugaaacauua

SEQ ID NO: 884482 - RNA, 19 nt, Homo sapiens
  misc_RNA (1)...(19): siRNA sense strand
gggaauagcugucggacuu

SEQ ID NO: 884483 - RNA, 19 nt, Homo sapiens
  misc_RNA (1)...(19): siRNA sense strand
gggaugaccucuugugaaa

SEQ ID NO: 884484 - RNA, 19 nt, Homo sapiens
  misc_RNA (1)...(19): siRNA sense strand
gaaagagauugaagagguu

SEQ ID NO: 884485 - RNA, 19 nt, Homo sapiens
  misc_RNA (1)...(19): siRNA sense strand
gaagggaucuagccaaugg

SEQ ID NO: 884486 - RNA, 19 nt, Homo sapiens
  misc_RNA (1)...(19): siRNA sense strand
cagcaaaccuugucugaug

SEQ ID NO: 884487 - RNA, 19 nt, Homo sapiens
  misc_RNA (1)...(19): siRNA sense strand
ucagagggaugaauuuauu

SEQ ID NO: 884488 - RNA, 19 nt, Homo sapiens
  misc_RNA (1)...(19): siRNA sense strand
gggcagagauuaacaagag

SEQ ID NO: 884489 - RNA, 19 nt, Homo sapiens
  misc_RNA (1)...(19): siRNA sense strand
ucacggagaucaacagaga

SEQ ID NO: 884490 - RNA, 19 nt, Homo sapiens
  misc_RNA (1)...(19): siRNA sense strand
caagguguaugauuuguug

SEQ ID NO: 884491 - RNA, 19 nt, Homo sapiens
  misc_RNA (1)...(19): siRNA sense strand
caaagucuaugggacauuu

SEQ ID NO: 884492 - RNA, 19 nt, Homo sapiens
  misc_RNA (1)...(19): siRNA sense strand
caucggaaauucagaaaug

SEQ ID NO: 884493 - RNA, 19 nt, Homo sapiens
  misc_RNA (1)...(19): siRNA sense strand
ggaaggauaccacaauuuc

SEQ ID NO: 884494 - RNA, 19 nt, Homo sapiens
  misc_RNA (1)...(19): siRNA sense strand
ucagaaaugucccuucaga

SEQ ID NO: 884495 - RNA, 19 nt, Homo sapiens
  misc_RNA (1)...(19): siRNA sense strand
cgaaauggguugcgaugau

SEQ ID NO: 884496 - RNA, 19 nt, Homo sapiens
  misc_RNA (1)...(19): siRNA sense strand
uugaagagguugaaacauu

SEQ ID NO: 884497 - RNA, 19 nt, Homo sapiens
  misc_RNA (1)...(19): siRNA sense strand
gaagagcaagguagaguga

SEQ ID NO: 884498 - RNA, 19 nt, Homo sapiens
  misc_RNA (1)...(19): siRNA sense strand
gcuccgagacuccuuuaua

SEQ ID NO: 884499 - RNA, 19 nt, Homo sapiens
  misc_RNA (1)...(19): siRNA sense strand
ggccagaacuccuccacuu

SEQ ID NO: 884500 - RNA, 19 nt, Homo sapiens
  misc_RNA (1)...(19): siRNA sense strand
gaaauggguugcgaugauc

SEQ ID NO: 884501 - RNA, 19 nt, Homo sapiens
  misc_RNA (1)...(19): siRNA sense strand
gcucagaaacuccacauau

SEQ ID NO: 884502 - RNA, 19 nt, Homo sapiens
  misc_RNA (1)...(19): siRNA sense strand
gcacaugaucgaagaguau

SEQ ID NO: 884503 - RNA, 19 nt, Homo sapiens
  misc_RNA (1)...(19): siRNA sense strand
gggaagggaucuagccaau

SEQ ID NO: 884504 - RNA, 19 nt, Homo sapiens
  misc_RNA (1)...(19): siRNA sense strand
agaaagagguguguugugu

SEQ ID NO: 884505 - RNA, 19 nt, Homo sapiens
  misc_RNA (1)...(19): siRNA sense strand
ugauuuagcugggaaugaa

SEQ ID NO: 884506 - RNA, 19 nt, Homo sapiens
  misc_RNA (1)...(19): siRNA sense strand
ggaagaagaagcugcaagu

SEQ ID NO: 884507 - RNA, 19 nt, Homo sapiens
  misc_RNA (1)...(19): siRNA sense strand
gugcaugaguccaagcaaa

SEQ ID NO: 884508 - RNA, 19 nt, Homo sapiens
  misc_RNA (1)...(19): siRNA sense strand
uagcugaccuccacgugaa

SEQ ID NO: 884509 - RNA, 19 nt, Homo sapiens
  misc_RNA (1)...(19): siRNA sense strand
ucagaaacuccacauauga

SEQ ID NO: 884510 - RNA, 19 nt, Homo sapiens
  misc_RNA (1)...(19): siRNA sense strand
gggcauggccaccugcuuu

SEQ ID NO: 884511 - RNA, 19 nt, Homo sapiens
  misc_RNA (1)...(19): siRNA sense strand
gaaagaggagcagauacaa

SEQ ID NO: 884512 - RNA, 19 nt, Homo sapiens
  misc_RNA (1)...(19): siRNA sense strand
gaaacuccacauaugagaa

SEQ ID NO: 884513 - RNA, 19 nt, Homo sapiens
  misc_RNA (1)...(19): siRNA sense strand
gaguacaccaugauauuga

SEQ ID NO: 884514 - RNA, 19 nt, Homo sapiens
  misc_RNA (1)...(19): siRNA sense strand
ggaguacaccaugauauug

SEQ ID NO: 884515 - RNA, 19 nt, Homo sapiens
  misc_RNA (1)...(19): siRNA sense strand
ggacaugaggcaccaagga

SEQ ID NO: 884516 - RNA, 19 nt, Homo sapiens
  misc_RNA (1)...(19): siRNA sense strand
gcaaucagcaaauccaagu

SEQ ID NO: 884517 - RNA, 19 nt, Homo sapiens
  misc_RNA (1)...(19): siRNA sense strand
gggaaggauaccacaauuu

SEQ ID NO: 884518 - RNA, 19 nt, Homo sapiens
  misc_RNA (1)...(19): siRNA sense strand
gcagaaagagauugaagag

SEQ ID NO: 884519 - RNA, 19 nt, Homo sapiens
  misc_RNA (1)...(19): siRNA sense strand
gaccaugccuucgaugaca

SEQ ID NO: 884520 - RNA, 19 nt, Homo sapiens
  misc_RNA (1)...(19): siRNA sense strand
gaaggauaccacaauuuca

SEQ ID NO: 884521 - RNA, 19 nt, Homo sapiens
  misc_RNA (1)...(19): siRNA sense strand
gaggauggcaaucagcaaa

SEQ ID NO: 884522 - RNA, 19 nt, Homo sapiens
  misc_RNA (1)...(19): siRNA sense strand
aaaacacucucaacacuuu

SEQ ID NO: 884523 - RNA, 19 nt, Homo sapiens
  misc_RNA (1)...(19): siRNA sense strand
uaccuuauguacagaguga

SEQ ID NO: 884524 - RNA, 19 nt, Homo sapiens
  misc_RNA (1)...(19): siRNA sense strand
ugaaagaggagcagauaca

SEQ ID NO: 884525 - RNA, 19 nt, Homo sapiens
  misc_RNA (1)...(19): siRNA sense strand
gaagcuggaccucaaaguc

SEQ ID NO: 884526 - RNA, 19 nt, Homo sapiens
  misc_RNA (1)...(19): siRNA sense strand
aaagucacaucggaaauuc

SEQ ID NO: 884527 - RNA, 19 nt, Homo sapiens
  misc_RNA (1)...(19): siRNA sense strand
cucagaaacuccacauaug

SEQ ID NO: 884528 - RNA, 19 nt, Homo sapiens
  misc_RNA (1)...(19): siRNA sense strand
caggagccaugcaguguuc

SEQ ID NO: 884529 - RNA, 19 nt, Homo sapiens
  misc_RNA (1)...(19): siRNA sense strand
gggcaagguguaugauuug

SEQ ID NO: 884530 - RNA, 19 nt, Homo sapiens
  misc_RNA (1)...(19): siRNA sense strand
ggagaaagagguguguugu

SEQ ID NO: 884531 - RNA, 19 nt, Homo sapiens
  misc_RNA (1)...(19): siRNA sense strand
gauugaagagguugaaaca

SEQ ID NO: 884532 - RNA, 19 nt, Homo sapiens
  misc_RNA (1)...(19): siRNA sense strand
cagagggaugaauuuauua

SEQ ID NO: 884533 - RNA, 19 nt, Homo sapiens
  misc_RNA (1)...(19): siRNA sense strand
ggaagcggccucucaacca

SEQ ID NO: 884534 - RNA, 19 nt, Homo sapiens
  misc_RNA (1)...(19): siRNA sense strand
ugaccgagauccaaaagaa

SEQ ID NO: 884535 - RNA, 19 nt, Homo sapiens
  misc_RNA (1)...(19): siRNA sense strand
gaaacauuacccacucugu

SEQ ID NO: 884536 - RNA, 19 nt, Homo sapiens
  misc_RNA (1)...(19): siRNA sense strand
ggauggcaaucagcaaauc

SEQ ID NO: 884537 - RNA, 19 nt, Homo sapiens
  misc_RNA (1)...(19): siRNA sense strand
cgagaagugggaagacgua

SEQ ID NO: 884538 - RNA, 19 nt, Homo sapiens
  misc_RNA (1)...(19): siRNA sense strand
uaagauaugcaaacagagu

SEQ ID NO: 884539 - RNA, 19 nt, Homo sapiens
  misc_RNA (1)...(19): siRNA sense strand
ggggcaagguguaugauuu

SEQ ID NO: 884540 - RNA, 19 nt, Homo sapiens
  misc_RNA (1)...(19): siRNA sense strand
caggaacggcccaagauug

SEQ ID NO: 884541 - RNA, 19 nt, Homo sapiens
  misc_RNA (1)...(19): siRNA sense strand
gcaaaccuugucugaugaa

SEQ ID NO: 884542 - RNA, 19 nt, Homo sapiens
  misc_RNA (1)...(19): siRNA sense strand
gaaugaaagaggagcagau

SEQ ID NO: 884543 - RNA, 19 nt, Homo sapiens
  misc_RNA (1)...(19): siRNA sense strand
ggauaaugcauggcaaguu

SEQ ID NO: 884544 - RNA, 19 nt, Homo sapiens
  misc_RNA (1)...(19): siRNA sense strand
gaagaagcugcaaguccuu

SEQ ID NO: 884545 - RNA, 19 nt, Homo sapiens
  misc_RNA (1)...(19): siRNA sense strand
gcaagguguaugauuuguu

SEQ ID NO: 884546 - RNA, 19 nt, Homo sapiens
  misc_RNA (1)...(19): siRNA sense strand
ggcccaagauuguucuaag

SEQ ID NO: 884547 - RNA, 19 nt, Homo sapiens
  misc_RNA (1)...(19): siRNA sense strand
gcucugaccgagauccaaa

SEQ ID NO: 884548 - RNA, 19 nt, Homo sapiens
  misc_RNA (1)...(19): siRNA sense strand
gagcagaaagagauugaag

SEQ ID NO: 884549 - RNA, 19 nt, Homo sapiens
  misc_RNA (1)...(19): siRNA sense strand
ucacaucggaaauucagaa

SEQ ID NO: 884550 - RNA, 19 nt, Homo sapiens
  misc_RNA (1)...(19): siRNA sense strand
caugauugcuaccaucucu

SEQ ID NO: 884551 - RNA, 19 nt, Homo sapiens
  misc_RNA (1)...(19): siRNA sense strand
gagaaagagguguguugug

SEQ ID NO: 884552 - RNA, 19 nt, Homo sapiens
  misc_RNA (1)...(19): siRNA sense strand
uguaugauuuguugaacug

SEQ ID NO: 884553 - RNA, 19 nt, Homo sapiens
  misc_RNA (1)...(19): siRNA sense strand
gugaggagcagaaagagau

SEQ ID NO: 884554 - RNA, 19 nt, Homo sapiens
  misc_RNA (1)...(19): siRNA sense strand
aaugaaagaggagcagaua

SEQ ID NO: 884555 - RNA, 19 nt, Homo sapiens
  misc_RNA (1)...(19): siRNA sense strand
ggucagaacaagccucaca

SEQ ID NO: 884556 - RNA, 19 nt, Homo sapiens
  misc_RNA (1)...(19): siRNA sense strand
uggaguacaccaugauauu

SEQ ID NO: 884557 - RNA, 19 nt, Homo sapiens
  misc_RNA (1)...(19): siRNA sense strand
agggaaggauaccacaauu

SEQ ID NO: 884558 - RNA, 19 nt, Homo sapiens
  misc_RNA (1)...(19): siRNA sense strand
agagugaggagcagaaaga

SEQ ID NO: 884559 - RNA, 19 nt, Homo sapiens
  misc_RNA (1)...(19): siRNA sense strand
ggacagcagcaagaucuca

SEQ ID NO: 884560 - RNA, 19 nt, Homo sapiens
  misc_RNA (1)...(19): siRNA sense strand
gcccggucuuuguccauuu

SEQ ID NO: 884561 - RNA, 19 nt, Homo sapiens
  misc_RNA (1)...(19): siRNA sense strand
gcccaagauuguucuaagg

SEQ ID NO: 884562 - RNA, 19 nt, Homo sapiens
  misc_RNA (1)...(19): siRNA sense strand
gaagaagaagcugcaaguc

SEQ ID NO: 884563 - RNA, 19 nt, Homo sapiens
  misc_RNA (1)...(19): siRNA sense strand
cuccgagacuccuuuauag

SEQ ID NO: 884564 - RNA, 19 nt, Homo sapiens
  misc_RNA (1)...(19): siRNA sense strand
uuguugaacuggaagaaga

SEQ ID NO: 884565 - RNA, 19 nt, Homo sapiens
  misc_RNA (1)...(19): siRNA sense strand
auucagaaaugucccuuca

SEQ ID NO: 884566 - RNA, 19 nt, Homo sapiens
  misc_RNA (1)...(19): siRNA sense strand
gccaugcaguguuccagau

SEQ ID NO: 884567 - RNA, 19 nt, Homo sapiens
  misc_RNA (1)...(19): siRNA sense strand
ugucggacuuccaggcaaa

SEQ ID NO: 884568 - RNA, 19 nt, Homo sapiens
  misc_RNA (1)...(19): siRNA sense strand
aaccuugucugaugaagca

SEQ ID NO: 884569 - RNA, 19 nt, Homo sapiens
  misc_RNA (1)...(19): siRNA sense strand
agauugaccuggagaccau

SEQ ID NO: 884570 - RNA, 19 nt, Homo sapiens
  misc_RNA (1)...(19): siRNA sense strand
ccaccugcuuugccuaugg

SEQ ID NO: 884571 - RNA, 19 nt, Homo sapiens
  misc_RNA (1)...(19): siRNA sense strand
gaagagguugaaacauuac

SEQ ID NO: 884572 - RNA, 19 nt, Homo sapiens
  misc_RNA (1)...(19): siRNA sense strand
gacaugaggcaccaaggau

SEQ ID NO: 884573 - RNA, 19 nt, Homo sapiens
  misc_RNA (1)...(19): siRNA sense strand
gauaugcaaacagaguaaa

SEQ ID NO: 884574 - RNA, 19 nt, Homo sapiens
  misc_RNA (1)...(19): siRNA sense strand
gaaaacacucucaacacuu

SEQ ID NO: 884575 - RNA, 19 nt, Homo sapiens
  misc_RNA (1)...(19): siRNA sense strand
gugcugaaccugguggaaa

SEQ ID NO: 884576 - RNA, 19 nt, Homo sapiens
  misc_RNA (1)...(19): siRNA sense strand
uagaguggguggagaaagc

SEQ ID NO: 884577 - RNA, 19 nt, Homo sapiens
  misc_RNA (1)...(19): siRNA sense strand
acuauugggucacgguaga

SEQ ID NO: 884578 - RNA, 19 nt, Homo sapiens
  misc_RNA (1)...(19): siRNA sense strand
gguggcacaggaugucuuu

SEQ ID NO: 884579 - RNA, 19 nt, Homo sapiens
  misc_RNA (1)...(19): siRNA sense strand
ccaaagagcccaguacagu

SEQ ID NO: 884580 - RNA, 19 nt, Homo sapiens
  misc_RNA (1)...(19): siRNA sense strand
aaagagcccaguacagugu

SEQ ID NO: 884581 - RNA, 19 nt, Homo sapiens
  misc_RNA (1)...(19): siRNA sense strand
agaagaaguuccagaaaua

SEQ ID NO: 884582 - RNA, 19 nt, Homo sapiens
  misc_RNA (1)...(19): siRNA sense strand
ggagguaucugcccuguca

SEQ ID NO: 884583 - RNA, 19 nt, Homo sapiens
  misc_RNA (1)...(19): siRNA sense strand
ucacuuggcugguguuuga

SEQ ID NO: 884584 - RNA, 19 nt, Homo sapiens
  misc_RNA (1)...(19): siRNA sense strand
gcagugccauccucaugua

SEQ ID NO: 884585 - RNA, 19 nt, Homo sapiens
  misc_RNA (1)...(19): siRNA sense strand
ccacagaagugagcaagaa

SEQ ID NO: 884586 - RNA, 19 nt, Homo sapiens
  misc_RNA (1)...(19): siRNA sense strand
cagaagaaguuccagaaau

SEQ ID NO: 884587 - RNA, 19 nt, Homo sapiens
  misc_RNA (1)...(19): siRNA sense strand
gcacagaggccacagaagu

SEQ ID NO: 884588 - RNA, 19 nt, Homo sapiens
  misc_RNA (1)...(19): siRNA sense strand
gcaggcaacuuccgaaugc

SEQ ID NO: 884589 - RNA, 19 nt, Homo sapiens
  misc_RNA (1)...(19): siRNA sense strand
ucauggagcugaccugguu

SEQ ID NO: 884590 - RNA, 19 nt, Homo sapiens
  misc_RNA (1)...(19): siRNA sense strand
gccgauggguccagaagaa

SEQ ID NO: 884591 - RNA, 19 nt, Homo sapiens
  misc_RNA (1)...(19): siRNA sense strand
ucugucaccuggcucaaua

SEQ ID NO: 884592 - RNA, 19 nt, Homo sapiens
  misc_RNA (1)...(19): siRNA sense strand
agaaugaaguguacaagca

SEQ ID NO: 884593 - RNA, 19 nt, Homo sapiens
  misc_RNA (1)...(19): siRNA sense strand
gcucaucgcugugcucuac

SEQ ID NO: 884594 - RNA, 19 nt, Homo sapiens
  misc_RNA (1)...(19): siRNA sense strand
gcaaugcuaucaucaucgu

SEQ ID NO: 884595 - RNA, 19 nt, Homo sapiens
  misc_RNA (1)...(19): siRNA sense strand
gcaagggcuuugugaaacu

SEQ ID NO: 884596 - RNA, 19 nt, Homo sapiens
  misc_RNA (1)...(19): siRNA sense strand
gaaguuccagaaauacauu

SEQ ID NO: 884597 - RNA, 19 nt, Homo sapiens
  misc_RNA (1)...(19): siRNA sense strand
caagaaguucccaggcaua

SEQ ID NO: 884598 - RNA, 19 nt, Homo sapiens
  misc_RNA (1)...(19): siRNA sense strand
gaacacacccaagaaaggu

SEQ ID NO: 884599 - RNA, 19 nt, Homo sapiens
  misc_RNA (1)...(19): siRNA sense strand
caccaggaacuauaucuuu

SEQ ID NO: 884600 - RNA, 19 nt, Homo sapiens
  misc_RNA (1)...(19): siRNA sense strand
uacauauucugcacugauu

SEQ ID NO: 884601 - RNA, 19 nt, Homo sapiens
  misc_RNA (1)...(19): siRNA sense strand
caggaccucuucucuguca

SEQ ID NO: 884602 - RNA, 19 nt, Homo sapiens
  misc_RNA (1)...(19): siRNA sense strand
gguccuguccuuccuugua

SEQ ID NO: 884603 - RNA, 19 nt, Homo sapiens
  misc_RNA (1)...(19): siRNA sense strand
ggaacacacccaagaaagg

SEQ ID NO: 884604 - RNA, 19 nt, Homo sapiens
  misc_RNA (1)...(19): siRNA sense strand
ccgcaagggcuuugugaaa

SEQ ID NO: 884605 - RNA, 19 nt, Homo sapiens
  misc_RNA (1)...(19): siRNA sense strand
guacauauucugcacugau

SEQ ID NO: 884606 - RNA, 19 nt, Homo sapiens
  misc_RNA (1)...(19): siRNA sense strand
gaagaaguuccagaaauac

SEQ ID NO: 884607 - RNA, 19 nt, Homo sapiens
  misc_RNA (1)...(19): siRNA sense strand
ccagaagaaguuccagaaa

SEQ ID NO: 884608 - RNA, 19 nt, Homo sapiens
  misc_RNA (1)...(19): siRNA sense strand
acaagcaggugaucuucga

SEQ ID NO: 884609 - RNA, 19 nt, Homo sapiens
  misc_RNA (1)...(19): siRNA sense strand
gagagaaugaaguguacaa

SEQ ID NO: 884610 - RNA, 19 nt, Homo sapiens
  misc_RNA (1)...(19): siRNA sense strand
ggccuuaccuggcuacacu

SEQ ID NO: 884611 - RNA, 19 nt, Homo sapiens
  misc_RNA (1)...(19): siRNA sense strand
gcugugcucuacuucacuu

SEQ ID NO: 884612 - RNA, 19 nt, Homo sapiens
  misc_RNA (1)...(19): siRNA sense strand
aaacuggcccugcgucaug

SEQ ID NO: 884613 - RNA, 19 nt, Homo sapiens
  misc_RNA (1)...(19): siRNA sense strand
agcaagacaucgaccugua

SEQ ID NO: 884614 - RNA, 19 nt, Homo sapiens
  misc_RNA (1)...(19): siRNA sense strand
ccaagcccaucaccacugu

SEQ ID NO: 884615 - RNA, 19 nt, Homo sapiens
  misc_RNA (1)...(19): siRNA sense strand
caggaacuauaucuuugga

SEQ ID NO: 884616 - RNA, 19 nt, Homo sapiens
  misc_RNA (1)...(19): siRNA sense strand
uccaggaccucuucucugu

SEQ ID NO: 884617 - RNA, 19 nt, Homo sapiens
  misc_RNA (1)...(19): siRNA sense strand
gaguggcaaugcuaucauc

SEQ ID NO: 884618 - RNA, 19 nt, Homo sapiens
  misc_RNA (1)...(19): siRNA sense strand
cagaagugagcaagaaguu

SEQ ID NO: 884619 - RNA, 19 nt, Homo sapiens
  misc_RNA (1)...(19): siRNA sense strand
guucccaucuacuccuuug

SEQ ID NO: 884620 - RNA, 19 nt, Homo sapiens
  misc_RNA (1)...(19): siRNA sense strand
uggcaaugcuaucaucauc

SEQ ID NO: 884621 - RNA, 19 nt, Homo sapiens
  misc_RNA (1)...(19): siRNA sense strand
gcagcuacaggucaucuca

SEQ ID NO: 884622 - RNA, 19 nt, Homo sapiens
  misc_RNA (1)...(19): siRNA sense strand
gaaugggaguggcaaugcu

SEQ ID NO: 884623 - RNA, 19 nt, Homo sapiens
  misc_RNA (1)...(19): siRNA sense strand
ccugaugucuggagguauc

SEQ ID NO: 884624 - RNA, 19 nt, Homo sapiens
  misc_RNA (1)...(19): siRNA sense strand
accaggaacuauaucuuug

SEQ ID NO: 884625 - RNA, 19 nt, Homo sapiens
  misc_RNA (1)...(19): siRNA sense strand
gcgcuacuuucgagacuac

SEQ ID NO: 884626 - RNA, 19 nt, Homo sapiens
  misc_RNA (1)...(19): siRNA sense strand
cagcacagaggccacagaa

SEQ ID NO: 884627 - RNA, 19 nt, Homo sapiens
  misc_RNA (1)...(19): siRNA sense strand
guccgaaacugggcugugu

SEQ ID NO: 884628 - RNA, 19 nt, Homo sapiens
  misc_RNA (1)...(19): siRNA sense strand
gcaagacaucgaccuguac

SEQ ID NO: 884629 - RNA, 19 nt, Homo sapiens
  misc_RNA (1)...(19): siRNA sense strand
gauggguccagaagaaguu

SEQ ID NO: 884630 - RNA, 19 nt, Homo sapiens
  misc_RNA (1)...(19): siRNA sense strand
gagacuacuuucccaucca

SEQ ID NO: 884631 - RNA, 19 nt, Homo sapiens
  misc_RNA (1)...(19): siRNA sense strand
ggucacaguggguccgaaa

SEQ ID NO: 884632 - RNA, 19 nt, Homo sapiens
  misc_RNA (1)...(19): siRNA sense strand
gaaccgcaagggcuuugug

SEQ ID NO: 884633 - RNA, 19 nt, Homo sapiens
  misc_RNA (1)...(19): siRNA sense strand
guacaagcaggugaucuuc

SEQ ID NO: 884634 - RNA, 19 nt, Homo sapiens
  misc_RNA (1)...(19): siRNA sense strand
uuccagaaauacauugguu

SEQ ID NO: 884635 - RNA, 19 nt, Homo sapiens
  misc_RNA (1)...(19): siRNA sense strand
caagggcuuugugaaacug

SEQ ID NO: 884636 - RNA, 19 nt, Homo sapiens
  misc_RNA (1)...(19): siRNA sense strand
ugaccugguucccaucuac

SEQ ID NO: 884637 - RNA, 19 nt, Homo sapiens
  misc_RNA (1)...(19): siRNA sense strand
gaaacuggcccugcgucau

SEQ ID NO: 884638 - RNA, 19 nt, Homo sapiens
  misc_RNA (1)...(19): siRNA sense strand
ccauccagcuggugaagac

SEQ ID NO: 884639 - RNA, 19 nt, Homo sapiens
  misc_RNA (1)...(19): siRNA sense strand
gacuggaacacacccaaga

SEQ ID NO: 884640 - RNA, 19 nt, Homo sapiens
  misc_RNA (1)...(19): siRNA sense strand
acaagcacaagaccaaguu

SEQ ID NO: 884641 - RNA, 19 nt, Homo sapiens
  misc_RNA (1)...(19): siRNA sense strand
uggagagaaugaaguguac

SEQ ID NO: 884642 - RNA, 19 nt, Homo sapiens
  misc_RNA (1)...(19): siRNA sense strand
gccgggacaccauagacua

SEQ ID NO: 884643 - RNA, 19 nt, Homo sapiens
  misc_RNA (1)...(19): siRNA sense strand
ugaccaccaggaacuauau

SEQ ID NO: 884644 - RNA, 19 nt, Homo sapiens
  misc_RNA (1)...(19): siRNA sense strand
cuacuuucgagacuacuuu

SEQ ID NO: 884645 - RNA, 19 nt, Homo sapiens
  misc_RNA (1)...(19): siRNA sense strand
gggaguggcaaugcuauca

SEQ ID NO: 884646 - RNA, 19 nt, Homo sapiens
  misc_RNA (1)...(19): siRNA sense strand
ccaccaggaacuauaucuu

SEQ ID NO: 884647 - RNA, 19 nt, Homo sapiens
  misc_RNA (1)...(19): siRNA sense strand
gacaagcacaagaccaagu

SEQ ID NO: 884648 - RNA, 19 nt, Homo sapiens
  misc_RNA (1)...(19): siRNA sense strand
cgcaagggcuuugugaaac

SEQ ID NO: 884649 - RNA, 19 nt, Homo sapiens
  misc_RNA (1)...(19): siRNA sense strand
gccauccucauguacauau

SEQ ID NO: 884650 - RNA, 19 nt, Homo sapiens
  misc_RNA (1)...(19): siRNA sense strand
cacagaggccacagaagug

SEQ ID NO: 884651 - RNA, 19 nt, Homo sapiens
  misc_RNA (1)...(19): siRNA sense strand
uuggagagaaugaagugua

SEQ ID NO: 884652 - RNA, 19 nt, Homo sapiens
  misc_RNA (1)...(19): siRNA sense strand
guugagggaguaccugaug

SEQ ID NO: 884653 - RNA, 19 nt, Homo sapiens
  misc_RNA (1)...(19): siRNA sense strand
ucaucgcugugcucuacuu

SEQ ID NO: 884654 - RNA, 19 nt, Homo sapiens
  misc_RNA (1)...(19): siRNA sense strand
caacccagcaagacaucga

SEQ ID NO: 884655 - RNA, 19 nt, Homo sapiens
  misc_RNA (1)...(19): siRNA sense strand
gcccaucaccacuguugug

SEQ ID NO: 884656 - RNA, 19 nt, Homo sapiens
  misc_RNA (1)...(19): siRNA sense strand
gugccauccucauguacau

SEQ ID NO: 884657 - RNA, 19 nt, Homo sapiens
  misc_RNA (1)...(19): siRNA sense strand
gaaagaauauggcaaagcu

SEQ ID NO: 884658 - RNA, 19 nt, Homo sapiens
  misc_RNA (1)...(19): siRNA sense strand
uggcaaagcugaugcaaga

SEQ ID NO: 884659 - RNA, 19 nt, Homo sapiens
  misc_RNA (1)...(19): siRNA sense strand
uaggaaacguugcaaauuc

SEQ ID NO: 884660 - RNA, 19 nt, Homo sapiens
  misc_RNA (1)...(19): siRNA sense strand
gaugcaagauggguuuauu

SEQ ID NO: 884661 - RNA, 19 nt, Homo sapiens
  misc_RNA (1)...(19): siRNA sense strand
gaaaaugcaucagaaagaa

SEQ ID NO: 884662 - RNA, 19 nt, Homo sapiens
  misc_RNA (1)...(19): siRNA sense strand
caagauggguuuauuuuga

SEQ ID NO: 884663 - RNA, 19 nt, Homo sapiens
  misc_RNA (1)...(19): siRNA sense strand
aaagaaaccaguucaguga

SEQ ID NO: 884664 - RNA, 19 nt, Homo sapiens
  misc_RNA (1)...(19): siRNA sense strand
uggcauuguuccucauuua

SEQ ID NO: 884665 - RNA, 19 nt, Homo sapiens
  misc_RNA (1)...(19): siRNA sense strand
gcaaagcugaugcaagaug

SEQ ID NO: 884666 - RNA, 19 nt, Homo sapiens
  misc_RNA (1)...(19): siRNA sense strand
ggaugggucucuggcauug

SEQ ID NO: 884667 - RNA, 19 nt, Homo sapiens
  misc_RNA (1)...(19): siRNA sense strand
guaggaaacguugcaaauu

SEQ ID NO: 884668 - RNA, 19 nt, Homo sapiens
  misc_RNA (1)...(19): siRNA sense strand
cagaguggcucaccagaag

SEQ ID NO: 884669 - RNA, 19 nt, Homo sapiens
  misc_RNA (1)...(19): siRNA sense strand
uggcuugauugcuucuuua

SEQ ID NO: 884670 - RNA, 19 nt, Homo sapiens
  misc_RNA (1)...(19): siRNA sense strand
aaauuccgauggcuugauu

SEQ ID NO: 884671 - RNA, 19 nt, Homo sapiens
  misc_RNA (1)...(19): siRNA sense strand
cauugugucuguggaaauu

SEQ ID NO: 884672 - RNA, 19 nt, Homo sapiens
  misc_RNA (1)...(19): siRNA sense strand
gauugcuucuuuauggaaa

SEQ ID NO: 884673 - RNA, 19 nt, Homo sapiens
  misc_RNA (1)...(19): siRNA sense strand
cuguauggcugcuggauga

SEQ ID NO: 884674 - RNA, 19 nt, Homo sapiens
  misc_RNA (1)...(19): siRNA sense strand
gaauauggcaaagcugaug

SEQ ID NO: 884675 - RNA, 19 nt, Homo sapiens
  misc_RNA (1)...(19): siRNA sense strand
ucaagaaaaugcaucagaa

SEQ ID NO: 884676 - RNA, 19 nt, Homo sapiens
  misc_RNA (1)...(19): siRNA sense strand
cuugauugcuucuuuaugg

SEQ ID NO: 884677 - RNA, 19 nt, Homo sapiens
  misc_RNA (1)...(19): siRNA sense strand
gcauuguuccucauuuaug

SEQ ID NO: 884678 - RNA, 19 nt, Homo sapiens
  misc_RNA (1)...(19): siRNA sense strand
uggcuguacuguuggcuuu

SEQ ID NO: 884679 - RNA, 19 nt, Homo sapiens
  misc_RNA (1)...(19): siRNA sense strand
uccgauggcuugauugcuu

SEQ ID NO: 884680 - RNA, 19 nt, Homo sapiens
  misc_RNA (1)...(19): siRNA sense strand
acuguuggcuuuaccuguu

SEQ ID NO: 884681 - RNA, 19 nt, Homo sapiens
  misc_RNA (1)...(19): siRNA sense strand
caucagaaagaaaccaguu

SEQ ID NO: 884682 - RNA, 19 nt, Homo sapiens
  misc_RNA (1)...(19): siRNA sense strand
agucauggcuagaacucaa

SEQ ID NO: 884683 - RNA, 19 nt, Homo sapiens
  misc_RNA (1)...(19): siRNA sense strand
gcugaugcaagauggguuu

SEQ ID NO: 884684 - RNA, 19 nt, Homo sapiens
  misc_RNA (1)...(19): siRNA sense strand
ggcuagaacucaagaaaau

SEQ ID NO: 884685 - RNA, 19 nt, Homo sapiens
  misc_RNA (1)...(19): siRNA sense strand
ccagaguggcucaccagaa

SEQ ID NO: 884686 - RNA, 19 nt, Homo sapiens
  misc_RNA (1)...(19): siRNA sense strand
gcaaauuccgauggcuuga

SEQ ID NO: 884687 - RNA, 19 nt, Homo sapiens
  misc_RNA (1)...(19): siRNA sense strand
ucagaaagaaaccaguuca

SEQ ID NO: 884688 - RNA, 19 nt, Homo sapiens
  misc_RNA (1)...(19): siRNA sense strand
ggaaagaauauggcaaagc

SEQ ID NO: 884689 - RNA, 19 nt, Homo sapiens
  misc_RNA (1)...(19): siRNA sense strand
agaaagaaaccaguucagu

SEQ ID NO: 884690 - RNA, 19 nt, Homo sapiens
  misc_RNA (1)...(19): siRNA sense strand
caagaaaaugcaucagaaa

SEQ ID NO: 884691 - RNA, 19 nt, Homo sapiens
  misc_RNA (1)...(19): siRNA sense strand
gcaagauggguuuauuuug

SEQ ID NO: 884692 - RNA, 19 nt, Homo sapiens
  misc_RNA (1)...(19): siRNA sense strand
cauuguuccucauuuaugc

SEQ ID NO: 884693 - RNA, 19 nt, Homo sapiens
  misc_RNA (1)...(19): siRNA sense strand
ggcauuguuccucauuuau

SEQ ID NO: 884694 - RNA, 19 nt, Homo sapiens
  misc_RNA (1)...(19): siRNA sense strand
cggcauuuccugcagauca

SEQ ID NO: 884695 - RNA, 19 nt, Homo sapiens
  misc_RNA (1)...(19): siRNA sense strand
gcuguacuguuggcuuuac

SEQ ID NO: 884696 - RNA, 19 nt, Homo sapiens
  misc_RNA (1)...(19): siRNA sense strand
gaaugaaugucacuugugu

SEQ ID NO: 884697 - RNA, 19 nt, Homo sapiens
  misc_RNA (1)...(19): siRNA sense strand
ucacauaccuaccaguuug

SEQ ID NO: 884698 - RNA, 19 nt, Homo sapiens
  misc_RNA (1)...(19): siRNA sense strand
aaaguggacugcagcauuu

SEQ ID NO: 884699 - RNA, 19 nt, Homo sapiens
  misc_RNA (1)...(19): siRNA sense strand
guacaguggucuauuucug

SEQ ID NO: 884700 - RNA, 19 nt, Homo sapiens
  misc_RNA (1)...(19): siRNA sense strand
gaaaaguaauggaagaguu

SEQ ID NO: 884701 - RNA, 19 nt, Homo sapiens
  misc_RNA (1)...(19): siRNA sense strand
gggaaugaaugucacuugu

SEQ ID NO: 884702 - RNA, 19 nt, Homo sapiens
  misc_RNA (1)...(19): siRNA sense strand
ucuguacaguggucuauuu

SEQ ID NO: 884703 - RNA, 19 nt, Homo sapiens
  misc_RNA (1)...(19): siRNA sense strand
uaauggaagaguucaguuu

SEQ ID NO: 884704 - RNA, 19 nt, Homo sapiens
  misc_RNA (1)...(19): siRNA sense strand
ggaaugaaugucacuugug

SEQ ID NO: 884705 - RNA, 19 nt, Homo sapiens
  misc_RNA (1)...(19): siRNA sense strand
cugcuagucugucuccaaa

SEQ ID NO: 884706 - RNA, 19 nt, Homo sapiens
  misc_RNA (1)...(19): siRNA sense strand
caucacauaccuaccaguu

SEQ ID NO: 884707 - RNA, 19 nt, Homo sapiens
  misc_RNA (1)...(19): siRNA sense strand
cuacaucaccuaugggaau

SEQ ID NO: 884708 - RNA, 19 nt, Homo sapiens
  misc_RNA (1)...(19): siRNA sense strand
gcucagaagcugcuagucu

SEQ ID NO: 884709 - RNA, 19 nt, Homo sapiens
  misc_RNA (1)...(19): siRNA sense strand
accgagagcuugaaaagua

SEQ ID NO: 884710 - RNA, 19 nt, Homo sapiens
  misc_RNA (1)...(19): siRNA sense strand
caucaccuaugggaaugaa

SEQ ID NO: 884711 - RNA, 19 nt, Homo sapiens
  misc_RNA (1)...(19): siRNA sense strand
ggacugcagcauuuacaag

SEQ ID NO: 884712 - RNA, 19 nt, Homo sapiens
  misc_RNA (1)...(19): siRNA sense strand
gacugcagcauuuacaaga

SEQ ID NO: 884713 - RNA, 19 nt, Homo sapiens
  misc_RNA (1)...(19): siRNA sense strand
guaauggaagaguucaguu

SEQ ID NO: 884714 - RNA, 19 nt, Homo sapiens
  misc_RNA (1)...(19): siRNA sense strand
gcagcauuuacaagaagua

SEQ ID NO: 884715 - RNA, 19 nt, Homo sapiens
  misc_RNA (1)...(19): siRNA sense strand
ucaccuaugggaaugaaug

SEQ ID NO: 884716 - RNA, 19 nt, Homo sapiens
  misc_RNA (1)...(19): siRNA sense strand
cugacuacaucaccuaugg

SEQ ID NO: 884717 - RNA, 19 nt, Homo sapiens
  misc_RNA (1)...(19): siRNA sense strand
gcauuuacaagaaguaucc

SEQ ID NO: 884718 - RNA, 19 nt, Homo sapiens
  misc_RNA (1)...(19): siRNA sense strand
guucugacuacaucaccua

SEQ ID NO: 884719 - RNA, 19 nt, Homo sapiens
  misc_RNA (1)...(19): siRNA sense strand
ccuaugggaaugaauguca

SEQ ID NO: 884720 - RNA, 19 nt, Homo sapiens
  misc_RNA (1)...(19): siRNA sense strand
acugcagcauuuacaagaa

SEQ ID NO: 884721 - RNA, 19 nt, Homo sapiens
  misc_RNA (1)...(19): siRNA sense strand
gaagaaaccucgcggaaag

SEQ ID NO: 884722 - RNA, 19 nt, Homo sapiens
  misc_RNA (1)...(19): siRNA sense strand
gaaccgcacugcagagaaa

SEQ ID NO: 884723 - RNA, 19 nt, Homo sapiens
  misc_RNA (1)...(19): siRNA sense strand
gaugagaagcgcaaacuua

SEQ ID NO: 884724 - RNA, 19 nt, Homo sapiens
  misc_RNA (1)...(19): siRNA sense strand
gaaaauaugugaagaggaa

SEQ ID NO: 884725 - RNA, 19 nt, Homo sapiens
  misc_RNA (1)...(19): siRNA sense strand
ucagaaggaucuccgcuua

SEQ ID NO: 884726 - RNA, 19 nt, Homo sapiens
  misc_RNA (1)...(19): siRNA sense strand
guacagagccuacauacau

SEQ ID NO: 884727 - RNA, 19 nt, Homo sapiens
  misc_RNA (1)...(19): siRNA sense strand
uggaacagcugaagccaua

SEQ ID NO: 884728 - RNA, 19 nt, Homo sapiens
  misc_RNA (1)...(19): siRNA sense strand
uaacaaggguaaacgauuc

SEQ ID NO: 884729 - RNA, 19 nt, Homo sapiens
  misc_RNA (1)...(19): siRNA sense strand
gaaaugcuucuuugugaaa

SEQ ID NO: 884730 - RNA, 19 nt, Homo sapiens
  misc_RNA (1)...(19): siRNA sense strand
gaccagaagugccaaaaua

SEQ ID NO: 884731 - RNA, 19 nt, Homo sapiens
  misc_RNA (1)...(19): siRNA sense strand
caagcgagccuguuaaaga

SEQ ID NO: 884732 - RNA, 19 nt, Homo sapiens
  misc_RNA (1)...(19): siRNA sense strand
ggaaagaccagacgucauc

SEQ ID NO: 884733 - RNA, 19 nt, Homo sapiens
  misc_RNA (1)...(19): siRNA sense strand
gaaaagagcccaagagcaa

SEQ ID NO: 884734 - RNA, 19 nt, Homo sapiens
  misc_RNA (1)...(19): siRNA sense strand
ccaaaggacuugaagaaac

SEQ ID NO: 884735 - RNA, 19 nt, Homo sapiens
  misc_RNA (1)...(19): siRNA sense strand
gaucuccgcuuagccauug

SEQ ID NO: 884736 - RNA, 19 nt, Homo sapiens
  misc_RNA (1)...(19): siRNA sense strand
gaagccagcugucuguuac

SEQ ID NO: 884737 - RNA, 19 nt, Homo sapiens
  misc_RNA (1)...(19): siRNA sense strand
gacaagaaucgacguaauu

SEQ ID NO: 884738 - RNA, 19 nt, Homo sapiens
  misc_RNA (1)...(19): siRNA sense strand
gaacaugggagaaggaaag

SEQ ID NO: 884739 - RNA, 19 nt, Homo sapiens
  misc_RNA (1)...(19): siRNA sense strand
aaacuuagccugucugaag

SEQ ID NO: 884740 - RNA, 19 nt, Homo sapiens
  misc_RNA (1)...(19): siRNA sense strand
caaaugagguguacaaaag

SEQ ID NO: 884741 - RNA, 19 nt, Homo sapiens
  misc_RNA (1)...(19): siRNA sense strand
gaaauacauucagaaggau

SEQ ID NO: 884742 - RNA, 19 nt, Homo sapiens
  misc_RNA (1)...(19): siRNA sense strand
gaagggaaggugaagaaga

SEQ ID NO: 884743 - RNA, 19 nt, Homo sapiens
  misc_RNA (1)...(19): siRNA sense strand
aagggaaggugaagaagaa

SEQ ID NO: 884744 - RNA, 19 nt, Homo sapiens
  misc_RNA (1)...(19): siRNA sense strand
gauccucauuuccaucauu

SEQ ID NO: 884745 - RNA, 19 nt, Homo sapiens
  misc_RNA (1)...(19): siRNA sense strand
ugacaagaaucgacguaau

SEQ ID NO: 884746 - RNA, 19 nt, Homo sapiens
  misc_RNA (1)...(19): siRNA sense strand
gaaacuuuaagccugauuu

SEQ ID NO: 884747 - RNA, 19 nt, Homo sapiens
  misc_RNA (1)...(19): siRNA sense strand
cauggcagcugcagcaaau

SEQ ID NO: 884748 - RNA, 19 nt, Homo sapiens
  misc_RNA (1)...(19): siRNA sense strand
gguagaugcugucgaagag

SEQ ID NO: 884749 - RNA, 19 nt, Homo sapiens
  misc_RNA (1)...(19): siRNA sense strand
caggagagccaaagggaaa

SEQ ID NO: 884750 - RNA, 19 nt, Homo sapiens
  misc_RNA (1)...(19): siRNA sense strand
caccaaaggacuugaagaa

SEQ ID NO: 884751 - RNA, 19 nt, Homo sapiens
  misc_RNA (1)...(19): siRNA sense strand
gaagaacaugggagaagga

SEQ ID NO: 884752 - RNA, 19 nt, Homo sapiens
  misc_RNA (1)...(19): siRNA sense strand
cgaagaaguugaaaauaug

SEQ ID NO: 884753 - RNA, 19 nt, Homo sapiens
  misc_RNA (1)...(19): siRNA sense strand
gccauaucaugcucauaaa

SEQ ID NO: 884754 - RNA, 19 nt, Homo sapiens
  misc_RNA (1)...(19): siRNA sense strand
caucacacccacagacaaa

SEQ ID NO: 884755 - RNA, 19 nt, Homo sapiens
  misc_RNA (1)...(19): siRNA sense strand
aagcgagccuguuaaagau

SEQ ID NO: 884756 - RNA, 19 nt, Homo sapiens
  misc_RNA (1)...(19): siRNA sense strand
cauaucaugcucauaaaga

SEQ ID NO: 884757 - RNA, 19 nt, Homo sapiens
  misc_RNA (1)...(19): siRNA sense strand
uagaugcugucgaagaguu

SEQ ID NO: 884758 - RNA, 19 nt, Homo sapiens
  misc_RNA (1)...(19): siRNA sense strand
uacagagccuacauacauu

SEQ ID NO: 884759 - RNA, 19 nt, Homo sapiens
  misc_RNA (1)...(19): siRNA sense strand
caaaggacuugaagaaacc

SEQ ID NO: 884760 - RNA, 19 nt, Homo sapiens
  misc_RNA (1)...(19): siRNA sense strand
ccacaauucuucugaugac

SEQ ID NO: 884761 - RNA, 19 nt, Homo sapiens
  misc_RNA (1)...(19): siRNA sense strand
gaacagcugaagccauauc

SEQ ID NO: 884762 - RNA, 19 nt, Homo sapiens
  misc_RNA (1)...(19): siRNA sense strand
ggagcuucauggccacuau

SEQ ID NO: 884763 - RNA, 19 nt, Homo sapiens
  misc_RNA (1)...(19): siRNA sense strand
gcaaugcagccaagaugau

SEQ ID NO: 884764 - RNA, 19 nt, Homo sapiens
  misc_RNA (1)...(19): siRNA sense strand
gaagccauaucaugcucau

SEQ ID NO: 884765 - RNA, 19 nt, Homo sapiens
  misc_RNA (1)...(19): siRNA sense strand
gaagaagaacaugggagaa

SEQ ID NO: 884766 - RNA, 19 nt, Homo sapiens
  misc_RNA (1)...(19): siRNA sense strand
caaccugcgacaucacuuu

SEQ ID NO: 884767 - RNA, 19 nt, Homo sapiens
  misc_RNA (1)...(19): siRNA sense strand
cagcaaaugagguguacaa

SEQ ID NO: 884768 - RNA, 19 nt, Homo sapiens
  misc_RNA (1)...(19): siRNA sense strand
ugaagaaaccucgcggaaa

SEQ ID NO: 884769 - RNA, 19 nt, Homo sapiens
  misc_RNA (1)...(19): siRNA sense strand
agaagccagcugucuguua

SEQ ID NO: 884770 - RNA, 19 nt, Homo sapiens
  misc_RNA (1)...(19): siRNA sense strand
gcaaacuuagccugucuga

SEQ ID NO: 884771 - RNA, 19 nt, Homo sapiens
  misc_RNA (1)...(19): siRNA sense strand
gaugacaagaaucgacgua

SEQ ID NO: 884772 - RNA, 19 nt, Homo sapiens
  misc_RNA (1)...(19): siRNA sense strand
gcaaucacgaagaaguuga

SEQ ID NO: 884773 - RNA, 19 nt, Homo sapiens
  misc_RNA (1)...(19): siRNA sense strand
cagcugaagccauaucaug

SEQ ID NO: 884774 - RNA, 19 nt, Homo sapiens
  misc_RNA (1)...(19): siRNA sense strand
cagaagaucaugccuggau

SEQ ID NO: 884775 - RNA, 19 nt, Homo sapiens
  misc_RNA (1)...(19): siRNA sense strand
caaaggaugagaaggaucu

SEQ ID NO: 884776 - RNA, 19 nt, Homo sapiens
  misc_RNA (1)...(19): siRNA sense strand
ucagagagaggcuccaaau

SEQ ID NO: 884777 - RNA, 19 nt, Homo sapiens
  misc_RNA (1)...(19): siRNA sense strand
gcgcaaacuuagccugucu

SEQ ID NO: 884778 - RNA, 19 nt, Homo sapiens
  misc_RNA (1)...(19): siRNA sense strand
ggagagaaguaggccaaac

SEQ ID NO: 884779 - RNA, 19 nt, Homo sapiens
  misc_RNA (1)...(19): siRNA sense strand
agccauaucaugcucauaa

SEQ ID NO: 884780 - RNA, 19 nt, Homo sapiens
  misc_RNA (1)...(19): siRNA sense strand
acagagccuacauacauua

SEQ ID NO: 884781 - RNA, 19 nt, Homo sapiens
  misc_RNA (1)...(19): siRNA sense strand
agaugcagauccucauuuc

SEQ ID NO: 884782 - RNA, 19 nt, Homo sapiens
  misc_RNA (1)...(19): siRNA sense strand
gaagugcuacguggacaug

SEQ ID NO: 884783 - RNA, 19 nt, Homo sapiens
  misc_RNA (1)...(19): siRNA sense strand
gcaaaugagguguacaaaa

SEQ ID NO: 884784 - RNA, 19 nt, Homo sapiens
  misc_RNA (1)...(19): siRNA sense strand
gaaaccucgcggaaagaaa

SEQ ID NO: 884785 - RNA, 19 nt, Homo sapiens
  misc_RNA (1)...(19): siRNA sense strand
gggcaaugcagccaagaug

SEQ ID NO: 884786 - RNA, 19 nt, Homo sapiens
  misc_RNA (1)...(19): siRNA sense strand
aaaccucgcggaaagaaau

SEQ ID NO: 884787 - RNA, 19 nt, Homo sapiens
  misc_RNA (1)...(19): siRNA sense strand
ggccaggaaagauuguuaa

SEQ ID NO: 884788 - RNA, 19 nt, Homo sapiens
  misc_RNA (1)...(19): siRNA sense strand
ugacagcacagccgugaau

SEQ ID NO: 884789 - RNA, 19 nt, Homo sapiens
  misc_RNA (1)...(19): siRNA sense strand
ggaaggugaagaagaacau

SEQ ID NO: 884790 - RNA, 19 nt, Homo sapiens
  misc_RNA (1)...(19): siRNA sense strand
caauucuucugaugacaag

SEQ ID NO: 884791 - RNA, 19 nt, Homo sapiens
  misc_RNA (1)...(19): siRNA sense strand
ucuuggacauccucaauca

SEQ ID NO: 884792 - RNA, 19 nt, Homo sapiens
  misc_RNA (1)...(19): siRNA sense strand
gggaaacucggccgauauc

SEQ ID NO: 884793 - RNA, 19 nt, Homo sapiens
  misc_RNA (1)...(19): siRNA sense strand
caaauccccucugaaaaga

SEQ ID NO: 884794 - RNA, 19 nt, Homo sapiens
  misc_RNA (1)...(19): siRNA sense strand
cagacgucaucccacaauu

SEQ ID NO: 884795 - RNA, 19 nt, Homo sapiens
  misc_RNA (1)...(19): siRNA sense strand
acuuuaagccugauuucua

SEQ ID NO: 884796 - RNA, 19 nt, Homo sapiens
  misc_RNA (1)...(19): siRNA sense strand
agaugaugcugaucgugaa

SEQ ID NO: 884797 - RNA, 19 nt, Homo sapiens
  misc_RNA (1)...(19): siRNA sense strand
gagagaaguaggccaaacu

SEQ ID NO: 884798 - RNA, 19 nt, Homo sapiens
  misc_RNA (1)...(19): siRNA sense strand
cgucaucccacaauucuuc

SEQ ID NO: 884799 - RNA, 19 nt, Homo sapiens
  misc_RNA (1)...(19): siRNA sense strand
gaccaguccgacaacgaua

SEQ ID NO: 884800 - RNA, 19 nt, Homo sapiens
  misc_RNA (1)...(19): siRNA sense strand
ccaagaugaugcugaucgu

SEQ ID NO: 884801 - RNA, 19 nt, Homo sapiens
  misc_RNA (1)...(19): siRNA sense strand
ggcaaugcagccaagauga

SEQ ID NO: 884802 - RNA, 19 nt, Homo sapiens
  misc_RNA (1)...(19): siRNA sense strand
uuaacaaggguaaacgauu

SEQ ID NO: 884803 - RNA, 19 nt, Homo sapiens
  misc_RNA (1)...(19): siRNA sense strand
cugcuaagccaaacagaga

SEQ ID NO: 884804 - RNA, 19 nt, Homo sapiens
  misc_RNA (1)...(19): siRNA sense strand
gagaaguaggccaaacuca

SEQ ID NO: 884805 - RNA, 19 nt, Homo sapiens
  misc_RNA (1)...(19): siRNA sense strand
ggaaccgcacugcagagaa

SEQ ID NO: 884806 - RNA, 19 nt, Homo sapiens
  misc_RNA (1)...(19): siRNA sense strand
aaagaugcagauccucauu

SEQ ID NO: 884807 - RNA, 19 nt, Homo sapiens
  misc_RNA (1)...(19): siRNA sense strand
cagagccuacauacauuaa

SEQ ID NO: 884808 - RNA, 19 nt, Homo sapiens
  misc_RNA (1)...(19): siRNA sense strand
ggauguuggugaucuuagc

SEQ ID NO: 884809 - RNA, 19 nt, Homo sapiens
  misc_RNA (1)...(19): siRNA sense strand
gcaucacacccacagacaa

SEQ ID NO: 884810 - RNA, 19 nt, Homo sapiens
  misc_RNA (1)...(19): siRNA sense strand
ccgcugaagucgucucaac

SEQ ID NO: 884811 - RNA, 19 nt, Homo sapiens
  misc_RNA (1)...(19): siRNA sense strand
aagaugcagauccucauuu

SEQ ID NO: 884812 - RNA, 19 nt, Homo sapiens
  misc_RNA (1)...(19): siRNA sense strand
cuuuaagccugauuucuac

SEQ ID NO: 884813 - RNA, 19 nt, Homo sapiens
  misc_RNA (1)...(19): siRNA sense strand
gagcuucauggccacuauu

SEQ ID NO: 884814 - RNA, 19 nt, Homo sapiens
  misc_RNA (1)...(19): siRNA sense strand
agcgguagaugcugucgaa

SEQ ID NO: 884815 - RNA, 19 nt, Homo sapiens
  misc_RNA (1)...(19): siRNA sense strand
gacgggauguuggugaucu

SEQ ID NO: 884816 - RNA, 19 nt, Homo sapiens
  misc_RNA (1)...(19): siRNA sense strand
ggucucaugggaaguggaa

SEQ ID NO: 884817 - RNA, 19 nt, Homo sapiens
  misc_RNA (1)...(19): siRNA sense strand
ucccacaauucuucugaug

SEQ ID NO: 884818 - RNA, 19 nt, Homo sapiens
  misc_RNA (1)...(19): siRNA sense strand
agaaggaucuccgcuuagc

SEQ ID NO: 884819 - RNA, 19 nt, Homo sapiens
  misc_RNA (1)...(19): siRNA sense strand
acaguuggccagcaucuuc

SEQ ID NO: 884820 - RNA, 19 nt, Homo sapiens
  misc_RNA (1)...(19): siRNA sense strand
caaugcagccaagaugaug

SEQ ID NO: 884821 - RNA, 19 nt, Homo sapiens
  misc_RNA (1)...(19): siRNA sense strand
gcaccucacuuaacgucua

SEQ ID NO: 884822 - RNA, 19 nt, Homo sapiens
  misc_RNA (1)...(19): siRNA sense strand
gaaggagaaugcagcucuu

SEQ ID NO: 884823 - RNA, 19 nt, Homo sapiens
  misc_RNA (1)...(19): siRNA sense strand
gaagaccagugucguaacu

SEQ ID NO: 884824 - RNA, 19 nt, Homo sapiens
  misc_RNA (1)...(19): siRNA sense strand
gaucccaccugguaucagu

SEQ ID NO: 884825 - RNA, 19 nt, Homo sapiens
  misc_RNA (1)...(19): siRNA sense strand
ucacuuaacgucuaacuuc

SEQ ID NO: 884826 - RNA, 19 nt, Homo sapiens
  misc_RNA (1)...(19): siRNA sense strand
ggagaaugcagcucuuuca

SEQ ID NO: 884827 - RNA, 19 nt, Homo sapiens
  misc_RNA (1)...(19): siRNA sense strand
gagaagggaggaaggagaa

SEQ ID NO: 884828 - RNA, 19 nt, Homo sapiens
  misc_RNA (1)...(19): siRNA sense strand
ugucguaacuggaauuaag

SEQ ID NO: 884829 - RNA, 19 nt, Homo sapiens
  misc_RNA (1)...(19): siRNA sense strand
ugauugggcaccucacuua

SEQ ID NO: 884830 - RNA, 19 nt, Homo sapiens
  misc_RNA (1)...(19): siRNA sense strand
gggaagaccagugucguaa

SEQ ID NO: 884831 - RNA, 19 nt, Homo sapiens
  misc_RNA (1)...(19): siRNA sense strand
ugucaggccuucucaguag

SEQ ID NO: 884832 - RNA, 19 nt, Homo sapiens
  misc_RNA (1)...(19): siRNA sense strand
uaacgucuaacuucagauu

SEQ ID NO: 884833 - RNA, 19 nt, Homo sapiens
  misc_RNA (1)...(19): siRNA sense strand
gcucgugucugcugugaac

SEQ ID NO: 884834 - RNA, 19 nt, Homo sapiens
  misc_RNA (1)...(19): siRNA sense strand
caugugaggcauuugcuuu

SEQ ID NO: 884835 - RNA, 19 nt, Homo sapiens
  misc_RNA (1)...(19): siRNA sense strand
ggaguugagggaauguuug

SEQ ID NO: 884836 - RNA, 19 nt, Homo sapiens
  misc_RNA (1)...(19): siRNA sense strand
gaagggaggaaggagaaug

SEQ ID NO: 884837 - RNA, 19 nt, Homo sapiens
  misc_RNA (1)...(19): siRNA sense strand
ugaggcauuugcuuuguca

SEQ ID NO: 884838 - RNA, 19 nt, Homo sapiens
  misc_RNA (1)...(19): siRNA sense strand
caccucacuuaacgucuaa

SEQ ID NO: 884839 - RNA, 19 nt, Homo sapiens
  misc_RNA (1)...(19): siRNA sense strand
cuuaacgucuaacuucaga

SEQ ID NO: 884840 - RNA, 19 nt, Homo sapiens
  misc_RNA (1)...(19): siRNA sense strand
gauugggcaccucacuuaa

SEQ ID NO: 884841 - RNA, 19 nt, Homo sapiens
  misc_RNA (1)...(19): siRNA sense strand
gauucacucuugggcauuc

SEQ ID NO: 884842 - RNA, 19 nt, Homo sapiens
  misc_RNA (1)...(19): siRNA sense strand
aacuucagauucacucuug

SEQ ID NO: 884843 - RNA, 19 nt, Homo sapiens
  misc_RNA (1)...(19): siRNA sense strand
cacuuaacgucuaacuuca

SEQ ID NO: 884844 - RNA, 19 nt, Homo sapiens
  misc_RNA (1)...(19): siRNA sense strand
cgggaagaccagugucgua

SEQ ID NO: 884845 - RNA, 19 nt, Homo sapiens
  misc_RNA (1)...(19): siRNA sense strand
uaacuucagauucacucuu

SEQ ID NO: 884846 - RNA, 19 nt, Homo sapiens
  misc_RNA (1)...(19): siRNA sense strand
acgucuaacuucagauuca

SEQ ID NO: 884847 - RNA, 19 nt, Homo sapiens
  misc_RNA (1)...(19): siRNA sense strand
gucuuccucuccaaucuug

SEQ ID NO: 884848 - RNA, 19 nt, Homo sapiens
  misc_RNA (1)...(19): siRNA sense strand
gaagguagaucuccagucu

SEQ ID NO: 884849 - RNA, 19 nt, Homo sapiens
  misc_RNA (1)...(19): siRNA sense strand
agacaacguugagagaaua

SEQ ID NO: 884850 - RNA, 19 nt, Homo sapiens
  misc_RNA (1)...(19): siRNA sense strand
caccaaaucccauugaauu

SEQ ID NO: 884851 - RNA, 19 nt, Homo sapiens
  misc_RNA (1)...(19): siRNA sense strand
caucaaagcagaagguaga

SEQ ID NO: 884852 - RNA, 19 nt, Homo sapiens
  misc_RNA (1)...(19): siRNA sense strand
agguagaucuccagucuuu

SEQ ID NO: 884853 - RNA, 19 nt, Homo sapiens
  misc_RNA (1)...(19): siRNA sense strand
caacguugagagaauagua

SEQ ID NO: 884854 - RNA, 19 nt, Homo sapiens
  misc_RNA (1)...(19): siRNA sense strand
aguugugccuaucuuauua

SEQ ID NO: 884855 - RNA, 19 nt, Homo sapiens
  misc_RNA (1)...(19): siRNA sense strand
cagacaacguugagagaau

SEQ ID NO: 884856 - RNA, 19 nt, Homo sapiens
  misc_RNA (1)...(19): siRNA sense strand
gcaaaggaaagaccaccaa

SEQ ID NO: 884857 - RNA, 19 nt, Homo sapiens
  misc_RNA (1)...(19): siRNA sense strand
gaagauuaaugcagaaaag

SEQ ID NO: 884858 - RNA, 19 nt, Homo sapiens
  misc_RNA (1)...(19): siRNA sense strand
caaaggaaagaccaccaaa

SEQ ID NO: 884859 - RNA, 19 nt, Homo sapiens
  misc_RNA (1)...(19): siRNA sense strand
aaacgcagguugcagaaaa

SEQ ID NO: 884860 - RNA, 19 nt, Homo sapiens
  misc_RNA (1)...(19): siRNA sense strand
ugagaagauuaaugcagaa

SEQ ID NO: 884861 - RNA, 19 nt, Homo sapiens
  misc_RNA (1)...(19): siRNA sense strand
gacaguugugccuaucuua

SEQ ID NO: 884862 - RNA, 19 nt, Homo sapiens
  misc_RNA (1)...(19): siRNA sense strand
gcagaaaagucaucaaagc

SEQ ID NO: 884863 - RNA, 19 nt, Homo sapiens
  misc_RNA (1)...(19): siRNA sense strand
caaagcagaagguagaucu

SEQ ID NO: 884864 - RNA, 19 nt, Homo sapiens
  misc_RNA (1)...(19): siRNA sense strand
guugagagaauaguagaaa

SEQ ID NO: 884865 - RNA, 19 nt, Homo sapiens
  misc_RNA (1)...(19): siRNA sense strand
gaauuucuagcaucuuauc

SEQ ID NO: 884866 - RNA, 19 nt, Homo sapiens
  misc_RNA (1)...(19): siRNA sense strand
aaggaaagaccaccaaauc

SEQ ID NO: 884867 - RNA, 19 nt, Homo sapiens
  misc_RNA (1)...(19): siRNA sense strand
gagaagauuaaugcagaaa

SEQ ID NO: 884868 - RNA, 19 nt, Homo sapiens
  misc_RNA (1)...(19): siRNA sense strand
agacaguugugccuaucuu

SEQ ID NO: 884869 - RNA, 19 nt, Homo sapiens
  misc_RNA (1)...(19): siRNA sense strand
cuaccuggaucagacaguu

SEQ ID NO: 884870 - RNA, 19 nt, Homo sapiens
  misc_RNA (1)...(19): siRNA sense strand
acaaggcacaguuugaaga

SEQ ID NO: 884871 - RNA, 19 nt, Homo sapiens
  misc_RNA (1)...(19): siRNA sense strand
caguugugccuaucuuauu

SEQ ID NO: 884872 - RNA, 19 nt, Homo sapiens
  misc_RNA (1)...(19): siRNA sense strand
caaggcacaguuugaagau

SEQ ID NO: 884873 - RNA, 19 nt, Homo sapiens
  misc_RNA (1)...(19): siRNA sense strand
gaccaccaaaucccauuga

SEQ ID NO: 884874 - RNA, 19 nt, Homo sapiens
  misc_RNA (1)...(19): siRNA sense strand
aaaggaaagaccaccaaau

SEQ ID NO: 884875 - RNA, 19 nt, Homo sapiens
  misc_RNA (1)...(19): siRNA sense strand
ccaccaaaucccauugaau

SEQ ID NO: 884876 - RNA, 19 nt, Homo sapiens
  misc_RNA (1)...(19): siRNA sense strand
cauugaauuucuagcaucu

SEQ ID NO: 884877 - RNA, 19 nt, Homo sapiens
  misc_RNA (1)...(19): siRNA sense strand
guagaucuccagucuuugc

SEQ ID NO: 884878 - RNA, 19 nt, Homo sapiens
  misc_RNA (1)...(19): siRNA sense strand
ucagacaguugugccuauc

SEQ ID NO: 884879 - RNA, 19 nt, Homo sapiens
  misc_RNA (1)...(19): siRNA sense strand
caaacgcagguugcagaaa

SEQ ID NO: 884880 - RNA, 19 nt, Homo sapiens
  misc_RNA (1)...(19): siRNA sense strand
caacccagcugcccucuuu

SEQ ID NO: 884881 - RNA, 19 nt, Homo sapiens
  misc_RNA (1)...(19): siRNA sense strand
gaccugaaguugaguauca

SEQ ID NO: 884882 - RNA, 19 nt, Homo sapiens
  misc_RNA (1)...(19): siRNA sense strand
gaugacagcccaacacuug

SEQ ID NO: 884883 - RNA, 19 nt, Homo sapiens
  misc_RNA (1)...(19): siRNA sense strand
gcacacacaccaacgagaa

SEQ ID NO: 884884 - RNA, 19 nt, Homo sapiens
  misc_RNA (1)...(19): siRNA sense strand
caacuccagugaccgcuuu

SEQ ID NO: 884885 - RNA, 19 nt, Homo sapiens
  misc_RNA (1)...(19): siRNA sense strand
gcaacaagcgcuauuccaa

SEQ ID NO: 884886 - RNA, 19 nt, Homo sapiens
  misc_RNA (1)...(19): siRNA sense strand
gaagguggagggacgcuuu

SEQ ID NO: 884887 - RNA, 19 nt, Homo sapiens
  misc_RNA (1)...(19): siRNA sense strand
uggaccaugucaacgauua

SEQ ID NO: 884888 - RNA, 19 nt, Homo sapiens
  misc_RNA (1)...(19): siRNA sense strand
ugucaacgauuaccauguc

SEQ ID NO: 884889 - RNA, 19 nt, Homo sapiens
  misc_RNA (1)...(19): siRNA sense strand
uguccgaccugcagcaaga

SEQ ID NO: 884890 - RNA, 19 nt, Homo sapiens
  misc_RNA (1)...(19): siRNA sense strand
gcacacgcgcacccacuau

SEQ ID NO: 884891 - RNA, 19 nt, Homo sapiens
  misc_RNA (1)...(19): siRNA sense strand
gcuauuccaacuccaguga

SEQ ID NO: 884892 - RNA, 19 nt, Homo sapiens
  misc_RNA (1)...(19): siRNA sense strand
gcccauggccacuuugugu

SEQ ID NO: 884893 - RNA, 19 nt, Homo sapiens
  misc_RNA (1)...(19): siRNA sense strand
gguggaccaugucaacgau

SEQ ID NO: 884894 - RNA, 19 nt, Homo sapiens
  misc_RNA (1)...(19): siRNA sense strand
ucaaaccggcuguggugaa

SEQ ID NO: 884895 - RNA, 19 nt, Homo sapiens
  misc_RNA (1)...(19): siRNA sense strand
caaguguaaccagcucuuu

SEQ ID NO: 884896 - RNA, 19 nt, Homo sapiens
  misc_RNA (1)...(19): siRNA sense strand
caaaccggcuguggugaac

SEQ ID NO: 884897 - RNA, 19 nt, Homo sapiens
  misc_RNA (1)...(19): siRNA sense strand
ucacugcgcaagcacauca

SEQ ID NO: 884898 - RNA, 19 nt, Homo sapiens
  misc_RNA (1)...(19): siRNA sense strand
caacgauuaccaugucaag

SEQ ID NO: 884899 - RNA, 19 nt, Homo sapiens
  misc_RNA (1)...(19): siRNA sense strand
gcucggugcugcucaaacc

SEQ ID NO: 884900 - RNA, 19 nt, Homo sapiens
  misc_RNA (1)...(19): siRNA sense strand
aacaagcgcuauuccaacu

SEQ ID NO: 884901 - RNA, 19 nt, Homo sapiens
  misc_RNA (1)...(19): siRNA sense strand
acagggagcugggcuuggu

SEQ ID NO: 884902 - RNA, 19 nt, Homo sapiens
  misc_RNA (1)...(19): siRNA sense strand
uccagccacugcgcuauuu

SEQ ID NO: 884903 - RNA, 19 nt, Homo sapiens
  misc_RNA (1)...(19): siRNA sense strand
ggaugacagcccaacacuu

SEQ ID NO: 884904 - RNA, 19 nt, Homo sapiens
  misc_RNA (1)...(19): siRNA sense strand
caacgccagguacaagaug

SEQ ID NO: 884905 - RNA, 19 nt, Homo sapiens
  misc_RNA (1)...(19): siRNA sense strand
uggacaagcccuacuacug

SEQ ID NO: 884906 - RNA, 19 nt, Homo sapiens
  misc_RNA (1)...(19): siRNA sense strand
ccugccuccuccuuccuua

SEQ ID NO: 884907 - RNA, 19 nt, Homo sapiens
  misc_RNA (1)...(19): siRNA sense strand
gcccuacuacugcaagaug

SEQ ID NO: 884908 - RNA, 19 nt, Homo sapiens
  misc_RNA (1)...(19): siRNA sense strand
gagguuucaacgccaggua

SEQ ID NO: 884909 - RNA, 19 nt, Homo sapiens
  misc_RNA (1)...(19): siRNA sense strand
aguguaaccagcucuuuga

SEQ ID NO: 884910 - RNA, 19 nt, Homo sapiens
  misc_RNA (1)...(19): siRNA sense strand
guacaaggcucuucaaaua

SEQ ID NO: 884911 - RNA, 19 nt, Homo sapiens
  misc_RNA (1)...(19): siRNA sense strand
gcaaauggcugaagagaaa

SEQ ID NO: 884912 - RNA, 19 nt, Homo sapiens
  misc_RNA (1)...(19): siRNA sense strand
gaaaguagcagauguagau

SEQ ID NO: 884913 - RNA, 19 nt, Homo sapiens
  misc_RNA (1)...(19): siRNA sense strand
gcaggucucugugaaagua

SEQ ID NO: 884914 - RNA, 19 nt, Homo sapiens
  misc_RNA (1)...(19): siRNA sense strand
ggauaaguuugaagaauuc

SEQ ID NO: 884915 - RNA, 19 nt, Homo sapiens
  misc_RNA (1)...(19): siRNA sense strand
gcugaacacuuccucuaaa

SEQ ID NO: 884916 - RNA, 19 nt, Homo sapiens
  misc_RNA (1)...(19): siRNA sense strand
ccaauaugcugaacacuuc

SEQ ID NO: 884917 - RNA, 19 nt, Homo sapiens
  misc_RNA (1)...(19): siRNA sense strand
aguagcagauguagauuua

SEQ ID NO: 884918 - RNA, 19 nt, Homo sapiens
  misc_RNA (1)...(19): siRNA sense strand
gaaacaagaagaagcacaa

SEQ ID NO: 884919 - RNA, 19 nt, Homo sapiens
  misc_RNA (1)...(19): siRNA sense strand
ccaaaggaaugaaugaagu

SEQ ID NO: 884920 - RNA, 19 nt, Homo sapiens
  misc_RNA (1)...(19): siRNA sense strand
gugcugaccuggauucuuc

SEQ ID NO: 884921 - RNA, 19 nt, Homo sapiens
  misc_RNA (1)...(19): siRNA sense strand
acaaggcucuucaaauaga

SEQ ID NO: 884922 - RNA, 19 nt, Homo sapiens
  misc_RNA (1)...(19): siRNA sense strand
agaagaagcacaacugaaa

SEQ ID NO: 884923 - RNA, 19 nt, Homo sapiens
  misc_RNA (1)...(19): siRNA sense strand
cggaaaagcugacaaagaa

SEQ ID NO: 884924 - RNA, 19 nt, Homo sapiens
  misc_RNA (1)...(19): siRNA sense strand
auacaacacuucugcaaau

SEQ ID NO: 884925 - RNA, 19 nt, Homo sapiens
  misc_RNA (1)...(19): siRNA sense strand
caaaggaaugaaugaagua

SEQ ID NO: 884926 - RNA, 19 nt, Homo sapiens
  misc_RNA (1)...(19): siRNA sense strand
gaaacugggaauucugaaa

SEQ ID NO: 884927 - RNA, 19 nt, Homo sapiens
  misc_RNA (1)...(19): siRNA sense strand
gagcagcuuuuccuuuaua

SEQ ID NO: 884928 - RNA, 19 nt, Homo sapiens
  misc_RNA (1)...(19): siRNA sense strand
caagaagaagcacaacuga

SEQ ID NO: 884929 - RNA, 19 nt, Homo sapiens
  misc_RNA (1)...(19): siRNA sense strand
agaaaggaaugaacucagu

SEQ ID NO: 884930 - RNA, 19 nt, Homo sapiens
  misc_RNA (1)...(19): siRNA sense strand
aagagcagcuuuuccuuua

SEQ ID NO: 884931 - RNA, 19 nt, Homo sapiens
  misc_RNA (1)...(19): siRNA sense strand
gaaaagcugacaaagaaaa

SEQ ID NO: 884932 - RNA, 19 nt, Homo sapiens
  misc_RNA (1)...(19): siRNA sense strand
gaucuccucuaggcauuga

SEQ ID NO: 884933 - RNA, 19 nt, Homo sapiens
  misc_RNA (1)...(19): siRNA sense strand
ugaaagggcaggucucugu

SEQ ID NO: 884934 - RNA, 19 nt, Homo sapiens
  misc_RNA (1)...(19): siRNA sense strand
gaagaagcacaacugaaag

SEQ ID NO: 884935 - RNA, 19 nt, Homo sapiens
  misc_RNA (1)...(19): siRNA sense strand
gggcaggucucugugaaag

SEQ ID NO: 884936 - RNA, 19 nt, Homo sapiens
  misc_RNA (1)...(19): siRNA sense strand
guaaaaugcuacucaaaag

SEQ ID NO: 884937 - RNA, 19 nt, Homo sapiens
  misc_RNA (1)...(19): siRNA sense strand
gaacacuuccucuaaaaga

SEQ ID NO: 884938 - RNA, 19 nt, Homo sapiens
  misc_RNA (1)...(19): siRNA sense strand
gagaaaacuauucgugaua

SEQ ID NO: 884939 - RNA, 19 nt, Homo sapiens
  misc_RNA (1)...(19): siRNA sense strand
caaggcucuucaaauagaa

SEQ ID NO: 884940 - RNA, 19 nt, Homo sapiens
  misc_RNA (1)...(19): siRNA sense strand
gguuagagaagcuguacaa

SEQ ID NO: 884941 - RNA, 19 nt, Homo sapiens
  misc_RNA (1)...(19): siRNA sense strand
gaagaauuccagacuacca

SEQ ID NO: 884942 - RNA, 19 nt, Homo sapiens
  misc_RNA (1)...(19): siRNA sense strand
uuugaagaauuccagacua

SEQ ID NO: 884943 - RNA, 19 nt, Homo sapiens
  misc_RNA (1)...(19): siRNA sense strand
uaauacaacacuucugcaa

SEQ ID NO: 884944 - RNA, 19 nt, Homo sapiens
  misc_RNA (1)...(19): siRNA sense strand
acaagaagaagcacaacug

SEQ ID NO: 884945 - RNA, 19 nt, Homo sapiens
  misc_RNA (1)...(19): siRNA sense strand
aaaggaaugaacucaguga

SEQ ID NO: 884946 - RNA, 19 nt, Homo sapiens
  misc_RNA (1)...(19): siRNA sense strand
uagcagauguagauuuagc

SEQ ID NO: 884947 - RNA, 19 nt, Homo sapiens
  misc_RNA (1)...(19): siRNA sense strand
ugugaaaguagcagaugua

SEQ ID NO: 884948 - RNA, 19 nt, Homo sapiens
  misc_RNA (1)...(19): siRNA sense strand
caaauagaaaggaaugaac

SEQ ID NO: 884949 - RNA, 19 nt, Homo sapiens
  misc_RNA (1)...(19): siRNA sense strand
aaacugggaauucugaaag

SEQ ID NO: 884950 - RNA, 19 nt, Homo sapiens
  misc_RNA (1)...(19): siRNA sense strand
aagaagcacaacugaaaga

SEQ ID NO: 884951 - RNA, 19 nt, Homo sapiens
  misc_RNA (1)...(19): siRNA sense strand
uacaacacuucugcaaaug

SEQ ID NO: 884952 - RNA, 19 nt, Homo sapiens
  misc_RNA (1)...(19): siRNA sense strand
aagggcaggucucugugaa

SEQ ID NO: 884953 - RNA, 19 nt, Homo sapiens
  misc_RNA (1)...(19): siRNA sense strand
uugaagaauuccagacuac

SEQ ID NO: 884954 - RNA, 19 nt, Homo sapiens
  misc_RNA (1)...(19): siRNA sense strand
aauacaacacuucugcaaa

SEQ ID NO: 884955 - RNA, 19 nt, Homo sapiens
  misc_RNA (1)...(19): siRNA sense strand
gauuuagcagugccuguga

SEQ ID NO: 884956 - RNA, 19 nt, Homo sapiens
  misc_RNA (1)...(19): siRNA sense strand
uguacaaggcucuucaaau

SEQ ID NO: 884957 - RNA, 19 nt, Homo sapiens
  misc_RNA (1)...(19): siRNA sense strand
aauuggagcgguuagagaa

SEQ ID NO: 884958 - RNA, 19 nt, Homo sapiens
  misc_RNA (1)...(19): siRNA sense strand
aagaagaagcacaacugaa

SEQ ID NO: 884959 - RNA, 19 nt, Homo sapiens
  misc_RNA (1)...(19): siRNA sense strand
aaagggcaggucucuguga

SEQ ID NO: 884960 - RNA, 19 nt, Homo sapiens
  misc_RNA (1)...(19): siRNA sense strand
aaagcccucuccacaggau

SEQ ID NO: 884961 - RNA, 19 nt, Homo sapiens
  misc_RNA (1)...(19): siRNA sense strand
gcagugccugugacgcauu

SEQ ID NO: 884962 - RNA, 19 nt, Homo sapiens
  misc_RNA (1)...(19): siRNA sense strand
gcacagccuucgcccagaa

SEQ ID NO: 884963 - RNA, 19 nt, Homo sapiens
  misc_RNA (1)...(19): siRNA sense strand
gggaugagguccacuacca

SEQ ID NO: 884964 - RNA, 19 nt, Homo sapiens
  misc_RNA (1)...(19): siRNA sense strand
gaccaggguaccaucaaua

SEQ ID NO: 884965 - RNA, 19 nt, Homo sapiens
  misc_RNA (1)...(19): siRNA sense strand
gaagaggcgaguccuguuc

SEQ ID NO: 884966 - RNA, 19 nt, Homo sapiens
  misc_RNA (1)...(19): siRNA sense strand
gcaacacccuggccuucuc

SEQ ID NO: 884967 - RNA, 19 nt, Homo sapiens
  misc_RNA (1)...(19): siRNA sense strand
ggaagaggcgaguccuguu

SEQ ID NO: 884968 - RNA, 19 nt, Homo sapiens
  misc_RNA (1)...(19): siRNA sense strand
gagguccacuaccacauca

SEQ ID NO: 884969 - RNA, 19 nt, Homo sapiens
  misc_RNA (1)...(19): siRNA sense strand
aagcuggccuggcacaaga

SEQ ID NO: 884970 - RNA, 19 nt, Homo sapiens
  misc_RNA (1)...(19): siRNA sense strand
gcacaagaagaucuacauc

SEQ ID NO: 884971 - RNA, 19 nt, Homo sapiens
  misc_RNA (1)...(19): siRNA sense strand
cagcccaucuucugcuuca

SEQ ID NO: 884972 - RNA, 19 nt, Homo sapiens
  misc_RNA (1)...(19): siRNA sense strand
gcuggauccugcugcaugu

SEQ ID NO: 884973 - RNA, 19 nt, Homo sapiens
  misc_RNA (1)...(19): siRNA sense strand
cuuggagccuuaccucuau

SEQ ID NO: 884974 - RNA, 19 nt, Homo sapiens
  misc_RNA (1)...(19): siRNA sense strand
gaccuccugucuggcagua

SEQ ID NO: 884975 - RNA, 19 nt, Homo sapiens
  misc_RNA (1)...(19): siRNA sense strand
gaagcuggccuggcacaag

SEQ ID NO: 884976 - RNA, 19 nt, Homo sapiens
  misc_RNA (1)...(19): siRNA sense strand
agaccaggguaccaucaau

SEQ ID NO: 884977 - RNA, 19 nt, Homo sapiens
  misc_RNA (1)...(19): siRNA sense strand
ggagaccaggguaccauca

SEQ ID NO: 884978 - RNA, 19 nt, Homo sapiens
  misc_RNA (1)...(19): siRNA sense strand
ccuuggagccuuaccucua

SEQ ID NO: 884979 - RNA, 19 nt, Homo sapiens
  misc_RNA (1)...(19): siRNA sense strand
gcagcaccaggccaucuug

SEQ ID NO: 884980 - RNA, 19 nt, Homo sapiens
  misc_RNA (1)...(19): siRNA sense strand
gagaccaggguaccaucaa

SEQ ID NO: 884981 - RNA, 19 nt, Homo sapiens
  misc_RNA (1)...(19): siRNA sense strand
ccucaaggucccucaagga

SEQ ID NO: 884982 - RNA, 19 nt, Homo sapiens
  misc_RNA (1)...(19): siRNA sense strand
cacccuggccuucucaaug

SEQ ID NO: 884983 - RNA, 19 nt, Homo sapiens
  misc_RNA (1)...(19): siRNA sense strand
gaucaaggauguucucaac

SEQ ID NO: 884984 - RNA, 19 nt, Homo sapiens
  misc_RNA (1)...(19): siRNA sense strand
uacagucccucuccuauaa

SEQ ID NO: 884985 - RNA, 19 nt, Homo sapiens
  misc_RNA (1)...(19): siRNA sense strand
guacagucccucuccuaua

SEQ ID NO: 884986 - RNA, 19 nt, Homo sapiens
  misc_RNA (1)...(19): siRNA sense strand
auaagaagaucaaggaugu

SEQ ID NO: 884987 - RNA, 19 nt, Homo sapiens
  misc_RNA (1)...(19): siRNA sense strand
aagaagcucucgugugcua

SEQ ID NO: 884988 - RNA, 19 nt, Homo sapiens
  misc_RNA (1)...(19): siRNA sense strand
guacucaguguuccuuaga

SEQ ID NO: 884989 - RNA, 19 nt, Homo sapiens
  misc_RNA (1)...(19): siRNA sense strand
gaagaucaaggauguucuc

SEQ ID NO: 884990 - RNA, 19 nt, Homo sapiens
  misc_RNA (1)...(19): siRNA sense strand
gaguacagucccucuccua

SEQ ID NO: 884991 - RNA, 19 nt, Homo sapiens
  misc_RNA (1)...(19): siRNA sense strand
uggcugugcuuguggcuau

SEQ ID NO: 884992 - RNA, 19 nt, Homo sapiens
  misc_RNA (1)...(19): siRNA sense strand
ucucaacagucuagaguac

SEQ ID NO: 884993 - RNA, 19 nt, Homo sapiens
  misc_RNA (1)...(19): siRNA sense strand
uggauaagaagaucaagga

SEQ ID NO: 884994 - RNA, 19 nt, Homo sapiens
  misc_RNA (1)...(19): siRNA sense strand
ucaacagucuagaguacag

SEQ ID NO: 884995 - RNA, 19 nt, Homo sapiens
  misc_RNA (1)...(19): siRNA sense strand
ggaguacucaguguuccuu

SEQ ID NO: 884996 - RNA, 19 nt, Homo sapiens
  misc_RNA (1)...(19): siRNA sense strand
gaagcucucgugugcuagu

SEQ ID NO: 884997 - RNA, 19 nt, Homo sapiens
  misc_RNA (1)...(19): siRNA sense strand
gaguacucaguguuccuua

SEQ ID NO: 884998 - RNA, 19 nt, Homo sapiens
  misc_RNA (1)...(19): siRNA sense strand
ccucuugccuccuucucau

SEQ ID NO: 884999 - RNA, 19 nt, Homo sapiens
  misc_RNA (1)...(19): siRNA sense strand
ggauaagaagaucaaggau

SEQ ID NO: 885000 - RNA, 19 nt, Homo sapiens
  misc_RNA (1)...(19): siRNA sense strand
gccguccucuugccuccuu

SEQ ID NO: 885001 - RNA, 19 nt, Homo sapiens
  misc_RNA (1)...(19): siRNA sense strand
ggagaaagcggagauauug

SEQ ID NO: 885002 - RNA, 19 nt, Homo sapiens
  misc_RNA (1)...(19): siRNA sense strand
aagcggagauauuggaguu

SEQ ID NO: 885003 - RNA, 19 nt, Homo sapiens
  misc_RNA (1)...(19): siRNA sense strand
gcugcuacuuguccgguuu

SEQ ID NO: 885004 - RNA, 19 nt, Homo sapiens
  misc_RNA (1)...(19): siRNA sense strand
ggaucgagcugagaauagg

SEQ ID NO: 885005 - RNA, 19 nt, Homo sapiens
  misc_RNA (1)...(19): siRNA sense strand
uggagaaagcggagauauu

SEQ ID NO: 885006 - RNA, 19 nt, Homo sapiens
  misc_RNA (1)...(19): siRNA sense strand
agaaagcggagauauugga

SEQ ID NO: 885007 - RNA, 19 nt, Homo sapiens
  misc_RNA (1)...(19): siRNA sense strand
ggaacccgaagcuggagaa

SEQ ID NO: 885008 - RNA, 19 nt, Homo sapiens
  misc_RNA (1)...(19): siRNA sense strand
gggaucgagcugagaauag

SEQ ID NO: 885009 - RNA, 19 nt, Homo sapiens
  misc_RNA (1)...(19): siRNA sense strand
gaacccgaagcuggagaaa

SEQ ID NO: 885010 - RNA, 19 nt, Homo sapiens
  misc_RNA (1)...(19): siRNA sense strand
gcucgccagcugcuacuug

SEQ ID NO: 885011 - RNA, 19 nt, Homo sapiens
  misc_RNA (1)...(19): siRNA sense strand
gagaaagcggagauauugg

SEQ ID NO: 885012 - RNA, 19 nt, Homo sapiens
  misc_RNA (1)...(19): siRNA sense strand
acccgaagcuggagaaagc

SEQ ID NO: 885013 - RNA, 19 nt, Homo sapiens
  misc_RNA (1)...(19): siRNA sense strand
caucaaccgcagccuggaa

SEQ ID NO: 885014 - RNA, 19 nt, Homo sapiens
  misc_RNA (1)...(19): siRNA sense strand
cgggaucgagcugagaaua

SEQ ID NO: 885015 - RNA, 19 nt, Homo sapiens
  misc_RNA (1)...(19): siRNA sense strand
gcaagaaacaagcuuauua

SEQ ID NO: 885016 - RNA, 19 nt, Homo sapiens
  misc_RNA (1)...(19): siRNA sense strand
gagagaaaccuuacaagua

SEQ ID NO: 885017 - RNA, 19 nt, Homo sapiens
  misc_RNA (1)...(19): siRNA sense strand
caacaaaugccuuauaaug

SEQ ID NO: 885018 - RNA, 19 nt, Homo sapiens
  misc_RNA (1)...(19): siRNA sense strand
gagagaaaccuuauaaaug

SEQ ID NO: 885019 - RNA, 19 nt, Homo sapiens
  misc_RNA (1)...(19): siRNA sense strand
gagagaaaccuuauaaaug

SEQ ID NO: 885020 - RNA, 19 nt, Homo sapiens
  misc_RNA (1)...(19): siRNA sense strand
agagaaaccuuacaaaugu

SEQ ID NO: 885021 - RNA, 19 nt, Homo sapiens
  misc_RNA (1)...(19): siRNA sense strand
agagaaaccuuacaaguau

SEQ ID NO: 885022 - RNA, 19 nt, Homo sapiens
  misc_RNA (1)...(19): siRNA sense strand
gguaaggucuuuagucgaa

SEQ ID NO: 885023 - RNA, 19 nt, Homo sapiens
  misc_RNA (1)...(19): siRNA sense strand
ggaaaguucuaaagucaga

SEQ ID NO: 885024 - RNA, 19 nt, Homo sapiens
  misc_RNA (1)...(19): siRNA sense strand
gaagagaugaacaugauaa

SEQ ID NO: 885025 - RNA, 19 nt, Homo sapiens
  misc_RNA (1)...(19): siRNA sense strand
acaaaucacuggagaauuc

SEQ ID NO: 885026 - RNA, 19 nt, Homo sapiens
  misc_RNA (1)...(19): siRNA sense strand
gagaagucuuucaacaaua

SEQ ID NO: 885027 - RNA, 19 nt, Homo sapiens
  misc_RNA (1)...(19): siRNA sense strand
ggagagaaaccuuauaaau

SEQ ID NO: 885028 - RNA, 19 nt, Homo sapiens
  misc_RNA (1)...(19): siRNA sense strand
ggcaaggucuuuaggcaua

SEQ ID NO: 885029 - RNA, 19 nt, Homo sapiens
  misc_RNA (1)...(19): siRNA sense strand
ggagagaaaccuuauaaau

SEQ ID NO: 885030 - RNA, 19 nt, Homo sapiens
  misc_RNA (1)...(19): siRNA sense strand
ggauguggcuauagaauuc

SEQ ID NO: 885031 - RNA, 19 nt, Homo sapiens
  misc_RNA (1)...(19): siRNA sense strand
agagaaaccuuauaagugu

SEQ ID NO: 885032 - RNA, 19 nt, Homo sapiens
  misc_RNA (1)...(19): siRNA sense strand
ggagagccaaguacaaaua

SEQ ID NO: 885033 - RNA, 19 nt, Homo sapiens
  misc_RNA (1)...(19): siRNA sense strand
gggaaacccuuuaguaucu

SEQ ID NO: 885034 - RNA, 19 nt, Homo sapiens
  misc_RNA (1)...(19): siRNA sense strand
gagaaaccuuacaaguaua

SEQ ID NO: 885035 - RNA, 19 nt, Homo sapiens
  misc_RNA (1)...(19): siRNA sense strand
ggcaaggucuucacucaaa

SEQ ID NO: 885036 - RNA, 19 nt, Homo sapiens
  misc_RNA (1)...(19): siRNA sense strand
gagagaaaccuuauaagug

SEQ ID NO: 885037 - RNA, 19 nt, Homo sapiens
  misc_RNA (1)...(19): siRNA sense strand
ggcaaggucuucacucaaa

SEQ ID NO: 885038 - RNA, 19 nt, Homo sapiens
  misc_RNA (1)...(19): siRNA sense strand
caacaauaauuccucaguu

SEQ ID NO: 885039 - RNA, 19 nt, Homo sapiens
  misc_RNA (1)...(19): siRNA sense strand
ugaaggaaauuacaaagga

SEQ ID NO: 885040 - RNA, 19 nt, Homo sapiens
  misc_RNA (1)...(19): siRNA sense strand
ucagagaagucauacuaaa

SEQ ID NO: 885041 - RNA, 19 nt, Homo sapiens
  misc_RNA (1)...(19): siRNA sense strand
agagaaaccuuacaagugu

SEQ ID NO: 885042 - RNA, 19 nt, Homo sapiens
  misc_RNA (1)...(19): siRNA sense strand
agagaaaccuuacaagugu

SEQ ID NO: 885043 - RNA, 19 nt, Homo sapiens
  misc_RNA (1)...(19): siRNA sense strand
agagaaaccuuacaagugu

SEQ ID NO: 885044 - RNA, 19 nt, Homo sapiens
  misc_RNA (1)...(19): siRNA sense strand
gggaagcccuuacaaaucu

SEQ ID NO: 885045 - RNA, 19 nt, Homo sapiens
  misc_RNA (1)...(19): siRNA sense strand
gagagaaaccuuacaagug

SEQ ID NO: 885046 - RNA, 19 nt, Homo sapiens
  misc_RNA (1)...(19): siRNA sense strand
gagagaaaccuuacaagug

SEQ ID NO: 885047 - RNA, 19 nt, Homo sapiens
  misc_RNA (1)...(19): siRNA sense strand
gagagaaaccuuacaagug

SEQ ID NO: 885048 - RNA, 19 nt, Homo sapiens
  misc_RNA (1)...(19): siRNA sense strand
guaaucagguugagaaguc

SEQ ID NO: 885049 - RNA, 19 nt, Homo sapiens
  misc_RNA (1)...(19): siRNA sense strand
ugagaagucuuucaacaau

SEQ ID NO: 885050 - RNA, 19 nt, Homo sapiens
  misc_RNA (1)...(19): siRNA sense strand
gaagaguaauacaggagaa

SEQ ID NO: 885051 - RNA, 19 nt, Homo sapiens
  misc_RNA (1)...(19): siRNA sense strand
ggagagaaaccuuauaagu

SEQ ID NO: 885052 - RNA, 19 nt, Homo sapiens
  misc_RNA (1)...(19): siRNA sense strand
ucacaacucucacaacauc

SEQ ID NO: 885053 - RNA, 19 nt, Homo sapiens
  misc_RNA (1)...(19): siRNA sense strand
gcagagaugcugaaggaaa

SEQ ID NO: 885054 - RNA, 19 nt, Homo sapiens
  misc_RNA (1)...(19): siRNA sense strand
gagaaaccuuauaagugua

SEQ ID NO: 885055 - RNA, 19 nt, Homo sapiens
  misc_RNA (1)...(19): siRNA sense strand
gaagucauacuaaagagaa

SEQ ID NO: 885056 - RNA, 19 nt, Homo sapiens
  misc_RNA (1)...(19): siRNA sense strand
gagaaaagccuuacaaaug

SEQ ID NO: 885057 - RNA, 19 nt, Homo sapiens
  misc_RNA (1)...(19): siRNA sense strand
gagaaaagccuuacaaaug

SEQ ID NO: 885058 - RNA, 19 nt, Homo sapiens
  misc_RNA (1)...(19): siRNA sense strand
ggcauggucuuuccucaaa

SEQ ID NO: 885059 - RNA, 19 nt, Homo sapiens
  misc_RNA (1)...(19): siRNA sense strand
ugggaaaccuuacaaaugu

SEQ ID NO: 885060 - RNA, 19 nt, Homo sapiens
  misc_RNA (1)...(19): siRNA sense strand
uguaagacaucgaggaauu

SEQ ID NO: 885061 - RNA, 19 nt, Homo sapiens
  misc_RNA (1)...(19): siRNA sense strand
caucagagaagucauacua

SEQ ID NO: 885062 - RNA, 19 nt, Homo sapiens
  misc_RNA (1)...(19): siRNA sense strand
ggcaaggucuucacucaga

SEQ ID NO: 885063 - RNA, 19 nt, Homo sapiens
  misc_RNA (1)...(19): siRNA sense strand
ggcaaggucuucacucaga

SEQ ID NO: 885064 - RNA, 19 nt, Homo sapiens
  misc_RNA (1)...(19): siRNA sense strand
ggcaaggucuucacucaga

SEQ ID NO: 885065 - RNA, 19 nt, Homo sapiens
  misc_RNA (1)...(19): siRNA sense strand
gcaaagccuucagugugua

SEQ ID NO: 885066 - RNA, 19 nt, Homo sapiens
  misc_RNA (1)...(19): siRNA sense strand
ggagugaagccuuauaugu

SEQ ID NO: 885067 - RNA, 19 nt, Homo sapiens
  misc_RNA (1)...(19): siRNA sense strand
gagaaaccuuacaaauguu

SEQ ID NO: 885068 - RNA, 19 nt, Homo sapiens
  misc_RNA (1)...(19): siRNA sense strand
ggagaaguauuccaaacag

SEQ ID NO: 885069 - RNA, 19 nt, Homo sapiens
  misc_RNA (1)...(19): siRNA sense strand
guggaaaguucuaaaguca

SEQ ID NO: 885070 - RNA, 19 nt, Homo sapiens
  misc_RNA (1)...(19): siRNA sense strand
acaaaugccuuauaauguc

SEQ ID NO: 885071 - RNA, 19 nt, Homo sapiens
  misc_RNA (1)...(19): siRNA sense strand
gauuaagccuucagucaca

SEQ ID NO: 885072 - RNA, 19 nt, Homo sapiens
  misc_RNA (1)...(19): siRNA sense strand
agacaucgaggaauucaua

SEQ ID NO: 885073 - RNA, 19 nt, Homo sapiens
  misc_RNA (1)...(19): siRNA sense strand
gaacauucaaaccuaacua

SEQ ID NO: 885074 - RNA, 19 nt, Homo sapiens
  misc_RNA (1)...(19): siRNA sense strand
ggcaaagccuucagugugu

SEQ ID NO: 885075 - RNA, 19 nt, Homo sapiens
  misc_RNA (1)...(19): siRNA sense strand
gcaaaucaucaaagaauuc

SEQ ID NO: 885076 - RNA, 19 nt, Homo sapiens
  misc_RNA (1)...(19): siRNA sense strand
gaaguauuccaaacaguga

SEQ ID NO: 885077 - RNA, 19 nt, Homo sapiens
  misc_RNA (1)...(19): siRNA sense strand
ggagagaaaccauaugagu

SEQ ID NO: 885078 - RNA, 19 nt, Homo sapiens
  misc_RNA (1)...(19): siRNA sense strand
ggagagaaaccuuacaagu

SEQ ID NO: 885079 - RNA, 19 nt, Homo sapiens
  misc_RNA (1)...(19): siRNA sense strand
gagaaaccauaugagugua

SEQ ID NO: 885080 - RNA, 19 nt, Homo sapiens
  misc_RNA (1)...(19): siRNA sense strand
ggagagaaaccauaugagu

SEQ ID NO: 885081 - RNA, 19 nt, Homo sapiens
  misc_RNA (1)...(19): siRNA sense strand
ggagagaaaccuuacaagu

SEQ ID NO: 885082 - RNA, 19 nt, Homo sapiens
  misc_RNA (1)...(19): siRNA sense strand
uuacaaaugucaugaaugc

SEQ ID NO: 885083 - RNA, 19 nt, Homo sapiens
  misc_RNA (1)...(19): siRNA sense strand
ggagagaaaccuuacaagu

SEQ ID NO: 885084 - RNA, 19 nt, Homo sapiens
  misc_RNA (1)...(19): siRNA sense strand
ggagagaaaccuuacaagu

SEQ ID NO: 885085 - RNA, 19 nt, Homo sapiens
  misc_RNA (1)...(19): siRNA sense strand
gaauucacaccuuguaaga

SEQ ID NO: 885086 - RNA, 19 nt, Homo sapiens
  misc_RNA (1)...(19): siRNA sense strand
ggaaagccaagacauugaa

SEQ ID NO: 885087 - RNA, 19 nt, Homo sapiens
  misc_RNA (1)...(19): siRNA sense strand
cucaacaaaugccuuauaa

SEQ ID NO: 885088 - RNA, 19 nt, Homo sapiens
  misc_RNA (1)...(19): siRNA sense strand
gaguaucaaugcagagaug

SEQ ID NO: 885089 - RNA, 19 nt, Homo sapiens
  misc_RNA (1)...(19): siRNA sense strand
cagagaugcugaaggaaau

SEQ ID NO: 885090 - RNA, 19 nt, Homo sapiens
  misc_RNA (1)...(19): siRNA sense strand
gaaaccauaugaguguaau

SEQ ID NO: 885091 - RNA, 19 nt, Homo sapiens
  misc_RNA (1)...(19): siRNA sense strand
gcaaggucuuuaggcauaa

SEQ ID NO: 885092 - RNA, 19 nt, Homo sapiens
  misc_RNA (1)...(19): siRNA sense strand
auacuggagugaagccuua

SEQ ID NO: 885093 - RNA, 19 nt, Homo sapiens
  misc_RNA (1)...(19): siRNA sense strand
caaaugccuuauaauguca

SEQ ID NO: 885094 - RNA, 19 nt, Homo sapiens
  misc_RNA (1)...(19): siRNA sense strand
uggaagagaugaacaugau

SEQ ID NO: 885095 - RNA, 19 nt, Homo sapiens
  misc_RNA (1)...(19): siRNA sense strand
cacauggccuugaguauca

SEQ ID NO: 885096 - RNA, 19 nt, Homo sapiens
  misc_RNA (1)...(19): siRNA sense strand
guucaagccuagcuauuca

SEQ ID NO: 885097 - RNA, 19 nt, Homo sapiens
  misc_RNA (1)...(19): siRNA sense strand
caaucucacucauggaaga

SEQ ID NO: 885098 - RNA, 19 nt, Homo sapiens
  misc_RNA (1)...(19): siRNA sense strand
ucagggauguggcuauaga

SEQ ID NO: 885099 - RNA, 19 nt, Homo sapiens
  misc_RNA (1)...(19): siRNA sense strand
ggucuucacucagaauuca

SEQ ID NO: 885100 - RNA, 19 nt, Homo sapiens
  misc_RNA (1)...(19): siRNA sense strand
ggucuucacucagaauuca

SEQ ID NO: 885101 - RNA, 19 nt, Homo sapiens
  misc_RNA (1)...(19): siRNA sense strand
gcaaggucuucacucagaa

SEQ ID NO: 885102 - RNA, 19 nt, Homo sapiens
  misc_RNA (1)...(19): siRNA sense strand
ggucuucacucagaauuca

SEQ ID NO: 885103 - RNA, 19 nt, Homo sapiens
  misc_RNA (1)...(19): siRNA sense strand
gcaaggucuucacucagaa

SEQ ID NO: 885104 - RNA, 19 nt, Homo sapiens
  misc_RNA (1)...(19): siRNA sense strand
ggucuucacucagaauuca

SEQ ID NO: 885105 - RNA, 19 nt, Homo sapiens
  misc_RNA (1)...(19): siRNA sense strand
gcaaggucuucacucagaa

SEQ ID NO: 885106 - RNA, 19 nt, Homo sapiens
  misc_RNA (1)...(19): siRNA sense strand
aagagaaaccuuacaaaug

SEQ ID NO: 885107 - RNA, 19 nt, Homo sapiens
  misc_RNA (1)...(19): siRNA sense strand
aggcauaauucauaccuuu

SEQ ID NO: 885108 - RNA, 19 nt, Homo sapiens
  misc_RNA (1)...(19): siRNA sense strand
gagugaagccuuauaugug

SEQ ID NO: 885109 - RNA, 19 nt, Homo sapiens
  misc_RNA (1)...(19): siRNA sense strand
gaaauucacaacucucaca

SEQ ID NO: 885110 - RNA, 19 nt, Homo sapiens
  misc_RNA (1)...(19): siRNA sense strand
uagagcacauucaaaccua

SEQ ID NO: 885111 - RNA, 19 nt, Homo sapiens
  misc_RNA (1)...(19): siRNA sense strand
gaauguggcaaggucuuua

SEQ ID NO: 885112 - RNA, 19 nt, Homo sapiens
  misc_RNA (1)...(19): siRNA sense strand
gaugcaagaaacaagcuua

SEQ ID NO: 885113 - RNA, 19 nt, Homo sapiens
  misc_RNA (1)...(19): siRNA sense strand
gacgugauguuggagaauu

SEQ ID NO: 885114 - RNA, 19 nt, Homo sapiens
  misc_RNA (1)...(19): siRNA sense strand
guacagggacgugauguug

SEQ ID NO: 885115 - RNA, 19 nt, Homo sapiens
  misc_RNA (1)...(19): siRNA sense strand
gaaagggucuucauucauu

SEQ ID NO: 885116 - RNA, 19 nt, Homo sapiens
  misc_RNA (1)...(19): siRNA sense strand
gagaaagggucuucauuca

SEQ ID NO: 885117 - RNA, 19 nt, Homo sapiens
  misc_RNA (1)...(19): siRNA sense strand
agacaaaccuuggaaauca

SEQ ID NO: 885118 - RNA, 19 nt, Homo sapiens
  misc_RNA (1)...(19): siRNA sense strand
ggagugcagugguucaauc

SEQ ID NO: 885119 - RNA, 19 nt, Homo sapiens
  misc_RNA (1)...(19): siRNA sense strand
cagcuaggauuacagacaa

SEQ ID NO: 885120 - RNA, 19 nt, Homo sapiens
  misc_RNA (1)...(19): siRNA sense strand
ggacccaacuuuguuacug

SEQ ID NO: 885121 - RNA, 19 nt, Homo sapiens
  misc_RNA (1)...(19): siRNA sense strand
caagauggcauuuguuaag

SEQ ID NO: 885122 - RNA, 19 nt, Homo sapiens
  misc_RNA (1)...(19): siRNA sense strand
caacuuuguuacugugaga

SEQ ID NO: 885123 - RNA, 19 nt, Homo sapiens
  misc_RNA (1)...(19): siRNA sense strand
gacaaaccuuggaaaucaa

SEQ ID NO: 885124 - RNA, 19 nt, Homo sapiens
  misc_RNA (1)...(19): siRNA sense strand
gaaaguucuggaaugauga

SEQ ID NO: 885125 - RNA, 19 nt, Homo sapiens
  misc_RNA (1)...(19): siRNA sense strand
ugagaaagggucuucauuc

SEQ ID NO: 885126 - RNA, 19 nt, Homo sapiens
  misc_RNA (1)...(19): siRNA sense strand
ccucccaguucaagaaauu

SEQ ID NO: 885127 - RNA, 19 nt, Homo sapiens
  misc_RNA (1)...(19): siRNA sense strand
gagcagcuaggauuacaga

SEQ ID NO: 885128 - RNA, 19 nt, Homo sapiens
  misc_RNA (1)...(19): siRNA sense strand
gacccaacuuuguuacugu

SEQ ID NO: 885129 - RNA, 19 nt, Homo sapiens
  misc_RNA (1)...(19): siRNA sense strand
cauucaagauggcauuugu

SEQ ID NO: 885130 - RNA, 19 nt, Homo sapiens
  misc_RNA (1)...(19): siRNA sense strand
gcagcuaggauuacagaca

SEQ ID NO: 885131 - RNA, 19 nt, Homo sapiens
  misc_RNA (1)...(19): siRNA sense strand
gagccuggacccaacuuug

SEQ ID NO: 885132 - RNA, 19 nt, Homo sapiens
  misc_RNA (1)...(19): siRNA sense strand
gugagaaagggucuucauu

SEQ ID NO: 885133 - RNA, 19 nt, Homo sapiens
  misc_RNA (1)...(19): siRNA sense strand
uucaagauggcauuuguua

SEQ ID NO: 885134 - RNA, 19 nt, Homo sapiens
  misc_RNA (1)...(19): siRNA sense strand
ucaagauggcauuuguuaa

SEQ ID NO: 885135 - RNA, 19 nt, Homo sapiens
  misc_RNA (1)...(19): siRNA sense strand
ccaccucccaguucaagaa

SEQ ID NO: 885136 - RNA, 19 nt, Homo sapiens
  misc_RNA (1)...(19): siRNA sense strand
gugguucaaucacggauca

SEQ ID NO: 885137 - RNA, 19 nt, Homo sapiens
  misc_RNA (1)...(19): siRNA sense strand
caguaugaguccauucagu

SEQ ID NO: 885138 - RNA, 19 nt, Homo sapiens
  misc_RNA (1)...(19): siRNA sense strand
aaagggucuucauucauuc

SEQ ID NO: 885139 - RNA, 19 nt, Homo sapiens
  misc_RNA (1)...(19): siRNA sense strand
ccuggacccaacuuuguua

SEQ ID NO: 885140 - RNA, 19 nt, Homo sapiens
  misc_RNA (1)...(19): siRNA sense strand
guaugaguccauucaguuc

SEQ ID NO: 885141 - RNA, 19 nt, Homo sapiens
  misc_RNA (1)...(19): siRNA sense strand
acagacaaaccuuggaaau

SEQ ID NO: 885142 - RNA, 19 nt, Homo sapiens
  misc_RNA (1)...(19): siRNA sense strand
guucuggaaugaugaagcu

SEQ ID NO: 885143 - RNA, 19 nt, Homo sapiens
  misc_RNA (1)...(19): siRNA sense strand
cagacaaaccuuggaaauc

SEQ ID NO: 885144 - RNA, 19 nt, Homo sapiens
  misc_RNA (1)...(19): siRNA sense strand
uuacagacaaaccuuggaa

SEQ ID NO: 885145 - RNA, 19 nt, Homo sapiens
  misc_RNA (1)...(19): siRNA sense strand
aguaugaguccauucaguu

SEQ ID NO: 885146 - RNA, 19 nt, Homo sapiens
  misc_RNA (1)...(19): siRNA sense strand
gagugcagugguucaauca

SEQ ID NO: 885147 - RNA, 19 nt, Homo sapiens
  misc_RNA (1)...(19): siRNA sense strand
agaaagggucuucauucau

SEQ ID NO: 885148 - RNA, 19 nt, Homo sapiens
  misc_RNA (1)...(19): siRNA sense strand
cuggaaugaugaagcuguu

SEQ ID NO: 885149 - RNA, 19 nt, Homo sapiens
  misc_RNA (1)...(19): siRNA sense strand
ggaaacaucugucauauug

SEQ ID NO: 885150 - RNA, 19 nt, Homo sapiens
  misc_RNA (1)...(19): siRNA sense strand
gcaaagauuucaacuauga

SEQ ID NO: 885151 - RNA, 19 nt, Homo sapiens
  misc_RNA (1)...(19): siRNA sense strand
gcaauaaggucacugauca

SEQ ID NO: 885152 - RNA, 19 nt, Homo sapiens
  misc_RNA (1)...(19): siRNA sense strand
gcaaggacaugaagaaguu

SEQ ID NO: 885153 - RNA, 19 nt, Homo sapiens
  misc_RNA (1)...(19): siRNA sense strand
gggcaaagauuucaacuau

SEQ ID NO: 885154 - RNA, 19 nt, Homo sapiens
  misc_RNA (1)...(19): siRNA sense strand
gcucaaaccuggcaaagaa

SEQ ID NO: 885155 - RNA, 19 nt, Homo sapiens
  misc_RNA (1)...(19): siRNA sense strand
gaccucagcuggaccaaua

SEQ ID NO: 885156 - RNA, 19 nt, Homo sapiens
  misc_RNA (1)...(19): siRNA sense strand
ggaccaauaucuccaagaa

SEQ ID NO: 885157 - RNA, 19 nt, Homo sapiens
  misc_RNA (1)...(19): siRNA sense strand
caaagaagacuccaaagaa

SEQ ID NO: 885158 - RNA, 19 nt, Homo sapiens
  misc_RNA (1)...(19): siRNA sense strand
gaacgaugccaaagaauug

SEQ ID NO: 885159 - RNA, 19 nt, Homo sapiens
  misc_RNA (1)...(19): siRNA sense strand
caaacagagugacaucuuu

SEQ ID NO: 885160 - RNA, 19 nt, Homo sapiens
  misc_RNA (1)...(19): siRNA sense strand
gcagggagcugagcaagga

SEQ ID NO: 885161 - RNA, 19 nt, Homo sapiens
  misc_RNA (1)...(19): siRNA sense strand
gguauguccuggagagaua

SEQ ID NO: 885162 - RNA, 19 nt, Homo sapiens
  misc_RNA (1)...(19): siRNA sense strand
gcaagcaagucaccaagga

SEQ ID NO: 885163 - RNA, 19 nt, Homo sapiens
  misc_RNA (1)...(19): siRNA sense strand
ugaaagcucugguggagaa

SEQ ID NO: 885164 - RNA, 19 nt, Homo sapiens
  misc_RNA (1)...(19): siRNA sense strand
gggagucgaugcuuauuga

SEQ ID NO: 885165 - RNA, 19 nt, Homo sapiens
  misc_RNA (1)...(19): siRNA sense strand
ggaagaagcggaaauacga

SEQ ID NO: 885166 - RNA, 19 nt, Homo sapiens
  misc_RNA (1)...(19): siRNA sense strand
ggaggucucugccaaaugg

SEQ ID NO: 885167 - RNA, 19 nt, Homo sapiens
  misc_RNA (1)...(19): siRNA sense strand
cuccaacgcugcacaauuu

SEQ ID NO: 885168 - RNA, 19 nt, Homo sapiens
  misc_RNA (1)...(19): siRNA sense strand
gauccagucucacuuacuu

SEQ ID NO: 885169 - RNA, 19 nt, Homo sapiens
  misc_RNA (1)...(19): siRNA sense strand
gaagcagggcuacacauuu

SEQ ID NO: 885170 - RNA, 19 nt, Homo sapiens
  misc_RNA (1)...(19): siRNA sense strand
ggaacgaugccaaagaauu

SEQ ID NO: 885171 - RNA, 19 nt, Homo sapiens
  misc_RNA (1)...(19): siRNA sense strand
cagagggagucgaugcuua

SEQ ID NO: 885172 - RNA, 19 nt, Homo sapiens
  misc_RNA (1)...(19): siRNA sense strand
gaaacauccugcacagcuu

SEQ ID NO: 885173 - RNA, 19 nt, Homo sapiens
  misc_RNA (1)...(19): siRNA sense strand
guggaacgaugccaaagaa

SEQ ID NO: 885174 - RNA, 19 nt, Homo sapiens
  misc_RNA (1)...(19): siRNA sense strand
gaacgccauugcagagaug

SEQ ID NO: 885175 - RNA, 19 nt, Homo sapiens
  misc_RNA (1)...(19): siRNA sense strand
gcacggagaugagcauguc

SEQ ID NO: 885176 - RNA, 19 nt, Homo sapiens
  misc_RNA (1)...(19): siRNA sense strand
gggaguguccgaaguguaa

SEQ ID NO: 885177 - RNA, 19 nt, Homo sapiens
  misc_RNA (1)...(19): siRNA sense strand
ccaaagaagacuccaaaga

SEQ ID NO: 885178 - RNA, 19 nt, Homo sapiens
  misc_RNA (1)...(19): siRNA sense strand
ugaaggagcacgcagauga

SEQ ID NO: 885179 - RNA, 19 nt, Homo sapiens
  misc_RNA (1)...(19): siRNA sense strand
gcaaacagagugacaucuu

SEQ ID NO: 885180 - RNA, 19 nt, Homo sapiens
  misc_RNA (1)...(19): siRNA sense strand
gaaguacccgaaagugaaa

SEQ ID NO: 885181 - RNA, 19 nt, Homo sapiens
  misc_RNA (1)...(19): siRNA sense strand
caaccugucugacugcaau

SEQ ID NO: 885182 - RNA, 19 nt, Homo sapiens
  misc_RNA (1)...(19): siRNA sense strand
ucaaggagcagaagaugaa

SEQ ID NO: 885183 - RNA, 19 nt, Homo sapiens
  misc_RNA (1)...(19): siRNA sense strand
gggacaagcuguacaacgu

SEQ ID NO: 885184 - RNA, 19 nt, Homo sapiens
  misc_RNA (1)...(19): siRNA sense strand
agagauacguguacugugu

SEQ ID NO: 885185 - RNA, 19 nt, Homo sapiens
  misc_RNA (1)...(19): siRNA sense strand
acaccaagcuggagcacuu

SEQ ID NO: 885186 - RNA, 19 nt, Homo sapiens
  misc_RNA (1)...(19): siRNA sense strand
uaagaugccugacccugau

SEQ ID NO: 885187 - RNA, 19 nt, Homo sapiens
  misc_RNA (1)...(19): siRNA sense strand
ggaaggcugugagcaguuc

SEQ ID NO: 885188 - RNA, 19 nt, Homo sapiens
  misc_RNA (1)...(19): siRNA sense strand
ggauggccgucuucagcua

SEQ ID NO: 885189 - RNA, 19 nt, Homo sapiens
  misc_RNA (1)...(19): siRNA sense strand
gaggaggaaggcaaguuua

SEQ ID NO: 885190 - RNA, 19 nt, Homo sapiens
  misc_RNA (1)...(19): siRNA sense strand
aaagaagacuccaaagaac

SEQ ID NO: 885191 - RNA, 19 nt, Homo sapiens
  misc_RNA (1)...(19): siRNA sense strand
gagaugaaguacccgaaag

SEQ ID NO: 885192 - RNA, 19 nt, Homo sapiens
  misc_RNA (1)...(19): siRNA sense strand
gaacugaagggccugaaag

SEQ ID NO: 885193 - RNA, 19 nt, Homo sapiens
  misc_RNA (1)...(19): siRNA sense strand
caacaggccaggucagaug

SEQ ID NO: 885194 - RNA, 19 nt, Homo sapiens
  misc_RNA (1)...(19): siRNA sense strand
ugaaguacccgaaagugaa

SEQ ID NO: 885195 - RNA, 19 nt, Homo sapiens
  misc_RNA (1)...(19): siRNA sense strand
gccaaagaauugagcugaa

SEQ ID NO: 885196 - RNA, 19 nt, Homo sapiens
  misc_RNA (1)...(19): siRNA sense strand
gaaccgggacaacaaggaa

SEQ ID NO: 885197 - RNA, 19 nt, Homo sapiens
  misc_RNA (1)...(19): siRNA sense strand
guggaaacaucugucauau

SEQ ID NO: 885198 - RNA, 19 nt, Homo sapiens
  misc_RNA (1)...(19): siRNA sense strand
caaacgcuguggaaacauc

SEQ ID NO: 885199 - RNA, 19 nt, Homo sapiens
  misc_RNA (1)...(19): siRNA sense strand
ccuggaugccuuaagauua

SEQ ID NO: 885200 - RNA, 19 nt, Homo sapiens
  misc_RNA (1)...(19): siRNA sense strand
uaugagaugugcugguaug

SEQ ID NO: 885201 - RNA, 19 nt, Homo sapiens
  misc_RNA (1)...(19): siRNA sense strand
gaaggaagacacgguggaa

SEQ ID NO: 885202 - RNA, 19 nt, Homo sapiens
  misc_RNA (1)...(19): siRNA sense strand
ggagagauacguguacugu

SEQ ID NO: 885203 - RNA, 19 nt, Homo sapiens
  misc_RNA (1)...(19): siRNA sense strand
ccaaagaauugagcugaag

SEQ ID NO: 885204 - RNA, 19 nt, Homo sapiens
  misc_RNA (1)...(19): siRNA sense strand
ugaggaagaagcggaaaua

SEQ ID NO: 885205 - RNA, 19 nt, Homo sapiens
  misc_RNA (1)...(19): siRNA sense strand
cggaugagcacucgaagaa

SEQ ID NO: 885206 - RNA, 19 nt, Homo sapiens
  misc_RNA (1)...(19): siRNA sense strand
acuaugagaugugcuggua

SEQ ID NO: 885207 - RNA, 19 nt, Homo sapiens
  misc_RNA (1)...(19): siRNA sense strand
ccauggagggcaaagauuu

SEQ ID NO: 885208 - RNA, 19 nt, Homo sapiens
  misc_RNA (1)...(19): siRNA sense strand
gcaggaacccgaggacgaa

SEQ ID NO: 885209 - RNA, 19 nt, Homo sapiens
  misc_RNA (1)...(19): siRNA sense strand
aagauaagcuuuucaggaa

SEQ ID NO: 885210 - RNA, 19 nt, Homo sapiens
  misc_RNA (1)...(19): siRNA sense strand
ggccaaagaagacuccaaa

SEQ ID NO: 885211 - RNA, 19 nt, Homo sapiens
  misc_RNA (1)...(19): siRNA sense strand
ccacauuggccguagacua

SEQ ID NO: 885212 - RNA, 19 nt, Homo sapiens
  misc_RNA (1)...(19): siRNA sense strand
aaggauggacugggaauua

SEQ ID NO: 885213 - RNA, 19 nt, Homo sapiens
  misc_RNA (1)...(19): siRNA sense strand
ugaaggagaagcagacaga

SEQ ID NO: 885214 - RNA, 19 nt, Homo sapiens
  misc_RNA (1)...(19): siRNA sense strand
gaagaagaaggugaagaug

SEQ ID NO: 885215 - RNA, 19 nt, Homo sapiens
  misc_RNA (1)...(19): siRNA sense strand
ggcaaagauuucaacuaug

SEQ ID NO: 885216 - RNA, 19 nt, Homo sapiens
  misc_RNA (1)...(19): siRNA sense strand
gcauagacggcuucucuuc

SEQ ID NO: 885217 - RNA, 19 nt, Homo sapiens
  misc_RNA (1)...(19): siRNA sense strand
ccaugcagcugcggaucua

SEQ ID NO: 885218 - RNA, 19 nt, Homo sapiens
  misc_RNA (1)...(19): siRNA sense strand
cgacuuccacaucgacuuu

SEQ ID NO: 885219 - RNA, 19 nt, Homo sapiens
  misc_RNA (1)...(19): siRNA sense strand
ggcaagaccgggaagcaaa

SEQ ID NO: 885220 - RNA, 19 nt, Homo sapiens
  misc_RNA (1)...(19): siRNA sense strand
ugucccaguuugugcguua

SEQ ID NO: 885221 - RNA, 19 nt, Homo sapiens
  misc_RNA (1)...(19): siRNA sense strand
uguggaaacaucugucaua

SEQ ID NO: 885222 - RNA, 19 nt, Homo sapiens
  misc_RNA (1)...(19): siRNA sense strand
ggacccgcauugaccugaa

SEQ ID NO: 885223 - RNA, 19 nt, Homo sapiens
  misc_RNA (1)...(19): siRNA sense strand
cacccuggaugccuuaaga

SEQ ID NO: 885224 - RNA, 19 nt, Homo sapiens
  misc_RNA (1)...(19): siRNA sense strand
guggugacuuggccaaaga

SEQ ID NO: 885225 - RNA, 19 nt, Homo sapiens
  misc_RNA (1)...(19): siRNA sense strand
cagcauagacggcuucucu

SEQ ID NO: 885226 - RNA, 19 nt, Homo sapiens
  misc_RNA (1)...(19): siRNA sense strand
cgaggaagcccagcauaga

SEQ ID NO: 885227 - RNA, 19 nt, Homo sapiens
  misc_RNA (1)...(19): siRNA sense strand
gcacuuccguuugguacca

SEQ ID NO: 885228 - RNA, 19 nt, Homo sapiens
  misc_RNA (1)...(19): siRNA sense strand
gaugagcaugucccaguuu

SEQ ID NO: 885229 - RNA, 19 nt, Homo sapiens
  misc_RNA (1)...(19): siRNA sense strand
ccaagcuccaccucaguua

SEQ ID NO: 885230 - RNA, 19 nt, Homo sapiens
  misc_RNA (1)...(19): siRNA sense strand
gcccaaguguauccagaug

SEQ ID NO: 885231 - RNA, 19 nt, Homo sapiens
  misc_RNA (1)...(19): siRNA sense strand
aggauggacugggaauuaa

SEQ ID NO: 885232 - RNA, 19 nt, Homo sapiens
  misc_RNA (1)...(19): siRNA sense strand
gaaggagcacgcagaugau

SEQ ID NO: 885233 - RNA, 19 nt, Homo sapiens
  misc_RNA (1)...(19): siRNA sense strand
ggacuggguggacaacaug

SEQ ID NO: 885234 - RNA, 19 nt, Homo sapiens
  misc_RNA (1)...(19): siRNA sense strand
gagcaugucccaguuugug

SEQ ID NO: 885235 - RNA, 19 nt, Homo sapiens
  misc_RNA (1)...(19): siRNA sense strand
gaaacaucugucauauuga

SEQ ID NO: 885236 - RNA, 19 nt, Homo sapiens
  misc_RNA (1)...(19): siRNA sense strand
caacaaggaagggcaggaa

SEQ ID NO: 885237 - RNA, 19 nt, Homo sapiens
  misc_RNA (1)...(19): siRNA sense strand
ugaagcagggcuacacauu

SEQ ID NO: 885238 - RNA, 19 nt, Homo sapiens
  misc_RNA (1)...(19): siRNA sense strand
cgauugaccgccagcgaua

SEQ ID NO: 885239 - RNA, 19 nt, Homo sapiens
  misc_RNA (1)...(19): siRNA sense strand
cccagcaucugaaggagaa

SEQ ID NO: 885240 - RNA, 19 nt, Homo sapiens
  misc_RNA (1)...(19): siRNA sense strand
gauggacugggaauuaaga

SEQ ID NO: 885241 - RNA, 19 nt, Homo sapiens
  misc_RNA (1)...(19): siRNA sense strand
gaucagugccuguccuucu

SEQ ID NO: 885242 - RNA, 19 nt, Homo sapiens
  misc_RNA (1)...(19): siRNA sense strand
agaagaagaaggugaagau

SEQ ID NO: 885243 - RNA, 19 nt, Homo sapiens
  misc_RNA (1)...(19): siRNA sense strand
ccaccucacucaggaauac

SEQ ID NO: 885244 - RNA, 19 nt, Homo sapiens
  misc_RNA (1)...(19): siRNA sense strand
aagcagggcuacacauuuu

SEQ ID NO: 885245 - RNA, 19 nt, Homo sapiens
  misc_RNA (1)...(19): siRNA sense strand
acgacgagcuuccaaacug

SEQ ID NO: 885246 - RNA, 19 nt, Homo sapiens
  misc_RNA (1)...(19): siRNA sense strand
guucauagccgagaugucu

SEQ ID NO: 885247 - RNA, 19 nt, Homo sapiens
  misc_RNA (1)...(19): siRNA sense strand
gcccggaggagaagaagaa

SEQ ID NO: 885248 - RNA, 19 nt, Homo sapiens
  misc_RNA (1)...(19): siRNA sense strand
cagaagggcacggagauga

SEQ ID NO: 885249 - RNA, 19 nt, Homo sapiens
  misc_RNA (1)...(19): siRNA sense strand
gccaugaucuccucugaua

SEQ ID NO: 885250 - RNA, 19 nt, Homo sapiens
  misc_RNA (1)...(19): siRNA sense strand
uaaagagccugguugguuu

SEQ ID NO: 885251 - RNA, 19 nt, Homo sapiens
  misc_RNA (1)...(19): siRNA sense strand
gaggaagaaugauuaaaug

SEQ ID NO: 885252 - RNA, 19 nt, Homo sapiens
  misc_RNA (1)...(19): siRNA sense strand
gcaaggccuucgaguguaa

SEQ ID NO: 885253 - RNA, 19 nt, Homo sapiens
  misc_RNA (1)...(19): siRNA sense strand
cagaagagcuuagggcauu

SEQ ID NO: 885254 - RNA, 19 nt, Homo sapiens
  misc_RNA (1)...(19): siRNA sense strand
cugaagagcuacaggagua

SEQ ID NO: 885255 - RNA, 19 nt, Homo sapiens
  misc_RNA (1)...(19): siRNA sense strand
guaaagagccugguugguu

SEQ ID NO: 885256 - RNA, 19 nt, Homo sapiens
  misc_RNA (1)...(19): siRNA sense strand
gggaggaaguggccaaguu

SEQ ID NO: 885257 - RNA, 19 nt, Homo sapiens
  misc_RNA (1)...(19): siRNA sense strand
ccaaguuccugucuuucua

SEQ ID NO: 885258 - RNA, 19 nt, Homo sapiens
  misc_RNA (1)...(19): siRNA sense strand
gaaugugguuguccugaau

SEQ ID NO: 885259 - RNA, 19 nt, Homo sapiens
  misc_RNA (1)...(19): siRNA sense strand
ggaccuaccacauggauga

SEQ ID NO: 885260 - RNA, 19 nt, Homo sapiens
  misc_RNA (1)...(19): siRNA sense strand
ccacaccuaugucucagaa

SEQ ID NO: 885261 - RNA, 19 nt, Homo sapiens
  misc_RNA (1)...(19): siRNA sense strand
ggagauggcccugagagaa

SEQ ID NO: 885262 - RNA, 19 nt, Homo sapiens
  misc_RNA (1)...(19): siRNA sense strand
ccacauggaugaguaugau

SEQ ID NO: 885263 - RNA, 19 nt, Homo sapiens
  misc_RNA (1)...(19): siRNA sense strand
ccaguggcaucauuaacuu

SEQ ID NO: 885264 - RNA, 19 nt, Homo sapiens
  misc_RNA (1)...(19): siRNA sense strand
acaccuaugucucagaaga

SEQ ID NO: 885265 - RNA, 19 nt, Homo sapiens
  misc_RNA (1)...(19): siRNA sense strand
caucuggguugacuugaga

SEQ ID NO: 885266 - RNA, 19 nt, Homo sapiens
  misc_RNA (1)...(19): siRNA sense strand
ggcaaggccuucgagugua

SEQ ID NO: 885267 - RNA, 19 nt, Homo sapiens
  misc_RNA (1)...(19): siRNA sense strand
ucuagaggaagaaugauua

SEQ ID NO: 885268 - RNA, 19 nt, Homo sapiens
  misc_RNA (1)...(19): siRNA sense strand
ggaagaaugauuaaauggu

SEQ ID NO: 885269 - RNA, 19 nt, Homo sapiens
  misc_RNA (1)...(19): siRNA sense strand
uggccaaguuccugucuuu

SEQ ID NO: 885270 - RNA, 19 nt, Homo sapiens
  misc_RNA (1)...(19): siRNA sense strand
ucaaaggccucauccucau

SEQ ID NO: 885271 - RNA, 19 nt, Homo sapiens
  misc_RNA (1)...(19): siRNA sense strand
cuacaggaccuaccacaug

SEQ ID NO: 885272 - RNA, 19 nt, Homo sapiens
  misc_RNA (1)...(19): siRNA sense strand
ccagaggacccaugugaug

SEQ ID NO: 885273 - RNA, 19 nt, Homo sapiens
  misc_RNA (1)...(19): siRNA sense strand
gggcaccagugagaacaaa

SEQ ID NO: 885274 - RNA, 19 nt, Homo sapiens
  misc_RNA (1)...(19): siRNA sense strand
ccuccuaccuguccucuag

SEQ ID NO: 885275 - RNA, 19 nt, Homo sapiens
  misc_RNA (1)...(19): siRNA sense strand
ucaguggcuugguccagua

SEQ ID NO: 885276 - RNA, 19 nt, Homo sapiens
  misc_RNA (1)...(19): siRNA sense strand
ggaggaaguggccaaguuc

SEQ ID NO: 885277 - RNA, 19 nt, Homo sapiens
  misc_RNA (1)...(19): siRNA sense strand
ccuaccacauggaugagua

SEQ ID NO: 885278 - RNA, 19 nt, Homo sapiens
  misc_RNA (1)...(19): siRNA sense strand
uuaaaugguucugggauuc

SEQ ID NO: 885279 - RNA, 19 nt, Homo sapiens
  misc_RNA (1)...(19): siRNA sense strand
gcaaggacuucgggauguc

SEQ ID NO: 885280 - RNA, 19 nt, Homo sapiens
  misc_RNA (1)...(19): siRNA sense strand
agaaugugguuguccugaa

SEQ ID NO: 885281 - RNA, 19 nt, Homo sapiens
  misc_RNA (1)...(19): siRNA sense strand
gagauggcccugagagaag

SEQ ID NO: 885282 - RNA, 19 nt, Homo sapiens
  misc_RNA (1)...(19): siRNA sense strand
ugagaacaaacucugcuuu

SEQ ID NO: 885283 - RNA, 19 nt, Homo sapiens
  misc_RNA (1)...(19): siRNA sense strand
cagcacgugugucucuaug

SEQ ID NO: 885284 - RNA, 19 nt, Homo sapiens
  misc_RNA (1)...(19): siRNA sense strand
gaaggucaaaggccucauc

SEQ ID NO: 885285 - RNA, 19 nt, Homo sapiens
  misc_RNA (1)...(19): siRNA sense strand
caagugaccaacgcaggua

SEQ ID NO: 885286 - RNA, 19 nt, Homo sapiens
  misc_RNA (1)...(19): siRNA sense strand
gaaccccaguggcaucauu

SEQ ID NO: 885287 - RNA, 19 nt, Homo sapiens
  misc_RNA (1)...(19): siRNA sense strand
uggcaaggccuucgagugu

SEQ ID NO: 885288 - RNA, 19 nt, Homo sapiens
  misc_RNA (1)...(19): siRNA sense strand
cuagaggaagaaugauuaa

SEQ ID NO: 885289 - RNA, 19 nt, Homo sapiens
  misc_RNA (1)...(19): siRNA sense strand
cuacaugcuguccguguuu

SEQ ID NO: 885290 - RNA, 19 nt, Homo sapiens
  misc_RNA (1)...(19): siRNA sense strand
uggccacggugcuguguga

SEQ ID NO: 885291 - RNA, 19 nt, Homo sapiens
  misc_RNA (1)...(19): siRNA sense strand
ugcaugugauuguggauga

SEQ ID NO: 885292 - RNA, 19 nt, Homo sapiens
  misc_RNA (1)...(19): siRNA sense strand
auuaaaugguucugggauu

SEQ ID NO: 885293 - RNA, 19 nt, Homo sapiens
  misc_RNA (1)...(19): siRNA sense strand
ucaaggcugcccacaccua

SEQ ID NO: 885294 - RNA, 19 nt, Homo sapiens
  misc_RNA (1)...(19): siRNA sense strand
gauuguggaugaggucuac

SEQ ID NO: 885295 - RNA, 19 nt, Homo sapiens
  misc_RNA (1)...(19): siRNA sense strand
gguggugccucgcucuucu

SEQ ID NO: 885296 - RNA, 19 nt, Homo sapiens
  misc_RNA (1)...(19): siRNA sense strand
gaagaucuggaaggagaau

SEQ ID NO: 885297 - RNA, 19 nt, Homo sapiens
  misc_RNA (1)...(19): siRNA sense strand
guaccgcaguguccuaagc

SEQ ID NO: 885298 - RNA, 19 nt, Homo sapiens
  misc_RNA (1)...(19): siRNA sense strand
caaggcugcccacaccuau

SEQ ID NO: 885299 - RNA, 19 nt, Homo sapiens
  misc_RNA (1)...(19): siRNA sense strand
ggaagaucuggaaggagaa

SEQ ID NO: 885300 - RNA, 19 nt, Homo sapiens
  misc_RNA (1)...(19): siRNA sense strand
aaucccaaguggcagaaga

SEQ ID NO: 885301 - RNA, 19 nt, Homo sapiens
  misc_RNA (1)...(19): siRNA sense strand
ccugguugguuucgcuuug

SEQ ID NO: 885302 - RNA, 19 nt, Homo sapiens
  misc_RNA (1)...(19): siRNA sense strand
gggcuggcuucuucaucug

SEQ ID NO: 885303 - RNA, 19 nt, Homo sapiens
  misc_RNA (1)...(19): siRNA sense strand
uggaugaggucuacaugcu

SEQ ID NO: 885304 - RNA, 19 nt, Homo sapiens
  misc_RNA (1)...(19): siRNA sense strand
gggcaccuuugaggaggaa

SEQ ID NO: 885305 - RNA, 19 nt, Homo sapiens
  misc_RNA (1)...(19): siRNA sense strand
caacauccggcuggccuau

SEQ ID NO: 885306 - RNA, 19 nt, Homo sapiens
  misc_RNA (1)...(19): siRNA sense strand
ucuacaugcuguccguguu

SEQ ID NO: 885307 - RNA, 19 nt, Homo sapiens
  misc_RNA (1)...(19): siRNA sense strand
acauggaugaguaugauga

SEQ ID NO: 885308 - RNA, 19 nt, Homo sapiens
  misc_RNA (1)...(19): siRNA sense strand
gggcaaccagcaaggacuu

SEQ ID NO: 885309 - RNA, 19 nt, Homo sapiens
  misc_RNA (1)...(19): siRNA sense strand
aguaugaugaggacaagaa

SEQ ID NO: 885310 - RNA, 19 nt, Homo sapiens
  misc_RNA (1)...(19): siRNA sense strand
gcaccagugagaacaaacu

SEQ ID NO: 885311 - RNA, 19 nt, Homo sapiens
  misc_RNA (1)...(19): siRNA sense strand
ggagauggauaccgacuug

SEQ ID NO: 885312 - RNA, 19 nt, Homo sapiens
  misc_RNA (1)...(19): siRNA sense strand
cagcugacauucucuauga

SEQ ID NO: 885313 - RNA, 19 nt, Homo sapiens
  misc_RNA (1)...(19): siRNA sense strand
gaagcugggugcacaaucu

SEQ ID NO: 885314 - RNA, 19 nt, Homo sapiens
  misc_RNA (1)...(19): siRNA sense strand
gaccagcagugucuugugu

SEQ ID NO: 885315 - RNA, 19 nt, Homo sapiens
  misc_RNA (1)...(19): siRNA sense strand
ccaguggccuccagguuga

SEQ ID NO: 885316 - RNA, 19 nt, Homo sapiens
  misc_RNA (1)...(19): siRNA sense strand
gauaccgacuugugaucaa

SEQ ID NO: 885317 - RNA, 19 nt, Homo sapiens
  misc_RNA (1)...(19): siRNA sense strand
uguaucaucugcacauuca

SEQ ID NO: 885318 - RNA, 19 nt, Homo sapiens
  misc_RNA (1)...(19): siRNA sense strand
gauggauaccgacuuguga

SEQ ID NO: 885319 - RNA, 19 nt, Homo sapiens
  misc_RNA (1)...(19): siRNA sense strand
gaagcccauuccucggauu

SEQ ID NO: 885320 - RNA, 19 nt, Homo sapiens
  misc_RNA (1)...(19): siRNA sense strand
gagcugcaggugugacuga

SEQ ID NO: 885321 - RNA, 19 nt, Homo sapiens
  misc_RNA (1)...(19): siRNA sense strand
ccagcagugucuuguguuc

SEQ ID NO: 885322 - RNA, 19 nt, Homo sapiens
  misc_RNA (1)...(19): siRNA sense strand
gagccucccagcugacauu

SEQ ID NO: 885323 - RNA, 19 nt, Homo sapiens
  misc_RNA (1)...(19): siRNA sense strand
ugucuuguguuccgugaug

SEQ ID NO: 885324 - RNA, 19 nt, Homo sapiens
  misc_RNA (1)...(19): siRNA sense strand
ggauaccgacuugugauca

SEQ ID NO: 885325 - RNA, 19 nt, Homo sapiens
  misc_RNA (1)...(19): siRNA sense strand
ugacugaugggaaugaagu

SEQ ID NO: 885326 - RNA, 19 nt, Homo sapiens
  misc_RNA (1)...(19): siRNA sense strand
uaucaucugcacauucaug

SEQ ID NO: 885327 - RNA, 19 nt, Homo sapiens
  misc_RNA (1)...(19): siRNA sense strand
gaggaccagcagugucuug

SEQ ID NO: 885328 - RNA, 19 nt, Homo sapiens
  misc_RNA (1)...(19): siRNA sense strand
agaagaagaccagcagcuu

SEQ ID NO: 885329 - RNA, 19 nt, Homo sapiens
  misc_RNA (1)...(19): siRNA sense strand
ccucccagcugacauucuc

SEQ ID NO: 885330 - RNA, 19 nt, Homo sapiens
  misc_RNA (1)...(19): siRNA sense strand
uggccaagcagacagcaaa

SEQ ID NO: 885331 - RNA, 19 nt, Homo sapiens
  misc_RNA (1)...(19): siRNA sense strand
ggaccagcagugucuugug

SEQ ID NO: 885332 - RNA, 19 nt, Homo sapiens
  misc_RNA (1)...(19): siRNA sense strand
ucaaggagcuccagaucaa

SEQ ID NO: 885333 - RNA, 19 nt, Homo sapiens
  misc_RNA (1)...(19): siRNA sense strand
gaaggaaacuugcaaacac

SEQ ID NO: 885334 - RNA, 19 nt, Homo sapiens
  misc_RNA (1)...(19): siRNA sense strand
cgagugcggugcagguuua

SEQ ID NO: 885335 - RNA, 19 nt, Homo sapiens
  misc_RNA (1)...(19): siRNA sense strand
gaaaggaggagauggacaa

SEQ ID NO: 885336 - RNA, 19 nt, Homo sapiens
  misc_RNA (1)...(19): siRNA sense strand
ucucagaacuggaaggaaa

SEQ ID NO: 885337 - RNA, 19 nt, Homo sapiens
  misc_RNA (1)...(19): siRNA sense strand
ggagaucgaguuccugaaa

SEQ ID NO: 885338 - RNA, 19 nt, Homo sapiens
  misc_RNA (1)...(19): siRNA sense strand
ggagguggauggaacaagu

SEQ ID NO: 885339 - RNA, 19 nt, Homo sapiens
  misc_RNA (1)...(19): siRNA sense strand
gaaguggcccagcuaauuc

SEQ ID NO: 885340 - RNA, 19 nt, Homo sapiens
  misc_RNA (1)...(19): siRNA sense strand
agucggagcuggccagaaa

SEQ ID NO: 885341 - RNA, 19 nt, Homo sapiens
  misc_RNA (1)...(19): siRNA sense strand
ccgagaagcuggugcacaa

SEQ ID NO: 885342 - RNA, 19 nt, Homo sapiens
  misc_RNA (1)...(19): siRNA sense strand
cgaaguggcccagcuaauu

SEQ ID NO: 885343 - RNA, 19 nt, Homo sapiens
  misc_RNA (1)...(19): siRNA sense strand
ccaagcgccucaucaagga

SEQ ID NO: 885344 - RNA, 19 nt, Homo sapiens
  misc_RNA (1)...(19): siRNA sense strand
caagaucucagaacuggaa

SEQ ID NO: 885345 - RNA, 19 nt, Homo sapiens
  misc_RNA (1)...(19): siRNA sense strand
caacguccaccgcaucaaa

SEQ ID NO: 885346 - RNA, 19 nt, Homo sapiens
  misc_RNA (1)...(19): siRNA sense strand
ggaaggaaacuugcaaaca

SEQ ID NO: 885347 - RNA, 19 nt, Homo sapiens
  misc_RNA (1)...(19): siRNA sense strand
gggcccaccacaagaaaua

SEQ ID NO: 885348 - RNA, 19 nt, Homo sapiens
  misc_RNA (1)...(19): siRNA sense strand
gcaggauccaggugaauga

SEQ ID NO: 885349 - RNA, 19 nt, Homo sapiens
  misc_RNA (1)...(19): siRNA sense strand
ccagcagccugaacgagaa

SEQ ID NO: 885350 - RNA, 19 nt, Homo sapiens
  misc_RNA (1)...(19): siRNA sense strand
ggacaagaucucagaacug

SEQ ID NO: 885351 - RNA, 19 nt, Homo sapiens
  misc_RNA (1)...(19): siRNA sense strand
acaaggagcgcauggagaa

SEQ ID NO: 885352 - RNA, 19 nt, Homo sapiens
  misc_RNA (1)...(19): siRNA sense strand
gggaggugcgcaagauuaa

SEQ ID NO: 885353 - RNA, 19 nt, Homo sapiens
  misc_RNA (1)...(19): siRNA sense strand
ggacauggagcccgagaag

SEQ ID NO: 885354 - RNA, 19 nt, Homo sapiens
  misc_RNA (1)...(19): siRNA sense strand
uggacaagcuccuggacaa

SEQ ID NO: 885355 - RNA, 19 nt, Homo sapiens
  misc_RNA (1)...(19): siRNA sense strand
gcagaaggagaucgaguuc

SEQ ID NO: 885356 - RNA, 19 nt, Homo sapiens
  misc_RNA (1)...(19): siRNA sense strand
uggagaagcuggguaucuu

SEQ ID NO: 885357 - RNA, 19 nt, Homo sapiens
  misc_RNA (1)...(19): siRNA sense strand
ggaaacuugcaaacacuga

SEQ ID NO: 885358 - RNA, 19 nt, Homo sapiens
  misc_RNA (1)...(19): siRNA sense strand
gagcgaaguggcccagcua

SEQ ID NO: 885359 - RNA, 19 nt, Homo sapiens
  misc_RNA (1)...(19): siRNA sense strand
gggagacucaggcgcagua

SEQ ID NO: 885360 - RNA, 19 nt, Homo sapiens
  misc_RNA (1)...(19): siRNA sense strand
ccagaaaggaggagaugga

SEQ ID NO: 885361 - RNA, 19 nt, Homo sapiens
  misc_RNA (1)...(19): siRNA sense strand
cgggaggugcgcaagauua

SEQ ID NO: 885362 - RNA, 19 nt, Homo sapiens
  misc_RNA (1)...(19): siRNA sense strand
cggugcagguuuaugauug

SEQ ID NO: 885363 - RNA, 19 nt, Homo sapiens
  misc_RNA (1)...(19): siRNA sense strand
agaagcuggugcacaaguu

SEQ ID NO: 885364 - RNA, 19 nt, Homo sapiens
  misc_RNA (1)...(19): siRNA sense strand
ucaagcaugcggucacuga

SEQ ID NO: 885365 - RNA, 19 nt, Homo sapiens
  misc_RNA (1)...(19): siRNA sense strand
ugcaaacacugaggaauuc

SEQ ID NO: 885366 - RNA, 19 nt, Homo sapiens
  misc_RNA (1)...(19): siRNA sense strand
gacaagcuccuggacaaga

SEQ ID NO: 885367 - RNA, 19 nt, Homo sapiens
  misc_RNA (1)...(19): siRNA sense strand
cuguggagcuggagaagga

SEQ ID NO: 885368 - RNA, 19 nt, Homo sapiens
  misc_RNA (1)...(19): siRNA sense strand
uguuugagcuagcggagaa

SEQ ID NO: 885369 - RNA, 19 nt, Homo sapiens
  misc_RNA (1)...(19): siRNA sense strand
ggacgugagcgccuacagu

SEQ ID NO: 885370 - RNA, 19 nt, Homo sapiens
  misc_RNA (1)...(19): siRNA sense strand
gaucaagcaugcggucacu

SEQ ID NO: 885371 - RNA, 19 nt, Homo sapiens
  misc_RNA (1)...(19): siRNA sense strand
gugcggugcagguuuauga

SEQ ID NO: 885372 - RNA, 19 nt, Homo sapiens
  misc_RNA (1)...(19): siRNA sense strand
uaauucagcagacuuugga

SEQ ID NO: 885373 - RNA, 19 nt, Homo sapiens
  misc_RNA (1)...(19): siRNA sense strand
uugcaaacacugaggaauu

SEQ ID NO: 885374 - RNA, 19 nt, Homo sapiens
  misc_RNA (1)...(19): siRNA sense strand
gagaucgaguuccugaaaa

SEQ ID NO: 885375 - RNA, 19 nt, Homo sapiens
  misc_RNA (1)...(19): siRNA sense strand
gcgcauggagaaacuggaa

SEQ ID NO: 885376 - RNA, 19 nt, Homo sapiens
  misc_RNA (1)...(19): siRNA sense strand
gaagcuggugcacaaguuc

SEQ ID NO: 885377 - RNA, 19 nt, Homo sapiens
  misc_RNA (1)...(19): siRNA sense strand
agaagcguguggagagguu

SEQ ID NO: 885378 - RNA, 19 nt, Homo sapiens
  misc_RNA (1)...(19): siRNA sense strand
guaugccacugacgaggau

SEQ ID NO: 885379 - RNA, 19 nt, Homo sapiens
  misc_RNA (1)...(19): siRNA sense strand
cugaggagguagaugaauc

SEQ ID NO: 885380 - RNA, 19 nt, Homo sapiens
  misc_RNA (1)...(19): siRNA sense strand
gaucucagaacuggaagga

SEQ ID NO: 885381 - RNA, 19 nt, Homo sapiens
  misc_RNA (1)...(19): siRNA sense strand
gagaagcuggugcacaagu

SEQ ID NO: 885382 - RNA, 19 nt, Homo sapiens
  misc_RNA (1)...(19): siRNA sense strand
cgaggagacgggagaguau

SEQ ID NO: 885383 - RNA, 19 nt, Homo sapiens
  misc_RNA (1)...(19): siRNA sense strand
gauggcagcgggagaugau

SEQ ID NO: 885384 - RNA, 19 nt, Homo sapiens
  misc_RNA (1)...(19): siRNA sense strand
uagaugaauccaagaagga

SEQ ID NO: 885385 - RNA, 19 nt, Homo sapiens
  misc_RNA (1)...(19): siRNA sense strand
acaagcuccuggacaagau

SEQ ID NO: 885386 - RNA, 19 nt, Homo sapiens
  misc_RNA (1)...(19): siRNA sense strand
ggaggaggacgacgaagac

SEQ ID NO: 885387 - RNA, 19 nt, Homo sapiens
  misc_RNA (1)...(19): siRNA sense strand
aaaguauguuccugcagau

SEQ ID NO: 885388 - RNA, 19 nt, Homo sapiens
  misc_RNA (1)...(19): siRNA sense strand
gccggaagauccauuucag

SEQ ID NO: 885389 - RNA, 19 nt, Homo sapiens
  misc_RNA (1)...(19): siRNA sense strand
ucagcgccgucuucgagaa

SEQ ID NO: 885390 - RNA, 19 nt, Homo sapiens
  misc_RNA (1)...(19): siRNA sense strand
ggccugggcaucagcauca

SEQ ID NO: 885391 - RNA, 19 nt, Homo sapiens
  misc_RNA (1)...(19): siRNA sense strand
ggugcagguuuaugauugg

SEQ ID NO: 885392 - RNA, 19 nt, Homo sapiens
  misc_RNA (1)...(19): siRNA sense strand
gcggugcagguuuaugauu

SEQ ID NO: 885393 - RNA, 19 nt, Homo sapiens
  misc_RNA (1)...(19): siRNA sense strand
agaacuggaaggaaacuug

SEQ ID NO: 885394 - RNA, 19 nt, Homo sapiens
  misc_RNA (1)...(19): siRNA sense strand
uggacaagaucucagaacu

SEQ ID NO: 885395 - RNA, 19 nt, Homo sapiens
  misc_RNA (1)...(19): siRNA sense strand
gagaugauggagcagagau

SEQ ID NO: 885396 - RNA, 19 nt, Homo sapiens
  misc_RNA (1)...(19): siRNA sense strand
caucgagguguuugagcua

SEQ ID NO: 885397 - RNA, 19 nt, Homo sapiens
  misc_RNA (1)...(19): siRNA sense strand
ucaaggacuaccagcagaa

SEQ ID NO: 885398 - RNA, 19 nt, Homo sapiens
  misc_RNA (1)...(19): siRNA sense strand
gcgaaguggcccagcuaau

SEQ ID NO: 885399 - RNA, 19 nt, Homo sapiens
  misc_RNA (1)...(19): siRNA sense strand
aggaggagauggacaagcu

SEQ ID NO: 885400 - RNA, 19 nt, Homo sapiens
  misc_RNA (1)...(19): siRNA sense strand
guucaaggagcuccagauc

SEQ ID NO: 885401 - RNA, 19 nt, Homo sapiens
  misc_RNA (1)...(19): siRNA sense strand
guucccggguggugagaug

SEQ ID NO: 885402 - RNA, 19 nt, Homo sapiens
  misc_RNA (1)...(19): siRNA sense strand
cgggagaguaugccacuga

SEQ ID NO: 885403 - RNA, 19 nt, Homo sapiens
  misc_RNA (1)...(19): siRNA sense strand
uggagagguuggagcuguu

SEQ ID NO: 885404 - RNA, 19 nt, Homo sapiens
  misc_RNA (1)...(19): siRNA sense strand
aaggaaacuugcaaacacu

SEQ ID NO: 885405 - RNA, 19 nt, Homo sapiens
  misc_RNA (1)...(19): siRNA sense strand
ggacaagcuccuggacaag

SEQ ID NO: 885406 - RNA, 19 nt, Homo sapiens
  misc_RNA (1)...(19): siRNA sense strand
agaaauauggcuccaacgu

SEQ ID NO: 885407 - RNA, 19 nt, Homo sapiens
  misc_RNA (1)...(19): siRNA sense strand
ggaacuauauuugcacuua

SEQ ID NO: 885408 - RNA, 19 nt, Homo sapiens
  misc_RNA (1)...(19): siRNA sense strand
gaacaaaccaugccaucua

SEQ ID NO: 885409 - RNA, 19 nt, Homo sapiens
  misc_RNA (1)...(19): siRNA sense strand
gaucagaaguuauggaaga

SEQ ID NO: 885410 - RNA, 19 nt, Homo sapiens
  misc_RNA (1)...(19): siRNA sense strand
gaagauauaucaccugaag

SEQ ID NO: 885411 - RNA, 19 nt, Homo sapiens
  misc_RNA (1)...(19): siRNA sense strand
gauaugcaaucccuagaua

SEQ ID NO: 885412 - RNA, 19 nt, Homo sapiens
  misc_RNA (1)...(19): siRNA sense strand
gacaugacaucccaagaua

SEQ ID NO: 885413 - RNA, 19 nt, Homo sapiens
  misc_RNA (1)...(19): siRNA sense strand
ggaagaaauugaaccuuug

SEQ ID NO: 885414 - RNA, 19 nt, Homo sapiens
  misc_RNA (1)...(19): siRNA sense strand
gcaguucccugaaauacaa

SEQ ID NO: 885415 - RNA, 19 nt, Homo sapiens
  misc_RNA (1)...(19): siRNA sense strand
agacauaccuucccaagau

SEQ ID NO: 885416 - RNA, 19 nt, Homo sapiens
  misc_RNA (1)...(19): siRNA sense strand
caacucacgucaucacuau

SEQ ID NO: 885417 - RNA, 19 nt, Homo sapiens
  misc_RNA (1)...(19): siRNA sense strand
gagaauuugugccagauga

SEQ ID NO: 885418 - RNA, 19 nt, Homo sapiens
  misc_RNA (1)...(19): siRNA sense strand
ggccagaaauccucaaaga

SEQ ID NO: 885419 - RNA, 19 nt, Homo sapiens
  misc_RNA (1)...(19): siRNA sense strand
gagaagaagcccucagaaa

SEQ ID NO: 885420 - RNA, 19 nt, Homo sapiens
  misc_RNA (1)...(19): siRNA sense strand
uauaucaccugaagacuug

SEQ ID NO: 885421 - RNA, 19 nt, Homo sapiens
  misc_RNA (1)...(19): siRNA sense strand
aaacgaaacuguauugacu

SEQ ID NO: 885422 - RNA, 19 nt, Homo sapiens
  misc_RNA (1)...(19): siRNA sense strand
gacauaccuucccaagaua

SEQ ID NO: 885423 - RNA, 19 nt, Homo sapiens
  misc_RNA (1)...(19): siRNA sense strand
cuucuaaucugacagcuaa

SEQ ID NO: 885424 - RNA, 19 nt, Homo sapiens
  misc_RNA (1)...(19): siRNA sense strand
caagauaugcuguuucaug

SEQ ID NO: 885425 - RNA, 19 nt, Homo sapiens
  misc_RNA (1)...(19): siRNA sense strand
aggaagaaauugaaccuuu

SEQ ID NO: 885426 - RNA, 19 nt, Homo sapiens
  misc_RNA (1)...(19): siRNA sense strand
caaagaggcauuccuuaga

SEQ ID NO: 885427 - RNA, 19 nt, Homo sapiens
  misc_RNA (1)...(19): siRNA sense strand
gauaugcuguuucaugaca

SEQ ID NO: 885428 - RNA, 19 nt, Homo sapiens
  misc_RNA (1)...(19): siRNA sense strand
gaaacuguauugacugcau

SEQ ID NO: 885429 - RNA, 19 nt, Homo sapiens
  misc_RNA (1)...(19): siRNA sense strand
aagauaugcuguuucauga

SEQ ID NO: 885430 - RNA, 19 nt, Homo sapiens
  misc_RNA (1)...(19): siRNA sense strand
gggauuacuuucaccauuc

SEQ ID NO: 885431 - RNA, 19 nt, Homo sapiens
  misc_RNA (1)...(19): siRNA sense strand
ccaaagccuugcaauacuu

SEQ ID NO: 885432 - RNA, 19 nt, Homo sapiens
  misc_RNA (1)...(19): siRNA sense strand
caagacacaucaucucaag

SEQ ID NO: 885433 - RNA, 19 nt, Homo sapiens
  misc_RNA (1)...(19): siRNA sense strand
caaacagucuucuaaucug

SEQ ID NO: 885434 - RNA, 19 nt, Homo sapiens
  misc_RNA (1)...(19): siRNA sense strand
cuacagacaucaagacaag

SEQ ID NO: 885435 - RNA, 19 nt, Homo sapiens
  misc_RNA (1)...(19): siRNA sense strand
gaaauacaacaccuacuuc

SEQ ID NO: 885436 - RNA, 19 nt, Homo sapiens
  misc_RNA (1)...(19): siRNA sense strand
caugccaccucaagacaua

SEQ ID NO: 885437 - RNA, 19 nt, Homo sapiens
  misc_RNA (1)...(19): siRNA sense strand
gcuaugcuuucuucaaguu

SEQ ID NO: 885438 - RNA, 19 nt, Homo sapiens
  misc_RNA (1)...(19): siRNA sense strand
caacaaaugcacaaucugu

SEQ ID NO: 885439 - RNA, 19 nt, Homo sapiens
  misc_RNA (1)...(19): siRNA sense strand
acaaaugcacaaucuguua

SEQ ID NO: 885440 - RNA, 19 nt, Homo sapiens
  misc_RNA (1)...(19): siRNA sense strand
aaaccaaagccuugcaaua

SEQ ID NO: 885441 - RNA, 19 nt, Homo sapiens
  misc_RNA (1)...(19): siRNA sense strand
caagacggcauuccuuaaa

SEQ ID NO: 885442 - RNA, 19 nt, Homo sapiens
  misc_RNA (1)...(19): siRNA sense strand
aaacagucuucuaaucuga

SEQ ID NO: 885443 - RNA, 19 nt, Homo sapiens
  misc_RNA (1)...(19): siRNA sense strand
ugcacaaucuguuaucuuu

SEQ ID NO: 885444 - RNA, 19 nt, Homo sapiens
  misc_RNA (1)...(19): siRNA sense strand
aaacuguuaugccaagauu

SEQ ID NO: 885445 - RNA, 19 nt, Homo sapiens
  misc_RNA (1)...(19): siRNA sense strand
gaaggccugucagaacaaa

SEQ ID NO: 885446 - RNA, 19 nt, Homo sapiens
  misc_RNA (1)...(19): siRNA sense strand
uguacaaccuucucaaaug

SEQ ID NO: 885447 - RNA, 19 nt, Homo sapiens
  misc_RNA (1)...(19): siRNA sense strand
gccauccuuugaagaaaua

SEQ ID NO: 885448 - RNA, 19 nt, Homo sapiens
  misc_RNA (1)...(19): siRNA sense strand
ggaacaauacccagaagga

SEQ ID NO: 885449 - RNA, 19 nt, Homo sapiens
  misc_RNA (1)...(19): siRNA sense strand
aaagaggcauuccuuagau

SEQ ID NO: 885450 - RNA, 19 nt, Homo sapiens
  misc_RNA (1)...(19): siRNA sense strand
gaggaacuccauagaagaa

SEQ ID NO: 885451 - RNA, 19 nt, Homo sapiens
  misc_RNA (1)...(19): siRNA sense strand
guacaaccuucucaaaugc

SEQ ID NO: 885452 - RNA, 19 nt, Homo sapiens
  misc_RNA (1)...(19): siRNA sense strand
gaaagugccaaaacuguua

SEQ ID NO: 885453 - RNA, 19 nt, Homo sapiens
  misc_RNA (1)...(19): siRNA sense strand
ccaaagaauggaaaucuga

SEQ ID NO: 885454 - RNA, 19 nt, Homo sapiens
  misc_RNA (1)...(19): siRNA sense strand
cacaguaaccgauaagaaa

SEQ ID NO: 885455 - RNA, 19 nt, Homo sapiens
  misc_RNA (1)...(19): siRNA sense strand
aacaaaccaugccaucuaa

SEQ ID NO: 885456 - RNA, 19 nt, Homo sapiens
  misc_RNA (1)...(19): siRNA sense strand
uagaaggccugucagaaca

SEQ ID NO: 885457 - RNA, 19 nt, Homo sapiens
  misc_RNA (1)...(19): siRNA sense strand
uuaaagaccagcagacuga

SEQ ID NO: 885458 - RNA, 19 nt, Homo sapiens
  misc_RNA (1)...(19): siRNA sense strand
ggaagagaccaaagaaugg

SEQ ID NO: 885459 - RNA, 19 nt, Homo sapiens
  misc_RNA (1)...(19): siRNA sense strand
gguaauaaagguagagaau

SEQ ID NO: 885460 - RNA, 19 nt, Homo sapiens
  misc_RNA (1)...(19): siRNA sense strand
gcaacucacgucaucacua

SEQ ID NO: 885461 - RNA, 19 nt, Homo sapiens
  misc_RNA (1)...(19): siRNA sense strand
ucacgggcaugaauguuau

SEQ ID NO: 885462 - RNA, 19 nt, Homo sapiens
  misc_RNA (1)...(19): siRNA sense strand
caaagccuugcaauacuua

SEQ ID NO: 885463 - RNA, 19 nt, Homo sapiens
  misc_RNA (1)...(19): siRNA sense strand
caaaguauccuuccaucuc

SEQ ID NO: 885464 - RNA, 19 nt, Homo sapiens
  misc_RNA (1)...(19): siRNA sense strand
uaucagcgcaugccauauu

SEQ ID NO: 885465 - RNA, 19 nt, Homo sapiens
  misc_RNA (1)...(19): siRNA sense strand
ccaaauacagcaauaccaa

SEQ ID NO: 885466 - RNA, 19 nt, Homo sapiens
  misc_RNA (1)...(19): siRNA sense strand
aagaggcacuccguagaua

SEQ ID NO: 885467 - RNA, 19 nt, Homo sapiens
  misc_RNA (1)...(19): siRNA sense strand
caaagaggcacuccguaga

SEQ ID NO: 885468 - RNA, 19 nt, Homo sapiens
  misc_RNA (1)...(19): siRNA sense strand
ugaaauacaacaccuacuu

SEQ ID NO: 885469 - RNA, 19 nt, Homo sapiens
  misc_RNA (1)...(19): siRNA sense strand
guagaacucuuuucauugu

SEQ ID NO: 885470 - RNA, 19 nt, Homo sapiens
  misc_RNA (1)...(19): siRNA sense strand
gaagaagcccucagaaaau

SEQ ID NO: 885471 - RNA, 19 nt, Homo sapiens
  misc_RNA (1)...(19): siRNA sense strand
gucaaacagucuucuaauc

SEQ ID NO: 885472 - RNA, 19 nt, Homo sapiens
  misc_RNA (1)...(19): siRNA sense strand
gaagagaccaaagaaugga

SEQ ID NO: 885473 - RNA, 19 nt, Homo sapiens
  misc_RNA (1)...(19): siRNA sense strand
caggauaccucacaguaac

SEQ ID NO: 885474 - RNA, 19 nt, Homo sapiens
  misc_RNA (1)...(19): siRNA sense strand
aagagcaacucccagauca

SEQ ID NO: 885475 - RNA, 19 nt, Homo sapiens
  misc_RNA (1)...(19): siRNA sense strand
caagcucaacuuaaucaaa

SEQ ID NO: 885476 - RNA, 19 nt, Homo sapiens
  misc_RNA (1)...(19): siRNA sense strand
ccuuccaucucccaaauuu

SEQ ID NO: 885477 - RNA, 19 nt, Homo sapiens
  misc_RNA (1)...(19): siRNA sense strand
caacaacaaaugcacaauc

SEQ ID NO: 885478 - RNA, 19 nt, Homo sapiens
  misc_RNA (1)...(19): siRNA sense strand
caguagaacucuuuucauu

SEQ ID NO: 885479 - RNA, 19 nt, Homo sapiens
  misc_RNA (1)...(19): siRNA sense strand
uggaagagaccaaagaaug

SEQ ID NO: 885480 - RNA, 19 nt, Homo sapiens
  misc_RNA (1)...(19): siRNA sense strand
caacaucccaggacagaag

SEQ ID NO: 885481 - RNA, 19 nt, Homo sapiens
  misc_RNA (1)...(19): siRNA sense strand
caaaugcacaaucuguuau

SEQ ID NO: 885482 - RNA, 19 nt, Homo sapiens
  misc_RNA (1)...(19): siRNA sense strand
uaacugggauuacuuucac

SEQ ID NO: 885483 - RNA, 19 nt, Homo sapiens
  misc_RNA (1)...(19): siRNA sense strand
caaagcagaaauccuuaga

SEQ ID NO: 885484 - RNA, 19 nt, Homo sapiens
  misc_RNA (1)...(19): siRNA sense strand
uaaggagacauucuuuaga

SEQ ID NO: 885485 - RNA, 19 nt, Homo sapiens
  misc_RNA (1)...(19): siRNA sense strand
ucaaacagucuucuaaucu

SEQ ID NO: 885486 - RNA, 19 nt, Homo sapiens
  misc_RNA (1)...(19): siRNA sense strand
auagcucucugcuggauuu

SEQ ID NO: 885487 - RNA, 19 nt, Homo sapiens
  misc_RNA (1)...(19): siRNA sense strand
guagaaggccugucagaac

SEQ ID NO: 885488 - RNA, 19 nt, Homo sapiens
  misc_RNA (1)...(19): siRNA sense strand
gcacuaaaacucgaagaua

SEQ ID NO: 885489 - RNA, 19 nt, Homo sapiens
  misc_RNA (1)...(19): siRNA sense strand
cagaaaauauguccauuca

SEQ ID NO: 885490 - RNA, 19 nt, Homo sapiens
  misc_RNA (1)...(19): siRNA sense strand
gauccugcuugcucuaauc

SEQ ID NO: 885491 - RNA, 19 nt, Homo sapiens
  misc_RNA (1)...(19): siRNA sense strand
cacaaucuguuaucuuugg

SEQ ID NO: 885492 - RNA, 19 nt, Homo sapiens
  misc_RNA (1)...(19): siRNA sense strand
caauaccaauucuggcaau

SEQ ID NO: 885493 - RNA, 19 nt, Homo sapiens
  misc_RNA (1)...(19): siRNA sense strand
cagaaggacaaucuaaaga

SEQ ID NO: 885494 - RNA, 19 nt, Homo sapiens
  misc_RNA (1)...(19): siRNA sense strand
ucaaagaggcauuccuuag

SEQ ID NO: 885495 - RNA, 19 nt, Homo sapiens
  misc_RNA (1)...(19): siRNA sense strand
uaugcuaucucaagacaca

SEQ ID NO: 885496 - RNA, 19 nt, Homo sapiens
  misc_RNA (1)...(19): siRNA sense strand
caugacaucccaagauaug

SEQ ID NO: 885497 - RNA, 19 nt, Homo sapiens
  misc_RNA (1)...(19): siRNA sense strand
ucacaguaaccgauaagaa

SEQ ID NO: 885498 - RNA, 19 nt, Homo sapiens
  misc_RNA (1)...(19): siRNA sense strand
aaucccaaauacagcaaua

SEQ ID NO: 885499 - RNA, 19 nt, Homo sapiens
  misc_RNA (1)...(19): siRNA sense strand
aaacuguauugacugcauu

SEQ ID NO: 885500 - RNA, 19 nt, Homo sapiens
  misc_RNA (1)...(19): siRNA sense strand
gagaagaaauccccgaaag

SEQ ID NO: 885501 - RNA, 19 nt, Homo sapiens
  misc_RNA (1)...(19): siRNA sense strand
ucaagacggcauuccuuaa

SEQ ID NO: 885502 - RNA, 19 nt, Homo sapiens
  misc_RNA (1)...(19): siRNA sense strand
caucccauauugugcaguu

SEQ ID NO: 885503 - RNA, 19 nt, Homo sapiens
  misc_RNA (1)...(19): siRNA sense strand
ugacaugacaucccaagau

SEQ ID NO: 885504 - RNA, 19 nt, Homo sapiens
  misc_RNA (1)...(19): siRNA sense strand
cucaagauaugcuguuuca

SEQ ID NO: 885505 - RNA, 19 nt, Homo sapiens
  misc_RNA (1)...(19): siRNA sense strand
acagacaucaagacaagua

SEQ ID NO: 885506 - RNA, 19 nt, Homo sapiens
  misc_RNA (1)...(19): siRNA sense strand
aagcucagguggagaaagu

SEQ ID NO: 885507 - RNA, 19 nt, Homo sapiens
  misc_RNA (1)...(19): siRNA sense strand
gcagaaagguggagaccaa

SEQ ID NO: 885508 - RNA, 19 nt, Homo sapiens
  misc_RNA (1)...(19): siRNA sense strand
gaagaggauucucccauug

SEQ ID NO: 885509 - RNA, 19 nt, Homo sapiens
  misc_RNA (1)...(19): siRNA sense strand
gaauucaaccuguuucuug

SEQ ID NO: 885510 - RNA, 19 nt, Homo sapiens
  misc_RNA (1)...(19): siRNA sense strand
gaagcccugucucagauuu

SEQ ID NO: 885511 - RNA, 19 nt, Homo sapiens
  misc_RNA (1)...(19): siRNA sense strand
ggagagacgucuacaaagc

SEQ ID NO: 885512 - RNA, 19 nt, Homo sapiens
  misc_RNA (1)...(19): siRNA sense strand
ccagguaugugaccacuau

SEQ ID NO: 885513 - RNA, 19 nt, Homo sapiens
  misc_RNA (1)...(19): siRNA sense strand
ugaagaggauucucccauu

SEQ ID NO: 885514 - RNA, 19 nt, Homo sapiens
  misc_RNA (1)...(19): siRNA sense strand
gaaguuaguacagaagaaa

SEQ ID NO: 885515 - RNA, 19 nt, Homo sapiens
  misc_RNA (1)...(19): siRNA sense strand
agaaagacuuggaggaaau

SEQ ID NO: 885516 - RNA, 19 nt, Homo sapiens
  misc_RNA (1)...(19): siRNA sense strand
gaagacagcaucccuugca

SEQ ID NO: 885517 - RNA, 19 nt, Homo sapiens
  misc_RNA (1)...(19): siRNA sense strand
gaacagcucagggaaagau

SEQ ID NO: 885518 - RNA, 19 nt, Homo sapiens
  misc_RNA (1)...(19): siRNA sense strand
uagaaagacuuggaggaaa

SEQ ID NO: 885519 - RNA, 19 nt, Homo sapiens
  misc_RNA (1)...(19): siRNA sense strand
cucaggagauucgaaguua

SEQ ID NO: 885520 - RNA, 19 nt, Homo sapiens
  misc_RNA (1)...(19): siRNA sense strand
uggaggaaaucaaagaaga

SEQ ID NO: 885521 - RNA, 19 nt, Homo sapiens
  misc_RNA (1)...(19): siRNA sense strand
gaaagguggagaccaacaa

SEQ ID NO: 885522 - RNA, 19 nt, Homo sapiens
  misc_RNA (1)...(19): siRNA sense strand
gugaagcccugucucagau

SEQ ID NO: 885523 - RNA, 19 nt, Homo sapiens
  misc_RNA (1)...(19): siRNA sense strand
gaaaucaaagaagacagua

SEQ ID NO: 885524 - RNA, 19 nt, Homo sapiens
  misc_RNA (1)...(19): siRNA sense strand
ggaaaucaaagaagacagu

SEQ ID NO: 885525 - RNA, 19 nt, Homo sapiens
  misc_RNA (1)...(19): siRNA sense strand
cgaaguuaguacagaagaa

SEQ ID NO: 885526 - RNA, 19 nt, Homo sapiens
  misc_RNA (1)...(19): siRNA sense strand
cagcagaaccaguugaguu

SEQ ID NO: 885527 - RNA, 19 nt, Homo sapiens
  misc_RNA (1)...(19): siRNA sense strand
caagaacagcucagggaaa

SEQ ID NO: 885528 - RNA, 19 nt, Homo sapiens
  misc_RNA (1)...(19): siRNA sense strand
cagaaccaguugaguuuca

SEQ ID NO: 885529 - RNA, 19 nt, Homo sapiens
  misc_RNA (1)...(19): siRNA sense strand
caccaaagacccuaggauu

SEQ ID NO: 885530 - RNA, 19 nt, Homo sapiens
  misc_RNA (1)...(19): siRNA sense strand
ccacauagaaagacuugga

SEQ ID NO: 885531 - RNA, 19 nt, Homo sapiens
  misc_RNA (1)...(19): siRNA sense strand
guacggagagugggaaaga

SEQ ID NO: 885532 - RNA, 19 nt, Homo sapiens
  misc_RNA (1)...(19): siRNA sense strand
gggcagaaccagacaugga

SEQ ID NO: 885533 - RNA, 19 nt, Homo sapiens
  misc_RNA (1)...(19): siRNA sense strand
ggaauuggagagacgucua

SEQ ID NO: 885534 - RNA, 19 nt, Homo sapiens
  misc_RNA (1)...(19): siRNA sense strand
gauccgacugguucaaauu

SEQ ID NO: 885535 - RNA, 19 nt, Homo sapiens
  misc_RNA (1)...(19): siRNA sense strand
ggauccgacugguucaaau

SEQ ID NO: 885536 - RNA, 19 nt, Homo sapiens
  misc_RNA (1)...(19): siRNA sense strand
gaaccagacauggaacaga

SEQ ID NO: 885537 - RNA, 19 nt, Homo sapiens
  misc_RNA (1)...(19): siRNA sense strand
ccaaagacccuaggauucu

SEQ ID NO: 885538 - RNA, 19 nt, Homo sapiens
  misc_RNA (1)...(19): siRNA sense strand
gucacaagauccuauccaa

SEQ ID NO: 885539 - RNA, 19 nt, Homo sapiens
  misc_RNA (1)...(19): siRNA sense strand
agacuuggaggaaaucaaa

SEQ ID NO: 885540 - RNA, 19 nt, Homo sapiens
  misc_RNA (1)...(19): siRNA sense strand
aagaacagcucagggaaag

SEQ ID NO: 885541 - RNA, 19 nt, Homo sapiens
  misc_RNA (1)...(19): siRNA sense strand
gcaacuucauccaggucaa

SEQ ID NO: 885542 - RNA, 19 nt, Homo sapiens
  misc_RNA (1)...(19): siRNA sense strand
gauucgaaguuaguacaga

SEQ ID NO: 885543 - RNA, 19 nt, Homo sapiens
  misc_RNA (1)...(19): siRNA sense strand
ggcagaaccagacauggaa

SEQ ID NO: 885544 - RNA, 19 nt, Homo sapiens
  misc_RNA (1)...(19): siRNA sense strand
ugucaucauuuccacauag

SEQ ID NO: 885545 - RNA, 19 nt, Homo sapiens
  misc_RNA (1)...(19): siRNA sense strand
ggagggcuucauucacgua

SEQ ID NO: 885546 - RNA, 19 nt, Homo sapiens
  misc_RNA (1)...(19): siRNA sense strand
gagauucgaaguuaguaca

SEQ ID NO: 885547 - RNA, 19 nt, Homo sapiens
  misc_RNA (1)...(19): siRNA sense strand
caacuucauccaggucaaa

SEQ ID NO: 885548 - RNA, 19 nt, Homo sapiens
  misc_RNA (1)...(19): siRNA sense strand
acucauggccagugucaaa

SEQ ID NO: 885549 - RNA, 19 nt, Homo sapiens
  misc_RNA (1)...(19): siRNA sense strand
gaaagacuuggaggaaauc

SEQ ID NO: 885550 - RNA, 19 nt, Homo sapiens
  misc_RNA (1)...(19): siRNA sense strand
gacccuaggauucuuguca

SEQ ID NO: 885551 - RNA, 19 nt, Homo sapiens
  misc_RNA (1)...(19): siRNA sense strand
uuggagagacgucuacaaa

SEQ ID NO: 885552 - RNA, 19 nt, Homo sapiens
  misc_RNA (1)...(19): siRNA sense strand
aaccuucccuucccugaau

SEQ ID NO: 885553 - RNA, 19 nt, Homo sapiens
  misc_RNA (1)...(19): siRNA sense strand
agagacgucuacaaagcuu

SEQ ID NO: 885554 - RNA, 19 nt, Homo sapiens
  misc_RNA (1)...(19): siRNA sense strand
caaagaagacaguaaaagu

SEQ ID NO: 885555 - RNA, 19 nt, Homo sapiens
  misc_RNA (1)...(19): siRNA sense strand
ggagagugggaaagagaga

SEQ ID NO: 885556 - RNA, 19 nt, Homo sapiens
  misc_RNA (1)...(19): siRNA sense strand
gucaucauuuccacauaga

SEQ ID NO: 885557 - RNA, 19 nt, Homo sapiens
  misc_RNA (1)...(19): siRNA sense strand
cugagaagauuuauuaccu

SEQ ID NO: 885558 - RNA, 19 nt, Homo sapiens
  misc_RNA (1)...(19): siRNA sense strand
caaaaggggcuguccauca

SEQ ID NO: 885559 - RNA, 19 nt, Homo sapiens
  misc_RNA (1)...(19): siRNA sense strand
gaggaaaucaaagaagaca

SEQ ID NO: 885560 - RNA, 19 nt, Homo sapiens
  misc_RNA (1)...(19): siRNA sense strand
cugaaugccugggaagaau

SEQ ID NO: 885561 - RNA, 19 nt, Homo sapiens
  misc_RNA (1)...(19): siRNA sense strand
gguaugugaccacuaucaa

SEQ ID NO: 885562 - RNA, 19 nt, Homo sapiens
  misc_RNA (1)...(19): siRNA sense strand
aagaggauucucccauuga

SEQ ID NO: 885563 - RNA, 19 nt, Homo sapiens
  misc_RNA (1)...(19): siRNA sense strand
ccacccauaggaaauucua

SEQ ID NO: 885564 - RNA, 19 nt, Homo sapiens
  misc_RNA (1)...(19): siRNA sense strand
auagaaagacuuggaggaa

SEQ ID NO: 885565 - RNA, 19 nt, Homo sapiens
  misc_RNA (1)...(19): siRNA sense strand
ucaggagauucgaaguuag

SEQ ID NO: 885566 - RNA, 19 nt, Homo sapiens
  misc_RNA (1)...(19): siRNA sense strand
caaccuucccuucccugaa

SEQ ID NO: 885567 - RNA, 19 nt, Homo sapiens
  misc_RNA (1)...(19): siRNA sense strand
ccucaggagauucgaaguu

SEQ ID NO: 885568 - RNA, 19 nt, Homo sapiens
  misc_RNA (1)...(19): siRNA sense strand
agcagaaccaguugaguuu

SEQ ID NO: 885569 - RNA, 19 nt, Homo sapiens
  misc_RNA (1)...(19): siRNA sense strand
auucgaaguuaguacagaa

SEQ ID NO: 885570 - RNA, 19 nt, Homo sapiens
  misc_RNA (1)...(19): siRNA sense strand
gaauuggagagacgucuac

SEQ ID NO: 885571 - RNA, 19 nt, Homo sapiens
  misc_RNA (1)...(19): siRNA sense strand
caagauccuauccaaccuu

SEQ ID NO: 885572 - RNA, 19 nt, Homo sapiens
  misc_RNA (1)...(19): siRNA sense strand
gcagaaccaguugaguuuc

SEQ ID NO: 885573 - RNA, 19 nt, Homo sapiens
  misc_RNA (1)...(19): siRNA sense strand
ccucuugccuguggaugga

SEQ ID NO: 885574 - RNA, 19 nt, Homo sapiens
  misc_RNA (1)...(19): siRNA sense strand
gagagacgucuacaaagcu

SEQ ID NO: 885575 - RNA, 19 nt, Homo sapiens
  misc_RNA (1)...(19): siRNA sense strand
cauggccagugucaaaugg

SEQ ID NO: 885576 - RNA, 19 nt, Homo sapiens
  misc_RNA (1)...(19): siRNA sense strand
agagugaagcccugucuca

SEQ ID NO: 885577 - RNA, 19 nt, Homo sapiens
  misc_RNA (1)...(19): siRNA sense strand
ggagagugaagcccugucu

SEQ ID NO: 885578 - RNA, 19 nt, Homo sapiens
  misc_RNA (1)...(19): siRNA sense strand
cuccagaauucaaccuguu

SEQ ID NO: 885579 - RNA, 19 nt, Homo sapiens
  misc_RNA (1)...(19): siRNA sense strand
ugaaugccugggaagaauu

SEQ ID NO: 885580 - RNA, 19 nt, Homo sapiens
  misc_RNA (1)...(19): siRNA sense strand
ggaggaaaucaaagaagac

SEQ ID NO: 885581 - RNA, 19 nt, Homo sapiens
  misc_RNA (1)...(19): siRNA sense strand
caggagauucgaaguuagu

SEQ ID NO: 885582 - RNA, 19 nt, Homo sapiens
  misc_RNA (1)...(19): siRNA sense strand
gaaagaaucucuccacuuc

SEQ ID NO: 885583 - RNA, 19 nt, Homo sapiens
  misc_RNA (1)...(19): siRNA sense strand
gcacagaacaucaauggua

SEQ ID NO: 885584 - RNA, 19 nt, Homo sapiens
  misc_RNA (1)...(19): siRNA sense strand
ggaaguaggauucaugaua

SEQ ID NO: 885585 - RNA, 19 nt, Homo sapiens
  misc_RNA (1)...(19): siRNA sense strand
gaacaucaaugguaagaca

SEQ ID NO: 885586 - RNA, 19 nt, Homo sapiens
  misc_RNA (1)...(19): siRNA sense strand
gaaguaggauucaugauag

SEQ ID NO: 885587 - RNA, 19 nt, Homo sapiens
  misc_RNA (1)...(19): siRNA sense strand
ucacagaucuucauaguca

SEQ ID NO: 885588 - RNA, 19 nt, Homo sapiens
  misc_RNA (1)...(19): siRNA sense strand
cacaagagcuguuccauuc

SEQ ID NO: 885589 - RNA, 19 nt, Homo sapiens
  misc_RNA (1)...(19): siRNA sense strand
gaauccagaucuugacuug

SEQ ID NO: 885590 - RNA, 19 nt, Homo sapiens
  misc_RNA (1)...(19): siRNA sense strand
gaaguucacucccacucaa

SEQ ID NO: 885591 - RNA, 19 nt, Homo sapiens
  misc_RNA (1)...(19): siRNA sense strand
ugaggacacuuuauaagaa

SEQ ID NO: 885592 - RNA, 19 nt, Homo sapiens
  misc_RNA (1)...(19): siRNA sense strand
gaggacacuuuauaagaaa

SEQ ID NO: 885593 - RNA, 19 nt, Homo sapiens
  misc_RNA (1)...(19): siRNA sense strand
gcacagcauugcagccauu

SEQ ID NO: 885594 - RNA, 19 nt, Homo sapiens
  misc_RNA (1)...(19): siRNA sense strand
ggacagcaaucagaccauu

SEQ ID NO: 885595 - RNA, 19 nt, Homo sapiens
  misc_RNA (1)...(19): siRNA sense strand
gagcagcaaagaauagaua

SEQ ID NO: 885596 - RNA, 19 nt, Homo sapiens
  misc_RNA (1)...(19): siRNA sense strand
cagcaagucauucgaguua

SEQ ID NO: 885597 - RNA, 19 nt, Homo sapiens
  misc_RNA (1)...(19): siRNA sense strand
gcccagcaguguaugauuu

SEQ ID NO: 885598 - RNA, 19 nt, Homo sapiens
  misc_RNA (1)...(19): siRNA sense strand
gccaauauauucucuaugg

SEQ ID NO: 885599 - RNA, 19 nt, Homo sapiens
  misc_RNA (1)...(19): siRNA sense strand
gcaagucauucgaguuaau

SEQ ID NO: 885600 - RNA, 19 nt, Homo sapiens
  misc_RNA (1)...(19): siRNA sense strand
gagcagaagaggauccaua

SEQ ID NO: 885601 - RNA, 19 nt, Homo sapiens
  misc_RNA (1)...(19): siRNA sense strand
gaugucugcugcguacuua

SEQ ID NO: 885602 - RNA, 19 nt, Homo sapiens
  misc_RNA (1)...(19): siRNA sense strand
gaaggcagcaugagagaga

SEQ ID NO: 885603 - RNA, 19 nt, Homo sapiens
  misc_RNA (1)...(19): siRNA sense strand
caacuacggcuccuagaaa

SEQ ID NO: 885604 - RNA, 19 nt, Homo sapiens
  misc_RNA (1)...(19): siRNA sense strand
gcugcguacuuaugucuua

SEQ ID NO: 885605 - RNA, 19 nt, Homo sapiens
  misc_RNA (1)...(19): siRNA sense strand
caugauaggccaauauauu

SEQ ID NO: 885606 - RNA, 19 nt, Homo sapiens
  misc_RNA (1)...(19): siRNA sense strand
cacagaacaucaaugguaa

SEQ ID NO: 885607 - RNA, 19 nt, Homo sapiens
  misc_RNA (1)...(19): siRNA sense strand
uagaaacuguccauccuuu

SEQ ID NO: 885608 - RNA, 19 nt, Homo sapiens
  misc_RNA (1)...(19): siRNA sense strand
gcggacagcuccauguuca

SEQ ID NO: 885609 - RNA, 19 nt, Homo sapiens
  misc_RNA (1)...(19): siRNA sense strand
gaugaugcauucccuaucu

SEQ ID NO: 885610 - RNA, 19 nt, Homo sapiens
  misc_RNA (1)...(19): siRNA sense strand
uaaagucccucugaaagga

SEQ ID NO: 885611 - RNA, 19 nt, Homo sapiens
  misc_RNA (1)...(19): siRNA sense strand
gaugaacagucagcauuug

SEQ ID NO: 885612 - RNA, 19 nt, Homo sapiens
  misc_RNA (1)...(19): siRNA sense strand
gaggaugucugggaugaug

SEQ ID NO: 885613 - RNA, 19 nt, Homo sapiens
  misc_RNA (1)...(19): siRNA sense strand
ggacuggucugagaaggau

SEQ ID NO: 885614 - RNA, 19 nt, Homo sapiens
  misc_RNA (1)...(19): siRNA sense strand
gcagccagguugcaacaau

SEQ ID NO: 885615 - RNA, 19 nt, Homo sapiens
  misc_RNA (1)...(19): siRNA sense strand
agaagaggauccauaaagu

SEQ ID NO: 885616 - RNA, 19 nt, Homo sapiens
  misc_RNA (1)...(19): siRNA sense strand
cagccagguugcaacaaua

SEQ ID NO: 885617 - RNA, 19 nt, Homo sapiens
  misc_RNA (1)...(19): siRNA sense strand
ggaggagcagcaaagaaua

SEQ ID NO: 885618 - RNA, 19 nt, Homo sapiens
  misc_RNA (1)...(19): siRNA sense strand
ucauuuggccugcagaaua

SEQ ID NO: 885619 - RNA, 19 nt, Homo sapiens
  misc_RNA (1)...(19): siRNA sense strand
aagaaucucuccacuucaa

SEQ ID NO: 885620 - RNA, 19 nt, Homo sapiens
  misc_RNA (1)...(19): siRNA sense strand
gaauagcuccugcuuggau

SEQ ID NO: 885621 - RNA, 19 nt, Homo sapiens
  misc_RNA (1)...(19): siRNA sense strand
gaucauggaacuaucacaa

SEQ ID NO: 885622 - RNA, 19 nt, Homo sapiens
  misc_RNA (1)...(19): siRNA sense strand
caagagcuguuccauucug

SEQ ID NO: 885623 - RNA, 19 nt, Homo sapiens
  misc_RNA (1)...(19): siRNA sense strand
gaguuaaugugccaaaguc

SEQ ID NO: 885624 - RNA, 19 nt, Homo sapiens
  misc_RNA (1)...(19): siRNA sense strand
ucauggaacuaucacaaga

SEQ ID NO: 885625 - RNA, 19 nt, Homo sapiens
  misc_RNA (1)...(19): siRNA sense strand
cauagucacugcagagaca

SEQ ID NO: 885626 - RNA, 19 nt, Homo sapiens
  misc_RNA (1)...(19): siRNA sense strand
guauguauguuuguguuga

SEQ ID NO: 885627 - RNA, 19 nt, Homo sapiens
  misc_RNA (1)...(19): siRNA sense strand
gagauuauuuauggagaga

SEQ ID NO: 885628 - RNA, 19 nt, Homo sapiens
  misc_RNA (1)...(19): siRNA sense strand
gaagaggauccauaaaguc

SEQ ID NO: 885629 - RNA, 19 nt, Homo sapiens
  misc_RNA (1)...(19): siRNA sense strand
gugagggcauugaggauga

SEQ ID NO: 885630 - RNA, 19 nt, Homo sapiens
  misc_RNA (1)...(19): siRNA sense strand
ccauaaagucccucugaaa

SEQ ID NO: 885631 - RNA, 19 nt, Homo sapiens
  misc_RNA (1)...(19): siRNA sense strand
aaucagaccauuccucauu

SEQ ID NO: 885632 - RNA, 19 nt, Homo sapiens
  misc_RNA (1)...(19): siRNA sense strand
cauucuggaugcuuucuuu

SEQ ID NO: 885633 - RNA, 19 nt, Homo sapiens
  misc_RNA (1)...(19): siRNA sense strand
ucucaguccuggcuaggua

SEQ ID NO: 885634 - RNA, 19 nt, Homo sapiens
  misc_RNA (1)...(19): siRNA sense strand
cagaagaggauccauaaag

SEQ ID NO: 885635 - RNA, 19 nt, Homo sapiens
  misc_RNA (1)...(19): siRNA sense strand
ugaaacaggcccuccauuc

SEQ ID NO: 885636 - RNA, 19 nt, Homo sapiens
  misc_RNA (1)...(19): siRNA sense strand
gccauuuccuuguuacuca

SEQ ID NO: 885637 - RNA, 19 nt, Homo sapiens
  misc_RNA (1)...(19): siRNA sense strand
gcagaagaggauccauaaa

SEQ ID NO: 885638 - RNA, 19 nt, Homo sapiens
  misc_RNA (1)...(19): siRNA sense strand
ucucacagaucuucauagu

SEQ ID NO: 885639 - RNA, 19 nt, Homo sapiens
  misc_RNA (1)...(19): siRNA sense strand
ucucuccacuucaagcuaa

SEQ ID NO: 885640 - RNA, 19 nt, Homo sapiens
  misc_RNA (1)...(19): siRNA sense strand
gaagacaauuuucaugcuu

SEQ ID NO: 885641 - RNA, 19 nt, Homo sapiens
  misc_RNA (1)...(19): siRNA sense strand
ucacaagagcuguuccauu

SEQ ID NO: 885642 - RNA, 19 nt, Homo sapiens
  misc_RNA (1)...(19): siRNA sense strand
uuaaugugccaaagucuaa

SEQ ID NO: 885643 - RNA, 19 nt, Homo sapiens
  misc_RNA (1)...(19): siRNA sense strand
ugacagagaggcagaugga

SEQ ID NO: 885644 - RNA, 19 nt, Homo sapiens
  misc_RNA (1)...(19): siRNA sense strand
cuuauuggguggcauccua

SEQ ID NO: 885645 - RNA, 19 nt, Homo sapiens
  misc_RNA (1)...(19): siRNA sense strand
uugaucagguucuggguuu

SEQ ID NO: 885646 - RNA, 19 nt, Homo sapiens
  misc_RNA (1)...(19): siRNA sense strand
ucagaccauuccucauuug

SEQ ID NO: 885647 - RNA, 19 nt, Homo sapiens
  misc_RNA (1)...(19): siRNA sense strand
gcgguggauugcuuuguau

SEQ ID NO: 885648 - RNA, 19 nt, Homo sapiens
  misc_RNA (1)...(19): siRNA sense strand
cauaaagucccucugaaag

SEQ ID NO: 885649 - RNA, 19 nt, Homo sapiens
  misc_RNA (1)...(19): siRNA sense strand
gaaagacaggcagaggaaa

SEQ ID NO: 885650 - RNA, 19 nt, Homo sapiens
  misc_RNA (1)...(19): siRNA sense strand
gaaacaggcccuccauucc

SEQ ID NO: 885651 - RNA, 19 nt, Homo sapiens
  misc_RNA (1)...(19): siRNA sense strand
ggguguguauguauguuug

SEQ ID NO: 885652 - RNA, 19 nt, Homo sapiens
  misc_RNA (1)...(19): siRNA sense strand
ugaaagaaucucuccacuu

SEQ ID NO: 885653 - RNA, 19 nt, Homo sapiens
  misc_RNA (1)...(19): siRNA sense strand
ggcccuccauuccauuuga

SEQ ID NO: 885654 - RNA, 19 nt, Homo sapiens
  misc_RNA (1)...(19): siRNA sense strand
guauguuuguguugacaga

SEQ ID NO: 885655 - RNA, 19 nt, Homo sapiens
  misc_RNA (1)...(19): siRNA sense strand
ggaaguucacucccacuca

SEQ ID NO: 885656 - RNA, 19 nt, Homo sapiens
  misc_RNA (1)...(19): siRNA sense strand
gggcacagaacaucaaugg

SEQ ID NO: 885657 - RNA, 19 nt, Homo sapiens
  misc_RNA (1)...(19): siRNA sense strand
ggacagcuccauguucaca

SEQ ID NO: 885658 - RNA, 19 nt, Homo sapiens
  misc_RNA (1)...(19): siRNA sense strand
agaaagacaggcagaggaa

SEQ ID NO: 885659 - RNA, 19 nt, Homo sapiens
  misc_RNA (1)...(19): siRNA sense strand
cauuuggccugcagaauac

SEQ ID NO: 885660 - RNA, 19 nt, Homo sapiens
  misc_RNA (1)...(19): siRNA sense strand
ccacugagaagacaauuuu

SEQ ID NO: 885661 - RNA, 19 nt, Homo sapiens
  misc_RNA (1)...(19): siRNA sense strand
aagaauagauagggaacug

SEQ ID NO: 885662 - RNA, 19 nt, Homo sapiens
  misc_RNA (1)...(19): siRNA sense strand
gaggagcagcaaagaauag

SEQ ID NO: 885663 - RNA, 19 nt, Homo sapiens
  misc_RNA (1)...(19): siRNA sense strand
gagcccagauggagaaucc

SEQ ID NO: 885664 - RNA, 19 nt, Homo sapiens
  misc_RNA (1)...(19): siRNA sense strand
guuaaugugccaaagucua

SEQ ID NO: 885665 - RNA, 19 nt, Homo sapiens
  misc_RNA (1)...(19): siRNA sense strand
guguauguauguuuguguu

SEQ ID NO: 885666 - RNA, 19 nt, Homo sapiens
  misc_RNA (1)...(19): siRNA sense strand
gaaacuguccauccuuugc

SEQ ID NO: 885667 - RNA, 19 nt, Homo sapiens
  misc_RNA (1)...(19): siRNA sense strand
gaucaucuuugugucuucu

SEQ ID NO: 885668 - RNA, 19 nt, Homo sapiens
  misc_RNA (1)...(19): siRNA sense strand
ucaggaagcucugguucuc

SEQ ID NO: 885669 - RNA, 19 nt, Homo sapiens
  misc_RNA (1)...(19): siRNA sense strand
ugaugaacagucagcauuu

SEQ ID NO: 885670 - RNA, 19 nt, Homo sapiens
  misc_RNA (1)...(19): siRNA sense strand
ugaccauccucuucaucuu

SEQ ID NO: 885671 - RNA, 19 nt, Homo sapiens
  misc_RNA (1)...(19): siRNA sense strand
ugcgguggauugcuuugua

SEQ ID NO: 885672 - RNA, 19 nt, Homo sapiens
  misc_RNA (1)...(19): siRNA sense strand
cauucgauacauucaguua

SEQ ID NO: 885673 - RNA, 19 nt, Homo sapiens
  misc_RNA (1)...(19): siRNA sense strand
cagaauacaaugucucagu

SEQ ID NO: 885674 - RNA, 19 nt, Homo sapiens
  misc_RNA (1)...(19): siRNA sense strand
guuacucaauauacuggaa

SEQ ID NO: 885675 - RNA, 19 nt, Homo sapiens
  misc_RNA (1)...(19): siRNA sense strand
auagggaacugaggagguu

SEQ ID NO: 885676 - RNA, 19 nt, Homo sapiens
  misc_RNA (1)...(19): siRNA sense strand
gaccauccucuucaucuuc

SEQ ID NO: 885677 - RNA, 19 nt, Homo sapiens
  misc_RNA (1)...(19): siRNA sense strand
ccucaccucugccuucagu

SEQ ID NO: 885678 - RNA, 19 nt, Homo sapiens
  misc_RNA (1)...(19): siRNA sense strand
agcgacaucugcacaguga

SEQ ID NO: 885679 - RNA, 19 nt, Homo sapiens
  misc_RNA (1)...(19): siRNA sense strand
caaucaacagcaagucauu

SEQ ID NO: 885680 - RNA, 19 nt, Homo sapiens
  misc_RNA (1)...(19): siRNA sense strand
ucacucccacucaaccaua

SEQ ID NO: 885681 - RNA, 19 nt, Homo sapiens
  misc_RNA (1)...(19): siRNA sense strand
uagaggagcagaagaggau

SEQ ID NO: 885682 - RNA, 19 nt, Homo sapiens
  misc_RNA (1)...(19): siRNA sense strand
gaacaaaugugcuuccuuu

SEQ ID NO: 885683 - RNA, 19 nt, Homo sapiens
  misc_RNA (1)...(19): siRNA sense strand
gaugacaccucuucgauuu

SEQ ID NO: 885684 - RNA, 19 nt, Homo sapiens
  misc_RNA (1)...(19): siRNA sense strand
gaucauauccuuccagauu

SEQ ID NO: 885685 - RNA, 19 nt, Homo sapiens
  misc_RNA (1)...(19): siRNA sense strand
gaagcauucucaaguaauu

SEQ ID NO: 885686 - RNA, 19 nt, Homo sapiens
  misc_RNA (1)...(19): siRNA sense strand
ggaaggaaauggacuuuua

SEQ ID NO: 885687 - RNA, 19 nt, Homo sapiens
  misc_RNA (1)...(19): siRNA sense strand
gaaaucauauguucgaaag

SEQ ID NO: 885688 - RNA, 19 nt, Homo sapiens
  misc_RNA (1)...(19): siRNA sense strand
caaaucauccuuucuagaa

SEQ ID NO: 885689 - RNA, 19 nt, Homo sapiens
  misc_RNA (1)...(19): siRNA sense strand
ccagaaagcaucaaagaaa

SEQ ID NO: 885690 - RNA, 19 nt, Homo sapiens
  misc_RNA (1)...(19): siRNA sense strand
gcaauggcaagguugauua

SEQ ID NO: 885691 - RNA, 19 nt, Homo sapiens
  misc_RNA (1)...(19): siRNA sense strand
gaauucaaacgugguauua

SEQ ID NO: 885692 - RNA, 19 nt, Homo sapiens
  misc_RNA (1)...(19): siRNA sense strand
accaaucccuuacaauuua

SEQ ID NO: 885693 - RNA, 19 nt, Homo sapiens
  misc_RNA (1)...(19): siRNA sense strand
ggaaauggacuuuuagaua

SEQ ID NO: 885694 - RNA, 19 nt, Homo sapiens
  misc_RNA (1)...(19): siRNA sense strand
gaugaagacuuuguuaaca

SEQ ID NO: 885695 - RNA, 19 nt, Homo sapiens
  misc_RNA (1)...(19): siRNA sense strand
cagcaagucugaugaagug

SEQ ID NO: 885696 - RNA, 19 nt, Homo sapiens
  misc_RNA (1)...(19): siRNA sense strand
gaacacuacaugaaacaaa

SEQ ID NO: 885697 - RNA, 19 nt, Homo sapiens
  misc_RNA (1)...(19): siRNA sense strand
gcagugugccuauuauaaa

SEQ ID NO: 885698 - RNA, 19 nt, Homo sapiens
  misc_RNA (1)...(19): siRNA sense strand
gaccaaucccuuacaauuu

SEQ ID NO: 885699 - RNA, 19 nt, Homo sapiens
  misc_RNA (1)...(19): siRNA sense strand
ucaaagcaauucaagaugu

SEQ ID NO: 885700 - RNA, 19 nt, Homo sapiens
  misc_RNA (1)...(19): siRNA sense strand
gaagauuacuaugaagguu

SEQ ID NO: 885701 - RNA, 19 nt, Homo sapiens
  misc_RNA (1)...(19): siRNA sense strand
ggaacaggaggaugauaua

SEQ ID NO: 885702 - RNA, 19 nt, Homo sapiens
  misc_RNA (1)...(19): siRNA sense strand
uaaaagagguguucguauu

SEQ ID NO: 885703 - RNA, 19 nt, Homo sapiens
  misc_RNA (1)...(19): siRNA sense strand
gaacaggaggaugauauaa

SEQ ID NO: 885704 - RNA, 19 nt, Homo sapiens
  misc_RNA (1)...(19): siRNA sense strand
caagguugauuauggagaa

SEQ ID NO: 885705 - RNA, 19 nt, Homo sapiens
  misc_RNA (1)...(19): siRNA sense strand
gguaggaucguaucacgua

SEQ ID NO: 885706 - RNA, 19 nt, Homo sapiens
  misc_RNA (1)...(19): siRNA sense strand
guauaggaauaguagauga

SEQ ID NO: 885707 - RNA, 19 nt, Homo sapiens
  misc_RNA (1)...(19): siRNA sense strand
gaugaugaagacuuuguua

SEQ ID NO: 885708 - RNA, 19 nt, Homo sapiens
  misc_RNA (1)...(19): siRNA sense strand
caucucagccuuccagaaa

SEQ ID NO: 885709 - RNA, 19 nt, Homo sapiens
  misc_RNA (1)...(19): siRNA sense strand
ggacaaggaaggaaaugga

SEQ ID NO: 885710 - RNA, 19 nt, Homo sapiens
  misc_RNA (1)...(19): siRNA sense strand
caaagcaauucaagaugug

SEQ ID NO: 885711 - RNA, 19 nt, Homo sapiens
  misc_RNA (1)...(19): siRNA sense strand
aaacuccgaaucacaaaua

SEQ ID NO: 885712 - RNA, 19 nt, Homo sapiens
  misc_RNA (1)...(19): siRNA sense strand
ugaccaaucccuuacaauu

SEQ ID NO: 885713 - RNA, 19 nt, Homo sapiens
  misc_RNA (1)...(19): siRNA sense strand
guuaacaucuuacguacuc

SEQ ID NO: 885714 - RNA, 19 nt, Homo sapiens
  misc_RNA (1)...(19): siRNA sense strand
caaaugugcuuccuuuuau

SEQ ID NO: 885715 - RNA, 19 nt, Homo sapiens
  misc_RNA (1)...(19): siRNA sense strand
ggaaaucauauguucgaaa

SEQ ID NO: 885716 - RNA, 19 nt, Homo sapiens
  misc_RNA (1)...(19): siRNA sense strand
caacagaggaagaaaucaa

SEQ ID NO: 885717 - RNA, 19 nt, Homo sapiens
  misc_RNA (1)...(19): siRNA sense strand
gaucguaucacguaaugga

SEQ ID NO: 885718 - RNA, 19 nt, Homo sapiens
  misc_RNA (1)...(19): siRNA sense strand
agaaagugaucauauccuu

SEQ ID NO: 885719 - RNA, 19 nt, Homo sapiens
  misc_RNA (1)...(19): siRNA sense strand
ggaaaacaauaccgacuug

SEQ ID NO: 885720 - RNA, 19 nt, Homo sapiens
  misc_RNA (1)...(19): siRNA sense strand
caaguaauuucaggccauu

SEQ ID NO: 885721 - RNA, 19 nt, Homo sapiens
  misc_RNA (1)...(19): siRNA sense strand
acaggaggaugauauaauc

SEQ ID NO: 885722 - RNA, 19 nt, Homo sapiens
  misc_RNA (1)...(19): siRNA sense strand
gaauacaggaaaucauaug

SEQ ID NO: 885723 - RNA, 19 nt, Homo sapiens
  misc_RNA (1)...(19): siRNA sense strand
uacaggaaaucauauguuc

SEQ ID NO: 885724 - RNA, 19 nt, Homo sapiens
  misc_RNA (1)...(19): siRNA sense strand
caaaacugcuucuauggaa

SEQ ID NO: 885725 - RNA, 19 nt, Homo sapiens
  misc_RNA (1)...(19): siRNA sense strand
gaaacaaagauaagaacuc

SEQ ID NO: 885726 - RNA, 19 nt, Homo sapiens
  misc_RNA (1)...(19): siRNA sense strand
ggagaauucaaacguggua

SEQ ID NO: 885727 - RNA, 19 nt, Homo sapiens
  misc_RNA (1)...(19): siRNA sense strand
caauggcaauggcaagguu

SEQ ID NO: 885728 - RNA, 19 nt, Homo sapiens
  misc_RNA (1)...(19): siRNA sense strand
uaagcaagcucuaaaagug

SEQ ID NO: 885729 - RNA, 19 nt, Homo sapiens
  misc_RNA (1)...(19): siRNA sense strand
agugucauauggugaauuu

SEQ ID NO: 885730 - RNA, 19 nt, Homo sapiens
  misc_RNA (1)...(19): siRNA sense strand
caagucugaugaaguguca

SEQ ID NO: 885731 - RNA, 19 nt, Homo sapiens
  misc_RNA (1)...(19): siRNA sense strand
aggaagaaaucaaaucauc

SEQ ID NO: 885732 - RNA, 19 nt, Homo sapiens
  misc_RNA (1)...(19): siRNA sense strand
aaagaacacuacaugaaac

SEQ ID NO: 885733 - RNA, 19 nt, Homo sapiens
  misc_RNA (1)...(19): siRNA sense strand
aguagaugaugaagacuuu

SEQ ID NO: 885734 - RNA, 19 nt, Homo sapiens
  misc_RNA (1)...(19): siRNA sense strand
aauaguagaugaugaagac

SEQ ID NO: 885735 - RNA, 19 nt, Homo sapiens
  misc_RNA (1)...(19): siRNA sense strand
uuacuuaaacuccgaauca

SEQ ID NO: 885736 - RNA, 19 nt, Homo sapiens
  misc_RNA (1)...(19): siRNA sense strand
ugacaccucuucgauuuag

SEQ ID NO: 885737 - RNA, 19 nt, Homo sapiens
  misc_RNA (1)...(19): siRNA sense strand
cugcauggcuaauucugaa

SEQ ID NO: 885738 - RNA, 19 nt, Homo sapiens
  misc_RNA (1)...(19): siRNA sense strand
ugaagacuuuguuaacauc

SEQ ID NO: 885739 - RNA, 19 nt, Homo sapiens
  misc_RNA (1)...(19): siRNA sense strand
gaacucauucuacauuaac

SEQ ID NO: 885740 - RNA, 19 nt, Homo sapiens
  misc_RNA (1)...(19): siRNA sense strand
cuagggcugucaucaguga

SEQ ID NO: 885741 - RNA, 19 nt, Homo sapiens
  misc_RNA (1)...(19): siRNA sense strand
gaaugaauacaggaaauca

SEQ ID NO: 885742 - RNA, 19 nt, Homo sapiens
  misc_RNA (1)...(19): siRNA sense strand
guaggaucguaucacguaa

SEQ ID NO: 885743 - RNA, 19 nt, Homo sapiens
  misc_RNA (1)...(19): siRNA sense strand
gaagguuuaaguauaggaa

SEQ ID NO: 885744 - RNA, 19 nt, Homo sapiens
  misc_RNA (1)...(19): siRNA sense strand
ggugcaaccuugacauuuu

SEQ ID NO: 885745 - RNA, 19 nt, Homo sapiens
  misc_RNA (1)...(19): siRNA sense strand
cagaaagcaucaaagaaaa

SEQ ID NO: 885746 - RNA, 19 nt, Homo sapiens
  misc_RNA (1)...(19): siRNA sense strand
caugaccaaucccuuacaa

SEQ ID NO: 885747 - RNA, 19 nt, Homo sapiens
  misc_RNA (1)...(19): siRNA sense strand
gaauaguagaugaugaaga

SEQ ID NO: 885748 - RNA, 19 nt, Homo sapiens
  misc_RNA (1)...(19): siRNA sense strand
gagucugcauggcuaauuc

SEQ ID NO: 885749 - RNA, 19 nt, Homo sapiens
  misc_RNA (1)...(19): siRNA sense strand
gagcaaaauuuagccauug

SEQ ID NO: 885750 - RNA, 19 nt, Homo sapiens
  misc_RNA (1)...(19): siRNA sense strand
ccaaucccuuacaauuuau

SEQ ID NO: 885751 - RNA, 19 nt, Homo sapiens
  misc_RNA (1)...(19): siRNA sense strand
gucauauggugaauuugaa

SEQ ID NO: 885752 - RNA, 19 nt, Homo sapiens
  misc_RNA (1)...(19): siRNA sense strand
ugucauauggugaauuuga

SEQ ID NO: 885753 - RNA, 19 nt, Homo sapiens
  misc_RNA (1)...(19): siRNA sense strand
gaagaaaucaaaucauccu

SEQ ID NO: 885754 - RNA, 19 nt, Homo sapiens
  misc_RNA (1)...(19): siRNA sense strand
aaauuuagccauugagcaa

SEQ ID NO: 885755 - RNA, 19 nt, Homo sapiens
  misc_RNA (1)...(19): siRNA sense strand
gaagugucauauggugaau

SEQ ID NO: 885756 - RNA, 19 nt, Homo sapiens
  misc_RNA (1)...(19): siRNA sense strand
acucaugaccaaucccuua

SEQ ID NO: 885757 - RNA, 19 nt, Homo sapiens
  misc_RNA (1)...(19): siRNA sense strand
gguauuauuggugaaauga

SEQ ID NO: 885758 - RNA, 19 nt, Homo sapiens
  misc_RNA (1)...(19): siRNA sense strand
uggcaagguugauuaugga

SEQ ID NO: 885759 - RNA, 19 nt, Homo sapiens
  misc_RNA (1)...(19): siRNA sense strand
gguugauuauggagaauuc

SEQ ID NO: 885760 - RNA, 19 nt, Homo sapiens
  misc_RNA (1)...(19): siRNA sense strand
acaaaugugcuuccuuuua

SEQ ID NO: 885761 - RNA, 19 nt, Homo sapiens
  misc_RNA (1)...(19): siRNA sense strand
uaggaauaguagaugauga

SEQ ID NO: 885762 - RNA, 19 nt, Homo sapiens
  misc_RNA (1)...(19): siRNA sense strand
gcagcaagucugaugaagu

SEQ ID NO: 885763 - RNA, 19 nt, Homo sapiens
  misc_RNA (1)...(19): siRNA sense strand
aaauguuacugugcaaaga

SEQ ID NO: 885764 - RNA, 19 nt, Homo sapiens
  misc_RNA (1)...(19): siRNA sense strand
gcaauucaagaugugcuaa

SEQ ID NO: 885765 - RNA, 19 nt, Homo sapiens
  misc_RNA (1)...(19): siRNA sense strand
ucauauccuuccagauuca

SEQ ID NO: 885766 - RNA, 19 nt, Homo sapiens
  misc_RNA (1)...(19): siRNA sense strand
caaggaaggaaauggacuu

SEQ ID NO: 885767 - RNA, 19 nt, Homo sapiens
  misc_RNA (1)...(19): siRNA sense strand
cuucaaagcaauucaagau

SEQ ID NO: 885768 - RNA, 19 nt, Homo sapiens
  misc_RNA (1)...(19): siRNA sense strand
ugaagugucauauggugaa

SEQ ID NO: 885769 - RNA, 19 nt, Homo sapiens
  misc_RNA (1)...(19): siRNA sense strand
ucaaaucauccuuucuaga

SEQ ID NO: 885770 - RNA, 19 nt, Homo sapiens
  misc_RNA (1)...(19): siRNA sense strand
caggaaaucauauguucga

SEQ ID NO: 885771 - RNA, 19 nt, Homo sapiens
  misc_RNA (1)...(19): siRNA sense strand
caagaugugcuaaaagaaa

SEQ ID NO: 885772 - RNA, 19 nt, Homo sapiens
  misc_RNA (1)...(19): siRNA sense strand
uaaggcagauuuuaagcaa

SEQ ID NO: 885773 - RNA, 19 nt, Homo sapiens
  misc_RNA (1)...(19): siRNA sense strand
ucaagaaaccaaugauagg

SEQ ID NO: 885774 - RNA, 19 nt, Homo sapiens
  misc_RNA (1)...(19): siRNA sense strand
agaggaagaaaucaaauca

SEQ ID NO: 885775 - RNA, 19 nt, Homo sapiens
  misc_RNA (1)...(19): siRNA sense strand
caaacgugguauuauuggu

SEQ ID NO: 885776 - RNA, 19 nt, Homo sapiens
  misc_RNA (1)...(19): siRNA sense strand
aggcuggucuucaaagcaa

SEQ ID NO: 885777 - RNA, 19 nt, Homo sapiens
  misc_RNA (1)...(19): siRNA sense strand
augauaggcuggucuucaa

SEQ ID NO: 885778 - RNA, 19 nt, Homo sapiens
  misc_RNA (1)...(19): siRNA sense strand
aauaccgacuuggugauuu

SEQ ID NO: 885779 - RNA, 19 nt, Homo sapiens
  misc_RNA (1)...(19): siRNA sense strand
ucucaaaacugcuucuaug

SEQ ID NO: 885780 - RNA, 19 nt, Homo sapiens
  misc_RNA (1)...(19): siRNA sense strand
aaauagcuuuggauucucu

SEQ ID NO: 885781 - RNA, 19 nt, Homo sapiens
  misc_RNA (1)...(19): siRNA sense strand
cuccgaaucacaaauauug

SEQ ID NO: 885782 - RNA, 19 nt, Homo sapiens
  misc_RNA (1)...(19): siRNA sense strand
ggaagaagaagaaggaaua

SEQ ID NO: 885783 - RNA, 19 nt, Homo sapiens
  misc_RNA (1)...(19): siRNA sense strand
agaagaagcugcuggcuaa

SEQ ID NO: 885784 - RNA, 19 nt, Homo sapiens
  misc_RNA (1)...(19): siRNA sense strand
ggaaggaucugugcugaga

SEQ ID NO: 885785 - RNA, 19 nt, Homo sapiens
  misc_RNA (1)...(19): siRNA sense strand
ggauuuagcugcuggaaag

SEQ ID NO: 885786 - RNA, 19 nt, Homo sapiens
  misc_RNA (1)...(19): siRNA sense strand
caagaaagcaggaagaaga

SEQ ID NO: 885787 - RNA, 19 nt, Homo sapiens
  misc_RNA (1)...(19): siRNA sense strand
gcuccuggaucuccuguuu

SEQ ID NO: 885788 - RNA, 19 nt, Homo sapiens
  misc_RNA (1)...(19): siRNA sense strand
ccauagaccuggaaaugug

SEQ ID NO: 885789 - RNA, 19 nt, Homo sapiens
  misc_RNA (1)...(19): siRNA sense strand
gaagaaggaauauaucgau

SEQ ID NO: 885790 - RNA, 19 nt, Homo sapiens
  misc_RNA (1)...(19): siRNA sense strand
ccgcgaaccugaccaauuc

SEQ ID NO: 885791 - RNA, 19 nt, Homo sapiens
  misc_RNA (1)...(19): siRNA sense strand
gcaggaagaagaagaagga

SEQ ID NO: 885792 - RNA, 19 nt, Homo sapiens
  misc_RNA (1)...(19): siRNA sense strand
gaaagcaggaagaagaaga

SEQ ID NO: 885793 - RNA, 19 nt, Homo sapiens
  misc_RNA (1)...(19): siRNA sense strand
gaagaagaaggaauauauc

SEQ ID NO: 885794 - RNA, 19 nt, Homo sapiens
  misc_RNA (1)...(19): siRNA sense strand
gaccauagaccuggaaaug

SEQ ID NO: 885795 - RNA, 19 nt, Homo sapiens
  misc_RNA (1)...(19): siRNA sense strand
gcuuugagcuccuggaucu

SEQ ID NO: 885796 - RNA, 19 nt, Homo sapiens
  misc_RNA (1)...(19): siRNA sense strand
agaagcugcuggcuaaaga

SEQ ID NO: 885797 - RNA, 19 nt, Homo sapiens
  misc_RNA (1)...(19): siRNA sense strand
ugaagccucugugaccaua

SEQ ID NO: 885798 - RNA, 19 nt, Homo sapiens
  misc_RNA (1)...(19): siRNA sense strand
gaagaaacuccaggccauu

SEQ ID NO: 885799 - RNA, 19 nt, Homo sapiens
  misc_RNA (1)...(19): siRNA sense strand
gaagaagaagaaggaauau

SEQ ID NO: 885800 - RNA, 19 nt, Homo sapiens
  misc_RNA (1)...(19): siRNA sense strand
gcaucacccugcccacuca

SEQ ID NO: 885801 - RNA, 19 nt, Homo sapiens
  misc_RNA (1)...(19): siRNA sense strand
ccagaacuuugcacaacga

SEQ ID NO: 885802 - RNA, 19 nt, Homo sapiens
  misc_RNA (1)...(19): siRNA sense strand
ggcccugccucuccuauca

SEQ ID NO: 885803 - RNA, 19 nt, Homo sapiens
  misc_RNA (1)...(19): siRNA sense strand
ggacuuugcgccuguacga

SEQ ID NO: 885804 - RNA, 19 nt, Homo sapiens
  misc_RNA (1)...(19): siRNA sense strand
ucaccgaggaugagaagaa

SEQ ID NO: 885805 - RNA, 19 nt, Homo sapiens
  misc_RNA (1)...(19): siRNA sense strand
agaggaaagucuugcaucu

SEQ ID NO: 885806 - RNA, 19 nt, Homo sapiens
  misc_RNA (1)...(19): siRNA sense strand
ugacacaacccgagaagag

SEQ ID NO: 885807 - RNA, 19 nt, Homo sapiens
  misc_RNA (1)...(19): siRNA sense strand
gaagcugcuggcuaaagaa

SEQ ID NO: 885808 - RNA, 19 nt, Homo sapiens
  misc_RNA (1)...(19): siRNA sense strand
cgacggaggagcuggacaa

SEQ ID NO: 885809 - RNA, 19 nt, Homo sapiens
  misc_RNA (1)...(19): siRNA sense strand
gaaacuccaggccauugug

SEQ ID NO: 885810 - RNA, 19 nt, Homo sapiens
  misc_RNA (1)...(19): siRNA sense strand
uggagcaacugaagaaacu

SEQ ID NO: 885811 - RNA, 19 nt, Homo sapiens
  misc_RNA (1)...(19): siRNA sense strand
ccugggcucuggagacuca

SEQ ID NO: 885812 - RNA, 19 nt, Homo sapiens
  misc_RNA (1)...(19): siRNA sense strand
uccuggaucuccuguuuga

SEQ ID NO: 885813 - RNA, 19 nt, Homo sapiens
  misc_RNA (1)...(19): siRNA sense strand
gcgcaagaaagcaggaaga

SEQ ID NO: 885814 - RNA, 19 nt, Homo sapiens
  misc_RNA (1)...(19): siRNA sense strand
gaagaagcugcuggcuaaa

SEQ ID NO: 885815 - RNA, 19 nt, Homo sapiens
  misc_RNA (1)...(19): siRNA sense strand
guaccugaagccucuguga

SEQ ID NO: 885816 - RNA, 19 nt, Homo sapiens
  misc_RNA (1)...(19): siRNA sense strand
gcaguccaccagcaaguca

SEQ ID NO: 885817 - RNA, 19 nt, Homo sapiens
  misc_RNA (1)...(19): siRNA sense strand
gcaagaaagcaggaagaag

SEQ ID NO: 885818 - RNA, 19 nt, Homo sapiens
  misc_RNA (1)...(19): siRNA sense strand
cgugaaagaccuccuccuu

SEQ ID NO: 885819 - RNA, 19 nt, Homo sapiens
  misc_RNA (1)...(19): siRNA sense strand
aagaaagcaggaagaagaa

SEQ ID NO: 885820 - RNA, 19 nt, Homo sapiens
  misc_RNA (1)...(19): siRNA sense strand
cgagagcccuggggacuuu

SEQ ID NO: 885821 - RNA, 19 nt, Homo sapiens
  misc_RNA (1)...(19): siRNA sense strand
aaagcaggaagaagaagaa

SEQ ID NO: 885822 - RNA, 19 nt, Homo sapiens
  misc_RNA (1)...(19): siRNA sense strand
auaguggcaucuccgaaga

SEQ ID NO: 885823 - RNA, 19 nt, Homo sapiens
  misc_RNA (1)...(19): siRNA sense strand
cagcuugcacugcucagaa

SEQ ID NO: 885824 - RNA, 19 nt, Homo sapiens
  misc_RNA (1)...(19): siRNA sense strand
gaaggaucugugcugagaa

SEQ ID NO: 885825 - RNA, 19 nt, Homo sapiens
  misc_RNA (1)...(19): siRNA sense strand
aagccucugugaccauaga

SEQ ID NO: 885826 - RNA, 19 nt, Homo sapiens
  misc_RNA (1)...(19): siRNA sense strand
cagcaagucagcccagaca

SEQ ID NO: 885827 - RNA, 19 nt, Homo sapiens
  misc_RNA (1)...(19): siRNA sense strand
aaggaucugugcugagaag

SEQ ID NO: 885828 - RNA, 19 nt, Homo sapiens
  misc_RNA (1)...(19): siRNA sense strand
gagacucggaugucagcuu

SEQ ID NO: 885829 - RNA, 19 nt, Homo sapiens
  misc_RNA (1)...(19): siRNA sense strand
uuuagcugcuggaaagaug

SEQ ID NO: 885830 - RNA, 19 nt, Homo sapiens
  misc_RNA (1)...(19): siRNA sense strand
cagaaucaggaguuacaga

SEQ ID NO: 885831 - RNA, 19 nt, Homo sapiens
  misc_RNA (1)...(19): siRNA sense strand
gcagucggcgcaagaaagc

SEQ ID NO: 885832 - RNA, 19 nt, Homo sapiens
  misc_RNA (1)...(19): siRNA sense strand
ccuggagacucggauguca

SEQ ID NO: 885833 - RNA, 19 nt, Homo sapiens
  misc_RNA (1)...(19): siRNA sense strand
agaagaaggaauauaucga

SEQ ID NO: 885834 - RNA, 19 nt, Homo sapiens
  misc_RNA (1)...(19): siRNA sense strand
ggagcuagcugcagugugu

SEQ ID NO: 885835 - RNA, 19 nt, Homo sapiens
  misc_RNA (1)...(19): siRNA sense strand
ggagcaagccgacaucgaa

SEQ ID NO: 885836 - RNA, 19 nt, Homo sapiens
  misc_RNA (1)...(19): siRNA sense strand
gcaagccgacaucgaagua

SEQ ID NO: 885837 - RNA, 19 nt, Homo sapiens
  misc_RNA (1)...(19): siRNA sense strand
ggcaagagcagccuaguga

SEQ ID NO: 885838 - RNA, 19 nt, Homo sapiens
  misc_RNA (1)...(19): siRNA sense strand
agagcaggcugaccucauu

SEQ ID NO: 885839 - RNA, 19 nt, Homo sapiens
  misc_RNA (1)...(19): siRNA sense strand
guggaggccuauaucgauu

SEQ ID NO: 885840 - RNA, 19 nt, Homo sapiens
  misc_RNA (1)...(19): siRNA sense strand
ggaggccuauaucgauuuc

SEQ ID NO: 885841 - RNA, 19 nt, Homo sapiens
  misc_RNA (1)...(19): siRNA sense strand
ggcccugggugcacaucua

SEQ ID NO: 885842 - RNA, 19 nt, Homo sapiens
  misc_RNA (1)...(19): siRNA sense strand
gcaagagcagccuagugaa

SEQ ID NO: 885843 - RNA, 19 nt, Homo sapiens
  misc_RNA (1)...(19): siRNA sense strand
gccaccaucuucgcgcuaa

SEQ ID NO: 885844 - RNA, 19 nt, Homo sapiens
  misc_RNA (1)...(19): siRNA sense strand
ggaagccuguguccaucgu

SEQ ID NO: 885845 - RNA, 19 nt, Homo sapiens
  misc_RNA (1)...(19): siRNA sense strand
gauccuggacaucaucuuc

SEQ ID NO: 885846 - RNA, 19 nt, Homo sapiens
  misc_RNA (1)...(19): siRNA sense strand
gcaggcgaguucacuagac

SEQ ID NO: 885847 - RNA, 19 nt, Homo sapiens
  misc_RNA (1)...(19): siRNA sense strand
cagucgaccuggccggauu

SEQ ID NO: 885848 - RNA, 19 nt, Homo sapiens
  misc_RNA (1)...(19): siRNA sense strand
cugcugcuguccugucuga

SEQ ID NO: 885849 - RNA, 19 nt, Homo sapiens
  misc_RNA (1)...(19): siRNA sense strand
uggaggcgcugaggaagga

SEQ ID NO: 885850 - RNA, 19 nt, Homo sapiens
  misc_RNA (1)...(19): siRNA sense strand
gaccuuauccacgcggaaa

SEQ ID NO: 885851 - RNA, 19 nt, Homo sapiens
  misc_RNA (1)...(19): siRNA sense strand
ggccgagacccucaccaaa

SEQ ID NO: 885852 - RNA, 19 nt, Homo sapiens
  misc_RNA (1)...(19): siRNA sense strand
gccgagacccucaccaaag

SEQ ID NO: 885853 - RNA, 19 nt, Homo sapiens
  misc_RNA (1)...(19): siRNA sense strand
caagagcagccuagugaac

SEQ ID NO: 885854 - RNA, 19 nt, Homo sapiens
  misc_RNA (1)...(19): siRNA sense strand
ggagauccuggacaucauc

SEQ ID NO: 885855 - RNA, 19 nt, Homo sapiens
  misc_RNA (1)...(19): siRNA sense strand
ccacguggaggccuauauc

SEQ ID NO: 885856 - RNA, 19 nt, Homo sapiens
  misc_RNA (1)...(19): siRNA sense strand
gaggcaggcgaguucacua

SEQ ID NO: 885857 - RNA, 19 nt, Homo sapiens
  misc_RNA (1)...(19): siRNA sense strand
ccgagacccucaccaaagc

SEQ ID NO: 885858 - RNA, 19 nt, Homo sapiens
  misc_RNA (1)...(19): siRNA sense strand
uggaugcccucggccacua

SEQ ID NO: 885859 - RNA, 19 nt, Homo sapiens
  misc_RNA (1)...(19): siRNA sense strand
gggcaagagcagccuagug

SEQ ID NO: 885860 - RNA, 19 nt, Homo sapiens
  misc_RNA (1)...(19): siRNA sense strand
gccacuacaagcagucaaa

SEQ ID NO: 885861 - RNA, 19 nt, Homo sapiens
  misc_RNA (1)...(19): siRNA sense strand
gaaaagcaguugagucaua

SEQ ID NO: 885862 - RNA, 19 nt, Homo sapiens
  misc_RNA (1)...(19): siRNA sense strand
gagaauauggaaaggauug

SEQ ID NO: 885863 - RNA, 19 nt, Homo sapiens
  misc_RNA (1)...(19): siRNA sense strand
ugagacagcugauggaaaa

SEQ ID NO: 885864 - RNA, 19 nt, Homo sapiens
  misc_RNA (1)...(19): siRNA sense strand
gaaaaugucaaccaggaaa

SEQ ID NO: 885865 - RNA, 19 nt, Homo sapiens
  misc_RNA (1)...(19): siRNA sense strand
gcccuuggcccuaccuuug

SEQ ID NO: 885866 - RNA, 19 nt, Homo sapiens
  misc_RNA (1)...(19): siRNA sense strand
uggaaaagcugagggaaaa

SEQ ID NO: 885867 - RNA, 19 nt, Homo sapiens
  misc_RNA (1)...(19): siRNA sense strand
cagcccauccugcaguaua

SEQ ID NO: 885868 - RNA, 19 nt, Homo sapiens
  misc_RNA (1)...(19): siRNA sense strand
ugaauacugugugccuaga

SEQ ID NO: 885869 - RNA, 19 nt, Homo sapiens
  misc_RNA (1)...(19): siRNA sense strand
gggaaaagcaguugaguca

SEQ ID NO: 885870 - RNA, 19 nt, Homo sapiens
  misc_RNA (1)...(19): siRNA sense strand
gagccacaggcaaggauga

SEQ ID NO: 885871 - RNA, 19 nt, Homo sapiens
  misc_RNA (1)...(19): siRNA sense strand
gugagacagcugauggaaa

SEQ ID NO: 885872 - RNA, 19 nt, Homo sapiens
  misc_RNA (1)...(19): siRNA sense strand
ggagagccacaggcaagga

SEQ ID NO: 885873 - RNA, 19 nt, Homo sapiens
  misc_RNA (1)...(19): siRNA sense strand
ggugagacagcugauggaa

SEQ ID NO: 885874 - RNA, 19 nt, Homo sapiens
  misc_RNA (1)...(19): siRNA sense strand
aagcagagauggaagaaua

SEQ ID NO: 885875 - RNA, 19 nt, Homo sapiens
  misc_RNA (1)...(19): siRNA sense strand
gaaagaacuuaaaggaaga

SEQ ID NO: 885876 - RNA, 19 nt, Homo sapiens
  misc_RNA (1)...(19): siRNA sense strand
gaaauuaccagcaucaaga

SEQ ID NO: 885877 - RNA, 19 nt, Homo sapiens
  misc_RNA (1)...(19): siRNA sense strand
uuugagagauccacuauua

SEQ ID NO: 885878 - RNA, 19 nt, Homo sapiens
  misc_RNA (1)...(19): siRNA sense strand
agaauuagauguggugaua

SEQ ID NO: 885879 - RNA, 19 nt, Homo sapiens
  misc_RNA (1)...(19): siRNA sense strand
ggagaaugaccguguguua

SEQ ID NO: 885880 - RNA, 19 nt, Homo sapiens
  misc_RNA (1)...(19): siRNA sense strand
agugaaagccucucuauua

SEQ ID NO: 885881 - RNA, 19 nt, Homo sapiens
  misc_RNA (1)...(19): siRNA sense strand
gcggagcccugacaucuuu

SEQ ID NO: 885882 - RNA, 19 nt, Homo sapiens
  misc_RNA (1)...(19): siRNA sense strand
caagaucaaucgaguagau

SEQ ID NO: 885883 - RNA, 19 nt, Homo sapiens
  misc_RNA (1)...(19): siRNA sense strand
ccacugguccauaucauua

SEQ ID NO: 885884 - RNA, 19 nt, Homo sapiens
  misc_RNA (1)...(19): siRNA sense strand
gaacaccagcauacaauga

SEQ ID NO: 885885 - RNA, 19 nt, Homo sapiens
  misc_RNA (1)...(19): siRNA sense strand
uguaggagguuaugaagaa

SEQ ID NO: 885886 - RNA, 19 nt, Homo sapiens
  misc_RNA (1)...(19): siRNA sense strand
ggaagaauuacucuaacua

SEQ ID NO: 885887 - RNA, 19 nt, Homo sapiens
  misc_RNA (1)...(19): siRNA sense strand
caggagacaucauucuaaa

SEQ ID NO: 885888 - RNA, 19 nt, Homo sapiens
  misc_RNA (1)...(19): siRNA sense strand
gcaaugucccucacaacua

SEQ ID NO: 885889 - RNA, 19 nt, Homo sapiens
  misc_RNA (1)...(19): siRNA sense strand
gauuccagauggugaaauu

SEQ ID NO: 885890 - RNA, 19 nt, Homo sapiens
  misc_RNA (1)...(19): siRNA sense strand
ugacagcuuucaugugauu

SEQ ID NO: 885891 - RNA, 19 nt, Homo sapiens
  misc_RNA (1)...(19): siRNA sense strand
gugaaagccucucuauuag

SEQ ID NO: 885892 - RNA, 19 nt, Homo sapiens
  misc_RNA (1)...(19): siRNA sense strand
ggaagaggcgcucacaaga

SEQ ID NO: 885893 - RNA, 19 nt, Homo sapiens
  misc_RNA (1)...(19): siRNA sense strand
agaaguacaucaggaauga

SEQ ID NO: 885894 - RNA, 19 nt, Homo sapiens
  misc_RNA (1)...(19): siRNA sense strand
caacacauuuaucgugaug

SEQ ID NO: 885895 - RNA, 19 nt, Homo sapiens
  misc_RNA (1)...(19): siRNA sense strand
gccaccaucuccuuaauga

SEQ ID NO: 885896 - RNA, 19 nt, Homo sapiens
  misc_RNA (1)...(19): siRNA sense strand
cgauaguacucaaagcuuu

SEQ ID NO: 885897 - RNA, 19 nt, Homo sapiens
  misc_RNA (1)...(19): siRNA sense strand
gacaugaucuucgauaugg

SEQ ID NO: 885898 - RNA, 19 nt, Homo sapiens
  misc_RNA (1)...(19): siRNA sense strand
gaaagugcggcucaucuga

SEQ ID NO: 885899 - RNA, 19 nt, Homo sapiens
  misc_RNA (1)...(19): siRNA sense strand
uggcaagacugcugaaaga

SEQ ID NO: 885900 - RNA, 19 nt, Homo sapiens
  misc_RNA (1)...(19): siRNA sense strand
gaagaggcgcucacaagau

SEQ ID NO: 885901 - RNA, 19 nt, Homo sapiens
  misc_RNA (1)...(19): siRNA sense strand
ggacaugaucuucgauaug

SEQ ID NO: 885902 - RNA, 19 nt, Homo sapiens
  misc_RNA (1)...(19): siRNA sense strand
gcacggcccuuugagagau

SEQ ID NO: 885903 - RNA, 19 nt, Homo sapiens
  misc_RNA (1)...(19): siRNA sense strand
caaauccauuguugaagga

SEQ ID NO: 885904 - RNA, 19 nt, Homo sapiens
  misc_RNA (1)...(19): siRNA sense strand
augagaaggugguaaauau

SEQ ID NO: 885905 - RNA, 19 nt, Homo sapiens
  misc_RNA (1)...(19): siRNA sense strand
gcugaaagaacuuaaagga

SEQ ID NO: 885906 - RNA, 19 nt, Homo sapiens
  misc_RNA (1)...(19): siRNA sense strand
ccacggugcuuguauaacu

SEQ ID NO: 885907 - RNA, 19 nt, Homo sapiens
  misc_RNA (1)...(19): siRNA sense strand
gaacaucauccucgauagu

SEQ ID NO: 885908 - RNA, 19 nt, Homo sapiens
  misc_RNA (1)...(19): siRNA sense strand
aagaggcgcucacaagaug

SEQ ID NO: 885909 - RNA, 19 nt, Homo sapiens
  misc_RNA (1)...(19): siRNA sense strand
uuaccacggugcuuguaua

SEQ ID NO: 885910 - RNA, 19 nt, Homo sapiens
  misc_RNA (1)...(19): siRNA sense strand
ggucauguggcuggaauua

SEQ ID NO: 885911 - RNA, 19 nt, Homo sapiens
  misc_RNA (1)...(19): siRNA sense strand
gagaaugggauuugccuau

SEQ ID NO: 885912 - RNA, 19 nt, Homo sapiens
  misc_RNA (1)...(19): siRNA sense strand
gaaugggauuugccuaucu

SEQ ID NO: 885913 - RNA, 19 nt, Homo sapiens
  misc_RNA (1)...(19): siRNA sense strand
agucugggcuucugcauug

SEQ ID NO: 885914 - RNA, 19 nt, Homo sapiens
  misc_RNA (1)...(19): siRNA sense strand
ccaggagacaucauucuaa

SEQ ID NO: 885915 - RNA, 19 nt, Homo sapiens
  misc_RNA (1)...(19): siRNA sense strand
gggauuugccuaucuaugu

SEQ ID NO: 885916 - RNA, 19 nt, Homo sapiens
  misc_RNA (1)...(19): siRNA sense strand
gaggagcagcuuggaauaa

SEQ ID NO: 885917 - RNA, 19 nt, Homo sapiens
  misc_RNA (1)...(19): siRNA sense strand
ugagagauccacuauuaga

SEQ ID NO: 885918 - RNA, 19 nt, Homo sapiens
  misc_RNA (1)...(19): siRNA sense strand
gugaggcaguggcauuauu

SEQ ID NO: 885919 - RNA, 19 nt, Homo sapiens
  misc_RNA (1)...(19): siRNA sense strand
ggagugaggcaguggcauu

SEQ ID NO: 885920 - RNA, 19 nt, Homo sapiens
  misc_RNA (1)...(19): siRNA sense strand
caaugucccucacaacuac

SEQ ID NO: 885921 - RNA, 19 nt, Homo sapiens
  misc_RNA (1)...(19): siRNA sense strand
ggagacaucauucuaaagg

SEQ ID NO: 885922 - RNA, 19 nt, Homo sapiens
  misc_RNA (1)...(19): siRNA sense strand
gcucaguccugcuaacuac

SEQ ID NO: 885923 - RNA, 19 nt, Homo sapiens
  misc_RNA (1)...(19): siRNA sense strand
caauggacaugaucuucga

SEQ ID NO: 885924 - RNA, 19 nt, Homo sapiens
  misc_RNA (1)...(19): siRNA sense strand
caagacugcugaaagaacu

SEQ ID NO: 885925 - RNA, 19 nt, Homo sapiens
  misc_RNA (1)...(19): siRNA sense strand
gcaguggcauuauugaaaa

SEQ ID NO: 885926 - RNA, 19 nt, Homo sapiens
  misc_RNA (1)...(19): siRNA sense strand
gagagauccacuauuagaa

SEQ ID NO: 885927 - RNA, 19 nt, Homo sapiens
  misc_RNA (1)...(19): siRNA sense strand
ggcaguggcauuauugaaa

SEQ ID NO: 885928 - RNA, 19 nt, Homo sapiens
  misc_RNA (1)...(19): siRNA sense strand
ucacauagagaaugggauu

SEQ ID NO: 885929 - RNA, 19 nt, Homo sapiens
  misc_RNA (1)...(19): siRNA sense strand
ggauggcgguguggcauau

SEQ ID NO: 885930 - RNA, 19 nt, Homo sapiens
  misc_RNA (1)...(19): siRNA sense strand
ucgaguagaucccagugaa

SEQ ID NO: 885931 - RNA, 19 nt, Homo sapiens
  misc_RNA (1)...(19): siRNA sense strand
caugagaaggugguaaaua

SEQ ID NO: 885932 - RNA, 19 nt, Homo sapiens
  misc_RNA (1)...(19): siRNA sense strand
ggauuugccuaucuauguc

SEQ ID NO: 885933 - RNA, 19 nt, Homo sapiens
  misc_RNA (1)...(19): siRNA sense strand
gauggaagaauuagaugug

SEQ ID NO: 885934 - RNA, 19 nt, Homo sapiens
  misc_RNA (1)...(19): siRNA sense strand
cgauauggcagcccagaaa

SEQ ID NO: 885935 - RNA, 19 nt, Homo sapiens
  misc_RNA (1)...(19): siRNA sense strand
gagugaggcaguggcauua

SEQ ID NO: 885936 - RNA, 19 nt, Homo sapiens
  misc_RNA (1)...(19): siRNA sense strand
gcagagauggaagaauaaa

SEQ ID NO: 885937 - RNA, 19 nt, Homo sapiens
  misc_RNA (1)...(19): siRNA sense strand
gagcaucacauagagaaug

SEQ ID NO: 885938 - RNA, 19 nt, Homo sapiens
  misc_RNA (1)...(19): siRNA sense strand
gugcuuguauaacuguaaa

SEQ ID NO: 885939 - RNA, 19 nt, Homo sapiens
  misc_RNA (1)...(19): siRNA sense strand
aagaacaucauccucgaua

SEQ ID NO: 885940 - RNA, 19 nt, Homo sapiens
  misc_RNA (1)...(19): siRNA sense strand
aggagcagcuuggaauaaa

SEQ ID NO: 885941 - RNA, 19 nt, Homo sapiens
  misc_RNA (1)...(19): siRNA sense strand
ccugaagucuuuccaaggu

SEQ ID NO: 885942 - RNA, 19 nt, Homo sapiens
  misc_RNA (1)...(19): siRNA sense strand
gguagaaguacaucaggaa

SEQ ID NO: 885943 - RNA, 19 nt, Homo sapiens
  misc_RNA (1)...(19): siRNA sense strand
gaaggaacaccagcauaca

SEQ ID NO: 885944 - RNA, 19 nt, Homo sapiens
  misc_RNA (1)...(19): siRNA sense strand
gcacuuccuguauucagaa

SEQ ID NO: 885945 - RNA, 19 nt, Homo sapiens
  misc_RNA (1)...(19): siRNA sense strand
ggacuccaaccacaacaug

SEQ ID NO: 885946 - RNA, 19 nt, Homo sapiens
  misc_RNA (1)...(19): siRNA sense strand
acuacgggcugaccaaaga

SEQ ID NO: 885947 - RNA, 19 nt, Homo sapiens
  misc_RNA (1)...(19): siRNA sense strand
aaaucgagcuuugaguguu

SEQ ID NO: 885948 - RNA, 19 nt, Homo sapiens
  misc_RNA (1)...(19): siRNA sense strand
caaccugcacuuccuguau

SEQ ID NO: 885949 - RNA, 19 nt, Homo sapiens
  misc_RNA (1)...(19): siRNA sense strand
ucaugugauucucaacaaa

SEQ ID NO: 885950 - RNA, 19 nt, Homo sapiens
  misc_RNA (1)...(19): siRNA sense strand
gagaaugaccguguguuag

SEQ ID NO: 885951 - RNA, 19 nt, Homo sapiens
  misc_RNA (1)...(19): siRNA sense strand
uagauguggugauauucuu

SEQ ID NO: 885952 - RNA, 19 nt, Homo sapiens
  misc_RNA (1)...(19): siRNA sense strand
gggagcaucacauagagaa

SEQ ID NO: 885953 - RNA, 19 nt, Homo sapiens
  misc_RNA (1)...(19): siRNA sense strand
ggccggagcaaccgaacua

SEQ ID NO: 885954 - RNA, 19 nt, Homo sapiens
  misc_RNA (1)...(19): siRNA sense strand
cgaagaaacacagcuggaa

SEQ ID NO: 885955 - RNA, 19 nt, Homo sapiens
  misc_RNA (1)...(19): siRNA sense strand
aaccugcacuuccuguauu

SEQ ID NO: 885956 - RNA, 19 nt, Homo sapiens
  misc_RNA (1)...(19): siRNA sense strand
gccaggagacaucauucua

SEQ ID NO: 885957 - RNA, 19 nt, Homo sapiens
  misc_RNA (1)...(19): siRNA sense strand
gagacaucauucuaaaggu

SEQ ID NO: 885958 - RNA, 19 nt, Homo sapiens
  misc_RNA (1)...(19): siRNA sense strand
gcaagacugcugaaagaac

SEQ ID NO: 885959 - RNA, 19 nt, Homo sapiens
  misc_RNA (1)...(19): siRNA sense strand
ggagucauaagcagagaug

SEQ ID NO: 885960 - RNA, 19 nt, Homo sapiens
  misc_RNA (1)...(19): siRNA sense strand
aaugggauuugccuaucua

SEQ ID NO: 885961 - RNA, 19 nt, Homo sapiens
  misc_RNA (1)...(19): siRNA sense strand
cgaggagcagcuuggaaua

SEQ ID NO: 885962 - RNA, 19 nt, Homo sapiens
  misc_RNA (1)...(19): siRNA sense strand
ucagcaaugucccucacaa

SEQ ID NO: 885963 - RNA, 19 nt, Homo sapiens
  misc_RNA (1)...(19): siRNA sense strand
ggucuugccuuggcucagu

SEQ ID NO: 885964 - RNA, 19 nt, Homo sapiens
  misc_RNA (1)...(19): siRNA sense strand
ggaacaccagcauacaaug

SEQ ID NO: 885965 - RNA, 19 nt, Homo sapiens
  misc_RNA (1)...(19): siRNA sense strand
gagguuaugaagaauacaa

SEQ ID NO: 885966 - RNA, 19 nt, Homo sapiens
  misc_RNA (1)...(19): siRNA sense strand
ccagugaaagccucucuau

SEQ ID NO: 885967 - RNA, 19 nt, Homo sapiens
  misc_RNA (1)...(19): siRNA sense strand
caucaagaucaaucgagua

SEQ ID NO: 885968 - RNA, 19 nt, Homo sapiens
  misc_RNA (1)...(19): siRNA sense strand
gaagaauacaauggaaaca

SEQ ID NO: 885969 - RNA, 19 nt, Homo sapiens
  misc_RNA (1)...(19): siRNA sense strand
gaaggugguaaauauccaa

SEQ ID NO: 885970 - RNA, 19 nt, Homo sapiens
  misc_RNA (1)...(19): siRNA sense strand
gaccguguguuagccauca

SEQ ID NO: 885971 - RNA, 19 nt, Homo sapiens
  misc_RNA (1)...(19): siRNA sense strand
gcaaccugcacuuccugua

SEQ ID NO: 885972 - RNA, 19 nt, Homo sapiens
  misc_RNA (1)...(19): siRNA sense strand
ugaaggaacaccagcauac

SEQ ID NO: 885973 - RNA, 19 nt, Homo sapiens
  misc_RNA (1)...(19): siRNA sense strand
gaauuaccacggugcuugu

SEQ ID NO: 885974 - RNA, 19 nt, Homo sapiens
  misc_RNA (1)...(19): siRNA sense strand
gaacgaaaccucugaugaa

SEQ ID NO: 885975 - RNA, 19 nt, Homo sapiens
  misc_RNA (1)...(19): siRNA sense strand
cgaaaccucugaugaauau

SEQ ID NO: 885976 - RNA, 19 nt, Homo sapiens
  misc_RNA (1)...(19): siRNA sense strand
ugaauaugcugaacuagaa

SEQ ID NO: 885977 - RNA, 19 nt, Homo sapiens
  misc_RNA (1)...(19): siRNA sense strand
ggugguagaugcugaagaa

SEQ ID NO: 885978 - RNA, 19 nt, Homo sapiens
  misc_RNA (1)...(19): siRNA sense strand
gauaagugcuuuuguguuu

SEQ ID NO: 885979 - RNA, 19 nt, Homo sapiens
  misc_RNA (1)...(19): siRNA sense strand
gccauagggugucugauaa

SEQ ID NO: 885980 - RNA, 19 nt, Homo sapiens
  misc_RNA (1)...(19): siRNA sense strand
gaaguaaacccugaaacaa

SEQ ID NO: 885981 - RNA, 19 nt, Homo sapiens
  misc_RNA (1)...(19): siRNA sense strand
ggaaguaaacccugaaaca

SEQ ID NO: 885982 - RNA, 19 nt, Homo sapiens
  misc_RNA (1)...(19): siRNA sense strand
gguagaugcugaagaaagu

SEQ ID NO: 885983 - RNA, 19 nt, Homo sapiens
  misc_RNA (1)...(19): siRNA sense strand
ugaugaauaugcugaacua

SEQ ID NO: 885984 - RNA, 19 nt, Homo sapiens
  misc_RNA (1)...(19): siRNA sense strand
caccaucgauaaugauaaa

SEQ ID NO: 885985 - RNA, 19 nt, Homo sapiens
  misc_RNA (1)...(19): siRNA sense strand
aagcagagauacauccauu

SEQ ID NO: 885986 - RNA, 19 nt, Homo sapiens
  misc_RNA (1)...(19): siRNA sense strand
ccaaacacacagaacauaa

SEQ ID NO: 885987 - RNA, 19 nt, Homo sapiens
  misc_RNA (1)...(19): siRNA sense strand
gaagcugucaccaucgaua

SEQ ID NO: 885988 - RNA, 19 nt, Homo sapiens
  misc_RNA (1)...(19): siRNA sense strand
agagauacauccauuucaa

SEQ ID NO: 885989 - RNA, 19 nt, Homo sapiens
  misc_RNA (1)...(19): siRNA sense strand
gcagagauacauccauuuc

SEQ ID NO: 885990 - RNA, 19 nt, Homo sapiens
  misc_RNA (1)...(19): siRNA sense strand
cuacaguuguggucauaaa

SEQ ID NO: 885991 - RNA, 19 nt, Homo sapiens
  misc_RNA (1)...(19): siRNA sense strand
caaacacacagaacauaaa

SEQ ID NO: 885992 - RNA, 19 nt, Homo sapiens
  misc_RNA (1)...(19): siRNA sense strand
caaaugcugcccuggauga

SEQ ID NO: 885993 - RNA, 19 nt, Homo sapiens
  misc_RNA (1)...(19): siRNA sense strand
uaacagauucccuggauca

SEQ ID NO: 885994 - RNA, 19 nt, Homo sapiens
  misc_RNA (1)...(19): siRNA sense strand
ugagaaagcaaguucagaa

SEQ ID NO: 885995 - RNA, 19 nt, Homo sapiens
  misc_RNA (1)...(19): siRNA sense strand
acaagacagucacaucaga

SEQ ID NO: 885996 - RNA, 19 nt, Homo sapiens
  misc_RNA (1)...(19): siRNA sense strand
caaagaacgaaaccucuga

SEQ ID NO: 885997 - RNA, 19 nt, Homo sapiens
  misc_RNA (1)...(19): siRNA sense strand
gagggaaaccacggaagua

SEQ ID NO: 885998 - RNA, 19 nt, Homo sapiens
  misc_RNA (1)...(19): siRNA sense strand
gauauuaugcuuacaagac

SEQ ID NO: 885999 - RNA, 19 nt, Homo sapiens
  misc_RNA (1)...(19): siRNA sense strand
agaagaacuuauaguggaa

SEQ ID NO: 886000 - RNA, 19 nt, Homo sapiens
  misc_RNA (1)...(19): siRNA sense strand
agucagugcugguggauau

SEQ ID NO: 886001 - RNA, 19 nt, Homo sapiens
  misc_RNA (1)...(19): siRNA sense strand
guagacauuucagcaacaa

SEQ ID NO: 886002 - RNA, 19 nt, Homo sapiens
  misc_RNA (1)...(19): siRNA sense strand
gggaaaccacggaaguaaa

SEQ ID NO: 886003 - RNA, 19 nt, Homo sapiens
  misc_RNA (1)...(19): siRNA sense strand
ggaaaccacggaaguaaac

SEQ ID NO: 886004 - RNA, 19 nt, Homo sapiens
  misc_RNA (1)...(19): siRNA sense strand
aguggaagcugagguggua

SEQ ID NO: 886005 - RNA, 19 nt, Homo sapiens
  misc_RNA (1)...(19): siRNA sense strand
ucuaacagauucccuggau

SEQ ID NO: 886006 - RNA, 19 nt, Homo sapiens
  misc_RNA (1)...(19): siRNA sense strand
gcugguggauauuaugcuu

SEQ ID NO: 886007 - RNA, 19 nt, Homo sapiens
  misc_RNA (1)...(19): siRNA sense strand
gccaaacacacagaacaua

SEQ ID NO: 886008 - RNA, 19 nt, Homo sapiens
  misc_RNA (1)...(19): siRNA sense strand
gguagacauuucagcaaca

SEQ ID NO: 886009 - RNA, 19 nt, Homo sapiens
  misc_RNA (1)...(19): siRNA sense strand
ugccauagggugucugaua

SEQ ID NO: 886010 - RNA, 19 nt, Homo sapiens
  misc_RNA (1)...(19): siRNA sense strand
caucagaccaagccaaaca

SEQ ID NO: 886011 - RNA, 19 nt, Homo sapiens
  misc_RNA (1)...(19): siRNA sense strand
agaacgaaaccucugauga

SEQ ID NO: 886012 - RNA, 19 nt, Homo sapiens
  misc_RNA (1)...(19): siRNA sense strand
uacaaaugcugcccuggau

SEQ ID NO: 886013 - RNA, 19 nt, Homo sapiens
  misc_RNA (1)...(19): siRNA sense strand
gagaaagcaaguucagaag

SEQ ID NO: 886014 - RNA, 19 nt, Homo sapiens
  misc_RNA (1)...(19): siRNA sense strand
uuacaagacagucacauca

SEQ ID NO: 886015 - RNA, 19 nt, Homo sapiens
  misc_RNA (1)...(19): siRNA sense strand
ucagugcugguggauauua

SEQ ID NO: 886016 - RNA, 19 nt, Homo sapiens
  misc_RNA (1)...(19): siRNA sense strand
gauacaacaaagaacgaaa

SEQ ID NO: 886017 - RNA, 19 nt, Homo sapiens
  misc_RNA (1)...(19): siRNA sense strand
ggagaauguugcggaaacu

SEQ ID NO: 886018 - RNA, 19 nt, Homo sapiens
  misc_RNA (1)...(19): siRNA sense strand
augcugaacuagaagaaga

SEQ ID NO: 886019 - RNA, 19 nt, Homo sapiens
  misc_RNA (1)...(19): siRNA sense strand
aacgaaaccucugaugaau

SEQ ID NO: 886020 - RNA, 19 nt, Homo sapiens
  misc_RNA (1)...(19): siRNA sense strand
cauagggugucugauaagu

SEQ ID NO: 886021 - RNA, 19 nt, Homo sapiens
  misc_RNA (1)...(19): siRNA sense strand
gagauacauccauuucaag

SEQ ID NO: 886022 - RNA, 19 nt, Homo sapiens
  misc_RNA (1)...(19): siRNA sense strand
ggagaccacagcagucagu

SEQ ID NO: 886023 - RNA, 19 nt, Homo sapiens
  misc_RNA (1)...(19): siRNA sense strand
caaaugccauagggugucu

SEQ ID NO: 886024 - RNA, 19 nt, Homo sapiens
  misc_RNA (1)...(19): siRNA sense strand
acgaaaccucugaugaaua

SEQ ID NO: 886025 - RNA, 19 nt, Homo sapiens
  misc_RNA (1)...(19): siRNA sense strand
gacagucacaucagaccaa

SEQ ID NO: 886026 - RNA, 19 nt, Homo sapiens
  misc_RNA (1)...(19): siRNA sense strand
cacaucagaccaagccaaa

SEQ ID NO: 886027 - RNA, 19 nt, Homo sapiens
  misc_RNA (1)...(19): siRNA sense strand
ccaucgauaaugauaaaga

SEQ ID NO: 886028 - RNA, 19 nt, Homo sapiens
  misc_RNA (1)...(19): siRNA sense strand
agaccaagccaaacacaca

SEQ ID NO: 886029 - RNA, 19 nt, Homo sapiens
  misc_RNA (1)...(19): siRNA sense strand
guggauauuaugcuuacaa

SEQ ID NO: 886030 - RNA, 19 nt, Homo sapiens
  misc_RNA (1)...(19): siRNA sense strand
guuguaggcgucacaguca

SEQ ID NO: 886031 - RNA, 19 nt, Homo sapiens
  misc_RNA (1)...(19): siRNA sense strand
ggauauuaugcuuacaaga

SEQ ID NO: 886032 - RNA, 19 nt, Homo sapiens
  misc_RNA (1)...(19): siRNA sense strand
cgagggaaaccacggaagu

SEQ ID NO: 886033 - RNA, 19 nt, Homo sapiens
  misc_RNA (1)...(19): siRNA sense strand
agaauguugcggaaacuga

SEQ ID NO: 886034 - RNA, 19 nt, Homo sapiens
  misc_RNA (1)...(19): siRNA sense strand
ggaaacugagaaagcaagu

SEQ ID NO: 886035 - RNA, 19 nt, Homo sapiens
  misc_RNA (1)...(19): siRNA sense strand
ucaccaucgauaaugauaa

SEQ ID NO: 886036 - RNA, 19 nt, Homo sapiens
  misc_RNA (1)...(19): siRNA sense strand
cccagaagaacuuauagug

SEQ ID NO: 886037 - RNA, 19 nt, Homo sapiens
  misc_RNA (1)...(19): siRNA sense strand
cagagauacauccauuuca

SEQ ID NO: 886038 - RNA, 19 nt, Homo sapiens
  misc_RNA (1)...(19): siRNA sense strand
gaggcugcuucggcucaaa

SEQ ID NO: 886039 - RNA, 19 nt, Homo sapiens
  misc_RNA (1)...(19): siRNA sense strand
cagugcugguggauauuau

SEQ ID NO: 886040 - RNA, 19 nt, Homo sapiens
  misc_RNA (1)...(19): siRNA sense strand
caggaggaagccaguguug

SEQ ID NO: 886041 - RNA, 19 nt, Homo sapiens
  misc_RNA (1)...(19): siRNA sense strand
gcugucaccaucgauaaug

SEQ ID NO: 886042 - RNA, 19 nt, Homo sapiens
  misc_RNA (1)...(19): siRNA sense strand
ccuggaaaccauuguauuu

SEQ ID NO: 886043 - RNA, 19 nt, Homo sapiens
  misc_RNA (1)...(19): siRNA sense strand
cuggaacccucccucugua

SEQ ID NO: 886044 - RNA, 19 nt, Homo sapiens
  misc_RNA (1)...(19): siRNA sense strand
guuguggccuggauacucu

SEQ ID NO: 886045 - RNA, 19 nt, Homo sapiens
  misc_RNA (1)...(19): siRNA sense strand
cugcuucccuucucuuaag

SEQ ID NO: 886046 - RNA, 19 nt, Homo sapiens
  misc_RNA (1)...(19): siRNA sense strand
ggaacccucccucuguauc

SEQ ID NO: 886047 - RNA, 19 nt, Homo sapiens
  misc_RNA (1)...(19): siRNA sense strand
gcugcuucccuucucuuaa

SEQ ID NO: 886048 - RNA, 19 nt, Homo sapiens
  misc_RNA (1)...(19): siRNA sense strand
ccucugcuguuccucucuu

SEQ ID NO: 886049 - RNA, 19 nt, Homo sapiens
  misc_RNA (1)...(19): siRNA sense strand
gcucgcugcuucccuucuc

SEQ ID NO: 886050 - RNA, 19 nt, Homo sapiens
  misc_RNA (1)...(19): siRNA sense strand
ccuggaacccucccucugu

SEQ ID NO: 886051 - RNA, 19 nt, Homo sapiens
  misc_RNA (1)...(19): siRNA sense strand
gaacaugggcccaggaguu

SEQ ID NO: 886052 - RNA, 19 nt, Homo sapiens
  misc_RNA (1)...(19): siRNA sense strand
gcgagaaguuggcgcugua

SEQ ID NO: 886053 - RNA, 19 nt, Homo sapiens
  misc_RNA (1)...(19): siRNA sense strand
gaaaacauguacacuauca

SEQ ID NO: 886054 - RNA, 19 nt, Homo sapiens
  misc_RNA (1)...(19): siRNA sense strand
gcgaaaacauguacacuau

SEQ ID NO: 886055 - RNA, 19 nt, Homo sapiens
  misc_RNA (1)...(19): siRNA sense strand
gaaguuggcgcuguacguu

SEQ ID NO: 886056 - RNA, 19 nt, Homo sapiens
  misc_RNA (1)...(19): siRNA sense strand
ccaaggccuuccaggacua

SEQ ID NO: 886057 - RNA, 19 nt, Homo sapiens
  misc_RNA (1)...(19): siRNA sense strand
gagauccgaugggagaaga

SEQ ID NO: 886058 - RNA, 19 nt, Homo sapiens
  misc_RNA (1)...(19): siRNA sense strand
aguuggcgcuguacguuua

SEQ ID NO: 886059 - RNA, 19 nt, Homo sapiens
  misc_RNA (1)...(19): siRNA sense strand
cauggcggcuggcuucuuc

SEQ ID NO: 886060 - RNA, 19 nt, Homo sapiens
  misc_RNA (1)...(19): siRNA sense strand
cgcuguacguuuaugagua

SEQ ID NO: 886061 - RNA, 19 nt, Homo sapiens
  misc_RNA (1)...(19): siRNA sense strand
gaaacucgauccccuacuc

SEQ ID NO: 886062 - RNA, 19 nt, Homo sapiens
  misc_RNA (1)...(19): siRNA sense strand
uccaccaacuccagcgaaa

SEQ ID NO: 886063 - RNA, 19 nt, Homo sapiens
  misc_RNA (1)...(19): siRNA sense strand
ugaagaagauucgccguua

SEQ ID NO: 886064 - RNA, 19 nt, Homo sapiens
  misc_RNA (1)...(19): siRNA sense strand
ggagagagaggccaagaaa

SEQ ID NO: 886065 - RNA, 19 nt, Homo sapiens
  misc_RNA (1)...(19): siRNA sense strand
ggaagacgccugcgcuaaa

SEQ ID NO: 886066 - RNA, 19 nt, Homo sapiens
  misc_RNA (1)...(19): siRNA sense strand
gaaggcagcagaagucuau

SEQ ID NO: 886067 - RNA, 19 nt, Homo sapiens
  misc_RNA (1)...(19): siRNA sense strand
gugaagaggugccugaaug

SEQ ID NO: 886068 - RNA, 19 nt, Homo sapiens
  misc_RNA (1)...(19): siRNA sense strand
cgacaaauguaaagacaag

SEQ ID NO: 886069 - RNA, 19 nt, Homo sapiens
  misc_RNA (1)...(19): siRNA sense strand
gaucaaguuugcccuaaag

SEQ ID NO: 886070 - RNA, 19 nt, Homo sapiens
  misc_RNA (1)...(19): siRNA sense strand
gagaucaaguuugcccuaa

SEQ ID NO: 886071 - RNA, 19 nt, Homo sapiens
  misc_RNA (1)...(19): siRNA sense strand
gaagauucgccguuacaaa

SEQ ID NO: 886072 - RNA, 19 nt, Homo sapiens
  misc_RNA (1)...(19): siRNA sense strand
gaagacgccugcgcuaaag

SEQ ID NO: 886073 - RNA, 19 nt, Homo sapiens
  misc_RNA (1)...(19): siRNA sense strand
gcaggaagccagcggagaa

SEQ ID NO: 886074 - RNA, 19 nt, Homo sapiens
  misc_RNA (1)...(19): siRNA sense strand
gcacagugagaucaaguuu

SEQ ID NO: 886075 - RNA, 19 nt, Homo sapiens
  misc_RNA (1)...(19): siRNA sense strand
ggagagcgacucagacuca

SEQ ID NO: 886076 - RNA, 19 nt, Homo sapiens
  misc_RNA (1)...(19): siRNA sense strand
acaggaagguagagaagaa

SEQ ID NO: 886077 - RNA, 19 nt, Homo sapiens
  misc_RNA (1)...(19): siRNA sense strand
gaagaagauucgccguuac

SEQ ID NO: 886078 - RNA, 19 nt, Homo sapiens
  misc_RNA (1)...(19): siRNA sense strand
gaagguagagaagaagaaa

SEQ ID NO: 886079 - RNA, 19 nt, Homo sapiens
  misc_RNA (1)...(19): siRNA sense strand
ggagaaggcagcagaaguc

SEQ ID NO: 886080 - RNA, 19 nt, Homo sapiens
  misc_RNA (1)...(19): siRNA sense strand
cgacaacaguggccugaag

SEQ ID NO: 886081 - RNA, 19 nt, Homo sapiens
  misc_RNA (1)...(19): siRNA sense strand
gccaagaaaucagcgaaga

SEQ ID NO: 886082 - RNA, 19 nt, Homo sapiens
  misc_RNA (1)...(19): siRNA sense strand
acaaggacguaauggagaa

SEQ ID NO: 886083 - RNA, 19 nt, Homo sapiens
  misc_RNA (1)...(19): siRNA sense strand
gaggagaacucggaaagcu

SEQ ID NO: 886084 - RNA, 19 nt, Homo sapiens
  misc_RNA (1)...(19): siRNA sense strand
ccucucagauccuccagaa

SEQ ID NO: 886085 - RNA, 19 nt, Homo sapiens
  misc_RNA (1)...(19): siRNA sense strand
gggacuugguguucgcuaa

SEQ ID NO: 886086 - RNA, 19 nt, Homo sapiens
  misc_RNA (1)...(19): siRNA sense strand
acaguggccugaagaggaa

SEQ ID NO: 886087 - RNA, 19 nt, Homo sapiens
  misc_RNA (1)...(19): siRNA sense strand
gagagaggccaagaaauca

SEQ ID NO: 886088 - RNA, 19 nt, Homo sapiens
  misc_RNA (1)...(19): siRNA sense strand
ugugggagauccagaacaa

SEQ ID NO: 886089 - RNA, 19 nt, Homo sapiens
  misc_RNA (1)...(19): siRNA sense strand
ucucagauccuccagaaga

SEQ ID NO: 886090 - RNA, 19 nt, Homo sapiens
  misc_RNA (1)...(19): siRNA sense strand
agagagaggccaagaaauc

SEQ ID NO: 886091 - RNA, 19 nt, Homo sapiens
  misc_RNA (1)...(19): siRNA sense strand
gaagaggagaacucggaaa

SEQ ID NO: 886092 - RNA, 19 nt, Homo sapiens
  misc_RNA (1)...(19): siRNA sense strand
ggaagguagagaagaagaa

SEQ ID NO: 886093 - RNA, 19 nt, Homo sapiens
  misc_RNA (1)...(19): siRNA sense strand
gaucgaggcggugcagaaa

SEQ ID NO: 886094 - RNA, 19 nt, Homo sapiens
  misc_RNA (1)...(19): siRNA sense strand
ggauggagagcgacucaga

SEQ ID NO: 886095 - RNA, 19 nt, Homo sapiens
  misc_RNA (1)...(19): siRNA sense strand
acagugagaucaaguuugc

SEQ ID NO: 886096 - RNA, 19 nt, Homo sapiens
  misc_RNA (1)...(19): siRNA sense strand
acgaugagcccgucaagaa

SEQ ID NO: 886097 - RNA, 19 nt, Homo sapiens
  misc_RNA (1)...(19): siRNA sense strand
aaagaugucggucucgaaa

SEQ ID NO: 886098 - RNA, 19 nt, Homo sapiens
  misc_RNA (1)...(19): siRNA sense strand
ggagaaggccgaggagaag

SEQ ID NO: 886099 - RNA, 19 nt, Homo sapiens
  misc_RNA (1)...(19): siRNA sense strand
caacaaguaccccaucuuu

SEQ ID NO: 886100 - RNA, 19 nt, Homo sapiens
  misc_RNA (1)...(19): siRNA sense strand
ggacaggaagguagagaag

SEQ ID NO: 886101 - RNA, 19 nt, Homo sapiens
  misc_RNA (1)...(19): siRNA sense strand
ccaagaaaucagcgaagaa

SEQ ID NO: 886102 - RNA, 19 nt, Homo sapiens
  misc_RNA (1)...(19): siRNA sense strand
aggccgagcuggagagaga

SEQ ID NO: 886103 - RNA, 19 nt, Homo sapiens
  misc_RNA (1)...(19): siRNA sense strand
ggaaaccuggccagaagga

SEQ ID NO: 886104 - RNA, 19 nt, Homo sapiens
  misc_RNA (1)...(19): siRNA sense strand
caagaaaucagcgaagaag

SEQ ID NO: 886105 - RNA, 19 nt, Homo sapiens
  misc_RNA (1)...(19): siRNA sense strand
caagaggaaaggcuucaau

SEQ ID NO: 886106 - RNA, 19 nt, Homo sapiens
  misc_RNA (1)...(19): siRNA sense strand
agaggaaaggcuucaauga

SEQ ID NO: 886107 - RNA, 19 nt, Homo sapiens
  misc_RNA (1)...(19): siRNA sense strand
cgacucagacucagacaag

SEQ ID NO: 886108 - RNA, 19 nt, Homo sapiens
  misc_RNA (1)...(19): siRNA sense strand
gcccagcaccgaucucuca

SEQ ID NO: 886109 - RNA, 19 nt, Homo sapiens
  misc_RNA (1)...(19): siRNA sense strand
guggccaccuugaagaaga

SEQ ID NO: 886110 - RNA, 19 nt, Homo sapiens
  misc_RNA (1)...(19): siRNA sense strand
gcuucucgauggacaggaa

SEQ ID NO: 886111 - RNA, 19 nt, Homo sapiens
  misc_RNA (1)...(19): siRNA sense strand
agaucaaguuugcccuaaa

SEQ ID NO: 886112 - RNA, 19 nt, Homo sapiens
  misc_RNA (1)...(19): siRNA sense strand
caagguguggcuccucuga

SEQ ID NO: 886113 - RNA, 19 nt, Homo sapiens
  misc_RNA (1)...(19): siRNA sense strand
ggagaaggcggaggacaag

SEQ ID NO: 886114 - RNA, 19 nt, Homo sapiens
  misc_RNA (1)...(19): siRNA sense strand
ggaagcccaacaagaggaa

SEQ ID NO: 886115 - RNA, 19 nt, Homo sapiens
  misc_RNA (1)...(19): siRNA sense strand
cgaacaaggacguaaugga

SEQ ID NO: 886116 - RNA, 19 nt, Homo sapiens
  misc_RNA (1)...(19): siRNA sense strand
gguguucgcuaagaugaag

SEQ ID NO: 886117 - RNA, 19 nt, Homo sapiens
  misc_RNA (1)...(19): siRNA sense strand
uacgacaaauguaaagaca

SEQ ID NO: 886118 - RNA, 19 nt, Homo sapiens
  misc_RNA (1)...(19): siRNA sense strand
ggagagcgcagaggacaag

SEQ ID NO: 886119 - RNA, 19 nt, Homo sapiens
  misc_RNA (1)...(19): siRNA sense strand
ucgaggcggugcagaaagu

SEQ ID NO: 886120 - RNA, 19 nt, Homo sapiens
  misc_RNA (1)...(19): siRNA sense strand
gagagagaggccaagaaau

SEQ ID NO: 886121 - RNA, 19 nt, Homo sapiens
  misc_RNA (1)...(19): siRNA sense strand
uaaagaugucggucucgaa

SEQ ID NO: 886122 - RNA, 19 nt, Homo sapiens
  misc_RNA (1)...(19): siRNA sense strand
gacaacaguggccugaaga

SEQ ID NO: 886123 - RNA, 19 nt, Homo sapiens
  misc_RNA (1)...(19): siRNA sense strand
aggcugggauggagaagga

SEQ ID NO: 886124 - RNA, 19 nt, Homo sapiens
  misc_RNA (1)...(19): siRNA sense strand
gaacucggaaagcucaucu

SEQ ID NO: 886125 - RNA, 19 nt, Homo sapiens
  misc_RNA (1)...(19): siRNA sense strand
aagauucgccguuacaaag

SEQ ID NO: 886126 - RNA, 19 nt, Homo sapiens
  misc_RNA (1)...(19): siRNA sense strand
guuacaaagcgaacaagga

SEQ ID NO: 886127 - RNA, 19 nt, Homo sapiens
  misc_RNA (1)...(19): siRNA sense strand
gaccagcgaccaggacuuc

SEQ ID NO: 886128 - RNA, 19 nt, Homo sapiens
  misc_RNA (1)...(19): siRNA sense strand
gacuugguguucgcuaaga

SEQ ID NO: 886129 - RNA, 19 nt, Homo sapiens
  misc_RNA (1)...(19): siRNA sense strand
cgaugugucugugaagaag

SEQ ID NO: 886130 - RNA, 19 nt, Homo sapiens
  misc_RNA (1)...(19): siRNA sense strand
agacaagaguagcgacaac

SEQ ID NO: 886131 - RNA, 19 nt, Homo sapiens
  misc_RNA (1)...(19): siRNA sense strand
ggacuugguguucgcuaag

SEQ ID NO: 886132 - RNA, 19 nt, Homo sapiens
  misc_RNA (1)...(19): siRNA sense strand
caagaguagcgacaacagu

SEQ ID NO: 886133 - RNA, 19 nt, Homo sapiens
  misc_RNA (1)...(19): siRNA sense strand
cucagauccuccagaagaa

SEQ ID NO: 886134 - RNA, 19 nt, Homo sapiens
  misc_RNA (1)...(19): siRNA sense strand
cagaagcugcacagugaga

SEQ ID NO: 886135 - RNA, 19 nt, Homo sapiens
  misc_RNA (1)...(19): siRNA sense strand
caaauguaaagacaaguac

SEQ ID NO: 886136 - RNA, 19 nt, Homo sapiens
  misc_RNA (1)...(19): siRNA sense strand
gaagcugcacagugagauc

SEQ ID NO: 886137 - RNA, 19 nt, Homo sapiens
  misc_RNA (1)...(19): siRNA sense strand
caaagcgaacaaggacgua

SEQ ID NO: 886138 - RNA, 19 nt, Homo sapiens
  misc_RNA (1)...(19): siRNA sense strand
gccagaaggagaagagagu

SEQ ID NO: 886139 - RNA, 19 nt, Homo sapiens
  misc_RNA (1)...(19): siRNA sense strand
ugaagaccugcacgacgua

SEQ ID NO: 886140 - RNA, 19 nt, Homo sapiens
  misc_RNA (1)...(19): siRNA sense strand
gacucagacucagacaaga

SEQ ID NO: 886141 - RNA, 19 nt, Homo sapiens
  misc_RNA (1)...(19): siRNA sense strand
gacaggaagguagagaaga

SEQ ID NO: 886142 - RNA, 19 nt, Homo sapiens
  misc_RNA (1)...(19): siRNA sense strand
uggaggagaagcugcagaa

SEQ ID NO: 886143 - RNA, 19 nt, Homo sapiens
  misc_RNA (1)...(19): siRNA sense strand
aggagaaggccgaggagaa

SEQ ID NO: 886144 - RNA, 19 nt, Homo sapiens
  misc_RNA (1)...(19): siRNA sense strand
gcauuaaagccuaaaguga

SEQ ID NO: 886145 - RNA, 19 nt, Homo sapiens
  misc_RNA (1)...(19): siRNA sense strand
uaaugaugcuaacguguau

SEQ ID NO: 886146 - RNA, 19 nt, Homo sapiens
  misc_RNA (1)...(19): siRNA sense strand
gagguccgcucccaacauc

SEQ ID NO: 886147 - RNA, 19 nt, Homo sapiens
  misc_RNA (1)...(19): siRNA sense strand
cuaaugaugcuaacgugua

SEQ ID NO: 886148 - RNA, 19 nt, Homo sapiens
  misc_RNA (1)...(19): siRNA sense strand
gcaccugacucuggaagcu

SEQ ID NO: 886149 - RNA, 19 nt, Homo sapiens
  misc_RNA (1)...(19): siRNA sense strand
ggaagcugaugaggcuaau

SEQ ID NO: 886150 - RNA, 19 nt, Homo sapiens
  misc_RNA (1)...(19): siRNA sense strand
aagcugaugaggcuaauga

SEQ ID NO: 886151 - RNA, 19 nt, Homo sapiens
  misc_RNA (1)...(19): siRNA sense strand
agccucagcuggguucuaa

SEQ ID NO: 886152 - RNA, 19 nt, Homo sapiens
  misc_RNA (1)...(19): siRNA sense strand
uaaagugaggcauguucaa

SEQ ID NO: 886153 - RNA, 19 nt, Homo sapiens
  misc_RNA (1)...(19): siRNA sense strand
ggcauuaaagccuaaagug

SEQ ID NO: 886154 - RNA, 19 nt, Homo sapiens
  misc_RNA (1)...(19): siRNA sense strand
gcugaugaggcuaaugaug

SEQ ID NO: 886155 - RNA, 19 nt, Homo sapiens
  misc_RNA (1)...(19): siRNA sense strand
agugaggcauguucaagau

SEQ ID NO: 886156 - RNA, 19 nt, Homo sapiens
  misc_RNA (1)...(19): siRNA sense strand
guucaagaugccacaguga

SEQ ID NO: 886157 - RNA, 19 nt, Homo sapiens
  misc_RNA (1)...(19): siRNA sense strand
gcucaggucuggaugauaa

SEQ ID NO: 886158 - RNA, 19 nt, Homo sapiens
  misc_RNA (1)...(19): siRNA sense strand
guacaacgccuucuggaaa

SEQ ID NO: 886159 - RNA, 19 nt, Homo sapiens
  misc_RNA (1)...(19): siRNA sense strand
gcauugaguuugacuggaa

SEQ ID NO: 886160 - RNA, 19 nt, Homo sapiens
  misc_RNA (1)...(19): siRNA sense strand
gagcauagacuccaacauc

SEQ ID NO: 886161 - RNA, 19 nt, Homo sapiens
  misc_RNA (1)...(19): siRNA sense strand
ggagucaccuaccucuuug

SEQ ID NO: 886162 - RNA, 19 nt, Homo sapiens
  misc_RNA (1)...(19): siRNA sense strand
ggauguggcagaccugaua

SEQ ID NO: 886163 - RNA, 19 nt, Homo sapiens
  misc_RNA (1)...(19): siRNA sense strand
acaucagucugguccauua

SEQ ID NO: 886164 - RNA, 19 nt, Homo sapiens
  misc_RNA (1)...(19): siRNA sense strand
guucuuggccacuuucuuu

SEQ ID NO: 886165 - RNA, 19 nt, Homo sapiens
  misc_RNA (1)...(19): siRNA sense strand
gcacuuuggcccuguaugu

SEQ ID NO: 886166 - RNA, 19 nt, Homo sapiens
  misc_RNA (1)...(19): siRNA sense strand
gaugauaacacgcuaugau

SEQ ID NO: 886167 - RNA, 19 nt, Homo sapiens
  misc_RNA (1)...(19): siRNA sense strand
gggaacugcuucgcucuug

SEQ ID NO: 886168 - RNA, 19 nt, Homo sapiens
  misc_RNA (1)...(19): siRNA sense strand
cugcugagcuuauuauguc

SEQ ID NO: 886169 - RNA, 19 nt, Homo sapiens
  misc_RNA (1)...(19): siRNA sense strand
gggaaggcggcaucuauga

SEQ ID NO: 886170 - RNA, 19 nt, Homo sapiens
  misc_RNA (1)...(19): siRNA sense strand
gaguuugacuggaaguaca

SEQ ID NO: 886171 - RNA, 19 nt, Homo sapiens
  misc_RNA (1)...(19): siRNA sense strand
ggucuaaaccuugucaugu

SEQ ID NO: 886172 - RNA, 19 nt, Homo sapiens
  misc_RNA (1)...(19): siRNA sense strand
caacaucagucugguccau

SEQ ID NO: 886173 - RNA, 19 nt, Homo sapiens
  misc_RNA (1)...(19): siRNA sense strand
caagggagaguacaagauc

SEQ ID NO: 886174 - RNA, 19 nt, Homo sapiens
  misc_RNA (1)...(19): siRNA sense strand
gcaagggagaguacaagau

SEQ ID NO: 886175 - RNA, 19 nt, Homo sapiens
  misc_RNA (1)...(19): siRNA sense strand
guaugucgccguugucaau

SEQ ID NO: 886176 - RNA, 19 nt, Homo sapiens
  misc_RNA (1)...(19): siRNA sense strand
gauaacacgcuaugaucug

SEQ ID NO: 886177 - RNA, 19 nt, Homo sapiens
  misc_RNA (1)...(19): siRNA sense strand
uacaacgccuucuggaaau

SEQ ID NO: 886178 - RNA, 19 nt, Homo sapiens
  misc_RNA (1)...(19): siRNA sense strand
ggccacugcugagcuuauu

SEQ ID NO: 886179 - RNA, 19 nt, Homo sapiens
  misc_RNA (1)...(19): siRNA sense strand
uggagucaccuaccucuuu

SEQ ID NO: 886180 - RNA, 19 nt, Homo sapiens
  misc_RNA (1)...(19): siRNA sense strand
ccacugcugagcuuauuau

SEQ ID NO: 886181 - RNA, 19 nt, Homo sapiens
  misc_RNA (1)...(19): siRNA sense strand
gucuaaaccuugucauguc

SEQ ID NO: 886182 - RNA, 19 nt, Homo sapiens
  misc_RNA (1)...(19): siRNA sense strand
gcuucgcucuugccuacuu

SEQ ID NO: 886183 - RNA, 19 nt, Homo sapiens
  misc_RNA (1)...(19): siRNA sense strand
gaaggcggcaucuaugacu

SEQ ID NO: 886184 - RNA, 19 nt, Homo sapiens
  misc_RNA (1)...(19): siRNA sense strand
gagaguacaagaucauggu

SEQ ID NO: 886185 - RNA, 19 nt, Homo sapiens
  misc_RNA (1)...(19): siRNA sense strand
agcauagacuccaacauca

SEQ ID NO: 886186 - RNA, 19 nt, Homo sapiens
  misc_RNA (1)...(19): siRNA sense strand
uaacacgcuaugaucugua

SEQ ID NO: 886187 - RNA, 19 nt, Homo sapiens
  misc_RNA (1)...(19): siRNA sense strand
uauuaugucccgcugcauu

SEQ ID NO: 886188 - RNA, 19 nt, Homo sapiens
  misc_RNA (1)...(19): siRNA sense strand
ucagcacuuuggcccugua

SEQ ID NO: 886189 - RNA, 19 nt, Homo sapiens
  misc_RNA (1)...(19): siRNA sense strand
guuccucagugucuacaag

SEQ ID NO: 886190 - RNA, 19 nt, Homo sapiens
  misc_RNA (1)...(19): siRNA sense strand
ggaaggcggcaucuaugac

SEQ ID NO: 886191 - RNA, 19 nt, Homo sapiens
  misc_RNA (1)...(19): siRNA sense strand
auaacacgcuaugaucugu

SEQ ID NO: 886192 - RNA, 19 nt, Homo sapiens
  misc_RNA (1)...(19): siRNA sense strand
cauagacuccaacaucagu

SEQ ID NO: 886193 - RNA, 19 nt, Homo sapiens
  misc_RNA (1)...(19): siRNA sense strand
ggcaagggagaguacaaga

SEQ ID NO: 886194 - RNA, 19 nt, Homo sapiens
  misc_RNA (1)...(19): siRNA sense strand
caugaaggccagcguggau

SEQ ID NO: 886195 - RNA, 19 nt, Homo sapiens
  misc_RNA (1)...(19): siRNA sense strand
ucagucugguccauuacau

SEQ ID NO: 886196 - RNA, 19 nt, Homo sapiens
  misc_RNA (1)...(19): siRNA sense strand
ggaaauaaauggugaggaa

SEQ ID NO: 886197 - RNA, 19 nt, Homo sapiens
  misc_RNA (1)...(19): siRNA sense strand
gaaggaagauggaauggaa

SEQ ID NO: 886198 - RNA, 19 nt, Homo sapiens
  misc_RNA (1)...(19): siRNA sense strand
gaagaugccuggaaagguu

SEQ ID NO: 886199 - RNA, 19 nt, Homo sapiens
  misc_RNA (1)...(19): siRNA sense strand
gagauagacugcagcauau

SEQ ID NO: 886200 - RNA, 19 nt, Homo sapiens
  misc_RNA (1)...(19): siRNA sense strand
gaauugaugugggaacuuu

SEQ ID NO: 886201 - RNA, 19 nt, Homo sapiens
  misc_RNA (1)...(19): siRNA sense strand
gacaauaacuugacucagu

SEQ ID NO: 886202 - RNA, 19 nt, Homo sapiens
  misc_RNA (1)...(19): siRNA sense strand
gaacuuugcugaaaucaac

SEQ ID NO: 886203 - RNA, 19 nt, Homo sapiens
  misc_RNA (1)...(19): siRNA sense strand
caacugguguguccaauuc

SEQ ID NO: 886204 - RNA, 19 nt, Homo sapiens
  misc_RNA (1)...(19): siRNA sense strand
ggaagaaauccuaaugaaa

SEQ ID NO: 886205 - RNA, 19 nt, Homo sapiens
  misc_RNA (1)...(19): siRNA sense strand
gagaaagaguuugcugaaa

SEQ ID NO: 886206 - RNA, 19 nt, Homo sapiens
  misc_RNA (1)...(19): siRNA sense strand
ccuaagaaauccaacagaa

SEQ ID NO: 886207 - RNA, 19 nt, Homo sapiens
  misc_RNA (1)...(19): siRNA sense strand
ggagaaggauauccagaca

SEQ ID NO: 886208 - RNA, 19 nt, Homo sapiens
  misc_RNA (1)...(19): siRNA sense strand
gcaaagggagcauacaaau

SEQ ID NO: 886209 - RNA, 19 nt, Homo sapiens
  misc_RNA (1)...(19): siRNA sense strand
caaauggaguugagcacuu

SEQ ID NO: 886210 - RNA, 19 nt, Homo sapiens
  misc_RNA (1)...(19): siRNA sense strand
gaaaucaaccuguaauacu

SEQ ID NO: 886211 - RNA, 19 nt, Homo sapiens
  misc_RNA (1)...(19): siRNA sense strand
ggagaaagaguuugcugaa

SEQ ID NO: 886212 - RNA, 19 nt, Homo sapiens
  misc_RNA (1)...(19): siRNA sense strand
caaguucauucuguagaua

SEQ ID NO: 886213 - RNA, 19 nt, Homo sapiens
  misc_RNA (1)...(19): siRNA sense strand
ggaggaaggcaaagaaguu

SEQ ID NO: 886214 - RNA, 19 nt, Homo sapiens
  misc_RNA (1)...(19): siRNA sense strand
agagauagacugcagcaua

SEQ ID NO: 886215 - RNA, 19 nt, Homo sapiens
  misc_RNA (1)...(19): siRNA sense strand
gaggaaggcaaagaaguua

SEQ ID NO: 886216 - RNA, 19 nt, Homo sapiens
  misc_RNA (1)...(19): siRNA sense strand
gaguugagcacuugugaaa

SEQ ID NO: 886217 - RNA, 19 nt, Homo sapiens
  misc_RNA (1)...(19): siRNA sense strand
ugaaaacacugaaaacuug

SEQ ID NO: 886218 - RNA, 19 nt, Homo sapiens
  misc_RNA (1)...(19): siRNA sense strand
ccagacagcccuaagaaau

SEQ ID NO: 886219 - RNA, 19 nt, Homo sapiens
  misc_RNA (1)...(19): siRNA sense strand
gaaacauccuauuauacca

SEQ ID NO: 886220 - RNA, 19 nt, Homo sapiens
  misc_RNA (1)...(19): siRNA sense strand
gaaauaaggaaggaagaug

SEQ ID NO: 886221 - RNA, 19 nt, Homo sapiens
  misc_RNA (1)...(19): siRNA sense strand
aaacuuggcccuacagugu

SEQ ID NO: 886222 - RNA, 19 nt, Homo sapiens
  misc_RNA (1)...(19): siRNA sense strand
caaauggcagucugugaaa

SEQ ID NO: 886223 - RNA, 19 nt, Homo sapiens
  misc_RNA (1)...(19): siRNA sense strand
ucaaguugcucuccggaau

SEQ ID NO: 886224 - RNA, 19 nt, Homo sapiens
  misc_RNA (1)...(19): siRNA sense strand
agaaagaguuugcugaaaa

SEQ ID NO: 886225 - RNA, 19 nt, Homo sapiens
  misc_RNA (1)...(19): siRNA sense strand
gaaauucaaguucauucug

SEQ ID NO: 886226 - RNA, 19 nt, Homo sapiens
  misc_RNA (1)...(19): siRNA sense strand
ggacccagaaggagaaaga

SEQ ID NO: 886227 - RNA, 19 nt, Homo sapiens
  misc_RNA (1)...(19): siRNA sense strand
aaagggagcauacaaaugg

SEQ ID NO: 886228 - RNA, 19 nt, Homo sapiens
  misc_RNA (1)...(19): siRNA sense strand
ggaucuuguuggaaauauu

SEQ ID NO: 886229 - RNA, 19 nt, Homo sapiens
  misc_RNA (1)...(19): siRNA sense strand
caaagggagcauacaaaug

SEQ ID NO: 886230 - RNA, 19 nt, Homo sapiens
  misc_RNA (1)...(19): siRNA sense strand
ccagaaggagaaagaguuu

SEQ ID NO: 886231 - RNA, 19 nt, Homo sapiens
  misc_RNA (1)...(19): siRNA sense strand
ccagaaguguggcugaaag

SEQ ID NO: 886232 - RNA, 19 nt, Homo sapiens
  misc_RNA (1)...(19): siRNA sense strand
cuaagaaauccaacagaaa

SEQ ID NO: 886233 - RNA, 19 nt, Homo sapiens
  misc_RNA (1)...(19): siRNA sense strand
ugaagaccuuggaagaaug

SEQ ID NO: 886234 - RNA, 19 nt, Homo sapiens
  misc_RNA (1)...(19): siRNA sense strand
ucaaguucauucuguagau

SEQ ID NO: 886235 - RNA, 19 nt, Homo sapiens
  misc_RNA (1)...(19): siRNA sense strand
gaaguguggcugaaagaca

SEQ ID NO: 886236 - RNA, 19 nt, Homo sapiens
  misc_RNA (1)...(19): siRNA sense strand
aacacaagcuuuagugaca

SEQ ID NO: 886237 - RNA, 19 nt, Homo sapiens
  misc_RNA (1)...(19): siRNA sense strand
cagcauaucaagugaggaa

SEQ ID NO: 886238 - RNA, 19 nt, Homo sapiens
  misc_RNA (1)...(19): siRNA sense strand
gaaaggcaaauggaguuga

SEQ ID NO: 886239 - RNA, 19 nt, Homo sapiens
  misc_RNA (1)...(19): siRNA sense strand
cugaagaccuuggaagaau

SEQ ID NO: 886240 - RNA, 19 nt, Homo sapiens
  misc_RNA (1)...(19): siRNA sense strand
caaaaugucagaacuaaga

SEQ ID NO: 886241 - RNA, 19 nt, Homo sapiens
  misc_RNA (1)...(19): siRNA sense strand
ugugggaacuuugcugaaa

SEQ ID NO: 886242 - RNA, 19 nt, Homo sapiens
  misc_RNA (1)...(19): siRNA sense strand
aauaaauggugaggaagaa

SEQ ID NO: 886243 - RNA, 19 nt, Homo sapiens
  misc_RNA (1)...(19): siRNA sense strand
gcucaaguccagcaagaug

SEQ ID NO: 886244 - RNA, 19 nt, Homo sapiens
  misc_RNA (1)...(19): siRNA sense strand
acaaauggcagucugugaa

SEQ ID NO: 886245 - RNA, 19 nt, Homo sapiens
  misc_RNA (1)...(19): siRNA sense strand
uugcugaaaucaaccugua

SEQ ID NO: 886246 - RNA, 19 nt, Homo sapiens
  misc_RNA (1)...(19): siRNA sense strand
ugucagaacuaagacucua

SEQ ID NO: 886247 - RNA, 19 nt, Homo sapiens
  misc_RNA (1)...(19): siRNA sense strand
uaauauaacaguccaaggu

SEQ ID NO: 886248 - RNA, 19 nt, Homo sapiens
  misc_RNA (1)...(19): siRNA sense strand
aaauggaguugagcacuug

SEQ ID NO: 886249 - RNA, 19 nt, Homo sapiens
  misc_RNA (1)...(19): siRNA sense strand
aacuaagacucuacuguga

SEQ ID NO: 886250 - RNA, 19 nt, Homo sapiens
  misc_RNA (1)...(19): siRNA sense strand
gcggauguagcccagguua

SEQ ID NO: 886251 - RNA, 19 nt, Homo sapiens
  misc_RNA (1)...(19): siRNA sense strand
uuaccacucuccagaagau

SEQ ID NO: 886252 - RNA, 19 nt, Homo sapiens
  misc_RNA (1)...(19): siRNA sense strand
uaucccaacuuucuuuagu

SEQ ID NO: 886253 - RNA, 19 nt, Homo sapiens
  misc_RNA (1)...(19): siRNA sense strand
ggaaggcaaagaaguuauc

SEQ ID NO: 886254 - RNA, 19 nt, Homo sapiens
  misc_RNA (1)...(19): siRNA sense strand
caaaagaagugaccacaac

SEQ ID NO: 886255 - RNA, 19 nt, Homo sapiens
  misc_RNA (1)...(19): siRNA sense strand
guacaaguggaccaacuau

SEQ ID NO: 886256 - RNA, 19 nt, Homo sapiens
  misc_RNA (1)...(19): siRNA sense strand
agacaaacuuggcccuaca

SEQ ID NO: 886257 - RNA, 19 nt, Homo sapiens
  misc_RNA (1)...(19): siRNA sense strand
cacaagcuuuagugacauu

SEQ ID NO: 886258 - RNA, 19 nt, Homo sapiens
  misc_RNA (1)...(19): siRNA sense strand
ccaacuuucuuuaguacca

SEQ ID NO: 886259 - RNA, 19 nt, Homo sapiens
  misc_RNA (1)...(19): siRNA sense strand
ugcugugguuccaguauua

SEQ ID NO: 886260 - RNA, 19 nt, Homo sapiens
  misc_RNA (1)...(19): siRNA sense strand
gugggaacuuugcugaaau

SEQ ID NO: 886261 - RNA, 19 nt, Homo sapiens
  misc_RNA (1)...(19): siRNA sense strand
cgacugaagcccucuugug

SEQ ID NO: 886262 - RNA, 19 nt, Homo sapiens
  misc_RNA (1)...(19): siRNA sense strand
gauggaucuuguuggaaau

SEQ ID NO: 886263 - RNA, 19 nt, Homo sapiens
  misc_RNA (1)...(19): siRNA sense strand
uaaauggugaggaagaaau

SEQ ID NO: 886264 - RNA, 19 nt, Homo sapiens
  misc_RNA (1)...(19): siRNA sense strand
aaauaaauggugaggaaga

SEQ ID NO: 886265 - RNA, 19 nt, Homo sapiens
  misc_RNA (1)...(19): siRNA sense strand
ggaaaggcaaauggaguug

SEQ ID NO: 886266 - RNA, 19 nt, Homo sapiens
  misc_RNA (1)...(19): siRNA sense strand
guaggacccagaaggagaa

SEQ ID NO: 886267 - RNA, 19 nt, Homo sapiens
  misc_RNA (1)...(19): siRNA sense strand
ugacauugaacuucuggaa

SEQ ID NO: 886268 - RNA, 19 nt, Homo sapiens
  misc_RNA (1)...(19): siRNA sense strand
ggaaggaagauggaaugga

SEQ ID NO: 886269 - RNA, 19 nt, Homo sapiens
  misc_RNA (1)...(19): siRNA sense strand
gcugaaaucaaccuguaau

SEQ ID NO: 886270 - RNA, 19 nt, Homo sapiens
  misc_RNA (1)...(19): siRNA sense strand
gaagcauucuuggcaucau

SEQ ID NO: 886271 - RNA, 19 nt, Homo sapiens
  misc_RNA (1)...(19): siRNA sense strand
accaugaacacaagcuuua

SEQ ID NO: 886272 - RNA, 19 nt, Homo sapiens
  misc_RNA (1)...(19): siRNA sense strand
guugagcacuugugaaaau

SEQ ID NO: 886273 - RNA, 19 nt, Homo sapiens
  misc_RNA (1)...(19): siRNA sense strand
ggaagaaugcaugcagauc

SEQ ID NO: 886274 - RNA, 19 nt, Homo sapiens
  misc_RNA (1)...(19): siRNA sense strand
acugugaccuccuuguuca

SEQ ID NO: 886275 - RNA, 19 nt, Homo sapiens
  misc_RNA (1)...(19): siRNA sense strand
uuagugacauugaacuucu

SEQ ID NO: 886276 - RNA, 19 nt, Homo sapiens
  misc_RNA (1)...(19): siRNA sense strand
aagcuuuagugacauugaa

SEQ ID NO: 886277 - RNA, 19 nt, Homo sapiens
  misc_RNA (1)...(19): siRNA sense strand
guuaucccaacuuucuuua

SEQ ID NO: 886278 - RNA, 19 nt, Homo sapiens
  misc_RNA (1)...(19): siRNA sense strand
acaaguggaccaacuaucu

SEQ ID NO: 886279 - RNA, 19 nt, Homo sapiens
  misc_RNA (1)...(19): siRNA sense strand
ggaacuuugcugaaaucaa

SEQ ID NO: 886280 - RNA, 19 nt, Homo sapiens
  misc_RNA (1)...(19): siRNA sense strand
aaaggcaaauggaguugag

SEQ ID NO: 886281 - RNA, 19 nt, Homo sapiens
  misc_RNA (1)...(19): siRNA sense strand
ugaaaucaaccuguaauac

SEQ ID NO: 886282 - RNA, 19 nt, Homo sapiens
  misc_RNA (1)...(19): siRNA sense strand
ggaguugagcacuugugaa

SEQ ID NO: 886283 - RNA, 19 nt, Homo sapiens
  misc_RNA (1)...(19): siRNA sense strand
cgaaguggaggcggaugua

SEQ ID NO: 886284 - RNA, 19 nt, Homo sapiens
  misc_RNA (1)...(19): siRNA sense strand
uaaccaacaaagaagaguu

SEQ ID NO: 886285 - RNA, 19 nt, Homo sapiens
  misc_RNA (1)...(19): siRNA sense strand
ggaucagacucaaguugcu

SEQ ID NO: 886286 - RNA, 19 nt, Homo sapiens
  misc_RNA (1)...(19): siRNA sense strand
uauaacaguccaaggugaa

SEQ ID NO: 886287 - RNA, 19 nt, Homo sapiens
  misc_RNA (1)...(19): siRNA sense strand
cugaaaucaaccuguaaua

SEQ ID NO: 886288 - RNA, 19 nt, Homo sapiens
  misc_RNA (1)...(19): siRNA sense strand
cagacagcccuaagaaauc

SEQ ID NO: 886289 - RNA, 19 nt, Homo sapiens
  misc_RNA (1)...(19): siRNA sense strand
ggauguagcccagguuagg

SEQ ID NO: 886290 - RNA, 19 nt, Homo sapiens
  misc_RNA (1)...(19): siRNA sense strand
aguccaaggugaaauaagg

SEQ ID NO: 886291 - RNA, 19 nt, Homo sapiens
  misc_RNA (1)...(19): siRNA sense strand
cuauuaugauucuccugaa

SEQ ID NO: 886292 - RNA, 19 nt, Homo sapiens
  misc_RNA (1)...(19): siRNA sense strand
aacaguauuucuaccugaa

SEQ ID NO: 886293 - RNA, 19 nt, Homo sapiens
  misc_RNA (1)...(19): siRNA sense strand
uaaggaaggaagauggaau

SEQ ID NO: 886294 - RNA, 19 nt, Homo sapiens
  misc_RNA (1)...(19): siRNA sense strand
ugaacacaagcuuuaguga

SEQ ID NO: 886295 - RNA, 19 nt, Homo sapiens
  misc_RNA (1)...(19): siRNA sense strand
uuaguaccaugaacacaag

SEQ ID NO: 886296 - RNA, 19 nt, Homo sapiens
  misc_RNA (1)...(19): siRNA sense strand
gaaggaggguuguacuuug

SEQ ID NO: 886297 - RNA, 19 nt, Homo sapiens
  misc_RNA (1)...(19): siRNA sense strand
gaacaucgaggucaaggaa

SEQ ID NO: 886298 - RNA, 19 nt, Homo sapiens
  misc_RNA (1)...(19): siRNA sense strand
ggaaggaggguuguacuuu

SEQ ID NO: 886299 - RNA, 19 nt, Homo sapiens
  misc_RNA (1)...(19): siRNA sense strand
gggaagcuguaccaucaga

SEQ ID NO: 886300 - RNA, 19 nt, Homo sapiens
  misc_RNA (1)...(19): siRNA sense strand
cccaaagacuguucagaga

SEQ ID NO: 886301 - RNA, 19 nt, Homo sapiens
  misc_RNA (1)...(19): siRNA sense strand
cagagaacaucgaggucaa

SEQ ID NO: 886302 - RNA, 19 nt, Homo sapiens
  misc_RNA (1)...(19): siRNA sense strand
aaggaggguuguacuuuga

SEQ ID NO: 886303 - RNA, 19 nt, Homo sapiens
  misc_RNA (1)...(19): siRNA sense strand
ccaaagacuguucagagaa

SEQ ID NO: 886304 - RNA, 19 nt, Homo sapiens
  misc_RNA (1)...(19): siRNA sense strand
gaacucugggcuacgcuau

SEQ ID NO: 886305 - RNA, 19 nt, Homo sapiens
  misc_RNA (1)...(19): siRNA sense strand
gacccucuauccggcagua

SEQ ID NO: 886306 - RNA, 19 nt, Homo sapiens
  misc_RNA (1)...(19): siRNA sense strand
acucugggcuacgcuauug

SEQ ID NO: 886307 - RNA, 19 nt, Homo sapiens
  misc_RNA (1)...(19): siRNA sense strand
gcugcagacugaccacuac

SEQ ID NO: 886308 - RNA, 19 nt, Homo sapiens
  misc_RNA (1)...(19): siRNA sense strand
gcuggugguucuggacaug

SEQ ID NO: 886309 - RNA, 19 nt, Homo sapiens
  misc_RNA (1)...(19): siRNA sense strand
ggacauggaggagggaacu

SEQ ID NO: 886310 - RNA, 19 nt, Homo sapiens
  misc_RNA (1)...(19): siRNA sense strand
caaggaaggaggguuguac

SEQ ID NO: 886311 - RNA, 19 nt, Homo sapiens
  misc_RNA (1)...(19): siRNA sense strand
gcccacagcucaccaccua

SEQ ID NO: 886312 - RNA, 19 nt, Homo sapiens
  misc_RNA (1)...(19): siRNA sense strand
gcagaugccaccaggagaa

SEQ ID NO: 886313 - RNA, 19 nt, Homo sapiens
  misc_RNA (1)...(19): siRNA sense strand
gcucugggcagcuuucaaa

SEQ ID NO: 886314 - RNA, 19 nt, Homo sapiens
  misc_RNA (1)...(19): siRNA sense strand
gcugguaccucuucaacag

SEQ ID NO: 886315 - RNA, 19 nt, Homo sapiens
  misc_RNA (1)...(19): siRNA sense strand
caacagcugguaccucuuc

SEQ ID NO: 886316 - RNA, 19 nt, Homo sapiens
  misc_RNA (1)...(19): siRNA sense strand
ggaaagcuggccaccuuca

SEQ ID NO: 886317 - RNA, 19 nt, Homo sapiens
  misc_RNA (1)...(19): siRNA sense strand
ggggaaagcuggccaccuu

SEQ ID NO: 886318 - RNA, 19 nt, Homo sapiens
  misc_RNA (1)...(19): siRNA sense strand
ucaacaguguggccuuuca

SEQ ID NO: 886319 - RNA, 19 nt, Homo sapiens
  misc_RNA (1)...(19): siRNA sense strand
gaaagcuggccaccuucaa

SEQ ID NO: 886320 - RNA, 19 nt, Homo sapiens
  misc_RNA (1)...(19): siRNA sense strand
ccacagcucaccaccuaug

SEQ ID NO: 886321 - RNA, 19 nt, Homo sapiens
  misc_RNA (1)...(19): siRNA sense strand
ggucuccucagcuguuuga

SEQ ID NO: 886322 - RNA, 19 nt, Homo sapiens
  misc_RNA (1)...(19): siRNA sense strand
cuucaacaguguggccuuu

SEQ ID NO: 886323 - RNA, 19 nt, Homo sapiens
  misc_RNA (1)...(19): siRNA sense strand
caacaguguggccuuucaa

SEQ ID NO: 886324 - RNA, 19 nt, Homo sapiens
  misc_RNA (1)...(19): siRNA sense strand
gaagaaggaacaugagaag

SEQ ID NO: 886325 - RNA, 19 nt, Homo sapiens
  misc_RNA (1)...(19): siRNA sense strand
ggacggaaaggaacaggaa

SEQ ID NO: 886326 - RNA, 19 nt, Homo sapiens
  misc_RNA (1)...(19): siRNA sense strand
uggaguaccuggucaagug

SEQ ID NO: 886327 - RNA, 19 nt, Homo sapiens
  misc_RNA (1)...(19): siRNA sense strand
gcaagggcaagcuggagua

SEQ ID NO: 886328 - RNA, 19 nt, Homo sapiens
  misc_RNA (1)...(19): siRNA sense strand
ggaagcaugcguacaguag

SEQ ID NO: 886329 - RNA, 19 nt, Homo sapiens
  misc_RNA (1)...(19): siRNA sense strand
gcaggcagagggaggguuu

SEQ ID NO: 886330 - RNA, 19 nt, Homo sapiens
  misc_RNA (1)...(19): siRNA sense strand
agaaggaacaugagaagga

SEQ ID NO: 886331 - RNA, 19 nt, Homo sapiens
  misc_RNA (1)...(19): siRNA sense strand
ggcugguccuccaaacaua

SEQ ID NO: 886332 - RNA, 19 nt, Homo sapiens
  misc_RNA (1)...(19): siRNA sense strand
gcacuucugccaacagucu

SEQ ID NO: 886333 - RNA, 19 nt, Homo sapiens
  misc_RNA (1)...(19): siRNA sense strand
gcugguccuccaaacauaa

SEQ ID NO: 886334 - RNA, 19 nt, Homo sapiens
  misc_RNA (1)...(19): siRNA sense strand
agaagaaggaacaugagaa

SEQ ID NO: 886335 - RNA, 19 nt, Homo sapiens
  misc_RNA (1)...(19): siRNA sense strand
cagaagaaggaacaugaga

SEQ ID NO: 886336 - RNA, 19 nt, Homo sapiens
  misc_RNA (1)...(19): siRNA sense strand
ccgagugcauccugagcaa

SEQ ID NO: 886337 - RNA, 19 nt, Homo sapiens
  misc_RNA (1)...(19): siRNA sense strand
uccagaagaaggaacauga

SEQ ID NO: 886338 - RNA, 19 nt, Homo sapiens
  misc_RNA (1)...(19): siRNA sense strand
cagcugcaccgacugaaga

SEQ ID NO: 886339 - RNA, 19 nt, Homo sapiens
  misc_RNA (1)...(19): siRNA sense strand
ccacagggcaaaugaaugu

SEQ ID NO: 886340 - RNA, 19 nt, Homo sapiens
  misc_RNA (1)...(19): siRNA sense strand
ggaaccacagggcaaauga

SEQ ID NO: 886341 - RNA, 19 nt, Homo sapiens
  misc_RNA (1)...(19): siRNA sense strand
gaaccacagggcaaaugaa

SEQ ID NO: 886342 - RNA, 19 nt, Homo sapiens
  misc_RNA (1)...(19): siRNA sense strand
ggacacugccagccucuuc

SEQ ID NO: 886343 - RNA, 19 nt, Homo sapiens
  misc_RNA (1)...(19): siRNA sense strand
gcuggccucaucuucguua

SEQ ID NO: 886344 - RNA, 19 nt, Homo sapiens
  misc_RNA (1)...(19): siRNA sense strand
uagcuggccucaucuucgu

SEQ ID NO: 886345 - RNA, 19 nt, Homo sapiens
  misc_RNA (1)...(19): siRNA sense strand
ggcaucaggugcugcugua

SEQ ID NO: 886346 - RNA, 19 nt, Homo sapiens
  misc_RNA (1)...(19): siRNA sense strand
gaaauucacaggacugacu

SEQ ID NO: 886347 - RNA, 19 nt, Homo sapiens
  misc_RNA (1)...(19): siRNA sense strand
ugcuguaccugguguagga

SEQ ID NO: 886348 - RNA, 19 nt, Homo sapiens
  misc_RNA (1)...(19): siRNA sense strand
caaaggaugugacuugcuu

SEQ ID NO: 886349 - RNA, 19 nt, Homo sapiens
  misc_RNA (1)...(19): siRNA sense strand
cacaagaucugaugguguu

SEQ ID NO: 886350 - RNA, 19 nt, Homo sapiens
  misc_RNA (1)...(19): siRNA sense strand
caagaucugaugguguuaa

SEQ ID NO: 886351 - RNA, 19 nt, Homo sapiens
  misc_RNA (1)...(19): siRNA sense strand
gaguuucucugcacaagcu

SEQ ID NO: 886352 - RNA, 19 nt, Homo sapiens
  misc_RNA (1)...(19): siRNA sense strand
aagaucugaugguguuaaa

SEQ ID NO: 886353 - RNA, 19 nt, Homo sapiens
  misc_RNA (1)...(19): siRNA sense strand
ggucucacaagaucugaug

SEQ ID NO: 886354 - RNA, 19 nt, Homo sapiens
  misc_RNA (1)...(19): siRNA sense strand
gggaguuucucugcacaag

SEQ ID NO: 886355 - RNA, 19 nt, Homo sapiens
  misc_RNA (1)...(19): siRNA sense strand
gaacagggacuuggugaga

SEQ ID NO: 886356 - RNA, 19 nt, Homo sapiens
  misc_RNA (1)...(19): siRNA sense strand
ggacagcacgugcaaagga

SEQ ID NO: 886357 - RNA, 19 nt, Homo sapiens
  misc_RNA (1)...(19): siRNA sense strand
ggagacagagcaaggaaca

SEQ ID NO: 886358 - RNA, 19 nt, Homo sapiens
  misc_RNA (1)...(19): siRNA sense strand
acagggacuuggugagaga

SEQ ID NO: 886359 - RNA, 19 nt, Homo sapiens
  misc_RNA (1)...(19): siRNA sense strand
gagcaaggaacagggacuu

SEQ ID NO: 886360 - RNA, 19 nt, Homo sapiens
  misc_RNA (1)...(19): siRNA sense strand
gaacaaguauguccgaugu

SEQ ID NO: 886361 - RNA, 19 nt, Homo sapiens
  misc_RNA (1)...(19): siRNA sense strand
gcaagacagugaagagaaa

SEQ ID NO: 886362 - RNA, 19 nt, Homo sapiens
  misc_RNA (1)...(19): siRNA sense strand
cagagugucuucauacuuu

SEQ ID NO: 886363 - RNA, 19 nt, Homo sapiens
  misc_RNA (1)...(19): siRNA sense strand
ugaaguaccuccaaacuag

SEQ ID NO: 886364 - RNA, 19 nt, Homo sapiens
  misc_RNA (1)...(19): siRNA sense strand
ggaaccagcuccagucagu

SEQ ID NO: 886365 - RNA, 19 nt, Homo sapiens
  misc_RNA (1)...(19): siRNA sense strand
gagugaagaucaaagacuu

SEQ ID NO: 886366 - RNA, 19 nt, Homo sapiens
  misc_RNA (1)...(19): siRNA sense strand
agaguuguauugugaagua

SEQ ID NO: 886367 - RNA, 19 nt, Homo sapiens
  misc_RNA (1)...(19): siRNA sense strand
uauguccgauguucuguua

SEQ ID NO: 886368 - RNA, 19 nt, Homo sapiens
  misc_RNA (1)...(19): siRNA sense strand
ugucaccgcuugaugcuaa

SEQ ID NO: 886369 - RNA, 19 nt, Homo sapiens
  misc_RNA (1)...(19): siRNA sense strand
ugcaggacaucguguauaa

SEQ ID NO: 886370 - RNA, 19 nt, Homo sapiens
  misc_RNA (1)...(19): siRNA sense strand
ugcaagaguuguauuguga

SEQ ID NO: 886371 - RNA, 19 nt, Homo sapiens
  misc_RNA (1)...(19): siRNA sense strand
ccacuacuaucgcuaugau

SEQ ID NO: 886372 - RNA, 19 nt, Homo sapiens
  misc_RNA (1)...(19): siRNA sense strand
ugaaagagaagaggaggua

SEQ ID NO: 886373 - RNA, 19 nt, Homo sapiens
  misc_RNA (1)...(19): siRNA sense strand
gcuaaacccucagcaugug

SEQ ID NO: 886374 - RNA, 19 nt, Homo sapiens
  misc_RNA (1)...(19): siRNA sense strand
ggaggagguucgagugaag

SEQ ID NO: 886375 - RNA, 19 nt, Homo sapiens
  misc_RNA (1)...(19): siRNA sense strand
cuucauacuuucugcaaga

SEQ ID NO: 886376 - RNA, 19 nt, Homo sapiens
  misc_RNA (1)...(19): siRNA sense strand
gugaaguaccuccaaacua

SEQ ID NO: 886377 - RNA, 19 nt, Homo sapiens
  misc_RNA (1)...(19): siRNA sense strand
acaaguauguccgauguuc

SEQ ID NO: 886378 - RNA, 19 nt, Homo sapiens
  misc_RNA (1)...(19): siRNA sense strand
caaugaaguucucccugau

SEQ ID NO: 886379 - RNA, 19 nt, Homo sapiens
  misc_RNA (1)...(19): siRNA sense strand
cauacuuucugcaagaguu

SEQ ID NO: 886380 - RNA, 19 nt, Homo sapiens
  misc_RNA (1)...(19): siRNA sense strand
gaaguucucccugaucaca

SEQ ID NO: 886381 - RNA, 19 nt, Homo sapiens
  misc_RNA (1)...(19): siRNA sense strand
gcuggugccuggcuugcaa

SEQ ID NO: 886382 - RNA, 19 nt, Homo sapiens
  misc_RNA (1)...(19): siRNA sense strand
caagaguuguauugugaag

SEQ ID NO: 886383 - RNA, 19 nt, Homo sapiens
  misc_RNA (1)...(19): siRNA sense strand
ccugaucacaugacaauga

SEQ ID NO: 886384 - RNA, 19 nt, Homo sapiens
  misc_RNA (1)...(19): siRNA sense strand
gagcugagguacgccaucu

SEQ ID NO: 886385 - RNA, 19 nt, Homo sapiens
  misc_RNA (1)...(19): siRNA sense strand
gcuaugaugagcaguugaa

SEQ ID NO: 886386 - RNA, 19 nt, Homo sapiens
  misc_RNA (1)...(19): siRNA sense strand
gugccuggcuugcaagaca

SEQ ID NO: 886387 - RNA, 19 nt, Homo sapiens
  misc_RNA (1)...(19): siRNA sense strand
gaggaggagguucgaguga

SEQ ID NO: 886388 - RNA, 19 nt, Homo sapiens
  misc_RNA (1)...(19): siRNA sense strand
uacaauacagugugaaaga

SEQ ID NO: 886389 - RNA, 19 nt, Homo sapiens
  misc_RNA (1)...(19): siRNA sense strand
gcaaagacaagaauaaaag

SEQ ID NO: 886390 - RNA, 19 nt, Homo sapiens
  misc_RNA (1)...(19): siRNA sense strand
gcaagaguuguauugugaa

SEQ ID NO: 886391 - RNA, 19 nt, Homo sapiens
  misc_RNA (1)...(19): siRNA sense strand
gagguucgagugaagauca

SEQ ID NO: 886392 - RNA, 19 nt, Homo sapiens
  misc_RNA (1)...(19): siRNA sense strand
caauacagugugaaagaga

SEQ ID NO: 886393 - RNA, 19 nt, Homo sapiens
  misc_RNA (1)...(19): siRNA sense strand
uguccgauguucuguuaga

SEQ ID NO: 886394 - RNA, 19 nt, Homo sapiens
  misc_RNA (1)...(19): siRNA sense strand
ucacagagugucuucauac

SEQ ID NO: 886395 - RNA, 19 nt, Homo sapiens
  misc_RNA (1)...(19): siRNA sense strand
aauacagugugaaagagaa

SEQ ID NO: 886396 - RNA, 19 nt, Homo sapiens
  misc_RNA (1)...(19): siRNA sense strand
cugaucacaugacaaugaa

SEQ ID NO: 886397 - RNA, 19 nt, Homo sapiens
  misc_RNA (1)...(19): siRNA sense strand
gcugaguucuggcaaagac

SEQ ID NO: 886398 - RNA, 19 nt, Homo sapiens
  misc_RNA (1)...(19): siRNA sense strand
aaagcguccugcagaacaa

SEQ ID NO: 886399 - RNA, 19 nt, Homo sapiens
  misc_RNA (1)...(19): siRNA sense strand
cugcaagaguuguauugug

SEQ ID NO: 886400 - RNA, 19 nt, Homo sapiens
  misc_RNA (1)...(19): siRNA sense strand
ugacaaugaagcagauaug

SEQ ID NO: 886401 - RNA, 19 nt, Homo sapiens
  misc_RNA (1)...(19): siRNA sense strand
cagcagcuuugaccacucu

SEQ ID NO: 886402 - RNA, 19 nt, Homo sapiens
  misc_RNA (1)...(19): siRNA sense strand
uggcaaagacaagaauaaa

SEQ ID NO: 886403 - RNA, 19 nt, Homo sapiens
  misc_RNA (1)...(19): siRNA sense strand
gcggcugaguucuggcaaa

SEQ ID NO: 886404 - RNA, 19 nt, Homo sapiens
  misc_RNA (1)...(19): siRNA sense strand
ccuccaaacuagcaaguac

SEQ ID NO: 886405 - RNA, 19 nt, Homo sapiens
  misc_RNA (1)...(19): siRNA sense strand
ccccuuugcuuuuacaaua

SEQ ID NO: 886406 - RNA, 19 nt, Homo sapiens
  misc_RNA (1)...(19): siRNA sense strand
cagcaugugcagcuccuuu

SEQ ID NO: 886407 - RNA, 19 nt, Homo sapiens
  misc_RNA (1)...(19): siRNA sense strand
acucuaaagcccacuacua

SEQ ID NO: 886408 - RNA, 19 nt, Homo sapiens
  misc_RNA (1)...(19): siRNA sense strand
gcagcuuugaccacucuaa

SEQ ID NO: 886409 - RNA, 19 nt, Homo sapiens
  misc_RNA (1)...(19): siRNA sense strand
cacauuguuugcugccuau

SEQ ID NO: 886410 - RNA, 19 nt, Homo sapiens
  misc_RNA (1)...(19): siRNA sense strand
cagcuuugaccacucuaaa

SEQ ID NO: 886411 - RNA, 19 nt, Homo sapiens
  misc_RNA (1)...(19): siRNA sense strand
agacacagccacugcucaa

SEQ ID NO: 886412 - RNA, 19 nt, Homo sapiens
  misc_RNA (1)...(19): siRNA sense strand
acaauacagugugaaagag

SEQ ID NO: 886413 - RNA, 19 nt, Homo sapiens
  misc_RNA (1)...(19): siRNA sense strand
cucuaaagcccacuacuau

SEQ ID NO: 886414 - RNA, 19 nt, Homo sapiens
  misc_RNA (1)...(19): siRNA sense strand
cuaaagcccacuacuaucg

SEQ ID NO: 886415 - RNA, 19 nt, Homo sapiens
  misc_RNA (1)...(19): siRNA sense strand
acuacuaucgcuaugauga

SEQ ID NO: 886416 - RNA, 19 nt, Homo sapiens
  misc_RNA (1)...(19): siRNA sense strand
gccauccccuuugcuuuua

SEQ ID NO: 886417 - RNA, 19 nt, Homo sapiens
  misc_RNA (1)...(19): siRNA sense strand
augaaguucucccugauca

SEQ ID NO: 886418 - RNA, 19 nt, Homo sapiens
  misc_RNA (1)...(19): siRNA sense strand
ccagucaguguacaagaug

SEQ ID NO: 886419 - RNA, 19 nt, Homo sapiens
  misc_RNA (1)...(19): siRNA sense strand
acaugacaaugaagcagau

SEQ ID NO: 886420 - RNA, 19 nt, Homo sapiens
  misc_RNA (1)...(19): siRNA sense strand
caucacagagugucuucau

SEQ ID NO: 886421 - RNA, 19 nt, Homo sapiens
  misc_RNA (1)...(19): siRNA sense strand
ucgcuaugaugagcaguug

SEQ ID NO: 886422 - RNA, 19 nt, Homo sapiens
  misc_RNA (1)...(19): siRNA sense strand
cuaccagucccgagguuug

SEQ ID NO: 886423 - RNA, 19 nt, Homo sapiens
  misc_RNA (1)...(19): siRNA sense strand
aggaggagguucgagugaa

SEQ ID NO: 886424 - RNA, 19 nt, Homo sapiens
  misc_RNA (1)...(19): siRNA sense strand
uccagucaguguacaagau

SEQ ID NO: 886425 - RNA, 19 nt, Homo sapiens
  misc_RNA (1)...(19): siRNA sense strand
gcccacuacuaucgcuaug

SEQ ID NO: 886426 - RNA, 19 nt, Homo sapiens
  misc_RNA (1)...(19): siRNA sense strand
gaauaagccucacaaauga

SEQ ID NO: 886427 - RNA, 19 nt, Homo sapiens
  misc_RNA (1)...(19): siRNA sense strand
gggcagaaauguagugauu

SEQ ID NO: 886428 - RNA, 19 nt, Homo sapiens
  misc_RNA (1)...(19): siRNA sense strand
gaucaugccuccauaucaa

SEQ ID NO: 886429 - RNA, 19 nt, Homo sapiens
  misc_RNA (1)...(19): siRNA sense strand
agagaaaccuuaugaaugu

SEQ ID NO: 886430 - RNA, 19 nt, Homo sapiens
  misc_RNA (1)...(19): siRNA sense strand
cagauucgcucuucaaguu

SEQ ID NO: 886431 - RNA, 19 nt, Homo sapiens
  misc_RNA (1)...(19): siRNA sense strand
gcagaaauguagugauugu

SEQ ID NO: 886432 - RNA, 19 nt, Homo sapiens
  misc_RNA (1)...(19): siRNA sense strand
gaacacaguaccuauagaa

SEQ ID NO: 886433 - RNA, 19 nt, Homo sapiens
  misc_RNA (1)...(19): siRNA sense strand
aaucaagccuuuguaguua

SEQ ID NO: 886434 - RNA, 19 nt, Homo sapiens
  misc_RNA (1)...(19): siRNA sense strand
gagagaaaccuuaugaaug

SEQ ID NO: 886435 - RNA, 19 nt, Homo sapiens
  misc_RNA (1)...(19): siRNA sense strand
ggaguuaaauaccauagau

SEQ ID NO: 886436 - RNA, 19 nt, Homo sapiens
  misc_RNA (1)...(19): siRNA sense strand
agaauaagccucacaaaug

SEQ ID NO: 886437 - RNA, 19 nt, Homo sapiens
  misc_RNA (1)...(19): siRNA sense strand
ggagagaaaccuuaugaau

SEQ ID NO: 886438 - RNA, 19 nt, Homo sapiens
  misc_RNA (1)...(19): siRNA sense strand
gagagaaacccuacagaug

SEQ ID NO: 886439 - RNA, 19 nt, Homo sapiens
  misc_RNA (1)...(19): siRNA sense strand
guacaaggaaguaauguug

SEQ ID NO: 886440 - RNA, 19 nt, Homo sapiens
  misc_RNA (1)...(19): siRNA sense strand
gagaauaagccucacaaau

SEQ ID NO: 886441 - RNA, 19 nt, Homo sapiens
  misc_RNA (1)...(19): siRNA sense strand
gaacaaccuuuuccaagaa

SEQ ID NO: 886442 - RNA, 19 nt, Homo sapiens
  misc_RNA (1)...(19): siRNA sense strand
uaagagagacagccauaaa

SEQ ID NO: 886443 - RNA, 19 nt, Homo sapiens
  misc_RNA (1)...(19): siRNA sense strand
cacaguaccuauagaaaug

SEQ ID NO: 886444 - RNA, 19 nt, Homo sapiens
  misc_RNA (1)...(19): siRNA sense strand
agucaaaucuguccagguu

SEQ ID NO: 886445 - RNA, 19 nt, Homo sapiens
  misc_RNA (1)...(19): siRNA sense strand
cuaaaucacagcucaauga

SEQ ID NO: 886446 - RNA, 19 nt, Homo sapiens
  misc_RNA (1)...(19): siRNA sense strand
ggagagagaccauauucau

SEQ ID NO: 886447 - RNA, 19 nt, Homo sapiens
  misc_RNA (1)...(19): siRNA sense strand
caucagcgaucacauacug

SEQ ID NO: 886448 - RNA, 19 nt, Homo sapiens
  misc_RNA (1)...(19): siRNA sense strand
gagaaacccuacagaugca

SEQ ID NO: 886449 - RNA, 19 nt, Homo sapiens
  misc_RNA (1)...(19): siRNA sense strand
gagaaaccuuaugaaugua

SEQ ID NO: 886450 - RNA, 19 nt, Homo sapiens
  misc_RNA (1)...(19): siRNA sense strand
gaccagacaucagaggauu

SEQ ID NO: 886451 - RNA, 19 nt, Homo sapiens
  misc_RNA (1)...(19): siRNA sense strand
gaaguaauguuggagaacu

SEQ ID NO: 886452 - RNA, 19 nt, Homo sapiens
  misc_RNA (1)...(19): siRNA sense strand
ccuuauaaaugcagugauu

SEQ ID NO: 886453 - RNA, 19 nt, Homo sapiens
  misc_RNA (1)...(19): siRNA sense strand
ccacaugucaguccucauu

SEQ ID NO: 886454 - RNA, 19 nt, Homo sapiens
  misc_RNA (1)...(19): siRNA sense strand
ggagagaaacccuacagau

SEQ ID NO: 886455 - RNA, 19 nt, Homo sapiens
  misc_RNA (1)...(19): siRNA sense strand
ggaauuugaacagagaaua

SEQ ID NO: 886456 - RNA, 19 nt, Homo sapiens
  misc_RNA (1)...(19): siRNA sense strand
uccaagaaaucaagccuuu

SEQ ID NO: 886457 - RNA, 19 nt, Homo sapiens
  misc_RNA (1)...(19): siRNA sense strand
agacaucagcgaucacaua

SEQ ID NO: 886458 - RNA, 19 nt, Homo sapiens
  misc_RNA (1)...(19): siRNA sense strand
caauagacaucagcgauca

SEQ ID NO: 886459 - RNA, 19 nt, Homo sapiens
  misc_RNA (1)...(19): siRNA sense strand
ggaagugccggcucaauag

SEQ ID NO: 886460 - RNA, 19 nt, Homo sapiens
  misc_RNA (1)...(19): siRNA sense strand
ccauggauguggugaaugu

SEQ ID NO: 886461 - RNA, 19 nt, Homo sapiens
  misc_RNA (1)...(19): siRNA sense strand
agucauaccuccuuauaca

SEQ ID NO: 886462 - RNA, 19 nt, Homo sapiens
  misc_RNA (1)...(19): siRNA sense strand
gagagacagccauaaauuc

SEQ ID NO: 886463 - RNA, 19 nt, Homo sapiens
  misc_RNA (1)...(19): siRNA sense strand
ggagggaaaccacaugaau

SEQ ID NO: 886464 - RNA, 19 nt, Homo sapiens
  misc_RNA (1)...(19): siRNA sense strand
cauaagagagacagccaua

SEQ ID NO: 886465 - RNA, 19 nt, Homo sapiens
  misc_RNA (1)...(19): siRNA sense strand
gcaagucgaagcucauuca

SEQ ID NO: 886466 - RNA, 19 nt, Homo sapiens
  misc_RNA (1)...(19): siRNA sense strand
ggagaacuacaucaaccua

SEQ ID NO: 886467 - RNA, 19 nt, Homo sapiens
  misc_RNA (1)...(19): siRNA sense strand
ucaggaauuugaacagaga

SEQ ID NO: 886468 - RNA, 19 nt, Homo sapiens
  misc_RNA (1)...(19): siRNA sense strand
aaaucaagccuuuguaguu

SEQ ID NO: 886469 - RNA, 19 nt, Homo sapiens
  misc_RNA (1)...(19): siRNA sense strand
gaaaucaagccuuuguagu

SEQ ID NO: 886470 - RNA, 19 nt, Homo sapiens
  misc_RNA (1)...(19): siRNA sense strand
caagaaaucaagccuuugu

SEQ ID NO: 886471 - RNA, 19 nt, Homo sapiens
  misc_RNA (1)...(19): siRNA sense strand
gaaaagauucugaugcauu

SEQ ID NO: 886472 - RNA, 19 nt, Homo sapiens
  misc_RNA (1)...(19): siRNA sense strand
ggaaaacauucaugaggaa

SEQ ID NO: 886473 - RNA, 19 nt, Homo sapiens
  misc_RNA (1)...(19): siRNA sense strand
gaauguagugagugugaaa

SEQ ID NO: 886474 - RNA, 19 nt, Homo sapiens
  misc_RNA (1)...(19): siRNA sense strand
ccaugaauguagugaaugu

SEQ ID NO: 886475 - RNA, 19 nt, Homo sapiens
  misc_RNA (1)...(19): siRNA sense strand
cggaagugccggcucaaua

SEQ ID NO: 886476 - RNA, 19 nt, Homo sapiens
  misc_RNA (1)...(19): siRNA sense strand
gagagagaccauauucaug

SEQ ID NO: 886477 - RNA, 19 nt, Homo sapiens
  misc_RNA (1)...(19): siRNA sense strand
agacaucagaggauucaua

SEQ ID NO: 886478 - RNA, 19 nt, Homo sapiens
  misc_RNA (1)...(19): siRNA sense strand
cuacaucaaccuaguauca

SEQ ID NO: 886479 - RNA, 19 nt, Homo sapiens
  misc_RNA (1)...(19): siRNA sense strand
gaaagucacagcucauggu

SEQ ID NO: 886480 - RNA, 19 nt, Homo sapiens
  misc_RNA (1)...(19): siRNA sense strand
gagggaaaccacaugaaug

SEQ ID NO: 886481 - RNA, 19 nt, Homo sapiens
  misc_RNA (1)...(19): siRNA sense strand
acaugucaguccucauuaa

SEQ ID NO: 886482 - RNA, 19 nt, Homo sapiens
  misc_RNA (1)...(19): siRNA sense strand
agagagacagccauaaauu

SEQ ID NO: 886483 - RNA, 19 nt, Homo sapiens
  misc_RNA (1)...(19): siRNA sense strand
uagaagauaugcaggaaaa

SEQ ID NO: 886484 - RNA, 19 nt, Homo sapiens
  misc_RNA (1)...(19): siRNA sense strand
acaaggaaguaauguugga

SEQ ID NO: 886485 - RNA, 19 nt, Homo sapiens
  misc_RNA (1)...(19): siRNA sense strand
gaacucauacaagagcaaa

SEQ ID NO: 886486 - RNA, 19 nt, Homo sapiens
  misc_RNA (1)...(19): siRNA sense strand
caucaaccuaguaucaaua

SEQ ID NO: 886487 - RNA, 19 nt, Homo sapiens
  misc_RNA (1)...(19): siRNA sense strand
ggagagagcaaggcaguuc

SEQ ID NO: 886488 - RNA, 19 nt, Homo sapiens
  misc_RNA (1)...(19): siRNA sense strand
gaacugaaagaggagagaa

SEQ ID NO: 886489 - RNA, 19 nt, Homo sapiens
  misc_RNA (1)...(19): siRNA sense strand
ugucaguccucauuaaaca

SEQ ID NO: 886490 - RNA, 19 nt, Homo sapiens
  misc_RNA (1)...(19): siRNA sense strand
gaauguagugaauguggaa

SEQ ID NO: 886491 - RNA, 19 nt, Homo sapiens
  misc_RNA (1)...(19): siRNA sense strand
gaagugccggcucaauaga

SEQ ID NO: 886492 - RNA, 19 nt, Homo sapiens
  misc_RNA (1)...(19): siRNA sense strand
uaccauagauguguuaaac

SEQ ID NO: 886493 - RNA, 19 nt, Homo sapiens
  misc_RNA (1)...(19): siRNA sense strand
gaauguggccccaucagua

SEQ ID NO: 886494 - RNA, 19 nt, Homo sapiens
  misc_RNA (1)...(19): siRNA sense strand
gaucacauacuggagagaa

SEQ ID NO: 886495 - RNA, 19 nt, Homo sapiens
  misc_RNA (1)...(19): siRNA sense strand
caaguuggagcaaggagaa

SEQ ID NO: 886496 - RNA, 19 nt, Homo sapiens
  misc_RNA (1)...(19): siRNA sense strand
cauaccuccuuauacauga

SEQ ID NO: 886497 - RNA, 19 nt, Homo sapiens
  misc_RNA (1)...(19): siRNA sense strand
gagagaccauauucaugca

SEQ ID NO: 886498 - RNA, 19 nt, Homo sapiens
  misc_RNA (1)...(19): siRNA sense strand
gaaaccuuaugaauguagu

SEQ ID NO: 886499 - RNA, 19 nt, Homo sapiens
  misc_RNA (1)...(19): siRNA sense strand
gagagaagccccaugaaug

SEQ ID NO: 886500 - RNA, 19 nt, Homo sapiens
  misc_RNA (1)...(19): siRNA sense strand
cucagaaggucuuguacaa

SEQ ID NO: 886501 - RNA, 19 nt, Homo sapiens
  misc_RNA (1)...(19): siRNA sense strand
ucaaaucuguccagguuuu

SEQ ID NO: 886502 - RNA, 19 nt, Homo sapiens
  misc_RNA (1)...(19): siRNA sense strand
gcacagcuuauucaacauc

SEQ ID NO: 886503 - RNA, 19 nt, Homo sapiens
  misc_RNA (1)...(19): siRNA sense strand
agagacagccauaaauuca

SEQ ID NO: 886504 - RNA, 19 nt, Homo sapiens
  misc_RNA (1)...(19): siRNA sense strand
caagccagauucgcucuuc

SEQ ID NO: 886505 - RNA, 19 nt, Homo sapiens
  misc_RNA (1)...(19): siRNA sense strand
aaacauucaugaggaagau

SEQ ID NO: 886506 - RNA, 19 nt, Homo sapiens
  misc_RNA (1)...(19): siRNA sense strand
gaacucacacaggagagaa

SEQ ID NO: 886507 - RNA, 19 nt, Homo sapiens
  misc_RNA (1)...(19): siRNA sense strand
aaucaggaauuugaacaga

SEQ ID NO: 886508 - RNA, 19 nt, Homo sapiens
  misc_RNA (1)...(19): siRNA sense strand
ggagcagcccacagucaaa

SEQ ID NO: 886509 - RNA, 19 nt, Homo sapiens
  misc_RNA (1)...(19): siRNA sense strand
acacaguaccuauagaaau

SEQ ID NO: 886510 - RNA, 19 nt, Homo sapiens
  misc_RNA (1)...(19): siRNA sense strand
aaacccagcagcccuaaau

SEQ ID NO: 886511 - RNA, 19 nt, Homo sapiens
  misc_RNA (1)...(19): siRNA sense strand
ugaacacaguaccuauaga

SEQ ID NO: 886512 - RNA, 19 nt, Homo sapiens
  misc_RNA (1)...(19): siRNA sense strand
gagaucaugccuccauauc

SEQ ID NO: 886513 - RNA, 19 nt, Homo sapiens
  misc_RNA (1)...(19): siRNA sense strand
ucaagccuuuguaguuaau

SEQ ID NO: 886514 - RNA, 19 nt, Homo sapiens
  misc_RNA (1)...(19): siRNA sense strand
gagcaaggcaguucuucag

SEQ ID NO: 886515 - RNA, 19 nt, Homo sapiens
  misc_RNA (1)...(19): siRNA sense strand
gagcaucagagaacucaca

SEQ ID NO: 886516 - RNA, 19 nt, Homo sapiens
  misc_RNA (1)...(19): siRNA sense strand
cgaagcucauucagcauca

SEQ ID NO: 886517 - RNA, 19 nt, Homo sapiens
  misc_RNA (1)...(19): siRNA sense strand
cgggagagaaaccuuauga

SEQ ID NO: 886518 - RNA, 19 nt, Homo sapiens
  misc_RNA (1)...(19): siRNA sense strand
ccauaucaagugugacaaa

SEQ ID NO: 886519 - RNA, 19 nt, Homo sapiens
  misc_RNA (1)...(19): siRNA sense strand
agacuucacacaggagaua

SEQ ID NO: 886520 - RNA, 19 nt, Homo sapiens
  misc_RNA (1)...(19): siRNA sense strand
uuacuggaguuaaauacca

SEQ ID NO: 886521 - RNA, 19 nt, Homo sapiens
  misc_RNA (1)...(19): siRNA sense strand
ugaugcauuugguggauau

SEQ ID NO: 886522 - RNA, 19 nt, Homo sapiens
  misc_RNA (1)...(19): siRNA sense strand
gagcagcccacagucaaau

SEQ ID NO: 886523 - RNA, 19 nt, Homo sapiens
  misc_RNA (1)...(19): siRNA sense strand
acaucaaccuaguaucaau

SEQ ID NO: 886524 - RNA, 19 nt, Homo sapiens
  misc_RNA (1)...(19): siRNA sense strand
caugucaguccucauuaaa

SEQ ID NO: 886525 - RNA, 19 nt, Homo sapiens
  misc_RNA (1)...(19): siRNA sense strand
gcacaccagagacuucaca

SEQ ID NO: 886526 - RNA, 19 nt, Homo sapiens
  misc_RNA (1)...(19): siRNA sense strand
gcacagcccugcaucauga

SEQ ID NO: 886527 - RNA, 19 nt, Homo sapiens
  misc_RNA (1)...(19): siRNA sense strand
gcacaggaguucuuucaga

SEQ ID NO: 886528 - RNA, 19 nt, Homo sapiens
  misc_RNA (1)...(19): siRNA sense strand
ggaguucacuacuggauuu

SEQ ID NO: 886529 - RNA, 19 nt, Homo sapiens
  misc_RNA (1)...(19): siRNA sense strand
gagcagaaacuguuaugua

SEQ ID NO: 886530 - RNA, 19 nt, Homo sapiens
  misc_RNA (1)...(19): siRNA sense strand
gaacuggagugugcccuaa

SEQ ID NO: 886531 - RNA, 19 nt, Homo sapiens
  misc_RNA (1)...(19): siRNA sense strand
agaaggagauggaagugua

SEQ ID NO: 886532 - RNA, 19 nt, Homo sapiens
  misc_RNA (1)...(19): siRNA sense strand
gucaagagcuggagcagaa

SEQ ID NO: 886533 - RNA, 19 nt, Homo sapiens
  misc_RNA (1)...(19): siRNA sense strand
gaaaauugcugcuuaugau

SEQ ID NO: 886534 - RNA, 19 nt, Homo sapiens
  misc_RNA (1)...(19): siRNA sense strand
gaagaaauccagcaucucu

SEQ ID NO: 886535 - RNA, 19 nt, Homo sapiens
  misc_RNA (1)...(19): siRNA sense strand
gaaggagacucaggagcaa

SEQ ID NO: 886536 - RNA, 19 nt, Homo sapiens
  misc_RNA (1)...(19): siRNA sense strand
agcagaaacuguuauguaa

SEQ ID NO: 886537 - RNA, 19 nt, Homo sapiens
  misc_RNA (1)...(19): siRNA sense strand
ggaacuggaggauguguuu

SEQ ID NO: 886538 - RNA, 19 nt, Homo sapiens
  misc_RNA (1)...(19): siRNA sense strand
ccacaggaguucacuacug

SEQ ID NO: 886539 - RNA, 19 nt, Homo sapiens
  misc_RNA (1)...(19): siRNA sense strand
ggagauggaacaacaaauc

SEQ ID NO: 886540 - RNA, 19 nt, Homo sapiens
  misc_RNA (1)...(19): siRNA sense strand
ucaggaagaugcaggugaa

SEQ ID NO: 886541 - RNA, 19 nt, Homo sapiens
  misc_RNA (1)...(19): siRNA sense strand
gguugcagcugaagaagga

SEQ ID NO: 886542 - RNA, 19 nt, Homo sapiens
  misc_RNA (1)...(19): siRNA sense strand
gcaagaggccugcaaacuc

SEQ ID NO: 886543 - RNA, 19 nt, Homo sapiens
  misc_RNA (1)...(19): siRNA sense strand
gauggaacaacaaaucaaa

SEQ ID NO: 886544 - RNA, 19 nt, Homo sapiens
  misc_RNA (1)...(19): siRNA sense strand
aaaggaaaauugcugcuua

SEQ ID NO: 886545 - RNA, 19 nt, Homo sapiens
  misc_RNA (1)...(19): siRNA sense strand
cagaaacuguuauguaagg

SEQ ID NO: 886546 - RNA, 19 nt, Homo sapiens
  misc_RNA (1)...(19): siRNA sense strand
gcagcuggauuuccuaagg

SEQ ID NO: 886547 - RNA, 19 nt, Homo sapiens
  misc_RNA (1)...(19): siRNA sense strand
gcaaacgucgggccagcua

SEQ ID NO: 886548 - RNA, 19 nt, Homo sapiens
  misc_RNA (1)...(19): siRNA sense strand
gaaggacacagagagguuu

SEQ ID NO: 886549 - RNA, 19 nt, Homo sapiens
  misc_RNA (1)...(19): siRNA sense strand
uggaggaacuggaggaugu

SEQ ID NO: 886550 - RNA, 19 nt, Homo sapiens
  misc_RNA (1)...(19): siRNA sense strand
gaauaacccaagucaggaa

SEQ ID NO: 886551 - RNA, 19 nt, Homo sapiens
  misc_RNA (1)...(19): siRNA sense strand
gaggagauggaacaacaaa

SEQ ID NO: 886552 - RNA, 19 nt, Homo sapiens
  misc_RNA (1)...(19): siRNA sense strand
gaaggcacaggaguucuuu

SEQ ID NO: 886553 - RNA, 19 nt, Homo sapiens
  misc_RNA (1)...(19): siRNA sense strand
gagauggaacaacaaauca

SEQ ID NO: 886554 - RNA, 19 nt, Homo sapiens
  misc_RNA (1)...(19): siRNA sense strand
ggaaggcacaggaguucuu

SEQ ID NO: 886555 - RNA, 19 nt, Homo sapiens
  misc_RNA (1)...(19): siRNA sense strand
guuggaagaugaaagugau

SEQ ID NO: 886556 - RNA, 19 nt, Homo sapiens
  misc_RNA (1)...(19): siRNA sense strand
gaagaugaaagugauguca

SEQ ID NO: 886557 - RNA, 19 nt, Homo sapiens
  misc_RNA (1)...(19): siRNA sense strand
gcaaacuccaccaagagaa

SEQ ID NO: 886558 - RNA, 19 nt, Homo sapiens
  misc_RNA (1)...(19): siRNA sense strand
ccugcaaacuccaccaaga

SEQ ID NO: 886559 - RNA, 19 nt, Homo sapiens
  misc_RNA (1)...(19): siRNA sense strand
ggaaaauugcugcuuauga

SEQ ID NO: 886560 - RNA, 19 nt, Homo sapiens
  misc_RNA (1)...(19): siRNA sense strand
gagaauaccaagcugaaac

SEQ ID NO: 886561 - RNA, 19 nt, Homo sapiens
  misc_RNA (1)...(19): siRNA sense strand
gaacaacaaaucaaaagug

SEQ ID NO: 886562 - RNA, 19 nt, Homo sapiens
  misc_RNA (1)...(19): siRNA sense strand
ucaagcagcucugguugca

SEQ ID NO: 886563 - RNA, 19 nt, Homo sapiens
  misc_RNA (1)...(19): siRNA sense strand
aaagugagaaggagcaguu

SEQ ID NO: 886564 - RNA, 19 nt, Homo sapiens
  misc_RNA (1)...(19): siRNA sense strand
gaaauccagcaucucuaug

SEQ ID NO: 886565 - RNA, 19 nt, Homo sapiens
  misc_RNA (1)...(19): siRNA sense strand
ucaagcagcuggauuuccu

SEQ ID NO: 886566 - RNA, 19 nt, Homo sapiens
  misc_RNA (1)...(19): siRNA sense strand
aaauccagcaucucuauga

SEQ ID NO: 886567 - RNA, 19 nt, Homo sapiens
  misc_RNA (1)...(19): siRNA sense strand
caacaaaucaaaagugaga

SEQ ID NO: 886568 - RNA, 19 nt, Homo sapiens
  misc_RNA (1)...(19): siRNA sense strand
cauuuacuguccaacuuug

SEQ ID NO: 886569 - RNA, 19 nt, Homo sapiens
  misc_RNA (1)...(19): siRNA sense strand
gcagaaacuguuauguaag

SEQ ID NO: 886570 - RNA, 19 nt, Homo sapiens
  misc_RNA (1)...(19): siRNA sense strand
gaagaaugaacuggagugu

SEQ ID NO: 886571 - RNA, 19 nt, Homo sapiens
  misc_RNA (1)...(19): siRNA sense strand
gaggaaggcacaggaguuc

SEQ ID NO: 886572 - RNA, 19 nt, Homo sapiens
  misc_RNA (1)...(19): siRNA sense strand
agaaauccagcaucucuau

SEQ ID NO: 886573 - RNA, 19 nt, Homo sapiens
  misc_RNA (1)...(19): siRNA sense strand
cccaugaggagaagaauga

SEQ ID NO: 886574 - RNA, 19 nt, Homo sapiens
  misc_RNA (1)...(19): siRNA sense strand
uuuagucacuucuucuuca

SEQ ID NO: 886575 - RNA, 19 nt, Homo sapiens
  misc_RNA (1)...(19): siRNA sense strand
gcuggagcagaaacuguua

SEQ ID NO: 886576 - RNA, 19 nt, Homo sapiens
  misc_RNA (1)...(19): siRNA sense strand
uaacccaagucaggaagau

SEQ ID NO: 886577 - RNA, 19 nt, Homo sapiens
  misc_RNA (1)...(19): siRNA sense strand
ggaagaugcaggugaacag

SEQ ID NO: 886578 - RNA, 19 nt, Homo sapiens
  misc_RNA (1)...(19): siRNA sense strand
aaauugcugcuuaugauga

SEQ ID NO: 886579 - RNA, 19 nt, Homo sapiens
  misc_RNA (1)...(19): siRNA sense strand
agaugaaagugaugucaag

SEQ ID NO: 886580 - RNA, 19 nt, Homo sapiens
  misc_RNA (1)...(19): siRNA sense strand
caaaagguguuggaagaug

SEQ ID NO: 886581 - RNA, 19 nt, Homo sapiens
  misc_RNA (1)...(19): siRNA sense strand
ugaaggacacagagagguu

SEQ ID NO: 886582 - RNA, 19 nt, Homo sapiens
  misc_RNA (1)...(19): siRNA sense strand
gagagucuacagcgugaga

SEQ ID NO: 886583 - RNA, 19 nt, Homo sapiens
  misc_RNA (1)...(19): siRNA sense strand
gcucagcagcaguuggaaa

SEQ ID NO: 886584 - RNA, 19 nt, Homo sapiens
  misc_RNA (1)...(19): siRNA sense strand
ggacacagagagguuucaa

SEQ ID NO: 886585 - RNA, 19 nt, Homo sapiens
  misc_RNA (1)...(19): siRNA sense strand
agaccaaggcugagaauac

SEQ ID NO: 886586 - RNA, 19 nt, Homo sapiens
  misc_RNA (1)...(19): siRNA sense strand
gaccaaggcugagaauacc

SEQ ID NO: 886587 - RNA, 19 nt, Homo sapiens
  misc_RNA (1)...(19): siRNA sense strand
ugaggaaggcacaggaguu

SEQ ID NO: 886588 - RNA, 19 nt, Homo sapiens
  misc_RNA (1)...(19): siRNA sense strand
augaggagauggaacaaca

SEQ ID NO: 886589 - RNA, 19 nt, Homo sapiens
  misc_RNA (1)...(19): siRNA sense strand
gaguggagccugccugcau

SEQ ID NO: 886590 - RNA, 19 nt, Homo sapiens
  misc_RNA (1)...(19): siRNA sense strand
gaacuggaggauguguuug

SEQ ID NO: 886591 - RNA, 19 nt, Homo sapiens
  misc_RNA (1)...(19): siRNA sense strand
gauuuagucacuucuucuu

SEQ ID NO: 886592 - RNA, 19 nt, Homo sapiens
  misc_RNA (1)...(19): siRNA sense strand
cagcuggauuuccuaaggu

SEQ ID NO: 886593 - RNA, 19 nt, Homo sapiens
  misc_RNA (1)...(19): siRNA sense strand
uggacagccuggagcagaa

SEQ ID NO: 886594 - RNA, 19 nt, Homo sapiens
  misc_RNA (1)...(19): siRNA sense strand
gagaccaaggcugagaaua

SEQ ID NO: 886595 - RNA, 19 nt, Homo sapiens
  misc_RNA (1)...(19): siRNA sense strand
ucauuuacuguccaacuuu

SEQ ID NO: 886596 - RNA, 19 nt, Homo sapiens
  misc_RNA (1)...(19): siRNA sense strand
augaagaaauccagcaucu

SEQ ID NO: 886597 - RNA, 19 nt, Homo sapiens
  misc_RNA (1)...(19): siRNA sense strand
gagcuggagcagaaacugu

SEQ ID NO: 886598 - RNA, 19 nt, Homo sapiens
  misc_RNA (1)...(19): siRNA sense strand
uggauuuagucacuucuuc

SEQ ID NO: 886599 - RNA, 19 nt, Homo sapiens
  misc_RNA (1)...(19): siRNA sense strand
ugagagcaccucccagaag

SEQ ID NO: 886600 - RNA, 19 nt, Homo sapiens
  misc_RNA (1)...(19): siRNA sense strand
gaaggagauggaaguguac

SEQ ID NO: 886601 - RNA, 19 nt, Homo sapiens
  misc_RNA (1)...(19): siRNA sense strand
caaacuccaccaagagaag

SEQ ID NO: 886602 - RNA, 19 nt, Homo sapiens
  misc_RNA (1)...(19): siRNA sense strand
ccagcaagaggccugcaaa

SEQ ID NO: 886603 - RNA, 19 nt, Homo sapiens
  misc_RNA (1)...(19): siRNA sense strand
ccuggaugcugauggcaau

SEQ ID NO: 886604 - RNA, 19 nt, Homo sapiens
  misc_RNA (1)...(19): siRNA sense strand
aagaagcccaugaggagaa

SEQ ID NO: 886605 - RNA, 19 nt, Homo sapiens
  misc_RNA (1)...(19): siRNA sense strand
gauggcaauggcuaucuga

SEQ ID NO: 886606 - RNA, 19 nt, Homo sapiens
  misc_RNA (1)...(19): siRNA sense strand
gguguuggaagaugaaagu

SEQ ID NO: 886607 - RNA, 19 nt, Homo sapiens
  misc_RNA (1)...(19): siRNA sense strand
gccagaauaacccaaguca

SEQ ID NO: 886608 - RNA, 19 nt, Homo sapiens
  misc_RNA (1)...(19): siRNA sense strand
gagaaggagauggaagugu

SEQ ID NO: 886609 - RNA, 19 nt, Homo sapiens
  misc_RNA (1)...(19): siRNA sense strand
gcugauggacagacuugga

SEQ ID NO: 886610 - RNA, 19 nt, Homo sapiens
  misc_RNA (1)...(19): siRNA sense strand
aaaagguguuggaagauga

SEQ ID NO: 886611 - RNA, 19 nt, Homo sapiens
  misc_RNA (1)...(19): siRNA sense strand
aauugcugcuuaugaugaa

SEQ ID NO: 886612 - RNA, 19 nt, Homo sapiens
  misc_RNA (1)...(19): siRNA sense strand
ccaagcugaaacucacuaa

SEQ ID NO: 886613 - RNA, 19 nt, Homo sapiens
  misc_RNA (1)...(19): siRNA sense strand
ccaaggcugagaauaccaa

SEQ ID NO: 886614 - RNA, 19 nt, Homo sapiens
  misc_RNA (1)...(19): siRNA sense strand
cuacuggauuuagucacuu

SEQ ID NO: 886615 - RNA, 19 nt, Homo sapiens
  misc_RNA (1)...(19): siRNA sense strand
gaguucacuacuggauuua

SEQ ID NO: 886616 - RNA, 19 nt, Homo sapiens
  misc_RNA (1)...(19): siRNA sense strand
ggauuuagucacuucuucu

SEQ ID NO: 886617 - RNA, 19 nt, Homo sapiens
  misc_RNA (1)...(19): siRNA sense strand
ggaaagccuccagcaagag

SEQ ID NO: 886618 - RNA, 19 nt, Homo sapiens
  misc_RNA (1)...(19): siRNA sense strand
aagacuuccugaccagaau

SEQ ID NO: 886619 - RNA, 19 nt, Homo sapiens
  misc_RNA (1)...(19): siRNA sense strand
uguccaacuuugaagacuu

SEQ ID NO: 886620 - RNA, 19 nt, Homo sapiens
  misc_RNA (1)...(19): siRNA sense strand
cucauuuacuguccaacuu

SEQ ID NO: 886621 - RNA, 19 nt, Homo sapiens
  misc_RNA (1)...(19): siRNA sense strand
gcccagcgccaugaagaga

SEQ ID NO: 886622 - RNA, 19 nt, Homo sapiens
  misc_RNA (1)...(19): siRNA sense strand
gaggcugcauaaggagcua

SEQ ID NO: 886623 - RNA, 19 nt, Homo sapiens
  misc_RNA (1)...(19): siRNA sense strand
gaaagagccaauagucaua

SEQ ID NO: 886624 - RNA, 19 nt, Homo sapiens
  misc_RNA (1)...(19): siRNA sense strand
gagacagaaugacaagaua

SEQ ID NO: 886625 - RNA, 19 nt, Homo sapiens
  misc_RNA (1)...(19): siRNA sense strand
gaaggauuaugugaguuua

SEQ ID NO: 886626 - RNA, 19 nt, Homo sapiens
  misc_RNA (1)...(19): siRNA sense strand
ucacaucuggcaaauauua

SEQ ID NO: 886627 - RNA, 19 nt, Homo sapiens
  misc_RNA (1)...(19): siRNA sense strand
gcaacucaaugaaagcaaa

SEQ ID NO: 886628 - RNA, 19 nt, Homo sapiens
  misc_RNA (1)...(19): siRNA sense strand
gauuauuccuggauuguga

SEQ ID NO: 886629 - RNA, 19 nt, Homo sapiens
  misc_RNA (1)...(19): siRNA sense strand
ggaaggauuaugugaguuu

SEQ ID NO: 886630 - RNA, 19 nt, Homo sapiens
  misc_RNA (1)...(19): siRNA sense strand
gaugugacccucaagauga

SEQ ID NO: 886631 - RNA, 19 nt, Homo sapiens
  misc_RNA (1)...(19): siRNA sense strand
gcaugaauguuggauguga

SEQ ID NO: 886632 - RNA, 19 nt, Homo sapiens
  misc_RNA (1)...(19): siRNA sense strand
uaaagcagauguggagcua

SEQ ID NO: 886633 - RNA, 19 nt, Homo sapiens
  misc_RNA (1)...(19): siRNA sense strand
uuucacaucuggcaaauau

SEQ ID NO: 886634 - RNA, 19 nt, Homo sapiens
  misc_RNA (1)...(19): siRNA sense strand
ugaagcaaaugugccauaa

SEQ ID NO: 886635 - RNA, 19 nt, Homo sapiens
  misc_RNA (1)...(19): siRNA sense strand
gcaaaugugccauaaagca

SEQ ID NO: 886636 - RNA, 19 nt, Homo sapiens
  misc_RNA (1)...(19): siRNA sense strand
gagaagagacagaaugaca

SEQ ID NO: 886637 - RNA, 19 nt, Homo sapiens
  misc_RNA (1)...(19): siRNA sense strand
aagcaaaugugccauaaag

SEQ ID NO: 886638 - RNA, 19 nt, Homo sapiens
  misc_RNA (1)...(19): siRNA sense strand
gaacauuccagggagcuuu

SEQ ID NO: 886639 - RNA, 19 nt, Homo sapiens
  misc_RNA (1)...(19): siRNA sense strand
gaaagcaaagccagaaugg

SEQ ID NO: 886640 - RNA, 19 nt, Homo sapiens
  misc_RNA (1)...(19): siRNA sense strand
ggugcaauauguuccaaga

SEQ ID NO: 886641 - RNA, 19 nt, Homo sapiens
  misc_RNA (1)...(19): siRNA sense strand
gaaaggagggcgaggacau

SEQ ID NO: 886642 - RNA, 19 nt, Homo sapiens
  misc_RNA (1)...(19): siRNA sense strand
uaugugaguuuaaggauag

SEQ ID NO: 886643 - RNA, 19 nt, Homo sapiens
  misc_RNA (1)...(19): siRNA sense strand
uaccagcacaguaggauua

SEQ ID NO: 886644 - RNA, 19 nt, Homo sapiens
  misc_RNA (1)...(19): siRNA sense strand
gaagcaaaugugccauaaa

SEQ ID NO: 886645 - RNA, 19 nt, Homo sapiens
  misc_RNA (1)...(19): siRNA sense strand
aagcaaagccagaauggaa

SEQ ID NO: 886646 - RNA, 19 nt, Homo sapiens
  misc_RNA (1)...(19): siRNA sense strand
gaagagacagaaugacaag

SEQ ID NO: 886647 - RNA, 19 nt, Homo sapiens
  misc_RNA (1)...(19): siRNA sense strand
aagcaugaauguuggaugu

SEQ ID NO: 886648 - RNA, 19 nt, Homo sapiens
  misc_RNA (1)...(19): siRNA sense strand
gagcuuuguugauguugau

SEQ ID NO: 886649 - RNA, 19 nt, Homo sapiens
  misc_RNA (1)...(19): siRNA sense strand
gguagaaccgugagcuuug

SEQ ID NO: 886650 - RNA, 19 nt, Homo sapiens
  misc_RNA (1)...(19): siRNA sense strand
gaaagagaagagacagaau

SEQ ID NO: 886651 - RNA, 19 nt, Homo sapiens
  misc_RNA (1)...(19): siRNA sense strand
uggaaaggcugcgaaagga

SEQ ID NO: 886652 - RNA, 19 nt, Homo sapiens
  misc_RNA (1)...(19): siRNA sense strand
gaauguaugaggaucugaa

SEQ ID NO: 886653 - RNA, 19 nt, Homo sapiens
  misc_RNA (1)...(19): siRNA sense strand
ggagauuugagaagcauga

SEQ ID NO: 886654 - RNA, 19 nt, Homo sapiens
  misc_RNA (1)...(19): siRNA sense strand
guagaaccgugagcuuugu

SEQ ID NO: 886655 - RNA, 19 nt, Homo sapiens
  misc_RNA (1)...(19): siRNA sense strand
ggaugugacccucaagaug

SEQ ID NO: 886656 - RNA, 19 nt, Homo sapiens
  misc_RNA (1)...(19): siRNA sense strand
ucaagaugaucccgauauc

SEQ ID NO: 886657 - RNA, 19 nt, Homo sapiens
  misc_RNA (1)...(19): siRNA sense strand
caaaguucccugauauaca

SEQ ID NO: 886658 - RNA, 19 nt, Homo sapiens
  misc_RNA (1)...(19): siRNA sense strand
ugaaagagccaauagucau

SEQ ID NO: 886659 - RNA, 19 nt, Homo sapiens
  misc_RNA (1)...(19): siRNA sense strand
gaaccgugagcuuuguuga

SEQ ID NO: 886660 - RNA, 19 nt, Homo sapiens
  misc_RNA (1)...(19): siRNA sense strand
gauuugagaagcaugaaug

SEQ ID NO: 886661 - RNA, 19 nt, Homo sapiens
  misc_RNA (1)...(19): siRNA sense strand
agagcaacaucacuuggaa

SEQ ID NO: 886662 - RNA, 19 nt, Homo sapiens
  misc_RNA (1)...(19): siRNA sense strand
gacagaaugacaagauaga

SEQ ID NO: 886663 - RNA, 19 nt, Homo sapiens
  misc_RNA (1)...(19): siRNA sense strand
aaagagaagagacagaaug

SEQ ID NO: 886664 - RNA, 19 nt, Homo sapiens
  misc_RNA (1)...(19): siRNA sense strand
cugcauuucuccaugaaga

SEQ ID NO: 886665 - RNA, 19 nt, Homo sapiens
  misc_RNA (1)...(19): siRNA sense strand
uuuggugucuguaacaauu

SEQ ID NO: 886666 - RNA, 19 nt, Homo sapiens
  misc_RNA (1)...(19): siRNA sense strand
augaggaucugaagcaaau

SEQ ID NO: 886667 - RNA, 19 nt, Homo sapiens
  misc_RNA (1)...(19): siRNA sense strand
gacacucacugcagucucu

SEQ ID NO: 886668 - RNA, 19 nt, Homo sapiens
  misc_RNA (1)...(19): siRNA sense strand
gagacauauuacacaggua

SEQ ID NO: 886669 - RNA, 19 nt, Homo sapiens
  misc_RNA (1)...(19): siRNA sense strand
caauauguuccaagaccua

SEQ ID NO: 886670 - RNA, 19 nt, Homo sapiens
  misc_RNA (1)...(19): siRNA sense strand
aaaguucccugauauacac

SEQ ID NO: 886671 - RNA, 19 nt, Homo sapiens
  misc_RNA (1)...(19): siRNA sense strand
ggacagccucaguggauuc

SEQ ID NO: 886672 - RNA, 19 nt, Homo sapiens
  misc_RNA (1)...(19): siRNA sense strand
cagcacaguaggauuauuc

SEQ ID NO: 886673 - RNA, 19 nt, Homo sapiens
  misc_RNA (1)...(19): siRNA sense strand
aagagaagagacagaauga

SEQ ID NO: 886674 - RNA, 19 nt, Homo sapiens
  misc_RNA (1)...(19): siRNA sense strand
gagcaacaucacuuggaaa

SEQ ID NO: 886675 - RNA, 19 nt, Homo sapiens
  misc_RNA (1)...(19): siRNA sense strand
gcucaggcuuucacaucug

SEQ ID NO: 886676 - RNA, 19 nt, Homo sapiens
  misc_RNA (1)...(19): siRNA sense strand
uugagaagcaugaauguug

SEQ ID NO: 886677 - RNA, 19 nt, Homo sapiens
  misc_RNA (1)...(19): siRNA sense strand
gcaaagccagaauggaaca

SEQ ID NO: 886678 - RNA, 19 nt, Homo sapiens
  misc_RNA (1)...(19): siRNA sense strand
gaagaagagcaacaucacu

SEQ ID NO: 886679 - RNA, 19 nt, Homo sapiens
  misc_RNA (1)...(19): siRNA sense strand
gaaaccacaagaaccagau

SEQ ID NO: 886680 - RNA, 19 nt, Homo sapiens
  misc_RNA (1)...(19): siRNA sense strand
cagccucaguggauucaga

SEQ ID NO: 886681 - RNA, 19 nt, Homo sapiens
  misc_RNA (1)...(19): siRNA sense strand
guaugaggaucugaagcaa

SEQ ID NO: 886682 - RNA, 19 nt, Homo sapiens
  misc_RNA (1)...(19): siRNA sense strand
gauuaugugaguuuaagga

SEQ ID NO: 886683 - RNA, 19 nt, Homo sapiens
  misc_RNA (1)...(19): siRNA sense strand
cagaaugacaagauagaug

SEQ ID NO: 886684 - RNA, 19 nt, Homo sapiens
  misc_RNA (1)...(19): siRNA sense strand
cucaguggauucagaguug

SEQ ID NO: 886685 - RNA, 19 nt, Homo sapiens
  misc_RNA (1)...(19): siRNA sense strand
ugaaagcaaagccagaaug

SEQ ID NO: 886686 - RNA, 19 nt, Homo sapiens
  misc_RNA (1)...(19): siRNA sense strand
gagccaauagucauaucuu

SEQ ID NO: 886687 - RNA, 19 nt, Homo sapiens
  misc_RNA (1)...(19): siRNA sense strand
aagaagagcaacaucacuu

SEQ ID NO: 886688 - RNA, 19 nt, Homo sapiens
  misc_RNA (1)...(19): siRNA sense strand
aaggauagaagcaaucaga

SEQ ID NO: 886689 - RNA, 19 nt, Homo sapiens
  misc_RNA (1)...(19): siRNA sense strand
cgugagcuuuguugauguu

SEQ ID NO: 886690 - RNA, 19 nt, Homo sapiens
  misc_RNA (1)...(19): siRNA sense strand
agacauauuacacagguau

SEQ ID NO: 886691 - RNA, 19 nt, Homo sapiens
  misc_RNA (1)...(19): siRNA sense strand
guuuaaggauagaagcaau

SEQ ID NO: 886692 - RNA, 19 nt, Homo sapiens
  misc_RNA (1)...(19): siRNA sense strand
gaugcuggaaggauuaugu

SEQ ID NO: 886693 - RNA, 19 nt, Homo sapiens
  misc_RNA (1)...(19): siRNA sense strand
gggcucaggcuuucacauc

SEQ ID NO: 886694 - RNA, 19 nt, Homo sapiens
  misc_RNA (1)...(19): siRNA sense strand
gaggaucugaagcaaaugu

SEQ ID NO: 886695 - RNA, 19 nt, Homo sapiens
  misc_RNA (1)...(19): siRNA sense strand
cuggaaggauuaugugagu

SEQ ID NO: 886696 - RNA, 19 nt, Homo sapiens
  misc_RNA (1)...(19): siRNA sense strand
cgauaucacuggaaaaucu

SEQ ID NO: 886697 - RNA, 19 nt, Homo sapiens
  misc_RNA (1)...(19): siRNA sense strand
agaagagacagaaugacaa

SEQ ID NO: 886698 - RNA, 19 nt, Homo sapiens
  misc_RNA (1)...(19): siRNA sense strand
ugagcuuuguugauguuga

SEQ ID NO: 886699 - RNA, 19 nt, Homo sapiens
  misc_RNA (1)...(19): siRNA sense strand
agagacagaaugacaagau

SEQ ID NO: 886700 - RNA, 19 nt, Homo sapiens
  misc_RNA (1)...(19): siRNA sense strand
aagcagauguggagcuacu

SEQ ID NO: 886701 - RNA, 19 nt, Homo sapiens
  misc_RNA (1)...(19): siRNA sense strand
ucaaaguucccugauauac

SEQ ID NO: 886702 - RNA, 19 nt, Homo sapiens
  misc_RNA (1)...(19): siRNA sense strand
agaagagcaacaucacuug

SEQ ID NO: 886703 - RNA, 19 nt, Homo sapiens
  misc_RNA (1)...(19): siRNA sense strand
gaaugacaagauagaugga

SEQ ID NO: 886704 - RNA, 19 nt, Homo sapiens
  misc_RNA (1)...(19): siRNA sense strand
ggauucagaguugauuuua

SEQ ID NO: 886705 - RNA, 19 nt, Homo sapiens
  misc_RNA (1)...(19): siRNA sense strand
accgugagcuuuguugaug

SEQ ID NO: 886706 - RNA, 19 nt, Homo sapiens
  misc_RNA (1)...(19): siRNA sense strand
acucacugcagucucuuua

SEQ ID NO: 886707 - RNA, 19 nt, Homo sapiens
  misc_RNA (1)...(19): siRNA sense strand
cuuccuguguggagauuug

SEQ ID NO: 886708 - RNA, 19 nt, Homo sapiens
  misc_RNA (1)...(19): siRNA sense strand
ccugaaagagccaauaguc

SEQ ID NO: 886709 - RNA, 19 nt, Homo sapiens
  misc_RNA (1)...(19): siRNA sense strand
ucaguggauucagaguuga

SEQ ID NO: 886710 - RNA, 19 nt, Homo sapiens
  misc_RNA (1)...(19): siRNA sense strand
ccagcacaguaggauuauu

SEQ ID NO: 886711 - RNA, 19 nt, Homo sapiens
  misc_RNA (1)...(19): siRNA sense strand
aaaggagggcgaggacauu

SEQ ID NO: 886712 - RNA, 19 nt, Homo sapiens
  misc_RNA (1)...(19): siRNA sense strand
cugaagcaaaugugccaua

SEQ ID NO: 886713 - RNA, 19 nt, Homo sapiens
  misc_RNA (1)...(19): siRNA sense strand
cacuuguggugcaauaugu

SEQ ID NO: 886714 - RNA, 19 nt, Homo sapiens
  misc_RNA (1)...(19): siRNA sense strand
aaagagccaauagucauau

SEQ ID NO: 886715 - RNA, 19 nt, Homo sapiens
  misc_RNA (1)...(19): siRNA sense strand
ugucugagccugugaaucc

SEQ ID NO: 886716 - RNA, 19 nt, Homo sapiens
  misc_RNA (1)...(19): siRNA sense strand
ugccugcauuucuccauga

SEQ ID NO: 886717 - RNA, 19 nt, Homo sapiens
  misc_RNA (1)...(19): siRNA sense strand
gcuuucacaucuggcaaau

SEQ ID NO: 886718 - RNA, 19 nt, Homo sapiens
  misc_RNA (1)...(19): siRNA sense strand
ggcucaggcuuucacaucu

SEQ ID NO: 886719 - RNA, 19 nt, Homo sapiens
  misc_RNA (1)...(19): siRNA sense strand
gagaagcaugaauguugga

SEQ ID NO: 886720 - RNA, 19 nt, Homo sapiens
  misc_RNA (1)...(19): siRNA sense strand
acacguaccuguccuacuu

SEQ ID NO: 886721 - RNA, 19 nt, Homo sapiens
  misc_RNA (1)...(19): siRNA sense strand
gcugguagccucuccauug

SEQ ID NO: 886722 - RNA, 19 nt, Homo sapiens
  misc_RNA (1)...(19): siRNA sense strand
caaauguccucaagaaggu

SEQ ID NO: 886723 - RNA, 19 nt, Homo sapiens
  misc_RNA (1)...(19): siRNA sense strand
gcgcgcugcucgucacuaa

SEQ ID NO: 886724 - RNA, 19 nt, Homo sapiens
  misc_RNA (1)...(19): siRNA sense strand
ucccaaauguccucaagaa

SEQ ID NO: 886725 - RNA, 19 nt, Homo sapiens
  misc_RNA (1)...(19): siRNA sense strand
ggacacccgagcagacuga

SEQ ID NO: 886726 - RNA, 19 nt, Homo sapiens
  misc_RNA (1)...(19): siRNA sense strand
agaagguccucguggauca

SEQ ID NO: 886727 - RNA, 19 nt, Homo sapiens
  misc_RNA (1)...(19): siRNA sense strand
ccucguggaucagcuggua

SEQ ID NO: 886728 - RNA, 19 nt, Homo sapiens
  misc_RNA (1)...(19): siRNA sense strand
cuccgaggcuucccaaaug

SEQ ID NO: 886729 - RNA, 19 nt, Homo sapiens
  misc_RNA (1)...(19): siRNA sense strand
gagcccaguuccucugaca

SEQ ID NO: 886730 - RNA, 19 nt, Homo sapiens
  misc_RNA (1)...(19): siRNA sense strand
caagaagguccucguggau

SEQ ID NO: 886731 - RNA, 19 nt, Homo sapiens
  misc_RNA (1)...(19): siRNA sense strand
guaccuguccuacuugaag

SEQ ID NO: 886732 - RNA, 19 nt, Homo sapiens
  misc_RNA (1)...(19): siRNA sense strand
gcgcugcucgucacuaaca

SEQ ID NO: 886733 - RNA, 19 nt, Homo sapiens
  misc_RNA (1)...(19): siRNA sense strand
gaaguaccggagcccaguu

SEQ ID NO: 886734 - RNA, 19 nt, Homo sapiens
  misc_RNA (1)...(19): siRNA sense strand
gaaacagacucgugagaca

SEQ ID NO: 886735 - RNA, 19 nt, Homo sapiens
  misc_RNA (1)...(19): siRNA sense strand
ugaauacugucuuuggaua

SEQ ID NO: 886736 - RNA, 19 nt, Homo sapiens
  misc_RNA (1)...(19): siRNA sense strand
cuggaaagcuuguuggaaa

SEQ ID NO: 886737 - RNA, 19 nt, Homo sapiens
  misc_RNA (1)...(19): siRNA sense strand
gcauuucggcuuccuaugu

SEQ ID NO: 886738 - RNA, 19 nt, Homo sapiens
  misc_RNA (1)...(19): siRNA sense strand
cagggaauuugaauacugu

SEQ ID NO: 886739 - RNA, 19 nt, Homo sapiens
  misc_RNA (1)...(19): siRNA sense strand
ucagggaauuugaauacug

SEQ ID NO: 886740 - RNA, 19 nt, Homo sapiens
  misc_RNA (1)...(19): siRNA sense strand
ccacaucagggaauuugaa

SEQ ID NO: 886741 - RNA, 19 nt, Homo sapiens
  misc_RNA (1)...(19): siRNA sense strand
uuggauauguugaugaaga

SEQ ID NO: 886742 - RNA, 19 nt, Homo sapiens
  misc_RNA (1)...(19): siRNA sense strand
gaauacugucuuuggauau

SEQ ID NO: 886743 - RNA, 19 nt, Homo sapiens
  misc_RNA (1)...(19): siRNA sense strand
caucagggaauuugaauac

SEQ ID NO: 886744 - RNA, 19 nt, Homo sapiens
  misc_RNA (1)...(19): siRNA sense strand
cagacacucuaccacauca

SEQ ID NO: 886745 - RNA, 19 nt, Homo sapiens
  misc_RNA (1)...(19): siRNA sense strand
ggaauuugaauacugucuu

SEQ ID NO: 886746 - RNA, 19 nt, Homo sapiens
  misc_RNA (1)...(19): siRNA sense strand
cauuucggcuuccuaugug

SEQ ID NO: 886747 - RNA, 19 nt, Homo sapiens
  misc_RNA (1)...(19): siRNA sense strand
aauacugucuuuggauaug

SEQ ID NO: 886748 - RNA, 19 nt, Homo sapiens
  misc_RNA (1)...(19): siRNA sense strand
cuuuggauauguugaugaa

SEQ ID NO: 886749 - RNA, 19 nt, Homo sapiens
  misc_RNA (1)...(19): siRNA sense strand
gggcauuucggcuuccuau

SEQ ID NO: 886750 - RNA, 19 nt, Homo sapiens
  misc_RNA (1)...(19): siRNA sense strand
cuauguggguucuggaaag

SEQ ID NO: 886751 - RNA, 19 nt, Homo sapiens
  misc_RNA (1)...(19): siRNA sense strand
uuugaauacugucuuugga

SEQ ID NO: 886752 - RNA, 19 nt, Homo sapiens
  misc_RNA (1)...(19): siRNA sense strand
aacagacacucuaccacau

SEQ ID NO: 886753 - RNA, 19 nt, Homo sapiens
  misc_RNA (1)...(19): siRNA sense strand
ggccaaagccugagacuga

SEQ ID NO: 886754 - RNA, 19 nt, Homo sapiens
  misc_RNA (1)...(19): siRNA sense strand
gcaagacggcggugaagaa

SEQ ID NO: 886755 - RNA, 19 nt, Homo sapiens
  misc_RNA (1)...(19): siRNA sense strand
gcaccacaaugcccacuuc

SEQ ID NO: 886756 - RNA, 19 nt, Homo sapiens
  misc_RNA (1)...(19): siRNA sense strand
gaagaaacggaaucugaau

SEQ ID NO: 886757 - RNA, 19 nt, Homo sapiens
  misc_RNA (1)...(19): siRNA sense strand
gugaagaaacggaaucuga

SEQ ID NO: 886758 - RNA, 19 nt, Homo sapiens
  misc_RNA (1)...(19): siRNA sense strand
ggcugaggcugcugugaaa

SEQ ID NO: 886759 - RNA, 19 nt, Homo sapiens
  misc_RNA (1)...(19): siRNA sense strand
gugcugagccugucugugu

SEQ ID NO: 886760 - RNA, 19 nt, Homo sapiens
  misc_RNA (1)...(19): siRNA sense strand
ugaagaaacggaaucugaa

SEQ ID NO: 886761 - RNA, 19 nt, Homo sapiens
  misc_RNA (1)...(19): siRNA sense strand
gagcgucuaugcgcaggaa

SEQ ID NO: 886762 - RNA, 19 nt, Homo sapiens
  misc_RNA (1)...(19): siRNA sense strand
acacuuacguacaaugcuu

SEQ ID NO: 886763 - RNA, 19 nt, Homo sapiens
  misc_RNA (1)...(19): siRNA sense strand
ccuggacacuuacguacaa

SEQ ID NO: 886764 - RNA, 19 nt, Homo sapiens
  misc_RNA (1)...(19): siRNA sense strand
gcuaccuccucccggauaa

SEQ ID NO: 886765 - RNA, 19 nt, Homo sapiens
  misc_RNA (1)...(19): siRNA sense strand
gccaaagccugagacugaa

SEQ ID NO: 886766 - RNA, 19 nt, Homo sapiens
  misc_RNA (1)...(19): siRNA sense strand
caagacggcggugaagaaa

SEQ ID NO: 886767 - RNA, 19 nt, Homo sapiens
  misc_RNA (1)...(19): siRNA sense strand
ccucagcccuguguucaau

SEQ ID NO: 886768 - RNA, 19 nt, Homo sapiens
  misc_RNA (1)...(19): siRNA sense strand
gcuucgugcugccugauga

SEQ ID NO: 886769 - RNA, 19 nt, Homo sapiens
  misc_RNA (1)...(19): siRNA sense strand
ccacuucggcucugaccuu

SEQ ID NO: 886770 - RNA, 19 nt, Homo sapiens
  misc_RNA (1)...(19): siRNA sense strand
gcacuucgcgcugcacuac

SEQ ID NO: 886771 - RNA, 19 nt, Homo sapiens
  misc_RNA (1)...(19): siRNA sense strand
aagcagagcaagcgcaaga

SEQ ID NO: 886772 - RNA, 19 nt, Homo sapiens
  misc_RNA (1)...(19): siRNA sense strand
gaaagccugggucgcaaca

SEQ ID NO: 886773 - RNA, 19 nt, Homo sapiens
  misc_RNA (1)...(19): siRNA sense strand
ggacacuuacguacaaugc

SEQ ID NO: 886774 - RNA, 19 nt, Homo sapiens
  misc_RNA (1)...(19): siRNA sense strand
agacggcggugaagaaacg

SEQ ID NO: 886775 - RNA, 19 nt, Homo sapiens
  misc_RNA (1)...(19): siRNA sense strand
aggcugcugugaaagagaa

SEQ ID NO: 886776 - RNA, 19 nt, Homo sapiens
  misc_RNA (1)...(19): siRNA sense strand
caugguguacgauggcuuu

SEQ ID NO: 886777 - RNA, 19 nt, Homo sapiens
  misc_RNA (1)...(19): siRNA sense strand
ucagcccuguguucaauca

SEQ ID NO: 886778 - RNA, 19 nt, Homo sapiens
  misc_RNA (1)...(19): siRNA sense strand
ucuaugcgcaggaagaaga

SEQ ID NO: 886779 - RNA, 19 nt, Homo sapiens
  misc_RNA (1)...(19): siRNA sense strand
cagggagacugaggcuuca

SEQ ID NO: 886780 - RNA, 19 nt, Homo sapiens
  misc_RNA (1)...(19): siRNA sense strand
gaccuuguccgagcgucua

SEQ ID NO: 886781 - RNA, 19 nt, Homo sapiens
  misc_RNA (1)...(19): siRNA sense strand
gcagugaccauccucauug

SEQ ID NO: 886782 - RNA, 19 nt, Homo sapiens
  misc_RNA (1)...(19): siRNA sense strand
gggcugagcacacaugaag

SEQ ID NO: 886783 - RNA, 19 nt, Homo sapiens
  misc_RNA (1)...(19): siRNA sense strand
gagcacagccgaggcaagu

SEQ ID NO: 886784 - RNA, 19 nt, Homo sapiens
  misc_RNA (1)...(19): siRNA sense strand
guaggcagcugggcuuacu

SEQ ID NO: 886785 - RNA, 19 nt, Homo sapiens
  misc_RNA (1)...(19): siRNA sense strand
gauuuccacugggugaaug

SEQ ID NO: 886786 - RNA, 19 nt, Homo sapiens
  misc_RNA (1)...(19): siRNA sense strand
cagugaccauccucauugu

SEQ ID NO: 886787 - RNA, 19 nt, Homo sapiens
  misc_RNA (1)...(19): siRNA sense strand
ggacaggcugcugcugcua

SEQ ID NO: 886788 - RNA, 19 nt, Homo sapiens
  misc_RNA (1)...(19): siRNA sense strand
gugaccauccucauuguag

SEQ ID NO: 886789 - RNA, 19 nt, Homo sapiens
  misc_RNA (1)...(19): siRNA sense strand
aagaagaucucucaaauga

SEQ ID NO: 886790 - RNA, 19 nt, Homo sapiens
  misc_RNA (1)...(19): siRNA sense strand
ccagaaauguggccuuuga

SEQ ID NO: 886791 - RNA, 19 nt, Homo sapiens
  misc_RNA (1)...(19): siRNA sense strand
ugaagaagaucucucaaau

SEQ ID NO: 886792 - RNA, 19 nt, Homo sapiens
  misc_RNA (1)...(19): siRNA sense strand
cggcagcccucucacauuu

SEQ ID NO: 886793 - RNA, 19 nt, Homo sapiens
  misc_RNA (1)...(19): siRNA sense strand
gaagaagaucucucaaaug

SEQ ID NO: 886794 - RNA, 19 nt, Homo sapiens
  misc_RNA (1)...(19): siRNA sense strand
gaaauguggccuuugaaga

SEQ ID NO: 886795 - RNA, 19 nt, Homo sapiens
  misc_RNA (1)...(19): siRNA sense strand
gcucaaaccagcacuaaug

SEQ ID NO: 886796 - RNA, 19 nt, Homo sapiens
  misc_RNA (1)...(19): siRNA sense strand
gcagucccaugaagaagau

SEQ ID NO: 886797 - RNA, 19 nt, Homo sapiens
  misc_RNA (1)...(19): siRNA sense strand
gcacuaaugaacagcaugu

SEQ ID NO: 886798 - RNA, 19 nt, Homo sapiens
  misc_RNA (1)...(19): siRNA sense strand
gcagcuaaccacaggaaga

SEQ ID NO: 886799 - RNA, 19 nt, Homo sapiens
  misc_RNA (1)...(19): siRNA sense strand
gcauguggaagaagauuug

SEQ ID NO: 886800 - RNA, 19 nt, Homo sapiens
  misc_RNA (1)...(19): siRNA sense strand
gagcucaaaccagcacuaa

SEQ ID NO: 886801 - RNA, 19 nt, Homo sapiens
  misc_RNA (1)...(19): siRNA sense strand
gauggucccugggcacugu

SEQ ID NO: 886802 - RNA, 19 nt, Homo sapiens
  misc_RNA (1)...(19): siRNA sense strand
gaagauuuggccugagugu

SEQ ID NO: 886803 - RNA, 19 nt, Homo sapiens
  misc_RNA (1)...(19): siRNA sense strand
ugaacagcauguggaagaa

SEQ ID NO: 886804 - RNA, 19 nt, Homo sapiens
  misc_RNA (1)...(19): siRNA sense strand
aagaagauuuggccugagu

SEQ ID NO: 886805 - RNA, 19 nt, Homo sapiens
  misc_RNA (1)...(19): siRNA sense strand
gauuuggccugaguguguu

SEQ ID NO: 886806 - RNA, 19 nt, Homo sapiens
  misc_RNA (1)...(19): siRNA sense strand
ccaggcagauaacauugca

SEQ ID NO: 886807 - RNA, 19 nt, Homo sapiens
  misc_RNA (1)...(19): siRNA sense strand
caaaccagcacuaaugaac

SEQ ID NO: 886808 - RNA, 19 nt, Homo sapiens
  misc_RNA (1)...(19): siRNA sense strand
gcugcagucccaugaagaa

SEQ ID NO: 886809 - RNA, 19 nt, Homo sapiens
  misc_RNA (1)...(19): siRNA sense strand
ccaugaagaagaucucuca

SEQ ID NO: 886810 - RNA, 19 nt, Homo sapiens
  misc_RNA (1)...(19): siRNA sense strand
uaacauugcacagcuucaa

SEQ ID NO: 886811 - RNA, 19 nt, Homo sapiens
  misc_RNA (1)...(19): siRNA sense strand
uaaugaacagcauguggaa

SEQ ID NO: 886812 - RNA, 19 nt, Homo sapiens
  misc_RNA (1)...(19): siRNA sense strand
aacagcauguggaagaaga

SEQ ID NO: 886813 - RNA, 19 nt, Homo sapiens
  misc_RNA (1)...(19): siRNA sense strand
gcagcccucucacauuuug

SEQ ID NO: 886814 - RNA, 19 nt, Homo sapiens
  misc_RNA (1)...(19): siRNA sense strand
gaacagcauguggaagaag

SEQ ID NO: 886815 - RNA, 19 nt, Homo sapiens
  misc_RNA (1)...(19): siRNA sense strand
aaauguggccuuugaagag

SEQ ID NO: 886816 - RNA, 19 nt, Homo sapiens
  misc_RNA (1)...(19): siRNA sense strand
ggagcucaaaccagcacua

SEQ ID NO: 886817 - RNA, 19 nt, Homo sapiens
  misc_RNA (1)...(19): siRNA sense strand
ucaaaccagcacuaaugaa

SEQ ID NO: 886818 - RNA, 19 nt, Homo sapiens
  misc_RNA (1)...(19): siRNA sense strand
agauuuggccugagugugu

SEQ ID NO: 886819 - RNA, 19 nt, Homo sapiens
  misc_RNA (1)...(19): siRNA sense strand
agauaacauugcacagcuu

SEQ ID NO: 886820 - RNA, 19 nt, Homo sapiens
  misc_RNA (1)...(19): siRNA sense strand
gggaggaggagagggaaga

SEQ ID NO: 886821 - RNA, 19 nt, Homo sapiens
  misc_RNA (1)...(19): siRNA sense strand
uugugacccuugccagaaa

SEQ ID NO: 886822 - RNA, 19 nt, Homo sapiens
  misc_RNA (1)...(19): siRNA sense strand
aaaccagcacuaaugaaca

SEQ ID NO: 886823 - RNA, 19 nt, Homo sapiens
  misc_RNA (1)...(19): siRNA sense strand
augaagaagaucucucaaa

SEQ ID NO: 886824 - RNA, 19 nt, Homo sapiens
  misc_RNA (1)...(19): siRNA sense strand
gacaagacccuuucaauaa

SEQ ID NO: 886825 - RNA, 19 nt, Homo sapiens
  misc_RNA (1)...(19): siRNA sense strand
acaagacccuuucaauaaa

SEQ ID NO: 886826 - RNA, 19 nt, Homo sapiens
  misc_RNA (1)...(19): siRNA sense strand
gagcgugcaugaagaagaa

SEQ ID NO: 886827 - RNA, 19 nt, Homo sapiens
  misc_RNA (1)...(19): siRNA sense strand
agacaagacccuuucaaua

SEQ ID NO: 886828 - RNA, 19 nt, Homo sapiens
  misc_RNA (1)...(19): siRNA sense strand
guugacaucucauuuacaa

SEQ ID NO: 886829 - RNA, 19 nt, Homo sapiens
  misc_RNA (1)...(19): siRNA sense strand
gcaugaagaagaaaguuaa

SEQ ID NO: 886830 - RNA, 19 nt, Homo sapiens
  misc_RNA (1)...(19): siRNA sense strand
caagacccuuucaauaaau

SEQ ID NO: 886831 - RNA, 19 nt, Homo sapiens
  misc_RNA (1)...(19): siRNA sense strand
caauaaauccagcucagaa

SEQ ID NO: 886832 - RNA, 19 nt, Homo sapiens
  misc_RNA (1)...(19): siRNA sense strand
caaaagagcuccuguugac

SEQ ID NO: 886833 - RNA, 19 nt, Homo sapiens
  misc_RNA (1)...(19): siRNA sense strand
cagagagcgugcaugaaga

SEQ ID NO: 886834 - RNA, 19 nt, Homo sapiens
  misc_RNA (1)...(19): siRNA sense strand
ccuguugacaucucauuua

SEQ ID NO: 886835 - RNA, 19 nt, Homo sapiens
  misc_RNA (1)...(19): siRNA sense strand
ugacaucucauuuacaauc

SEQ ID NO: 886836 - RNA, 19 nt, Homo sapiens
  misc_RNA (1)...(19): siRNA sense strand
gcucagaaacaccuauugu

SEQ ID NO: 886837 - RNA, 19 nt, Homo sapiens
  misc_RNA (1)...(19): siRNA sense strand
ucagagagcgugcaugaag

SEQ ID NO: 886838 - RNA, 19 nt, Homo sapiens
  misc_RNA (1)...(19): siRNA sense strand
ugucagagagcgugcauga

SEQ ID NO: 886839 - RNA, 19 nt, Homo sapiens
  misc_RNA (1)...(19): siRNA sense strand
cagacaagacccuuucaau

SEQ ID NO: 886840 - RNA, 19 nt, Homo sapiens
  misc_RNA (1)...(19): siRNA sense strand
gacaucucauuuacaaucu

SEQ ID NO: 886841 - RNA, 19 nt, Homo sapiens
  misc_RNA (1)...(19): siRNA sense strand
uaaauccagcucagaaaca

SEQ ID NO: 886842 - RNA, 19 nt, Homo sapiens
  misc_RNA (1)...(19): siRNA sense strand
gguggaagcuaugaaaaga

SEQ ID NO: 886843 - RNA, 19 nt, Homo sapiens
  misc_RNA (1)...(19): siRNA sense strand
aaagagcuccuguugacau

SEQ ID NO: 886844 - RNA, 19 nt, Homo sapiens
  misc_RNA (1)...(19): siRNA sense strand
aauaaauccagcucagaaa

SEQ ID NO: 886845 - RNA, 19 nt, Homo sapiens
  misc_RNA (1)...(19): siRNA sense strand
gagcuccuguugacaucuc

SEQ ID NO: 886846 - RNA, 19 nt, Homo sapiens
  misc_RNA (1)...(19): siRNA sense strand
gacccgaugcugucagaga

SEQ ID NO: 886847 - RNA, 19 nt, Homo sapiens
  misc_RNA (1)...(19): siRNA sense strand
cuauggcuuugcaaaauua

SEQ ID NO: 886848 - RNA, 19 nt, Homo sapiens
  misc_RNA (1)...(19): siRNA sense strand
acacagacaagacccuuuc

SEQ ID NO: 886849 - RNA, 19 nt, Homo sapiens
  misc_RNA (1)...(19): siRNA sense strand
ugcaugaagaagaaaguua

SEQ ID NO: 886850 - RNA, 19 nt, Homo sapiens
  misc_RNA (1)...(19): siRNA sense strand
ucaauaaauccagcucaga

SEQ ID NO: 886851 - RNA, 19 nt, Homo sapiens
  misc_RNA (1)...(19): siRNA sense strand
agagagcgugcaugaagaa

SEQ ID NO: 886852 - RNA, 19 nt, Homo sapiens
  misc_RNA (1)...(19): siRNA sense strand
gacacagacaagacccuuu

SEQ ID NO: 886853 - RNA, 19 nt, Homo sapiens
  misc_RNA (1)...(19): siRNA sense strand
ggcgguggaagcuaugaaa

SEQ ID NO: 886854 - RNA, 19 nt, Homo sapiens
  misc_RNA (1)...(19): siRNA sense strand
ugacgcgggucuucuuguc

SEQ ID NO: 886855 - RNA, 19 nt, Homo sapiens
  misc_RNA (1)...(19): siRNA sense strand
ggaucuuggcggucaggua

SEQ ID NO: 886856 - RNA, 19 nt, Homo sapiens
  misc_RNA (1)...(19): siRNA sense strand
gagggaaguuuauagcuau

SEQ ID NO: 886857 - RNA, 19 nt, Homo sapiens
  misc_RNA (1)...(19): siRNA sense strand
guagugagagggaaguuua

SEQ ID NO: 886858 - RNA, 19 nt, Homo sapiens
  misc_RNA (1)...(19): siRNA sense strand
ggaaacacaacauaccaaa

SEQ ID NO: 886859 - RNA, 19 nt, Homo sapiens
  misc_RNA (1)...(19): siRNA sense strand
gcuauaagcaccuacauca

SEQ ID NO: 886860 - RNA, 19 nt, Homo sapiens
  misc_RNA (1)...(19): siRNA sense strand
acaagugggucaaugaaga

SEQ ID NO: 886861 - RNA, 19 nt, Homo sapiens
  misc_RNA (1)...(19): siRNA sense strand
agagggaaguuuauagcua

SEQ ID NO: 886862 - RNA, 19 nt, Homo sapiens
  misc_RNA (1)...(19): siRNA sense strand
uauaagcaccuacaucaaa

SEQ ID NO: 886863 - RNA, 19 nt, Homo sapiens
  misc_RNA (1)...(19): siRNA sense strand
gugggucaaugaagaaauu

SEQ ID NO: 886864 - RNA, 19 nt, Homo sapiens
  misc_RNA (1)...(19): siRNA sense strand
ccaugaaucuuauagaacu

SEQ ID NO: 886865 - RNA, 19 nt, Homo sapiens
  misc_RNA (1)...(19): siRNA sense strand
gauaauggaaacacaacau

SEQ ID NO: 886866 - RNA, 19 nt, Homo sapiens
  misc_RNA (1)...(19): siRNA sense strand
caagugggucaaugaagaa

SEQ ID NO: 886867 - RNA, 19 nt, Homo sapiens
  misc_RNA (1)...(19): siRNA sense strand
ggauacagcaaaagcagua

SEQ ID NO: 886868 - RNA, 19 nt, Homo sapiens
  misc_RNA (1)...(19): siRNA sense strand
gaaacacaacauaccaaaa

SEQ ID NO: 886869 - RNA, 19 nt, Homo sapiens
  misc_RNA (1)...(19): siRNA sense strand
uaccaaaaccuaugggaua

SEQ ID NO: 886870 - RNA, 19 nt, Homo sapiens
  misc_RNA (1)...(19): siRNA sense strand
gaacgucucucaguugauu

SEQ ID NO: 886871 - RNA, 19 nt, Homo sapiens
  misc_RNA (1)...(19): siRNA sense strand
ggacauggcugcccuugag

SEQ ID NO: 886872 - RNA, 19 nt, Homo sapiens
  misc_RNA (1)...(19): siRNA sense strand
gaucaccaaugcuugcuuu

SEQ ID NO: 886873 - RNA, 19 nt, Homo sapiens
  misc_RNA (1)...(19): siRNA sense strand
ggaugagggugaagaguau

SEQ ID NO: 886874 - RNA, 19 nt, Homo sapiens
  misc_RNA (1)...(19): siRNA sense strand
aaccuuaaccgccuuauua

SEQ ID NO: 886875 - RNA, 19 nt, Homo sapiens
  misc_RNA (1)...(19): siRNA sense strand
acaaugaggccaucuauga

SEQ ID NO: 886876 - RNA, 19 nt, Homo sapiens
  misc_RNA (1)...(19): siRNA sense strand
caaccuacacuaaccuuaa

SEQ ID NO: 886877 - RNA, 19 nt, Homo sapiens
  misc_RNA (1)...(19): siRNA sense strand
ggagaugauuccuucaaca

SEQ ID NO: 886878 - RNA, 19 nt, Homo sapiens
  misc_RNA (1)...(19): siRNA sense strand
gcagagaucaccaaugcuu

SEQ ID NO: 886879 - RNA, 19 nt, Homo sapiens
  misc_RNA (1)...(19): siRNA sense strand
uagcagagaucaccaaugc

SEQ ID NO: 886880 - RNA, 19 nt, Homo sapiens
  misc_RNA (1)...(19): siRNA sense strand
ugacagaauuccagaccaa

SEQ ID NO: 886881 - RNA, 19 nt, Homo sapiens
  misc_RNA (1)...(19): siRNA sense strand
ccacaaguuugaccugaug

SEQ ID NO: 886882 - RNA, 19 nt, Homo sapiens
  misc_RNA (1)...(19): siRNA sense strand
cgagggcacuacaccauug

SEQ ID NO: 886883 - RNA, 19 nt, Homo sapiens
  misc_RNA (1)...(19): siRNA sense strand
caucacugcuucccugaga

SEQ ID NO: 886884 - RNA, 19 nt, Homo sapiens
  misc_RNA (1)...(19): siRNA sense strand
gauggagcccugaauguug

SEQ ID NO: 886885 - RNA, 19 nt, Homo sapiens
  misc_RNA (1)...(19): siRNA sense strand
cauggaacgucucucaguu

SEQ ID NO: 886886 - RNA, 19 nt, Homo sapiens
  misc_RNA (1)...(19): siRNA sense strand
gaaggauuaugaggagguu

SEQ ID NO: 886887 - RNA, 19 nt, Homo sapiens
  misc_RNA (1)...(19): siRNA sense strand
ggccaucuaugacaucugu

SEQ ID NO: 886888 - RNA, 19 nt, Homo sapiens
  misc_RNA (1)...(19): siRNA sense strand
cagauuguguccuccauca

SEQ ID NO: 886889 - RNA, 19 nt, Homo sapiens
  misc_RNA (1)...(19): siRNA sense strand
ugacgugguucccaaagau

SEQ ID NO: 886890 - RNA, 19 nt, Homo sapiens
  misc_RNA (1)...(19): siRNA sense strand
gggcaguguuuguagacuu

SEQ ID NO: 886891 - RNA, 19 nt, Homo sapiens
  misc_RNA (1)...(19): siRNA sense strand
gaacccacagucauugaug

SEQ ID NO: 886892 - RNA, 19 nt, Homo sapiens
  misc_RNA (1)...(19): siRNA sense strand
ucaacaccuucuucaguga

SEQ ID NO: 886893 - RNA, 19 nt, Homo sapiens
  misc_RNA (1)...(19): siRNA sense strand
uggaacgucucucaguuga

SEQ ID NO: 886894 - RNA, 19 nt, Homo sapiens
  misc_RNA (1)...(19): siRNA sense strand
ggcaguguuuguagacuug

SEQ ID NO: 886895 - RNA, 19 nt, Homo sapiens
  misc_RNA (1)...(19): siRNA sense strand
gcucauggaacgucucuca

SEQ ID NO: 886896 - RNA, 19 nt, Homo sapiens
  misc_RNA (1)...(19): siRNA sense strand
ccaagugacaagaccauug

SEQ ID NO: 886897 - RNA, 19 nt, Homo sapiens
  misc_RNA (1)...(19): siRNA sense strand
caccaaugcuugcuuugag

SEQ ID NO: 886898 - RNA, 19 nt, Homo sapiens
  misc_RNA (1)...(19): siRNA sense strand
ugauugugccuucauggua

SEQ ID NO: 886899 - RNA, 19 nt, Homo sapiens
  misc_RNA (1)...(19): siRNA sense strand
gaagaugcugccaauaacu

SEQ ID NO: 886900 - RNA, 19 nt, Homo sapiens
  misc_RNA (1)...(19): siRNA sense strand
gugacgugguucccaaaga

SEQ ID NO: 886901 - RNA, 19 nt, Homo sapiens
  misc_RNA (1)...(19): siRNA sense strand
cuuauuagccagauugugu

SEQ ID NO: 886902 - RNA, 19 nt, Homo sapiens
  misc_RNA (1)...(19): siRNA sense strand
gugccuuuguucacuggua

SEQ ID NO: 886903 - RNA, 19 nt, Homo sapiens
  misc_RNA (1)...(19): siRNA sense strand
cugcuucccugagauuuga

SEQ ID NO: 886904 - RNA, 19 nt, Homo sapiens
  misc_RNA (1)...(19): siRNA sense strand
aagaugcugccaauaacua

SEQ ID NO: 886905 - RNA, 19 nt, Homo sapiens
  misc_RNA (1)...(19): siRNA sense strand
ggagcucuacugccuggaa

SEQ ID NO: 886906 - RNA, 19 nt, Homo sapiens
  misc_RNA (1)...(19): siRNA sense strand
gugcaucuccauccacguu

SEQ ID NO: 886907 - RNA, 19 nt, Homo sapiens
  misc_RNA (1)...(19): siRNA sense strand
caaguuugaccugauguau

SEQ ID NO: 886908 - RNA, 19 nt, Homo sapiens
  misc_RNA (1)...(19): siRNA sense strand
auguugaccugacagaauu

SEQ ID NO: 886909 - RNA, 19 nt, Homo sapiens
  misc_RNA (1)...(19): siRNA sense strand
gaauguugaccugacagaa

SEQ ID NO: 886910 - RNA, 19 nt, Homo sapiens
  misc_RNA (1)...(19): siRNA sense strand
ccaaccuacacuaaccuua

SEQ ID NO: 886911 - RNA, 19 nt, Homo sapiens
  misc_RNA (1)...(19): siRNA sense strand
aggaugagggugaagagua

SEQ ID NO: 886912 - RNA, 19 nt, Homo sapiens
  misc_RNA (1)...(19): siRNA sense strand
ugaggagguuggagcagau

SEQ ID NO: 886913 - RNA, 19 nt, Homo sapiens
  misc_RNA (1)...(19): siRNA sense strand
ggccagaugccaagugaca

SEQ ID NO: 886914 - RNA, 19 nt, Homo sapiens
  misc_RNA (1)...(19): siRNA sense strand
caagugacaagaccauugg

SEQ ID NO: 886915 - RNA, 19 nt, Homo sapiens
  misc_RNA (1)...(19): siRNA sense strand
agacaaugaggccaucuau

SEQ ID NO: 886916 - RNA, 19 nt, Homo sapiens
  misc_RNA (1)...(19): siRNA sense strand
gagaggaugagggugaaga

SEQ ID NO: 886917 - RNA, 19 nt, Homo sapiens
  misc_RNA (1)...(19): siRNA sense strand
ugauggagcccugaauguu

SEQ ID NO: 886918 - RNA, 19 nt, Homo sapiens
  misc_RNA (1)...(19): siRNA sense strand
ucacugcuucccugagauu

SEQ ID NO: 886919 - RNA, 19 nt, Homo sapiens
  misc_RNA (1)...(19): siRNA sense strand
uaaccuuaaccgccuuauu

SEQ ID NO: 886920 - RNA, 19 nt, Homo sapiens
  misc_RNA (1)...(19): siRNA sense strand
ugucguagaaaccucgaua

SEQ ID NO: 886921 - RNA, 19 nt, Homo sapiens
  misc_RNA (1)...(19): siRNA sense strand
ucaccaaugcuugcuuuga

SEQ ID NO: 886922 - RNA, 19 nt, Homo sapiens
  misc_RNA (1)...(19): siRNA sense strand
auggagcccugaauguuga

SEQ ID NO: 886923 - RNA, 19 nt, Homo sapiens
  misc_RNA (1)...(19): siRNA sense strand
gacaaugaggccaucuaug

SEQ ID NO: 886924 - RNA, 19 nt, Homo sapiens
  misc_RNA (1)...(19): siRNA sense strand
gaggagguuggagcagaua

SEQ ID NO: 886925 - RNA, 19 nt, Homo sapiens
  misc_RNA (1)...(19): siRNA sense strand
ugccaagcgugccuuuguu

SEQ ID NO: 886926 - RNA, 19 nt, Homo sapiens
  misc_RNA (1)...(19): siRNA sense strand
ucccaaagaugucaaugcu

SEQ ID NO: 886927 - RNA, 19 nt, Homo sapiens
  misc_RNA (1)...(19): siRNA sense strand
ggaacccacagucauugau

SEQ ID NO: 886928 - RNA, 19 nt, Homo sapiens
  misc_RNA (1)...(19): siRNA sense strand
gccuggaccacaaguuuga

SEQ ID NO: 886929 - RNA, 19 nt, Homo sapiens
  misc_RNA (1)...(19): siRNA sense strand
gagaugauuccuucaacac

SEQ ID NO: 886930 - RNA, 19 nt, Homo sapiens
  misc_RNA (1)...(19): siRNA sense strand
uuccacagcuguaguugag

SEQ ID NO: 886931 - RNA, 19 nt, Homo sapiens
  misc_RNA (1)...(19): siRNA sense strand
cggagaggaugagggugaa

SEQ ID NO: 886932 - RNA, 19 nt, Homo sapiens
  misc_RNA (1)...(19): siRNA sense strand
aguuugaccugauguaugc

SEQ ID NO: 886933 - RNA, 19 nt, Homo sapiens
  misc_RNA (1)...(19): siRNA sense strand
ucgccuggaccacaaguuu

SEQ ID NO: 886934 - RNA, 19 nt, Homo sapiens
  misc_RNA (1)...(19): siRNA sense strand
gagcgcccaaccuacacua

SEQ ID NO: 886935 - RNA, 19 nt, Homo sapiens
  misc_RNA (1)...(19): siRNA sense strand
cuucaacaccuucuucagu

SEQ ID NO: 886936 - RNA, 19 nt, Homo sapiens
  misc_RNA (1)...(19): siRNA sense strand
gauaagaaguccacucaca

SEQ ID NO: 886937 - RNA, 19 nt, Homo sapiens
  misc_RNA (1)...(19): siRNA sense strand
gaaguccacucacagaaau

SEQ ID NO: 886938 - RNA, 19 nt, Homo sapiens
  misc_RNA (1)...(19): siRNA sense strand
ucacagaaauccugaagau

SEQ ID NO: 886939 - RNA, 19 nt, Homo sapiens
  misc_RNA (1)...(19): siRNA sense strand
cagcaccgaucccgacaua

SEQ ID NO: 886940 - RNA, 19 nt, Homo sapiens
  misc_RNA (1)...(19): siRNA sense strand
gaagguaaacacaaacgaa

SEQ ID NO: 886941 - RNA, 19 nt, Homo sapiens
  misc_RNA (1)...(19): siRNA sense strand
gauccuauguuuccuucuu

SEQ ID NO: 886942 - RNA, 19 nt, Homo sapiens
  misc_RNA (1)...(19): siRNA sense strand
uggcaaauaugaagguaaa

SEQ ID NO: 886943 - RNA, 19 nt, Homo sapiens
  misc_RNA (1)...(19): siRNA sense strand
gaagaaagcaaaaccaaaa

SEQ ID NO: 886944 - RNA, 19 nt, Homo sapiens
  misc_RNA (1)...(19): siRNA sense strand
gcaccgaucccgacauaga

SEQ ID NO: 886945 - RNA, 19 nt, Homo sapiens
  misc_RNA (1)...(19): siRNA sense strand
gaagaagagaagagagaaa

SEQ ID NO: 886946 - RNA, 19 nt, Homo sapiens
  misc_RNA (1)...(19): siRNA sense strand
auagaucagugacgucuuu

SEQ ID NO: 886947 - RNA, 19 nt, Homo sapiens
  misc_RNA (1)...(19): siRNA sense strand
gguaaacacaaacgaaaga

SEQ ID NO: 886948 - RNA, 19 nt, Homo sapiens
  misc_RNA (1)...(19): siRNA sense strand
gcaaauaugaagguaaaca

SEQ ID NO: 886949 - RNA, 19 nt, Homo sapiens
  misc_RNA (1)...(19): siRNA sense strand
uaagaaguccacucacaga

SEQ ID NO: 886950 - RNA, 19 nt, Homo sapiens
  misc_RNA (1)...(19): siRNA sense strand
gcuggcaaauaugaaggua

SEQ ID NO: 886951 - RNA, 19 nt, Homo sapiens
  misc_RNA (1)...(19): siRNA sense strand
agaaguccacucacagaaa

SEQ ID NO: 886952 - RNA, 19 nt, Homo sapiens
  misc_RNA (1)...(19): siRNA sense strand
guaaacacaaacgaaagaa

SEQ ID NO: 886953 - RNA, 19 nt, Homo sapiens
  misc_RNA (1)...(19): siRNA sense strand
aagaagaagagaagagaga

SEQ ID NO: 886954 - RNA, 19 nt, Homo sapiens
  misc_RNA (1)...(19): siRNA sense strand
uucagaugauccuauguuu

SEQ ID NO: 886955 - RNA, 19 nt, Homo sapiens
  misc_RNA (1)...(19): siRNA sense strand
aagguaaacacaaacgaaa

SEQ ID NO: 886956 - RNA, 19 nt, Homo sapiens
  misc_RNA (1)...(19): siRNA sense strand
gagaagagagaaaacaaau

SEQ ID NO: 886957 - RNA, 19 nt, Homo sapiens
  misc_RNA (1)...(19): siRNA sense strand
cagaugauccuauguuucc

SEQ ID NO: 886958 - RNA, 19 nt, Homo sapiens
  misc_RNA (1)...(19): siRNA sense strand
uuaagaagaagagaagaga

SEQ ID NO: 886959 - RNA, 19 nt, Homo sapiens
  misc_RNA (1)...(19): siRNA sense strand
gaugauccuauguuuccuu

SEQ ID NO: 886960 - RNA, 19 nt, Homo sapiens
  misc_RNA (1)...(19): siRNA sense strand
cuucagaugauccuauguu

SEQ ID NO: 886961 - RNA, 19 nt, Homo sapiens
  misc_RNA (1)...(19): siRNA sense strand
gaagagaagagagaaaaca

SEQ ID NO: 886962 - RNA, 19 nt, Homo sapiens
  misc_RNA (1)...(19): siRNA sense strand
ucagaugauccuauguuuc

SEQ ID NO: 886963 - RNA, 19 nt, Homo sapiens
  misc_RNA (1)...(19): siRNA sense strand
gcacgcugcucaucuucuu

SEQ ID NO: 886964 - RNA, 19 nt, Homo sapiens
  misc_RNA (1)...(19): siRNA sense strand
gccugcagguucauauuga

SEQ ID NO: 886965 - RNA, 19 nt, Homo sapiens
  misc_RNA (1)...(19): siRNA sense strand
gcagguucauauugagauc

SEQ ID NO: 886966 - RNA, 19 nt, Homo sapiens
  misc_RNA (1)...(19): siRNA sense strand
guucauauugagauccauu

SEQ ID NO: 886967 - RNA, 19 nt, Homo sapiens
  misc_RNA (1)...(19): siRNA sense strand
caacguccgccugcagguu

SEQ ID NO: 886968 - RNA, 19 nt, Homo sapiens
  misc_RNA (1)...(19): siRNA sense strand
gagcaagcaucuucacuga

SEQ ID NO: 886969 - RNA, 19 nt, Homo sapiens
  misc_RNA (1)...(19): siRNA sense strand
gcacagaggugagaagcaa

SEQ ID NO: 886970 - RNA, 19 nt, Homo sapiens
  misc_RNA (1)...(19): siRNA sense strand
gcacagacauggcagaaaa

SEQ ID NO: 886971 - RNA, 19 nt, Homo sapiens
  misc_RNA (1)...(19): siRNA sense strand
gcagacagaguguuugauu

SEQ ID NO: 886972 - RNA, 19 nt, Homo sapiens
  misc_RNA (1)...(19): siRNA sense strand
acacugaucuggagcugaa

SEQ ID NO: 886973 - RNA, 19 nt, Homo sapiens
  misc_RNA (1)...(19): siRNA sense strand
ggccgcagauuuacacuga

SEQ ID NO: 886974 - RNA, 19 nt, Homo sapiens
  misc_RNA (1)...(19): siRNA sense strand
gagaucaucccaggguuua

SEQ ID NO: 886975 - RNA, 19 nt, Homo sapiens
  misc_RNA (1)...(19): siRNA sense strand
guucgagucugagccuuua

SEQ ID NO: 886976 - RNA, 19 nt, Homo sapiens
  misc_RNA (1)...(19): siRNA sense strand
gaaggaugcccaggucuuu

SEQ ID NO: 886977 - RNA, 19 nt, Homo sapiens
  misc_RNA (1)...(19): siRNA sense strand
gcccaggucuuucccaaau

SEQ ID NO: 886978 - RNA, 19 nt, Homo sapiens
  misc_RNA (1)...(19): siRNA sense strand
ggagagagacgcuuaugca

SEQ ID NO: 886979 - RNA, 19 nt, Homo sapiens
  misc_RNA (1)...(19): siRNA sense strand
ccaggucuuucccaaauau

SEQ ID NO: 886980 - RNA, 19 nt, Homo sapiens
  misc_RNA (1)...(19): siRNA sense strand
agaagcagaucgcccaguu

SEQ ID NO: 886981 - RNA, 19 nt, Homo sapiens
  misc_RNA (1)...(19): siRNA sense strand
ggagaucaucccaggguuu

SEQ ID NO: 886982 - RNA, 19 nt, Homo sapiens
  misc_RNA (1)...(19): siRNA sense strand
cagcacauguggccuuuag

SEQ ID NO: 886983 - RNA, 19 nt, Homo sapiens
  misc_RNA (1)...(19): siRNA sense strand
gggcugaggcuucaucuuc

SEQ ID NO: 886984 - RNA, 19 nt, Homo sapiens
  misc_RNA (1)...(19): siRNA sense strand
uuaccaaggugcuggauca

SEQ ID NO: 886985 - RNA, 19 nt, Homo sapiens
  misc_RNA (1)...(19): siRNA sense strand
cagacagaguguuugauug

SEQ ID NO: 886986 - RNA, 19 nt, Homo sapiens
  misc_RNA (1)...(19): siRNA sense strand
ucaaggaguugugcuggaa

SEQ ID NO: 886987 - RNA, 19 nt, Homo sapiens
  misc_RNA (1)...(19): siRNA sense strand
ccauccaccugaacuguga

SEQ ID NO: 886988 - RNA, 19 nt, Homo sapiens
  misc_RNA (1)...(19): siRNA sense strand
caccagauuuggagagaau

SEQ ID NO: 886989 - RNA, 19 nt, Homo sapiens
  misc_RNA (1)...(19): siRNA sense strand
gauaggagcaggacacaac

SEQ ID NO: 886990 - RNA, 19 nt, Homo sapiens
  misc_RNA (1)...(19): siRNA sense strand
ucacagcucccauuaccaa

SEQ ID NO: 886991 - RNA, 19 nt, Homo sapiens
  misc_RNA (1)...(19): siRNA sense strand
gagcccagcuuccccgaua

SEQ ID NO: 886992 - RNA, 19 nt, Homo sapiens
  misc_RNA (1)...(19): siRNA sense strand
cagcguaccugcagagacu

SEQ ID NO: 886993 - RNA, 19 nt, Homo sapiens
  misc_RNA (1)...(19): siRNA sense strand
cauguagucucccucuuca

SEQ ID NO: 886994 - RNA, 19 nt, Homo sapiens
  misc_RNA (1)...(19): siRNA sense strand
gcaaaauggugcuguccaa

SEQ ID NO: 886995 - RNA, 19 nt, Homo sapiens
  misc_RNA (1)...(19): siRNA sense strand
gucugaagccugaguauga

SEQ ID NO: 886996 - RNA, 19 nt, Homo sapiens
  misc_RNA (1)...(19): siRNA sense strand
agccacagaugcagugauu

SEQ ID NO: 886997 - RNA, 19 nt, Homo sapiens
  misc_RNA (1)...(19): siRNA sense strand
uggcgaaggugcaggugaa

SEQ ID NO: 886998 - RNA, 19 nt, Homo sapiens
  misc_RNA (1)...(19): siRNA sense strand
gcaaguggccgaggucucu

SEQ ID NO: 886999 - RNA, 19 nt, Homo sapiens
  misc_RNA (1)...(19): siRNA sense strand
gggacgagcaggagagaga

SEQ ID NO: 887000 - RNA, 19 nt, Homo sapiens
  misc_RNA (1)...(19): siRNA sense strand
caccugaacugugaagaca

SEQ ID NO: 887001 - RNA, 19 nt, Homo sapiens
  misc_RNA (1)...(19): siRNA sense strand
uuagggaccucaagagcau

SEQ ID NO: 887002 - RNA, 19 nt, Homo sapiens
  misc_RNA (1)...(19): siRNA sense strand
gcaugggugcccucucuga

SEQ ID NO: 887003 - RNA, 19 nt, Homo sapiens
  misc_RNA (1)...(19): siRNA sense strand
ggucgccugucaccaagau

SEQ ID NO: 887004 - RNA, 19 nt, Homo sapiens
  misc_RNA (1)...(19): siRNA sense strand
ccacagaugcagugauugg

SEQ ID NO: 887005 - RNA, 19 nt, Homo sapiens
  misc_RNA (1)...(19): siRNA sense strand
ccucacaccaccagauuug

SEQ ID NO: 887006 - RNA, 19 nt, Homo sapiens
  misc_RNA (1)...(19): siRNA sense strand
caacacaucaccgcagauc

SEQ ID NO: 887007 - RNA, 19 nt, Homo sapiens
  misc_RNA (1)...(19): siRNA sense strand
gcgaaaugcagcacaugug

SEQ ID NO: 887008 - RNA, 19 nt, Homo sapiens
  misc_RNA (1)...(19): siRNA sense strand
ugaagacacccuccuccuu

SEQ ID NO: 887009 - RNA, 19 nt, Homo sapiens
  misc_RNA (1)...(19): siRNA sense strand
ccgcagauuuacacugauc

SEQ ID NO: 887010 - RNA, 19 nt, Homo sapiens
  misc_RNA (1)...(19): siRNA sense strand
cccaggucuuucccaaaua

SEQ ID NO: 887011 - RNA, 19 nt, Homo sapiens
  misc_RNA (1)...(19): siRNA sense strand
ggaccucaagagcauguga

SEQ ID NO: 887012 - RNA, 19 nt, Homo sapiens
  misc_RNA (1)...(19): siRNA sense strand
gcugaggcuucaucuucga

SEQ ID NO: 887013 - RNA, 19 nt, Homo sapiens
  misc_RNA (1)...(19): siRNA sense strand
gcaggagagagacgcuuau

SEQ ID NO: 887014 - RNA, 19 nt, Homo sapiens
  misc_RNA (1)...(19): siRNA sense strand
gcagugauuggagccauga

SEQ ID NO: 887015 - RNA, 19 nt, Homo sapiens
  misc_RNA (1)...(19): siRNA sense strand
ucccaaauaugaggaguuc

SEQ ID NO: 887016 - RNA, 19 nt, Homo sapiens
  misc_RNA (1)...(19): siRNA sense strand
gaucaucccaggguuuaag

SEQ ID NO: 887017 - RNA, 19 nt, Homo sapiens
  misc_RNA (1)...(19): siRNA sense strand
ggaguugugcuggaagaug

SEQ ID NO: 887018 - RNA, 19 nt, Homo sapiens
  misc_RNA (1)...(19): siRNA sense strand
ccucacagcucccauuacc

SEQ ID NO: 887019 - RNA, 19 nt, Homo sapiens
  misc_RNA (1)...(19): siRNA sense strand
gaagcagaucgcccaguuc

SEQ ID NO: 887020 - RNA, 19 nt, Homo sapiens
  misc_RNA (1)...(19): siRNA sense strand
guccucacagcucccauua

SEQ ID NO: 887021 - RNA, 19 nt, Homo sapiens
  misc_RNA (1)...(19): siRNA sense strand
ccauguagucucccucuuc

SEQ ID NO: 887022 - RNA, 19 nt, Homo sapiens
  misc_RNA (1)...(19): siRNA sense strand
caucaccgcagaucaccuu

SEQ ID NO: 887023 - RNA, 19 nt, Homo sapiens
  misc_RNA (1)...(19): siRNA sense strand
guaugaugcgguggugaua

SEQ ID NO: 887024 - RNA, 19 nt, Homo sapiens
  misc_RNA (1)...(19): siRNA sense strand
gaucuggagcugaagaaac

SEQ ID NO: 887025 - RNA, 19 nt, Homo sapiens
  misc_RNA (1)...(19): siRNA sense strand
cuucaaggacucugugguu

SEQ ID NO: 887026 - RNA, 19 nt, Homo sapiens
  misc_RNA (1)...(19): siRNA sense strand
gacagaguguuugauugca

SEQ ID NO: 887027 - RNA, 19 nt, Homo sapiens
  misc_RNA (1)...(19): siRNA sense strand
ugcugaggccgcagauuua

SEQ ID NO: 887028 - RNA, 19 nt, Homo sapiens
  misc_RNA (1)...(19): siRNA sense strand
gggagcugcugggcgaaau

SEQ ID NO: 887029 - RNA, 19 nt, Homo sapiens
  misc_RNA (1)...(19): siRNA sense strand
ccaccagauuuggagagaa

SEQ ID NO: 887030 - RNA, 19 nt, Homo sapiens
  misc_RNA (1)...(19): siRNA sense strand
cagcucccauuaccaaggu

SEQ ID NO: 887031 - RNA, 19 nt, Homo sapiens
  misc_RNA (1)...(19): siRNA sense strand
ucacaccaccagauuugga

SEQ ID NO: 887032 - RNA, 19 nt, Homo sapiens
  misc_RNA (1)...(19): siRNA sense strand
aagacacccuccuccuuca

SEQ ID NO: 887033 - RNA, 19 nt, Homo sapiens
  misc_RNA (1)...(19): siRNA sense strand
gggcacagacauggcagaa

SEQ ID NO: 887034 - RNA, 19 nt, Homo sapiens
  misc_RNA (1)...(19): siRNA sense strand
agacgcuuaugcagacaga

SEQ ID NO: 887035 - RNA, 19 nt, Homo sapiens
  misc_RNA (1)...(19): siRNA sense strand
aaggaguugugcuggaaga

SEQ ID NO: 887036 - RNA, 19 nt, Homo sapiens
  misc_RNA (1)...(19): siRNA sense strand
aagccacucuagccacaga

SEQ ID NO: 887037 - RNA, 19 nt, Homo sapiens
  misc_RNA (1)...(19): siRNA sense strand
acacauggagcaagcaucu

SEQ ID NO: 887038 - RNA, 19 nt, Homo sapiens
  misc_RNA (1)...(19): siRNA sense strand
uagucucccucuucacuca

SEQ ID NO: 887039 - RNA, 19 nt, Homo sapiens
  misc_RNA (1)...(19): siRNA sense strand
cuuugaagaugccauggau

SEQ ID NO: 887040 - RNA, 19 nt, Homo sapiens
  misc_RNA (1)...(19): siRNA sense strand
ucaucaggccuuugaagau

SEQ ID NO: 887041 - RNA, 19 nt, Homo sapiens
  misc_RNA (1)...(19): siRNA sense strand
cgagaggcgccaugugauc

SEQ ID NO: 887042 - RNA, 19 nt, Homo sapiens
  misc_RNA (1)...(19): siRNA sense strand
aggugcaggugaacaguga

SEQ ID NO: 887043 - RNA, 19 nt, Homo sapiens
  misc_RNA (1)...(19): siRNA sense strand
gaggucugaagccugagua

SEQ ID NO: 887044 - RNA, 19 nt, Homo sapiens
  misc_RNA (1)...(19): siRNA sense strand
ggucugaagccugaguaug

SEQ ID NO: 887045 - RNA, 19 nt, Homo sapiens
  misc_RNA (1)...(19): siRNA sense strand
uugauugcaucgaggucua

SEQ ID NO: 887046 - RNA, 19 nt, Homo sapiens
  misc_RNA (1)...(19): siRNA sense strand
acagaguguuugauugcau

SEQ ID NO: 887047 - RNA, 19 nt, Homo sapiens
  misc_RNA (1)...(19): siRNA sense strand
agacagaguguuugauugc

SEQ ID NO: 887048 - RNA, 19 nt, Homo sapiens
  misc_RNA (1)...(19): siRNA sense strand
ucugaagccugaguaugau

SEQ ID NO: 887049 - RNA, 19 nt, Homo sapiens
  misc_RNA (1)...(19): siRNA sense strand
gauuggagccaugacaagu

SEQ ID NO: 887050 - RNA, 19 nt, Homo sapiens
  misc_RNA (1)...(19): siRNA sense strand
gguucgagucugagccuuu

SEQ ID NO: 887051 - RNA, 19 nt, Homo sapiens
  misc_RNA (1)...(19): siRNA sense strand
gguccucacagcucccauu

SEQ ID NO: 887052 - RNA, 19 nt, Homo sapiens
  misc_RNA (1)...(19): siRNA sense strand
gcacaacgcaauacacaga

SEQ ID NO: 887053 - RNA, 19 nt, Homo sapiens
  misc_RNA (1)...(19): siRNA sense strand
gcaauacacagaacaagau

SEQ ID NO: 887054 - RNA, 19 nt, Homo sapiens
  misc_RNA (1)...(19): siRNA sense strand
gggcccagaugguuugcaa

SEQ ID NO: 887055 - RNA, 19 nt, Homo sapiens
  misc_RNA (1)...(19): siRNA sense strand
caauacacagaacaagauu

SEQ ID NO: 887056 - RNA, 19 nt, Homo sapiens
  misc_RNA (1)...(19): siRNA sense strand
uguuacagcgcgugguuua

SEQ ID NO: 887057 - RNA, 19 nt, Homo sapiens
  misc_RNA (1)...(19): siRNA sense strand
uacagcgcgugguuuacua

SEQ ID NO: 887058 - RNA, 19 nt, Homo sapiens
  misc_RNA (1)...(19): siRNA sense strand
caacgcaauacacagaaca

SEQ ID NO: 887059 - RNA, 19 nt, Homo sapiens
  misc_RNA (1)...(19): siRNA sense strand
acacucgcacaacgcaaua

SEQ ID NO: 887060 - RNA, 19 nt, Homo sapiens
  misc_RNA (1)...(19): siRNA sense strand
cgcaauacacagaacaaga

SEQ ID NO: 887061 - RNA, 19 nt, Homo sapiens
  misc_RNA (1)...(19): siRNA sense strand
gcccagaugguuugcaaag

SEQ ID NO: 887062 - RNA, 19 nt, Homo sapiens
  misc_RNA (1)...(19): siRNA sense strand
gcucagauuucagaggaau

SEQ ID NO: 887063 - RNA, 19 nt, Homo sapiens
  misc_RNA (1)...(19): siRNA sense strand
gggaggagcuguccauacg

SEQ ID NO: 887064 - RNA, 19 nt, Homo sapiens
  misc_RNA (1)...(19): siRNA sense strand
aggagaagguggauaagug

SEQ ID NO: 887065 - RNA, 19 nt, Homo sapiens
  misc_RNA (1)...(19): siRNA sense strand
ccaacccagugcacaagga

SEQ ID NO: 887066 - RNA, 19 nt, Homo sapiens
  misc_RNA (1)...(19): siRNA sense strand
cccaggagaagguggauaa

SEQ ID NO: 887067 - RNA, 19 nt, Homo sapiens
  misc_RNA (1)...(19): siRNA sense strand
gggugaagcaggccagaau

SEQ ID NO: 887068 - RNA, 19 nt, Homo sapiens
  misc_RNA (1)...(19): siRNA sense strand
gacccaacccagugcacaa

SEQ ID NO: 887069 - RNA, 19 nt, Homo sapiens
  misc_RNA (1)...(19): siRNA sense strand
gaucaacgccgucaucuug

SEQ ID NO: 887070 - RNA, 19 nt, Homo sapiens
  misc_RNA (1)...(19): siRNA sense strand
gggcagcgcugaaggagaa

SEQ ID NO: 887071 - RNA, 19 nt, Homo sapiens
  misc_RNA (1)...(19): siRNA sense strand
ugaagaagcagguguuuga

SEQ ID NO: 887072 - RNA, 19 nt, Homo sapiens
  misc_RNA (1)...(19): siRNA sense strand
ccaacgugauggugaagaa

SEQ ID NO: 887073 - RNA, 19 nt, Homo sapiens
  misc_RNA (1)...(19): siRNA sense strand
caguaccgcuucagcauug

SEQ ID NO: 887074 - RNA, 19 nt, Homo sapiens
  misc_RNA (1)...(19): siRNA sense strand
gcaguaccgcuucagcauu

SEQ ID NO: 887075 - RNA, 19 nt, Homo sapiens
  misc_RNA (1)...(19): siRNA sense strand
gaagcagguguuugagcua

SEQ ID NO: 887076 - RNA, 19 nt, Homo sapiens
  misc_RNA (1)...(19): siRNA sense strand
gcaagugggcagcgcugaa

SEQ ID NO: 887077 - RNA, 19 nt, Homo sapiens
  misc_RNA (1)...(19): siRNA sense strand
gcggcuggauggugcaguu

SEQ ID NO: 887078 - RNA, 19 nt, Homo sapiens
  misc_RNA (1)...(19): siRNA sense strand
ucgaguacauccucagcaa

SEQ ID NO: 887079 - RNA, 19 nt, Homo sapiens
  misc_RNA (1)...(19): siRNA sense strand
gcauccggcugcuccagau

SEQ ID NO: 887080 - RNA, 19 nt, Homo sapiens
  misc_RNA (1)...(19): siRNA sense strand
gcagguguuugagcuacug

SEQ ID NO: 887081 - RNA, 19 nt, Homo sapiens
  misc_RNA (1)...(19): siRNA sense strand
uggacgcccuggaccacua

SEQ ID NO: 887082 - RNA, 19 nt, Homo sapiens
  misc_RNA (1)...(19): siRNA sense strand
ggcagggcaucgaguacau

SEQ ID NO: 887083 - RNA, 19 nt, Homo sapiens
  misc_RNA (1)...(19): siRNA sense strand
ggugaagaagcagguguuu

SEQ ID NO: 887084 - RNA, 19 nt, Homo sapiens
  misc_RNA (1)...(19): siRNA sense strand
uggcugcccugugcaucua

SEQ ID NO: 887085 - RNA, 19 nt, Homo sapiens
  misc_RNA (1)...(19): siRNA sense strand
gaagaagcagguguuugag

SEQ ID NO: 887086 - RNA, 19 nt, Homo sapiens
  misc_RNA (1)...(19): siRNA sense strand
gcccuggaccacuacaaga

SEQ ID NO: 887087 - RNA, 19 nt, Homo sapiens
  misc_RNA (1)...(19): siRNA sense strand
gaucugaacugccuuguca

SEQ ID NO: 887088 - RNA, 19 nt, Homo sapiens
  misc_RNA (1)...(19): siRNA sense strand
ucacccagcuggaggaaga

SEQ ID NO: 887089 - RNA, 19 nt, Homo sapiens
  misc_RNA (1)...(19): siRNA sense strand
caggacaaguuggaucuga

SEQ ID NO: 887090 - RNA, 19 nt, Homo sapiens
  misc_RNA (1)...(19): siRNA sense strand
uggaggagcugugguugga

SEQ ID NO: 887091 - RNA, 19 nt, Homo sapiens
  misc_RNA (1)...(19): siRNA sense strand
ggacaaguuggaucugaac

SEQ ID NO: 887092 - RNA, 19 nt, Homo sapiens
  misc_RNA (1)...(19): siRNA sense strand
aggacaaguuggaucugaa

SEQ ID NO: 887093 - RNA, 19 nt, Homo sapiens
  misc_RNA (1)...(19): siRNA sense strand
ccgaguaucugaagcguua

SEQ ID NO: 887094 - RNA, 19 nt, Homo sapiens
  misc_RNA (1)...(19): siRNA sense strand
gaacuugccuacaaaugga

SEQ ID NO: 887095 - RNA, 19 nt, Homo sapiens
  misc_RNA (1)...(19): siRNA sense strand
ggaagaugauggagauuug

SEQ ID NO: 887096 - RNA, 19 nt, Homo sapiens
  misc_RNA (1)...(19): siRNA sense strand
ccaaggagaacaagaauaa

SEQ ID NO: 887097 - RNA, 19 nt, Homo sapiens
  misc_RNA (1)...(19): siRNA sense strand
gaacagcaaauaugaguau

SEQ ID NO: 887098 - RNA, 19 nt, Homo sapiens
  misc_RNA (1)...(19): siRNA sense strand
ggaggaacuugccuacaaa

SEQ ID NO: 887099 - RNA, 19 nt, Homo sapiens
  misc_RNA (1)...(19): siRNA sense strand
aaagaaggcugcacacaug

SEQ ID NO: 887100 - RNA, 19 nt, Homo sapiens
  misc_RNA (1)...(19): siRNA sense strand
caaagaacagcaaauauga

SEQ ID NO: 887101 - RNA, 19 nt, Homo sapiens
  misc_RNA (1)...(19): siRNA sense strand
gaaugcggauuguggauga

SEQ ID NO: 887102 - RNA, 19 nt, Homo sapiens
  misc_RNA (1)...(19): siRNA sense strand
gcaccaggauucugauuca

SEQ ID NO: 887103 - RNA, 19 nt, Homo sapiens
  misc_RNA (1)...(19): siRNA sense strand
caaggaggccucagcauaa

SEQ ID NO: 887104 - RNA, 19 nt, Homo sapiens
  misc_RNA (1)...(19): siRNA sense strand
ccagaucccucuccuccua

SEQ ID NO: 887105 - RNA, 19 nt, Homo sapiens
  misc_RNA (1)...(19): siRNA sense strand
ccagaaggguccauaacaa

SEQ ID NO: 887106 - RNA, 19 nt, Homo sapiens
  misc_RNA (1)...(19): siRNA sense strand
cgucaugguuccucagaua

SEQ ID NO: 887107 - RNA, 19 nt, Homo sapiens
  misc_RNA (1)...(19): siRNA sense strand
cgagauaagucuggucgua

SEQ ID NO: 887108 - RNA, 19 nt, Homo sapiens
  misc_RNA (1)...(19): siRNA sense strand
ccaaagaacagcaaauaug

SEQ ID NO: 887109 - RNA, 19 nt, Homo sapiens
  misc_RNA (1)...(19): siRNA sense strand
gaaagaaggcugcacacau

SEQ ID NO: 887110 - RNA, 19 nt, Homo sapiens
  misc_RNA (1)...(19): siRNA sense strand
ccaaggaggccucagcaua

SEQ ID NO: 887111 - RNA, 19 nt, Homo sapiens
  misc_RNA (1)...(19): siRNA sense strand
ggacagcuaucuccacaac

SEQ ID NO: 887112 - RNA, 19 nt, Homo sapiens
  misc_RNA (1)...(19): siRNA sense strand
gagaguccgucaugauuca

SEQ ID NO: 887113 - RNA, 19 nt, Homo sapiens
  misc_RNA (1)...(19): siRNA sense strand
uggcagaguuuguggauga

SEQ ID NO: 887114 - RNA, 19 nt, Homo sapiens
  misc_RNA (1)...(19): siRNA sense strand
caaauggaguguugaggau

SEQ ID NO: 887115 - RNA, 19 nt, Homo sapiens
  misc_RNA (1)...(19): siRNA sense strand
uaagagaacaggaaagaga

SEQ ID NO: 887116 - RNA, 19 nt, Homo sapiens
  misc_RNA (1)...(19): siRNA sense strand
cagaagagguaaagcagau

SEQ ID NO: 887117 - RNA, 19 nt, Homo sapiens
  misc_RNA (1)...(19): siRNA sense strand
ggaggacucuuggcucuuc

SEQ ID NO: 887118 - RNA, 19 nt, Homo sapiens
  misc_RNA (1)...(19): siRNA sense strand
ccaauggauuugaacagaa

SEQ ID NO: 887119 - RNA, 19 nt, Homo sapiens
  misc_RNA (1)...(19): siRNA sense strand
agagagagaugagcuguau

SEQ ID NO: 887120 - RNA, 19 nt, Homo sapiens
  misc_RNA (1)...(19): siRNA sense strand
aagaaaccauggcauuuga

SEQ ID NO: 887121 - RNA, 19 nt, Homo sapiens
  misc_RNA (1)...(19): siRNA sense strand
gguguuaacugacauacag

SEQ ID NO: 887122 - RNA, 19 nt, Homo sapiens
  misc_RNA (1)...(19): siRNA sense strand
uggaggaacuugccuacaa

SEQ ID NO: 887123 - RNA, 19 nt, Homo sapiens
  misc_RNA (1)...(19): siRNA sense strand
caagaaaccauggcauuug

SEQ ID NO: 887124 - RNA, 19 nt, Homo sapiens
  misc_RNA (1)...(19): siRNA sense strand
acgaagaccuacccucaaa

SEQ ID NO: 887125 - RNA, 19 nt, Homo sapiens
  misc_RNA (1)...(19): siRNA sense strand
gcaaugaaagagaugcaaa

SEQ ID NO: 887126 - RNA, 19 nt, Homo sapiens
  misc_RNA (1)...(19): siRNA sense strand
gcaagggaaugcggauugu

SEQ ID NO: 887127 - RNA, 19 nt, Homo sapiens
  misc_RNA (1)...(19): siRNA sense strand
gcaagacuucuccacauug

SEQ ID NO: 887128 - RNA, 19 nt, Homo sapiens
  misc_RNA (1)...(19): siRNA sense strand
caaaggugacugccagaaa

SEQ ID NO: 887129 - RNA, 19 nt, Homo sapiens
  misc_RNA (1)...(19): siRNA sense strand
gagauaagucuggucguaa

SEQ ID NO: 887130 - RNA, 19 nt, Homo sapiens
  misc_RNA (1)...(19): siRNA sense strand
caaggaacaggaucaagaa

SEQ ID NO: 887131 - RNA, 19 nt, Homo sapiens
  misc_RNA (1)...(19): siRNA sense strand
ggagacagaggaccaaauc

SEQ ID NO: 887132 - RNA, 19 nt, Homo sapiens
  misc_RNA (1)...(19): siRNA sense strand
ccagaaagcaacugauuca

SEQ ID NO: 887133 - RNA, 19 nt, Homo sapiens
  misc_RNA (1)...(19): siRNA sense strand
gaagaccuacccucaaaca

SEQ ID NO: 887134 - RNA, 19 nt, Homo sapiens
  misc_RNA (1)...(19): siRNA sense strand
gauuguggaugaugaugug

SEQ ID NO: 887135 - RNA, 19 nt, Homo sapiens
  misc_RNA (1)...(19): siRNA sense strand
gcuaagagaacaggaaaga

SEQ ID NO: 887136 - RNA, 19 nt, Homo sapiens
  misc_RNA (1)...(19): siRNA sense strand
agaggaagaugauggagau

SEQ ID NO: 887137 - RNA, 19 nt, Homo sapiens
  misc_RNA (1)...(19): siRNA sense strand
ggaacuugccuacaaaugg

SEQ ID NO: 887138 - RNA, 19 nt, Homo sapiens
  misc_RNA (1)...(19): siRNA sense strand
agaauaaggccaaggagaa

SEQ ID NO: 887139 - RNA, 19 nt, Homo sapiens
  misc_RNA (1)...(19): siRNA sense strand
acgaagaucuggauaggau

SEQ ID NO: 887140 - RNA, 19 nt, Homo sapiens
  misc_RNA (1)...(19): siRNA sense strand
ggaagaggaagaugaugga

SEQ ID NO: 887141 - RNA, 19 nt, Homo sapiens
  misc_RNA (1)...(19): siRNA sense strand
ucaagaaaccauggcauuu

SEQ ID NO: 887142 - RNA, 19 nt, Homo sapiens
  misc_RNA (1)...(19): siRNA sense strand
ucaaggaacaggaucaaga

SEQ ID NO: 887143 - RNA, 19 nt, Homo sapiens
  misc_RNA (1)...(19): siRNA sense strand
cgucaugacuccucagaca

SEQ ID NO: 887144 - RNA, 19 nt, Homo sapiens
  misc_RNA (1)...(19): siRNA sense strand
ccaggaggauccgucauga

SEQ ID NO: 887145 - RNA, 19 nt, Homo sapiens
  misc_RNA (1)...(19): siRNA sense strand
uuuaauaucuggccuggau

SEQ ID NO: 887146 - RNA, 19 nt, Homo sapiens
  misc_RNA (1)...(19): siRNA sense strand
ggucguaagaggaauuuga

SEQ ID NO: 887147 - RNA, 19 nt, Homo sapiens
  misc_RNA (1)...(19): siRNA sense strand
gagaacagcaggagcucaa

SEQ ID NO: 887148 - RNA, 19 nt, Homo sapiens
  misc_RNA (1)...(19): siRNA sense strand
uagcaagacuucuccacau

SEQ ID NO: 887149 - RNA, 19 nt, Homo sapiens
  misc_RNA (1)...(19): siRNA sense strand
uggauaggaugcuaagaga

SEQ ID NO: 887150 - RNA, 19 nt, Homo sapiens
  misc_RNA (1)...(19): siRNA sense strand
ggaacaggaucaagaaacc

SEQ ID NO: 887151 - RNA, 19 nt, Homo sapiens
  misc_RNA (1)...(19): siRNA sense strand
ggaggaagaggaagaugau

SEQ ID NO: 887152 - RNA, 19 nt, Homo sapiens
  misc_RNA (1)...(19): siRNA sense strand
gaaggcugcacacauguau

SEQ ID NO: 887153 - RNA, 19 nt, Homo sapiens
  misc_RNA (1)...(19): siRNA sense strand
aaaggugacugccagaaag

SEQ ID NO: 887154 - RNA, 19 nt, Homo sapiens
  misc_RNA (1)...(19): siRNA sense strand
caagacuucuccacauugg

SEQ ID NO: 887155 - RNA, 19 nt, Homo sapiens
  misc_RNA (1)...(19): siRNA sense strand
caauggauuugaacagaag

SEQ ID NO: 887156 - RNA, 19 nt, Homo sapiens
  misc_RNA (1)...(19): siRNA sense strand
gcaaaggaggaaagcagaa

SEQ ID NO: 887157 - RNA, 19 nt, Homo sapiens
  misc_RNA (1)...(19): siRNA sense strand
uguggaggaugcaaugaaa

SEQ ID NO: 887158 - RNA, 19 nt, Homo sapiens
  misc_RNA (1)...(19): siRNA sense strand
caaccaaacuagaaaagga

SEQ ID NO: 887159 - RNA, 19 nt, Homo sapiens
  misc_RNA (1)...(19): siRNA sense strand
guaugacccugacaucucu

SEQ ID NO: 887160 - RNA, 19 nt, Homo sapiens
  misc_RNA (1)...(19): siRNA sense strand
caaaggaggaaagcagaaa

SEQ ID NO: 887161 - RNA, 19 nt, Homo sapiens
  misc_RNA (1)...(19): siRNA sense strand
gacagaggaccaaaucuuc

SEQ ID NO: 887162 - RNA, 19 nt, Homo sapiens
  misc_RNA (1)...(19): siRNA sense strand
ggagaguccgucaugauuc

SEQ ID NO: 887163 - RNA, 19 nt, Homo sapiens
  misc_RNA (1)...(19): siRNA sense strand
gccuacaaauggaguguug

SEQ ID NO: 887164 - RNA, 19 nt, Homo sapiens
  misc_RNA (1)...(19): siRNA sense strand
caagaaggcaguggaggaa

SEQ ID NO: 887165 - RNA, 19 nt, Homo sapiens
  misc_RNA (1)...(19): siRNA sense strand
ccucccaacagauuuaaua

SEQ ID NO: 887166 - RNA, 19 nt, Homo sapiens
  misc_RNA (1)...(19): siRNA sense strand
gcagcuugauuccaaaggu

SEQ ID NO: 887167 - RNA, 19 nt, Homo sapiens
  misc_RNA (1)...(19): siRNA sense strand
gagccucccauuugucauu

SEQ ID NO: 887168 - RNA, 19 nt, Homo sapiens
  misc_RNA (1)...(19): siRNA sense strand
ugauuuggcuccuaauguc

SEQ ID NO: 887169 - RNA, 19 nt, Homo sapiens
  misc_RNA (1)...(19): siRNA sense strand
ggaggccucagcauaauuc

SEQ ID NO: 887170 - RNA, 19 nt, Homo sapiens
  misc_RNA (1)...(19): siRNA sense strand
cuccuaaugucacuuauuc

SEQ ID NO: 887171 - RNA, 19 nt, Homo sapiens
  misc_RNA (1)...(19): siRNA sense strand
ucaggugcaucuccuagga

SEQ ID NO: 887172 - RNA, 19 nt, Homo sapiens
  misc_RNA (1)...(19): siRNA sense strand
uaagaggaauuugaaacuc

SEQ ID NO: 887173 - RNA, 19 nt, Homo sapiens
  misc_RNA (1)...(19): siRNA sense strand
gauaggaugcuaagagaac

SEQ ID NO: 887174 - RNA, 19 nt, Homo sapiens
  misc_RNA (1)...(19): siRNA sense strand
acucuuggcucuucagaca

SEQ ID NO: 887175 - RNA, 19 nt, Homo sapiens
  misc_RNA (1)...(19): siRNA sense strand
ugacgaagaucuggauagg

SEQ ID NO: 887176 - RNA, 19 nt, Homo sapiens
  misc_RNA (1)...(19): siRNA sense strand
cuauauugaugacgaagau

SEQ ID NO: 887177 - RNA, 19 nt, Homo sapiens
  misc_RNA (1)...(19): siRNA sense strand
gaggaugcaaugaaagaga

SEQ ID NO: 887178 - RNA, 19 nt, Homo sapiens
  misc_RNA (1)...(19): siRNA sense strand
guaagaggaauuugaaacu

SEQ ID NO: 887179 - RNA, 19 nt, Homo sapiens
  misc_RNA (1)...(19): siRNA sense strand
ggcauuugaagcugaauuu

SEQ ID NO: 887180 - RNA, 19 nt, Homo sapiens
  misc_RNA (1)...(19): siRNA sense strand
ggaaagaaggcugcacaca

SEQ ID NO: 887181 - RNA, 19 nt, Homo sapiens
  misc_RNA (1)...(19): siRNA sense strand
agacagaggaccaaaucuu

SEQ ID NO: 887182 - RNA, 19 nt, Homo sapiens
  misc_RNA (1)...(19): siRNA sense strand
agaccuacccucaaacaga

SEQ ID NO: 887183 - RNA, 19 nt, Homo sapiens
  misc_RNA (1)...(19): siRNA sense strand
ggaguguugaggauaugua

SEQ ID NO: 887184 - RNA, 19 nt, Homo sapiens
  misc_RNA (1)...(19): siRNA sense strand
aaacuggguugguguuaac

SEQ ID NO: 887185 - RNA, 19 nt, Homo sapiens
  misc_RNA (1)...(19): siRNA sense strand
ggccucagcauaauucuuc

SEQ ID NO: 887186 - RNA, 19 nt, Homo sapiens
  misc_RNA (1)...(19): siRNA sense strand
gaucuggauaggaugcuaa

SEQ ID NO: 887187 - RNA, 19 nt, Homo sapiens
  misc_RNA (1)...(19): siRNA sense strand
gaaaccauggcauuugaag

SEQ ID NO: 887188 - RNA, 19 nt, Homo sapiens
  misc_RNA (1)...(19): siRNA sense strand
ucccaaagaacagcaaaua

SEQ ID NO: 887189 - RNA, 19 nt, Homo sapiens
  misc_RNA (1)...(19): siRNA sense strand
agcaggagcucaaggaaca

SEQ ID NO: 887190 - RNA, 19 nt, Homo sapiens
  misc_RNA (1)...(19): siRNA sense strand
aauggaguguugaggauau

SEQ ID NO: 887191 - RNA, 19 nt, Homo sapiens
  misc_RNA (1)...(19): siRNA sense strand
gaacguuuagagcaaagga

SEQ ID NO: 887192 - RNA, 19 nt, Homo sapiens
  misc_RNA (1)...(19): siRNA sense strand
gaguguugaggauauguaa

SEQ ID NO: 887193 - RNA, 19 nt, Homo sapiens
  misc_RNA (1)...(19): siRNA sense strand
gaauaugccuucagucuuu

SEQ ID NO: 887194 - RNA, 19 nt, Homo sapiens
  misc_RNA (1)...(19): siRNA sense strand
gagcagaaccuucagaaua

SEQ ID NO: 887195 - RNA, 19 nt, Homo sapiens
  misc_RNA (1)...(19): siRNA sense strand
gcacaauacuuggcaguua

SEQ ID NO: 887196 - RNA, 19 nt, Homo sapiens
  misc_RNA (1)...(19): siRNA sense strand
gagcagggcuucaccauug

SEQ ID NO: 887197 - RNA, 19 nt, Homo sapiens
  misc_RNA (1)...(19): siRNA sense strand
ggaaauggaccaagaauau

SEQ ID NO: 887198 - RNA, 19 nt, Homo sapiens
  misc_RNA (1)...(19): siRNA sense strand
ggaagaagcuaagauacuu

SEQ ID NO: 887199 - RNA, 19 nt, Homo sapiens
  misc_RNA (1)...(19): siRNA sense strand
ggaaggagaagaauucgua

SEQ ID NO: 887200 - RNA, 19 nt, Homo sapiens
  misc_RNA (1)...(19): siRNA sense strand
gagaagaauucguacaguu

SEQ ID NO: 887201 - RNA, 19 nt, Homo sapiens
  misc_RNA (1)...(19): siRNA sense strand
gauaucaucuuucucugaa

SEQ ID NO: 887202 - RNA, 19 nt, Homo sapiens
  misc_RNA (1)...(19): siRNA sense strand
uaagaugaguuuccaagaa

SEQ ID NO: 887203 - RNA, 19 nt, Homo sapiens
  misc_RNA (1)...(19): siRNA sense strand
aggaagaccuggaauauga

SEQ ID NO: 887204 - RNA, 19 nt, Homo sapiens
  misc_RNA (1)...(19): siRNA sense strand
ggacagacucuuccaacua

SEQ ID NO: 887205 - RNA, 19 nt, Homo sapiens
  misc_RNA (1)...(19): siRNA sense strand
ccaagaaguucagcgguua

SEQ ID NO: 887206 - RNA, 19 nt, Homo sapiens
  misc_RNA (1)...(19): siRNA sense strand
agcagaaccuucagaauaa

SEQ ID NO: 887207 - RNA, 19 nt, Homo sapiens
  misc_RNA (1)...(19): siRNA sense strand
ccaagaauaugccuucagu

SEQ ID NO: 887208 - RNA, 19 nt, Homo sapiens
  misc_RNA (1)...(19): siRNA sense strand
ccaacuauguggagaacaa

SEQ ID NO: 887209 - RNA, 19 nt, Homo sapiens
  misc_RNA (1)...(19): siRNA sense strand
caaaggagcacuaccacuu

SEQ ID NO: 887210 - RNA, 19 nt, Homo sapiens
  misc_RNA (1)...(19): siRNA sense strand
cacaauacuuggcaguuaa

SEQ ID NO: 887211 - RNA, 19 nt, Homo sapiens
  misc_RNA (1)...(19): siRNA sense strand
gcaguuaagccguguguau

SEQ ID NO: 887212 - RNA, 19 nt, Homo sapiens
  misc_RNA (1)...(19): siRNA sense strand
gaagcugacucugcuggaa

SEQ ID NO: 887213 - RNA, 19 nt, Homo sapiens
  misc_RNA (1)...(19): siRNA sense strand
gcuggaagaagcuaagaua

SEQ ID NO: 887214 - RNA, 19 nt, Homo sapiens
  misc_RNA (1)...(19): siRNA sense strand
ggaagcagaaccugaguug

SEQ ID NO: 887215 - RNA, 19 nt, Homo sapiens
  misc_RNA (1)...(19): siRNA sense strand
ccgcccagcuuccaucuuu

SEQ ID NO: 887216 - RNA, 19 nt, Homo sapiens
  misc_RNA (1)...(19): siRNA sense strand
caaggaggcuggcaaugag

SEQ ID NO: 887217 - RNA, 19 nt, Homo sapiens
  misc_RNA (1)...(19): siRNA sense strand
cagcuuccaucuuugugua

SEQ ID NO: 887218 - RNA, 19 nt, Homo sapiens
  misc_RNA (1)...(19): siRNA sense strand
uaaugaauguggaaaugga

SEQ ID NO: 887219 - RNA, 19 nt, Homo sapiens
  misc_RNA (1)...(19): siRNA sense strand
gacagacucuuccaacuac

SEQ ID NO: 887220 - RNA, 19 nt, Homo sapiens
  misc_RNA (1)...(19): siRNA sense strand
ccaagcgccucaucaagga

SEQ ID NO: 887221 - RNA, 19 nt, Homo sapiens
  misc_RNA (1)...(19): siRNA sense strand
ucagcuaccucugcucuaa

SEQ ID NO: 887222 - RNA, 19 nt, Homo sapiens
  misc_RNA (1)...(19): siRNA sense strand
gaaauggaccaagaauaug

SEQ ID NO: 887223 - RNA, 19 nt, Homo sapiens
  misc_RNA (1)...(19): siRNA sense strand
gcuaagauacuucagacuu

SEQ ID NO: 887224 - RNA, 19 nt, Homo sapiens
  misc_RNA (1)...(19): siRNA sense strand
ggagaagaauucguacagu

SEQ ID NO: 887225 - RNA, 19 nt, Homo sapiens
  misc_RNA (1)...(19): siRNA sense strand
gaaaucccgaaaugacuuu

SEQ ID NO: 887226 - RNA, 19 nt, Homo sapiens
  misc_RNA (1)...(19): siRNA sense strand
cuaagauacuucagacuuc

SEQ ID NO: 887227 - RNA, 19 nt, Homo sapiens
  misc_RNA (1)...(19): siRNA sense strand
ggaacucauugaccgcuau

SEQ ID NO: 887228 - RNA, 19 nt, Homo sapiens
  misc_RNA (1)...(19): siRNA sense strand
ggaaaucccgaaaugacuu

SEQ ID NO: 887229 - RNA, 19 nt, Homo sapiens
  misc_RNA (1)...(19): siRNA sense strand
gacuggaaaucccgaaaug

SEQ ID NO: 887230 - RNA, 19 nt, Homo sapiens
  misc_RNA (1)...(19): siRNA sense strand
aagaccagcugaccacuga

SEQ ID NO: 887231 - RNA, 19 nt, Homo sapiens
  misc_RNA (1)...(19): siRNA sense strand
ucucuucccugguuaucua

SEQ ID NO: 887232 - RNA, 19 nt, Homo sapiens
  misc_RNA (1)...(19): siRNA sense strand
ucaaggaggcuggcaauga

SEQ ID NO: 887233 - RNA, 19 nt, Homo sapiens
  misc_RNA (1)...(19): siRNA sense strand
cugcagggcuugaaaugga

SEQ ID NO: 887234 - RNA, 19 nt, Homo sapiens
  misc_RNA (1)...(19): siRNA sense strand
uauaaggcauugacuaaac

SEQ ID NO: 887235 - RNA, 19 nt, Homo sapiens
  misc_RNA (1)...(19): siRNA sense strand
ggagaacaaugguuuuaau

SEQ ID NO: 887236 - RNA, 19 nt, Homo sapiens
  misc_RNA (1)...(19): siRNA sense strand
gaaccugaguuggaagagu

SEQ ID NO: 887237 - RNA, 19 nt, Homo sapiens
  misc_RNA (1)...(19): siRNA sense strand
ggaauaugaggaagaggaa

SEQ ID NO: 887238 - RNA, 19 nt, Homo sapiens
  misc_RNA (1)...(19): siRNA sense strand
uaagauacuucagacuuca

SEQ ID NO: 887239 - RNA, 19 nt, Homo sapiens
  misc_RNA (1)...(19): siRNA sense strand
ccuaaugaauguggaaaug

SEQ ID NO: 887240 - RNA, 19 nt, Homo sapiens
  misc_RNA (1)...(19): siRNA sense strand
gaucagcggucagcaacuc

SEQ ID NO: 887241 - RNA, 19 nt, Homo sapiens
  misc_RNA (1)...(19): siRNA sense strand
cagcgucgagggauauaua

SEQ ID NO: 887242 - RNA, 19 nt, Homo sapiens
  misc_RNA (1)...(19): siRNA sense strand
ucuauaaggcauugacuaa

SEQ ID NO: 887243 - RNA, 19 nt, Homo sapiens
  misc_RNA (1)...(19): siRNA sense strand
gcucuucucauaacaccua

SEQ ID NO: 887244 - RNA, 19 nt, Homo sapiens
  misc_RNA (1)...(19): siRNA sense strand
ggcaggagaccaacuaugu

SEQ ID NO: 887245 - RNA, 19 nt, Homo sapiens
  misc_RNA (1)...(19): siRNA sense strand
cagcgguuauugcaccuaa

SEQ ID NO: 887246 - RNA, 19 nt, Homo sapiens
  misc_RNA (1)...(19): siRNA sense strand
gaauggcggcuguggcuau

SEQ ID NO: 887247 - RNA, 19 nt, Homo sapiens
  misc_RNA (1)...(19): siRNA sense strand
guuggaagagucagaauug

SEQ ID NO: 887248 - RNA, 19 nt, Homo sapiens
  misc_RNA (1)...(19): siRNA sense strand
caucugcucuucucauaac

SEQ ID NO: 887249 - RNA, 19 nt, Homo sapiens
  misc_RNA (1)...(19): siRNA sense strand
gcugagcgauugguuucaa

SEQ ID NO: 887250 - RNA, 19 nt, Homo sapiens
  misc_RNA (1)...(19): siRNA sense strand
gaacaaugguuuuaaucca

SEQ ID NO: 887251 - RNA, 19 nt, Homo sapiens
  misc_RNA (1)...(19): siRNA sense strand
caaagcccagacucucuua

SEQ ID NO: 887252 - RNA, 19 nt, Homo sapiens
  misc_RNA (1)...(19): siRNA sense strand
cuugaagucugucucauuc

SEQ ID NO: 887253 - RNA, 19 nt, Homo sapiens
  misc_RNA (1)...(19): siRNA sense strand
gcguggagguggauguaug

SEQ ID NO: 887254 - RNA, 19 nt, Homo sapiens
  misc_RNA (1)...(19): siRNA sense strand
gugcaggaacuguuugaaa

SEQ ID NO: 887255 - RNA, 19 nt, Homo sapiens
  misc_RNA (1)...(19): siRNA sense strand
gaauucguacaguucuaua

SEQ ID NO: 887256 - RNA, 19 nt, Homo sapiens
  misc_RNA (1)...(19): siRNA sense strand
gcagaaccuucagaauaag

SEQ ID NO: 887257 - RNA, 19 nt, Homo sapiens
  misc_RNA (1)...(19): siRNA sense strand
ccagacuuccugcgugaua

SEQ ID NO: 887258 - RNA, 19 nt, Homo sapiens
  misc_RNA (1)...(19): siRNA sense strand
aagaugaguuuccaagaag

SEQ ID NO: 887259 - RNA, 19 nt, Homo sapiens
  misc_RNA (1)...(19): siRNA sense strand
ugaggaagaccuggaauau

SEQ ID NO: 887260 - RNA, 19 nt, Homo sapiens
  misc_RNA (1)...(19): siRNA sense strand
gauguggagacaauacgua

SEQ ID NO: 887261 - RNA, 19 nt, Homo sapiens
  misc_RNA (1)...(19): siRNA sense strand
aaaucaggaugguaagaug

SEQ ID NO: 887262 - RNA, 19 nt, Homo sapiens
  misc_RNA (1)...(19): siRNA sense strand
gcuuccaucuuuguguaua

SEQ ID NO: 887263 - RNA, 19 nt, Homo sapiens
  misc_RNA (1)...(19): siRNA sense strand
gaggaagaccuggaauaug

SEQ ID NO: 887264 - RNA, 19 nt, Homo sapiens
  misc_RNA (1)...(19): siRNA sense strand
cugaggagcuucggaggaa

SEQ ID NO: 887265 - RNA, 19 nt, Homo sapiens
  misc_RNA (1)...(19): siRNA sense strand
guaagaugaguuuccaaga

SEQ ID NO: 887266 - RNA, 19 nt, Homo sapiens
  misc_RNA (1)...(19): siRNA sense strand
aagcagaaccugaguugga

SEQ ID NO: 887267 - RNA, 19 nt, Homo sapiens
  misc_RNA (1)...(19): siRNA sense strand
gaccauggcccgucaucug

SEQ ID NO: 887268 - RNA, 19 nt, Homo sapiens
  misc_RNA (1)...(19): siRNA sense strand
ggagcagggcuucaccauu

SEQ ID NO: 887269 - RNA, 19 nt, Homo sapiens
  misc_RNA (1)...(19): siRNA sense strand
gugcugaggugcaggaacu

SEQ ID NO: 887270 - RNA, 19 nt, Homo sapiens
  misc_RNA (1)...(19): siRNA sense strand
gaucuuuggcguucgucua

SEQ ID NO: 887271 - RNA, 19 nt, Homo sapiens
  misc_RNA (1)...(19): siRNA sense strand
gcccaucagcccuuucaaa

SEQ ID NO: 887272 - RNA, 19 nt, Homo sapiens
  misc_RNA (1)...(19): siRNA sense strand
gaccacugaucaggacuug

SEQ ID NO: 887273 - RNA, 19 nt, Homo sapiens
  misc_RNA (1)...(19): siRNA sense strand
uuccgcagcuucacacauu

SEQ ID NO: 887274 - RNA, 19 nt, Homo sapiens
  misc_RNA (1)...(19): siRNA sense strand
gcaggaacuguuugaaagu

SEQ ID NO: 887275 - RNA, 19 nt, Homo sapiens
  misc_RNA (1)...(19): siRNA sense strand
gaaguucagcgguuauugc

SEQ ID NO: 887276 - RNA, 19 nt, Homo sapiens
  misc_RNA (1)...(19): siRNA sense strand
gcaggagaccaacuaugug

SEQ ID NO: 887277 - RNA, 19 nt, Homo sapiens
  misc_RNA (1)...(19): siRNA sense strand
gcagaucuuuggcguucgu

SEQ ID NO: 887278 - RNA, 19 nt, Homo sapiens
  misc_RNA (1)...(19): siRNA sense strand
ugcaggaacuguuugaaag

SEQ ID NO: 887279 - RNA, 19 nt, Homo sapiens
  misc_RNA (1)...(19): siRNA sense strand
guuucaacguggagacaaa

SEQ ID NO: 887280 - RNA, 19 nt, Homo sapiens
  misc_RNA (1)...(19): siRNA sense strand
caaaguggacaagaccaaa

SEQ ID NO: 887281 - RNA, 19 nt, Homo sapiens
  misc_RNA (1)...(19): siRNA sense strand
ugaggaagaggaagcagaa

SEQ ID NO: 887282 - RNA, 19 nt, Homo sapiens
  misc_RNA (1)...(19): siRNA sense strand
ucauaacaccuaccuagug

SEQ ID NO: 887283 - RNA, 19 nt, Homo sapiens
  misc_RNA (1)...(19): siRNA sense strand
uauugcaccuaaugaaugu

SEQ ID NO: 887284 - RNA, 19 nt, Homo sapiens
  misc_RNA (1)...(19): siRNA sense strand
gaccaauggcugagcgauu

SEQ ID NO: 887285 - RNA, 19 nt, Homo sapiens
  misc_RNA (1)...(19): siRNA sense strand
gaugaguuuccaagaaguu

SEQ ID NO: 887286 - RNA, 19 nt, Homo sapiens
  misc_RNA (1)...(19): siRNA sense strand
caccugcuguccaaagaug

SEQ ID NO: 887287 - RNA, 19 nt, Homo sapiens
  misc_RNA (1)...(19): siRNA sense strand
caagguuaccgccacauuc

SEQ ID NO: 887288 - RNA, 19 nt, Homo sapiens
  misc_RNA (1)...(19): siRNA sense strand
aguuaacacuugaggaaga

SEQ ID NO: 887289 - RNA, 19 nt, Homo sapiens
  misc_RNA (1)...(19): siRNA sense strand
gggaaccugucguuuacca

SEQ ID NO: 887290 - RNA, 19 nt, Homo sapiens
  misc_RNA (1)...(19): siRNA sense strand
gagcagcgucgagggauau

SEQ ID NO: 887291 - RNA, 19 nt, Homo sapiens
  misc_RNA (1)...(19): siRNA sense strand
guggagacaauacguaaug

SEQ ID NO: 887292 - RNA, 19 nt, Homo sapiens
  misc_RNA (1)...(19): siRNA sense strand
gggcuucaccauugucuuc

SEQ ID NO: 887293 - RNA, 19 nt, Homo sapiens
  misc_RNA (1)...(19): siRNA sense strand
gauagcagcuuacaggaaa

SEQ ID NO: 887294 - RNA, 19 nt, Homo sapiens
  misc_RNA (1)...(19): siRNA sense strand
gcgaggagauccacgagua

SEQ ID NO: 887295 - RNA, 19 nt, Homo sapiens
  misc_RNA (1)...(19): siRNA sense strand
ccacugggcuaucacuuaa

SEQ ID NO: 887296 - RNA, 19 nt, Homo sapiens
  misc_RNA (1)...(19): siRNA sense strand
uaagguagccucuaagaaa

SEQ ID NO: 887297 - RNA, 19 nt, Homo sapiens
  misc_RNA (1)...(19): siRNA sense strand
caucuaagguagccucuaa

SEQ ID NO: 887298 - RNA, 19 nt, Homo sapiens
  misc_RNA (1)...(19): siRNA sense strand
ggacgugacuguggcuaaa

SEQ ID NO: 887299 - RNA, 19 nt, Homo sapiens
  misc_RNA (1)...(19): siRNA sense strand
ggaggaggcaucuaaggua

SEQ ID NO: 887300 - RNA, 19 nt, Homo sapiens
  misc_RNA (1)...(19): siRNA sense strand
acauugagauagcagcuua

SEQ ID NO: 887301 - RNA, 19 nt, Homo sapiens
  misc_RNA (1)...(19): siRNA sense strand
gaccugaccucggcucuga

SEQ ID NO: 887302 - RNA, 19 nt, Homo sapiens
  misc_RNA (1)...(19): siRNA sense strand
ggcuaucacuuaagaaaga

SEQ ID NO: 887303 - RNA, 19 nt, Homo sapiens
  misc_RNA (1)...(19): siRNA sense strand
gaggagacaguaauaucua

SEQ ID NO: 887304 - RNA, 19 nt, Homo sapiens
  misc_RNA (1)...(19): siRNA sense strand
gcuacaaccuccaaagucu

SEQ ID NO: 887305 - RNA, 19 nt, Homo sapiens
  misc_RNA (1)...(19): siRNA sense strand
uaagaaaaccucccagaua

SEQ ID NO: 887306 - RNA, 19 nt, Homo sapiens
  misc_RNA (1)...(19): siRNA sense strand
uaccaggacuugcucaaug

SEQ ID NO: 887307 - RNA, 19 nt, Homo sapiens
  misc_RNA (1)...(19): siRNA sense strand
gccuggaccuggagaagaa

SEQ ID NO: 887308 - RNA, 19 nt, Homo sapiens
  misc_RNA (1)...(19): siRNA sense strand
ccuagaauccucagugcua

SEQ ID NO: 887309 - RNA, 19 nt, Homo sapiens
  misc_RNA (1)...(19): siRNA sense strand
gcggaagaaugguacaagu

SEQ ID NO: 887310 - RNA, 19 nt, Homo sapiens
  misc_RNA (1)...(19): siRNA sense strand
ggacuugcucaaugucaaa

SEQ ID NO: 887311 - RNA, 19 nt, Homo sapiens
  misc_RNA (1)...(19): siRNA sense strand
gaucugaggaacaccaaga

SEQ ID NO: 887312 - RNA, 19 nt, Homo sapiens
  misc_RNA (1)...(19): siRNA sense strand
uugggcagcuggagaauga

SEQ ID NO: 887313 - RNA, 19 nt, Homo sapiens
  misc_RNA (1)...(19): siRNA sense strand
gcauugggcagcuggagaa

SEQ ID NO: 887314 - RNA, 19 nt, Homo sapiens
  misc_RNA (1)...(19): siRNA sense strand
accaguggguuaagcauuu

SEQ ID NO: 887315 - RNA, 19 nt, Homo sapiens
  misc_RNA (1)...(19): siRNA sense strand
gaacaccaagagugagaug

SEQ ID NO: 887316 - RNA, 19 nt, Homo sapiens
  misc_RNA (1)...(19): siRNA sense strand
ugaggaacaccaagaguga

SEQ ID NO: 887317 - RNA, 19 nt, Homo sapiens
  misc_RNA (1)...(19): siRNA sense strand
gcaccaacgaguacaagau

SEQ ID NO: 887318 - RNA, 19 nt, Homo sapiens
  misc_RNA (1)...(19): siRNA sense strand
accgagaaaucaaauauag

SEQ ID NO: 887319 - RNA, 19 nt, Homo sapiens
  misc_RNA (1)...(19): siRNA sense strand
gagaaugaucugaggaaca

SEQ ID NO: 887320 - RNA, 19 nt, Homo sapiens
  misc_RNA (1)...(19): siRNA sense strand
gcaguccgcggaagaaugg

SEQ ID NO: 887321 - RNA, 19 nt, Homo sapiens
  misc_RNA (1)...(19): siRNA sense strand
gcacgccaccuucgggaau

SEQ ID NO: 887322 - RNA, 19 nt, Homo sapiens
  misc_RNA (1)...(19): siRNA sense strand
aagaaaaccucccagauag

SEQ ID NO: 887323 - RNA, 19 nt, Homo sapiens
  misc_RNA (1)...(19): siRNA sense strand
ggggaaaguuuugaagaaa

SEQ ID NO: 887324 - RNA, 19 nt, Homo sapiens
  misc_RNA (1)...(19): siRNA sense strand
ugaauccacuucccaaucc

SEQ ID NO: 887325 - RNA, 19 nt, Homo sapiens
  misc_RNA (1)...(19): siRNA sense strand
aauauuagaggagacagua

SEQ ID NO: 887326 - RNA, 19 nt, Homo sapiens
  misc_RNA (1)...(19): siRNA sense strand
agaaugaucugaggaacac

SEQ ID NO: 887327 - RNA, 19 nt, Homo sapiens
  misc_RNA (1)...(19): siRNA sense strand
uauagaagaaaccaccauu

SEQ ID NO: 887328 - RNA, 19 nt, Homo sapiens
  misc_RNA (1)...(19): siRNA sense strand
uaagaaaaccgagaaauca

SEQ ID NO: 887329 - RNA, 19 nt, Homo sapiens
  misc_RNA (1)...(19): siRNA sense strand
augagucccuggccgcuaa

SEQ ID NO: 887330 - RNA, 19 nt, Homo sapiens
  misc_RNA (1)...(19): siRNA sense strand
uagaggagacaguaauauc

SEQ ID NO: 887331 - RNA, 19 nt, Homo sapiens
  misc_RNA (1)...(19): siRNA sense strand
gggaaaguuuugaagaaau

SEQ ID NO: 887332 - RNA, 19 nt, Homo sapiens
  misc_RNA (1)...(19): siRNA sense strand
ccagauaggggaaaguuuu

SEQ ID NO: 887333 - RNA, 19 nt, Homo sapiens
  misc_RNA (1)...(19): siRNA sense strand
aggaggaggaggcaucuaa

SEQ ID NO: 887334 - RNA, 19 nt, Homo sapiens
  misc_RNA (1)...(19): siRNA sense strand
acugggcuaucacuuaaga

SEQ ID NO: 887335 - RNA, 19 nt, Homo sapiens
  misc_RNA (1)...(19): siRNA sense strand
cacgccaccuucgggaaua

SEQ ID NO: 887336 - RNA, 19 nt, Homo sapiens
  misc_RNA (1)...(19): siRNA sense strand
auagaagaaaccaccauuu

SEQ ID NO: 887337 - RNA, 19 nt, Homo sapiens
  misc_RNA (1)...(19): siRNA sense strand
gggaauaccaggacuugcu

SEQ ID NO: 887338 - RNA, 19 nt, Homo sapiens
  misc_RNA (1)...(19): siRNA sense strand
uccacugggcuaucacuua

SEQ ID NO: 887339 - RNA, 19 nt, Homo sapiens
  misc_RNA (1)...(19): siRNA sense strand
uaccugcucccaccuagaa

SEQ ID NO: 887340 - RNA, 19 nt, Homo sapiens
  misc_RNA (1)...(19): siRNA sense strand
ugguacaaguccaaguuug

SEQ ID NO: 887341 - RNA, 19 nt, Homo sapiens
  misc_RNA (1)...(19): siRNA sense strand
gaaaaccgagaaaucaaau

SEQ ID NO: 887342 - RNA, 19 nt, Homo sapiens
  misc_RNA (1)...(19): siRNA sense strand
cuaagguagccucuaagaa

SEQ ID NO: 887343 - RNA, 19 nt, Homo sapiens
  misc_RNA (1)...(19): siRNA sense strand
ccaguggguuaagcauuuc

SEQ ID NO: 887344 - RNA, 19 nt, Homo sapiens
  misc_RNA (1)...(19): siRNA sense strand
gaggagauccacgaguauc

SEQ ID NO: 887345 - RNA, 19 nt, Homo sapiens
  misc_RNA (1)...(19): siRNA sense strand
ucuaagguagccucuaaga

SEQ ID NO: 887346 - RNA, 19 nt, Homo sapiens
  misc_RNA (1)...(19): siRNA sense strand
ggaggaggaggcaucuaag

SEQ ID NO: 887347 - RNA, 19 nt, Homo sapiens
  misc_RNA (1)...(19): siRNA sense strand
gcucuugacauugagauag

SEQ ID NO: 887348 - RNA, 19 nt, Homo sapiens
  misc_RNA (1)...(19): siRNA sense strand
cgaggagauccacgaguau

SEQ ID NO: 887349 - RNA, 19 nt, Homo sapiens
  misc_RNA (1)...(19): siRNA sense strand
gaauccacuucccaaucca

SEQ ID NO: 887350 - RNA, 19 nt, Homo sapiens
  misc_RNA (1)...(19): siRNA sense strand
gccaggaggugcucaugaa

SEQ ID NO: 887351 - RNA, 19 nt, Homo sapiens
  misc_RNA (1)...(19): siRNA sense strand
ggccaucgauaucuguaug

SEQ ID NO: 887352 - RNA, 19 nt, Homo sapiens
  misc_RNA (1)...(19): siRNA sense strand
ggacguccucuccggcuuu

SEQ ID NO: 887353 - RNA, 19 nt, Homo sapiens
  misc_RNA (1)...(19): siRNA sense strand
uggacuaccucaccaugga

SEQ ID NO: 887354 - RNA, 19 nt, Homo sapiens
  misc_RNA (1)...(19): siRNA sense strand
aggaggugcucaugaaucu

SEQ ID NO: 887355 - RNA, 19 nt, Homo sapiens
  misc_RNA (1)...(19): siRNA sense strand
ugguggagcuggucuggau

SEQ ID NO: 887356 - RNA, 19 nt, Homo sapiens
  misc_RNA (1)...(19): siRNA sense strand
ccgccaugguguccaaguu

SEQ ID NO: 887357 - RNA, 19 nt, Homo sapiens
  misc_RNA (1)...(19): siRNA sense strand
ggccaggaggugcucauga

SEQ ID NO: 887358 - RNA, 19 nt, Homo sapiens
  misc_RNA (1)...(19): siRNA sense strand
gccaugguguccaaguucu

SEQ ID NO: 887359 - RNA, 19 nt, Homo sapiens
  misc_RNA (1)...(19): siRNA sense strand
caucggcuaccuccaguuc

SEQ ID NO: 887360 - RNA, 19 nt, Homo sapiens
  misc_RNA (1)...(19): siRNA sense strand
gacguccucuccggcuuug

SEQ ID NO: 887361 - RNA, 19 nt, Homo sapiens
  misc_RNA (1)...(19): siRNA sense strand
ggaaagauccggccaguua

SEQ ID NO: 887362 - RNA, 19 nt, Homo sapiens
  misc_RNA (1)...(19): siRNA sense strand
gaggaaagacuguaauuaa

SEQ ID NO: 887363 - RNA, 19 nt, Homo sapiens
  misc_RNA (1)...(19): siRNA sense strand
ggagaagaauuuccucuga

SEQ ID NO: 887364 - RNA, 19 nt, Homo sapiens
  misc_RNA (1)...(19): siRNA sense strand
ccagugaacuuguaaggaa

SEQ ID NO: 887365 - RNA, 19 nt, Homo sapiens
  misc_RNA (1)...(19): siRNA sense strand
ccaaaucacucacucauac

SEQ ID NO: 887366 - RNA, 19 nt, Homo sapiens
  misc_RNA (1)...(19): siRNA sense strand
ggaaagacuguaauuaaug

SEQ ID NO: 887367 - RNA, 19 nt, Homo sapiens
  misc_RNA (1)...(19): siRNA sense strand
gcaguuugcucccaagaug

SEQ ID NO: 887368 - RNA, 19 nt, Homo sapiens
  misc_RNA (1)...(19): siRNA sense strand
caaaggcauuaaagcauuu

SEQ ID NO: 887369 - RNA, 19 nt, Homo sapiens
  misc_RNA (1)...(19): siRNA sense strand
ggaaaggaguccauuaucg

SEQ ID NO: 887370 - RNA, 19 nt, Homo sapiens
  misc_RNA (1)...(19): siRNA sense strand
ucaaaggcauuaaagcauu

SEQ ID NO: 887371 - RNA, 19 nt, Homo sapiens
  misc_RNA (1)...(19): siRNA sense strand
aaacaugggcuccagauuu

SEQ ID NO: 887372 - RNA, 19 nt, Homo sapiens
  misc_RNA (1)...(19): siRNA sense strand
gacaagaauugcacaggaa

SEQ ID NO: 887373 - RNA, 19 nt, Homo sapiens
  misc_RNA (1)...(19): siRNA sense strand
uaugaagcgugauccuuua

SEQ ID NO: 887374 - RNA, 19 nt, Homo sapiens
  misc_RNA (1)...(19): siRNA sense strand
cauagcagauggcauguug

SEQ ID NO: 887375 - RNA, 19 nt, Homo sapiens
  misc_RNA (1)...(19): siRNA sense strand
gcuacagcuuuaaauauga

SEQ ID NO: 887376 - RNA, 19 nt, Homo sapiens
  misc_RNA (1)...(19): siRNA sense strand
caaaguugguggccugaau

SEQ ID NO: 887377 - RNA, 19 nt, Homo sapiens
  misc_RNA (1)...(19): siRNA sense strand
ugacuuuggugacuccuuu

SEQ ID NO: 887378 - RNA, 19 nt, Homo sapiens
  misc_RNA (1)...(19): siRNA sense strand
gcacgaggaaagacuguaa

SEQ ID NO: 887379 - RNA, 19 nt, Homo sapiens
  misc_RNA (1)...(19): siRNA sense strand
ugaagucauugucaaaguu

SEQ ID NO: 887380 - RNA, 19 nt, Homo sapiens
  misc_RNA (1)...(19): siRNA sense strand
cugcuugggugauagauaa

SEQ ID NO: 887381 - RNA, 19 nt, Homo sapiens
  misc_RNA (1)...(19): siRNA sense strand
gugcuucgauucacucaga

SEQ ID NO: 887382 - RNA, 19 nt, Homo sapiens
  misc_RNA (1)...(19): siRNA sense strand
cgaggaaagacuguaauua

SEQ ID NO: 887383 - RNA, 19 nt, Homo sapiens
  misc_RNA (1)...(19): siRNA sense strand
uaugagaagugguuaugga

SEQ ID NO: 887384 - RNA, 19 nt, Homo sapiens
  misc_RNA (1)...(19): siRNA sense strand
gaagagcaguugaaauccu

SEQ ID NO: 887385 - RNA, 19 nt, Homo sapiens
  misc_RNA (1)...(19): siRNA sense strand
gaaaacguguucuaaucuu

SEQ ID NO: 887386 - RNA, 19 nt, Homo sapiens
  misc_RNA (1)...(19): siRNA sense strand
cauuaaagcauuucuggaa

SEQ ID NO: 887387 - RNA, 19 nt, Homo sapiens
  misc_RNA (1)...(19): siRNA sense strand
gaaagauccggccaguuau

SEQ ID NO: 887388 - RNA, 19 nt, Homo sapiens
  misc_RNA (1)...(19): siRNA sense strand
ccuauagacguuaauauga

SEQ ID NO: 887389 - RNA, 19 nt, Homo sapiens
  misc_RNA (1)...(19): siRNA sense strand
gaaacaugggcuccagauu

SEQ ID NO: 887390 - RNA, 19 nt, Homo sapiens
  misc_RNA (1)...(19): siRNA sense strand
gaagcuuggugcagacgau

SEQ ID NO: 887391 - RNA, 19 nt, Homo sapiens
  misc_RNA (1)...(19): siRNA sense strand
ggucugcuauaaacaaagu

SEQ ID NO: 887392 - RNA, 19 nt, Homo sapiens
  misc_RNA (1)...(19): siRNA sense strand
gaaugugggcuugauguga

SEQ ID NO: 887393 - RNA, 19 nt, Homo sapiens
  misc_RNA (1)...(19): siRNA sense strand
gaaaaucaaaggagaagaa

SEQ ID NO: 887394 - RNA, 19 nt, Homo sapiens
  misc_RNA (1)...(19): siRNA sense strand
guaaauccuauagacguua

SEQ ID NO: 887395 - RNA, 19 nt, Homo sapiens
  misc_RNA (1)...(19): siRNA sense strand
uggaagagcaguugaaauc

SEQ ID NO: 887396 - RNA, 19 nt, Homo sapiens
  misc_RNA (1)...(19): siRNA sense strand
aaugugggcuugaugugaa

SEQ ID NO: 887397 - RNA, 19 nt, Homo sapiens
  misc_RNA (1)...(19): siRNA sense strand
gugcagacgauguaauuga

SEQ ID NO: 887398 - RNA, 19 nt, Homo sapiens
  misc_RNA (1)...(19): siRNA sense strand
guuaauaugagaagugguu

SEQ ID NO: 887399 - RNA, 19 nt, Homo sapiens
  misc_RNA (1)...(19): siRNA sense strand
gaagucauugucaaaguuc

SEQ ID NO: 887400 - RNA, 19 nt, Homo sapiens
  misc_RNA (1)...(19): siRNA sense strand
ggcuugaugugaaauacuu

SEQ ID NO: 887401 - RNA, 19 nt, Homo sapiens
  misc_RNA (1)...(19): siRNA sense strand
ggucaggagccaccuaugu

SEQ ID NO: 887402 - RNA, 19 nt, Homo sapiens
  misc_RNA (1)...(19): siRNA sense strand
ccaccuaugugacuuuggu

SEQ ID NO: 887403 - RNA, 19 nt, Homo sapiens
  misc_RNA (1)...(19): siRNA sense strand
gauggaaugugggcuugau

SEQ ID NO: 887404 - RNA, 19 nt, Homo sapiens
  misc_RNA (1)...(19): siRNA sense strand
guucaaaggcauuaaagca

SEQ ID NO: 887405 - RNA, 19 nt, Homo sapiens
  misc_RNA (1)...(19): siRNA sense strand
cuugggugauagauaaaua

SEQ ID NO: 887406 - RNA, 19 nt, Homo sapiens
  misc_RNA (1)...(19): siRNA sense strand
uguaaauccuauagacguu

SEQ ID NO: 887407 - RNA, 19 nt, Homo sapiens
  misc_RNA (1)...(19): siRNA sense strand
ggacacgcacgaggaaaga

SEQ ID NO: 887408 - RNA, 19 nt, Homo sapiens
  misc_RNA (1)...(19): siRNA sense strand
guuggcggauccacugaaa

SEQ ID NO: 887409 - RNA, 19 nt, Homo sapiens
  misc_RNA (1)...(19): siRNA sense strand
gcagacgauguaauugauu

SEQ ID NO: 887410 - RNA, 19 nt, Homo sapiens
  misc_RNA (1)...(19): siRNA sense strand
cuauagacguuaauaugag

SEQ ID NO: 887411 - RNA, 19 nt, Homo sapiens
  misc_RNA (1)...(19): siRNA sense strand
uagaugacauugcagaacu

SEQ ID NO: 887412 - RNA, 19 nt, Homo sapiens
  misc_RNA (1)...(19): siRNA sense strand
gaagcgugauccuuuacac

SEQ ID NO: 887413 - RNA, 19 nt, Homo sapiens
  misc_RNA (1)...(19): siRNA sense strand
gauccggccaguuauugaa

SEQ ID NO: 887414 - RNA, 19 nt, Homo sapiens
  misc_RNA (1)...(19): siRNA sense strand
ccaagaugccagugaacuu

SEQ ID NO: 887415 - RNA, 19 nt, Homo sapiens
  misc_RNA (1)...(19): siRNA sense strand
agaacaugaugaugccuau

SEQ ID NO: 887416 - RNA, 19 nt, Homo sapiens
  misc_RNA (1)...(19): siRNA sense strand
gcucaugugacagcaguuu

SEQ ID NO: 887417 - RNA, 19 nt, Homo sapiens
  misc_RNA (1)...(19): siRNA sense strand
aaagauccggccaguuauu

SEQ ID NO: 887418 - RNA, 19 nt, Homo sapiens
  misc_RNA (1)...(19): siRNA sense strand
gagcaguugaaauccuuaa

SEQ ID NO: 887419 - RNA, 19 nt, Homo sapiens
  misc_RNA (1)...(19): siRNA sense strand
aagagcaguugaaauccuu

SEQ ID NO: 887420 - RNA, 19 nt, Homo sapiens
  misc_RNA (1)...(19): siRNA sense strand
agaagaauuuccucugacu

SEQ ID NO: 887421 - RNA, 19 nt, Homo sapiens
  misc_RNA (1)...(19): siRNA sense strand
gcggauccacugaaacaug

SEQ ID NO: 887422 - RNA, 19 nt, Homo sapiens
  misc_RNA (1)...(19): siRNA sense strand
uacucaagcugccucuuug

SEQ ID NO: 887423 - RNA, 19 nt, Homo sapiens
  misc_RNA (1)...(19): siRNA sense strand
ggucugggcugcaguuccu

SEQ ID NO: 887424 - RNA, 19 nt, Homo sapiens
  misc_RNA (1)...(19): siRNA sense strand
ucgauucacucagaacaug

SEQ ID NO: 887425 - RNA, 19 nt, Homo sapiens
  misc_RNA (1)...(19): siRNA sense strand
ggaaugugggcuugaugug

SEQ ID NO: 887426 - RNA, 19 nt, Homo sapiens
  misc_RNA (1)...(19): siRNA sense strand
aaacaaggcacucuuucag

SEQ ID NO: 887427 - RNA, 19 nt, Homo sapiens
  misc_RNA (1)...(19): siRNA sense strand
gauaaauaugggaagaaug

SEQ ID NO: 887428 - RNA, 19 nt, Homo sapiens
  misc_RNA (1)...(19): siRNA sense strand
ggagccaccuaugugacuu

SEQ ID NO: 887429 - RNA, 19 nt, Homo sapiens
  misc_RNA (1)...(19): siRNA sense strand
gaaguguggaagagcaguu

SEQ ID NO: 887430 - RNA, 19 nt, Homo sapiens
  misc_RNA (1)...(19): siRNA sense strand
auaugaagcgugauccuuu

SEQ ID NO: 887431 - RNA, 19 nt, Homo sapiens
  misc_RNA (1)...(19): siRNA sense strand
uuucagaguuuguuguagu

SEQ ID NO: 887432 - RNA, 19 nt, Homo sapiens
  misc_RNA (1)...(19): siRNA sense strand
auacucaagcugccucuuu

SEQ ID NO: 887433 - RNA, 19 nt, Homo sapiens
  misc_RNA (1)...(19): siRNA sense strand
ucaggagccaccuauguga

SEQ ID NO: 887434 - RNA, 19 nt, Homo sapiens
  misc_RNA (1)...(19): siRNA sense strand
uggaaacaaggcacucuuu

SEQ ID NO: 887435 - RNA, 19 nt, Homo sapiens
  misc_RNA (1)...(19): siRNA sense strand
aggagucacuguagguuca

SEQ ID NO: 887436 - RNA, 19 nt, Homo sapiens
  misc_RNA (1)...(19): siRNA sense strand
aacaugggcuccagauuuu

SEQ ID NO: 887437 - RNA, 19 nt, Homo sapiens
  misc_RNA (1)...(19): siRNA sense strand
agaugccagugaacuugua

SEQ ID NO: 887438 - RNA, 19 nt, Homo sapiens
  misc_RNA (1)...(19): siRNA sense strand
caguguaaauccuauagac

SEQ ID NO: 887439 - RNA, 19 nt, Homo sapiens
  misc_RNA (1)...(19): siRNA sense strand
cauuaucgcugggcauuuu

SEQ ID NO: 887440 - RNA, 19 nt, Homo sapiens
  misc_RNA (1)...(19): siRNA sense strand
ugggaagaaugaagugcuu

SEQ ID NO: 887441 - RNA, 19 nt, Homo sapiens
  misc_RNA (1)...(19): siRNA sense strand
gagccaccuaugugacuuu

SEQ ID NO: 887442 - RNA, 19 nt, Homo sapiens
  misc_RNA (1)...(19): siRNA sense strand
gcaguugaaauccuuaaaa

SEQ ID NO: 887443 - RNA, 19 nt, Homo sapiens
  misc_RNA (1)...(19): siRNA sense strand
cuucaagccuggagaugag

SEQ ID NO: 887444 - RNA, 19 nt, Homo sapiens
  misc_RNA (1)...(19): siRNA sense strand
ugaacaaaccuuuccuuuu

SEQ ID NO: 887445 - RNA, 19 nt, Homo sapiens
  misc_RNA (1)...(19): siRNA sense strand
agaagugguuauggagcua

SEQ ID NO: 887446 - RNA, 19 nt, Homo sapiens
  misc_RNA (1)...(19): siRNA sense strand
cccaaaucacucacucaua

SEQ ID NO: 887447 - RNA, 19 nt, Homo sapiens
  misc_RNA (1)...(19): siRNA sense strand
uugaacaaaccuuuccuuu

SEQ ID NO: 887448 - RNA, 19 nt, Homo sapiens
  misc_RNA (1)...(19): siRNA sense strand
ggccaguuauugaacaaac

SEQ ID NO: 887449 - RNA, 19 nt, Homo sapiens
  misc_RNA (1)...(19): siRNA sense strand
ucacucagaacaugaugau

SEQ ID NO: 887450 - RNA, 19 nt, Homo sapiens
  misc_RNA (1)...(19): siRNA sense strand
ugcagacgauguaauugau

SEQ ID NO: 887451 - RNA, 19 nt, Homo sapiens
  misc_RNA (1)...(19): siRNA sense strand
guugguggccugaaugaca

SEQ ID NO: 887452 - RNA, 19 nt, Homo sapiens
  misc_RNA (1)...(19): siRNA sense strand
ugacuccuuuccuccugaa

SEQ ID NO: 887453 - RNA, 19 nt, Homo sapiens
  misc_RNA (1)...(19): siRNA sense strand
caggcggaguugguacuuu

SEQ ID NO: 887454 - RNA, 19 nt, Homo sapiens
  misc_RNA (1)...(19): siRNA sense strand
acaagaauugcacaggaaa

SEQ ID NO: 887455 - RNA, 19 nt, Homo sapiens
  misc_RNA (1)...(19): siRNA sense strand
cagccuggucugcuauaaa

SEQ ID NO: 887456 - RNA, 19 nt, Homo sapiens
  misc_RNA (1)...(19): siRNA sense strand
gaugccagugaacuuguaa

SEQ ID NO: 887457 - RNA, 19 nt, Homo sapiens
  misc_RNA (1)...(19): siRNA sense strand
cuauacagguaaugaaagc

SEQ ID NO: 887458 - RNA, 19 nt, Homo sapiens
  misc_RNA (1)...(19): siRNA sense strand
gccugaaugacaagaauug

SEQ ID NO: 887459 - RNA, 19 nt, Homo sapiens
  misc_RNA (1)...(19): siRNA sense strand
gcuuggugcagacgaugua

SEQ ID NO: 887460 - RNA, 19 nt, Homo sapiens
  misc_RNA (1)...(19): siRNA sense strand
gacguuaauaugagaagug

SEQ ID NO: 887461 - RNA, 19 nt, Homo sapiens
  misc_RNA (1)...(19): siRNA sense strand
agaaagaacuggcaugaaa

SEQ ID NO: 887462 - RNA, 19 nt, Homo sapiens
  misc_RNA (1)...(19): siRNA sense strand
gcagaaagaacuggcauga

SEQ ID NO: 887463 - RNA, 19 nt, Homo sapiens
  misc_RNA (1)...(19): siRNA sense strand
ccacgugguugaagcagaa

SEQ ID NO: 887464 - RNA, 19 nt, Homo sapiens
  misc_RNA (1)...(19): siRNA sense strand
caaaagauuucccacaaug

SEQ ID NO: 887465 - RNA, 19 nt, Homo sapiens
  misc_RNA (1)...(19): siRNA sense strand
ccucaucucuagcaguguu

SEQ ID NO: 887466 - RNA, 19 nt, Homo sapiens
  misc_RNA (1)...(19): siRNA sense strand
ucaccucccugcucaucuu

SEQ ID NO: 887467 - RNA, 19 nt, Homo sapiens
  misc_RNA (1)...(19): siRNA sense strand
gaaagaacuggcaugaaac

SEQ ID NO: 887468 - RNA, 19 nt, Homo sapiens
  misc_RNA (1)...(19): siRNA sense strand
gcacugcuguguacaaaag

SEQ ID NO: 887469 - RNA, 19 nt, Homo sapiens
  misc_RNA (1)...(19): siRNA sense strand
ccauucugccuucaaguuu

SEQ ID NO: 887470 - RNA, 19 nt, Homo sapiens
  misc_RNA (1)...(19): siRNA sense strand
aaagauuucccacaaugga

SEQ ID NO: 887471 - RNA, 19 nt, Homo sapiens
  misc_RNA (1)...(19): siRNA sense strand
uacaaaagauuucccacaa

SEQ ID NO: 887472 - RNA, 19 nt, Homo sapiens
  misc_RNA (1)...(19): siRNA sense strand
gaaacccauucugccuuca

SEQ ID NO: 887473 - RNA, 19 nt, Homo sapiens
  misc_RNA (1)...(19): siRNA sense strand
gcugaugcgcuacgucaau

SEQ ID NO: 887474 - RNA, 19 nt, Homo sapiens
  misc_RNA (1)...(19): siRNA sense strand
cagaaagaacuggcaugaa

SEQ ID NO: 887475 - RNA, 19 nt, Homo sapiens
  misc_RNA (1)...(19): siRNA sense strand
gguugaagcagaaagaacu

SEQ ID NO: 887476 - RNA, 19 nt, Homo sapiens
  misc_RNA (1)...(19): siRNA sense strand
gaauccagcuccucagaaa

SEQ ID NO: 887477 - RNA, 19 nt, Homo sapiens
  misc_RNA (1)...(19): siRNA sense strand
cuacaaggauggaaggaua

SEQ ID NO: 887478 - RNA, 19 nt, Homo sapiens
  misc_RNA (1)...(19): siRNA sense strand
gaggaugacuugacugaug

SEQ ID NO: 887479 - RNA, 19 nt, Homo sapiens
  misc_RNA (1)...(19): siRNA sense strand
caaaggcuacugcugaaua

SEQ ID NO: 887480 - RNA, 19 nt, Homo sapiens
  misc_RNA (1)...(19): siRNA sense strand
ggucaaggccuacacuuuc

SEQ ID NO: 887481 - RNA, 19 nt, Homo sapiens
  misc_RNA (1)...(19): siRNA sense strand
cagcaucuguuguggcuau

SEQ ID NO: 887482 - RNA, 19 nt, Homo sapiens
  misc_RNA (1)...(19): siRNA sense strand
gaugggccuucuucucaaa

SEQ ID NO: 887483 - RNA, 19 nt, Homo sapiens
  misc_RNA (1)...(19): siRNA sense strand
gaagaucacuccgggucau

SEQ ID NO: 887484 - RNA, 19 nt, Homo sapiens
  misc_RNA (1)...(19): siRNA sense strand
cacaaaggcuacugcugaa

SEQ ID NO: 887485 - RNA, 19 nt, Homo sapiens
  misc_RNA (1)...(19): siRNA sense strand
ggaaggauagugcaaagca

SEQ ID NO: 887486 - RNA, 19 nt, Homo sapiens
  misc_RNA (1)...(19): siRNA sense strand
uugagacgcugcaguguga

SEQ ID NO: 887487 - RNA, 19 nt, Homo sapiens
  misc_RNA (1)...(19): siRNA sense strand
cagaugggccuucuucuca

SEQ ID NO: 887488 - RNA, 19 nt, Homo sapiens
  misc_RNA (1)...(19): siRNA sense strand
gucaaggccuacacuuuca

SEQ ID NO: 887489 - RNA, 19 nt, Homo sapiens
  misc_RNA (1)...(19): siRNA sense strand
aaaggcuacugcugaauag

SEQ ID NO: 887490 - RNA, 19 nt, Homo sapiens
  misc_RNA (1)...(19): siRNA sense strand
ccacacggaggaugacuug

SEQ ID NO: 887491 - RNA, 19 nt, Homo sapiens
  misc_RNA (1)...(19): siRNA sense strand
gcugggcuguguccucaug

SEQ ID NO: 887492 - RNA, 19 nt, Homo sapiens
  misc_RNA (1)...(19): siRNA sense strand
ucauggaguugagggaauu

SEQ ID NO: 887493 - RNA, 19 nt, Homo sapiens
  misc_RNA (1)...(19): siRNA sense strand
gauggaaggauagugcaaa

SEQ ID NO: 887494 - RNA, 19 nt, Homo sapiens
  misc_RNA (1)...(19): siRNA sense strand
gcaccucccacauugaauc

SEQ ID NO: 887495 - RNA, 19 nt, Homo sapiens
  misc_RNA (1)...(19): siRNA sense strand
ccacugaggacaaccaagu

SEQ ID NO: 887496 - RNA, 19 nt, Homo sapiens
  misc_RNA (1)...(19): siRNA sense strand
ggugugaggcagccacuga

SEQ ID NO: 887497 - RNA, 19 nt, Homo sapiens
  misc_RNA (1)...(19): siRNA sense strand
gaacccuuccaccugauug

SEQ ID NO: 887498 - RNA, 19 nt, Homo sapiens
  misc_RNA (1)...(19): siRNA sense strand
ggaguugagggaauuaucu

SEQ ID NO: 887499 - RNA, 19 nt, Homo sapiens
  misc_RNA (1)...(19): siRNA sense strand
aacagggaauucuccauca

SEQ ID NO: 887500 - RNA, 19 nt, Homo sapiens
  misc_RNA (1)...(19): siRNA sense strand
ccugggcccucuaccuuuc

SEQ ID NO: 887501 - RNA, 19 nt, Homo sapiens
  misc_RNA (1)...(19): siRNA sense strand
cggaggaugacuugacuga

SEQ ID NO: 887502 - RNA, 19 nt, Homo sapiens
  misc_RNA (1)...(19): siRNA sense strand
gguccagccaagccaguuu

SEQ ID NO: 887503 - RNA, 19 nt, Homo sapiens
  misc_RNA (1)...(19): siRNA sense strand
agaugggccuucuucucaa

SEQ ID NO: 887504 - RNA, 19 nt, Homo sapiens
  misc_RNA (1)...(19): siRNA sense strand
ggcuaucacaguccaagaa

SEQ ID NO: 887505 - RNA, 19 nt, Homo sapiens
  misc_RNA (1)...(19): siRNA sense strand
ucggucaccugcucaugga

SEQ ID NO: 887506 - RNA, 19 nt, Homo sapiens
  misc_RNA (1)...(19): siRNA sense strand
ugaauccagcuccucagaa

SEQ ID NO: 887507 - RNA, 19 nt, Homo sapiens
  misc_RNA (1)...(19): siRNA sense strand
caccagaugggccuucuuc

SEQ ID NO: 887508 - RNA, 19 nt, Homo sapiens
  misc_RNA (1)...(19): siRNA sense strand
ccaccugauuguguccuau

SEQ ID NO: 887509 - RNA, 19 nt, Homo sapiens
  misc_RNA (1)...(19): siRNA sense strand
gauccaggcuuuucuucuc

SEQ ID NO: 887510 - RNA, 19 nt, Homo sapiens
  misc_RNA (1)...(19): siRNA sense strand
ggauggaaggauagugcaa

SEQ ID NO: 887511 - RNA, 19 nt, Homo sapiens
  misc_RNA (1)...(19): siRNA sense strand
ccucuucuccuucuacaag

SEQ ID NO: 887512 - RNA, 19 nt, Homo sapiens
  misc_RNA (1)...(19): siRNA sense strand
ccucucaagcuccguguuu

SEQ ID NO: 887513 - RNA, 19 nt, Homo sapiens
  misc_RNA (1)...(19): siRNA sense strand
gguauacuuuccucaauua

SEQ ID NO: 887514 - RNA, 19 nt, Homo sapiens
  misc_RNA (1)...(19): siRNA sense strand
guucugagcugguauacuu

SEQ ID NO: 887515 - RNA, 19 nt, Homo sapiens
  misc_RNA (1)...(19): siRNA sense strand
ggugcaagguggaaauaua

SEQ ID NO: 887516 - RNA, 19 nt, Homo sapiens
  misc_RNA (1)...(19): siRNA sense strand
gcaaugcacacuuucauau

SEQ ID NO: 887517 - RNA, 19 nt, Homo sapiens
  misc_RNA (1)...(19): siRNA sense strand
guuccuaacugccuucaga

SEQ ID NO: 887518 - RNA, 19 nt, Homo sapiens
  misc_RNA (1)...(19): siRNA sense strand
gcagcuuucuucucucuca

SEQ ID NO: 887519 - RNA, 19 nt, Homo sapiens
  misc_RNA (1)...(19): siRNA sense strand
gcaagguggaaauauauga

SEQ ID NO: 887520 - RNA, 19 nt, Homo sapiens
  misc_RNA (1)...(19): siRNA sense strand
caaucgagaucucauuuac

SEQ ID NO: 887521 - RNA, 19 nt, Homo sapiens
  misc_RNA (1)...(19): siRNA sense strand
aaauauaugacgcugcuua

SEQ ID NO: 887522 - RNA, 19 nt, Homo sapiens
  misc_RNA (1)...(19): siRNA sense strand
ccucaggccucacuccuau

SEQ ID NO: 887523 - RNA, 19 nt, Homo sapiens
  misc_RNA (1)...(19): siRNA sense strand
gccagcaucuaccuacuug

SEQ ID NO: 887524 - RNA, 19 nt, Homo sapiens
  misc_RNA (1)...(19): siRNA sense strand
gcauauaccacuuccuugu

SEQ ID NO: 887525 - RNA, 19 nt, Homo sapiens
  misc_RNA (1)...(19): siRNA sense strand
gguccuagauacugucauc

SEQ ID NO: 887526 - RNA, 19 nt, Homo sapiens
  misc_RNA (1)...(19): siRNA sense strand
ucaccugccuggaugaugu

SEQ ID NO: 887527 - RNA, 19 nt, Homo sapiens
  misc_RNA (1)...(19): siRNA sense strand
gauccucuuucucuacaau

SEQ ID NO: 887528 - RNA, 19 nt, Homo sapiens
  misc_RNA (1)...(19): siRNA sense strand
gaaaagacauuaaguuccu

SEQ ID NO: 887529 - RNA, 19 nt, Homo sapiens
  misc_RNA (1)...(19): siRNA sense strand
gaagcucaaccacuggaaa

SEQ ID NO: 887530 - RNA, 19 nt, Homo sapiens
  misc_RNA (1)...(19): siRNA sense strand
ccucaauuauuacaucuca

SEQ ID NO: 887531 - RNA, 19 nt, Homo sapiens
  misc_RNA (1)...(19): siRNA sense strand
cuacaugcauauaccacuu

SEQ ID NO: 887532 - RNA, 19 nt, Homo sapiens
  misc_RNA (1)...(19): siRNA sense strand
ucuagcagcuuucuucucu

SEQ ID NO: 887533 - RNA, 19 nt, Homo sapiens
  misc_RNA (1)...(19): siRNA sense strand
ccaagguccuagauacugu

SEQ ID NO: 887534 - RNA, 19 nt, Homo sapiens
  misc_RNA (1)...(19): siRNA sense strand
caaugcacacuuucauauu

SEQ ID NO: 887535 - RNA, 19 nt, Homo sapiens
  misc_RNA (1)...(19): siRNA sense strand
uccuauggcucuacuuuga

SEQ ID NO: 887536 - RNA, 19 nt, Homo sapiens
  misc_RNA (1)...(19): siRNA sense strand
aaugcacacuuucauauuc

SEQ ID NO: 887537 - RNA, 19 nt, Homo sapiens
  misc_RNA (1)...(19): siRNA sense strand
gugcaagguggaaauauau

SEQ ID NO: 887538 - RNA, 19 nt, Homo sapiens
  misc_RNA (1)...(19): siRNA sense strand
ugguauacuuuccucaauu

SEQ ID NO: 887539 - RNA, 19 nt, Homo sapiens
  misc_RNA (1)...(19): siRNA sense strand
acaaucgagaucucauuua

SEQ ID NO: 887540 - RNA, 19 nt, Homo sapiens
  misc_RNA (1)...(19): siRNA sense strand
uauaugacgcugcuuaauc

SEQ ID NO: 887541 - RNA, 19 nt, Homo sapiens
  misc_RNA (1)...(19): siRNA sense strand
cauccuauggcucuacuuu

SEQ ID NO: 887542 - RNA, 19 nt, Homo sapiens
  misc_RNA (1)...(19): siRNA sense strand
auaugacgcugcuuaaucu

SEQ ID NO: 887543 - RNA, 19 nt, Homo sapiens
  misc_RNA (1)...(19): siRNA sense strand
uguauccacguuuguauuu

SEQ ID NO: 887544 - RNA, 19 nt, Homo sapiens
  misc_RNA (1)...(19): siRNA sense strand
agacaggacucaccuugcu

SEQ ID NO: 887545 - RNA, 19 nt, Homo sapiens
  misc_RNA (1)...(19): siRNA sense strand
cauauaccacuuccuuguu

SEQ ID NO: 887546 - RNA, 19 nt, Homo sapiens
  misc_RNA (1)...(19): siRNA sense strand
cuggguguauccuguguuu

SEQ ID NO: 887547 - RNA, 19 nt, Homo sapiens
  misc_RNA (1)...(19): siRNA sense strand
cuauggcucuacuuugaga

SEQ ID NO: 887548 - RNA, 19 nt, Homo sapiens
  misc_RNA (1)...(19): siRNA sense strand
ucacuccuauccaucaaag

SEQ ID NO: 887549 - RNA, 19 nt, Homo sapiens
  misc_RNA (1)...(19): siRNA sense strand
uacaaucgagaucucauuu

SEQ ID NO: 887550 - RNA, 19 nt, Homo sapiens
  misc_RNA (1)...(19): siRNA sense strand
uuacaucagccgcauccua

SEQ ID NO: 887551 - RNA, 19 nt, Homo sapiens
  misc_RNA (1)...(19): siRNA sense strand
uagcagcuuucuucucucu

SEQ ID NO: 887552 - RNA, 19 nt, Homo sapiens
  misc_RNA (1)...(19): siRNA sense strand
cagcaucuaccuacuugga

SEQ ID NO: 887553 - RNA, 19 nt, Homo sapiens
  misc_RNA (1)...(19): siRNA sense strand
auauaccacuuccuuguuc

SEQ ID NO: 887554 - RNA, 19 nt, Homo sapiens
  misc_RNA (1)...(19): siRNA sense strand
aauauaugacgcugcuuaa

SEQ ID NO: 887555 - RNA, 19 nt, Homo sapiens
  misc_RNA (1)...(19): siRNA sense strand
uacaucagccgcauccuau

SEQ ID NO: 887556 - RNA, 19 nt, Homo sapiens
  misc_RNA (1)...(19): siRNA sense strand
ucaaagaagacaggacuca

SEQ ID NO: 887557 - RNA, 19 nt, Homo sapiens
  misc_RNA (1)...(19): siRNA sense strand
gggaaaagacauuaaguuc

SEQ ID NO: 887558 - RNA, 19 nt, Homo sapiens
  misc_RNA (1)...(19): siRNA sense strand
gcugguauacuuuccucaa

SEQ ID NO: 887559 - RNA, 19 nt, Homo sapiens
  misc_RNA (1)...(19): siRNA sense strand
cuaccuacuuggagagaag

SEQ ID NO: 887560 - RNA, 19 nt, Homo sapiens
  misc_RNA (1)...(19): siRNA sense strand
ggugaaacccaaaaucuug

SEQ ID NO: 887561 - RNA, 19 nt, Homo sapiens
  misc_RNA (1)...(19): siRNA sense strand
agacuucuacaugcauaua

SEQ ID NO: 887562 - RNA, 19 nt, Homo sapiens
  misc_RNA (1)...(19): siRNA sense strand
cuacaaucgagaucucauu

SEQ ID NO: 887563 - RNA, 19 nt, Homo sapiens
  misc_RNA (1)...(19): siRNA sense strand
gaugaugugcugaaaagaa

SEQ ID NO: 887564 - RNA, 19 nt, Homo sapiens
  misc_RNA (1)...(19): siRNA sense strand
guggcugaaucaugcaaug

SEQ ID NO: 887565 - RNA, 19 nt, Homo sapiens
  misc_RNA (1)...(19): siRNA sense strand
gggucuagcagcuuucuuc

SEQ ID NO: 887566 - RNA, 19 nt, Homo sapiens
  misc_RNA (1)...(19): siRNA sense strand
ucuggauccucuuucucua

SEQ ID NO: 887567 - RNA, 19 nt, Homo sapiens
  misc_RNA (1)...(19): siRNA sense strand
cacggaagaagaggaagua

SEQ ID NO: 887568 - RNA, 19 nt, Homo sapiens
  misc_RNA (1)...(19): siRNA sense strand
caaauggugcaagguggaa

SEQ ID NO: 887569 - RNA, 19 nt, Homo sapiens
  misc_RNA (1)...(19): siRNA sense strand
gcucaaccacuggaaaugg

SEQ ID NO: 887570 - RNA, 19 nt, Homo sapiens
  misc_RNA (1)...(19): siRNA sense strand
ucuugggucuagcagcuuu

SEQ ID NO: 887571 - RNA, 19 nt, Homo sapiens
  misc_RNA (1)...(19): siRNA sense strand
ccuggaugaugugcugaaa

SEQ ID NO: 887572 - RNA, 19 nt, Homo sapiens
  misc_RNA (1)...(19): siRNA sense strand
cugguauacuuuccucaau

SEQ ID NO: 887573 - RNA, 19 nt, Homo sapiens
  misc_RNA (1)...(19): siRNA sense strand
acuccuauccaucaaagaa

SEQ ID NO: 887574 - RNA, 19 nt, Homo sapiens
  misc_RNA (1)...(19): siRNA sense strand
uggauccucuuucucuaca

SEQ ID NO: 887575 - RNA, 19 nt, Homo sapiens
  misc_RNA (1)...(19): siRNA sense strand
gaagaagaccuguugcaua

SEQ ID NO: 887576 - RNA, 19 nt, Homo sapiens
  misc_RNA (1)...(19): siRNA sense strand
aagaagaccuguugcauaa

SEQ ID NO: 887577 - RNA, 19 nt, Homo sapiens
  misc_RNA (1)...(19): siRNA sense strand
ggcaaagacugacgaaaug

SEQ ID NO: 887578 - RNA, 19 nt, Homo sapiens
  misc_RNA (1)...(19): siRNA sense strand
acacaaugcuccguucuaa

SEQ ID NO: 887579 - RNA, 19 nt, Homo sapiens
  misc_RNA (1)...(19): siRNA sense strand
gaagaccuguugcauaaaa

SEQ ID NO: 887580 - RNA, 19 nt, Homo sapiens
  misc_RNA (1)...(19): siRNA sense strand
caaagcaggcaaagacuga

SEQ ID NO: 887581 - RNA, 19 nt, Homo sapiens
  misc_RNA (1)...(19): siRNA sense strand
cugacgaaauggaaucaua

SEQ ID NO: 887582 - RNA, 19 nt, Homo sapiens
  misc_RNA (1)...(19): siRNA sense strand
ggaaucauaccaucguaga

SEQ ID NO: 887583 - RNA, 19 nt, Homo sapiens
  misc_RNA (1)...(19): siRNA sense strand
aaacaaagcaggcaaagac

SEQ ID NO: 887584 - RNA, 19 nt, Homo sapiens
  misc_RNA (1)...(19): siRNA sense strand
cauuauaguggacagcuua

SEQ ID NO: 887585 - RNA, 19 nt, Homo sapiens
  misc_RNA (1)...(19): siRNA sense strand
gcuggaaauacacacaaua

SEQ ID NO: 887586 - RNA, 19 nt, Homo sapiens
  misc_RNA (1)...(19): siRNA sense strand
ugacagaugagaacacaau

SEQ ID NO: 887587 - RNA, 19 nt, Homo sapiens
  misc_RNA (1)...(19): siRNA sense strand
aagaaagcaugaagaccuu

SEQ ID NO: 887588 - RNA, 19 nt, Homo sapiens
  misc_RNA (1)...(19): siRNA sense strand
cuggaaauacacacaauaa

SEQ ID NO: 887589 - RNA, 19 nt, Homo sapiens
  misc_RNA (1)...(19): siRNA sense strand
ucaaaaggcucuaaaacag

SEQ ID NO: 887590 - RNA, 19 nt, Homo sapiens
  misc_RNA (1)...(19): siRNA sense strand
ugagauuucugauagucau

SEQ ID NO: 887591 - RNA, 19 nt, Homo sapiens
  misc_RNA (1)...(19): siRNA sense strand
caaagacugacgaaaugga

SEQ ID NO: 887592 - RNA, 19 nt, Homo sapiens
  misc_RNA (1)...(19): siRNA sense strand
ggacagcuuacugcucuga

SEQ ID NO: 887593 - RNA, 19 nt, Homo sapiens
  misc_RNA (1)...(19): siRNA sense strand
aaaaggcucuaaaacagaa

SEQ ID NO: 887594 - RNA, 19 nt, Homo sapiens
  misc_RNA (1)...(19): siRNA sense strand
aguuugagauuucugauag

SEQ ID NO: 887595 - RNA, 19 nt, Homo sapiens
  misc_RNA (1)...(19): siRNA sense strand
aggcaaagacugacgaaau

SEQ ID NO: 887596 - RNA, 19 nt, Homo sapiens
  misc_RNA (1)...(19): siRNA sense strand
acucugcaguuugagauuu

SEQ ID NO: 887597 - RNA, 19 nt, Homo sapiens
  misc_RNA (1)...(19): siRNA sense strand
gauuucugauagucaugaa

SEQ ID NO: 887598 - RNA, 19 nt, Homo sapiens
  misc_RNA (1)...(19): siRNA sense strand
aacgauagcccauuauagu

SEQ ID NO: 887599 - RNA, 19 nt, Homo sapiens
  misc_RNA (1)...(19): siRNA sense strand
aaacgauagcccauuauag

SEQ ID NO: 887600 - RNA, 19 nt, Homo sapiens
  misc_RNA (1)...(19): siRNA sense strand
acaaugcuccguucuaaac

SEQ ID NO: 887601 - RNA, 19 nt, Homo sapiens
  misc_RNA (1)...(19): siRNA sense strand
accauuugaugcaagauga

SEQ ID NO: 887602 - RNA, 19 nt, Homo sapiens
  misc_RNA (1)...(19): siRNA sense strand
caguuugagauuucugaua

SEQ ID NO: 887603 - RNA, 19 nt, Homo sapiens
  misc_RNA (1)...(19): siRNA sense strand
aaagacugacgaaauggaa

SEQ ID NO: 887604 - RNA, 19 nt, Homo sapiens
  misc_RNA (1)...(19): siRNA sense strand
gcaaagacugacgaaaugg

SEQ ID NO: 887605 - RNA, 19 nt, Homo sapiens
  misc_RNA (1)...(19): siRNA sense strand
aaaagaagaagaccuguug

SEQ ID NO: 887606 - RNA, 19 nt, Homo sapiens
  misc_RNA (1)...(19): siRNA sense strand
ggcuggaaauacacacaau

SEQ ID NO: 887607 - RNA, 19 nt, Homo sapiens
  misc_RNA (1)...(19): siRNA sense strand
gcaggcaaagacugacgaa

SEQ ID NO: 887608 - RNA, 19 nt, Homo sapiens
  misc_RNA (1)...(19): siRNA sense strand
ggcucaggcuggaaauaca

SEQ ID NO: 887609 - RNA, 19 nt, Homo sapiens
  misc_RNA (1)...(19): siRNA sense strand
ccauuauaguggacagcuu

SEQ ID NO: 887610 - RNA, 19 nt, Homo sapiens
  misc_RNA (1)...(19): siRNA sense strand
caaaaggcucuaaaacaga

SEQ ID NO: 887611 - RNA, 19 nt, Homo sapiens
  misc_RNA (1)...(19): siRNA sense strand
ggccacauauggaagcauu

SEQ ID NO: 887612 - RNA, 19 nt, Homo sapiens
  misc_RNA (1)...(19): siRNA sense strand
ggaagcauugcauugauug

SEQ ID NO: 887613 - RNA, 19 nt, Homo sapiens
  misc_RNA (1)...(19): siRNA sense strand
guacuggccacauauggaa

SEQ ID NO: 887614 - RNA, 19 nt, Homo sapiens
  misc_RNA (1)...(19): siRNA sense strand
uggaagcauugcauugauu

SEQ ID NO: 887615 - RNA, 19 nt, Homo sapiens
  misc_RNA (1)...(19): siRNA sense strand
cagguagaaugaacugugu

SEQ ID NO: 887616 - RNA, 19 nt, Homo sapiens
  misc_RNA (1)...(19): siRNA sense strand
gcauugcauugauugucuu

SEQ ID NO: 887617 - RNA, 19 nt, Homo sapiens
  misc_RNA (1)...(19): siRNA sense strand
uauggaagcauugcauuga

SEQ ID NO: 887618 - RNA, 19 nt, Homo sapiens
  misc_RNA (1)...(19): siRNA sense strand
caacucuuauacucucaca

SEQ ID NO: 887619 - RNA, 19 nt, Homo sapiens
  misc_RNA (1)...(19): siRNA sense strand
uagaaugaacuguguacug

SEQ ID NO: 887620 - RNA, 19 nt, Homo sapiens
  misc_RNA (1)...(19): siRNA sense strand
cauauggaagcauugcauu

SEQ ID NO: 887621 - RNA, 19 nt, Homo sapiens
  misc_RNA (1)...(19): siRNA sense strand
cagcugugaaagcaacaua

SEQ ID NO: 887622 - RNA, 19 nt, Homo sapiens
  misc_RNA (1)...(19): siRNA sense strand
ucucacagguagaaugaac

SEQ ID NO: 887623 - RNA, 19 nt, Homo sapiens
  misc_RNA (1)...(19): siRNA sense strand
gcagguccagaaagugaug

SEQ ID NO: 887624 - RNA, 19 nt, Homo sapiens
  misc_RNA (1)...(19): siRNA sense strand
gaagcauugcauugauugu

SEQ ID NO: 887625 - RNA, 19 nt, Homo sapiens
  misc_RNA (1)...(19): siRNA sense strand
ucuuauacucucacaggua

SEQ ID NO: 887626 - RNA, 19 nt, Homo sapiens
  misc_RNA (1)...(19): siRNA sense strand
aaucaaugcugccaacuau

SEQ ID NO: 887627 - RNA, 19 nt, Homo sapiens
  misc_RNA (1)...(19): siRNA sense strand
auacagggcugcuggacuu

SEQ ID NO: 887628 - RNA, 19 nt, Homo sapiens
  misc_RNA (1)...(19): siRNA sense strand
guacugcugcugcauggua

SEQ ID NO: 887629 - RNA, 19 nt, Homo sapiens
  misc_RNA (1)...(19): siRNA sense strand
cuccagcucugauuguaua

SEQ ID NO: 887630 - RNA, 19 nt, Homo sapiens
  misc_RNA (1)...(19): siRNA sense strand
ugaagcagcugcccaacca

SEQ ID NO: 887631 - RNA, 19 nt, Homo sapiens
  misc_RNA (1)...(19): siRNA sense strand
gaagacuccagcucugauu

SEQ ID NO: 887632 - RNA, 19 nt, Homo sapiens
  misc_RNA (1)...(19): siRNA sense strand
gacuccagcucugauugua

SEQ ID NO: 887633 - RNA, 19 nt, Homo sapiens
  misc_RNA (1)...(19): siRNA sense strand
caacuaugccagugugaag

SEQ ID NO: 887634 - RNA, 19 nt, Homo sapiens
  misc_RNA (1)...(19): siRNA sense strand
ccagaggaguggcauacag

SEQ ID NO: 887635 - RNA, 19 nt, Homo sapiens
  misc_RNA (1)...(19): siRNA sense strand
cagcucugauuguauaugg

SEQ ID NO: 887636 - RNA, 19 nt, Homo sapiens
  misc_RNA (1)...(19): siRNA sense strand
cuaccgggcuguggccauu

SEQ ID NO: 887637 - RNA, 19 nt, Homo sapiens
  misc_RNA (1)...(19): siRNA sense strand
caggcucgcuucucuguac

SEQ ID NO: 887638 - RNA, 19 nt, Homo sapiens
  misc_RNA (1)...(19): siRNA sense strand
aaaucaaugcugccaacua

SEQ ID NO: 887639 - RNA, 19 nt, Homo sapiens
  misc_RNA (1)...(19): siRNA sense strand
caucugcacugacaaaauc

SEQ ID NO: 887640 - RNA, 19 nt, Homo sapiens
  misc_RNA (1)...(19): siRNA sense strand
ggcagaaccuggguacacu

SEQ ID NO: 887641 - RNA, 19 nt, Homo sapiens
  misc_RNA (1)...(19): siRNA sense strand
gugaagacuccagcucuga

SEQ ID NO: 887642 - RNA, 19 nt, Homo sapiens
  misc_RNA (1)...(19): siRNA sense strand
ccuguuaccuggacaaacc

SEQ ID NO: 887643 - RNA, 19 nt, Homo sapiens
  misc_RNA (1)...(19): siRNA sense strand
ucaaugcugccaacuaugc

SEQ ID NO: 887644 - RNA, 19 nt, Homo sapiens
  misc_RNA (1)...(19): siRNA sense strand
gcaggcucgcuucucugua

SEQ ID NO: 887645 - RNA, 19 nt, Homo sapiens
  misc_RNA (1)...(19): siRNA sense strand
gaacagccuggaugaagaa

SEQ ID NO: 887646 - RNA, 19 nt, Homo sapiens
  misc_RNA (1)...(19): siRNA sense strand
gugcagaccuccaagaagu

SEQ ID NO: 887647 - RNA, 19 nt, Homo sapiens
  misc_RNA (1)...(19): siRNA sense strand
acagcgaccuugcaaagaa

SEQ ID NO: 887648 - RNA, 19 nt, Homo sapiens
  misc_RNA (1)...(19): siRNA sense strand
caagaaguccuacgugugu

SEQ ID NO: 887649 - RNA, 19 nt, Homo sapiens
  misc_RNA (1)...(19): siRNA sense strand
ugaagacccuguggugauu

SEQ ID NO: 887650 - RNA, 19 nt, Homo sapiens
  misc_RNA (1)...(19): siRNA sense strand
gaggauuggucccuucuag

SEQ ID NO: 887651 - RNA, 19 nt, Homo sapiens
  misc_RNA (1)...(19): siRNA sense strand
ggaccuggaugggcaccua

SEQ ID NO: 887652 - RNA, 19 nt, Homo sapiens
  misc_RNA (1)...(19): siRNA sense strand
ccaaagagccgcuggaaaa

SEQ ID NO: 887653 - RNA, 19 nt, Homo sapiens
  misc_RNA (1)...(19): siRNA sense strand
agaacagccuggaugaaga

SEQ ID NO: 887654 - RNA, 19 nt, Homo sapiens
  misc_RNA (1)...(19): siRNA sense strand
cgagucggguuucuccauu

SEQ ID NO: 887655 - RNA, 19 nt, Homo sapiens
  misc_RNA (1)...(19): siRNA sense strand
uauggagaguucaucauug

SEQ ID NO: 887656 - RNA, 19 nt, Homo sapiens
  misc_RNA (1)...(19): siRNA sense strand
gagaacagccuggaugaag

SEQ ID NO: 887657 - RNA, 19 nt, Homo sapiens
  misc_RNA (1)...(19): siRNA sense strand
cagccuggaugaagaagug

SEQ ID NO: 887658 - RNA, 19 nt, Homo sapiens
  misc_RNA (1)...(19): siRNA sense strand
ggauuggucccuucuagau

SEQ ID NO: 887659 - RNA, 19 nt, Homo sapiens
  misc_RNA (1)...(19): siRNA sense strand
ucaagagcuucacgcagaa

SEQ ID NO: 887660 - RNA, 19 nt, Homo sapiens
  misc_RNA (1)...(19): siRNA sense strand
gguagaagaaagaaggaaa

SEQ ID NO: 887661 - RNA, 19 nt, Homo sapiens
  misc_RNA (1)...(19): siRNA sense strand
ggacccaguucugcaagau

SEQ ID NO: 887662 - RNA, 19 nt, Homo sapiens
  misc_RNA (1)...(19): siRNA sense strand
ccacagcgaccuugcaaag

SEQ ID NO: 887663 - RNA, 19 nt, Homo sapiens
  misc_RNA (1)...(19): siRNA sense strand
ucaaggacaugauuuuaug

SEQ ID NO: 887664 - RNA, 19 nt, Homo sapiens
  misc_RNA (1)...(19): siRNA sense strand
caggaugcccagcccauaa

SEQ ID NO: 887665 - RNA, 19 nt, Homo sapiens
  misc_RNA (1)...(19): siRNA sense strand
cacgagcgccugcacauga

SEQ ID NO: 887666 - RNA, 19 nt, Homo sapiens
  misc_RNA (1)...(19): siRNA sense strand
gagcccaccuggagagaac

SEQ ID NO: 887667 - RNA, 19 nt, Homo sapiens
  misc_RNA (1)...(19): siRNA sense strand
ggacgaggacucccagcau

SEQ ID NO: 887668 - RNA, 19 nt, Homo sapiens
  misc_RNA (1)...(19): siRNA sense strand
gagcuucacgcagaacuau

SEQ ID NO: 887669 - RNA, 19 nt, Homo sapiens
  misc_RNA (1)...(19): siRNA sense strand
cuccaagucuccagccauu

SEQ ID NO: 887670 - RNA, 19 nt, Homo sapiens
  misc_RNA (1)...(19): siRNA sense strand
gguacugcgucaagagcuu

SEQ ID NO: 887671 - RNA, 19 nt, Homo sapiens
  misc_RNA (1)...(19): siRNA sense strand
gcuggagggucaacuucau

SEQ ID NO: 887672 - RNA, 19 nt, Homo sapiens
  misc_RNA (1)...(19): siRNA sense strand
gugaagacccuguggugau

SEQ ID NO: 887673 - RNA, 19 nt, Homo sapiens
  misc_RNA (1)...(19): siRNA sense strand
aaagugaggagcccaggaa

SEQ ID NO: 887674 - RNA, 19 nt, Homo sapiens
  misc_RNA (1)...(19): siRNA sense strand
uggcuucuauggagaguuc

SEQ ID NO: 887675 - RNA, 19 nt, Homo sapiens
  misc_RNA (1)...(19): siRNA sense strand
gcuucacgcagaacuauga

SEQ ID NO: 887676 - RNA, 19 nt, Homo sapiens
  misc_RNA (1)...(19): siRNA sense strand
gcacaccaaggagcagauu

SEQ ID NO: 887677 - RNA, 19 nt, Homo sapiens
  misc_RNA (1)...(19): siRNA sense strand
gccacgcguuccagaguug

SEQ ID NO: 887678 - RNA, 19 nt, Homo sapiens
  misc_RNA (1)...(19): siRNA sense strand
cuauggagaguucaucauu

SEQ ID NO: 887679 - RNA, 19 nt, Homo sapiens
  misc_RNA (1)...(19): siRNA sense strand
aggagcagcugccgguaga

SEQ ID NO: 887680 - RNA, 19 nt, Homo sapiens
  misc_RNA (1)...(19): siRNA sense strand
uagagaacagccuggauga

SEQ ID NO: 887681 - RNA, 19 nt, Homo sapiens
  misc_RNA (1)...(19): siRNA sense strand
gagucggguuucuccauuc

SEQ ID NO: 887682 - RNA, 19 nt, Homo sapiens
  misc_RNA (1)...(19): siRNA sense strand
agucuuggcuccgaaggaa

SEQ ID NO: 887683 - RNA, 19 nt, Homo sapiens
  misc_RNA (1)...(19): siRNA sense strand
gggacccaguucugcaaga

SEQ ID NO: 887684 - RNA, 19 nt, Homo sapiens
  misc_RNA (1)...(19): siRNA sense strand
ucugcaagaugcuuuccuu

SEQ ID NO: 887685 - RNA, 19 nt, Homo sapiens
  misc_RNA (1)...(19): siRNA sense strand
cgacagcgaggaccuggau

SEQ ID NO: 887686 - RNA, 19 nt, Homo sapiens
  misc_RNA (1)...(19): siRNA sense strand
agcaggcucugaacuccua

SEQ ID NO: 887687 - RNA, 19 nt, Homo sapiens
  misc_RNA (1)...(19): siRNA sense strand
ccaagcaggcucugaacuc

SEQ ID NO: 887688 - RNA, 19 nt, Homo sapiens
  misc_RNA (1)...(19): siRNA sense strand
ccaggaugcccagcccaua

SEQ ID NO: 887689 - RNA, 19 nt, Homo sapiens
  misc_RNA (1)...(19): siRNA sense strand
guuccaagcaggcucugaa

SEQ ID NO: 887690 - RNA, 19 nt, Homo sapiens
  misc_RNA (1)...(19): siRNA sense strand
cuacguguguccgaacugu

SEQ ID NO: 887691 - RNA, 19 nt, Homo sapiens
  misc_RNA (1)...(19): siRNA sense strand
gaggagcccaggaaaauga

SEQ ID NO: 887692 - RNA, 19 nt, Homo sapiens
  misc_RNA (1)...(19): siRNA sense strand
gagccacgcguuccagagu

SEQ ID NO: 887693 - RNA, 19 nt, Homo sapiens
  misc_RNA (1)...(19): siRNA sense strand
gaagacccuguggugauug

SEQ ID NO: 887694 - RNA, 19 nt, Homo sapiens
  misc_RNA (1)...(19): siRNA sense strand
gcaaggccaaacugagcuu

SEQ ID NO: 887695 - RNA, 19 nt, Homo sapiens
  misc_RNA (1)...(19): siRNA sense strand
gccauuccagguagaagaa

SEQ ID NO: 887696 - RNA, 19 nt, Homo sapiens
  misc_RNA (1)...(19): siRNA sense strand
gggucucaaugccuccaaa

SEQ ID NO: 887697 - RNA, 19 nt, Homo sapiens
  misc_RNA (1)...(19): siRNA sense strand
gcucaagcacugugaagac

SEQ ID NO: 887698 - RNA, 19 nt, Homo sapiens
  misc_RNA (1)...(19): siRNA sense strand
augaagaagugaccaucga

SEQ ID NO: 887699 - RNA, 19 nt, Homo sapiens
  misc_RNA (1)...(19): siRNA sense strand
gcaacccgcgaucucuaga

SEQ ID NO: 887700 - RNA, 19 nt, Homo sapiens
  misc_RNA (1)...(19): siRNA sense strand
ucucaaugccuccaaacga

SEQ ID NO: 887701 - RNA, 19 nt, Homo sapiens
  misc_RNA (1)...(19): siRNA sense strand
guagaagaaagaaggaaac

SEQ ID NO: 887702 - RNA, 19 nt, Homo sapiens
  misc_RNA (1)...(19): siRNA sense strand
uuccaggccugcccacaga

SEQ ID NO: 887703 - RNA, 19 nt, Homo sapiens
  misc_RNA (1)...(19): siRNA sense strand
aagacccuguggugauuga

SEQ ID NO: 887704 - RNA, 19 nt, Homo sapiens
  misc_RNA (1)...(19): siRNA sense strand
acccuguggugauugauga

SEQ ID NO: 887705 - RNA, 19 nt, Homo sapiens
  misc_RNA (1)...(19): siRNA sense strand
acgagcgccugcacaugaa

SEQ ID NO: 887706 - RNA, 19 nt, Homo sapiens
  misc_RNA (1)...(19): siRNA sense strand
ggaucuccagggcaaagaa

SEQ ID NO: 887707 - RNA, 19 nt, Homo sapiens
  misc_RNA (1)...(19): siRNA sense strand
ccauucaaggacaugauuu

SEQ ID NO: 887708 - RNA, 19 nt, Homo sapiens
  misc_RNA (1)...(19): siRNA sense strand
ggacaaacauugagcuucu

SEQ ID NO: 887709 - RNA, 19 nt, Homo sapiens
  misc_RNA (1)...(19): siRNA sense strand
ucagagagcugcaggaaca

SEQ ID NO: 887710 - RNA, 19 nt, Homo sapiens
  misc_RNA (1)...(19): siRNA sense strand
gaacagcuacuccagaaac

SEQ ID NO: 887711 - RNA, 19 nt, Homo sapiens
  misc_RNA (1)...(19): siRNA sense strand
cugaacagcuacuccagaa

SEQ ID NO: 887712 - RNA, 19 nt, Homo sapiens
  misc_RNA (1)...(19): siRNA sense strand
ccuaugagguuuaucuucu

SEQ ID NO: 887713 - RNA, 19 nt, Homo sapiens
  misc_RNA (1)...(19): siRNA sense strand
aaacauuagucccuacaag

SEQ ID NO: 887714 - RNA, 19 nt, Homo sapiens
  misc_RNA (1)...(19): siRNA sense strand
acauugagcuucugaacag

SEQ ID NO: 887715 - RNA, 19 nt, Homo sapiens
  misc_RNA (1)...(19): siRNA sense strand
gagagcugcaggaacauug

SEQ ID NO: 887716 - RNA, 19 nt, Homo sapiens
  misc_RNA (1)...(19): siRNA sense strand
cagcuacuccagaaacuau

SEQ ID NO: 887717 - RNA, 19 nt, Homo sapiens
  misc_RNA (1)...(19): siRNA sense strand
gaaaaguucagcucagaga

SEQ ID NO: 887718 - RNA, 19 nt, Homo sapiens
  misc_RNA (1)...(19): siRNA sense strand
guggugaaguccugguuag

SEQ ID NO: 887719 - RNA, 19 nt, Homo sapiens
  misc_RNA (1)...(19): siRNA sense strand
acauuagucccuacaagaa

SEQ ID NO: 887720 - RNA, 19 nt, Homo sapiens
  misc_RNA (1)...(19): siRNA sense strand
uggaagggacaaacauuga

SEQ ID NO: 887721 - RNA, 19 nt, Homo sapiens
  misc_RNA (1)...(19): siRNA sense strand
cuaugagguuuaucuucuu

SEQ ID NO: 887722 - RNA, 19 nt, Homo sapiens
  misc_RNA (1)...(19): siRNA sense strand
ggaagggacaaacauugag

SEQ ID NO: 887723 - RNA, 19 nt, Homo sapiens
  misc_RNA (1)...(19): siRNA sense strand
ucaucagugugucuuggaa

SEQ ID NO: 887724 - RNA, 19 nt, Homo sapiens
  misc_RNA (1)...(19): siRNA sense strand
gacaaacauugagcuucug

SEQ ID NO: 887725 - RNA, 19 nt, Homo sapiens
  misc_RNA (1)...(19): siRNA sense strand
aacauuagucccuacaaga

SEQ ID NO: 887726 - RNA, 19 nt, Homo sapiens
  misc_RNA (1)...(19): siRNA sense strand
gcacgagccucaucugcuu

SEQ ID NO: 887727 - RNA, 19 nt, Homo sapiens
  misc_RNA (1)...(19): siRNA sense strand
gagcugggccucgaaauga

SEQ ID NO: 887728 - RNA, 19 nt, Homo sapiens
  misc_RNA (1)...(19): siRNA sense strand
cgaaaugacagcaggguuu

SEQ ID NO: 887729 - RNA, 19 nt, Homo sapiens
  misc_RNA (1)...(19): siRNA sense strand
gaaaugacagcaggguuug

SEQ ID NO: 887730 - RNA, 19 nt, Homo sapiens
  misc_RNA (1)...(19): siRNA sense strand
ccugcuagauggugauaaa

SEQ ID NO: 887731 - RNA, 19 nt, Homo sapiens
  misc_RNA (1)...(19): siRNA sense strand
guauacgccuaacauugug

SEQ ID NO: 887732 - RNA, 19 nt, Homo sapiens
  misc_RNA (1)...(19): siRNA sense strand
cuucaggucuucaccaagu

SEQ ID NO: 887733 - RNA, 19 nt, Homo sapiens
  misc_RNA (1)...(19): siRNA sense strand
uguauacgccuaacauugu

SEQ ID NO: 887734 - RNA, 19 nt, Homo sapiens
  misc_RNA (1)...(19): siRNA sense strand
gaaccugcagcgccucuuc

SEQ ID NO: 887735 - RNA, 19 nt, Homo sapiens
  misc_RNA (1)...(19): siRNA sense strand
ggugauaaaggcaaguuuc

SEQ ID NO: 887736 - RNA, 19 nt, Homo sapiens
  misc_RNA (1)...(19): siRNA sense strand
uaaaggcaaguuucugcuu

SEQ ID NO: 887737 - RNA, 19 nt, Homo sapiens
  misc_RNA (1)...(19): siRNA sense strand
uuacugaggacacuuucuu

SEQ ID NO: 887738 - RNA, 19 nt, Homo sapiens
  misc_RNA (1)...(19): siRNA sense strand
gcuguauacgccuaacauu

SEQ ID NO: 887739 - RNA, 19 nt, Homo sapiens
  misc_RNA (1)...(19): siRNA sense strand
ccacgacugccugggcuuu

SEQ ID NO: 887740 - RNA, 19 nt, Homo sapiens
  misc_RNA (1)...(19): siRNA sense strand
caggagccaggaagccuaa

SEQ ID NO: 887741 - RNA, 19 nt, Homo sapiens
  misc_RNA (1)...(19): siRNA sense strand
ggucuggagagccgcugua

SEQ ID NO: 887742 - RNA, 19 nt, Homo sapiens
  misc_RNA (1)...(19): siRNA sense strand
aaggcaaguuucugcuuca

SEQ ID NO: 887743 - RNA, 19 nt, Homo sapiens
  misc_RNA (1)...(19): siRNA sense strand
caaacgagauggagguaaa

SEQ ID NO: 887744 - RNA, 19 nt, Homo sapiens
  misc_RNA (1)...(19): siRNA sense strand
aaaggaaacuggacaacaa

SEQ ID NO: 887745 - RNA, 19 nt, Homo sapiens
  misc_RNA (1)...(19): siRNA sense strand
gaaaugugguuagacaaga

SEQ ID NO: 887746 - RNA, 19 nt, Homo sapiens
  misc_RNA (1)...(19): siRNA sense strand
cuagaaaugugguuagaca

SEQ ID NO: 887747 - RNA, 19 nt, Homo sapiens
  misc_RNA (1)...(19): siRNA sense strand
gaaacuggacaacaaacga

SEQ ID NO: 887748 - RNA, 19 nt, Homo sapiens
  misc_RNA (1)...(19): siRNA sense strand
ggacaacaaacgagaugga

SEQ ID NO: 887749 - RNA, 19 nt, Homo sapiens
  misc_RNA (1)...(19): siRNA sense strand
gacuagaaaugugguuaga

SEQ ID NO: 887750 - RNA, 19 nt, Homo sapiens
  misc_RNA (1)...(19): siRNA sense strand
aaaugugguuagacaagaa

SEQ ID NO: 887751 - RNA, 19 nt, Homo sapiens
  misc_RNA (1)...(19): siRNA sense strand
ggaagccacaggauucuag

SEQ ID NO: 887752 - RNA, 19 nt, Homo sapiens
  misc_RNA (1)...(19): siRNA sense strand
ccagggaagccacaggauu

SEQ ID NO: 887753 - RNA, 19 nt, Homo sapiens
  misc_RNA (1)...(19): siRNA sense strand
cagggaagccacaggauuc

SEQ ID NO: 887754 - RNA, 19 nt, Homo sapiens
  misc_RNA (1)...(19): siRNA sense strand
cgagauggagguaaaauga

SEQ ID NO: 887755 - RNA, 19 nt, Homo sapiens
  misc_RNA (1)...(19): siRNA sense strand
gugguuagacaagaauuug

SEQ ID NO: 887756 - RNA, 19 nt, Homo sapiens
  misc_RNA (1)...(19): siRNA sense strand
aaggaaacuggacaacaaa

SEQ ID NO: 887757 - RNA, 19 nt, Homo sapiens
  misc_RNA (1)...(19): siRNA sense strand
agaaaugugguuagacaag

SEQ ID NO: 887758 - RNA, 19 nt, Homo sapiens
  misc_RNA (1)...(19): siRNA sense strand
agacagaccucuucuauga

SEQ ID NO: 887759 - RNA, 19 nt, Homo sapiens
  misc_RNA (1)...(19): siRNA sense strand
gcaagugugugauuuguga

SEQ ID NO: 887760 - RNA, 19 nt, Homo sapiens
  misc_RNA (1)...(19): siRNA sense strand
gcgcauaugugaugagugu

SEQ ID NO: 887761 - RNA, 19 nt, Homo sapiens
  misc_RNA (1)...(19): siRNA sense strand
agagauggcugcccaaaga

SEQ ID NO: 887762 - RNA, 19 nt, Homo sapiens
  misc_RNA (1)...(19): siRNA sense strand
gauggcaagugugugauuu

SEQ ID NO: 887763 - RNA, 19 nt, Homo sapiens
  misc_RNA (1)...(19): siRNA sense strand
gcauaugugaugaguguaa

SEQ ID NO: 887764 - RNA, 19 nt, Homo sapiens
  misc_RNA (1)...(19): siRNA sense strand
ucugaugccuauuauugua

SEQ ID NO: 887765 - RNA, 19 nt, Homo sapiens
  misc_RNA (1)...(19): siRNA sense strand
ggucucugaugccuauuau

SEQ ID NO: 887766 - RNA, 19 nt, Homo sapiens
  misc_RNA (1)...(19): siRNA sense strand
ccucuucuaugaacgcaaa

SEQ ID NO: 887767 - RNA, 19 nt, Homo sapiens
  misc_RNA (1)...(19): siRNA sense strand
ucucugaugccuauuauug

SEQ ID NO: 887768 - RNA, 19 nt, Homo sapiens
  misc_RNA (1)...(19): siRNA sense strand
gaguguaacuauggaucuu

SEQ ID NO: 887769 - RNA, 19 nt, Homo sapiens
  misc_RNA (1)...(19): siRNA sense strand
gauggcugcccaaagauug

SEQ ID NO: 887770 - RNA, 19 nt, Homo sapiens
  misc_RNA (1)...(19): siRNA sense strand
ugugaugaguguaacuaug

SEQ ID NO: 887771 - RNA, 19 nt, Homo sapiens
  misc_RNA (1)...(19): siRNA sense strand
acagaccucuucuaugaac

SEQ ID NO: 887772 - RNA, 19 nt, Homo sapiens
  misc_RNA (1)...(19): siRNA sense strand
gggucucugaugccuauua

SEQ ID NO: 887773 - RNA, 19 nt, Homo sapiens
  misc_RNA (1)...(19): siRNA sense strand
gcaccauccaggagaagga

SEQ ID NO: 887774 - RNA, 19 nt, Homo sapiens
  misc_RNA (1)...(19): siRNA sense strand
gacagaccucuucuaugaa

SEQ ID NO: 887775 - RNA, 19 nt, Homo sapiens
  misc_RNA (1)...(19): siRNA sense strand
gugaugaguguaacuaugg

SEQ ID NO: 887776 - RNA, 19 nt, Homo sapiens
  misc_RNA (1)...(19): siRNA sense strand
uggcaagugugugauuugu

SEQ ID NO: 887777 - RNA, 19 nt, Homo sapiens
  misc_RNA (1)...(19): siRNA sense strand
ugugauuugugacuccuau

SEQ ID NO: 887778 - RNA, 19 nt, Homo sapiens
  misc_RNA (1)...(19): siRNA sense strand
ugugauggcaaguguguga

SEQ ID NO: 887779 - RNA, 19 nt, Homo sapiens
  misc_RNA (1)...(19): siRNA sense strand
aaaaugugauggcaagugu

SEQ ID NO: 887780 - RNA, 19 nt, Homo sapiens
  misc_RNA (1)...(19): siRNA sense strand
ugaugaguguaacuaugga

SEQ ID NO: 887781 - RNA, 19 nt, Homo sapiens
  misc_RNA (1)...(19): siRNA sense strand
ggcaagcccucuccuuuga

SEQ ID NO: 887782 - RNA, 19 nt, Homo sapiens
  misc_RNA (1)...(19): siRNA sense strand
gcacaugcauugggucaag

SEQ ID NO: 887783 - RNA, 19 nt, Homo sapiens
  misc_RNA (1)...(19): siRNA sense strand
ccacugagcugggcaccau

SEQ ID NO: 887784 - RNA, 19 nt, Homo sapiens
  misc_RNA (1)...(19): siRNA sense strand
ggcaccauguggaccuaua

SEQ ID NO: 887785 - RNA, 19 nt, Homo sapiens
  misc_RNA (1)...(19): siRNA sense strand
caggcaagcccucuccuuu

SEQ ID NO: 887786 - RNA, 19 nt, Homo sapiens
  misc_RNA (1)...(19): siRNA sense strand
gcaggcaagcccucuccuu

SEQ ID NO: 887787 - RNA, 19 nt, Homo sapiens
  misc_RNA (1)...(19): siRNA sense strand
ugcauugggucaagucaca

SEQ ID NO: 887788 - RNA, 19 nt, Homo sapiens
  misc_RNA (1)...(19): siRNA sense strand
gcaccauguggaccuauag

SEQ ID NO: 887789 - RNA, 19 nt, Homo sapiens
  misc_RNA (1)...(19): siRNA sense strand
cgagaugcaucgaaauuga

SEQ ID NO: 887790 - RNA, 19 nt, Homo sapiens
  misc_RNA (1)...(19): siRNA sense strand
ccagccagccuuccugaaa

SEQ ID NO: 887791 - RNA, 19 nt, Homo sapiens
  misc_RNA (1)...(19): siRNA sense strand
gagcaagggauccugacuu

SEQ ID NO: 887792 - RNA, 19 nt, Homo sapiens
  misc_RNA (1)...(19): siRNA sense strand
cagccagccuuccugaaag

SEQ ID NO: 887793 - RNA, 19 nt, Homo sapiens
  misc_RNA (1)...(19): siRNA sense strand
gcaggacccaggugagaca

SEQ ID NO: 887794 - RNA, 19 nt, Homo sapiens
  misc_RNA (1)...(19): siRNA sense strand
cucccgagaugcaucgaaa

SEQ ID NO: 887795 - RNA, 19 nt, Homo sapiens
  misc_RNA (1)...(19): siRNA sense strand
cccgagaugcaucgaaauu

SEQ ID NO: 887796 - RNA, 19 nt, Homo sapiens
  misc_RNA (1)...(19): siRNA sense strand
gaggagagacagaaagaaa

SEQ ID NO: 887797 - RNA, 19 nt, Homo sapiens
  misc_RNA (1)...(19): siRNA sense strand
ccaccaacauaauucauca

SEQ ID NO: 887798 - RNA, 19 nt, Homo sapiens
  misc_RNA (1)...(19): siRNA sense strand
gaagccagcacuccucauc

SEQ ID NO: 887799 - RNA, 19 nt, Homo sapiens
  misc_RNA (1)...(19): siRNA sense strand
aaaccuuuguggugucaag

SEQ ID NO: 887800 - RNA, 19 nt, Homo sapiens
  misc_RNA (1)...(19): siRNA sense strand
agaaaccuuugugguguca

SEQ ID NO: 887801 - RNA, 19 nt, Homo sapiens
  misc_RNA (1)...(19): siRNA sense strand
gcagcaaaacaaaacaaaa

SEQ ID NO: 887802 - RNA, 19 nt, Homo sapiens
  misc_RNA (1)...(19): siRNA sense strand
gaagagacaucgauaagga

SEQ ID NO: 887803 - RNA, 19 nt, Homo sapiens
  misc_RNA (1)...(19): siRNA sense strand
gcaacuacggguccucuga

SEQ ID NO: 887804 - RNA, 19 nt, Homo sapiens
  misc_RNA (1)...(19): siRNA sense strand
gccgguccuuggaauauuu

SEQ ID NO: 887805 - RNA, 19 nt, Homo sapiens
  misc_RNA (1)...(19): siRNA sense strand
gagagccgguccuuggaau

SEQ ID NO: 887806 - RNA, 19 nt, Homo sapiens
  misc_RNA (1)...(19): siRNA sense strand
gugcaacucagcccacaaa

SEQ ID NO: 887807 - RNA, 19 nt, Homo sapiens
  misc_RNA (1)...(19): siRNA sense strand
caacuacggguccucugaa

SEQ ID NO: 887808 - RNA, 19 nt, Homo sapiens
  misc_RNA (1)...(19): siRNA sense strand
ggagagccgguccuuggaa

SEQ ID NO: 887809 - RNA, 19 nt, Homo sapiens
  misc_RNA (1)...(19): siRNA sense strand
ggacaaaacggaagagaca

SEQ ID NO: 887810 - RNA, 19 nt, Homo sapiens
  misc_RNA (1)...(19): siRNA sense strand
gagccgguccuuggaauau

SEQ ID NO: 887811 - RNA, 19 nt, Homo sapiens
  misc_RNA (1)...(19): siRNA sense strand
ggaagagacaucgauaagg

SEQ ID NO: 887812 - RNA, 19 nt, Homo sapiens
  misc_RNA (1)...(19): siRNA sense strand
aaacggaagagacaucgau

SEQ ID NO: 887813 - RNA, 19 nt, Homo sapiens
  misc_RNA (1)...(19): siRNA sense strand
cggaagagacaucgauaag

SEQ ID NO: 887814 - RNA, 19 nt, Homo sapiens
  misc_RNA (1)...(19): siRNA sense strand
gaucagggcaugugcuuua

SEQ ID NO: 887815 - RNA, 19 nt, Homo sapiens
  misc_RNA (1)...(19): siRNA sense strand
gaccugaccugagaauuga

SEQ ID NO: 887816 - RNA, 19 nt, Homo sapiens
  misc_RNA (1)...(19): siRNA sense strand
ggacaaagaggccaucugu

SEQ ID NO: 887817 - RNA, 19 nt, Homo sapiens
  misc_RNA (1)...(19): siRNA sense strand
aaacaacucuggugggaau

SEQ ID NO: 887818 - RNA, 19 nt, Homo sapiens
  misc_RNA (1)...(19): siRNA sense strand
gaacgaggaggaagaugaa

SEQ ID NO: 887819 - RNA, 19 nt, Homo sapiens
  misc_RNA (1)...(19): siRNA sense strand
gaagagcuguauccugaca

SEQ ID NO: 887820 - RNA, 19 nt, Homo sapiens
  misc_RNA (1)...(19): siRNA sense strand
aagaaauacuggaagcaua

SEQ ID NO: 887821 - RNA, 19 nt, Homo sapiens
  misc_RNA (1)...(19): siRNA sense strand
ggacgaggaggaagaagaa

SEQ ID NO: 887822 - RNA, 19 nt, Homo sapiens
  misc_RNA (1)...(19): siRNA sense strand
ccagauaauucgccagaug

SEQ ID NO: 887823 - RNA, 19 nt, Homo sapiens
  misc_RNA (1)...(19): siRNA sense strand
caacaugguccagauaauu

SEQ ID NO: 887824 - RNA, 19 nt, Homo sapiens
  misc_RNA (1)...(19): siRNA sense strand
ugacccagcuguggaguaa

SEQ ID NO: 887825 - RNA, 19 nt, Homo sapiens
  misc_RNA (1)...(19): siRNA sense strand
caaggccuauaaucaguaa

SEQ ID NO: 887826 - RNA, 19 nt, Homo sapiens
  misc_RNA (1)...(19): siRNA sense strand
agaccaagaugacgaugaa

SEQ ID NO: 887827 - RNA, 19 nt, Homo sapiens
  misc_RNA (1)...(19): siRNA sense strand
ggaaauaaaguuggaaaca

SEQ ID NO: 887828 - RNA, 19 nt, Homo sapiens
  misc_RNA (1)...(19): siRNA sense strand
cuaccgagaagaagaaaua

SEQ ID NO: 887829 - RNA, 19 nt, Homo sapiens
  misc_RNA (1)...(19): siRNA sense strand
gggacaacguagacuauau

SEQ ID NO: 887830 - RNA, 19 nt, Homo sapiens
  misc_RNA (1)...(19): siRNA sense strand
ggacaacguagacuauaug

SEQ ID NO: 887831 - RNA, 19 nt, Homo sapiens
  misc_RNA (1)...(19): siRNA sense strand
gcaggaguaccaggaaaua

SEQ ID NO: 887832 - RNA, 19 nt, Homo sapiens
  misc_RNA (1)...(19): siRNA sense strand
ucugugagguggacaaaga

SEQ ID NO: 887833 - RNA, 19 nt, Homo sapiens
  misc_RNA (1)...(19): siRNA sense strand
acaaagaggccaucugugu

SEQ ID NO: 887834 - RNA, 19 nt, Homo sapiens
  misc_RNA (1)...(19): siRNA sense strand
gcaaggccuauaaucagua

SEQ ID NO: 887835 - RNA, 19 nt, Homo sapiens
  misc_RNA (1)...(19): siRNA sense strand
acgaagaguuguuccaaga

SEQ ID NO: 887836 - RNA, 19 nt, Homo sapiens
  misc_RNA (1)...(19): siRNA sense strand
acagugguauaacuaauug

SEQ ID NO: 887837 - RNA, 19 nt, Homo sapiens
  misc_RNA (1)...(19): siRNA sense strand
cuugagaccugaccugaga

SEQ ID NO: 887838 - RNA, 19 nt, Homo sapiens
  misc_RNA (1)...(19): siRNA sense strand
ucaggacuauuaccuagga

SEQ ID NO: 887839 - RNA, 19 nt, Homo sapiens
  misc_RNA (1)...(19): siRNA sense strand
gaagaaauacuggaagcau

SEQ ID NO: 887840 - RNA, 19 nt, Homo sapiens
  misc_RNA (1)...(19): siRNA sense strand
gacagugguauaacuaauu

SEQ ID NO: 887841 - RNA, 19 nt, Homo sapiens
  misc_RNA (1)...(19): siRNA sense strand
ggaaugcugacgaagaguu

SEQ ID NO: 887842 - RNA, 19 nt, Homo sapiens
  misc_RNA (1)...(19): siRNA sense strand
gaaaccggaguaaugauca

SEQ ID NO: 887843 - RNA, 19 nt, Homo sapiens
  misc_RNA (1)...(19): siRNA sense strand
ggaaaccggaguaaugauc

SEQ ID NO: 887844 - RNA, 19 nt, Homo sapiens
  misc_RNA (1)...(19): siRNA sense strand
ugacagugguauaacuaau

SEQ ID NO: 887845 - RNA, 19 nt, Homo sapiens
  misc_RNA (1)...(19): siRNA sense strand
ccaacaugguccagauaau

SEQ ID NO: 887846 - RNA, 19 nt, Homo sapiens
  misc_RNA (1)...(19): siRNA sense strand
aagaaagcauucacagcaa

SEQ ID NO: 887847 - RNA, 19 nt, Homo sapiens
  misc_RNA (1)...(19): siRNA sense strand
gggaauacuucagauagag

SEQ ID NO: 887848 - RNA, 19 nt, Homo sapiens
  misc_RNA (1)...(19): siRNA sense strand
ggugacagugguauaacua

SEQ ID NO: 887849 - RNA, 19 nt, Homo sapiens
  misc_RNA (1)...(19): siRNA sense strand
gauagagcaagaaagcauu

SEQ ID NO: 887850 - RNA, 19 nt, Homo sapiens
  misc_RNA (1)...(19): siRNA sense strand
cccugaaacucuucuguga

SEQ ID NO: 887851 - RNA, 19 nt, Homo sapiens
  misc_RNA (1)...(19): siRNA sense strand
agaccugaccugagaauug

SEQ ID NO: 887852 - RNA, 19 nt, Homo sapiens
  misc_RNA (1)...(19): siRNA sense strand
ggugggaauacuucagaua

SEQ ID NO: 887853 - RNA, 19 nt, Homo sapiens
  misc_RNA (1)...(19): siRNA sense strand
gugcaggaguaccaggaaa

SEQ ID NO: 887854 - RNA, 19 nt, Homo sapiens
  misc_RNA (1)...(19): siRNA sense strand
gccaacaugguccagauaa

SEQ ID NO: 887855 - RNA, 19 nt, Homo sapiens
  misc_RNA (1)...(19): siRNA sense strand
cagcuuucgucccaacuug

SEQ ID NO: 887856 - RNA, 19 nt, Homo sapiens
  misc_RNA (1)...(19): siRNA sense strand
ggaggaggaggacgaggaa

SEQ ID NO: 887857 - RNA, 19 nt, Homo sapiens
  misc_RNA (1)...(19): siRNA sense strand
gaaugcugacgaagaguug

SEQ ID NO: 887858 - RNA, 19 nt, Homo sapiens
  misc_RNA (1)...(19): siRNA sense strand
gagcaagaaagcauucaca

SEQ ID NO: 887859 - RNA, 19 nt, Homo sapiens
  misc_RNA (1)...(19): siRNA sense strand
ugggaauacuucagauaga

SEQ ID NO: 887860 - RNA, 19 nt, Homo sapiens
  misc_RNA (1)...(19): siRNA sense strand
ggaguaccaggaaauaaag

SEQ ID NO: 887861 - RNA, 19 nt, Homo sapiens
  misc_RNA (1)...(19): siRNA sense strand
agaagaagaaauacuggaa

SEQ ID NO: 887862 - RNA, 19 nt, Homo sapiens
  misc_RNA (1)...(19): siRNA sense strand
guaccaggaaauaaaguug

SEQ ID NO: 887863 - RNA, 19 nt, Homo sapiens
  misc_RNA (1)...(19): siRNA sense strand
gcagacccuucaggaggaa

SEQ ID NO: 887864 - RNA, 19 nt, Homo sapiens
  misc_RNA (1)...(19): siRNA sense strand
acagcaaggccuauaauca

SEQ ID NO: 887865 - RNA, 19 nt, Homo sapiens
  misc_RNA (1)...(19): siRNA sense strand
ccugagaauugaugucuac

SEQ ID NO: 887866 - RNA, 19 nt, Homo sapiens
  misc_RNA (1)...(19): siRNA sense strand
agaacgaggaggaagauga

SEQ ID NO: 887867 - RNA, 19 nt, Homo sapiens
  misc_RNA (1)...(19): siRNA sense strand
guaaugaucagggcaugug

SEQ ID NO: 887868 - RNA, 19 nt, Homo sapiens
  misc_RNA (1)...(19): siRNA sense strand
gaagaugaagagcuguauc

SEQ ID NO: 887869 - RNA, 19 nt, Homo sapiens
  misc_RNA (1)...(19): siRNA sense strand
cagcaaggccuauaaucag

SEQ ID NO: 887870 - RNA, 19 nt, Homo sapiens
  misc_RNA (1)...(19): siRNA sense strand
aggaagcccugaaacucuu

SEQ ID NO: 887871 - RNA, 19 nt, Homo sapiens
  misc_RNA (1)...(19): siRNA sense strand
aggaguaccaggaaauaaa

SEQ ID NO: 887872 - RNA, 19 nt, Homo sapiens
  misc_RNA (1)...(19): siRNA sense strand
gggacgaggaggaagaaga

SEQ ID NO: 887873 - RNA, 19 nt, Homo sapiens
  misc_RNA (1)...(19): siRNA sense strand
gaagcggugugugccaucu

SEQ ID NO: 887874 - RNA, 19 nt, Homo sapiens
  misc_RNA (1)...(19): siRNA sense strand
ggccaacaugguccagaua

SEQ ID NO: 887875 - RNA, 19 nt, Homo sapiens
  misc_RNA (1)...(19): siRNA sense strand
gcucggugacagugguaua

SEQ ID NO: 887876 - RNA, 19 nt, Homo sapiens
  misc_RNA (1)...(19): siRNA sense strand
ucacagcaaggccuauaau

SEQ ID NO: 887877 - RNA, 19 nt, Homo sapiens
  misc_RNA (1)...(19): siRNA sense strand
caggaaauaaaguuggaaa

SEQ ID NO: 887878 - RNA, 19 nt, Homo sapiens
  misc_RNA (1)...(19): siRNA sense strand
cagauaauucgccagaugu

SEQ ID NO: 887879 - RNA, 19 nt, Homo sapiens
  misc_RNA (1)...(19): siRNA sense strand
cgaugaggacgaagaugaa

SEQ ID NO: 887880 - RNA, 19 nt, Homo sapiens
  misc_RNA (1)...(19): siRNA sense strand
ggacgaggaggaccagaac

SEQ ID NO: 887881 - RNA, 19 nt, Homo sapiens
  misc_RNA (1)...(19): siRNA sense strand
ucagauagagcaagaaagc

SEQ ID NO: 887882 - RNA, 19 nt, Homo sapiens
  misc_RNA (1)...(19): siRNA sense strand
aggagguggugcaggagua

SEQ ID NO: 887883 - RNA, 19 nt, Homo sapiens
  misc_RNA (1)...(19): siRNA sense strand
cagggcaugugcuuuaaac

SEQ ID NO: 887884 - RNA, 19 nt, Homo sapiens
  misc_RNA (1)...(19): siRNA sense strand
gugacagugguauaacuaa

SEQ ID NO: 887885 - RNA, 19 nt, Homo sapiens
  misc_RNA (1)...(19): siRNA sense strand
gugggaauacuucagauag

SEQ ID NO: 887886 - RNA, 19 nt, Homo sapiens
  misc_RNA (1)...(19): siRNA sense strand
caggaguaccaggaaauaa

SEQ ID NO: 887887 - RNA, 19 nt, Homo sapiens
  misc_RNA (1)...(19): siRNA sense strand
ccgagaagaagaaauacug

SEQ ID NO: 887888 - RNA, 19 nt, Homo sapiens
  misc_RNA (1)...(19): siRNA sense strand
ggaagaucaggacuauuac

SEQ ID NO: 887889 - RNA, 19 nt, Homo sapiens
  misc_RNA (1)...(19): siRNA sense strand
ugugccaucugcuuggauu

SEQ ID NO: 887890 - RNA, 19 nt, Homo sapiens
  misc_RNA (1)...(19): siRNA sense strand
cuuuacacgucgcagcuuu

SEQ ID NO: 887891 - RNA, 19 nt, Homo sapiens
  misc_RNA (1)...(19): siRNA sense strand
ugacgaagaguuguuccaa

SEQ ID NO: 887892 - RNA, 19 nt, Homo sapiens
  misc_RNA (1)...(19): siRNA sense strand
acgaugaggacgaagauga

SEQ ID NO: 887893 - RNA, 19 nt, Homo sapiens
  misc_RNA (1)...(19): siRNA sense strand
ggaccagaacgaggaggaa

SEQ ID NO: 887894 - RNA, 19 nt, Homo sapiens
  misc_RNA (1)...(19): siRNA sense strand
cgaggaggaagaugaaugg

SEQ ID NO: 887895 - RNA, 19 nt, Homo sapiens
  misc_RNA (1)...(19): siRNA sense strand
cuaauugggacaacguaga

SEQ ID NO: 887896 - RNA, 19 nt, Homo sapiens
  misc_RNA (1)...(19): siRNA sense strand
ugaugucuaccgagaagaa

SEQ ID NO: 887897 - RNA, 19 nt, Homo sapiens
  misc_RNA (1)...(19): siRNA sense strand
gacaacguagacuauaugu

SEQ ID NO: 887898 - RNA, 19 nt, Homo sapiens
  misc_RNA (1)...(19): siRNA sense strand
cuucagauagagcaagaaa

SEQ ID NO: 887899 - RNA, 19 nt, Homo sapiens
  misc_RNA (1)...(19): siRNA sense strand
ccaucugcuuggauuacuu

SEQ ID NO: 887900 - RNA, 19 nt, Homo sapiens
  misc_RNA (1)...(19): siRNA sense strand
gcagcuuucgucccaacuu

SEQ ID NO: 887901 - RNA, 19 nt, Homo sapiens
  misc_RNA (1)...(19): siRNA sense strand
agaaauacuggaagcauac

SEQ ID NO: 887902 - RNA, 19 nt, Homo sapiens
  misc_RNA (1)...(19): siRNA sense strand
uaacuaauugggacaacgu

SEQ ID NO: 887903 - RNA, 19 nt, Homo sapiens
  misc_RNA (1)...(19): siRNA sense strand
ccaagaugacgaugaacuc

SEQ ID NO: 887904 - RNA, 19 nt, Homo sapiens
  misc_RNA (1)...(19): siRNA sense strand
uuaccuaggaggcuugaga

SEQ ID NO: 887905 - RNA, 19 nt, Homo sapiens
  misc_RNA (1)...(19): siRNA sense strand
gaaaugcccaugaccuuca

SEQ ID NO: 887906 - RNA, 19 nt, Homo sapiens
  misc_RNA (1)...(19): siRNA sense strand
gggagucgcaguacggaua

SEQ ID NO: 887907 - RNA, 19 nt, Homo sapiens
  misc_RNA (1)...(19): siRNA sense strand
ccagggaugccgaaaguag

SEQ ID NO: 887908 - RNA, 19 nt, Homo sapiens
  misc_RNA (1)...(19): siRNA sense strand
caucuggaaaugcccauga

SEQ ID NO: 887909 - RNA, 19 nt, Homo sapiens
  misc_RNA (1)...(19): siRNA sense strand
gaugccgaaaguagacaua

SEQ ID NO: 887910 - RNA, 19 nt, Homo sapiens
  misc_RNA (1)...(19): siRNA sense strand
cauacagggagucgcagua

SEQ ID NO: 887911 - RNA, 19 nt, Homo sapiens
  misc_RNA (1)...(19): siRNA sense strand
cuccagggaugccgaaagu

SEQ ID NO: 887912 - RNA, 19 nt, Homo sapiens
  misc_RNA (1)...(19): siRNA sense strand
uggaaaugcccaugaccuu

SEQ ID NO: 887913 - RNA, 19 nt, Homo sapiens
  misc_RNA (1)...(19): siRNA sense strand
cuucaucgcagcagcguau

SEQ ID NO: 887914 - RNA, 19 nt, Homo sapiens
  misc_RNA (1)...(19): siRNA sense strand
gaugugagcugcaaugaaa

SEQ ID NO: 887915 - RNA, 19 nt, Homo sapiens
  misc_RNA (1)...(19): siRNA sense strand
caacaaaggucaugcuuca

SEQ ID NO: 887916 - RNA, 19 nt, Homo sapiens
  misc_RNA (1)...(19): siRNA sense strand
ggaaugaaccuacagauga

SEQ ID NO: 887917 - RNA, 19 nt, Homo sapiens
  misc_RNA (1)...(19): siRNA sense strand
ggacagaauucaagacaga

SEQ ID NO: 887918 - RNA, 19 nt, Homo sapiens
  misc_RNA (1)...(19): siRNA sense strand
gaaagugucucuaccuugu

SEQ ID NO: 887919 - RNA, 19 nt, Homo sapiens
  misc_RNA (1)...(19): siRNA sense strand
uagcagagauuacuaaaga

SEQ ID NO: 887920 - RNA, 19 nt, Homo sapiens
  misc_RNA (1)...(19): siRNA sense strand
ggaaccaacugucaacauu

SEQ ID NO: 887921 - RNA, 19 nt, Homo sapiens
  misc_RNA (1)...(19): siRNA sense strand
gaacaaagacuacgaagag

SEQ ID NO: 887922 - RNA, 19 nt, Homo sapiens
  misc_RNA (1)...(19): siRNA sense strand
gaaugaaccuacagaugaa

SEQ ID NO: 887923 - RNA, 19 nt, Homo sapiens
  misc_RNA (1)...(19): siRNA sense strand
gaagaaauuggacaccuua

SEQ ID NO: 887924 - RNA, 19 nt, Homo sapiens
  misc_RNA (1)...(19): siRNA sense strand
ggacaguggugauaagaga

SEQ ID NO: 887925 - RNA, 19 nt, Homo sapiens
  misc_RNA (1)...(19): siRNA sense strand
aagaagaaaucaccuagua

SEQ ID NO: 887926 - RNA, 19 nt, Homo sapiens
  misc_RNA (1)...(19): siRNA sense strand
cagaagauaugagaagaua

SEQ ID NO: 887927 - RNA, 19 nt, Homo sapiens
  misc_RNA (1)...(19): siRNA sense strand
aagaagagcuggaauuaau

SEQ ID NO: 887928 - RNA, 19 nt, Homo sapiens
  misc_RNA (1)...(19): siRNA sense strand
gcaaaguccacauauuuaa

SEQ ID NO: 887929 - RNA, 19 nt, Homo sapiens
  misc_RNA (1)...(19): siRNA sense strand
gauagugccuugugcaugu

SEQ ID NO: 887930 - RNA, 19 nt, Homo sapiens
  misc_RNA (1)...(19): siRNA sense strand
ugacagaccuaaugcucua

SEQ ID NO: 887931 - RNA, 19 nt, Homo sapiens
  misc_RNA (1)...(19): siRNA sense strand
cuccagaucugccggauua

SEQ ID NO: 887932 - RNA, 19 nt, Homo sapiens
  misc_RNA (1)...(19): siRNA sense strand
gaagggagcaguuaguaga

SEQ ID NO: 887933 - RNA, 19 nt, Homo sapiens
  misc_RNA (1)...(19): siRNA sense strand
gaagaacuguacucaaguc

SEQ ID NO: 887934 - RNA, 19 nt, Homo sapiens
  misc_RNA (1)...(19): siRNA sense strand
gaagaagagcuggaauuaa

SEQ ID NO: 887935 - RNA, 19 nt, Homo sapiens
  misc_RNA (1)...(19): siRNA sense strand
gcacagauauguauaaaag

SEQ ID NO: 887936 - RNA, 19 nt, Homo sapiens
  misc_RNA (1)...(19): siRNA sense strand
acacagaccuggaacuuca

SEQ ID NO: 887937 - RNA, 19 nt, Homo sapiens
  misc_RNA (1)...(19): siRNA sense strand
gaagaaaucaccuaguaca

SEQ ID NO: 887938 - RNA, 19 nt, Homo sapiens
  misc_RNA (1)...(19): siRNA sense strand
uauagaagcaugucacuuu

SEQ ID NO: 887939 - RNA, 19 nt, Homo sapiens
  misc_RNA (1)...(19): siRNA sense strand
ccaagcagauccagagaga

SEQ ID NO: 887940 - RNA, 19 nt, Homo sapiens
  misc_RNA (1)...(19): siRNA sense strand
ggcaaaguccacauauuua

SEQ ID NO: 887941 - RNA, 19 nt, Homo sapiens
  misc_RNA (1)...(19): siRNA sense strand
gagaagauacuuacaucaa

SEQ ID NO: 887942 - RNA, 19 nt, Homo sapiens
  misc_RNA (1)...(19): siRNA sense strand
ccuacaagcucuaacauuc

SEQ ID NO: 887943 - RNA, 19 nt, Homo sapiens
  misc_RNA (1)...(19): siRNA sense strand
gaaagccaguaccaagaga

SEQ ID NO: 887944 - RNA, 19 nt, Homo sapiens
  misc_RNA (1)...(19): siRNA sense strand
gaccaacugcguaaacaua

SEQ ID NO: 887945 - RNA, 19 nt, Homo sapiens
  misc_RNA (1)...(19): siRNA sense strand
gagaagaagagcuggaauu

SEQ ID NO: 887946 - RNA, 19 nt, Homo sapiens
  misc_RNA (1)...(19): siRNA sense strand
cagaaacaguucaucauuc

SEQ ID NO: 887947 - RNA, 19 nt, Homo sapiens
  misc_RNA (1)...(19): siRNA sense strand
caagugggcugugcugcua

SEQ ID NO: 887948 - RNA, 19 nt, Homo sapiens
  misc_RNA (1)...(19): siRNA sense strand
caugaggguucaccaguaa

SEQ ID NO: 887949 - RNA, 19 nt, Homo sapiens
  misc_RNA (1)...(19): siRNA sense strand
cugaagagcuggcggaguu

SEQ ID NO: 887950 - RNA, 19 nt, Homo sapiens
  misc_RNA (1)...(19): siRNA sense strand
caaagacuacgaagagaaa

SEQ ID NO: 887951 - RNA, 19 nt, Homo sapiens
  misc_RNA (1)...(19): siRNA sense strand
caacagaaacaguucauca

SEQ ID NO: 887952 - RNA, 19 nt, Homo sapiens
  misc_RNA (1)...(19): siRNA sense strand
ggaucagauugacuacaua

SEQ ID NO: 887953 - RNA, 19 nt, Homo sapiens
  misc_RNA (1)...(19): siRNA sense strand
agaagaagagcuggaauua

SEQ ID NO: 887954 - RNA, 19 nt, Homo sapiens
  misc_RNA (1)...(19): siRNA sense strand
guacucaagucgcccuuau

SEQ ID NO: 887955 - RNA, 19 nt, Homo sapiens
  misc_RNA (1)...(19): siRNA sense strand
gauucaggcuucaauagug

SEQ ID NO: 887956 - RNA, 19 nt, Homo sapiens
  misc_RNA (1)...(19): siRNA sense strand
gacauuugauggaacuuga

SEQ ID NO: 887957 - RNA, 19 nt, Homo sapiens
  misc_RNA (1)...(19): siRNA sense strand
gcuccuagauggcguagau

SEQ ID NO: 887958 - RNA, 19 nt, Homo sapiens
  misc_RNA (1)...(19): siRNA sense strand
aacuauaccuucccaaauu

SEQ ID NO: 887959 - RNA, 19 nt, Homo sapiens
  misc_RNA (1)...(19): siRNA sense strand
caacauugccgguacacuu

SEQ ID NO: 887960 - RNA, 19 nt, Homo sapiens
  misc_RNA (1)...(19): siRNA sense strand
aaucucaacuuguaccaaa

SEQ ID NO: 887961 - RNA, 19 nt, Homo sapiens
  misc_RNA (1)...(19): siRNA sense strand
gagaagggagcaguuagua

SEQ ID NO: 887962 - RNA, 19 nt, Homo sapiens
  misc_RNA (1)...(19): siRNA sense strand
guaaagccaguagccauua

SEQ ID NO: 887963 - RNA, 19 nt, Homo sapiens
  misc_RNA (1)...(19): siRNA sense strand
gaaccaacugucaacauug

SEQ ID NO: 887964 - RNA, 19 nt, Homo sapiens
  misc_RNA (1)...(19): siRNA sense strand
gagaaagccaguaccaaga

SEQ ID NO: 887965 - RNA, 19 nt, Homo sapiens
  misc_RNA (1)...(19): siRNA sense strand
uuagacuucucaugcaaua

SEQ ID NO: 887966 - RNA, 19 nt, Homo sapiens
  misc_RNA (1)...(19): siRNA sense strand
caaacuauaccuucccaaa

SEQ ID NO: 887967 - RNA, 19 nt, Homo sapiens
  misc_RNA (1)...(19): siRNA sense strand
ucaugaggguucaccagua

SEQ ID NO: 887968 - RNA, 19 nt, Homo sapiens
  misc_RNA (1)...(19): siRNA sense strand
gaagagcuggaauuaauag

SEQ ID NO: 887969 - RNA, 19 nt, Homo sapiens
  misc_RNA (1)...(19): siRNA sense strand
uaacaauccacuacaauca

SEQ ID NO: 887970 - RNA, 19 nt, Homo sapiens
  misc_RNA (1)...(19): siRNA sense strand
gaagauaugagaagauacu

SEQ ID NO: 887971 - RNA, 19 nt, Homo sapiens
  misc_RNA (1)...(19): siRNA sense strand
aggcaaaguccacauauuu

SEQ ID NO: 887972 - RNA, 19 nt, Homo sapiens
  misc_RNA (1)...(19): siRNA sense strand
uggaaaaucucaacuugua

SEQ ID NO: 887973 - RNA, 19 nt, Homo sapiens
  misc_RNA (1)...(19): siRNA sense strand
agaagcaugucacuuuguu

SEQ ID NO: 887974 - RNA, 19 nt, Homo sapiens
  misc_RNA (1)...(19): siRNA sense strand
agccuuaguucacaguuua

SEQ ID NO: 887975 - RNA, 19 nt, Homo sapiens
  misc_RNA (1)...(19): siRNA sense strand
gaagagaaagccaguacca

SEQ ID NO: 887976 - RNA, 19 nt, Homo sapiens
  misc_RNA (1)...(19): siRNA sense strand
gaguaccgguugaaagugu

SEQ ID NO: 887977 - RNA, 19 nt, Homo sapiens
  misc_RNA (1)...(19): siRNA sense strand
ccaacugcguaaacauauu

SEQ ID NO: 887978 - RNA, 19 nt, Homo sapiens
  misc_RNA (1)...(19): siRNA sense strand
cagacgaucacccuagaua

SEQ ID NO: 887979 - RNA, 19 nt, Homo sapiens
  misc_RNA (1)...(19): siRNA sense strand
gauaacaauccacuacaau

SEQ ID NO: 887980 - RNA, 19 nt, Homo sapiens
  misc_RNA (1)...(19): siRNA sense strand
gaaauuggacaccuuagac

SEQ ID NO: 887981 - RNA, 19 nt, Homo sapiens
  misc_RNA (1)...(19): siRNA sense strand
caacugcguaaacauauug

SEQ ID NO: 887982 - RNA, 19 nt, Homo sapiens
  misc_RNA (1)...(19): siRNA sense strand
uaaguucaccugcaacaga

SEQ ID NO: 887983 - RNA, 19 nt, Homo sapiens
  misc_RNA (1)...(19): siRNA sense strand
cagauugacuacauagaca

SEQ ID NO: 887984 - RNA, 19 nt, Homo sapiens
  misc_RNA (1)...(19): siRNA sense strand
guaauuugccauugaaagu

SEQ ID NO: 887985 - RNA, 19 nt, Homo sapiens
  misc_RNA (1)...(19): siRNA sense strand
ucacuuuguuucucuggaa

SEQ ID NO: 887986 - RNA, 19 nt, Homo sapiens
  misc_RNA (1)...(19): siRNA sense strand
uaauagaccaacugcguaa

SEQ ID NO: 887987 - RNA, 19 nt, Homo sapiens
  misc_RNA (1)...(19): siRNA sense strand
uaacaggacagaauucaag

SEQ ID NO: 887988 - RNA, 19 nt, Homo sapiens
  misc_RNA (1)...(19): siRNA sense strand
gauaugagaagauacuuac

SEQ ID NO: 887989 - RNA, 19 nt, Homo sapiens
  misc_RNA (1)...(19): siRNA sense strand
gaucugccggauuaugaua

SEQ ID NO: 887990 - RNA, 19 nt, Homo sapiens
  misc_RNA (1)...(19): siRNA sense strand
agaaaucaccuaguacauu

SEQ ID NO: 887991 - RNA, 19 nt, Homo sapiens
  misc_RNA (1)...(19): siRNA sense strand
ccauugaaagucuuaauug

SEQ ID NO: 887992 - RNA, 19 nt, Homo sapiens
  misc_RNA (1)...(19): siRNA sense strand
ggaauuaauagaccaacug

SEQ ID NO: 887993 - RNA, 19 nt, Homo sapiens
  misc_RNA (1)...(19): siRNA sense strand
gcaccuaccacugauucua

SEQ ID NO: 887994 - RNA, 19 nt, Homo sapiens
  misc_RNA (1)...(19): siRNA sense strand
cuugagagaccuuaaugua

SEQ ID NO: 887995 - RNA, 19 nt, Homo sapiens
  misc_RNA (1)...(19): siRNA sense strand
agaagaaauuggacaccuu

SEQ ID NO: 887996 - RNA, 19 nt, Homo sapiens
  misc_RNA (1)...(19): siRNA sense strand
ggacaccuuagacauuuga

SEQ ID NO: 887997 - RNA, 19 nt, Homo sapiens
  misc_RNA (1)...(19): siRNA sense strand
ucagagaagggagcaguua

SEQ ID NO: 887998 - RNA, 19 nt, Homo sapiens
  misc_RNA (1)...(19): siRNA sense strand
gggaaugaaccuacagaug

SEQ ID NO: 887999 - RNA, 19 nt, Homo sapiens
  misc_RNA (1)...(19): siRNA sense strand
agauaacaauccacuacaa

SEQ ID NO: 888000 - RNA, 19 nt, Homo sapiens
  misc_RNA (1)...(19): siRNA sense strand
gguuagacuucucaugcaa

SEQ ID NO: 888001 - RNA, 19 nt, Homo sapiens
  misc_RNA (1)...(19): siRNA sense strand
caccagcuguaguaaguug

SEQ ID NO: 888002 - RNA, 19 nt, Homo sapiens
  misc_RNA (1)...(19): siRNA sense strand
ccacugauucuacagauuc

SEQ ID NO: 888003 - RNA, 19 nt, Homo sapiens
  misc_RNA (1)...(19): siRNA sense strand
acagaaacaguucaucauu

SEQ ID NO: 888004 - RNA, 19 nt, Homo sapiens
  misc_RNA (1)...(19): siRNA sense strand
agaaauuccuauagaagca

SEQ ID NO: 888005 - RNA, 19 nt, Homo sapiens
  misc_RNA (1)...(19): siRNA sense strand
agacuucucaugcaauaaa

SEQ ID NO: 888006 - RNA, 19 nt, Homo sapiens
  misc_RNA (1)...(19): siRNA sense strand
cagccuuaguucacaguuu

SEQ ID NO: 888007 - RNA, 19 nt, Homo sapiens
  misc_RNA (1)...(19): siRNA sense strand
cauauugaguaccgguuga

SEQ ID NO: 888008 - RNA, 19 nt, Homo sapiens
  misc_RNA (1)...(19): siRNA sense strand
caagacagagagaagaaga

SEQ ID NO: 888009 - RNA, 19 nt, Homo sapiens
  misc_RNA (1)...(19): siRNA sense strand
aaacagaagauaugagaag

SEQ ID NO: 888010 - RNA, 19 nt, Homo sapiens
  misc_RNA (1)...(19): siRNA sense strand
gagagaagaagagcuggaa

SEQ ID NO: 888011 - RNA, 19 nt, Homo sapiens
  misc_RNA (1)...(19): siRNA sense strand
gcguaaacauauugaguac

SEQ ID NO: 888012 - RNA, 19 nt, Homo sapiens
  misc_RNA (1)...(19): siRNA sense strand
agaagagcuggaauuaaua

SEQ ID NO: 888013 - RNA, 19 nt, Homo sapiens
  misc_RNA (1)...(19): siRNA sense strand
gaagcaugucacuuuguuu

SEQ ID NO: 888014 - RNA, 19 nt, Homo sapiens
  misc_RNA (1)...(19): siRNA sense strand
uaucucagcuucauacuaa

SEQ ID NO: 888015 - RNA, 19 nt, Homo sapiens
  misc_RNA (1)...(19): siRNA sense strand
gcauuuagcugugauguug

SEQ ID NO: 888016 - RNA, 19 nt, Homo sapiens
  misc_RNA (1)...(19): siRNA sense strand
ggagaucauuuggcauuua

SEQ ID NO: 888017 - RNA, 19 nt, Homo sapiens
  misc_RNA (1)...(19): siRNA sense strand
cuaaagagguagcaagaaa

SEQ ID NO: 888018 - RNA, 19 nt, Homo sapiens
  misc_RNA (1)...(19): siRNA sense strand
acacagauaugacgaaaga

SEQ ID NO: 888019 - RNA, 19 nt, Homo sapiens
  misc_RNA (1)...(19): siRNA sense strand
uaacagggauggucuuuua

SEQ ID NO: 888020 - RNA, 19 nt, Homo sapiens
  misc_RNA (1)...(19): siRNA sense strand
cgaaagacuugaaagaaga

SEQ ID NO: 888021 - RNA, 19 nt, Homo sapiens
  misc_RNA (1)...(19): siRNA sense strand
cagggagggucuauuguua

SEQ ID NO: 888022 - RNA, 19 nt, Homo sapiens
  misc_RNA (1)...(19): siRNA sense strand
cgaguaaauuucuugguaa

SEQ ID NO: 888023 - RNA, 19 nt, Homo sapiens
  misc_RNA (1)...(19): siRNA sense strand
ggacuaugauucaacaaca

SEQ ID NO: 888024 - RNA, 19 nt, Homo sapiens
  misc_RNA (1)...(19): siRNA sense strand
gcugugauguugcuaaaga

SEQ ID NO: 888025 - RNA, 19 nt, Homo sapiens
  misc_RNA (1)...(19): siRNA sense strand
caacagggagggucuauug

SEQ ID NO: 888026 - RNA, 19 nt, Homo sapiens
  misc_RNA (1)...(19): siRNA sense strand
guaaaugcagcugguauua

SEQ ID NO: 888027 - RNA, 19 nt, Homo sapiens
  misc_RNA (1)...(19): siRNA sense strand
gagggucuauuguuaaugu

SEQ ID NO: 888028 - RNA, 19 nt, Homo sapiens
  misc_RNA (1)...(19): siRNA sense strand
gcagagcuguggcccaguu

SEQ ID NO: 888029 - RNA, 19 nt, Homo sapiens
  misc_RNA (1)...(19): siRNA sense strand
gacaaagugugugcuguuu

SEQ ID NO: 888030 - RNA, 19 nt, Homo sapiens
  misc_RNA (1)...(19): siRNA sense strand
ucgaguaaauuucuuggua

SEQ ID NO: 888031 - RNA, 19 nt, Homo sapiens
  misc_RNA (1)...(19): siRNA sense strand
uugaagagcuggagaaaca

SEQ ID NO: 888032 - RNA, 19 nt, Homo sapiens
  misc_RNA (1)...(19): siRNA sense strand
ggacaaagugugugcuguu

SEQ ID NO: 888033 - RNA, 19 nt, Homo sapiens
  misc_RNA (1)...(19): siRNA sense strand
gagaucauuuggcauuuag

SEQ ID NO: 888034 - RNA, 19 nt, Homo sapiens
  misc_RNA (1)...(19): siRNA sense strand
guuccaugcugaccuguaa

SEQ ID NO: 888035 - RNA, 19 nt, Homo sapiens
  misc_RNA (1)...(19): siRNA sense strand
gggagggucuauuguuaau

SEQ ID NO: 888036 - RNA, 19 nt, Homo sapiens
  misc_RNA (1)...(19): siRNA sense strand
gaagagcuggagaaacauu

SEQ ID NO: 888037 - RNA, 19 nt, Homo sapiens
  misc_RNA (1)...(19): siRNA sense strand
gacgaaagacuugaaagaa

SEQ ID NO: 888038 - RNA, 19 nt, Homo sapiens
  misc_RNA (1)...(19): siRNA sense strand
gaaagacuugaaagaagaa

SEQ ID NO: 888039 - RNA, 19 nt, Homo sapiens
  misc_RNA (1)...(19): siRNA sense strand
uaaaggaggauuaguugga

SEQ ID NO: 888040 - RNA, 19 nt, Homo sapiens
  misc_RNA (1)...(19): siRNA sense strand
gcaccaggauuuguacaca

SEQ ID NO: 888041 - RNA, 19 nt, Homo sapiens
  misc_RNA (1)...(19): siRNA sense strand
ggauuuguacacacagaua

SEQ ID NO: 888042 - RNA, 19 nt, Homo sapiens
  misc_RNA (1)...(19): siRNA sense strand
uaaaugcagcugguauuaa

SEQ ID NO: 888043 - RNA, 19 nt, Homo sapiens
  misc_RNA (1)...(19): siRNA sense strand
gcggagaucauuuggcauu

SEQ ID NO: 888044 - RNA, 19 nt, Homo sapiens
  misc_RNA (1)...(19): siRNA sense strand
ugacgaaagacuugaaaga

SEQ ID NO: 888045 - RNA, 19 nt, Homo sapiens
  misc_RNA (1)...(19): siRNA sense strand
aaacauuuaggucgaguaa

SEQ ID NO: 888046 - RNA, 19 nt, Homo sapiens
  misc_RNA (1)...(19): siRNA sense strand
acacacagauaugacgaaa

SEQ ID NO: 888047 - RNA, 19 nt, Homo sapiens
  misc_RNA (1)...(19): siRNA sense strand
gguaaaugcagcugguauu

SEQ ID NO: 888048 - RNA, 19 nt, Homo sapiens
  misc_RNA (1)...(19): siRNA sense strand
aaaugcagcugguauuaac

SEQ ID NO: 888049 - RNA, 19 nt, Homo sapiens
  misc_RNA (1)...(19): siRNA sense strand
agagguagcaagaaagaaa

SEQ ID NO: 888050 - RNA, 19 nt, Homo sapiens
  misc_RNA (1)...(19): siRNA sense strand
uacagggcauguucuggua

SEQ ID NO: 888051 - RNA, 19 nt, Homo sapiens
  misc_RNA (1)...(19): siRNA sense strand
acgaaagacuugaaagaag

SEQ ID NO: 888052 - RNA, 19 nt, Homo sapiens
  misc_RNA (1)...(19): siRNA sense strand
ugaggacuaugauucaaca

SEQ ID NO: 888053 - RNA, 19 nt, Homo sapiens
  misc_RNA (1)...(19): siRNA sense strand
caguaaaggaggauuaguu

SEQ ID NO: 888054 - RNA, 19 nt, Homo sapiens
  misc_RNA (1)...(19): siRNA sense strand
gaaacauuuaggucgagua

SEQ ID NO: 888055 - RNA, 19 nt, Homo sapiens
  misc_RNA (1)...(19): siRNA sense strand
uagaaucaccguauauuac

SEQ ID NO: 888056 - RNA, 19 nt, Homo sapiens
  misc_RNA (1)...(19): siRNA sense strand
aaagagguagcaagaaaga

SEQ ID NO: 888057 - RNA, 19 nt, Homo sapiens
  misc_RNA (1)...(19): siRNA sense strand
gccaugaggacuaugauuc

SEQ ID NO: 888058 - RNA, 19 nt, Homo sapiens
  misc_RNA (1)...(19): siRNA sense strand
aaaggaggauuaguuggau

SEQ ID NO: 888059 - RNA, 19 nt, Homo sapiens
  misc_RNA (1)...(19): siRNA sense strand
caugaggacuaugauucaa

SEQ ID NO: 888060 - RNA, 19 nt, Homo sapiens
  misc_RNA (1)...(19): siRNA sense strand
gagcuguggcccaguuaau

SEQ ID NO: 888061 - RNA, 19 nt, Homo sapiens
  misc_RNA (1)...(19): siRNA sense strand
cuugggagguuuggagaaa

SEQ ID NO: 888062 - RNA, 19 nt, Homo sapiens
  misc_RNA (1)...(19): siRNA sense strand
uagagugaauguaguugca

SEQ ID NO: 888063 - RNA, 19 nt, Homo sapiens
  misc_RNA (1)...(19): siRNA sense strand
gaaucaccguauauuacag

SEQ ID NO: 888064 - RNA, 19 nt, Homo sapiens
  misc_RNA (1)...(19): siRNA sense strand
ccaugaggacuaugauuca

SEQ ID NO: 888065 - RNA, 19 nt, Homo sapiens
  misc_RNA (1)...(19): siRNA sense strand
cggagaucauuuggcauuu

SEQ ID NO: 888066 - RNA, 19 nt, Homo sapiens
  misc_RNA (1)...(19): siRNA sense strand
uauauuacagggcauguuc

SEQ ID NO: 888067 - RNA, 19 nt, Homo sapiens
  misc_RNA (1)...(19): siRNA sense strand
caggauuuguacacacaga

SEQ ID NO: 888068 - RNA, 19 nt, Homo sapiens
  misc_RNA (1)...(19): siRNA sense strand
aguaaaggaggauuaguug

SEQ ID NO: 888069 - RNA, 19 nt, Homo sapiens
  misc_RNA (1)...(19): siRNA sense strand
uguaguugcaccaggauuu

SEQ ID NO: 888070 - RNA, 19 nt, Homo sapiens
  misc_RNA (1)...(19): siRNA sense strand
agaaucaccguauauuaca

SEQ ID NO: 888071 - RNA, 19 nt, Homo sapiens
  misc_RNA (1)...(19): siRNA sense strand
uaugguaucucagcuucau

SEQ ID NO: 888072 - RNA, 19 nt, Homo sapiens
  misc_RNA (1)...(19): siRNA sense strand
agagcuggagaaacauuua

SEQ ID NO: 888073 - RNA, 19 nt, Homo sapiens
  misc_RNA (1)...(19): siRNA sense strand
gauaugacgaaagacuuga

SEQ ID NO: 888074 - RNA, 19 nt, Homo sapiens
  misc_RNA (1)...(19): siRNA sense strand
gauuuguacacacagauau

SEQ ID NO: 888075 - RNA, 19 nt, Homo sapiens
  misc_RNA (1)...(19): siRNA sense strand
acagggagggucuauuguu

SEQ ID NO: 888076 - RNA, 19 nt, Homo sapiens
  misc_RNA (1)...(19): siRNA sense strand
cagggauggucuuuuagua

SEQ ID NO: 888077 - RNA, 19 nt, Homo sapiens
  misc_RNA (1)...(19): siRNA sense strand
guaguugcaccaggauuug

SEQ ID NO: 888078 - RNA, 19 nt, Homo sapiens
  misc_RNA (1)...(19): siRNA sense strand
uaaagagguagcaagaaag

SEQ ID NO: 888079 - RNA, 19 nt, Homo sapiens
  misc_RNA (1)...(19): siRNA sense strand
caacaacagggagggucua

SEQ ID NO: 888080 - RNA, 19 nt, Homo sapiens
  misc_RNA (1)...(19): siRNA sense strand
gcuucauacuaaccucuug

SEQ ID NO: 888081 - RNA, 19 nt, Homo sapiens
  misc_RNA (1)...(19): siRNA sense strand
cagauaugacgaaagacuu

SEQ ID NO: 888082 - RNA, 19 nt, Homo sapiens
  misc_RNA (1)...(19): siRNA sense strand
aagcugccaugaggacuau

SEQ ID NO: 888083 - RNA, 19 nt, Homo sapiens
  misc_RNA (1)...(19): siRNA sense strand
gagcuggagaaacauuuag

SEQ ID NO: 888084 - RNA, 19 nt, Homo sapiens
  misc_RNA (1)...(19): siRNA sense strand
acucuggccaguccguuua

SEQ ID NO: 888085 - RNA, 19 nt, Homo sapiens
  misc_RNA (1)...(19): siRNA sense strand
gacuaugauucaacaacag

SEQ ID NO: 888086 - RNA, 19 nt, Homo sapiens
  misc_RNA (1)...(19): siRNA sense strand
gggauggucuuuuaguaag

SEQ ID NO: 888087 - RNA, 19 nt, Homo sapiens
  misc_RNA (1)...(19): siRNA sense strand
agauaugacgaaagacuug

SEQ ID NO: 888088 - RNA, 19 nt, Homo sapiens
  misc_RNA (1)...(19): siRNA sense strand
aaggaggauuaguuggauu

SEQ ID NO: 888089 - RNA, 19 nt, Homo sapiens
  misc_RNA (1)...(19): siRNA sense strand
gaccucggcggagaucauu

SEQ ID NO: 888090 - RNA, 19 nt, Homo sapiens
  misc_RNA (1)...(19): siRNA sense strand
aaagcugccaugaggacua

SEQ ID NO: 888091 - RNA, 19 nt, Homo sapiens
  misc_RNA (1)...(19): siRNA sense strand
gaagaagccuguauccuua

SEQ ID NO: 888092 - RNA, 19 nt, Homo sapiens
  misc_RNA (1)...(19): siRNA sense strand
gaaacacccucaucauuug

SEQ ID NO: 888093 - RNA, 19 nt, Homo sapiens
  misc_RNA (1)...(19): siRNA sense strand
ggaaacacccucaucauuu

SEQ ID NO: 888094 - RNA, 19 nt, Homo sapiens
  misc_RNA (1)...(19): siRNA sense strand
gggaauaccuggucuucaa

SEQ ID NO: 888095 - RNA, 19 nt, Homo sapiens
  misc_RNA (1)...(19): siRNA sense strand
gagucuaccugggcaauua

SEQ ID NO: 888096 - RNA, 19 nt, Homo sapiens
  misc_RNA (1)...(19): siRNA sense strand
gaucauugacuuccuugua

SEQ ID NO: 888097 - RNA, 19 nt, Homo sapiens
  misc_RNA (1)...(19): siRNA sense strand
gggaaacacccucaucauu

SEQ ID NO: 888098 - RNA, 19 nt, Homo sapiens
  misc_RNA (1)...(19): siRNA sense strand
gguguucucugaugggauu

SEQ ID NO: 888099 - RNA, 19 nt, Homo sapiens
  misc_RNA (1)...(19): siRNA sense strand
ugaagaagccuguauccuu

SEQ ID NO: 888100 - RNA, 19 nt, Homo sapiens
  misc_RNA (1)...(19): siRNA sense strand
gaugggauuugaucugaau

SEQ ID NO: 888101 - RNA, 19 nt, Homo sapiens
  misc_RNA (1)...(19): siRNA sense strand
gccaagggaucauugacuu

SEQ ID NO: 888102 - RNA, 19 nt, Homo sapiens
  misc_RNA (1)...(19): siRNA sense strand
ggaccacacuuccuauugc

SEQ ID NO: 888103 - RNA, 19 nt, Homo sapiens
  misc_RNA (1)...(19): siRNA sense strand
uuacagguguucucugaug

SEQ ID NO: 888104 - RNA, 19 nt, Homo sapiens
  misc_RNA (1)...(19): siRNA sense strand
ccagaaugcugaggacuuc

SEQ ID NO: 888105 - RNA, 19 nt, Homo sapiens
  misc_RNA (1)...(19): siRNA sense strand
aauuacagguguucucuga

SEQ ID NO: 888106 - RNA, 19 nt, Homo sapiens
  misc_RNA (1)...(19): siRNA sense strand
uaaccgggacgcugugaaa

SEQ ID NO: 888107 - RNA, 19 nt, Homo sapiens
  misc_RNA (1)...(19): siRNA sense strand
gaaggugguauucaucaca

SEQ ID NO: 888108 - RNA, 19 nt, Homo sapiens
  misc_RNA (1)...(19): siRNA sense strand
aucauugacuuccuuguaa

SEQ ID NO: 888109 - RNA, 19 nt, Homo sapiens
  misc_RNA (1)...(19): siRNA sense strand
gcagaaggugguauucauc

SEQ ID NO: 888110 - RNA, 19 nt, Homo sapiens
  misc_RNA (1)...(19): siRNA sense strand
gauaaccagcccugacaau

SEQ ID NO: 888111 - RNA, 19 nt, Homo sapiens
  misc_RNA (1)...(19): siRNA sense strand
gagcagaaggugguauuca

SEQ ID NO: 888112 - RNA, 19 nt, Homo sapiens
  misc_RNA (1)...(19): siRNA sense strand
uaaccagcccugacaaucu

SEQ ID NO: 888113 - RNA, 19 nt, Homo sapiens
  misc_RNA (1)...(19): siRNA sense strand
cugaugggauuugaucuga

SEQ ID NO: 888114 - RNA, 19 nt, Homo sapiens
  misc_RNA (1)...(19): siRNA sense strand
guaagccagcacccuauug

SEQ ID NO: 888115 - RNA, 19 nt, Homo sapiens
  misc_RNA (1)...(19): siRNA sense strand
gcaauuacagguguucucu

SEQ ID NO: 888116 - RNA, 19 nt, Homo sapiens
  misc_RNA (1)...(19): siRNA sense strand
gcugugcccuacacugaag

SEQ ID NO: 888117 - RNA, 19 nt, Homo sapiens
  misc_RNA (1)...(19): siRNA sense strand
cagaaggugguauucauca

SEQ ID NO: 888118 - RNA, 19 nt, Homo sapiens
  misc_RNA (1)...(19): siRNA sense strand
ccaaugcucaauccugaug

SEQ ID NO: 888119 - RNA, 19 nt, Homo sapiens
  misc_RNA (1)...(19): siRNA sense strand
cagagcagaaggugguauu

SEQ ID NO: 888120 - RNA, 19 nt, Homo sapiens
  misc_RNA (1)...(19): siRNA sense strand
uacccugcauggagugaaa

SEQ ID NO: 888121 - RNA, 19 nt, Homo sapiens
  misc_RNA (1)...(19): siRNA sense strand
ccuguguccuccgggaaua

SEQ ID NO: 888122 - RNA, 19 nt, Homo sapiens
  misc_RNA (1)...(19): siRNA sense strand
ggaauaccuggucuucaag

SEQ ID NO: 888123 - RNA, 19 nt, Homo sapiens
  misc_RNA (1)...(19): siRNA sense strand
guucucugaugggauuuga

SEQ ID NO: 888124 - RNA, 19 nt, Homo sapiens
  misc_RNA (1)...(19): siRNA sense strand
gccagaaugcugaggacuu

SEQ ID NO: 888125 - RNA, 19 nt, Homo sapiens
  misc_RNA (1)...(19): siRNA sense strand
cgagaguauccaagucuga

SEQ ID NO: 888126 - RNA, 19 nt, Homo sapiens
  misc_RNA (1)...(19): siRNA sense strand
gaccacacuuccuauugcu

SEQ ID NO: 888127 - RNA, 19 nt, Homo sapiens
  misc_RNA (1)...(19): siRNA sense strand
gggccagagugugcaacaa

SEQ ID NO: 888128 - RNA, 19 nt, Homo sapiens
  misc_RNA (1)...(19): siRNA sense strand
uauuccagcacacccuuua

SEQ ID NO: 888129 - RNA, 19 nt, Homo sapiens
  misc_RNA (1)...(19): siRNA sense strand
cuugaccuccugacgauaa

SEQ ID NO: 888130 - RNA, 19 nt, Homo sapiens
  misc_RNA (1)...(19): siRNA sense strand
ggagucuaccugggcaauu

SEQ ID NO: 888131 - RNA, 19 nt, Homo sapiens
  misc_RNA (1)...(19): siRNA sense strand
ugaugggauuugaucugaa

SEQ ID NO: 888132 - RNA, 19 nt, Homo sapiens
  misc_RNA (1)...(19): siRNA sense strand
ucauugacuuccuuguaag

SEQ ID NO: 888133 - RNA, 19 nt, Homo sapiens
  misc_RNA (1)...(19): siRNA sense strand
acacugaagaagccuguau

SEQ ID NO: 888134 - RNA, 19 nt, Homo sapiens
  misc_RNA (1)...(19): siRNA sense strand
gaggauggcuauaagaaga

SEQ ID NO: 888135 - RNA, 19 nt, Homo sapiens
  misc_RNA (1)...(19): siRNA sense strand
ccacucccauggugacuua

SEQ ID NO: 888136 - RNA, 19 nt, Homo sapiens
  misc_RNA (1)...(19): siRNA sense strand
guagagacuucuugaggaa

SEQ ID NO: 888137 - RNA, 19 nt, Homo sapiens
  misc_RNA (1)...(19): siRNA sense strand
gcaacgggauuuugaguuu

SEQ ID NO: 888138 - RNA, 19 nt, Homo sapiens
  misc_RNA (1)...(19): siRNA sense strand
uaaagaagcaggucagcaa

SEQ ID NO: 888139 - RNA, 19 nt, Homo sapiens
  misc_RNA (1)...(19): siRNA sense strand
ggaagcggguagaggaguu

SEQ ID NO: 888140 - RNA, 19 nt, Homo sapiens
  misc_RNA (1)...(19): siRNA sense strand
gcaaggaggaggucccuau

SEQ ID NO: 888141 - RNA, 19 nt, Homo sapiens
  misc_RNA (1)...(19): siRNA sense strand
ggaugaggauggcuauaag

SEQ ID NO: 888142 - RNA, 19 nt, Homo sapiens
  misc_RNA (1)...(19): siRNA sense strand
caaguuccgucaccugcaa

SEQ ID NO: 888143 - RNA, 19 nt, Homo sapiens
  misc_RNA (1)...(19): siRNA sense strand
ugagcgagguguccaacuu

SEQ ID NO: 888144 - RNA, 19 nt, Homo sapiens
  misc_RNA (1)...(19): siRNA sense strand
gccaugacuuccagaacaa

SEQ ID NO: 888145 - RNA, 19 nt, Homo sapiens
  misc_RNA (1)...(19): siRNA sense strand
gcaaccugcuggccaccaa

SEQ ID NO: 888146 - RNA, 19 nt, Homo sapiens
  misc_RNA (1)...(19): siRNA sense strand
ggguagaggaguuaaagaa

SEQ ID NO: 888147 - RNA, 19 nt, Homo sapiens
  misc_RNA (1)...(19): siRNA sense strand
agaaugccaugcucaggaa

SEQ ID NO: 888148 - RNA, 19 nt, Homo sapiens
  misc_RNA (1)...(19): siRNA sense strand
cggcugaccuaccaaaugg

SEQ ID NO: 888149 - RNA, 19 nt, Homo sapiens
  misc_RNA (1)...(19): siRNA sense strand
ccagagaucacgccacugu

SEQ ID NO: 888150 - RNA, 19 nt, Homo sapiens
  misc_RNA (1)...(19): siRNA sense strand
gaagcggguagaggaguua

SEQ ID NO: 888151 - RNA, 19 nt, Homo sapiens
  misc_RNA (1)...(19): siRNA sense strand
uagaggaguuaaagaagca

SEQ ID NO: 888152 - RNA, 19 nt, Homo sapiens
  misc_RNA (1)...(19): siRNA sense strand
ugcccuggcucaaacaauu

SEQ ID NO: 888153 - RNA, 19 nt, Homo sapiens
  misc_RNA (1)...(19): siRNA sense strand
ccacugcaccagcgacuga

SEQ ID NO: 888154 - RNA, 19 nt, Homo sapiens
  misc_RNA (1)...(19): siRNA sense strand
uaagaagacaggagagcuu

SEQ ID NO: 888155 - RNA, 19 nt, Homo sapiens
  misc_RNA (1)...(19): siRNA sense strand
caugaucucuaugauaucu

SEQ ID NO: 888156 - RNA, 19 nt, Homo sapiens
  misc_RNA (1)...(19): siRNA sense strand
gagcgagguguccaacuug

SEQ ID NO: 888157 - RNA, 19 nt, Homo sapiens
  misc_RNA (1)...(19): siRNA sense strand
cauggugacuuacccuauc

SEQ ID NO: 888158 - RNA, 19 nt, Homo sapiens
  misc_RNA (1)...(19): siRNA sense strand
agagacuucuugaggaaug

SEQ ID NO: 888159 - RNA, 19 nt, Homo sapiens
  misc_RNA (1)...(19): siRNA sense strand
gaugaggauggcuauaaga

SEQ ID NO: 888160 - RNA, 19 nt, Homo sapiens
  misc_RNA (1)...(19): siRNA sense strand
ggccaccaaugagguacua

SEQ ID NO: 888161 - RNA, 19 nt, Homo sapiens
  misc_RNA (1)...(19): siRNA sense strand
gcaaucaggccaaggucau

SEQ ID NO: 888162 - RNA, 19 nt, Homo sapiens
  misc_RNA (1)...(19): siRNA sense strand
ugccaugacuuccagaaca

SEQ ID NO: 888163 - RNA, 19 nt, Homo sapiens
  misc_RNA (1)...(19): siRNA sense strand
cagcugcccuggcucaaac

SEQ ID NO: 888164 - RNA, 19 nt, Homo sapiens
  misc_RNA (1)...(19): siRNA sense strand
gagguacuacuggaacaaa

SEQ ID NO: 888165 - RNA, 19 nt, Homo sapiens
  misc_RNA (1)...(19): siRNA sense strand
caaucaggccaaggucaua

SEQ ID NO: 888166 - RNA, 19 nt, Homo sapiens
  misc_RNA (1)...(19): siRNA sense strand
caaauugccguuucaucca

SEQ ID NO: 888167 - RNA, 19 nt, Homo sapiens
  misc_RNA (1)...(19): siRNA sense strand
gguagaggaguuaaagaag

SEQ ID NO: 888168 - RNA, 19 nt, Homo sapiens
  misc_RNA (1)...(19): siRNA sense strand
ggaggaugaggauggcuau

SEQ ID NO: 888169 - RNA, 19 nt, Homo sapiens
  misc_RNA (1)...(19): siRNA sense strand
caucuucugccaugacuuc

SEQ ID NO: 888170 - RNA, 19 nt, Homo sapiens
  misc_RNA (1)...(19): siRNA sense strand
gcacuguugccacuuuuaa

SEQ ID NO: 888171 - RNA, 19 nt, Homo sapiens
  misc_RNA (1)...(19): siRNA sense strand
aggaugaggauggcuauaa

SEQ ID NO: 888172 - RNA, 19 nt, Homo sapiens
  misc_RNA (1)...(19): siRNA sense strand
ggauggcuauaagaagaca

SEQ ID NO: 888173 - RNA, 19 nt, Homo sapiens
  misc_RNA (1)...(19): siRNA sense strand
ucccagagcaugcgcauca

SEQ ID NO: 888174 - RNA, 19 nt, Homo sapiens
  misc_RNA (1)...(19): siRNA sense strand
aggaggaggucccuaucug

SEQ ID NO: 888175 - RNA, 19 nt, Homo sapiens
  misc_RNA (1)...(19): siRNA sense strand
agagaucacgccacuguca

SEQ ID NO: 888176 - RNA, 19 nt, Homo sapiens
  misc_RNA (1)...(19): siRNA sense strand
cgauaucgccacccagaca

SEQ ID NO: 888177 - RNA, 19 nt, Homo sapiens
  misc_RNA (1)...(19): siRNA sense strand
gaggagccaagugcaaguu

SEQ ID NO: 888178 - RNA, 19 nt, Homo sapiens
  misc_RNA (1)...(19): siRNA sense strand
uggcaggaaucacaaugag

SEQ ID NO: 888179 - RNA, 19 nt, Homo sapiens
  misc_RNA (1)...(19): siRNA sense strand
aaauugccguuucauccau

SEQ ID NO: 888180 - RNA, 19 nt, Homo sapiens
  misc_RNA (1)...(19): siRNA sense strand
gagacuucuugaggaaugu

SEQ ID NO: 888181 - RNA, 19 nt, Homo sapiens
  misc_RNA (1)...(19): siRNA sense strand
caaugagguacuacuggaa

SEQ ID NO: 888182 - RNA, 19 nt, Homo sapiens
  misc_RNA (1)...(19): siRNA sense strand
gcuggccaccaaugaggua

SEQ ID NO: 888183 - RNA, 19 nt, Homo sapiens
  misc_RNA (1)...(19): siRNA sense strand
aaacaauugcccagggaau

SEQ ID NO: 888184 - RNA, 19 nt, Homo sapiens
  misc_RNA (1)...(19): siRNA sense strand
gaggaugaggauggcuaua

SEQ ID NO: 888185 - RNA, 19 nt, Homo sapiens
  misc_RNA (1)...(19): siRNA sense strand
ggacugagauguacaauug

SEQ ID NO: 888186 - RNA, 19 nt, Homo sapiens
  misc_RNA (1)...(19): siRNA sense strand
gaagauuguuagcacauua

SEQ ID NO: 888187 - RNA, 19 nt, Homo sapiens
  misc_RNA (1)...(19): siRNA sense strand
ccaaaucacuugacauauu

SEQ ID NO: 888188 - RNA, 19 nt, Homo sapiens
  misc_RNA (1)...(19): siRNA sense strand
ggacagauauucaacacuu

SEQ ID NO: 888189 - RNA, 19 nt, Homo sapiens
  misc_RNA (1)...(19): siRNA sense strand
aaagaaaguugccauagua

SEQ ID NO: 888190 - RNA, 19 nt, Homo sapiens
  misc_RNA (1)...(19): siRNA sense strand
acacagggauugcaaauuu

SEQ ID NO: 888191 - RNA, 19 nt, Homo sapiens
  misc_RNA (1)...(19): siRNA sense strand
gaaaggagcuagcaguucu

SEQ ID NO: 888192 - RNA, 19 nt, Homo sapiens
  misc_RNA (1)...(19): siRNA sense strand
gcaauacagucagcaaauu

SEQ ID NO: 888193 - RNA, 19 nt, Homo sapiens
  misc_RNA (1)...(19): siRNA sense strand
cuucaggucuugcuuaaua

SEQ ID NO: 888194 - RNA, 19 nt, Homo sapiens
  misc_RNA (1)...(19): siRNA sense strand
gagugaagcuuccaaagug

SEQ ID NO: 888195 - RNA, 19 nt, Homo sapiens
  misc_RNA (1)...(19): siRNA sense strand
gaaaucacacucucugaaa

SEQ ID NO: 888196 - RNA, 19 nt, Homo sapiens
  misc_RNA (1)...(19): siRNA sense strand
uaaauuaacugcugagaac

SEQ ID NO: 888197 - RNA, 19 nt, Homo sapiens
  misc_RNA (1)...(19): siRNA sense strand
caucguaccuguaaccauu

SEQ ID NO: 888198 - RNA, 19 nt, Homo sapiens
  misc_RNA (1)...(19): siRNA sense strand
gcaaccauacuacuaauuu

SEQ ID NO: 888199 - RNA, 19 nt, Homo sapiens
  misc_RNA (1)...(19): siRNA sense strand
gcaaacauguggcaaggau

SEQ ID NO: 888200 - RNA, 19 nt, Homo sapiens
  misc_RNA (1)...(19): siRNA sense strand
caaagaaaguugccauagu

SEQ ID NO: 888201 - RNA, 19 nt, Homo sapiens
  misc_RNA (1)...(19): siRNA sense strand
gcgagugguuggacagaua

SEQ ID NO: 888202 - RNA, 19 nt, Homo sapiens
  misc_RNA (1)...(19): siRNA sense strand
ggaaaggacugagauguac

SEQ ID NO: 888203 - RNA, 19 nt, Homo sapiens
  misc_RNA (1)...(19): siRNA sense strand
aaagugcuguggaagaaua

SEQ ID NO: 888204 - RNA, 19 nt, Homo sapiens
  misc_RNA (1)...(19): siRNA sense strand
ucacagcaccacuuaauaa

SEQ ID NO: 888205 - RNA, 19 nt, Homo sapiens
  misc_RNA (1)...(19): siRNA sense strand
aauaagaacuugcagacaa

SEQ ID NO: 888206 - RNA, 19 nt, Homo sapiens
  misc_RNA (1)...(19): siRNA sense strand
uaacauagcaauacaguca

SEQ ID NO: 888207 - RNA, 19 nt, Homo sapiens
  misc_RNA (1)...(19): siRNA sense strand
caagggcacugauggauuc

SEQ ID NO: 888208 - RNA, 19 nt, Homo sapiens
  misc_RNA (1)...(19): siRNA sense strand
cagcaauguuguuauguuu

SEQ ID NO: 888209 - RNA, 19 nt, Homo sapiens
  misc_RNA (1)...(19): siRNA sense strand
ggaguuauuuauucucaga

SEQ ID NO: 888210 - RNA, 19 nt, Homo sapiens
  misc_RNA (1)...(19): siRNA sense strand
cacauuaucuguugcaguu

SEQ ID NO: 888211 - RNA, 19 nt, Homo sapiens
  misc_RNA (1)...(19): siRNA sense strand
gaaaguugccauaguaaca

SEQ ID NO: 888212 - RNA, 19 nt, Homo sapiens
  misc_RNA (1)...(19): siRNA sense strand
ggacagacaccauuaacau

SEQ ID NO: 888213 - RNA, 19 nt, Homo sapiens
  misc_RNA (1)...(19): siRNA sense strand
cagcaaauuucucuucaga

SEQ ID NO: 888214 - RNA, 19 nt, Homo sapiens
  misc_RNA (1)...(19): siRNA sense strand
ucaaagugcuguggaagaa

SEQ ID NO: 888215 - RNA, 19 nt, Homo sapiens
  misc_RNA (1)...(19): siRNA sense strand
ggagagauagaauuacaaa

SEQ ID NO: 888216 - RNA, 19 nt, Homo sapiens
  misc_RNA (1)...(19): siRNA sense strand
gagaacaucacuagugcua

SEQ ID NO: 888217 - RNA, 19 nt, Homo sapiens
  misc_RNA (1)...(19): siRNA sense strand
ggaaaucacacucucugaa

SEQ ID NO: 888218 - RNA, 19 nt, Homo sapiens
  misc_RNA (1)...(19): siRNA sense strand
caucagcaauguuguuaug

SEQ ID NO: 888219 - RNA, 19 nt, Homo sapiens
  misc_RNA (1)...(19): siRNA sense strand
gacauggucuuuaguccaa

SEQ ID NO: 888220 - RNA, 19 nt, Homo sapiens
  misc_RNA (1)...(19): siRNA sense strand
ggaugugcacugucuguua

SEQ ID NO: 888221 - RNA, 19 nt, Homo sapiens
  misc_RNA (1)...(19): siRNA sense strand
cuggaaaccucuccgagua

SEQ ID NO: 888222 - RNA, 19 nt, Homo sapiens
  misc_RNA (1)...(19): siRNA sense strand
caagacaugcggcuuugua

SEQ ID NO: 888223 - RNA, 19 nt, Homo sapiens
  misc_RNA (1)...(19): siRNA sense strand
guuagcacauuaucuguug

SEQ ID NO: 888224 - RNA, 19 nt, Homo sapiens
  misc_RNA (1)...(19): siRNA sense strand
uuaccuggauucuagcaua

SEQ ID NO: 888225 - RNA, 19 nt, Homo sapiens
  misc_RNA (1)...(19): siRNA sense strand
aauggcagauguauuugua

SEQ ID NO: 888226 - RNA, 19 nt, Homo sapiens
  misc_RNA (1)...(19): siRNA sense strand
caauacagucagcaaauuu

SEQ ID NO: 888227 - RNA, 19 nt, Homo sapiens
  misc_RNA (1)...(19): siRNA sense strand
gagcaaauggagacuuauu

SEQ ID NO: 888228 - RNA, 19 nt, Homo sapiens
  misc_RNA (1)...(19): siRNA sense strand
gcugguggcugucgugugu

SEQ ID NO: 888229 - RNA, 19 nt, Homo sapiens
  misc_RNA (1)...(19): siRNA sense strand
gcaaggauacuccaaaugc

SEQ ID NO: 888230 - RNA, 19 nt, Homo sapiens
  misc_RNA (1)...(19): siRNA sense strand
gagcuucaggucuugcuua

SEQ ID NO: 888231 - RNA, 19 nt, Homo sapiens
  misc_RNA (1)...(19): siRNA sense strand
gaccauccuugcaaacaug

SEQ ID NO: 888232 - RNA, 19 nt, Homo sapiens
  misc_RNA (1)...(19): siRNA sense strand
gaaccuaacauagcaauac

SEQ ID NO: 888233 - RNA, 19 nt, Homo sapiens
  misc_RNA (1)...(19): siRNA sense strand
uugagcaaauggagacuua

SEQ ID NO: 888234 - RNA, 19 nt, Homo sapiens
  misc_RNA (1)...(19): siRNA sense strand
cagcaccacuuaauaacau

SEQ ID NO: 888235 - RNA, 19 nt, Homo sapiens
  misc_RNA (1)...(19): siRNA sense strand
gaugucacagcaccacuua

SEQ ID NO: 888236 - RNA, 19 nt, Homo sapiens
  misc_RNA (1)...(19): siRNA sense strand
ggaccauccuugcaaacau

SEQ ID NO: 888237 - RNA, 19 nt, Homo sapiens
  misc_RNA (1)...(19): siRNA sense strand
ucagcaauguuguuauguu

SEQ ID NO: 888238 - RNA, 19 nt, Homo sapiens
  misc_RNA (1)...(19): siRNA sense strand
aaucagugguggaaccuaa

SEQ ID NO: 888239 - RNA, 19 nt, Homo sapiens
  misc_RNA (1)...(19): siRNA sense strand
gguggaaccuaacauagca

SEQ ID NO: 888240 - RNA, 19 nt, Homo sapiens
  misc_RNA (1)...(19): siRNA sense strand
gacaugcggcuuuguaguu

SEQ ID NO: 888241 - RNA, 19 nt, Homo sapiens
  misc_RNA (1)...(19): siRNA sense strand
gaugugcacugucuguuac

SEQ ID NO: 888242 - RNA, 19 nt, Homo sapiens
  misc_RNA (1)...(19): siRNA sense strand
gaaggacugggacacauau

SEQ ID NO: 888243 - RNA, 19 nt, Homo sapiens
  misc_RNA (1)...(19): siRNA sense strand
gcugagaacaucacuagug

SEQ ID NO: 888244 - RNA, 19 nt, Homo sapiens
  misc_RNA (1)...(19): siRNA sense strand
aaccuuacaugaacgcuuu

SEQ ID NO: 888245 - RNA, 19 nt, Homo sapiens
  misc_RNA (1)...(19): siRNA sense strand
ccgccuuacugcacuauuu

SEQ ID NO: 888246 - RNA, 19 nt, Homo sapiens
  misc_RNA (1)...(19): siRNA sense strand
ggucuggcucucacaguua

SEQ ID NO: 888247 - RNA, 19 nt, Homo sapiens
  misc_RNA (1)...(19): siRNA sense strand
gcugcaaccauacuacuaa

SEQ ID NO: 888248 - RNA, 19 nt, Homo sapiens
  misc_RNA (1)...(19): siRNA sense strand
gaacccaaugguguuauaa

SEQ ID NO: 888249 - RNA, 19 nt, Homo sapiens
  misc_RNA (1)...(19): siRNA sense strand
agaacccaaugguguuaua

SEQ ID NO: 888250 - RNA, 19 nt, Homo sapiens
  misc_RNA (1)...(19): siRNA sense strand
ccucggcauuucauucuuu

SEQ ID NO: 888251 - RNA, 19 nt, Homo sapiens
  misc_RNA (1)...(19): siRNA sense strand
ucccaaaucacuugacaua

SEQ ID NO: 888252 - RNA, 19 nt, Homo sapiens
  misc_RNA (1)...(19): siRNA sense strand
gcagguagaggaugucaca

SEQ ID NO: 888253 - RNA, 19 nt, Homo sapiens
  misc_RNA (1)...(19): siRNA sense strand
ugccgugccuggaaccuua

SEQ ID NO: 888254 - RNA, 19 nt, Homo sapiens
  misc_RNA (1)...(19): siRNA sense strand
cgaaggacugggacacaua

SEQ ID NO: 888255 - RNA, 19 nt, Homo sapiens
  misc_RNA (1)...(19): siRNA sense strand
gcaaaacugaugaaaauga

SEQ ID NO: 888256 - RNA, 19 nt, Homo sapiens
  misc_RNA (1)...(19): siRNA sense strand
caacgcuuauugagcaaau

SEQ ID NO: 888257 - RNA, 19 nt, Homo sapiens
  misc_RNA (1)...(19): siRNA sense strand
ucaaagaguugcugcuacu

SEQ ID NO: 888258 - RNA, 19 nt, Homo sapiens
  misc_RNA (1)...(19): siRNA sense strand
gaucgucuucagcuacaua

SEQ ID NO: 888259 - RNA, 19 nt, Homo sapiens
  misc_RNA (1)...(19): siRNA sense strand
uggaaaggacugagaugua

SEQ ID NO: 888260 - RNA, 19 nt, Homo sapiens
  misc_RNA (1)...(19): siRNA sense strand
caaccuccucuuuguguuu

SEQ ID NO: 888261 - RNA, 19 nt, Homo sapiens
  misc_RNA (1)...(19): siRNA sense strand
ggaggauugugaucaggau

SEQ ID NO: 888262 - RNA, 19 nt, Homo sapiens
  misc_RNA (1)...(19): siRNA sense strand
gaugcuaguuaaugaugau

SEQ ID NO: 888263 - RNA, 19 nt, Homo sapiens
  misc_RNA (1)...(19): siRNA sense strand
caauaucccaaaucacuug

SEQ ID NO: 888264 - RNA, 19 nt, Homo sapiens
  misc_RNA (1)...(19): siRNA sense strand
gaggcugcguguaaagaug

SEQ ID NO: 888265 - RNA, 19 nt, Homo sapiens
  misc_RNA (1)...(19): siRNA sense strand
ggccgaggcugcguguaaa

SEQ ID NO: 888266 - RNA, 19 nt, Homo sapiens
  misc_RNA (1)...(19): siRNA sense strand
cagugggaguuauuuauuc

SEQ ID NO: 888267 - RNA, 19 nt, Homo sapiens
  misc_RNA (1)...(19): siRNA sense strand
uagcaguucucuaguuucu

SEQ ID NO: 888268 - RNA, 19 nt, Homo sapiens
  misc_RNA (1)...(19): siRNA sense strand
cgaucaaagugcuguggaa

SEQ ID NO: 888269 - RNA, 19 nt, Homo sapiens
  misc_RNA (1)...(19): siRNA sense strand
ccagaacccaaugguguua

SEQ ID NO: 888270 - RNA, 19 nt, Homo sapiens
  misc_RNA (1)...(19): siRNA sense strand
gucaaucugugcauaucaa

SEQ ID NO: 888271 - RNA, 19 nt, Homo sapiens
  misc_RNA (1)...(19): siRNA sense strand
ugacauauuauccaacguu

SEQ ID NO: 888272 - RNA, 19 nt, Homo sapiens
  misc_RNA (1)...(19): siRNA sense strand
caugcggcuuuguaguuua

SEQ ID NO: 888273 - RNA, 19 nt, Homo sapiens
  misc_RNA (1)...(19): siRNA sense strand
auucaacacuuccagaaau

SEQ ID NO: 888274 - RNA, 19 nt, Homo sapiens
  misc_RNA (1)...(19): siRNA sense strand
ugauguugcuaucgucuau

SEQ ID NO: 888275 - RNA, 19 nt, Homo sapiens
  misc_RNA (1)...(19): siRNA sense strand
gauucuagcauaccugaug

SEQ ID NO: 888276 - RNA, 19 nt, Homo sapiens
  misc_RNA (1)...(19): siRNA sense strand
gcccuuacaacgcuuauug

SEQ ID NO: 888277 - RNA, 19 nt, Homo sapiens
  misc_RNA (1)...(19): siRNA sense strand
uggcaaggauacuccaaau

SEQ ID NO: 888278 - RNA, 19 nt, Homo sapiens
  misc_RNA (1)...(19): siRNA sense strand
ggaaaccucuccgaguacu

SEQ ID NO: 888279 - RNA, 19 nt, Homo sapiens
  misc_RNA (1)...(19): siRNA sense strand
acaugcggcuuuguaguuu

SEQ ID NO: 888280 - RNA, 19 nt, Homo sapiens
  misc_RNA (1)...(19): siRNA sense strand
uaacccagaugcacagacu

SEQ ID NO: 888281 - RNA, 19 nt, Homo sapiens
  misc_RNA (1)...(19): siRNA sense strand
ugagauguacaauugcuaa

SEQ ID NO: 888282 - RNA, 19 nt, Homo sapiens
  misc_RNA (1)...(19): siRNA sense strand
gaaaaucuacuuccucauc

SEQ ID NO: 888283 - RNA, 19 nt, Homo sapiens
  misc_RNA (1)...(19): siRNA sense strand
ugugcagucucucucuaua

SEQ ID NO: 888284 - RNA, 19 nt, Homo sapiens
  misc_RNA (1)...(19): siRNA sense strand
cauaccugaugcuaguuaa

SEQ ID NO: 888285 - RNA, 19 nt, Homo sapiens
  misc_RNA (1)...(19): siRNA sense strand
ggagaaggaucuuauaaau

SEQ ID NO: 888286 - RNA, 19 nt, Homo sapiens
  misc_RNA (1)...(19): siRNA sense strand
ggucauauuucaucccuua

SEQ ID NO: 888287 - RNA, 19 nt, Homo sapiens
  misc_RNA (1)...(19): siRNA sense strand
gggagaagcuuagguuuaa

SEQ ID NO: 888288 - RNA, 19 nt, Homo sapiens
  misc_RNA (1)...(19): siRNA sense strand
ggaagagccuuuggucaua

SEQ ID NO: 888289 - RNA, 19 nt, Homo sapiens
  misc_RNA (1)...(19): siRNA sense strand
agagaaaccuuacaaaugu

SEQ ID NO: 888290 - RNA, 19 nt, Homo sapiens
  misc_RNA (1)...(19): siRNA sense strand
gagagaaaccuuacaaaug

SEQ ID NO: 888291 - RNA, 19 nt, Homo sapiens
  misc_RNA (1)...(19): siRNA sense strand
uaagaucaguccuuguuaa

SEQ ID NO: 888292 - RNA, 19 nt, Homo sapiens
  misc_RNA (1)...(19): siRNA sense strand
uagcagagauuauaaaugg

SEQ ID NO: 888293 - RNA, 19 nt, Homo sapiens
  misc_RNA (1)...(19): siRNA sense strand
cauacugcaucccuuauua

SEQ ID NO: 888294 - RNA, 19 nt, Homo sapiens
  misc_RNA (1)...(19): siRNA sense strand
gagagaaacccuacaaaug

SEQ ID NO: 888295 - RNA, 19 nt, Homo sapiens
  misc_RNA (1)...(19): siRNA sense strand
gagagaaacccuacaaaug

SEQ ID NO: 888296 - RNA, 19 nt, Homo sapiens
  misc_RNA (1)...(19): siRNA sense strand
ggucacacuucaucccuua

SEQ ID NO: 888297 - RNA, 19 nt, Homo sapiens
  misc_RNA (1)...(19): siRNA sense strand
ggagagaaaccuuacaaau

SEQ ID NO: 888298 - RNA, 19 nt, Homo sapiens
  misc_RNA (1)...(19): siRNA sense strand
gagagacaccugaaacaaa

SEQ ID NO: 888299 - RNA, 19 nt, Homo sapiens
  misc_RNA (1)...(19): siRNA sense strand
gaagagccuuuggucauau

SEQ ID NO: 888300 - RNA, 19 nt, Homo sapiens
  misc_RNA (1)...(19): siRNA sense strand
caucacucauugugcauua

SEQ ID NO: 888301 - RNA, 19 nt, Homo sapiens
  misc_RNA (1)...(19): siRNA sense strand
ggagagaaacccuacaaau

SEQ ID NO: 888302 - RNA, 19 nt, Homo sapiens
  misc_RNA (1)...(19): siRNA sense strand
ggagagaaacccuacaaau

SEQ ID NO: 888303 - RNA, 19 nt, Homo sapiens
  misc_RNA (1)...(19): siRNA sense strand
agagacaccugaaacaaau

SEQ ID NO: 888304 - RNA, 19 nt, Homo sapiens
  misc_RNA (1)...(19): siRNA sense strand
guucaucucucacucaaca

SEQ ID NO: 888305 - RNA, 19 nt, Homo sapiens
  misc_RNA (1)...(19): siRNA sense strand
gagaaggaucuuauaaaug

SEQ ID NO: 888306 - RNA, 19 nt, Homo sapiens
  misc_RNA (1)...(19): siRNA sense strand
gggagaaggaucuuauaaa

SEQ ID NO: 888307 - RNA, 19 nt, Homo sapiens
  misc_RNA (1)...(19): siRNA sense strand
gaucaguccuuguuaacca

SEQ ID NO: 888308 - RNA, 19 nt, Homo sapiens
  misc_RNA (1)...(19): siRNA sense strand
gcagagauuauaaauggaa

SEQ ID NO: 888309 - RNA, 19 nt, Homo sapiens
  misc_RNA (1)...(19): siRNA sense strand
agagaaacccuacaaaugu

SEQ ID NO: 888310 - RNA, 19 nt, Homo sapiens
  misc_RNA (1)...(19): siRNA sense strand
ggacgagccuuuggucaca

SEQ ID NO: 888311 - RNA, 19 nt, Homo sapiens
  misc_RNA (1)...(19): siRNA sense strand
agagaaacccuacaaaugu

SEQ ID NO: 888312 - RNA, 19 nt, Homo sapiens
  misc_RNA (1)...(19): siRNA sense strand
gagaaaagccguaugaaug

SEQ ID NO: 888313 - RNA, 19 nt, Homo sapiens
  misc_RNA (1)...(19): siRNA sense strand
gcucauacugcaucccuua

SEQ ID NO: 888314 - RNA, 19 nt, Homo sapiens
  misc_RNA (1)...(19): siRNA sense strand
gagaaaagcccuaugaaug

SEQ ID NO: 888315 - RNA, 19 nt, Homo sapiens
  misc_RNA (1)...(19): siRNA sense strand
gagaaaagcccuaugaaug

SEQ ID NO: 888316 - RNA, 19 nt, Homo sapiens
  misc_RNA (1)...(19): siRNA sense strand
cacacuucaucccuuauua

SEQ ID NO: 888317 - RNA, 19 nt, Homo sapiens
  misc_RNA (1)...(19): siRNA sense strand
cugcaucccuuauuaaaca

SEQ ID NO: 888318 - RNA, 19 nt, Homo sapiens
  misc_RNA (1)...(19): siRNA sense strand
cauugugcauuacagauuu

SEQ ID NO: 888319 - RNA, 19 nt, Homo sapiens
  misc_RNA (1)...(19): siRNA sense strand
ugaaacaaaugucaaccau

SEQ ID NO: 888320 - RNA, 19 nt, Homo sapiens
  misc_RNA (1)...(19): siRNA sense strand
agccagagcucaucacuca

SEQ ID NO: 888321 - RNA, 19 nt, Homo sapiens
  misc_RNA (1)...(19): siRNA sense strand
ucagagaacccacccagaa

SEQ ID NO: 888322 - RNA, 19 nt, Homo sapiens
  misc_RNA (1)...(19): siRNA sense strand
caacaggagcccacucaga

SEQ ID NO: 888323 - RNA, 19 nt, Homo sapiens
  misc_RNA (1)...(19): siRNA sense strand
guucugcacuauagauuuc

SEQ ID NO: 888324 - RNA, 19 nt, Homo sapiens
  misc_RNA (1)...(19): siRNA sense strand
ggagagacaccugaaacaa

SEQ ID NO: 888325 - RNA, 19 nt, Homo sapiens
  misc_RNA (1)...(19): siRNA sense strand
gugcauuacagauuucaua

SEQ ID NO: 888326 - RNA, 19 nt, Homo sapiens
  misc_RNA (1)...(19): siRNA sense strand
ucacucaacauuacagauu

SEQ ID NO: 888327 - RNA, 19 nt, Homo sapiens
  misc_RNA (1)...(19): siRNA sense strand
cauuacagauuucauacug

SEQ ID NO: 888328 - RNA, 19 nt, Homo sapiens
  misc_RNA (1)...(19): siRNA sense strand
ggaagagaaggucuaaauc

SEQ ID NO: 888329 - RNA, 19 nt, Homo sapiens
  misc_RNA (1)...(19): siRNA sense strand
gaagagaaggucuaaaucc

SEQ ID NO: 888330 - RNA, 19 nt, Homo sapiens
  misc_RNA (1)...(19): siRNA sense strand
ccagagcucaucacucauu

SEQ ID NO: 888331 - RNA, 19 nt, Homo sapiens
  misc_RNA (1)...(19): siRNA sense strand
gggaggugaugcuggagaa

SEQ ID NO: 888332 - RNA, 19 nt, Homo sapiens
  misc_RNA (1)...(19): siRNA sense strand
ugucaaccauucacaaauc

SEQ ID NO: 888333 - RNA, 19 nt, Homo sapiens
  misc_RNA (1)...(19): siRNA sense strand
caacauuacagauuucaca

SEQ ID NO: 888334 - RNA, 19 nt, Homo sapiens
  misc_RNA (1)...(19): siRNA sense strand
caucaaagaacucauacug

SEQ ID NO: 888335 - RNA, 19 nt, Homo sapiens
  misc_RNA (1)...(19): siRNA sense strand
aggaaucaaugccaaguug

SEQ ID NO: 888336 - RNA, 19 nt, Homo sapiens
  misc_RNA (1)...(19): siRNA sense strand
ugggagaagcuuagguuua

SEQ ID NO: 888337 - RNA, 19 nt, Homo sapiens
  misc_RNA (1)...(19): siRNA sense strand
cagagaacccacccagaaa

SEQ ID NO: 888338 - RNA, 19 nt, Homo sapiens
  misc_RNA (1)...(19): siRNA sense strand
gaaggaucuuauaaaugug

SEQ ID NO: 888339 - RNA, 19 nt, Homo sapiens
  misc_RNA (1)...(19): siRNA sense strand
gaauucaggcagacuuuag

SEQ ID NO: 888340 - RNA, 19 nt, Homo sapiens
  misc_RNA (1)...(19): siRNA sense strand
cacucaacauuacagauuu

SEQ ID NO: 888341 - RNA, 19 nt, Homo sapiens
  misc_RNA (1)...(19): siRNA sense strand
uuagagaugcagcagauaa

SEQ ID NO: 888342 - RNA, 19 nt, Homo sapiens
  misc_RNA (1)...(19): siRNA sense strand
uggaagagaaggucuaaau

SEQ ID NO: 888343 - RNA, 19 nt, Homo sapiens
  misc_RNA (1)...(19): siRNA sense strand
caucagaggacucauacug

SEQ ID NO: 888344 - RNA, 19 nt, Homo sapiens
  misc_RNA (1)...(19): siRNA sense strand
ggaauggauuugggagaag

SEQ ID NO: 888345 - RNA, 19 nt, Homo sapiens
  misc_RNA (1)...(19): siRNA sense strand
uggaauggauuugggagaa

SEQ ID NO: 888346 - RNA, 19 nt, Homo sapiens
  misc_RNA (1)...(19): siRNA sense strand
ccaccacccuuagcagaga

SEQ ID NO: 888347 - RNA, 19 nt, Homo sapiens
  misc_RNA (1)...(19): siRNA sense strand
cgguugugauggccaguua

SEQ ID NO: 888348 - RNA, 19 nt, Homo sapiens
  misc_RNA (1)...(19): siRNA sense strand
gaaggucuaaauccaagga

SEQ ID NO: 888349 - RNA, 19 nt, Homo sapiens
  misc_RNA (1)...(19): siRNA sense strand
gagaagucaugcuggaaaa

SEQ ID NO: 888350 - RNA, 19 nt, Homo sapiens
  misc_RNA (1)...(19): siRNA sense strand
aaacaucagagaagucaug

SEQ ID NO: 888351 - RNA, 19 nt, Homo sapiens
  misc_RNA (1)...(19): siRNA sense strand
gagcucaucacucauugug

SEQ ID NO: 888352 - RNA, 19 nt, Homo sapiens
  misc_RNA (1)...(19): siRNA sense strand
acacuucaucccuuauuaa

SEQ ID NO: 888353 - RNA, 19 nt, Homo sapiens
  misc_RNA (1)...(19): siRNA sense strand
agauguggcuguggaauuc

SEQ ID NO: 888354 - RNA, 19 nt, Homo sapiens
  misc_RNA (1)...(19): siRNA sense strand
aagagaaggucuaaaucca

SEQ ID NO: 888355 - RNA, 19 nt, Homo sapiens
  misc_RNA (1)...(19): siRNA sense strand
cugcaguucucgaaguuga

SEQ ID NO: 888356 - RNA, 19 nt, Homo sapiens
  misc_RNA (1)...(19): siRNA sense strand
caucucucacucaacauua

SEQ ID NO: 888357 - RNA, 19 nt, Homo sapiens
  misc_RNA (1)...(19): siRNA sense strand
ucuaguauccaaaccauau

SEQ ID NO: 888358 - RNA, 19 nt, Homo sapiens
  misc_RNA (1)...(19): siRNA sense strand
gaauguggacgagccuuug

SEQ ID NO: 888359 - RNA, 19 nt, Homo sapiens
  misc_RNA (1)...(19): siRNA sense strand
gaaugugggagaaccuuca

SEQ ID NO: 888360 - RNA, 19 nt, Homo sapiens
  misc_RNA (1)...(19): siRNA sense strand
gcaguucucgaaguugaaa

SEQ ID NO: 888361 - RNA, 19 nt, Homo sapiens
  misc_RNA (1)...(19): siRNA sense strand
aagcaucagaggacucaua

SEQ ID NO: 888362 - RNA, 19 nt, Homo sapiens
  misc_RNA (1)...(19): siRNA sense strand
cauaugugaucugccaguu

SEQ ID NO: 888363 - RNA, 19 nt, Homo sapiens
  misc_RNA (1)...(19): siRNA sense strand
gaaaagcccuaugaaugca

SEQ ID NO: 888364 - RNA, 19 nt, Homo sapiens
  misc_RNA (1)...(19): siRNA sense strand
uuaagaucaguccuuguua

SEQ ID NO: 888365 - RNA, 19 nt, Homo sapiens
  misc_RNA (1)...(19): siRNA sense strand
ccagguaguaucaguggaa

SEQ ID NO: 888366 - RNA, 19 nt, Homo sapiens
  misc_RNA (1)...(19): siRNA sense strand
cagagcucaucacucauug

SEQ ID NO: 888367 - RNA, 19 nt, Homo sapiens
  misc_RNA (1)...(19): siRNA sense strand
ggagaaaagcccuaugaau

SEQ ID NO: 888368 - RNA, 19 nt, Homo sapiens
  misc_RNA (1)...(19): siRNA sense strand
ggagaaaagcccuaugaau

SEQ ID NO: 888369 - RNA, 19 nt, Homo sapiens
  misc_RNA (1)...(19): siRNA sense strand
ggagaaaagccguaugaau

SEQ ID NO: 888370 - RNA, 19 nt, Homo sapiens
  misc_RNA (1)...(19): siRNA sense strand
ggucuaaauccaaggaauc

SEQ ID NO: 888371 - RNA, 19 nt, Homo sapiens
  misc_RNA (1)...(19): siRNA sense strand
cagaauucaggcagacuuu

SEQ ID NO: 888372 - RNA, 19 nt, Homo sapiens
  misc_RNA (1)...(19): siRNA sense strand
uagagaugcagcagauaaa

SEQ ID NO: 888373 - RNA, 19 nt, Homo sapiens
  misc_RNA (1)...(19): siRNA sense strand
uucaagaugugcugcaguu

SEQ ID NO: 888374 - RNA, 19 nt, Homo sapiens
  misc_RNA (1)...(19): siRNA sense strand
cuaaauccaaggaaucaau

SEQ ID NO: 888375 - RNA, 19 nt, Homo sapiens
  misc_RNA (1)...(19): siRNA sense strand
agagaagucaugcuggaaa

SEQ ID NO: 888376 - RNA, 19 nt, Homo sapiens
  misc_RNA (1)...(19): siRNA sense strand
ccacucagacuggaagaga

SEQ ID NO: 888377 - RNA, 19 nt, Homo sapiens
  misc_RNA (1)...(19): siRNA sense strand
gaggacucauacuggagaa

SEQ ID NO: 888378 - RNA, 19 nt, Homo sapiens
  misc_RNA (1)...(19): siRNA sense strand
gaguucgucucuuguucug

SEQ ID NO: 888379 - RNA, 19 nt, Homo sapiens
  misc_RNA (1)...(19): siRNA sense strand
ugggagaaggaucuuauaa

SEQ ID NO: 888380 - RNA, 19 nt, Homo sapiens
  misc_RNA (1)...(19): siRNA sense strand
uuuaagaucaguccuuguu

SEQ ID NO: 888381 - RNA, 19 nt, Homo sapiens
  misc_RNA (1)...(19): siRNA sense strand
ucacacuucaucccuuauu

SEQ ID NO: 888382 - RNA, 19 nt, Homo sapiens
  misc_RNA (1)...(19): siRNA sense strand
ucaggaacuuggccauucu

SEQ ID NO: 888383 - RNA, 19 nt, Homo sapiens
  misc_RNA (1)...(19): siRNA sense strand
gaacucauacuggagaaaa

SEQ ID NO: 888384 - RNA, 19 nt, Homo sapiens
  misc_RNA (1)...(19): siRNA sense strand
cuggagaacuucaggaacu

SEQ ID NO: 888385 - RNA, 19 nt, Homo sapiens
  misc_RNA (1)...(19): siRNA sense strand
ccaggcagaucaugaacua

SEQ ID NO: 888386 - RNA, 19 nt, Homo sapiens
  misc_RNA (1)...(19): siRNA sense strand
ccgaggagcuggcugagaa

SEQ ID NO: 888387 - RNA, 19 nt, Homo sapiens
  misc_RNA (1)...(19): siRNA sense strand
gcugcucacucucuacuuu

SEQ ID NO: 888388 - RNA, 19 nt, Homo sapiens
  misc_RNA (1)...(19): siRNA sense strand
gaucagaguuuggccuuuc

SEQ ID NO: 888389 - RNA, 19 nt, Homo sapiens
  misc_RNA (1)...(19): siRNA sense strand
guagagggauuaugacaac

SEQ ID NO: 888390 - RNA, 19 nt, Homo sapiens
  misc_RNA (1)...(19): siRNA sense strand
ggacacaggccuugaagag

SEQ ID NO: 888391 - RNA, 19 nt, Homo sapiens
  misc_RNA (1)...(19): siRNA sense strand
ccaggcggcugaggaguuu

SEQ ID NO: 888392 - RNA, 19 nt, Homo sapiens
  misc_RNA (1)...(19): siRNA sense strand
caacgccgauggccauaag

SEQ ID NO: 888393 - RNA, 19 nt, Homo sapiens
  misc_RNA (1)...(19): siRNA sense strand
aguuguaccuggagaauga

SEQ ID NO: 888394 - RNA, 19 nt, Homo sapiens
  misc_RNA (1)...(19): siRNA sense strand
caggguagagggauuauga

SEQ ID NO: 888395 - RNA, 19 nt, Homo sapiens
  misc_RNA (1)...(19): siRNA sense strand
ggagauggugcuauugaug

SEQ ID NO: 888396 - RNA, 19 nt, Homo sapiens
  misc_RNA (1)...(19): siRNA sense strand
ggaaauugccauggacuca

SEQ ID NO: 888397 - RNA, 19 nt, Homo sapiens
  misc_RNA (1)...(19): siRNA sense strand
agcauuagcugccaugugu

SEQ ID NO: 888398 - RNA, 19 nt, Homo sapiens
  misc_RNA (1)...(19): siRNA sense strand
ccacuugaaggaccggaua

SEQ ID NO: 888399 - RNA, 19 nt, Homo sapiens
  misc_RNA (1)...(19): siRNA sense strand
ggaucagaguuuggccuuu

SEQ ID NO: 888400 - RNA, 19 nt, Homo sapiens
  misc_RNA (1)...(19): siRNA sense strand
ggacaggcagagcaaguca

SEQ ID NO: 888401 - RNA, 19 nt, Homo sapiens
  misc_RNA (1)...(19): siRNA sense strand
gaacaugaggggcugguaa

SEQ ID NO: 888402 - RNA, 19 nt, Homo sapiens
  misc_RNA (1)...(19): siRNA sense strand
gugcagggacugugacaau

SEQ ID NO: 888403 - RNA, 19 nt, Homo sapiens
  misc_RNA (1)...(19): siRNA sense strand
guggagauggugcuauuga

SEQ ID NO: 888404 - RNA, 19 nt, Homo sapiens
  misc_RNA (1)...(19): siRNA sense strand
aaugggcucuggcgaggaa

SEQ ID NO: 888405 - RNA, 19 nt, Homo sapiens
  misc_RNA (1)...(19): siRNA sense strand
ugguggagauggugcuauu

SEQ ID NO: 888406 - RNA, 19 nt, Homo sapiens
  misc_RNA (1)...(19): siRNA sense strand
gguagagggauuaugacaa

SEQ ID NO: 888407 - RNA, 19 nt, Homo sapiens
  misc_RNA (1)...(19): siRNA sense strand
ucaguuccagugugucuuu

SEQ ID NO: 888408 - RNA, 19 nt, Homo sapiens
  misc_RNA (1)...(19): siRNA sense strand
gugcaggguagagggauua

SEQ ID NO: 888409 - RNA, 19 nt, Homo sapiens
  misc_RNA (1)...(19): siRNA sense strand
gggaagggcguguauuucg

SEQ ID NO: 888410 - RNA, 19 nt, Homo sapiens
  misc_RNA (1)...(19): siRNA sense strand
gcucuaccaugaggaccuu

SEQ ID NO: 888411 - RNA, 19 nt, Homo sapiens
  misc_RNA (1)...(19): siRNA sense strand
aacaggcucuggccaggaa

SEQ ID NO: 888412 - RNA, 19 nt, Homo sapiens
  misc_RNA (1)...(19): siRNA sense strand
gcagggacugugacaaugg

SEQ ID NO: 888413 - RNA, 19 nt, Homo sapiens
  misc_RNA (1)...(19): siRNA sense strand
ggaggagguccgagaacug

SEQ ID NO: 888414 - RNA, 19 nt, Homo sapiens
  misc_RNA (1)...(19): siRNA sense strand
uccugcagcucuaccauga

SEQ ID NO: 888415 - RNA, 19 nt, Homo sapiens
  misc_RNA (1)...(19): siRNA sense strand
gcccaguggagaccucuaa

SEQ ID NO: 888416 - RNA, 19 nt, Homo sapiens
  misc_RNA (1)...(19): siRNA sense strand
ggugcugacuggcgacuac

SEQ ID NO: 888417 - RNA, 19 nt, Homo sapiens
  misc_RNA (1)...(19): siRNA sense strand
ggaguuguaccuggagaau

SEQ ID NO: 888418 - RNA, 19 nt, Homo sapiens
  misc_RNA (1)...(19): siRNA sense strand
cagcaucuucgucaucuuc

SEQ ID NO: 888419 - RNA, 19 nt, Homo sapiens
  misc_RNA (1)...(19): siRNA sense strand
gcggugccauggugugagu

SEQ ID NO: 888420 - RNA, 19 nt, Homo sapiens
  misc_RNA (1)...(19): siRNA sense strand
gucgcucucuugccacuug

SEQ ID NO: 888421 - RNA, 19 nt, Homo sapiens
  misc_RNA (1)...(19): siRNA sense strand
aggagggccugguggaaau

SEQ ID NO: 888422 - RNA, 19 nt, Homo sapiens
  misc_RNA (1)...(19): siRNA sense strand
gagcggugccaugguguga

SEQ ID NO: 888423 - RNA, 19 nt, Homo sapiens
  misc_RNA (1)...(19): siRNA sense strand
acgggaagggcguguauuu

SEQ ID NO: 888424 - RNA, 19 nt, Homo sapiens
  misc_RNA (1)...(19): siRNA sense strand
uggaggagcaggcccagaa

SEQ ID NO: 888425 - RNA, 19 nt, Homo sapiens
  misc_RNA (1)...(19): siRNA sense strand
ggacucaccagagcaagag

SEQ ID NO: 888426 - RNA, 19 nt, Homo sapiens
  misc_RNA (1)...(19): siRNA sense strand
cauuagcugccauguguug

SEQ ID NO: 888427 - RNA, 19 nt, Homo sapiens
  misc_RNA (1)...(19): siRNA sense strand
ugaaggaccggauaugacu

SEQ ID NO: 888428 - RNA, 19 nt, Homo sapiens
  misc_RNA (1)...(19): siRNA sense strand
ggcagaucaugaacuacau

SEQ ID NO: 888429 - RNA, 19 nt, Homo sapiens
  misc_RNA (1)...(19): siRNA sense strand
ggaggagcaggcccagaau

SEQ ID NO: 888430 - RNA, 19 nt, Homo sapiens
  misc_RNA (1)...(19): siRNA sense strand
guggugcacucggccuuug

SEQ ID NO: 888431 - RNA, 19 nt, Homo sapiens
  misc_RNA (1)...(19): siRNA sense strand
ugcuguugcuggaguugua

SEQ ID NO: 888432 - RNA, 19 nt, Homo sapiens
  misc_RNA (1)...(19): siRNA sense strand
cucacucucuacuuugaaa

SEQ ID NO: 888433 - RNA, 19 nt, Homo sapiens
  misc_RNA (1)...(19): siRNA sense strand
ggucuuggcccaggcagau

SEQ ID NO: 888434 - RNA, 19 nt, Homo sapiens
  misc_RNA (1)...(19): siRNA sense strand
gccuagggcuaccaagcau

SEQ ID NO: 888435 - RNA, 19 nt, Homo sapiens
  misc_RNA (1)...(19): siRNA sense strand
agauggugcuauugaugga

SEQ ID NO: 888436 - RNA, 19 nt, Homo sapiens
  misc_RNA (1)...(19): siRNA sense strand
uggagauggugcuauugau

SEQ ID NO: 888437 - RNA, 19 nt, Homo sapiens
  misc_RNA (1)...(19): siRNA sense strand
ucaacgagcuggcggaguu

SEQ ID NO: 888438 - RNA, 19 nt, Homo sapiens
  misc_RNA (1)...(19): siRNA sense strand
gcucacugguuagccauaa

SEQ ID NO: 888439 - RNA, 19 nt, Homo sapiens
  misc_RNA (1)...(19): siRNA sense strand
ugagcaacgugcacaaucu

SEQ ID NO: 888440 - RNA, 19 nt, Homo sapiens
  misc_RNA (1)...(19): siRNA sense strand
gcaccuguuugcgcucaug

SEQ ID NO: 888441 - RNA, 19 nt, Homo sapiens
  misc_RNA (1)...(19): siRNA sense strand
cgucuucgccguccacuuc

SEQ ID NO: 888442 - RNA, 19 nt, Homo sapiens
  misc_RNA (1)...(19): siRNA sense strand
ggaguuugcccgcuuacag

SEQ ID NO: 888443 - RNA, 19 nt, Homo sapiens
  misc_RNA (1)...(19): siRNA sense strand
gcaacgugcacaaucucaa

SEQ ID NO: 888444 - RNA, 19 nt, Homo sapiens
  misc_RNA (1)...(19): siRNA sense strand
uucuaccgcucacugguua

SEQ ID NO: 888445 - RNA, 19 nt, Homo sapiens
  misc_RNA (1)...(19): siRNA sense strand
gcccuucggccugaucuuu

SEQ ID NO: 888446 - RNA, 19 nt, Homo sapiens
  misc_RNA (1)...(19): siRNA sense strand
ucaccuacccggacuggau

SEQ ID NO: 888447 - RNA, 19 nt, Homo sapiens
  misc_RNA (1)...(19): siRNA sense strand
ccuucggccugaucuuuau

SEQ ID NO: 888448 - RNA, 19 nt, Homo sapiens
  misc_RNA (1)...(19): siRNA sense strand
ucaacgagcacuccaugca

SEQ ID NO: 888449 - RNA, 19 nt, Homo sapiens
  misc_RNA (1)...(19): siRNA sense strand
ccugaucuuuaucgucuuc

SEQ ID NO: 888450 - RNA, 19 nt, Homo sapiens
  misc_RNA (1)...(19): siRNA sense strand
ucacugguuagccauaaga

SEQ ID NO: 888451 - RNA, 19 nt, Homo sapiens
  misc_RNA (1)...(19): siRNA sense strand
caacgagcuggcggaguuu

SEQ ID NO: 888452 - RNA, 19 nt, Homo sapiens
  misc_RNA (1)...(19): siRNA sense strand
gcucugcugggucaaguuc

SEQ ID NO: 888453 - RNA, 19 nt, Homo sapiens
  misc_RNA (1)...(19): siRNA sense strand
ggacgcugaccacgacuac

SEQ ID NO: 888454 - RNA, 19 nt, Homo sapiens
  misc_RNA (1)...(19): siRNA sense strand
cgccucaacucugcuguua

SEQ ID NO: 888455 - RNA, 19 nt, Homo sapiens
  misc_RNA (1)...(19): siRNA sense strand
ggagggaggaggcggaaau

SEQ ID NO: 888456 - RNA, 19 nt, Homo sapiens
  misc_RNA (1)...(19): siRNA sense strand
ccaccagcauccuccaaag

SEQ ID NO: 888457 - RNA, 19 nt, Homo sapiens
  misc_RNA (1)...(19): siRNA sense strand
ggauagccagggacaggaa

SEQ ID NO: 888458 - RNA, 19 nt, Homo sapiens
  misc_RNA (1)...(19): siRNA sense strand
ccuagccgguuuccauucu

SEQ ID NO: 888459 - RNA, 19 nt, Homo sapiens
  misc_RNA (1)...(19): siRNA sense strand
uagccgguuuccauucuuc

SEQ ID NO: 888460 - RNA, 19 nt, Homo sapiens
  misc_RNA (1)...(19): siRNA sense strand
gaacaaagauaagccguau

SEQ ID NO: 888461 - RNA, 19 nt, Homo sapiens
  misc_RNA (1)...(19): siRNA sense strand
gagaaagugccaauaaaua

SEQ ID NO: 888462 - RNA, 19 nt, Homo sapiens
  misc_RNA (1)...(19): siRNA sense strand
gaacagaagcugcacagau

SEQ ID NO: 888463 - RNA, 19 nt, Homo sapiens
  misc_RNA (1)...(19): siRNA sense strand
caagagccuucuaaagauu

SEQ ID NO: 888464 - RNA, 19 nt, Homo sapiens
  misc_RNA (1)...(19): siRNA sense strand
ccaagagccuucuaaagau

SEQ ID NO: 888465 - RNA, 19 nt, Homo sapiens
  misc_RNA (1)...(19): siRNA sense strand
gaugaugucuaccauguuc

SEQ ID NO: 888466 - RNA, 19 nt, Homo sapiens
  misc_RNA (1)...(19): siRNA sense strand
gugagaaagugccaauaaa

SEQ ID NO: 888467 - RNA, 19 nt, Homo sapiens
  misc_RNA (1)...(19): siRNA sense strand
ggacgcugcuuuccaugga

SEQ ID NO: 888468 - RNA, 19 nt, Homo sapiens
  misc_RNA (1)...(19): siRNA sense strand
gggaucagcggucuuauug

SEQ ID NO: 888469 - RNA, 19 nt, Homo sapiens
  misc_RNA (1)...(19): siRNA sense strand
cagaugaugucuaccaugu

SEQ ID NO: 888470 - RNA, 19 nt, Homo sapiens
  misc_RNA (1)...(19): siRNA sense strand
ggaagccagucaaauacga

SEQ ID NO: 888471 - RNA, 19 nt, Homo sapiens
  misc_RNA (1)...(19): siRNA sense strand
gaucagcggucuuauugac

SEQ ID NO: 888472 - RNA, 19 nt, Homo sapiens
  misc_RNA (1)...(19): siRNA sense strand
gggcucuucuggacccuua

SEQ ID NO: 888473 - RNA, 19 nt, Homo sapiens
  misc_RNA (1)...(19): siRNA sense strand
aacagaagcugcacagaug

SEQ ID NO: 888474 - RNA, 19 nt, Homo sapiens
  misc_RNA (1)...(19): siRNA sense strand
gaaagugccaauaaauaca

SEQ ID NO: 888475 - RNA, 19 nt, Homo sapiens
  misc_RNA (1)...(19): siRNA sense strand
agacaucaguguuaagauc

SEQ ID NO: 888476 - RNA, 19 nt, Homo sapiens
  misc_RNA (1)...(19): siRNA sense strand
uccaagagccuucuaaaga

SEQ ID NO: 888477 - RNA, 19 nt, Homo sapiens
  misc_RNA (1)...(19): siRNA sense strand
gcccgagacaucaguguua

SEQ ID NO: 888478 - RNA, 19 nt, Homo sapiens
  misc_RNA (1)...(19): siRNA sense strand
ggucuugagccuacuguuu

SEQ ID NO: 888479 - RNA, 19 nt, Homo sapiens
  misc_RNA (1)...(19): siRNA sense strand
cguccucgcuggagccuuu

SEQ ID NO: 888480 - RNA, 19 nt, Homo sapiens
  misc_RNA (1)...(19): siRNA sense strand
gucuugagccuacuguuua

SEQ ID NO: 888481 - RNA, 19 nt, Homo sapiens
  misc_RNA (1)...(19): siRNA sense strand
ccaacguucugucuucaau

SEQ ID NO: 888482 - RNA, 19 nt, Homo sapiens
  misc_RNA (1)...(19): siRNA sense strand
ugagaaagugccaauaaau

SEQ ID NO: 888483 - RNA, 19 nt, Homo sapiens
  misc_RNA (1)...(19): siRNA sense strand
guagcccgcugcaucaugu

SEQ ID NO: 888484 - RNA, 19 nt, Homo sapiens
  misc_RNA (1)...(19): siRNA sense strand
cuuaaucucugccuucauc

SEQ ID NO: 888485 - RNA, 19 nt, Homo sapiens
  misc_RNA (1)...(19): siRNA sense strand
acgggaagccagucaaaua

SEQ ID NO: 888486 - RNA, 19 nt, Homo sapiens
  misc_RNA (1)...(19): siRNA sense strand
uggaguauauugaccacaa

SEQ ID NO: 888487 - RNA, 19 nt, Homo sapiens
  misc_RNA (1)...(19): siRNA sense strand
caucaguguuaagaucuuu

SEQ ID NO: 888488 - RNA, 19 nt, Homo sapiens
  misc_RNA (1)...(19): siRNA sense strand
ugugagaaagugccaauaa

SEQ ID NO: 888489 - RNA, 19 nt, Homo sapiens
  misc_RNA (1)...(19): siRNA sense strand
ccagcaacaucaucucagu

SEQ ID NO: 888490 - RNA, 19 nt, Homo sapiens
  misc_RNA (1)...(19): siRNA sense strand
acaagaagaggaagaagug

SEQ ID NO: 888491 - RNA, 19 nt, Homo sapiens
  misc_RNA (1)...(19): siRNA sense strand
ccaaugacaccaccauaca

SEQ ID NO: 888492 - RNA, 19 nt, Homo sapiens
  misc_RNA (1)...(19): siRNA sense strand
gggguacccuggaauauga

SEQ ID NO: 888493 - RNA, 19 nt, Homo sapiens
  misc_RNA (1)...(19): siRNA sense strand
cgcaaugcauacaucauga

SEQ ID NO: 888494 - RNA, 19 nt, Homo sapiens
  misc_RNA (1)...(19): siRNA sense strand
aaaccgcaaugcauacauc

SEQ ID NO: 888495 - RNA, 19 nt, Homo sapiens
  misc_RNA (1)...(19): siRNA sense strand
cgggucaucuuggaguaua

SEQ ID NO: 888496 - RNA, 19 nt, Homo sapiens
  misc_RNA (1)...(19): siRNA sense strand
aauccaacguucugucuuc

SEQ ID NO: 888497 - RNA, 19 nt, Homo sapiens
  misc_RNA (1)...(19): siRNA sense strand
cuacucaugcgaaacauug

SEQ ID NO: 888498 - RNA, 19 nt, Homo sapiens
  misc_RNA (1)...(19): siRNA sense strand
ucuucaaucugcaaaucua

SEQ ID NO: 888499 - RNA, 19 nt, Homo sapiens
  misc_RNA (1)...(19): siRNA sense strand
agccguaucuccuguacuu

SEQ ID NO: 888500 - RNA, 19 nt, Homo sapiens
  misc_RNA (1)...(19): siRNA sense strand
ggaguauauugaccacaag

SEQ ID NO: 888501 - RNA, 19 nt, Homo sapiens
  misc_RNA (1)...(19): siRNA sense strand
agaaagugccaauaaauac

SEQ ID NO: 888502 - RNA, 19 nt, Homo sapiens
  misc_RNA (1)...(19): siRNA sense strand
gagccuacuguuuaucuug

SEQ ID NO: 888503 - RNA, 19 nt, Homo sapiens
  misc_RNA (1)...(19): siRNA sense strand
cgagacaucaguguuaaga

SEQ ID NO: 888504 - RNA, 19 nt, Homo sapiens
  misc_RNA (1)...(19): siRNA sense strand
gaauaugacggugaucaca

SEQ ID NO: 888505 - RNA, 19 nt, Homo sapiens
  misc_RNA (1)...(19): siRNA sense strand
cggcagcggauucguauug

SEQ ID NO: 888506 - RNA, 19 nt, Homo sapiens
  misc_RNA (1)...(19): siRNA sense strand
gauuguggccugguuguau

SEQ ID NO: 888507 - RNA, 19 nt, Homo sapiens
  misc_RNA (1)...(19): siRNA sense strand
ccaucuacgggaagaauuu

SEQ ID NO: 888508 - RNA, 19 nt, Homo sapiens
  misc_RNA (1)...(19): siRNA sense strand
gcucugggcauccaacauc

SEQ ID NO: 888509 - RNA, 19 nt, Homo sapiens
  misc_RNA (1)...(19): siRNA sense strand
uuaccacacugggucauug

SEQ ID NO: 888510 - RNA, 19 nt, Homo sapiens
  misc_RNA (1)...(19): siRNA sense strand
gcugagaacggccuacagu

SEQ ID NO: 888511 - RNA, 19 nt, Homo sapiens
  misc_RNA (1)...(19): siRNA sense strand
caaauacgaccccuccuuu

SEQ ID NO: 888512 - RNA, 19 nt, Homo sapiens
  misc_RNA (1)...(19): siRNA sense strand
cccgagacaucaguguuaa

SEQ ID NO: 888513 - RNA, 19 nt, Homo sapiens
  misc_RNA (1)...(19): siRNA sense strand
ccagggaucaccaaugaca

SEQ ID NO: 888514 - RNA, 19 nt, Homo sapiens
  misc_RNA (1)...(19): siRNA sense strand
cuacugggccuuccacaag

SEQ ID NO: 888515 - RNA, 19 nt, Homo sapiens
  misc_RNA (1)...(19): siRNA sense strand
gcucuucauucuagguuac

SEQ ID NO: 888516 - RNA, 19 nt, Homo sapiens
  misc_RNA (1)...(19): siRNA sense strand
gcaaugcauacaucaugau

SEQ ID NO: 888517 - RNA, 19 nt, Homo sapiens
  misc_RNA (1)...(19): siRNA sense strand
gaccugcugcuguucuuug

SEQ ID NO: 888518 - RNA, 19 nt, Homo sapiens
  misc_RNA (1)...(19): siRNA sense strand
caucaugugcuguuucaag

SEQ ID NO: 888519 - RNA, 19 nt, Homo sapiens
  misc_RNA (1)...(19): siRNA sense strand
ccuacuacauguccaagag

SEQ ID NO: 888520 - RNA, 19 nt, Homo sapiens
  misc_RNA (1)...(19): siRNA sense strand
gcucugggacgcugcuuuc

SEQ ID NO: 888521 - RNA, 19 nt, Homo sapiens
  misc_RNA (1)...(19): siRNA sense strand
ccagggcuacucauccaaa

SEQ ID NO: 888522 - RNA, 19 nt, Homo sapiens
  misc_RNA (1)...(19): siRNA sense strand
ccgcaaugcauacaucaug

SEQ ID NO: 888523 - RNA, 19 nt, Homo sapiens
  misc_RNA (1)...(19): siRNA sense strand
cccaggacaucccuaccuu

SEQ ID NO: 888524 - RNA, 19 nt, Homo sapiens
  misc_RNA (1)...(19): siRNA sense strand
gacaacaagaagaggaaga

SEQ ID NO: 888525 - RNA, 19 nt, Homo sapiens
  misc_RNA (1)...(19): siRNA sense strand
cuaaagauucugggcaaga

SEQ ID NO: 888526 - RNA, 19 nt, Homo sapiens
  misc_RNA (1)...(19): siRNA sense strand
ccacggcccaccuugugaa

SEQ ID NO: 888527 - RNA, 19 nt, Homo sapiens
  misc_RNA (1)...(19): siRNA sense strand
caagaagaggaagaaguga

SEQ ID NO: 888528 - RNA, 19 nt, Homo sapiens
  misc_RNA (1)...(19): siRNA sense strand
ggauuguggccugguugua

SEQ ID NO: 888529 - RNA, 19 nt, Homo sapiens
  misc_RNA (1)...(19): siRNA sense strand
cguaucuccuguacuucaa

SEQ ID NO: 888530 - RNA, 19 nt, Homo sapiens
  misc_RNA (1)...(19): siRNA sense strand
acaacaagaagaggaagaa

SEQ ID NO: 888531 - RNA, 19 nt, Homo sapiens
  misc_RNA (1)...(19): siRNA sense strand
cagaccugcugcuguucuu

SEQ ID NO: 888532 - RNA, 19 nt, Homo sapiens
  misc_RNA (1)...(19): siRNA sense strand
ccaauaaauacaucaugca

SEQ ID NO: 888533 - RNA, 19 nt, Homo sapiens
  misc_RNA (1)...(19): siRNA sense strand
ggaucagcggucuuauuga

SEQ ID NO: 888534 - RNA, 19 nt, Homo sapiens
  misc_RNA (1)...(19): siRNA sense strand
caccaaugacaccaccaua

SEQ ID NO: 888535 - RNA, 19 nt, Homo sapiens
  misc_RNA (1)...(19): siRNA sense strand
ccuggaauaugacggugau

SEQ ID NO: 888536 - RNA, 19 nt, Homo sapiens
  misc_RNA (1)...(19): siRNA sense strand
ccucaaugcccgagacauc

SEQ ID NO: 888537 - RNA, 19 nt, Homo sapiens
  misc_RNA (1)...(19): siRNA sense strand
cuacgggaagccagucaaa

SEQ ID NO: 888538 - RNA, 19 nt, Homo sapiens
  misc_RNA (1)...(19): siRNA sense strand
ugcaucaugugcuguuuca

SEQ ID NO: 888539 - RNA, 19 nt, Homo sapiens
  misc_RNA (1)...(19): siRNA sense strand
gcugcaucaugugcuguuu

SEQ ID NO: 888540 - RNA, 19 nt, Homo sapiens
  misc_RNA (1)...(19): siRNA sense strand
ggucaucuuggaguauauu

SEQ ID NO: 888541 - RNA, 19 nt, Homo sapiens
  misc_RNA (1)...(19): siRNA sense strand
ugucuucaaucugcaaauc

SEQ ID NO: 888542 - RNA, 19 nt, Homo sapiens
  misc_RNA (1)...(19): siRNA sense strand
ucuugagccuacuguuuau

SEQ ID NO: 888543 - RNA, 19 nt, Homo sapiens
  misc_RNA (1)...(19): siRNA sense strand
caucugcugcguccucuuc

SEQ ID NO: 888544 - RNA, 19 nt, Homo sapiens
  misc_RNA (1)...(19): siRNA sense strand
ugaugucuaccauguucua

SEQ ID NO: 888545 - RNA, 19 nt, Homo sapiens
  misc_RNA (1)...(19): siRNA sense strand
uuccugcucuucauucuag

SEQ ID NO: 888546 - RNA, 19 nt, Homo sapiens
  misc_RNA (1)...(19): siRNA sense strand
ggguggcucuggucuugag

SEQ ID NO: 888547 - RNA, 19 nt, Homo sapiens
  misc_RNA (1)...(19): siRNA sense strand
gagccuuugccuccuucua

SEQ ID NO: 888548 - RNA, 19 nt, Homo sapiens
  misc_RNA (1)...(19): siRNA sense strand
gaacaaagauaagccguau

SEQ ID NO: 888549 - RNA, 19 nt, Homo sapiens
  misc_RNA (1)...(19): siRNA sense strand
gagaaagugccaauaaaua

SEQ ID NO: 888550 - RNA, 19 nt, Homo sapiens
  misc_RNA (1)...(19): siRNA sense strand
gaacagaagcugcacagau

SEQ ID NO: 888551 - RNA, 19 nt, Homo sapiens
  misc_RNA (1)...(19): siRNA sense strand
caagagccuucuaaagauu

SEQ ID NO: 888552 - RNA, 19 nt, Homo sapiens
  misc_RNA (1)...(19): siRNA sense strand
ccaagagccuucuaaagau

SEQ ID NO: 888553 - RNA, 19 nt, Homo sapiens
  misc_RNA (1)...(19): siRNA sense strand
gaugaugucuaccauguuc

SEQ ID NO: 888554 - RNA, 19 nt, Homo sapiens
  misc_RNA (1)...(19): siRNA sense strand
gugagaaagugccaauaaa

SEQ ID NO: 888555 - RNA, 19 nt, Homo sapiens
  misc_RNA (1)...(19): siRNA sense strand
ggacgcugcuuuccaugga

SEQ ID NO: 888556 - RNA, 19 nt, Homo sapiens
  misc_RNA (1)...(19): siRNA sense strand
gggaucagcggucuuauug

SEQ ID NO: 888557 - RNA, 19 nt, Homo sapiens
  misc_RNA (1)...(19): siRNA sense strand
cagaugaugucuaccaugu

SEQ ID NO: 888558 - RNA, 19 nt, Homo sapiens
  misc_RNA (1)...(19): siRNA sense strand
ggaagccagucaaauacga

SEQ ID NO: 888559 - RNA, 19 nt, Homo sapiens
  misc_RNA (1)...(19): siRNA sense strand
gaucagcggucuuauugac

SEQ ID NO: 888560 - RNA, 19 nt, Homo sapiens
  misc_RNA (1)...(19): siRNA sense strand
gggcucuucuggacccuua

SEQ ID NO: 888561 - RNA, 19 nt, Homo sapiens
  misc_RNA (1)...(19): siRNA sense strand
aacagaagcugcacagaug

SEQ ID NO: 888562 - RNA, 19 nt, Homo sapiens
  misc_RNA (1)...(19): siRNA sense strand
gaaagugccaauaaauaca

SEQ ID NO: 888563 - RNA, 19 nt, Homo sapiens
  misc_RNA (1)...(19): siRNA sense strand
agacaucaguguuaagauc

SEQ ID NO: 888564 - RNA, 19 nt, Homo sapiens
  misc_RNA (1)...(19): siRNA sense strand
uccaagagccuucuaaaga

SEQ ID NO: 888565 - RNA, 19 nt, Homo sapiens
  misc_RNA (1)...(19): siRNA sense strand
gcccgagacaucaguguua

SEQ ID NO: 888566 - RNA, 19 nt, Homo sapiens
  misc_RNA (1)...(19): siRNA sense strand
ggucuugagccuacuguuu

SEQ ID NO: 888567 - RNA, 19 nt, Homo sapiens
  misc_RNA (1)...(19): siRNA sense strand
cguccucgcuggagccuuu

SEQ ID NO: 888568 - RNA, 19 nt, Homo sapiens
  misc_RNA (1)...(19): siRNA sense strand
gucuugagccuacuguuua

SEQ ID NO: 888569 - RNA, 19 nt, Homo sapiens
  misc_RNA (1)...(19): siRNA sense strand
ccaacguucugucuucaau

SEQ ID NO: 888570 - RNA, 19 nt, Homo sapiens
  misc_RNA (1)...(19): siRNA sense strand
ugagaaagugccaauaaau

SEQ ID NO: 888571 - RNA, 19 nt, Homo sapiens
  misc_RNA (1)...(19): siRNA sense strand
guagcccgcugcaucaugu

SEQ ID NO: 888572 - RNA, 19 nt, Homo sapiens
  misc_RNA (1)...(19): siRNA sense strand
cuuaaucucugccuucauc

SEQ ID NO: 888573 - RNA, 19 nt, Homo sapiens
  misc_RNA (1)...(19): siRNA sense strand
acgggaagccagucaaaua

SEQ ID NO: 888574 - RNA, 19 nt, Homo sapiens
  misc_RNA (1)...(19): siRNA sense strand
uggaguauauugaccacaa

SEQ ID NO: 888575 - RNA, 19 nt, Homo sapiens
  misc_RNA (1)...(19): siRNA sense strand
caucaguguuaagaucuuu

SEQ ID NO: 888576 - RNA, 19 nt, Homo sapiens
  misc_RNA (1)...(19): siRNA sense strand
ugugagaaagugccaauaa

SEQ ID NO: 888577 - RNA, 19 nt, Homo sapiens
  misc_RNA (1)...(19): siRNA sense strand
ccagcaacaucaucucagu

SEQ ID NO: 888578 - RNA, 19 nt, Homo sapiens
  misc_RNA (1)...(19): siRNA sense strand
acaagaagaggaagaagug

SEQ ID NO: 888579 - RNA, 19 nt, Homo sapiens
  misc_RNA (1)...(19): siRNA sense strand
ccaaugacaccaccauaca

SEQ ID NO: 888580 - RNA, 19 nt, Homo sapiens
  misc_RNA (1)...(19): siRNA sense strand
gggguacccuggaauauga

SEQ ID NO: 888581 - RNA, 19 nt, Homo sapiens
  misc_RNA (1)...(19): siRNA sense strand
cgcaaugcauacaucauga

SEQ ID NO: 888582 - RNA, 19 nt, Homo sapiens
  misc_RNA (1)...(19): siRNA sense strand
aaaccgcaaugcauacauc

SEQ ID NO: 888583 - RNA, 19 nt, Homo sapiens
  misc_RNA (1)...(19): siRNA sense strand
cgggucaucuuggaguaua

SEQ ID NO: 888584 - RNA, 19 nt, Homo sapiens
  misc_RNA (1)...(19): siRNA sense strand
aauccaacguucugucuuc

SEQ ID NO: 888585 - RNA, 19 nt, Homo sapiens
  misc_RNA (1)...(19): siRNA sense strand
cuacucaugcgaaacauug

SEQ ID NO: 888586 - RNA, 19 nt, Homo sapiens
  misc_RNA (1)...(19): siRNA sense strand
ucuucaaucugcaaaucua

SEQ ID NO: 888587 - RNA, 19 nt, Homo sapiens
  misc_RNA (1)...(19): siRNA sense strand
agccguaucuccuguacuu

SEQ ID NO: 888588 - RNA, 19 nt, Homo sapiens
  misc_RNA (1)...(19): siRNA sense strand
ggaguauauugaccacaag

SEQ ID NO: 888589 - RNA, 19 nt, Homo sapiens
  misc_RNA (1)...(19): siRNA sense strand
agaaagugccaauaaauac

SEQ ID NO: 888590 - RNA, 19 nt, Homo sapiens
  misc_RNA (1)...(19): siRNA sense strand
gagccuacuguuuaucuug

SEQ ID NO: 888591 - RNA, 19 nt, Homo sapiens
  misc_RNA (1)...(19): siRNA sense strand
cgagacaucaguguuaaga

SEQ ID NO: 888592 - RNA, 19 nt, Homo sapiens
  misc_RNA (1)...(19): siRNA sense strand
gaauaugacggugaucaca

SEQ ID NO: 888593 - RNA, 19 nt, Homo sapiens
  misc_RNA (1)...(19): siRNA sense strand
cggcagcggauucguauug

SEQ ID NO: 888594 - RNA, 19 nt, Homo sapiens
  misc_RNA (1)...(19): siRNA sense strand
gauuguggccugguuguau

SEQ ID NO: 888595 - RNA, 19 nt, Homo sapiens
  misc_RNA (1)...(19): siRNA sense strand
ccaucuacgggaagaauuu

SEQ ID NO: 888596 - RNA, 19 nt, Homo sapiens
  misc_RNA (1)...(19): siRNA sense strand
gcucugggcauccaacauc

SEQ ID NO: 888597 - RNA, 19 nt, Homo sapiens
  misc_RNA (1)...(19): siRNA sense strand
uuaccacacugggucauug

SEQ ID NO: 888598 - RNA, 19 nt, Homo sapiens
  misc_RNA (1)...(19): siRNA sense strand
gcugagaacggccuacagu

SEQ ID NO: 888599 - RNA, 19 nt, Homo sapiens
  misc_RNA (1)...(19): siRNA sense strand
caaauacgaccccuccuuu

SEQ ID NO: 888600 - RNA, 19 nt, Homo sapiens
  misc_RNA (1)...(19): siRNA sense strand
cccgagacaucaguguuaa

SEQ ID NO: 888601 - RNA, 19 nt, Homo sapiens
  misc_RNA (1)...(19): siRNA sense strand
ccagggaucaccaaugaca

SEQ ID NO: 888602 - RNA, 19 nt, Homo sapiens
  misc_RNA (1)...(19): siRNA sense strand
cuacugggccuuccacaag

SEQ ID NO: 888603 - RNA, 19 nt, Homo sapiens
  misc_RNA (1)...(19): siRNA sense strand
gcucuucauucuagguuac

SEQ ID NO: 888604 - RNA, 19 nt, Homo sapiens
  misc_RNA (1)...(19): siRNA sense strand
gcaaugcauacaucaugau

SEQ ID NO: 888605 - RNA, 19 nt, Homo sapiens
  misc_RNA (1)...(19): siRNA sense strand
gaccugcugcuguucuuug

SEQ ID NO: 888606 - RNA, 19 nt, Homo sapiens
  misc_RNA (1)...(19): siRNA sense strand
caucaugugcuguuucaag

SEQ ID NO: 888607 - RNA, 19 nt, Homo sapiens
  misc_RNA (1)...(19): siRNA sense strand
ccuacuacauguccaagag

SEQ ID NO: 888608 - RNA, 19 nt, Homo sapiens
  misc_RNA (1)...(19): siRNA sense strand
gcucugggacgcugcuuuc

SEQ ID NO: 888609 - RNA, 19 nt, Homo sapiens
  misc_RNA (1)...(19): siRNA sense strand
ccagggcuacucauccaaa

SEQ ID NO: 888610 - RNA, 19 nt, Homo sapiens
  misc_RNA (1)...(19): siRNA sense strand
ccgcaaugcauacaucaug

SEQ ID NO: 888611 - RNA, 19 nt, Homo sapiens
  misc_RNA (1)...(19): siRNA sense strand
cccaggacaucccuaccuu

SEQ ID NO: 888612 - RNA, 19 nt, Homo sapiens
  misc_RNA (1)...(19): siRNA sense strand
gacaacaagaagaggaaga

SEQ ID NO: 888613 - RNA, 19 nt, Homo sapiens
  misc_RNA (1)...(19): siRNA sense strand
cuaaagauucugggcaaga

SEQ ID NO: 888614 - RNA, 19 nt, Homo sapiens
  misc_RNA (1)...(19): siRNA sense strand
ccacggcccaccuugugaa

SEQ ID NO: 888615 - RNA, 19 nt, Homo sapiens
  misc_RNA (1)...(19): siRNA sense strand
caagaagaggaagaaguga

SEQ ID NO: 888616 - RNA, 19 nt, Homo sapiens
  misc_RNA (1)...(19): siRNA sense strand
ggauuguggccugguugua

SEQ ID NO: 888617 - RNA, 19 nt, Homo sapiens
  misc_RNA (1)...(19): siRNA sense strand
cguaucuccuguacuucaa

SEQ ID NO: 888618 - RNA, 19 nt, Homo sapiens
  misc_RNA (1)...(19): siRNA sense strand
acaacaagaagaggaagaa

SEQ ID NO: 888619 - RNA, 19 nt, Homo sapiens
  misc_RNA (1)...(19): siRNA sense strand
cagaccugcugcuguucuu

SEQ ID NO: 888620 - RNA, 19 nt, Homo sapiens
  misc_RNA (1)...(19): siRNA sense strand
ccaauaaauacaucaugca

SEQ ID NO: 888621 - RNA, 19 nt, Homo sapiens
  misc_RNA (1)...(19): siRNA sense strand
ggaucagcggucuuauuga

SEQ ID NO: 888622 - RNA, 19 nt, Homo sapiens
  misc_RNA (1)...(19): siRNA sense strand
caccaaugacaccaccaua

SEQ ID NO: 888623 - RNA, 19 nt, Homo sapiens
  misc_RNA (1)...(19): siRNA sense strand
ccuggaauaugacggugau

SEQ ID NO: 888624 - RNA, 19 nt, Homo sapiens
  misc_RNA (1)...(19): siRNA sense strand
ccucaaugcccgagacauc

SEQ ID NO: 888625 - RNA, 19 nt, Homo sapiens
  misc_RNA (1)...(19): siRNA sense strand
cuacgggaagccagucaaa

SEQ ID NO: 888626 - RNA, 19 nt, Homo sapiens
  misc_RNA (1)...(19): siRNA sense strand
ugcaucaugugcuguuuca

SEQ ID NO: 888627 - RNA, 19 nt, Homo sapiens
  misc_RNA (1)...(19): siRNA sense strand
gcugcaucaugugcuguuu

SEQ ID NO: 888628 - RNA, 19 nt, Homo sapiens
  misc_RNA (1)...(19): siRNA sense strand
ggucaucuuggaguauauu

SEQ ID NO: 888629 - RNA, 19 nt, Homo sapiens
  misc_RNA (1)...(19): siRNA sense strand
ugucuucaaucugcaaauc

SEQ ID NO: 888630 - RNA, 19 nt, Homo sapiens
  misc_RNA (1)...(19): siRNA sense strand
ucuugagccuacuguuuau

SEQ ID NO: 888631 - RNA, 19 nt, Homo sapiens
  misc_RNA (1)...(19): siRNA sense strand
caucugcugcguccucuuc

SEQ ID NO: 888632 - RNA, 19 nt, Homo sapiens
  misc_RNA (1)...(19): siRNA sense strand
ugaugucuaccauguucua

SEQ ID NO: 888633 - RNA, 19 nt, Homo sapiens
  misc_RNA (1)...(19): siRNA sense strand
uuccugcucuucauucuag

SEQ ID NO: 888634 - RNA, 19 nt, Homo sapiens
  misc_RNA (1)...(19): siRNA sense strand
ggguggcucuggucuugag

SEQ ID NO: 888635 - RNA, 19 nt, Homo sapiens
  misc_RNA (1)...(19): siRNA sense strand
gagccuuugccuccuucua

SEQ ID NO: 888636 - RNA, 19 nt, Homo sapiens
  misc_RNA (1)...(19): siRNA sense strand
guuuagagaugccaaauga

SEQ ID NO: 888637 - RNA, 19 nt, Homo sapiens
  misc_RNA (1)...(19): siRNA sense strand
caaacuuccucgcuucuuu

SEQ ID NO: 888638 - RNA, 19 nt, Homo sapiens
  misc_RNA (1)...(19): siRNA sense strand
ggacauggcacaucaaguc

SEQ ID NO: 888639 - RNA, 19 nt, Homo sapiens
  misc_RNA (1)...(19): siRNA sense strand
gcggagagugcaagaaaua

SEQ ID NO: 888640 - RNA, 19 nt, Homo sapiens
  misc_RNA (1)...(19): siRNA sense strand
gaaggaggaacucaacuug

SEQ ID NO: 888641 - RNA, 19 nt, Homo sapiens
  misc_RNA (1)...(19): siRNA sense strand
gcacugacccgaggaauuc

SEQ ID NO: 888642 - RNA, 19 nt, Homo sapiens
  misc_RNA (1)...(19): siRNA sense strand
ggaaaccacagguguaaug

SEQ ID NO: 888643 - RNA, 19 nt, Homo sapiens
  misc_RNA (1)...(19): siRNA sense strand
cauaaaugcccggagauua

SEQ ID NO: 888644 - RNA, 19 nt, Homo sapiens
  misc_RNA (1)...(19): siRNA sense strand
gaacaaugaagccaagugu

SEQ ID NO: 888645 - RNA, 19 nt, Homo sapiens
  misc_RNA (1)...(19): siRNA sense strand
guccaagaguuguuuagaa

SEQ ID NO: 888646 - RNA, 19 nt, Homo sapiens
  misc_RNA (1)...(19): siRNA sense strand
ucacugauguacuaccuau

SEQ ID NO: 888647 - RNA, 19 nt, Homo sapiens
  misc_RNA (1)...(19): siRNA sense strand
acaaggacauggcacauca

SEQ ID NO: 888648 - RNA, 19 nt, Homo sapiens
  misc_RNA (1)...(19): siRNA sense strand
caaggaaaccacaggugua

SEQ ID NO: 888649 - RNA, 19 nt, Homo sapiens
  misc_RNA (1)...(19): siRNA sense strand
ggaaggaggaacucaacuu

SEQ ID NO: 888650 - RNA, 19 nt, Homo sapiens
  misc_RNA (1)...(19): siRNA sense strand
gcccaucacuggaauaaaa

SEQ ID NO: 888651 - RNA, 19 nt, Homo sapiens
  misc_RNA (1)...(19): siRNA sense strand
caaaugaggaucaaaauga

SEQ ID NO: 888652 - RNA, 19 nt, Homo sapiens
  misc_RNA (1)...(19): siRNA sense strand
ccacagguguaaugguguu

SEQ ID NO: 888653 - RNA, 19 nt, Homo sapiens
  misc_RNA (1)...(19): siRNA sense strand
caacuuggucugcaaacuu

SEQ ID NO: 888654 - RNA, 19 nt, Homo sapiens
  misc_RNA (1)...(19): siRNA sense strand
gucagguggugaagaagua

SEQ ID NO: 888655 - RNA, 19 nt, Homo sapiens
  misc_RNA (1)...(19): siRNA sense strand
ggaacaagacacaaagaag

SEQ ID NO: 888656 - RNA, 19 nt, Homo sapiens
  misc_RNA (1)...(19): siRNA sense strand
cagcaacaccacaagauga

SEQ ID NO: 888657 - RNA, 19 nt, Homo sapiens
  misc_RNA (1)...(19): siRNA sense strand
gggaacaagacacaaagaa

SEQ ID NO: 888658 - RNA, 19 nt, Homo sapiens
  misc_RNA (1)...(19): siRNA sense strand
gaucacaaguacucagacu

SEQ ID NO: 888659 - RNA, 19 nt, Homo sapiens
  misc_RNA (1)...(19): siRNA sense strand
aaacaucagcuucgaguuc

SEQ ID NO: 888660 - RNA, 19 nt, Homo sapiens
  misc_RNA (1)...(19): siRNA sense strand
gaaacgggaacaagacaca

SEQ ID NO: 888661 - RNA, 19 nt, Homo sapiens
  misc_RNA (1)...(19): siRNA sense strand
gcacaucaaguccaagagu

SEQ ID NO: 888662 - RNA, 19 nt, Homo sapiens
  misc_RNA (1)...(19): siRNA sense strand
caagaaauagugcgguuca

SEQ ID NO: 888663 - RNA, 19 nt, Homo sapiens
  misc_RNA (1)...(19): siRNA sense strand
cagcggagagugcaagaaa

SEQ ID NO: 888664 - RNA, 19 nt, Homo sapiens
  misc_RNA (1)...(19): siRNA sense strand
ucucuucacucucgucuca

SEQ ID NO: 888665 - RNA, 19 nt, Homo sapiens
  misc_RNA (1)...(19): siRNA sense strand
gcagcaacaccacaagaug

SEQ ID NO: 888666 - RNA, 19 nt, Homo sapiens
  misc_RNA (1)...(19): siRNA sense strand
cacaucaaguccaagaguu

SEQ ID NO: 888667 - RNA, 19 nt, Homo sapiens
  misc_RNA (1)...(19): siRNA sense strand
gagagugcaagaaauagug

SEQ ID NO: 888668 - RNA, 19 nt, Homo sapiens
  misc_RNA (1)...(19): siRNA sense strand
ggagagugcaagaaauagu

SEQ ID NO: 888669 - RNA, 19 nt, Homo sapiens
  misc_RNA (1)...(19): siRNA sense strand
cauggcacaucaaguccaa

SEQ ID NO: 888670 - RNA, 19 nt, Homo sapiens
  misc_RNA (1)...(19): siRNA sense strand
caaguacucagacuggaau

SEQ ID NO: 888671 - RNA, 19 nt, Homo sapiens
  misc_RNA (1)...(19): siRNA sense strand
caaguccaagaguuguuua

SEQ ID NO: 888672 - RNA, 19 nt, Homo sapiens
  misc_RNA (1)...(19): siRNA sense strand
auaaaugcccggagauuag

SEQ ID NO: 888673 - RNA, 19 nt, Homo sapiens
  misc_RNA (1)...(19): siRNA sense strand
ccgcauggacgaugggaaa

SEQ ID NO: 888674 - RNA, 19 nt, Homo sapiens
  misc_RNA (1)...(19): siRNA sense strand
cagcaggagucguggacau

SEQ ID NO: 888675 - RNA, 19 nt, Homo sapiens
  misc_RNA (1)...(19): siRNA sense strand
cuaccuauccuggcaaaga

SEQ ID NO: 888676 - RNA, 19 nt, Homo sapiens
  misc_RNA (1)...(19): siRNA sense strand
cccgucagguggugaagaa

SEQ ID NO: 888677 - RNA, 19 nt, Homo sapiens
  misc_RNA (1)...(19): siRNA sense strand
gaacccgucagguggugaa

SEQ ID NO: 888678 - RNA, 19 nt, Homo sapiens
  misc_RNA (1)...(19): siRNA sense strand
gaaccuuguggucaucaau

SEQ ID NO: 888679 - RNA, 19 nt, Homo sapiens
  misc_RNA (1)...(19): siRNA sense strand
aggaggaacucaacuuggu

SEQ ID NO: 888680 - RNA, 19 nt, Homo sapiens
  misc_RNA (1)...(19): siRNA sense strand
ccauaaaugcccggagauu

SEQ ID NO: 888681 - RNA, 19 nt, Homo sapiens
  misc_RNA (1)...(19): siRNA sense strand
aaggaaaccacagguguaa

SEQ ID NO: 888682 - RNA, 19 nt, Homo sapiens
  misc_RNA (1)...(19): siRNA sense strand
uccaagaguuguuuagaac

SEQ ID NO: 888683 - RNA, 19 nt, Homo sapiens
  misc_RNA (1)...(19): siRNA sense strand
ggccaucacugugcauguc

SEQ ID NO: 888684 - RNA, 19 nt, Homo sapiens
  misc_RNA (1)...(19): siRNA sense strand
uaccuauccuggcaaagau

SEQ ID NO: 888685 - RNA, 19 nt, Homo sapiens
  misc_RNA (1)...(19): siRNA sense strand
gcaaacuuccucgcuucuu

SEQ ID NO: 888686 - RNA, 19 nt, Homo sapiens
  misc_RNA (1)...(19): siRNA sense strand
aggcagagcccuugcaucu

SEQ ID NO: 888687 - RNA, 19 nt, Homo sapiens
  misc_RNA (1)...(19): siRNA sense strand
aaacuuccucgcuucuuug

SEQ ID NO: 888688 - RNA, 19 nt, Homo sapiens
  misc_RNA (1)...(19): siRNA sense strand
ugaagaagcuggggcuaga

SEQ ID NO: 888689 - RNA, 19 nt, Homo sapiens
  misc_RNA (1)...(19): siRNA sense strand
ucaaguccaagaguuguuu

SEQ ID NO: 888690 - RNA, 19 nt, Homo sapiens
  misc_RNA (1)...(19): siRNA sense strand
ggcacugacccgaggaauu

SEQ ID NO: 888691 - RNA, 19 nt, Homo sapiens
  misc_RNA (1)...(19): siRNA sense strand
acaaugaagccaagugucu

SEQ ID NO: 888692 - RNA, 19 nt, Homo sapiens
  misc_RNA (1)...(19): siRNA sense strand
gaugccaaaugaggaucaa

SEQ ID NO: 888693 - RNA, 19 nt, Homo sapiens
  misc_RNA (1)...(19): siRNA sense strand
cagcccaucacuggaauaa

SEQ ID NO: 888694 - RNA, 19 nt, Homo sapiens
  misc_RNA (1)...(19): siRNA sense strand
aagaaguacugggccauca

SEQ ID NO: 888695 - RNA, 19 nt, Homo sapiens
  misc_RNA (1)...(19): siRNA sense strand
ggacaaggacauggcacau

SEQ ID NO: 888696 - RNA, 19 nt, Homo sapiens
  misc_RNA (1)...(19): siRNA sense strand
gaaaccacagguguaaugg

SEQ ID NO: 888697 - RNA, 19 nt, Homo sapiens
  misc_RNA (1)...(19): siRNA sense strand
aggagccgguguccacaaa

SEQ ID NO: 888698 - RNA, 19 nt, Homo sapiens
  misc_RNA (1)...(19): siRNA sense strand
aacaucagcuucgaguuca

SEQ ID NO: 888699 - RNA, 19 nt, Homo sapiens
  misc_RNA (1)...(19): siRNA sense strand
gagccgguguccacaaacg

SEQ ID NO: 888700 - RNA, 19 nt, Homo sapiens
  misc_RNA (1)...(19): siRNA sense strand
cagcagcaacaccacaaga

SEQ ID NO: 888701 - RNA, 19 nt, Homo sapiens
  misc_RNA (1)...(19): siRNA sense strand
gaaguacugggccaucacu

SEQ ID NO: 888702 - RNA, 19 nt, Homo sapiens
  misc_RNA (1)...(19): siRNA sense strand
ccgccugcguuuagagaug

SEQ ID NO: 888703 - RNA, 19 nt, Homo sapiens
  misc_RNA (1)...(19): siRNA sense strand
cagccggaaugcgcaaguu

SEQ ID NO: 888704 - RNA, 19 nt, Homo sapiens
  misc_RNA (1)...(19): siRNA sense strand
caacaccacaagaugacau

SEQ ID NO: 888705 - RNA, 19 nt, Homo sapiens
  misc_RNA (1)...(19): siRNA sense strand
accuuguggucaucaauaa

SEQ ID NO: 888706 - RNA, 19 nt, Homo sapiens
  misc_RNA (1)...(19): siRNA sense strand
cccagaaacgggaacaaga

SEQ ID NO: 888707 - RNA, 19 nt, Homo sapiens
  misc_RNA (1)...(19): siRNA sense strand
gcacaggucagcucaagua

SEQ ID NO: 888708 - RNA, 19 nt, Homo sapiens
  misc_RNA (1)...(19): siRNA sense strand
cgaaagcgcuucacuuacu

SEQ ID NO: 888709 - RNA, 19 nt, Homo sapiens
  misc_RNA (1)...(19): siRNA sense strand
caggucagcucaaguaaug

SEQ ID NO: 888710 - RNA, 19 nt, Homo sapiens
  misc_RNA (1)...(19): siRNA sense strand
gaaagcgcuucacuuacuu

SEQ ID NO: 888711 - RNA, 19 nt, Homo sapiens
  misc_RNA (1)...(19): siRNA sense strand
ggaagaucaugcaggacaa

SEQ ID NO: 888712 - RNA, 19 nt, Homo sapiens
  misc_RNA (1)...(19): siRNA sense strand
aaacaaagagucagaugga

SEQ ID NO: 888713 - RNA, 19 nt, Homo sapiens
  misc_RNA (1)...(19): siRNA sense strand
caaagagucagauggaguu

SEQ ID NO: 888714 - RNA, 19 nt, Homo sapiens
  misc_RNA (1)...(19): siRNA sense strand
gaagcgucauucuggaaga

SEQ ID NO: 888715 - RNA, 19 nt, Homo sapiens
  misc_RNA (1)...(19): siRNA sense strand
ggaaacaaagagucagaug

SEQ ID NO: 888716 - RNA, 19 nt, Homo sapiens
  misc_RNA (1)...(19): siRNA sense strand
gagaagauccgcgagaagu

SEQ ID NO: 888717 - RNA, 19 nt, Homo sapiens
  misc_RNA (1)...(19): siRNA sense strand
ugaagacgggauuugauuu

SEQ ID NO: 888718 - RNA, 19 nt, Homo sapiens
  misc_RNA (1)...(19): siRNA sense strand
gggacgaggaucuaacuug

SEQ ID NO: 888719 - RNA, 19 nt, Homo sapiens
  misc_RNA (1)...(19): siRNA sense strand
gaagacgggauuugauuuu

SEQ ID NO: 888720 - RNA, 19 nt, Homo sapiens
  misc_RNA (1)...(19): siRNA sense strand
gagcaccgaacgugagaga

SEQ ID NO: 888721 - RNA, 19 nt, Homo sapiens
  misc_RNA (1)...(19): siRNA sense strand
ccagaccacuguccaaagc

SEQ ID NO: 888722 - RNA, 19 nt, Homo sapiens
  misc_RNA (1)...(19): siRNA sense strand
gaagauccgcgagaaguac

SEQ ID NO: 888723 - RNA, 19 nt, Homo sapiens
  misc_RNA (1)...(19): siRNA sense strand
agaagauccgcgagaagua

SEQ ID NO: 888724 - RNA, 19 nt, Homo sapiens
  misc_RNA (1)...(19): siRNA sense strand
aggagaagauccgcgagaa

SEQ ID NO: 888725 - RNA, 19 nt, Homo sapiens
  misc_RNA (1)...(19): siRNA sense strand
ggagaagauccgcgagaag

SEQ ID NO: 888726 - RNA, 19 nt, Homo sapiens
  misc_RNA (1)...(19): siRNA sense strand
gaucaaguccauggagaag

SEQ ID NO: 888727 - RNA, 19 nt, Homo sapiens
  misc_RNA (1)...(19): siRNA sense strand
agaccacuguccaaagcuu

SEQ ID NO: 888728 - RNA, 19 nt, Homo sapiens
  misc_RNA (1)...(19): siRNA sense strand
gcccagaccacuguccaaa

SEQ ID NO: 888729 - RNA, 19 nt, Homo sapiens
  misc_RNA (1)...(19): siRNA sense strand
gggaagacacccuguucuc

SEQ ID NO: 888730 - RNA, 19 nt, Homo sapiens
  misc_RNA (1)...(19): siRNA sense strand
ggaggaggaagcgucauuc

SEQ ID NO: 888731 - RNA, 19 nt, Homo sapiens
  misc_RNA (1)...(19): siRNA sense strand
gaagcugccaucuccugau

SEQ ID NO: 888732 - RNA, 19 nt, Homo sapiens
  misc_RNA (1)...(19): siRNA sense strand
gcgucauucuggaagauca

SEQ ID NO: 888733 - RNA, 19 nt, Homo sapiens
  misc_RNA (1)...(19): siRNA sense strand
uugaagacgggauuugauu

SEQ ID NO: 888734 - RNA, 19 nt, Homo sapiens
  misc_RNA (1)...(19): siRNA sense strand
gcgaaagcgcuucacuuac

SEQ ID NO: 888735 - RNA, 19 nt, Homo sapiens
  misc_RNA (1)...(19): siRNA sense strand
gcucaaguaaugucgucuu

SEQ ID NO: 888736 - RNA, 19 nt, Homo sapiens
  misc_RNA (1)...(19): siRNA sense strand
agagucagauggaguucag

SEQ ID NO: 888737 - RNA, 19 nt, Homo sapiens
  misc_RNA (1)...(19): siRNA sense strand
ggucagcucaaguaauguc

SEQ ID NO: 888738 - RNA, 19 nt, Homo sapiens
  misc_RNA (1)...(19): siRNA sense strand
ucagauggaguucaguauc

SEQ ID NO: 888739 - RNA, 19 nt, Homo sapiens
  misc_RNA (1)...(19): siRNA sense strand
agucagauggaguucagua

SEQ ID NO: 888740 - RNA, 19 nt, Homo sapiens
  misc_RNA (1)...(19): siRNA sense strand
gaggagaguucccgagauc

SEQ ID NO: 888741 - RNA, 19 nt, Homo sapiens
  misc_RNA (1)...(19): siRNA sense strand
ggccgcagcuccauucuca

SEQ ID NO: 888742 - RNA, 19 nt, Homo sapiens
  misc_RNA (1)...(19): siRNA sense strand
ggaauugccugcggaagag

SEQ ID NO: 888743 - RNA, 19 nt, Homo sapiens
  misc_RNA (1)...(19): siRNA sense strand
ggccaccguuuccgcaaua

SEQ ID NO: 888744 - RNA, 19 nt, Homo sapiens
  misc_RNA (1)...(19): siRNA sense strand
gugcagacgucaccuugga

SEQ ID NO: 888745 - RNA, 19 nt, Homo sapiens
  misc_RNA (1)...(19): siRNA sense strand
uggagugccugaccuuuga

SEQ ID NO: 888746 - RNA, 19 nt, Homo sapiens
  misc_RNA (1)...(19): siRNA sense strand
gaggaugugccagagaaua

SEQ ID NO: 888747 - RNA, 19 nt, Homo sapiens
  misc_RNA (1)...(19): siRNA sense strand
gcagcugucucgccugaag

SEQ ID NO: 888748 - RNA, 19 nt, Homo sapiens
  misc_RNA (1)...(19): siRNA sense strand
guaaugcuggcaagaguug

SEQ ID NO: 888749 - RNA, 19 nt, Homo sapiens
  misc_RNA (1)...(19): siRNA sense strand
gacgucaccuuggaggaaa

SEQ ID NO: 888750 - RNA, 19 nt, Homo sapiens
  misc_RNA (1)...(19): siRNA sense strand
gcagagucccaggcagaua

SEQ ID NO: 888751 - RNA, 19 nt, Homo sapiens
  misc_RNA (1)...(19): siRNA sense strand
uugaggaugugccagagaa

SEQ ID NO: 888752 - RNA, 19 nt, Homo sapiens
  misc_RNA (1)...(19): siRNA sense strand
uaaacaagaagagcccaaa

SEQ ID NO: 888753 - RNA, 19 nt, Homo sapiens
  misc_RNA (1)...(19): siRNA sense strand
cuggcccacucccaucuua

SEQ ID NO: 888754 - RNA, 19 nt, Homo sapiens
  misc_RNA (1)...(19): siRNA sense strand
aggaugugccagagaauaa

SEQ ID NO: 888755 - RNA, 19 nt, Homo sapiens
  misc_RNA (1)...(19): siRNA sense strand
cuucuuggcagcagugaaa

SEQ ID NO: 888756 - RNA, 19 nt, Homo sapiens
  misc_RNA (1)...(19): siRNA sense strand
gcacaccaagaaacagauc

SEQ ID NO: 888757 - RNA, 19 nt, Homo sapiens
  misc_RNA (1)...(19): siRNA sense strand
uggagcaguuccugagugu

SEQ ID NO: 888758 - RNA, 19 nt, Homo sapiens
  misc_RNA (1)...(19): siRNA sense strand
ccaauccggaguugcaguu

SEQ ID NO: 888759 - RNA, 19 nt, Homo sapiens
  misc_RNA (1)...(19): siRNA sense strand
agaggagaguucccgagau

SEQ ID NO: 888760 - RNA, 19 nt, Homo sapiens
  misc_RNA (1)...(19): siRNA sense strand
gcuccuuccugugccuuug

SEQ ID NO: 888761 - RNA, 19 nt, Homo sapiens
  misc_RNA (1)...(19): siRNA sense strand
ggagaguucccgagaucag

SEQ ID NO: 888762 - RNA, 19 nt, Homo sapiens
  misc_RNA (1)...(19): siRNA sense strand
aggaauugccugcggaaga

SEQ ID NO: 888763 - RNA, 19 nt, Homo sapiens
  misc_RNA (1)...(19): siRNA sense strand
ccugcgcuccugagaguaa

SEQ ID NO: 888764 - RNA, 19 nt, Homo sapiens
  misc_RNA (1)...(19): siRNA sense strand
cagagucccaggcagauag

SEQ ID NO: 888765 - RNA, 19 nt, Homo sapiens
  misc_RNA (1)...(19): siRNA sense strand
gaccagaagugucuauaua

SEQ ID NO: 888766 - RNA, 19 nt, Homo sapiens
  misc_RNA (1)...(19): siRNA sense strand
gaacugcucaggacuauaa

SEQ ID NO: 888767 - RNA, 19 nt, Homo sapiens
  misc_RNA (1)...(19): siRNA sense strand
ccaauucagucuucagauu

SEQ ID NO: 888768 - RNA, 19 nt, Homo sapiens
  misc_RNA (1)...(19): siRNA sense strand
agagacagaucuuugauga

SEQ ID NO: 888769 - RNA, 19 nt, Homo sapiens
  misc_RNA (1)...(19): siRNA sense strand
gcaaagagaacaacaaacu

SEQ ID NO: 888770 - RNA, 19 nt, Homo sapiens
  misc_RNA (1)...(19): siRNA sense strand
caugaacccuugguagaua

SEQ ID NO: 888771 - RNA, 19 nt, Homo sapiens
  misc_RNA (1)...(19): siRNA sense strand
cgaccuggcuuucaugaug

SEQ ID NO: 888772 - RNA, 19 nt, Homo sapiens
  misc_RNA (1)...(19): siRNA sense strand
cuauauaccugucagauca

SEQ ID NO: 888773 - RNA, 19 nt, Homo sapiens
  misc_RNA (1)...(19): siRNA sense strand
ggagaaugaugcagcuaug

SEQ ID NO: 888774 - RNA, 19 nt, Homo sapiens
  misc_RNA (1)...(19): siRNA sense strand
acaacaaacuggaagauca

SEQ ID NO: 888775 - RNA, 19 nt, Homo sapiens
  misc_RNA (1)...(19): siRNA sense strand
agacagaucuuugaugaag

SEQ ID NO: 888776 - RNA, 19 nt, Homo sapiens
  misc_RNA (1)...(19): siRNA sense strand
gaaaaugcaucaauuacca

SEQ ID NO: 888777 - RNA, 19 nt, Homo sapiens
  misc_RNA (1)...(19): siRNA sense strand
cagccuuugugucuucuua

SEQ ID NO: 888778 - RNA, 19 nt, Homo sapiens
  misc_RNA (1)...(19): siRNA sense strand
ugaaauuguuccugaagau

SEQ ID NO: 888779 - RNA, 19 nt, Homo sapiens
  misc_RNA (1)...(19): siRNA sense strand
gaggaaccauuugggaaga

SEQ ID NO: 888780 - RNA, 19 nt, Homo sapiens
  misc_RNA (1)...(19): siRNA sense strand
ggaaccauuugggaagaaa

SEQ ID NO: 888781 - RNA, 19 nt, Homo sapiens
  misc_RNA (1)...(19): siRNA sense strand
gaacaacaaacuggaagau

SEQ ID NO: 888782 - RNA, 19 nt, Homo sapiens
  misc_RNA (1)...(19): siRNA sense strand
uugcaguacucgaauauau

SEQ ID NO: 888783 - RNA, 19 nt, Homo sapiens
  misc_RNA (1)...(19): siRNA sense strand
gcucgaaaaugcaucaauu

SEQ ID NO: 888784 - RNA, 19 nt, Homo sapiens
  misc_RNA (1)...(19): siRNA sense strand
acagggagcugggccuauu

SEQ ID NO: 888785 - RNA, 19 nt, Homo sapiens
  misc_RNA (1)...(19): siRNA sense strand
cgaccgaccuggcuuucau

SEQ ID NO: 888786 - RNA, 19 nt, Homo sapiens
  misc_RNA (1)...(19): siRNA sense strand
gaaauuguuccugaagaug

SEQ ID NO: 888787 - RNA, 19 nt, Homo sapiens
  misc_RNA (1)...(19): siRNA sense strand
cagaacugcucaggacuau

SEQ ID NO: 888788 - RNA, 19 nt, Homo sapiens
  misc_RNA (1)...(19): siRNA sense strand
ggacuauaagcacuacuau

SEQ ID NO: 888789 - RNA, 19 nt, Homo sapiens
  misc_RNA (1)...(19): siRNA sense strand
ugucagcucuucugcagau

SEQ ID NO: 888790 - RNA, 19 nt, Homo sapiens
  misc_RNA (1)...(19): siRNA sense strand
ggaagaaaacuaagaagga

SEQ ID NO: 888791 - RNA, 19 nt, Homo sapiens
  misc_RNA (1)...(19): siRNA sense strand
gaagugcccagaccagaag

SEQ ID NO: 888792 - RNA, 19 nt, Homo sapiens
  misc_RNA (1)...(19): siRNA sense strand
cagccucaguuugaaauug

SEQ ID NO: 888793 - RNA, 19 nt, Homo sapiens
  misc_RNA (1)...(19): siRNA sense strand
gcuucagccugcagccuuu

SEQ ID NO: 888794 - RNA, 19 nt, Homo sapiens
  misc_RNA (1)...(19): siRNA sense strand
gagaaugaugcagcuauga

SEQ ID NO: 888795 - RNA, 19 nt, Homo sapiens
  misc_RNA (1)...(19): siRNA sense strand
caggguagcccaauucagu

SEQ ID NO: 888796 - RNA, 19 nt, Homo sapiens
  misc_RNA (1)...(19): siRNA sense strand
auacucaccugcagcacuu

SEQ ID NO: 888797 - RNA, 19 nt, Homo sapiens
  misc_RNA (1)...(19): siRNA sense strand
cccgugggcuauugcagua

SEQ ID NO: 888798 - RNA, 19 nt, Homo sapiens
  misc_RNA (1)...(19): siRNA sense strand
caaagagaacaacaaacug

SEQ ID NO: 888799 - RNA, 19 nt, Homo sapiens
  misc_RNA (1)...(19): siRNA sense strand
accagugggugaaauuuga

SEQ ID NO: 888800 - RNA, 19 nt, Homo sapiens
  misc_RNA (1)...(19): siRNA sense strand
ggaaacuaaugccuaaccu

SEQ ID NO: 888801 - RNA, 19 nt, Homo sapiens
  misc_RNA (1)...(19): siRNA sense strand
caacaaacuggaagaucau

SEQ ID NO: 888802 - RNA, 19 nt, Homo sapiens
  misc_RNA (1)...(19): siRNA sense strand
cacaugaacccuugguaga

SEQ ID NO: 888803 - RNA, 19 nt, Homo sapiens
  misc_RNA (1)...(19): siRNA sense strand
aauucagucuucagauuga

SEQ ID NO: 888804 - RNA, 19 nt, Homo sapiens
  misc_RNA (1)...(19): siRNA sense strand
guagcccaauucagucuuc

SEQ ID NO: 888805 - RNA, 19 nt, Homo sapiens
  misc_RNA (1)...(19): siRNA sense strand
ucacaggguagcccaauuc

SEQ ID NO: 888806 - RNA, 19 nt, Homo sapiens
  misc_RNA (1)...(19): siRNA sense strand
gcaguacucgaauauaugc

SEQ ID NO: 888807 - RNA, 19 nt, Homo sapiens
  misc_RNA (1)...(19): siRNA sense strand
cuucuuaccagcccaugua

SEQ ID NO: 888808 - RNA, 19 nt, Homo sapiens
  misc_RNA (1)...(19): siRNA sense strand
acuaaugccuaaccugcuu

SEQ ID NO: 888809 - RNA, 19 nt, Homo sapiens
  misc_RNA (1)...(19): siRNA sense strand
acuauaagcacuacuaugg

SEQ ID NO: 888810 - RNA, 19 nt, Homo sapiens
  misc_RNA (1)...(19): siRNA sense strand
aaauuguuccugaagauga

SEQ ID NO: 888811 - RNA, 19 nt, Homo sapiens
  misc_RNA (1)...(19): siRNA sense strand
ugaagugcccagaccagaa

SEQ ID NO: 888812 - RNA, 19 nt, Homo sapiens
  misc_RNA (1)...(19): siRNA sense strand
gagacagaucuuugaugaa

SEQ ID NO: 888813 - RNA, 19 nt, Homo sapiens
  misc_RNA (1)...(19): siRNA sense strand
gugugcagccucaguuuga

SEQ ID NO: 888814 - RNA, 19 nt, Homo sapiens
  misc_RNA (1)...(19): siRNA sense strand
guuugaaauuguuccugaa

SEQ ID NO: 888815 - RNA, 19 nt, Homo sapiens
  misc_RNA (1)...(19): siRNA sense strand
aggcaaagagaacaacaaa

SEQ ID NO: 888816 - RNA, 19 nt, Homo sapiens
  misc_RNA (1)...(19): siRNA sense strand
ccagaagugucuauauacc

SEQ ID NO: 888817 - RNA, 19 nt, Homo sapiens
  misc_RNA (1)...(19): siRNA sense strand
uugaaauuguuccugaaga

SEQ ID NO: 888818 - RNA, 19 nt, Homo sapiens
  misc_RNA (1)...(19): siRNA sense strand
ucaauuaccagugggugaa

SEQ ID NO: 888819 - RNA, 19 nt, Homo sapiens
  misc_RNA (1)...(19): siRNA sense strand
uuucagagacagaucuuug

SEQ ID NO: 888820 - RNA, 19 nt, Homo sapiens
  misc_RNA (1)...(19): siRNA sense strand
ccagcucugugggaacuau

SEQ ID NO: 888821 - RNA, 19 nt, Homo sapiens
  misc_RNA (1)...(19): siRNA sense strand
cugcagccuuugugucuuc

SEQ ID NO: 888822 - RNA, 19 nt, Homo sapiens
  misc_RNA (1)...(19): siRNA sense strand
gcccaauucagucuucaga

SEQ ID NO: 888823 - RNA, 19 nt, Homo sapiens
  misc_RNA (1)...(19): siRNA sense strand
ugggugaaauuugaugugu

SEQ ID NO: 888824 - RNA, 19 nt, Homo sapiens
  misc_RNA (1)...(19): siRNA sense strand
gacuauaagcacuacuaug

SEQ ID NO: 888825 - RNA, 19 nt, Homo sapiens
  misc_RNA (1)...(19): siRNA sense strand
agagaacaacaaacuggaa

SEQ ID NO: 888826 - RNA, 19 nt, Homo sapiens
  misc_RNA (1)...(19): siRNA sense strand
gacacaugaacccuuggua

SEQ ID NO: 888827 - RNA, 19 nt, Homo sapiens
  misc_RNA (1)...(19): siRNA sense strand
cagagacagaucuuugaug

SEQ ID NO: 888828 - RNA, 19 nt, Homo sapiens
  misc_RNA (1)...(19): siRNA sense strand
ggccagcucugugggaacu

SEQ ID NO: 888829 - RNA, 19 nt, Homo sapiens
  misc_RNA (1)...(19): siRNA sense strand
ugaaauuugaugugugcaa

SEQ ID NO: 888830 - RNA, 19 nt, Homo sapiens
  misc_RNA (1)...(19): siRNA sense strand
ggugugcagccucaguuug

SEQ ID NO: 888831 - RNA, 19 nt, Homo sapiens
  misc_RNA (1)...(19): siRNA sense strand
caaggaaucugaagcuuua

SEQ ID NO: 888832 - RNA, 19 nt, Homo sapiens
  misc_RNA (1)...(19): siRNA sense strand
ggaaauacccagacuguua

SEQ ID NO: 888833 - RNA, 19 nt, Homo sapiens
  misc_RNA (1)...(19): siRNA sense strand
gaagaaagcuagaacuaau

SEQ ID NO: 888834 - RNA, 19 nt, Homo sapiens
  misc_RNA (1)...(19): siRNA sense strand
ccgggaagcuguaagauua

SEQ ID NO: 888835 - RNA, 19 nt, Homo sapiens
  misc_RNA (1)...(19): siRNA sense strand
gagcaaacauaccaagaaa

SEQ ID NO: 888836 - RNA, 19 nt, Homo sapiens
  misc_RNA (1)...(19): siRNA sense strand
gcacuggaauuaauaccua

SEQ ID NO: 888837 - RNA, 19 nt, Homo sapiens
  misc_RNA (1)...(19): siRNA sense strand
gaagagaggcacuggaauu

SEQ ID NO: 888838 - RNA, 19 nt, Homo sapiens
  misc_RNA (1)...(19): siRNA sense strand
ccagacagcugccaucaga

SEQ ID NO: 888839 - RNA, 19 nt, Homo sapiens
  misc_RNA (1)...(19): siRNA sense strand
gagaggcacuggaauuaau

SEQ ID NO: 888840 - RNA, 19 nt, Homo sapiens
  misc_RNA (1)...(19): siRNA sense strand
gagaagaaagcuagaacua

SEQ ID NO: 888841 - RNA, 19 nt, Homo sapiens
  misc_RNA (1)...(19): siRNA sense strand
ggccugggauuucucguua

SEQ ID NO: 888842 - RNA, 19 nt, Homo sapiens
  misc_RNA (1)...(19): siRNA sense strand
cgacaauacagguaauuua

SEQ ID NO: 888843 - RNA, 19 nt, Homo sapiens
  misc_RNA (1)...(19): siRNA sense strand
cugaggagcugcugucuuu

SEQ ID NO: 888844 - RNA, 19 nt, Homo sapiens
  misc_RNA (1)...(19): siRNA sense strand
ggaaaucccaggaauacaa

SEQ ID NO: 888845 - RNA, 19 nt, Homo sapiens
  misc_RNA (1)...(19): siRNA sense strand
gcacucugguucugccuaa

SEQ ID NO: 888846 - RNA, 19 nt, Homo sapiens
  misc_RNA (1)...(19): siRNA sense strand
caagaaacacuaugaaauc

SEQ ID NO: 888847 - RNA, 19 nt, Homo sapiens
  misc_RNA (1)...(19): siRNA sense strand
guaauuuggcugugcuuua

SEQ ID NO: 888848 - RNA, 19 nt, Homo sapiens
  misc_RNA (1)...(19): siRNA sense strand
ggaacaacaugauuauacu

SEQ ID NO: 888849 - RNA, 19 nt, Homo sapiens
  misc_RNA (1)...(19): siRNA sense strand
ucaaauacagccagacuuu

SEQ ID NO: 888850 - RNA, 19 nt, Homo sapiens
  misc_RNA (1)...(19): siRNA sense strand
ucaaggcaauuaaagcaaa

SEQ ID NO: 888851 - RNA, 19 nt, Homo sapiens
  misc_RNA (1)...(19): siRNA sense strand
gcaauuaaacacagaagga

SEQ ID NO: 888852 - RNA, 19 nt, Homo sapiens
  misc_RNA (1)...(19): siRNA sense strand
gaagacggccacaagagaa

SEQ ID NO: 888853 - RNA, 19 nt, Homo sapiens
  misc_RNA (1)...(19): siRNA sense strand
ccacguggaugccuugaau

SEQ ID NO: 888854 - RNA, 19 nt, Homo sapiens
  misc_RNA (1)...(19): siRNA sense strand
gcaauuaaagcaaauccaa

SEQ ID NO: 888855 - RNA, 19 nt, Homo sapiens
  misc_RNA (1)...(19): siRNA sense strand
gaauuacggucugcugaga

SEQ ID NO: 888856 - RNA, 19 nt, Homo sapiens
  misc_RNA (1)...(19): siRNA sense strand
guggaugaaucuaggcaua

SEQ ID NO: 888857 - RNA, 19 nt, Homo sapiens
  misc_RNA (1)...(19): siRNA sense strand
uaauuuggcugugcuuuau

SEQ ID NO: 888858 - RNA, 19 nt, Homo sapiens
  misc_RNA (1)...(19): siRNA sense strand
ggccuccucuucagaauga

SEQ ID NO: 888859 - RNA, 19 nt, Homo sapiens
  misc_RNA (1)...(19): siRNA sense strand
ccaagaaacacuaugaaau

SEQ ID NO: 888860 - RNA, 19 nt, Homo sapiens
  misc_RNA (1)...(19): siRNA sense strand
caggaacuaaggagaauua

SEQ ID NO: 888861 - RNA, 19 nt, Homo sapiens
  misc_RNA (1)...(19): siRNA sense strand
gaacagcuuuucagaagug

SEQ ID NO: 888862 - RNA, 19 nt, Homo sapiens
  misc_RNA (1)...(19): siRNA sense strand
gaaaugccaccgugcugaa

SEQ ID NO: 888863 - RNA, 19 nt, Homo sapiens
  misc_RNA (1)...(19): siRNA sense strand
uaauuuagcccaagcugaa

SEQ ID NO: 888864 - RNA, 19 nt, Homo sapiens
  misc_RNA (1)...(19): siRNA sense strand
gggaagcuguaagauuaaa

SEQ ID NO: 888865 - RNA, 19 nt, Homo sapiens
  misc_RNA (1)...(19): siRNA sense strand
gaaauacccagacuguuac

SEQ ID NO: 888866 - RNA, 19 nt, Homo sapiens
  misc_RNA (1)...(19): siRNA sense strand
gccaagcccugugcucuga

SEQ ID NO: 888867 - RNA, 19 nt, Homo sapiens
  misc_RNA (1)...(19): siRNA sense strand
gacaauacagguaauuuag

SEQ ID NO: 888868 - RNA, 19 nt, Homo sapiens
  misc_RNA (1)...(19): siRNA sense strand
gccaagaaacacuaugaaa

SEQ ID NO: 888869 - RNA, 19 nt, Homo sapiens
  misc_RNA (1)...(19): siRNA sense strand
aagagaggcacuggaauua

SEQ ID NO: 888870 - RNA, 19 nt, Homo sapiens
  misc_RNA (1)...(19): siRNA sense strand
ggaauacaaggaaucugaa

SEQ ID NO: 888871 - RNA, 19 nt, Homo sapiens
  misc_RNA (1)...(19): siRNA sense strand
agaagaaagcuagaacuaa

SEQ ID NO: 888872 - RNA, 19 nt, Homo sapiens
  misc_RNA (1)...(19): siRNA sense strand
cagcugccaucagaaacua

SEQ ID NO: 888873 - RNA, 19 nt, Homo sapiens
  misc_RNA (1)...(19): siRNA sense strand
caaggcaauuaaagcaaau

SEQ ID NO: 888874 - RNA, 19 nt, Homo sapiens
  misc_RNA (1)...(19): siRNA sense strand
ggaugaaucuaggcauagu

SEQ ID NO: 888875 - RNA, 19 nt, Homo sapiens
  misc_RNA (1)...(19): siRNA sense strand
aagcagcagagcaaaguua

SEQ ID NO: 888876 - RNA, 19 nt, Homo sapiens
  misc_RNA (1)...(19): siRNA sense strand
augcuaagguucacuacaa

SEQ ID NO: 888877 - RNA, 19 nt, Homo sapiens
  misc_RNA (1)...(19): siRNA sense strand
caucaggaacuaaggagaa

SEQ ID NO: 888878 - RNA, 19 nt, Homo sapiens
  misc_RNA (1)...(19): siRNA sense strand
gacagcaauuaaacacaga

SEQ ID NO: 888879 - RNA, 19 nt, Homo sapiens
  misc_RNA (1)...(19): siRNA sense strand
agacagcugccaucagaaa

SEQ ID NO: 888880 - RNA, 19 nt, Homo sapiens
  misc_RNA (1)...(19): siRNA sense strand
aagguucacuacaacauug

SEQ ID NO: 888881 - RNA, 19 nt, Homo sapiens
  misc_RNA (1)...(19): siRNA sense strand
acugugugcugcugacuuu

SEQ ID NO: 888882 - RNA, 19 nt, Homo sapiens
  misc_RNA (1)...(19): siRNA sense strand
acaaggaaucugaagcuuu

SEQ ID NO: 888883 - RNA, 19 nt, Homo sapiens
  misc_RNA (1)...(19): siRNA sense strand
ggugagggccguaaacuac

SEQ ID NO: 888884 - RNA, 19 nt, Homo sapiens
  misc_RNA (1)...(19): siRNA sense strand
caaaguuaccggacagcaa

SEQ ID NO: 888885 - RNA, 19 nt, Homo sapiens
  misc_RNA (1)...(19): siRNA sense strand
ugaagacggccacaagaga

SEQ ID NO: 888886 - RNA, 19 nt, Homo sapiens
  misc_RNA (1)...(19): siRNA sense strand
uugaaugcguggagaaaug

SEQ ID NO: 888887 - RNA, 19 nt, Homo sapiens
  misc_RNA (1)...(19): siRNA sense strand
ugagcaaacauaccaagaa

SEQ ID NO: 888888 - RNA, 19 nt, Homo sapiens
  misc_RNA (1)...(19): siRNA sense strand
gggccguaaacuacaauua

SEQ ID NO: 888889 - RNA, 19 nt, Homo sapiens
  misc_RNA (1)...(19): siRNA sense strand
gggcugggaugcucuacgu

SEQ ID NO: 888890 - RNA, 19 nt, Homo sapiens
  misc_RNA (1)...(19): siRNA sense strand
gaacaacaugauuauacuc

SEQ ID NO: 888891 - RNA, 19 nt, Homo sapiens
  misc_RNA (1)...(19): siRNA sense strand
caauuaaacacagaaggaa

SEQ ID NO: 888892 - RNA, 19 nt, Homo sapiens
  misc_RNA (1)...(19): siRNA sense strand
gaaaucccaggaauacaag

SEQ ID NO: 888893 - RNA, 19 nt, Homo sapiens
  misc_RNA (1)...(19): siRNA sense strand
ugaucacucucucauguuc

SEQ ID NO: 888894 - RNA, 19 nt, Homo sapiens
  misc_RNA (1)...(19): siRNA sense strand
gauuauacuccucgacaau

SEQ ID NO: 888895 - RNA, 19 nt, Homo sapiens
  misc_RNA (1)...(19): siRNA sense strand
gccuggaacaacaugauua

SEQ ID NO: 888896 - RNA, 19 nt, Homo sapiens
  misc_RNA (1)...(19): siRNA sense strand
cugccuaauuggccugaua

SEQ ID NO: 888897 - RNA, 19 nt, Homo sapiens
  misc_RNA (1)...(19): siRNA sense strand
uacgugcgcuggaggauca

SEQ ID NO: 888898 - RNA, 19 nt, Homo sapiens
  misc_RNA (1)...(19): siRNA sense strand
uaagguucacuacaacauu

SEQ ID NO: 888899 - RNA, 19 nt, Homo sapiens
  misc_RNA (1)...(19): siRNA sense strand
auccaaaugcugcaaguua

SEQ ID NO: 888900 - RNA, 19 nt, Homo sapiens
  misc_RNA (1)...(19): siRNA sense strand
caaccucgggcgucuguau

SEQ ID NO: 888901 - RNA, 19 nt, Homo sapiens
  misc_RNA (1)...(19): siRNA sense strand
agcccaagcugaagcaguu

SEQ ID NO: 888902 - RNA, 19 nt, Homo sapiens
  misc_RNA (1)...(19): siRNA sense strand
gcaaaagaaagcugucuga

SEQ ID NO: 888903 - RNA, 19 nt, Homo sapiens
  misc_RNA (1)...(19): siRNA sense strand
ucaaugcuaagguucacua

SEQ ID NO: 888904 - RNA, 19 nt, Homo sapiens
  misc_RNA (1)...(19): siRNA sense strand
ugaaaucuccuugcagcuu

SEQ ID NO: 888905 - RNA, 19 nt, Homo sapiens
  misc_RNA (1)...(19): siRNA sense strand
ggaagagaggcacuggaau

SEQ ID NO: 888906 - RNA, 19 nt, Homo sapiens
  misc_RNA (1)...(19): siRNA sense strand
ugagggccguaaacuacaa

SEQ ID NO: 888907 - RNA, 19 nt, Homo sapiens
  misc_RNA (1)...(19): siRNA sense strand
ccaugaauaaucuuggaaa

SEQ ID NO: 888908 - RNA, 19 nt, Homo sapiens
  misc_RNA (1)...(19): siRNA sense strand
ugauuauacuccucgacaa

SEQ ID NO: 888909 - RNA, 19 nt, Homo sapiens
  misc_RNA (1)...(19): siRNA sense strand
aaaguuaccggacagcaau

SEQ ID NO: 888910 - RNA, 19 nt, Homo sapiens
  misc_RNA (1)...(19): siRNA sense strand
gaagcagcagagcaaaguu

SEQ ID NO: 888911 - RNA, 19 nt, Homo sapiens
  misc_RNA (1)...(19): siRNA sense strand
cuaggcauagugcagaaua

SEQ ID NO: 888912 - RNA, 19 nt, Homo sapiens
  misc_RNA (1)...(19): siRNA sense strand
ggagcccugagcaaacaua

SEQ ID NO: 888913 - RNA, 19 nt, Homo sapiens
  misc_RNA (1)...(19): siRNA sense strand
gaacuaaugcaaaagaaag

SEQ ID NO: 888914 - RNA, 19 nt, Homo sapiens
  misc_RNA (1)...(19): siRNA sense strand
gcugugcuuuaucaucguu

SEQ ID NO: 888915 - RNA, 19 nt, Homo sapiens
  misc_RNA (1)...(19): siRNA sense strand
aggaauacaaggaaucuga

SEQ ID NO: 888916 - RNA, 19 nt, Homo sapiens
  misc_RNA (1)...(19): siRNA sense strand
uggaagagaggcacuggaa

SEQ ID NO: 888917 - RNA, 19 nt, Homo sapiens
  misc_RNA (1)...(19): siRNA sense strand
aaacuaccgggaagcugua

SEQ ID NO: 888918 - RNA, 19 nt, Homo sapiens
  misc_RNA (1)...(19): siRNA sense strand
gaauacaaggaaucugaag

SEQ ID NO: 888919 - RNA, 19 nt, Homo sapiens
  misc_RNA (1)...(19): siRNA sense strand
agaggcacuggaauuaaua

SEQ ID NO: 888920 - RNA, 19 nt, Homo sapiens
  misc_RNA (1)...(19): siRNA sense strand
uuaaaucccaaguauguuc

SEQ ID NO: 888921 - RNA, 19 nt, Homo sapiens
  misc_RNA (1)...(19): siRNA sense strand
ucacuacaacauuggcaaa

SEQ ID NO: 888922 - RNA, 19 nt, Homo sapiens
  misc_RNA (1)...(19): siRNA sense strand
aaagcuagaacuaaugcaa

SEQ ID NO: 888923 - RNA, 19 nt, Homo sapiens
  misc_RNA (1)...(19): siRNA sense strand
gauuucucguuaucccauu

SEQ ID NO: 888924 - RNA, 19 nt, Homo sapiens
  misc_RNA (1)...(19): siRNA sense strand
uggaacaacaugauuauac

SEQ ID NO: 888925 - RNA, 19 nt, Homo sapiens
  misc_RNA (1)...(19): siRNA sense strand
agaaggaaauacccagacu

SEQ ID NO: 888926 - RNA, 19 nt, Homo sapiens
  misc_RNA (1)...(19): siRNA sense strand
gaggagcugcugucuuugg

SEQ ID NO: 888927 - RNA, 19 nt, Homo sapiens
  misc_RNA (1)...(19): siRNA sense strand
acuaugaaaucuccuugca

SEQ ID NO: 888928 - RNA, 19 nt, Homo sapiens
  misc_RNA (1)...(19): siRNA sense strand
ggccaagaaacacuaugaa

SEQ ID NO: 888929 - RNA, 19 nt, Homo sapiens
  misc_RNA (1)...(19): siRNA sense strand
cacuggaauuaauaccuaa

SEQ ID NO: 888930 - RNA, 19 nt, Homo sapiens
  misc_RNA (1)...(19): siRNA sense strand
agagaggcacuggaauuaa

SEQ ID NO: 888931 - RNA, 19 nt, Homo sapiens
  misc_RNA (1)...(19): siRNA sense strand
ggacuucuuugaccugcua

SEQ ID NO: 888932 - RNA, 19 nt, Homo sapiens
  misc_RNA (1)...(19): siRNA sense strand
ggagaagauugaugaaagu

SEQ ID NO: 888933 - RNA, 19 nt, Homo sapiens
  misc_RNA (1)...(19): siRNA sense strand
ggucagugcuggucaucuu

SEQ ID NO: 888934 - RNA, 19 nt, Homo sapiens
  misc_RNA (1)...(19): siRNA sense strand
guacaacagccucauauuc

SEQ ID NO: 888935 - RNA, 19 nt, Homo sapiens
  misc_RNA (1)...(19): siRNA sense strand
cacagaagcuggugacauc

SEQ ID NO: 888936 - RNA, 19 nt, Homo sapiens
  misc_RNA (1)...(19): siRNA sense strand
ugaaagugcagguguguaa

SEQ ID NO: 888937 - RNA, 19 nt, Homo sapiens
  misc_RNA (1)...(19): siRNA sense strand
ggagaugcuggacuucuuu

SEQ ID NO: 888938 - RNA, 19 nt, Homo sapiens
  misc_RNA (1)...(19): siRNA sense strand
uggagaagauugaugaaag

SEQ ID NO: 888939 - RNA, 19 nt, Homo sapiens
  misc_RNA (1)...(19): siRNA sense strand
gcaaguccuucgacaucug

SEQ ID NO: 888940 - RNA, 19 nt, Homo sapiens
  misc_RNA (1)...(19): siRNA sense strand
ggacgugugggcggaguua

SEQ ID NO: 888941 - RNA, 19 nt, Homo sapiens
  misc_RNA (1)...(19): siRNA sense strand
aauuggagcuggagaagau

SEQ ID NO: 888942 - RNA, 19 nt, Homo sapiens
  misc_RNA (1)...(19): siRNA sense strand
gaacacccucuaugugcuu

SEQ ID NO: 888943 - RNA, 19 nt, Homo sapiens
  misc_RNA (1)...(19): siRNA sense strand
gggcagcagugcacagaag

SEQ ID NO: 888944 - RNA, 19 nt, Homo sapiens
  misc_RNA (1)...(19): siRNA sense strand
ggugacgacuccuccaaca

SEQ ID NO: 888945 - RNA, 19 nt, Homo sapiens
  misc_RNA (1)...(19): siRNA sense strand
gaaauuggagcuggagaag

SEQ ID NO: 888946 - RNA, 19 nt, Homo sapiens
  misc_RNA (1)...(19): siRNA sense strand
caacuccacgcuucgagaa

SEQ ID NO: 888947 - RNA, 19 nt, Homo sapiens
  misc_RNA (1)...(19): siRNA sense strand
gcacagaagcuggugacau

SEQ ID NO: 888948 - RNA, 19 nt, Homo sapiens
  misc_RNA (1)...(19): siRNA sense strand
cagcauaagcucggcauug

SEQ ID NO: 888949 - RNA, 19 nt, Homo sapiens
  misc_RNA (1)...(19): siRNA sense strand
gcccugaagcuucucugua

SEQ ID NO: 888950 - RNA, 19 nt, Homo sapiens
  misc_RNA (1)...(19): siRNA sense strand
ggugacaucugcgccaucu

SEQ ID NO: 888951 - RNA, 19 nt, Homo sapiens
  misc_RNA (1)...(19): siRNA sense strand
ugacaucugcgccaucugu

SEQ ID NO: 888952 - RNA, 19 nt, Homo sapiens
  misc_RNA (1)...(19): siRNA sense strand
ggccagcaccuucgccuau

SEQ ID NO: 888953 - RNA, 19 nt, Homo sapiens
  misc_RNA (1)...(19): siRNA sense strand
ccauccagcugugguacaa

SEQ ID NO: 888954 - RNA, 19 nt, Homo sapiens
  misc_RNA (1)...(19): siRNA sense strand
uggagaugcuggacuucuu

SEQ ID NO: 888955 - RNA, 19 nt, Homo sapiens
  misc_RNA (1)...(19): siRNA sense strand
guaccucucagaacuaugg

SEQ ID NO: 888956 - RNA, 19 nt, Homo sapiens
  misc_RNA (1)...(19): siRNA sense strand
caagggaaaguucuaucug

SEQ ID NO: 888957 - RNA, 19 nt, Homo sapiens
  misc_RNA (1)...(19): siRNA sense strand
aaaguucuaucuggucauc

SEQ ID NO: 888958 - RNA, 19 nt, Homo sapiens
  misc_RNA (1)...(19): siRNA sense strand
ucuuugaccugcuauggau

SEQ ID NO: 888959 - RNA, 19 nt, Homo sapiens
  misc_RNA (1)...(19): siRNA sense strand
gaugaaagugcaggugugu

SEQ ID NO: 888960 - RNA, 19 nt, Homo sapiens
  misc_RNA (1)...(19): siRNA sense strand
cccugaagcuucucuguac

SEQ ID NO: 888961 - RNA, 19 nt, Homo sapiens
  misc_RNA (1)...(19): siRNA sense strand
cagcugugguacaaauaca

SEQ ID NO: 888962 - RNA, 19 nt, Homo sapiens
  misc_RNA (1)...(19): siRNA sense strand
uggccaaacugugcuuuca

SEQ ID NO: 888963 - RNA, 19 nt, Homo sapiens
  misc_RNA (1)...(19): siRNA sense strand
ugaaggggcacaagaaauu

SEQ ID NO: 888964 - RNA, 19 nt, Homo sapiens
  misc_RNA (1)...(19): siRNA sense strand
ccaccaccauuuccaccau

SEQ ID NO: 888965 - RNA, 19 nt, Homo sapiens
  misc_RNA (1)...(19): siRNA sense strand
ccaagggaaaguucuaucu

SEQ ID NO: 888966 - RNA, 19 nt, Homo sapiens
  misc_RNA (1)...(19): siRNA sense strand
gagaagauugaugaaagug

SEQ ID NO: 888967 - RNA, 19 nt, Homo sapiens
  misc_RNA (1)...(19): siRNA sense strand
gagaugcuggacuucuuug

SEQ ID NO: 888968 - RNA, 19 nt, Homo sapiens
  misc_RNA (1)...(19): siRNA sense strand
agaaauuggagcuggagaa

SEQ ID NO: 888969 - RNA, 19 nt, Homo sapiens
  misc_RNA (1)...(19): siRNA sense strand
gccagcaccuucgccuaug

SEQ ID NO: 888970 - RNA, 19 nt, Homo sapiens
  misc_RNA (1)...(19): siRNA sense strand
gagcuggagaagauugaug

SEQ ID NO: 888971 - RNA, 19 nt, Homo sapiens
  misc_RNA (1)...(19): siRNA sense strand
ugugccagaugcuguugaa

SEQ ID NO: 888972 - RNA, 19 nt, Homo sapiens
  misc_RNA (1)...(19): siRNA sense strand
gggccugucugcugugcua

SEQ ID NO: 888973 - RNA, 19 nt, Homo sapiens
  misc_RNA (1)...(19): siRNA sense strand
gggccuuccuauuauguaa

SEQ ID NO: 888974 - RNA, 19 nt, Homo sapiens
  misc_RNA (1)...(19): siRNA sense strand
uaucugggcucgucucucu

SEQ ID NO: 888975 - RNA, 19 nt, Homo sapiens
  misc_RNA (1)...(19): siRNA sense strand
ugucugcugugcuauuuau

SEQ ID NO: 888976 - RNA, 19 nt, Homo sapiens
  misc_RNA (1)...(19): siRNA sense strand
ucagcugccuguacucaug

SEQ ID NO: 888977 - RNA, 19 nt, Homo sapiens
  misc_RNA (1)...(19): siRNA sense strand
cugcugugcuauuuauuug

SEQ ID NO: 888978 - RNA, 19 nt, Homo sapiens
  misc_RNA (1)...(19): siRNA sense strand
uuauuugccuuccgucuuc

SEQ ID NO: 888979 - RNA, 19 nt, Homo sapiens
  misc_RNA (1)...(19): siRNA sense strand
aaagggagcggcagcuaga

SEQ ID NO: 888980 - RNA, 19 nt, Homo sapiens
  misc_RNA (1)...(19): siRNA sense strand
ccugucugcugugcuauuu

SEQ ID NO: 888981 - RNA, 19 nt, Homo sapiens
  misc_RNA (1)...(19): siRNA sense strand
ugacagaugcuuucagacu

SEQ ID NO: 888982 - RNA, 19 nt, Homo sapiens
  misc_RNA (1)...(19): siRNA sense strand
aaucccagcuggacagaca

SEQ ID NO: 888983 - RNA, 19 nt, Homo sapiens
  misc_RNA (1)...(19): siRNA sense strand
cggcuucgggaacaaguua

SEQ ID NO: 888984 - RNA, 19 nt, Homo sapiens
  misc_RNA (1)...(19): siRNA sense strand
cagaugcuuucagacugua

SEQ ID NO: 888985 - RNA, 19 nt, Homo sapiens
  misc_RNA (1)...(19): siRNA sense strand
ggagcggcagcuagaggua

SEQ ID NO: 888986 - RNA, 19 nt, Homo sapiens
  misc_RNA (1)...(19): siRNA sense strand
agccagugcugcugacaga

SEQ ID NO: 888987 - RNA, 19 nt, Homo sapiens
  misc_RNA (1)...(19): siRNA sense strand
gccuuccuauuauguaaau

SEQ ID NO: 888988 - RNA, 19 nt, Homo sapiens
  misc_RNA (1)...(19): siRNA sense strand
gacuguagagcucagagaa

SEQ ID NO: 888989 - RNA, 19 nt, Homo sapiens
  misc_RNA (1)...(19): siRNA sense strand
ccagugcugcugacagaug

SEQ ID NO: 888990 - RNA, 19 nt, Homo sapiens
  misc_RNA (1)...(19): siRNA sense strand
cuguagagcucagagaaag

SEQ ID NO: 888991 - RNA, 19 nt, Homo sapiens
  misc_RNA (1)...(19): siRNA sense strand
ucugcugugcuauuuauuu

SEQ ID NO: 888992 - RNA, 19 nt, Homo sapiens
  misc_RNA (1)...(19): siRNA sense strand
gcagcggcuucgggaacaa

SEQ ID NO: 888993 - RNA, 19 nt, Homo sapiens
  misc_RNA (1)...(19): siRNA sense strand
caacagcccugaccaucaa

SEQ ID NO: 888994 - RNA, 19 nt, Homo sapiens
  misc_RNA (1)...(19): siRNA sense strand
ggagcucuauaaccaauuu

SEQ ID NO: 888995 - RNA, 19 nt, Homo sapiens
  misc_RNA (1)...(19): siRNA sense strand
ccaauuugcugccaacuca

SEQ ID NO: 888996 - RNA, 19 nt, Homo sapiens
  misc_RNA (1)...(19): siRNA sense strand
cgucguagcuuuggcugaa

SEQ ID NO: 888997 - RNA, 19 nt, Homo sapiens
  misc_RNA (1)...(19): siRNA sense strand
ugcaacggcuccagcagua

SEQ ID NO: 888998 - RNA, 19 nt, Homo sapiens
  misc_RNA (1)...(19): siRNA sense strand
gcaggagcagcuaaagaaa

SEQ ID NO: 888999 - RNA, 19 nt, Homo sapiens
  misc_RNA (1)...(19): siRNA sense strand
caacggcuccagcaguaug

SEQ ID NO: 889000 - RNA, 19 nt, Homo sapiens
  misc_RNA (1)...(19): siRNA sense strand
gaaucucgucguagcuuug

SEQ ID NO: 889001 - RNA, 19 nt, Homo sapiens
  misc_RNA (1)...(19): siRNA sense strand
agaaucucgucguagcuuu

SEQ ID NO: 889002 - RNA, 19 nt, Homo sapiens
  misc_RNA (1)...(19): siRNA sense strand
ccaacagcccugaccauca

SEQ ID NO: 889003 - RNA, 19 nt, Homo sapiens
  misc_RNA (1)...(19): siRNA sense strand
ugcaggagcagcuaaagaa

SEQ ID NO: 889004 - RNA, 19 nt, Homo sapiens
  misc_RNA (1)...(19): siRNA sense strand
gcugguggccacguacuuu

SEQ ID NO: 889005 - RNA, 19 nt, Homo sapiens
  misc_RNA (1)...(19): siRNA sense strand
caccuguccuucccucaug

SEQ ID NO: 889006 - RNA, 19 nt, Homo sapiens
  misc_RNA (1)...(19): siRNA sense strand
acuuggagcucuauaacca

SEQ ID NO: 889007 - RNA, 19 nt, Homo sapiens
  misc_RNA (1)...(19): siRNA sense strand
aaagguuuccggagguuug

SEQ ID NO: 889008 - RNA, 19 nt, Homo sapiens
  misc_RNA (1)...(19): siRNA sense strand
gccacuuggagcucuauaa

SEQ ID NO: 889009 - RNA, 19 nt, Homo sapiens
  misc_RNA (1)...(19): siRNA sense strand
gaaaacacaggucccaaca

SEQ ID NO: 889010 - RNA, 19 nt, Homo sapiens
  misc_RNA (1)...(19): siRNA sense strand
auaaagguuuccggagguu

SEQ ID NO: 889011 - RNA, 19 nt, Homo sapiens
  misc_RNA (1)...(19): siRNA sense strand
ccacuuggagcucuauaac

SEQ ID NO: 889012 - RNA, 19 nt, Homo sapiens
  misc_RNA (1)...(19): siRNA sense strand
gaaggaggcucucuuauca

SEQ ID NO: 889013 - RNA, 19 nt, Homo sapiens
  misc_RNA (1)...(19): siRNA sense strand
gaggcucucuuaucaauug

SEQ ID NO: 889014 - RNA, 19 nt, Homo sapiens
  misc_RNA (1)...(19): siRNA sense strand
gaugaaggaggcucucuua

SEQ ID NO: 889015 - RNA, 19 nt, Homo sapiens
  misc_RNA (1)...(19): siRNA sense strand
ugaagagucuggaaagaga

SEQ ID NO: 889016 - RNA, 19 nt, Homo sapiens
  misc_RNA (1)...(19): siRNA sense strand
ugacaaagccaaagauuca

SEQ ID NO: 889017 - RNA, 19 nt, Homo sapiens
  misc_RNA (1)...(19): siRNA sense strand
gagagaacauccggaagau

SEQ ID NO: 889018 - RNA, 19 nt, Homo sapiens
  misc_RNA (1)...(19): siRNA sense strand
gcaaugacaaagccaaaga

SEQ ID NO: 889019 - RNA, 19 nt, Homo sapiens
  misc_RNA (1)...(19): siRNA sense strand
caaagccaaagauucaaua

SEQ ID NO: 889020 - RNA, 19 nt, Homo sapiens
  misc_RNA (1)...(19): siRNA sense strand
gaagaugcagggucucaug

SEQ ID NO: 889021 - RNA, 19 nt, Homo sapiens
  misc_RNA (1)...(19): siRNA sense strand
gaugcagggucucauguuc

SEQ ID NO: 889022 - RNA, 19 nt, Homo sapiens
  misc_RNA (1)...(19): siRNA sense strand
gccaaagauucaauagaug

SEQ ID NO: 889023 - RNA, 19 nt, Homo sapiens
  misc_RNA (1)...(19): siRNA sense strand
caauagaugcugggaguaa

SEQ ID NO: 889024 - RNA, 19 nt, Homo sapiens
  misc_RNA (1)...(19): siRNA sense strand
agccaaagauucaauagau

SEQ ID NO: 889025 - RNA, 19 nt, Homo sapiens
  misc_RNA (1)...(19): siRNA sense strand
ggugaagagucuggaaaga

SEQ ID NO: 889026 - RNA, 19 nt, Homo sapiens
  misc_RNA (1)...(19): siRNA sense strand
caacuaugaccaagaagau

SEQ ID NO: 889027 - RNA, 19 nt, Homo sapiens
  misc_RNA (1)...(19): siRNA sense strand
ugaaggaggcucucuuauc

SEQ ID NO: 889028 - RNA, 19 nt, Homo sapiens
  misc_RNA (1)...(19): siRNA sense strand
ucccaacuaugaccaagaa

SEQ ID NO: 889029 - RNA, 19 nt, Homo sapiens
  misc_RNA (1)...(19): siRNA sense strand
gcucucuuaucaauuggaa

SEQ ID NO: 889030 - RNA, 19 nt, Homo sapiens
  misc_RNA (1)...(19): siRNA sense strand
agagagaacauccggaaga

SEQ ID NO: 889031 - RNA, 19 nt, Homo sapiens
  misc_RNA (1)...(19): siRNA sense strand
acaguugugugaccaagug

SEQ ID NO: 889032 - RNA, 19 nt, Homo sapiens
  misc_RNA (1)...(19): siRNA sense strand
aggaggcucucuuaucaau

SEQ ID NO: 889033 - RNA, 19 nt, Homo sapiens
  misc_RNA (1)...(19): siRNA sense strand
cagcuggacaguuguguga

SEQ ID NO: 889034 - RNA, 19 nt, Homo sapiens
  misc_RNA (1)...(19): siRNA sense strand
ugaccaagaagaugaagga

SEQ ID NO: 889035 - RNA, 19 nt, Homo sapiens
  misc_RNA (1)...(19): siRNA sense strand
ccaacuaugaccaagaaga

SEQ ID NO: 889036 - RNA, 19 nt, Homo sapiens
  misc_RNA (1)...(19): siRNA sense strand
ugaccaaguguguggauga

SEQ ID NO: 889037 - RNA, 19 nt, Homo sapiens
  misc_RNA (1)...(19): siRNA sense strand
gcaccucaucccaacuaug

SEQ ID NO: 889038 - RNA, 19 nt, Homo sapiens
  misc_RNA (1)...(19): siRNA sense strand
acuaugaccaagaagauga

SEQ ID NO: 889039 - RNA, 19 nt, Homo sapiens
  misc_RNA (1)...(19): siRNA sense strand
ggaggcucucuuaucaauu

SEQ ID NO: 889040 - RNA, 19 nt, Homo sapiens
  misc_RNA (1)...(19): siRNA sense strand
aaugacaaagccaaagauu

SEQ ID NO: 889041 - RNA, 19 nt, Homo sapiens
  misc_RNA (1)...(19): siRNA sense strand
caaugacaaagccaaagau

SEQ ID NO: 889042 - RNA, 19 nt, Homo sapiens
  misc_RNA (1)...(19): siRNA sense strand
gcaucgagcgcugccaugu

SEQ ID NO: 889043 - RNA, 19 nt, Homo sapiens
  misc_RNA (1)...(19): siRNA sense strand
gaaagaacacugugaaauu

SEQ ID NO: 889044 - RNA, 19 nt, Homo sapiens
  misc_RNA (1)...(19): siRNA sense strand
gaacuuugaugaagauuug

SEQ ID NO: 889045 - RNA, 19 nt, Homo sapiens
  misc_RNA (1)...(19): siRNA sense strand
caaguuaucuguuaaguca

SEQ ID NO: 889046 - RNA, 19 nt, Homo sapiens
  misc_RNA (1)...(19): siRNA sense strand
gaugcaagcuggaauuuga

SEQ ID NO: 889047 - RNA, 19 nt, Homo sapiens
  misc_RNA (1)...(19): siRNA sense strand
uaucauaccugucacaaug

SEQ ID NO: 889048 - RNA, 19 nt, Homo sapiens
  misc_RNA (1)...(19): siRNA sense strand
aaacuuagauugcaacagu

SEQ ID NO: 889049 - RNA, 19 nt, Homo sapiens
  misc_RNA (1)...(19): siRNA sense strand
ccauuuagcuguuguucuu

SEQ ID NO: 889050 - RNA, 19 nt, Homo sapiens
  misc_RNA (1)...(19): siRNA sense strand
ucaggaccuuugauauuua

SEQ ID NO: 889051 - RNA, 19 nt, Homo sapiens
  misc_RNA (1)...(19): siRNA sense strand
gaauguuucucuuucuaug

SEQ ID NO: 889052 - RNA, 19 nt, Homo sapiens
  misc_RNA (1)...(19): siRNA sense strand
ucagagauaugccuucaug

SEQ ID NO: 889053 - RNA, 19 nt, Homo sapiens
  misc_RNA (1)...(19): siRNA sense strand
cagcaacacuggacuguca

SEQ ID NO: 889054 - RNA, 19 nt, Homo sapiens
  misc_RNA (1)...(19): siRNA sense strand
gaguugauuucugcgauua

SEQ ID NO: 889055 - RNA, 19 nt, Homo sapiens
  misc_RNA (1)...(19): siRNA sense strand
cagcaaacaaucagagaua

SEQ ID NO: 889056 - RNA, 19 nt, Homo sapiens
  misc_RNA (1)...(19): siRNA sense strand
guguuucccucuuugaaua

SEQ ID NO: 889057 - RNA, 19 nt, Homo sapiens
  misc_RNA (1)...(19): siRNA sense strand
gauugggccucauggauau

SEQ ID NO: 889058 - RNA, 19 nt, Homo sapiens
  misc_RNA (1)...(19): siRNA sense strand
ggaguugauuucugcgauu

SEQ ID NO: 889059 - RNA, 19 nt, Homo sapiens
  misc_RNA (1)...(19): siRNA sense strand
ucgcuuauccuuauuguaa

SEQ ID NO: 889060 - RNA, 19 nt, Homo sapiens
  misc_RNA (1)...(19): siRNA sense strand
ggugauguguauuguuuau

SEQ ID NO: 889061 - RNA, 19 nt, Homo sapiens
  misc_RNA (1)...(19): siRNA sense strand
gaucugaaauggcugaaaa

SEQ ID NO: 889062 - RNA, 19 nt, Homo sapiens
  misc_RNA (1)...(19): siRNA sense strand
ggaaagaucaauggauguu

SEQ ID NO: 889063 - RNA, 19 nt, Homo sapiens
  misc_RNA (1)...(19): siRNA sense strand
acccaaggcuuauugauau

SEQ ID NO: 889064 - RNA, 19 nt, Homo sapiens
  misc_RNA (1)...(19): siRNA sense strand
ugacguggucugccuguua

SEQ ID NO: 889065 - RNA, 19 nt, Homo sapiens
  misc_RNA (1)...(19): siRNA sense strand
aauauucccucuucauuca

SEQ ID NO: 889066 - RNA, 19 nt, Homo sapiens
  misc_RNA (1)...(19): siRNA sense strand
cagcuaagccugccacuuc

SEQ ID NO: 889067 - RNA, 19 nt, Homo sapiens
  misc_RNA (1)...(19): siRNA sense strand
uaagaaagaacacugugaa

SEQ ID NO: 889068 - RNA, 19 nt, Homo sapiens
  misc_RNA (1)...(19): siRNA sense strand
aaagaucaauggauguugu

SEQ ID NO: 889069 - RNA, 19 nt, Homo sapiens
  misc_RNA (1)...(19): siRNA sense strand
caaggcuuauugauauuug

SEQ ID NO: 889070 - RNA, 19 nt, Homo sapiens
  misc_RNA (1)...(19): siRNA sense strand
guggacaacuaagacauuu

SEQ ID NO: 889071 - RNA, 19 nt, Homo sapiens
  misc_RNA (1)...(19): siRNA sense strand
gaccuuugauauuuaggaa

SEQ ID NO: 889072 - RNA, 19 nt, Homo sapiens
  misc_RNA (1)...(19): siRNA sense strand
ggauauaucucugcaucag

SEQ ID NO: 889073 - RNA, 19 nt, Homo sapiens
  misc_RNA (1)...(19): siRNA sense strand
gaggaaaucaugaccagau

SEQ ID NO: 889074 - RNA, 19 nt, Homo sapiens
  misc_RNA (1)...(19): siRNA sense strand
gacguggucugccuguuau

SEQ ID NO: 889075 - RNA, 19 nt, Homo sapiens
  misc_RNA (1)...(19): siRNA sense strand
guucugggccugugaaguu

SEQ ID NO: 889076 - RNA, 19 nt, Homo sapiens
  misc_RNA (1)...(19): siRNA sense strand
gcaaacaaucagagauaug

SEQ ID NO: 889077 - RNA, 19 nt, Homo sapiens
  misc_RNA (1)...(19): siRNA sense strand
gcaguuauugacuccauuu

SEQ ID NO: 889078 - RNA, 19 nt, Homo sapiens
  misc_RNA (1)...(19): siRNA sense strand
guuaagucauuccauuguu

SEQ ID NO: 889079 - RNA, 19 nt, Homo sapiens
  misc_RNA (1)...(19): siRNA sense strand
gcuggaauuugaauguuuc

SEQ ID NO: 889080 - RNA, 19 nt, Homo sapiens
  misc_RNA (1)...(19): siRNA sense strand
ugagaacuuugaugaagau

SEQ ID NO: 889081 - RNA, 19 nt, Homo sapiens
  misc_RNA (1)...(19): siRNA sense strand
caaaaucaguuuccaaugg

SEQ ID NO: 889082 - RNA, 19 nt, Homo sapiens
  misc_RNA (1)...(19): siRNA sense strand
ucacagguguuucccucuu

SEQ ID NO: 889083 - RNA, 19 nt, Homo sapiens
  misc_RNA (1)...(19): siRNA sense strand
gggcuucuauacuuaaucu

SEQ ID NO: 889084 - RNA, 19 nt, Homo sapiens
  misc_RNA (1)...(19): siRNA sense strand
ugugaagccucguuuagga

SEQ ID NO: 889085 - RNA, 19 nt, Homo sapiens
  misc_RNA (1)...(19): siRNA sense strand
ugauugggccucauggaua

SEQ ID NO: 889086 - RNA, 19 nt, Homo sapiens
  misc_RNA (1)...(19): siRNA sense strand
ucuguuaagucauuccauu

SEQ ID NO: 889087 - RNA, 19 nt, Homo sapiens
  misc_RNA (1)...(19): siRNA sense strand
uagcuguuguucuugauga

SEQ ID NO: 889088 - RNA, 19 nt, Homo sapiens
  misc_RNA (1)...(19): siRNA sense strand
uaguguugaugaagacuuu

SEQ ID NO: 889089 - RNA, 19 nt, Homo sapiens
  misc_RNA (1)...(19): siRNA sense strand
gaaaucaugaccagaucug

SEQ ID NO: 889090 - RNA, 19 nt, Homo sapiens
  misc_RNA (1)...(19): siRNA sense strand
caugguaacuucugaaaau

SEQ ID NO: 889091 - RNA, 19 nt, Homo sapiens
  misc_RNA (1)...(19): siRNA sense strand
gacagucaacgacaaauca

SEQ ID NO: 889092 - RNA, 19 nt, Homo sapiens
  misc_RNA (1)...(19): siRNA sense strand
gcuggcuucuauaguguuu

SEQ ID NO: 889093 - RNA, 19 nt, Homo sapiens
  misc_RNA (1)...(19): siRNA sense strand
caaacuaugaagacccuaa

SEQ ID NO: 889094 - RNA, 19 nt, Homo sapiens
  misc_RNA (1)...(19): siRNA sense strand
ccugugaaguuuaccauag

SEQ ID NO: 889095 - RNA, 19 nt, Homo sapiens
  misc_RNA (1)...(19): siRNA sense strand
gauauuugcggaguugauu

SEQ ID NO: 889096 - RNA, 19 nt, Homo sapiens
  misc_RNA (1)...(19): siRNA sense strand
cucuacagauaucaaguua

SEQ ID NO: 889097 - RNA, 19 nt, Homo sapiens
  misc_RNA (1)...(19): siRNA sense strand
gaaagaucaauggauguug

SEQ ID NO: 889098 - RNA, 19 nt, Homo sapiens
  misc_RNA (1)...(19): siRNA sense strand
uagaugauucugaugauga

SEQ ID NO: 889099 - RNA, 19 nt, Homo sapiens
  misc_RNA (1)...(19): siRNA sense strand
gaccaucagcaaacaauca

SEQ ID NO: 889100 - RNA, 19 nt, Homo sapiens
  misc_RNA (1)...(19): siRNA sense strand
uuaagucauuccauuguuc

SEQ ID NO: 889101 - RNA, 19 nt, Homo sapiens
  misc_RNA (1)...(19): siRNA sense strand
auggugauguguauuguuu

SEQ ID NO: 889102 - RNA, 19 nt, Homo sapiens
  misc_RNA (1)...(19): siRNA sense strand
cacagguguuucccucuuu

SEQ ID NO: 889103 - RNA, 19 nt, Homo sapiens
  misc_RNA (1)...(19): siRNA sense strand
guuaguggauucagaugag

SEQ ID NO: 889104 - RNA, 19 nt, Homo sapiens
  misc_RNA (1)...(19): siRNA sense strand
ggaauuugaauguuucucu

SEQ ID NO: 889105 - RNA, 19 nt, Homo sapiens
  misc_RNA (1)...(19): siRNA sense strand
uagagacagucaacgacaa

SEQ ID NO: 889106 - RNA, 19 nt, Homo sapiens
  misc_RNA (1)...(19): siRNA sense strand
aacccaaggcuuauugaua

SEQ ID NO: 889107 - RNA, 19 nt, Homo sapiens
  misc_RNA (1)...(19): siRNA sense strand
uaguguggcauuugaagua

SEQ ID NO: 889108 - RNA, 19 nt, Homo sapiens
  misc_RNA (1)...(19): siRNA sense strand
caagcuggaauuugaaugu

SEQ ID NO: 889109 - RNA, 19 nt, Homo sapiens
  misc_RNA (1)...(19): siRNA sense strand
augaagacccuaaggcuaa

SEQ ID NO: 889110 - RNA, 19 nt, Homo sapiens
  misc_RNA (1)...(19): siRNA sense strand
cugagaacuuugaugaaga

SEQ ID NO: 889111 - RNA, 19 nt, Homo sapiens
  misc_RNA (1)...(19): siRNA sense strand
gguggacaacuaagacauu

SEQ ID NO: 889112 - RNA, 19 nt, Homo sapiens
  misc_RNA (1)...(19): siRNA sense strand
agaaagaacacugugaaau

SEQ ID NO: 889113 - RNA, 19 nt, Homo sapiens
  misc_RNA (1)...(19): siRNA sense strand
guuuaacucuacagauauc

SEQ ID NO: 889114 - RNA, 19 nt, Homo sapiens
  misc_RNA (1)...(19): siRNA sense strand
ucugagaacuuugaugaag

SEQ ID NO: 889115 - RNA, 19 nt, Homo sapiens
  misc_RNA (1)...(19): siRNA sense strand
aaucagagauaugccuuca

SEQ ID NO: 889116 - RNA, 19 nt, Homo sapiens
  misc_RNA (1)...(19): siRNA sense strand
ccaaggcuuauugauauuu

SEQ ID NO: 889117 - RNA, 19 nt, Homo sapiens
  misc_RNA (1)...(19): siRNA sense strand
agaugauucugaugaugaa

SEQ ID NO: 889118 - RNA, 19 nt, Homo sapiens
  misc_RNA (1)...(19): siRNA sense strand
gagaccaucagcaaacaau

SEQ ID NO: 889119 - RNA, 19 nt, Homo sapiens
  misc_RNA (1)...(19): siRNA sense strand
ugugcuggcuucuauagug

SEQ ID NO: 889120 - RNA, 19 nt, Homo sapiens
  misc_RNA (1)...(19): siRNA sense strand
gacguuggcucgccuucuc

SEQ ID NO: 889121 - RNA, 19 nt, Homo sapiens
  misc_RNA (1)...(19): siRNA sense strand
uggcuucuauaguguuuau

SEQ ID NO: 889122 - RNA, 19 nt, Homo sapiens
  misc_RNA (1)...(19): siRNA sense strand
gauuugaaguggguagaag

SEQ ID NO: 889123 - RNA, 19 nt, Homo sapiens
  misc_RNA (1)...(19): siRNA sense strand
gcuuauccuuauuguaauc

SEQ ID NO: 889124 - RNA, 19 nt, Homo sapiens
  misc_RNA (1)...(19): siRNA sense strand
gaagccucguuuaggaaca

SEQ ID NO: 889125 - RNA, 19 nt, Homo sapiens
  misc_RNA (1)...(19): siRNA sense strand
ugaaguggguagaagaaaa

SEQ ID NO: 889126 - RNA, 19 nt, Homo sapiens
  misc_RNA (1)...(19): siRNA sense strand
auugaggaauucaugguaa

SEQ ID NO: 889127 - RNA, 19 nt, Homo sapiens
  misc_RNA (1)...(19): siRNA sense strand
uugcugugcuggcuucuau

SEQ ID NO: 889128 - RNA, 19 nt, Homo sapiens
  misc_RNA (1)...(19): siRNA sense strand
cuaagaaagaacacuguga

SEQ ID NO: 889129 - RNA, 19 nt, Homo sapiens
  misc_RNA (1)...(19): siRNA sense strand
gugcuggcuucuauagugu

SEQ ID NO: 889130 - RNA, 19 nt, Homo sapiens
  misc_RNA (1)...(19): siRNA sense strand
aaauauucccucuucauuc

SEQ ID NO: 889131 - RNA, 19 nt, Homo sapiens
  misc_RNA (1)...(19): siRNA sense strand
gaaaauauucccucuucau

SEQ ID NO: 889132 - RNA, 19 nt, Homo sapiens
  misc_RNA (1)...(19): siRNA sense strand
caggaccuuugauauuuag

SEQ ID NO: 889133 - RNA, 19 nt, Homo sapiens
  misc_RNA (1)...(19): siRNA sense strand
ccucuucauucacagaugu

SEQ ID NO: 889134 - RNA, 19 nt, Homo sapiens
  misc_RNA (1)...(19): siRNA sense strand
cuucaugcccuuaauagau

SEQ ID NO: 889135 - RNA, 19 nt, Homo sapiens
  misc_RNA (1)...(19): siRNA sense strand
caaacaaucagagauaugc

SEQ ID NO: 889136 - RNA, 19 nt, Homo sapiens
  misc_RNA (1)...(19): siRNA sense strand
gaaggcgugaugagaguca

SEQ ID NO: 889137 - RNA, 19 nt, Homo sapiens
  misc_RNA (1)...(19): siRNA sense strand
gcauugugaagccucguuu

SEQ ID NO: 889138 - RNA, 19 nt, Homo sapiens
  misc_RNA (1)...(19): siRNA sense strand
gauggguuucauaucuuua

SEQ ID NO: 889139 - RNA, 19 nt, Homo sapiens
  misc_RNA (1)...(19): siRNA sense strand
ggaccuuugauauuuagga

SEQ ID NO: 889140 - RNA, 19 nt, Homo sapiens
  misc_RNA (1)...(19): siRNA sense strand
ggauggaacgcuggguuga

SEQ ID NO: 889141 - RNA, 19 nt, Homo sapiens
  misc_RNA (1)...(19): siRNA sense strand
aagaaagaacacugugaaa

SEQ ID NO: 889142 - RNA, 19 nt, Homo sapiens
  misc_RNA (1)...(19): siRNA sense strand
cccaaggcuuauugauauu

SEQ ID NO: 889143 - RNA, 19 nt, Homo sapiens
  misc_RNA (1)...(19): siRNA sense strand
gagaaugugggaaaucuuu

SEQ ID NO: 889144 - RNA, 19 nt, Homo sapiens
  misc_RNA (1)...(19): siRNA sense strand
gagaaugugggaaaucuuu

SEQ ID NO: 889145 - RNA, 19 nt, Homo sapiens
  misc_RNA (1)...(19): siRNA sense strand
uuacaaguguggagaaugu

SEQ ID NO: 889146 - RNA, 19 nt, Homo sapiens
  misc_RNA (1)...(19): siRNA sense strand
ggagaaugugggaaaucuu

SEQ ID NO: 889147 - RNA, 19 nt, Homo sapiens
  misc_RNA (1)...(19): siRNA sense strand
uggagaaugugggaaaucu

SEQ ID NO: 889148 - RNA, 19 nt, Homo sapiens
  misc_RNA (1)...(19): siRNA sense strand
gcagugaaugugggaaauc

SEQ ID NO: 889149 - RNA, 19 nt, Homo sapiens
  misc_RNA (1)...(19): siRNA sense strand
gagaguucacacuggagaa

SEQ ID NO: 889150 - RNA, 19 nt, Homo sapiens
  misc_RNA (1)...(19): siRNA sense strand
gagaaugugggaaaucuuu

SEQ ID NO: 889151 - RNA, 19 nt, Homo sapiens
  misc_RNA (1)...(19): siRNA sense strand
uuacaaguguggagaaugu

SEQ ID NO: 889152 - RNA, 19 nt, Homo sapiens
  misc_RNA (1)...(19): siRNA sense strand
uuacaaguguggagaaugu

SEQ ID NO: 889153 - RNA, 19 nt, Homo sapiens
  misc_RNA (1)...(19): siRNA sense strand
ggagaaugugggaaaucuu

SEQ ID NO: 889154 - RNA, 19 nt, Homo sapiens
  misc_RNA (1)...(19): siRNA sense strand
ggagaaugugggaaaucuu

SEQ ID NO: 889155 - RNA, 19 nt, Homo sapiens
  misc_RNA (1)...(19): siRNA sense strand
uggagaaugugggaaaucu

SEQ ID NO: 889156 - RNA, 19 nt, Homo sapiens
  misc_RNA (1)...(19): siRNA sense strand
uggagaaugugggaaaucu

SEQ ID NO: 889157 - RNA, 19 nt, Homo sapiens
  misc_RNA (1)...(19): siRNA sense strand
gcagugaaugugggaaauc

SEQ ID NO: 889158 - RNA, 19 nt, Homo sapiens
  misc_RNA (1)...(19): siRNA sense strand
gcagugaaugugggaaauc

SEQ ID NO: 889159 - RNA, 19 nt, Homo sapiens
  misc_RNA (1)...(19): siRNA sense strand
gagaguucacacuggagaa

SEQ ID NO: 889160 - RNA, 19 nt, Homo sapiens
  misc_RNA (1)...(19): siRNA sense strand
gagaguucacacuggagaa

SEQ ID NO: 889161 - RNA, 19 nt, Homo sapiens
  misc_RNA (1)...(19): siRNA sense strand
gcagacagcggccuggauu

SEQ ID NO: 889162 - RNA, 19 nt, Homo sapiens
  misc_RNA (1)...(19): siRNA sense strand
uggaguaucucaucaacga

SEQ ID NO: 889163 - RNA, 19 nt, Homo sapiens
  misc_RNA (1)...(19): siRNA sense strand
ggacgccuaugccgagaag

SEQ ID NO: 889164 - RNA, 19 nt, Homo sapiens
  misc_RNA (1)...(19): siRNA sense strand
ucacuggaguaucucauca

SEQ ID NO: 889165 - RNA, 19 nt, Homo sapiens
  misc_RNA (1)...(19): siRNA sense strand
gcacagucaauggcuauga

SEQ ID NO: 889166 - RNA, 19 nt, Homo sapiens
  misc_RNA (1)...(19): siRNA sense strand
gccuacccgucuacagaua

SEQ ID NO: 889167 - RNA, 19 nt, Homo sapiens
  misc_RNA (1)...(19): siRNA sense strand
caccguaggccaguacuuu

SEQ ID NO: 889168 - RNA, 19 nt, Homo sapiens
  misc_RNA (1)...(19): siRNA sense strand
ccgagaagguggccaacag

SEQ ID NO: 889169 - RNA, 19 nt, Homo sapiens
  misc_RNA (1)...(19): siRNA sense strand
ccaccagcaugcccacauc

SEQ ID NO: 889170 - RNA, 19 nt, Homo sapiens
  misc_RNA (1)...(19): siRNA sense strand
caccucagccgcacaguca

SEQ ID NO: 889171 - RNA, 19 nt, Homo sapiens
  misc_RNA (1)...(19): siRNA sense strand
cagacagcggccuggauua

SEQ ID NO: 889172 - RNA, 19 nt, Homo sapiens
  misc_RNA (1)...(19): siRNA sense strand
ccaaaagugugcucaagag

SEQ ID NO: 889173 - RNA, 19 nt, Homo sapiens
  misc_RNA (1)...(19): siRNA sense strand
gaacagugugcuggugaca

SEQ ID NO: 889174 - RNA, 19 nt, Homo sapiens
  misc_RNA (1)...(19): siRNA sense strand
ccgccuacccgucuacaga

SEQ ID NO: 889175 - RNA, 19 nt, Homo sapiens
  misc_RNA (1)...(19): siRNA sense strand
ccagcaagagugugugcaa

SEQ ID NO: 889176 - RNA, 19 nt, Homo sapiens
  misc_RNA (1)...(19): siRNA sense strand
gaagaaauuuggaaccuaa

SEQ ID NO: 889177 - RNA, 19 nt, Homo sapiens
  misc_RNA (1)...(19): siRNA sense strand
ccaguuugcucaucacuua

SEQ ID NO: 889178 - RNA, 19 nt, Homo sapiens
  misc_RNA (1)...(19): siRNA sense strand
gcucaucacuuagaacuuu

SEQ ID NO: 889179 - RNA, 19 nt, Homo sapiens
  misc_RNA (1)...(19): siRNA sense strand
ucaaggagcucugcauauu

SEQ ID NO: 889180 - RNA, 19 nt, Homo sapiens
  misc_RNA (1)...(19): siRNA sense strand
cgaguacguuucuuuaauu

SEQ ID NO: 889181 - RNA, 19 nt, Homo sapiens
  misc_RNA (1)...(19): siRNA sense strand
gaaggacagcgacucuuua

SEQ ID NO: 889182 - RNA, 19 nt, Homo sapiens
  misc_RNA (1)...(19): siRNA sense strand
ggacagcgacucuuuagug

SEQ ID NO: 889183 - RNA, 19 nt, Homo sapiens
  misc_RNA (1)...(19): siRNA sense strand
gacaaacaguauacagauu

SEQ ID NO: 889184 - RNA, 19 nt, Homo sapiens
  misc_RNA (1)...(19): siRNA sense strand
caaacuacuuucaggagaa

SEQ ID NO: 889185 - RNA, 19 nt, Homo sapiens
  misc_RNA (1)...(19): siRNA sense strand
ucuaucggcugaauuauga

SEQ ID NO: 889186 - RNA, 19 nt, Homo sapiens
  misc_RNA (1)...(19): siRNA sense strand
gcacuguggaaauuuauaa

SEQ ID NO: 889187 - RNA, 19 nt, Homo sapiens
  misc_RNA (1)...(19): siRNA sense strand
gcacauccuucuccaugau

SEQ ID NO: 889188 - RNA, 19 nt, Homo sapiens
  misc_RNA (1)...(19): siRNA sense strand
cauugcagcugguuccaua

SEQ ID NO: 889189 - RNA, 19 nt, Homo sapiens
  misc_RNA (1)...(19): siRNA sense strand
gcgagauuauggaguauga

SEQ ID NO: 889190 - RNA, 19 nt, Homo sapiens
  misc_RNA (1)...(19): siRNA sense strand
cccaguggcucucaacuuu

SEQ ID NO: 889191 - RNA, 19 nt, Homo sapiens
  misc_RNA (1)...(19): siRNA sense strand
aacauuaucuguagcugua

SEQ ID NO: 889192 - RNA, 19 nt, Homo sapiens
  misc_RNA (1)...(19): siRNA sense strand
gaacacucguggcaguaga

SEQ ID NO: 889193 - RNA, 19 nt, Homo sapiens
  misc_RNA (1)...(19): siRNA sense strand
gaagguggaaguaaagaau

SEQ ID NO: 889194 - RNA, 19 nt, Homo sapiens
  misc_RNA (1)...(19): siRNA sense strand
gcgcacagcucaugcuuuu

SEQ ID NO: 889195 - RNA, 19 nt, Homo sapiens
  misc_RNA (1)...(19): siRNA sense strand
caaaaggguuuccaaaaug

SEQ ID NO: 889196 - RNA, 19 nt, Homo sapiens
  misc_RNA (1)...(19): siRNA sense strand
uggagaagguggaaguaaa

SEQ ID NO: 889197 - RNA, 19 nt, Homo sapiens
  misc_RNA (1)...(19): siRNA sense strand
gaucauuuacugcaccuaa

SEQ ID NO: 889198 - RNA, 19 nt, Homo sapiens
  misc_RNA (1)...(19): siRNA sense strand
guccaugucuacaacguaa

SEQ ID NO: 889199 - RNA, 19 nt, Homo sapiens
  misc_RNA (1)...(19): siRNA sense strand
uuacaggcguuaaacauca

SEQ ID NO: 889200 - RNA, 19 nt, Homo sapiens
  misc_RNA (1)...(19): siRNA sense strand
caucaaguaugcuauggau

SEQ ID NO: 889201 - RNA, 19 nt, Homo sapiens
  misc_RNA (1)...(19): siRNA sense strand
caucgaguacguuucuuua

SEQ ID NO: 889202 - RNA, 19 nt, Homo sapiens
  misc_RNA (1)...(19): siRNA sense strand
gagauuauggaguaugauu

SEQ ID NO: 889203 - RNA, 19 nt, Homo sapiens
  misc_RNA (1)...(19): siRNA sense strand
gcagcgcuguucauaagau

SEQ ID NO: 889204 - RNA, 19 nt, Homo sapiens
  misc_RNA (1)...(19): siRNA sense strand
gcacugacacccacuuagu

SEQ ID NO: 889205 - RNA, 19 nt, Homo sapiens
  misc_RNA (1)...(19): siRNA sense strand
gcacagcucaugcuuuuaa

SEQ ID NO: 889206 - RNA, 19 nt, Homo sapiens
  misc_RNA (1)...(19): siRNA sense strand
gacaaaggguccugagaac

SEQ ID NO: 889207 - RNA, 19 nt, Homo sapiens
  misc_RNA (1)...(19): siRNA sense strand
ugucucaucuccuguucua

SEQ ID NO: 889208 - RNA, 19 nt, Homo sapiens
  misc_RNA (1)...(19): siRNA sense strand
ucaaaaggguuuccaaaau

SEQ ID NO: 889209 - RNA, 19 nt, Homo sapiens
  misc_RNA (1)...(19): siRNA sense strand
guacagcaucccagacaaa

SEQ ID NO: 889210 - RNA, 19 nt, Homo sapiens
  misc_RNA (1)...(19): siRNA sense strand
agguggaaguaaagaauua

SEQ ID NO: 889211 - RNA, 19 nt, Homo sapiens
  misc_RNA (1)...(19): siRNA sense strand
gcuguguggcuuacaauaa

SEQ ID NO: 889212 - RNA, 19 nt, Homo sapiens
  misc_RNA (1)...(19): siRNA sense strand
ucgaguacguuucuuuaau

SEQ ID NO: 889213 - RNA, 19 nt, Homo sapiens
  misc_RNA (1)...(19): siRNA sense strand
uauauaagccucuacucuu

SEQ ID NO: 889214 - RNA, 19 nt, Homo sapiens
  misc_RNA (1)...(19): siRNA sense strand
gcuuacaauuucccaguga

SEQ ID NO: 889215 - RNA, 19 nt, Homo sapiens
  misc_RNA (1)...(19): siRNA sense strand
caaaggguccugagaacau

SEQ ID NO: 889216 - RNA, 19 nt, Homo sapiens
  misc_RNA (1)...(19): siRNA sense strand
agagccaucucaucgcuaa

SEQ ID NO: 889217 - RNA, 19 nt, Homo sapiens
  misc_RNA (1)...(19): siRNA sense strand
agacaaaggguccugagaa

SEQ ID NO: 889218 - RNA, 19 nt, Homo sapiens
  misc_RNA (1)...(19): siRNA sense strand
ugacacccacuuagucuuu

SEQ ID NO: 889219 - RNA, 19 nt, Homo sapiens
  misc_RNA (1)...(19): siRNA sense strand
aaggagcucugcauauugu

SEQ ID NO: 889220 - RNA, 19 nt, Homo sapiens
  misc_RNA (1)...(19): siRNA sense strand
agaagaaauuuggaaccua

SEQ ID NO: 889221 - RNA, 19 nt, Homo sapiens
  misc_RNA (1)...(19): siRNA sense strand
uagaacggccucuggauga

SEQ ID NO: 889222 - RNA, 19 nt, Homo sapiens
  misc_RNA (1)...(19): siRNA sense strand
gaacaguggaggccaugug

SEQ ID NO: 889223 - RNA, 19 nt, Homo sapiens
  misc_RNA (1)...(19): siRNA sense strand
ccugagaacauuaucugua

SEQ ID NO: 889224 - RNA, 19 nt, Homo sapiens
  misc_RNA (1)...(19): siRNA sense strand
gacaaaaccuuacucuaca

SEQ ID NO: 889225 - RNA, 19 nt, Homo sapiens
  misc_RNA (1)...(19): siRNA sense strand
uacauguucugcaucauug

SEQ ID NO: 889226 - RNA, 19 nt, Homo sapiens
  misc_RNA (1)...(19): siRNA sense strand
gcagggcuuucaccaccuu

SEQ ID NO: 889227 - RNA, 19 nt, Homo sapiens
  misc_RNA (1)...(19): siRNA sense strand
caaggagcucugcauauug

SEQ ID NO: 889228 - RNA, 19 nt, Homo sapiens
  misc_RNA (1)...(19): siRNA sense strand
ugcuguagcugaccaagaa

SEQ ID NO: 889229 - RNA, 19 nt, Homo sapiens
  misc_RNA (1)...(19): siRNA sense strand
caaacaguauacagauugg

SEQ ID NO: 889230 - RNA, 19 nt, Homo sapiens
  misc_RNA (1)...(19): siRNA sense strand
cugagaacauuaucuguag

SEQ ID NO: 889231 - RNA, 19 nt, Homo sapiens
  misc_RNA (1)...(19): siRNA sense strand
ggagaagguggaaguaaag

SEQ ID NO: 889232 - RNA, 19 nt, Homo sapiens
  misc_RNA (1)...(19): siRNA sense strand
gaacagucuuccauuuuca

SEQ ID NO: 889233 - RNA, 19 nt, Homo sapiens
  misc_RNA (1)...(19): siRNA sense strand
agaaggacagcgacucuuu

SEQ ID NO: 889234 - RNA, 19 nt, Homo sapiens
  misc_RNA (1)...(19): siRNA sense strand
auauaagccucuacucuuc

SEQ ID NO: 889235 - RNA, 19 nt, Homo sapiens
  misc_RNA (1)...(19): siRNA sense strand
acaaacaguauacagauug

SEQ ID NO: 889236 - RNA, 19 nt, Homo sapiens
  misc_RNA (1)...(19): siRNA sense strand
aggcagcgcuguucauaag

SEQ ID NO: 889237 - RNA, 19 nt, Homo sapiens
  misc_RNA (1)...(19): siRNA sense strand
cgauggcacuaucauaagu

SEQ ID NO: 889238 - RNA, 19 nt, Homo sapiens
  misc_RNA (1)...(19): siRNA sense strand
agauggcacuguggaaauu

SEQ ID NO: 889239 - RNA, 19 nt, Homo sapiens
  misc_RNA (1)...(19): siRNA sense strand
cuacauguucugcaucauu

SEQ ID NO: 889240 - RNA, 19 nt, Homo sapiens
  misc_RNA (1)...(19): siRNA sense strand
gcauauuguucagcuguca

SEQ ID NO: 889241 - RNA, 19 nt, Homo sapiens
  misc_RNA (1)...(19): siRNA sense strand
aaucaaggagcucugcaua

SEQ ID NO: 889242 - RNA, 19 nt, Homo sapiens
  misc_RNA (1)...(19): siRNA sense strand
aaaggguccugagaacauu

SEQ ID NO: 889243 - RNA, 19 nt, Homo sapiens
  misc_RNA (1)...(19): siRNA sense strand
ucucaucuccuguucuaaa

SEQ ID NO: 889244 - RNA, 19 nt, Homo sapiens
  misc_RNA (1)...(19): siRNA sense strand
uaucauaaguguggacucu

SEQ ID NO: 889245 - RNA, 19 nt, Homo sapiens
  misc_RNA (1)...(19): siRNA sense strand
uacaauaaccagucaaaca

SEQ ID NO: 889246 - RNA, 19 nt, Homo sapiens
  misc_RNA (1)...(19): siRNA sense strand
uaacuugucagcaaacuac

SEQ ID NO: 889247 - RNA, 19 nt, Homo sapiens
  misc_RNA (1)...(19): siRNA sense strand
cagacaaacaguauacaga

SEQ ID NO: 889248 - RNA, 19 nt, Homo sapiens
  misc_RNA (1)...(19): siRNA sense strand
caaauuaccccagacaaaa

SEQ ID NO: 889249 - RNA, 19 nt, Homo sapiens
  misc_RNA (1)...(19): siRNA sense strand
cagcucccaccacccauua

SEQ ID NO: 889250 - RNA, 19 nt, Homo sapiens
  misc_RNA (1)...(19): siRNA sense strand
guggaggccaugugucuuu

SEQ ID NO: 889251 - RNA, 19 nt, Homo sapiens
  misc_RNA (1)...(19): siRNA sense strand
cguuaaacaucaaguaugc

SEQ ID NO: 889252 - RNA, 19 nt, Homo sapiens
  misc_RNA (1)...(19): siRNA sense strand
caauaaccagucaaacaga

SEQ ID NO: 889253 - RNA, 19 nt, Homo sapiens
  misc_RNA (1)...(19): siRNA sense strand
guucagcugucaggaggaa

SEQ ID NO: 889254 - RNA, 19 nt, Homo sapiens
  misc_RNA (1)...(19): siRNA sense strand
caucaggaauccgcugugu

SEQ ID NO: 889255 - RNA, 19 nt, Homo sapiens
  misc_RNA (1)...(19): siRNA sense strand
ccacugggacgcuugugaa

SEQ ID NO: 889256 - RNA, 19 nt, Homo sapiens
  misc_RNA (1)...(19): siRNA sense strand
ucaggcagcgcuguucaua

SEQ ID NO: 889257 - RNA, 19 nt, Homo sapiens
  misc_RNA (1)...(19): siRNA sense strand
caaaucaggcagcgcuguu

SEQ ID NO: 889258 - RNA, 19 nt, Homo sapiens
  misc_RNA (1)...(19): siRNA sense strand
aaacaucaaguaugcuaug

SEQ ID NO: 889259 - RNA, 19 nt, Homo sapiens
  misc_RNA (1)...(19): siRNA sense strand
uaaccagucaaacagauug

SEQ ID NO: 889260 - RNA, 19 nt, Homo sapiens
  misc_RNA (1)...(19): siRNA sense strand
gcagaaggacagcgacucu

SEQ ID NO: 889261 - RNA, 19 nt, Homo sapiens
  misc_RNA (1)...(19): siRNA sense strand
agacaaacaguauacagau

SEQ ID NO: 889262 - RNA, 19 nt, Homo sapiens
  misc_RNA (1)...(19): siRNA sense strand
cacggugccugcuuacaau

SEQ ID NO: 889263 - RNA, 19 nt, Homo sapiens
  misc_RNA (1)...(19): siRNA sense strand
gccuacauguucugcauca

SEQ ID NO: 889264 - RNA, 19 nt, Homo sapiens
  misc_RNA (1)...(19): siRNA sense strand
uaagguccaucgaguacgu

SEQ ID NO: 889265 - RNA, 19 nt, Homo sapiens
  misc_RNA (1)...(19): siRNA sense strand
gaguacagcaucccagaca

SEQ ID NO: 889266 - RNA, 19 nt, Homo sapiens
  misc_RNA (1)...(19): siRNA sense strand
ugacugcuauggcuauugc

SEQ ID NO: 889267 - RNA, 19 nt, Homo sapiens
  misc_RNA (1)...(19): siRNA sense strand
ggugccugcuuacaauuuc

SEQ ID NO: 889268 - RNA, 19 nt, Homo sapiens
  misc_RNA (1)...(19): siRNA sense strand
gcagcugguuccauagacu

SEQ ID NO: 889269 - RNA, 19 nt, Homo sapiens
  misc_RNA (1)...(19): siRNA sense strand
caaaaccguuccagcauca

SEQ ID NO: 889270 - RNA, 19 nt, Homo sapiens
  misc_RNA (1)...(19): siRNA sense strand
uccgauggcacuaucauaa

SEQ ID NO: 889271 - RNA, 19 nt, Homo sapiens
  misc_RNA (1)...(19): siRNA sense strand
aauaaccagucaaacagau

SEQ ID NO: 889272 - RNA, 19 nt, Homo sapiens
  misc_RNA (1)...(19): siRNA sense strand
uuacugcaccuaaagacaa

SEQ ID NO: 889273 - RNA, 19 nt, Homo sapiens
  misc_RNA (1)...(19): siRNA sense strand
cagcaucacacucaugaca

SEQ ID NO: 889274 - RNA, 19 nt, Homo sapiens
  misc_RNA (1)...(19): siRNA sense strand
gcucccaccacccauuaaa

SEQ ID NO: 889275 - RNA, 19 nt, Homo sapiens
  misc_RNA (1)...(19): siRNA sense strand
auggcgagauuauggagua

SEQ ID NO: 889276 - RNA, 19 nt, Homo sapiens
  misc_RNA (1)...(19): siRNA sense strand
gugcugcucugcuggauca

SEQ ID NO: 889277 - RNA, 19 nt, Homo sapiens
  misc_RNA (1)...(19): siRNA sense strand
gagcuuaacgugccuaucg

SEQ ID NO: 889278 - RNA, 19 nt, Homo sapiens
  misc_RNA (1)...(19): siRNA sense strand
uggaacuggucaccucuaa

SEQ ID NO: 889279 - RNA, 19 nt, Homo sapiens
  misc_RNA (1)...(19): siRNA sense strand
gaacuggucaccucuaacc

SEQ ID NO: 889280 - RNA, 19 nt, Homo sapiens
  misc_RNA (1)...(19): siRNA sense strand
ggucuucaccauccacuuc

SEQ ID NO: 889281 - RNA, 19 nt, Homo sapiens
  misc_RNA (1)...(19): siRNA sense strand
uggagacgcaguaccagua

SEQ ID NO: 889282 - RNA, 19 nt, Homo sapiens
  misc_RNA (1)...(19): siRNA sense strand
gagcagggccaagcugaag

SEQ ID NO: 889283 - RNA, 19 nt, Homo sapiens
  misc_RNA (1)...(19): siRNA sense strand
gaucgaggagcuccacaag

SEQ ID NO: 889284 - RNA, 19 nt, Homo sapiens
  misc_RNA (1)...(19): siRNA sense strand
gcaacauccacaaccugaa

SEQ ID NO: 889285 - RNA, 19 nt, Homo sapiens
  misc_RNA (1)...(19): siRNA sense strand
caacauccacaaccugaac

SEQ ID NO: 889286 - RNA, 19 nt, Homo sapiens
  misc_RNA (1)...(19): siRNA sense strand
caccgugcuuggcauccua

SEQ ID NO: 889287 - RNA, 19 nt, Homo sapiens
  misc_RNA (1)...(19): siRNA sense strand
ggauauugcuugacauuug

SEQ ID NO: 889288 - RNA, 19 nt, Homo sapiens
  misc_RNA (1)...(19): siRNA sense strand
gaaacgaauucaagaaaca

SEQ ID NO: 889289 - RNA, 19 nt, Homo sapiens
  misc_RNA (1)...(19): siRNA sense strand
gaagucagcuaucagaaca

SEQ ID NO: 889290 - RNA, 19 nt, Homo sapiens
  misc_RNA (1)...(19): siRNA sense strand
gaaaggcugucgugacuca

SEQ ID NO: 889291 - RNA, 19 nt, Homo sapiens
  misc_RNA (1)...(19): siRNA sense strand
gcgcagaaaucuuugaguu

SEQ ID NO: 889292 - RNA, 19 nt, Homo sapiens
  misc_RNA (1)...(19): siRNA sense strand
ccacagcgcagaaaucuuu

SEQ ID NO: 889293 - RNA, 19 nt, Homo sapiens
  misc_RNA (1)...(19): siRNA sense strand
gauauugcuugacauuuga

SEQ ID NO: 889294 - RNA, 19 nt, Homo sapiens
  misc_RNA (1)...(19): siRNA sense strand
gaacacagagaaagaaugu

SEQ ID NO: 889295 - RNA, 19 nt, Homo sapiens
  misc_RNA (1)...(19): siRNA sense strand
gagaaaggcugucgugacu

SEQ ID NO: 889296 - RNA, 19 nt, Homo sapiens
  misc_RNA (1)...(19): siRNA sense strand
ggagagggccgaauaagug

SEQ ID NO: 889297 - RNA, 19 nt, Homo sapiens
  misc_RNA (1)...(19): siRNA sense strand
ccaaaacacugcagagaua

SEQ ID NO: 889298 - RNA, 19 nt, Homo sapiens
  misc_RNA (1)...(19): siRNA sense strand
gaacuuuacagcaacaauu

SEQ ID NO: 889299 - RNA, 19 nt, Homo sapiens
  misc_RNA (1)...(19): siRNA sense strand
gaacagugauggaaauagc

SEQ ID NO: 889300 - RNA, 19 nt, Homo sapiens
  misc_RNA (1)...(19): siRNA sense strand
gaaagugaauguccagacu

SEQ ID NO: 889301 - RNA, 19 nt, Homo sapiens
  misc_RNA (1)...(19): siRNA sense strand
caagcaggcucuucuaagu

SEQ ID NO: 889302 - RNA, 19 nt, Homo sapiens
  misc_RNA (1)...(19): siRNA sense strand
cagaagaugcuauuggaua

SEQ ID NO: 889303 - RNA, 19 nt, Homo sapiens
  misc_RNA (1)...(19): siRNA sense strand
ggaaacaaguucugaucca

SEQ ID NO: 889304 - RNA, 19 nt, Homo sapiens
  misc_RNA (1)...(19): siRNA sense strand
gcuauuggauauugcuuga

SEQ ID NO: 889305 - RNA, 19 nt, Homo sapiens
  misc_RNA (1)...(19): siRNA sense strand
ccuacaacccuuuaaauuu

SEQ ID NO: 889306 - RNA, 19 nt, Homo sapiens
  misc_RNA (1)...(19): siRNA sense strand
ucaaaggacuuaauguucu

SEQ ID NO: 889307 - RNA, 19 nt, Homo sapiens
  misc_RNA (1)...(19): siRNA sense strand
gagauaacccaacacaguu

SEQ ID NO: 889308 - RNA, 19 nt, Homo sapiens
  misc_RNA (1)...(19): siRNA sense strand
acacagagaaagaauguuu

SEQ ID NO: 889309 - RNA, 19 nt, Homo sapiens
  misc_RNA (1)...(19): siRNA sense strand
ucagugugguauccuauuu

SEQ ID NO: 889310 - RNA, 19 nt, Homo sapiens
  misc_RNA (1)...(19): siRNA sense strand
agaagaugcuauuggauau

SEQ ID NO: 889311 - RNA, 19 nt, Homo sapiens
  misc_RNA (1)...(19): siRNA sense strand
ucagacugcugccagaauu

SEQ ID NO: 889312 - RNA, 19 nt, Homo sapiens
  misc_RNA (1)...(19): siRNA sense strand
gcaugaaacggcuggaauu

SEQ ID NO: 889313 - RNA, 19 nt, Homo sapiens
  misc_RNA (1)...(19): siRNA sense strand
gcagggauguccaccucuu

SEQ ID NO: 889314 - RNA, 19 nt, Homo sapiens
  misc_RNA (1)...(19): siRNA sense strand
ggauuugucuggcaagucu

SEQ ID NO: 889315 - RNA, 19 nt, Homo sapiens
  misc_RNA (1)...(19): siRNA sense strand
ucagaacagugauggaaau

SEQ ID NO: 889316 - RNA, 19 nt, Homo sapiens
  misc_RNA (1)...(19): siRNA sense strand
cagaaacgaauucaagaaa

SEQ ID NO: 889317 - RNA, 19 nt, Homo sapiens
  misc_RNA (1)...(19): siRNA sense strand
caguguagauccuuauaau

SEQ ID NO: 889318 - RNA, 19 nt, Homo sapiens
  misc_RNA (1)...(19): siRNA sense strand
ccgaauaaguguaguugau

SEQ ID NO: 889319 - RNA, 19 nt, Homo sapiens
  misc_RNA (1)...(19): siRNA sense strand
ucugagggcuguccaucua

SEQ ID NO: 889320 - RNA, 19 nt, Homo sapiens
  misc_RNA (1)...(19): siRNA sense strand
gaagggauccacuggcaau

SEQ ID NO: 889321 - RNA, 19 nt, Homo sapiens
  misc_RNA (1)...(19): siRNA sense strand
caaaggaccaugggaagaa

SEQ ID NO: 889322 - RNA, 19 nt, Homo sapiens
  misc_RNA (1)...(19): siRNA sense strand
ggaggaagacacacacaug

SEQ ID NO: 889323 - RNA, 19 nt, Homo sapiens
  misc_RNA (1)...(19): siRNA sense strand
ggaacucauucuguaauuc

SEQ ID NO: 889324 - RNA, 19 nt, Homo sapiens
  misc_RNA (1)...(19): siRNA sense strand
ucuaaacauucaacgcaua

SEQ ID NO: 889325 - RNA, 19 nt, Homo sapiens
  misc_RNA (1)...(19): siRNA sense strand
gcaguguagauccuuauaa

SEQ ID NO: 889326 - RNA, 19 nt, Homo sapiens
  misc_RNA (1)...(19): siRNA sense strand
ccagaauuguuccugaaga

SEQ ID NO: 889327 - RNA, 19 nt, Homo sapiens
  misc_RNA (1)...(19): siRNA sense strand
ccagggaacaugcuucaaa

SEQ ID NO: 889328 - RNA, 19 nt, Homo sapiens
  misc_RNA (1)...(19): siRNA sense strand
ugucacaccuuacuuucuu

SEQ ID NO: 889329 - RNA, 19 nt, Homo sapiens
  misc_RNA (1)...(19): siRNA sense strand
agucugaucuagagaauuc

SEQ ID NO: 889330 - RNA, 19 nt, Homo sapiens
  misc_RNA (1)...(19): siRNA sense strand
guggagcuguugcccagua

SEQ ID NO: 889331 - RNA, 19 nt, Homo sapiens
  misc_RNA (1)...(19): siRNA sense strand
gaacucauucuguaauucu

SEQ ID NO: 889332 - RNA, 19 nt, Homo sapiens
  misc_RNA (1)...(19): siRNA sense strand
gcaagucugaucuagagaa

SEQ ID NO: 889333 - RNA, 19 nt, Homo sapiens
  misc_RNA (1)...(19): siRNA sense strand
ggaaggccuaccagaaauu

SEQ ID NO: 889334 - RNA, 19 nt, Homo sapiens
  misc_RNA (1)...(19): siRNA sense strand
uuaauguucucaagcaaug

SEQ ID NO: 889335 - RNA, 19 nt, Homo sapiens
  misc_RNA (1)...(19): siRNA sense strand
ugaggaagcugaggaugau

SEQ ID NO: 889336 - RNA, 19 nt, Homo sapiens
  misc_RNA (1)...(19): siRNA sense strand
ugauggaaauagcgaggua

SEQ ID NO: 889337 - RNA, 19 nt, Homo sapiens
  misc_RNA (1)...(19): siRNA sense strand
gcaaaggaccaugggaaga

SEQ ID NO: 889338 - RNA, 19 nt, Homo sapiens
  misc_RNA (1)...(19): siRNA sense strand
caagucugaucuagagaau

SEQ ID NO: 889339 - RNA, 19 nt, Homo sapiens
  misc_RNA (1)...(19): siRNA sense strand
gcagagauaacccaacaca

SEQ ID NO: 889340 - RNA, 19 nt, Homo sapiens
  misc_RNA (1)...(19): siRNA sense strand
gcauagacgauuucagugu

SEQ ID NO: 889341 - RNA, 19 nt, Homo sapiens
  misc_RNA (1)...(19): siRNA sense strand
gggaacaugcuucaaagga

SEQ ID NO: 889342 - RNA, 19 nt, Homo sapiens
  misc_RNA (1)...(19): siRNA sense strand
cuagugagauaccuaugga

SEQ ID NO: 889343 - RNA, 19 nt, Homo sapiens
  misc_RNA (1)...(19): siRNA sense strand
ggaugcagguuccagaaac

SEQ ID NO: 889344 - RNA, 19 nt, Homo sapiens
  misc_RNA (1)...(19): siRNA sense strand
gaagaugcuauuggauauu

SEQ ID NO: 889345 - RNA, 19 nt, Homo sapiens
  misc_RNA (1)...(19): siRNA sense strand
aacagaagaugcuauugga

SEQ ID NO: 889346 - RNA, 19 nt, Homo sapiens
  misc_RNA (1)...(19): siRNA sense strand
gaauguuuccgaccagaug

SEQ ID NO: 889347 - RNA, 19 nt, Homo sapiens
  misc_RNA (1)...(19): siRNA sense strand
gacuuaauguucucaagca

SEQ ID NO: 889348 - RNA, 19 nt, Homo sapiens
  misc_RNA (1)...(19): siRNA sense strand
aagaugcuauuggauauug

SEQ ID NO: 889349 - RNA, 19 nt, Homo sapiens
  misc_RNA (1)...(19): siRNA sense strand
ccagaaacgaauucaagaa

SEQ ID NO: 889350 - RNA, 19 nt, Homo sapiens
  misc_RNA (1)...(19): siRNA sense strand
ugaugaggaucgcaaagga

SEQ ID NO: 889351 - RNA, 19 nt, Homo sapiens
  misc_RNA (1)...(19): siRNA sense strand
gaggaagacacacacaugu

SEQ ID NO: 889352 - RNA, 19 nt, Homo sapiens
  misc_RNA (1)...(19): siRNA sense strand
uucagaaggugcuaauuug

SEQ ID NO: 889353 - RNA, 19 nt, Homo sapiens
  misc_RNA (1)...(19): siRNA sense strand
gcaagcaggcucuucuaag

SEQ ID NO: 889354 - RNA, 19 nt, Homo sapiens
  misc_RNA (1)...(19): siRNA sense strand
uaccagaaauucaccaucu

SEQ ID NO: 889355 - RNA, 19 nt, Homo sapiens
  misc_RNA (1)...(19): siRNA sense strand
aaucccgucuguacucuaa

SEQ ID NO: 889356 - RNA, 19 nt, Homo sapiens
  misc_RNA (1)...(19): siRNA sense strand
gaccuaaaauuggagcuua

SEQ ID NO: 889357 - RNA, 19 nt, Homo sapiens
  misc_RNA (1)...(19): siRNA sense strand
cggaaggccuaccagaaau

SEQ ID NO: 889358 - RNA, 19 nt, Homo sapiens
  misc_RNA (1)...(19): siRNA sense strand
caaaggacuuaauguucuc

SEQ ID NO: 889359 - RNA, 19 nt, Homo sapiens
  misc_RNA (1)...(19): siRNA sense strand
agaaacagaagaugcuauu

SEQ ID NO: 889360 - RNA, 19 nt, Homo sapiens
  misc_RNA (1)...(19): siRNA sense strand
uauaaguggugaugaggau

SEQ ID NO: 889361 - RNA, 19 nt, Homo sapiens
  misc_RNA (1)...(19): siRNA sense strand
ccgaccagauggcuagauu

SEQ ID NO: 889362 - RNA, 19 nt, Homo sapiens
  misc_RNA (1)...(19): siRNA sense strand
uggcaagucugaucuagag

SEQ ID NO: 889363 - RNA, 19 nt, Homo sapiens
  misc_RNA (1)...(19): siRNA sense strand
cgaauaaguguaguugauu

SEQ ID NO: 889364 - RNA, 19 nt, Homo sapiens
  misc_RNA (1)...(19): siRNA sense strand
ugagagaggaccauuguca

SEQ ID NO: 889365 - RNA, 19 nt, Homo sapiens
  misc_RNA (1)...(19): siRNA sense strand
agagauaacccaacacagu

SEQ ID NO: 889366 - RNA, 19 nt, Homo sapiens
  misc_RNA (1)...(19): siRNA sense strand
cagggaacaugcuucaaag

SEQ ID NO: 889367 - RNA, 19 nt, Homo sapiens
  misc_RNA (1)...(19): siRNA sense strand
gagccaagaaagugaaugu

SEQ ID NO: 889368 - RNA, 19 nt, Homo sapiens
  misc_RNA (1)...(19): siRNA sense strand
uggaacucauucuguaauu

SEQ ID NO: 889369 - RNA, 19 nt, Homo sapiens
  misc_RNA (1)...(19): siRNA sense strand
ggauguccaccucuuucua

SEQ ID NO: 889370 - RNA, 19 nt, Homo sapiens
  misc_RNA (1)...(19): siRNA sense strand
aaacagaagaugcuauugg

SEQ ID NO: 889371 - RNA, 19 nt, Homo sapiens
  misc_RNA (1)...(19): siRNA sense strand
gaaacagaagaugcuauug

SEQ ID NO: 889372 - RNA, 19 nt, Homo sapiens
  misc_RNA (1)...(19): siRNA sense strand
acacacaugucaaaagaaa

SEQ ID NO: 889373 - RNA, 19 nt, Homo sapiens
  misc_RNA (1)...(19): siRNA sense strand
cuguggaacucauucugua

SEQ ID NO: 889374 - RNA, 19 nt, Homo sapiens
  misc_RNA (1)...(19): siRNA sense strand
cugcagagauaacccaaca

SEQ ID NO: 889375 - RNA, 19 nt, Homo sapiens
  misc_RNA (1)...(19): siRNA sense strand
gaacucuuucugcagugua

SEQ ID NO: 889376 - RNA, 19 nt, Homo sapiens
  misc_RNA (1)...(19): siRNA sense strand
agacucagaccuugaacaa

SEQ ID NO: 889377 - RNA, 19 nt, Homo sapiens
  misc_RNA (1)...(19): siRNA sense strand
ucagcuaucagaacaguga

SEQ ID NO: 889378 - RNA, 19 nt, Homo sapiens
  misc_RNA (1)...(19): siRNA sense strand
cagaauuguuccugaagag

SEQ ID NO: 889379 - RNA, 19 nt, Homo sapiens
  misc_RNA (1)...(19): siRNA sense strand
ggaacucuuucugcagugu

SEQ ID NO: 889380 - RNA, 19 nt, Homo sapiens
  misc_RNA (1)...(19): siRNA sense strand
gaaggccuaccagaaauuc

SEQ ID NO: 889381 - RNA, 19 nt, Homo sapiens
  misc_RNA (1)...(19): siRNA sense strand
cuucaaaggacuuaauguu

SEQ ID NO: 889382 - RNA, 19 nt, Homo sapiens
  misc_RNA (1)...(19): siRNA sense strand
cacagagaaagaauguuua

SEQ ID NO: 889383 - RNA, 19 nt, Homo sapiens
  misc_RNA (1)...(19): siRNA sense strand
acacacacaugucaaaaga

SEQ ID NO: 889384 - RNA, 19 nt, Homo sapiens
  misc_RNA (1)...(19): siRNA sense strand
aagcugaggaugaugguuu

SEQ ID NO: 889385 - RNA, 19 nt, Homo sapiens
  misc_RNA (1)...(19): siRNA sense strand
gauaacccaacacaguuug

SEQ ID NO: 889386 - RNA, 19 nt, Homo sapiens
  misc_RNA (1)...(19): siRNA sense strand
ugaaacggcuggaauuccu

SEQ ID NO: 889387 - RNA, 19 nt, Homo sapiens
  misc_RNA (1)...(19): siRNA sense strand
cguccacacuggugagaaa

SEQ ID NO: 889388 - RNA, 19 nt, Homo sapiens
  misc_RNA (1)...(19): siRNA sense strand
gcccuucccuugccacauc

SEQ ID NO: 889389 - RNA, 19 nt, Homo sapiens
  misc_RNA (1)...(19): siRNA sense strand
cgacugcgggaccuucuuu

SEQ ID NO: 889390 - RNA, 19 nt, Homo sapiens
  misc_RNA (1)...(19): siRNA sense strand
ggugcacacuggcgagaag

SEQ ID NO: 889391 - RNA, 19 nt, Homo sapiens
  misc_RNA (1)...(19): siRNA sense strand
ggagugcggcaaguucuuc

SEQ ID NO: 889392 - RNA, 19 nt, Homo sapiens
  misc_RNA (1)...(19): siRNA sense strand
gcugcgagcgcgacuucaa

SEQ ID NO: 889393 - RNA, 19 nt, Homo sapiens
  misc_RNA (1)...(19): siRNA sense strand
ccacgagugcuaccucaag

SEQ ID NO: 889394 - RNA, 19 nt, Homo sapiens
  misc_RNA (1)...(19): siRNA sense strand
gagaaggaauggcaacgaa

SEQ ID NO: 889395 - RNA, 19 nt, Homo sapiens
  misc_RNA (1)...(19): siRNA sense strand
gaaggaauggcaacgaaga

SEQ ID NO: 889396 - RNA, 19 nt, Homo sapiens
  misc_RNA (1)...(19): siRNA sense strand
uagcagaaacccugucuuu

SEQ ID NO: 889397 - RNA, 19 nt, Homo sapiens
  misc_RNA (1)...(19): siRNA sense strand
ggaauggcaacgaagaaga

SEQ ID NO: 889398 - RNA, 19 nt, Homo sapiens
  misc_RNA (1)...(19): siRNA sense strand
caacgaagaagacaaccau

SEQ ID NO: 889399 - RNA, 19 nt, Homo sapiens
  misc_RNA (1)...(19): siRNA sense strand
gccaaggccucuacuucca

SEQ ID NO: 889400 - RNA, 19 nt, Homo sapiens
  misc_RNA (1)...(19): siRNA sense strand
caaaagaaguagcagaaac

SEQ ID NO: 889401 - RNA, 19 nt, Homo sapiens
  misc_RNA (1)...(19): siRNA sense strand
ggagaaggaauggcaacga

SEQ ID NO: 889402 - RNA, 19 nt, Homo sapiens
  misc_RNA (1)...(19): siRNA sense strand
ggccucuacuuccacauca

SEQ ID NO: 889403 - RNA, 19 nt, Homo sapiens
  misc_RNA (1)...(19): siRNA sense strand
gugccaaggccucuacuuc

SEQ ID NO: 889404 - RNA, 19 nt, Homo sapiens
  misc_RNA (1)...(19): siRNA sense strand
gaauggcaacgaagaagac

SEQ ID NO: 889405 - RNA, 19 nt, Homo sapiens
  misc_RNA (1)...(19): siRNA sense strand
agucagagcucacaacuua

SEQ ID NO: 889406 - RNA, 19 nt, Homo sapiens
  misc_RNA (1)...(19): siRNA sense strand
gaaauucugugcaucuaaa

SEQ ID NO: 889407 - RNA, 19 nt, Homo sapiens
  misc_RNA (1)...(19): siRNA sense strand
gagaaacccuaugaauaua

SEQ ID NO: 889408 - RNA, 19 nt, Homo sapiens
  misc_RNA (1)...(19): siRNA sense strand
gggaaugccugaaugauga

SEQ ID NO: 889409 - RNA, 19 nt, Homo sapiens
  misc_RNA (1)...(19): siRNA sense strand
gcucacaacuuauuaaaca

SEQ ID NO: 889410 - RNA, 19 nt, Homo sapiens
  misc_RNA (1)...(19): siRNA sense strand
ggagaaacccuaugaaugu

SEQ ID NO: 889411 - RNA, 19 nt, Homo sapiens
  misc_RNA (1)...(19): siRNA sense strand
ugagaaaccuuacgaaugu

SEQ ID NO: 889412 - RNA, 19 nt, Homo sapiens
  misc_RNA (1)...(19): siRNA sense strand
ucagagagauuuauacaga

SEQ ID NO: 889413 - RNA, 19 nt, Homo sapiens
  misc_RNA (1)...(19): siRNA sense strand
gcaagaaacccuuugaaug

SEQ ID NO: 889414 - RNA, 19 nt, Homo sapiens
  misc_RNA (1)...(19): siRNA sense strand
caagaaacccuuugaaugu

SEQ ID NO: 889415 - RNA, 19 nt, Homo sapiens
  misc_RNA (1)...(19): siRNA sense strand
guucacagcuuauuaguca

SEQ ID NO: 889416 - RNA, 19 nt, Homo sapiens
  misc_RNA (1)...(19): siRNA sense strand
gcucagaccuuacuagaca

SEQ ID NO: 889417 - RNA, 19 nt, Homo sapiens
  misc_RNA (1)...(19): siRNA sense strand
gagaaacccuaugaaugua

SEQ ID NO: 889418 - RNA, 19 nt, Homo sapiens
  misc_RNA (1)...(19): siRNA sense strand
gagaaacccuaugaaugua

SEQ ID NO: 889419 - RNA, 19 nt, Homo sapiens
  misc_RNA (1)...(19): siRNA sense strand
gaugugagaccaagaaauu

SEQ ID NO: 889420 - RNA, 19 nt, Homo sapiens
  misc_RNA (1)...(19): siRNA sense strand
agacauggcucacaguuug

SEQ ID NO: 889421 - RNA, 19 nt, Homo sapiens
  misc_RNA (1)...(19): siRNA sense strand
caacaucagagaauucaua

SEQ ID NO: 889422 - RNA, 19 nt, Homo sapiens
  misc_RNA (1)...(19): siRNA sense strand
ucucagaguucacagcuua

SEQ ID NO: 889423 - RNA, 19 nt, Homo sapiens
  misc_RNA (1)...(19): siRNA sense strand
ugagaagccuuaugaaugu

SEQ ID NO: 889424 - RNA, 19 nt, Homo sapiens
  misc_RNA (1)...(19): siRNA sense strand
ugagaaacccuaugaauau

SEQ ID NO: 889425 - RNA, 19 nt, Homo sapiens
  misc_RNA (1)...(19): siRNA sense strand
gggaaggccuuuaguagug

SEQ ID NO: 889426 - RNA, 19 nt, Homo sapiens
  misc_RNA (1)...(19): siRNA sense strand
guaauaggcaguuuaagaa

SEQ ID NO: 889427 - RNA, 19 nt, Homo sapiens
  misc_RNA (1)...(19): siRNA sense strand
aguaguggcucaaacuuua

SEQ ID NO: 889428 - RNA, 19 nt, Homo sapiens
  misc_RNA (1)...(19): siRNA sense strand
gaagaucugcccacuuuga

SEQ ID NO: 889429 - RNA, 19 nt, Homo sapiens
  misc_RNA (1)...(19): siRNA sense strand
gugagaaacccuaugaaua

SEQ ID NO: 889430 - RNA, 19 nt, Homo sapiens
  misc_RNA (1)...(19): siRNA sense strand
cagcaaaucauuaacagua

SEQ ID NO: 889431 - RNA, 19 nt, Homo sapiens
  misc_RNA (1)...(19): siRNA sense strand
caaaugugaucuccuacuu

SEQ ID NO: 889432 - RNA, 19 nt, Homo sapiens
  misc_RNA (1)...(19): siRNA sense strand
gagaugugauguuggagaa

SEQ ID NO: 889433 - RNA, 19 nt, Homo sapiens
  misc_RNA (1)...(19): siRNA sense strand
gaugugauguuggagaauu

SEQ ID NO: 889434 - RNA, 19 nt, Homo sapiens
  misc_RNA (1)...(19): siRNA sense strand
agacaucccucaagacuca

SEQ ID NO: 889435 - RNA, 19 nt, Homo sapiens
  misc_RNA (1)...(19): siRNA sense strand
gaauguaauaggcaguuua

SEQ ID NO: 889436 - RNA, 19 nt, Homo sapiens
  misc_RNA (1)...(19): siRNA sense strand
gcucaaacuuuacucaaca

SEQ ID NO: 889437 - RNA, 19 nt, Homo sapiens
  misc_RNA (1)...(19): siRNA sense strand
ugagaaacccuaugaaugu

SEQ ID NO: 889438 - RNA, 19 nt, Homo sapiens
  misc_RNA (1)...(19): siRNA sense strand
augaagaucugcccacuuu

SEQ ID NO: 889439 - RNA, 19 nt, Homo sapiens
  misc_RNA (1)...(19): siRNA sense strand
auacagagaugugauguug

SEQ ID NO: 889440 - RNA, 19 nt, Homo sapiens
  misc_RNA (1)...(19): siRNA sense strand
gaauauagggaauguggaa

SEQ ID NO: 889441 - RNA, 19 nt, Homo sapiens
  misc_RNA (1)...(19): siRNA sense strand
agaaagaacucggcucuca

SEQ ID NO: 889442 - RNA, 19 nt, Homo sapiens
  misc_RNA (1)...(19): siRNA sense strand
aagaaacccuuugaaugua

SEQ ID NO: 889443 - RNA, 19 nt, Homo sapiens
  misc_RNA (1)...(19): siRNA sense strand
ccucaagacucacucauca

SEQ ID NO: 889444 - RNA, 19 nt, Homo sapiens
  misc_RNA (1)...(19): siRNA sense strand
gugagaagccuuaugaaug

SEQ ID NO: 889445 - RNA, 19 nt, Homo sapiens
  misc_RNA (1)...(19): siRNA sense strand
gagaugauugggaauguaa

SEQ ID NO: 889446 - RNA, 19 nt, Homo sapiens
  misc_RNA (1)...(19): siRNA sense strand
gggagaaacccuaugaaug

SEQ ID NO: 889447 - RNA, 19 nt, Homo sapiens
  misc_RNA (1)...(19): siRNA sense strand
agaaacccuuugaauguaa

SEQ ID NO: 889448 - RNA, 19 nt, Homo sapiens
  misc_RNA (1)...(19): siRNA sense strand
ggaauguaauaggcaguuu

SEQ ID NO: 889449 - RNA, 19 nt, Homo sapiens
  misc_RNA (1)...(19): siRNA sense strand
ucagugauguucagugaug

SEQ ID NO: 889450 - RNA, 19 nt, Homo sapiens
  misc_RNA (1)...(19): siRNA sense strand
ugacagagagcuaacaaga

SEQ ID NO: 889451 - RNA, 19 nt, Homo sapiens
  misc_RNA (1)...(19): siRNA sense strand
ugagaagccuuaugaaugc

SEQ ID NO: 889452 - RNA, 19 nt, Homo sapiens
  misc_RNA (1)...(19): siRNA sense strand
gcucacaguuugcuacaca

SEQ ID NO: 889453 - RNA, 19 nt, Homo sapiens
  misc_RNA (1)...(19): siRNA sense strand
gaugauugggaauguaaua

SEQ ID NO: 889454 - RNA, 19 nt, Homo sapiens
  misc_RNA (1)...(19): siRNA sense strand
caauugguauucacucaug

SEQ ID NO: 889455 - RNA, 19 nt, Homo sapiens
  misc_RNA (1)...(19): siRNA sense strand
caacuuauucagcaucaaa

SEQ ID NO: 889456 - RNA, 19 nt, Homo sapiens
  misc_RNA (1)...(19): siRNA sense strand
gagaaaccuuacgaaugua

SEQ ID NO: 889457 - RNA, 19 nt, Homo sapiens
  misc_RNA (1)...(19): siRNA sense strand
gagaagccuuaugaaugua

SEQ ID NO: 889458 - RNA, 19 nt, Homo sapiens
  misc_RNA (1)...(19): siRNA sense strand
aaccaaaugugaucuccua

SEQ ID NO: 889459 - RNA, 19 nt, Homo sapiens
  misc_RNA (1)...(19): siRNA sense strand
gaucagagagauuuauaca

SEQ ID NO: 889460 - RNA, 19 nt, Homo sapiens
  misc_RNA (1)...(19): siRNA sense strand
gaauguaaggaaugugaaa

SEQ ID NO: 889461 - RNA, 19 nt, Homo sapiens
  misc_RNA (1)...(19): siRNA sense strand
acagagaugugauguugga

SEQ ID NO: 889462 - RNA, 19 nt, Homo sapiens
  misc_RNA (1)...(19): siRNA sense strand
gagauaauucauaccauug

SEQ ID NO: 889463 - RNA, 19 nt, Homo sapiens
  misc_RNA (1)...(19): siRNA sense strand
agacaucagagaauucaua

SEQ ID NO: 889464 - RNA, 19 nt, Homo sapiens
  misc_RNA (1)...(19): siRNA sense strand
gaaacccuaugaauguaag

SEQ ID NO: 889465 - RNA, 19 nt, Homo sapiens
  misc_RNA (1)...(19): siRNA sense strand
aauuaugacccacaacuua

SEQ ID NO: 889466 - RNA, 19 nt, Homo sapiens
  misc_RNA (1)...(19): siRNA sense strand
gaaacccuaugaauguaag

SEQ ID NO: 889467 - RNA, 19 nt, Homo sapiens
  misc_RNA (1)...(19): siRNA sense strand
gagcucacaacuuauuaaa

SEQ ID NO: 889468 - RNA, 19 nt, Homo sapiens
  misc_RNA (1)...(19): siRNA sense strand
ccauccauccuucacauua

SEQ ID NO: 889469 - RNA, 19 nt, Homo sapiens
  misc_RNA (1)...(19): siRNA sense strand
gugagaaaccuuacgaaug

SEQ ID NO: 889470 - RNA, 19 nt, Homo sapiens
  misc_RNA (1)...(19): siRNA sense strand
gugagaaacccuaugaaug

SEQ ID NO: 889471 - RNA, 19 nt, Homo sapiens
  misc_RNA (1)...(19): siRNA sense strand
caagaugugagaccaagaa

SEQ ID NO: 889472 - RNA, 19 nt, Homo sapiens
  misc_RNA (1)...(19): siRNA sense strand
gaagccuuaugaaugcaaa

SEQ ID NO: 889473 - RNA, 19 nt, Homo sapiens
  misc_RNA (1)...(19): siRNA sense strand
ccauugagaagccuuauga

SEQ ID NO: 889474 - RNA, 19 nt, Homo sapiens
  misc_RNA (1)...(19): siRNA sense strand
uguaauaggcaguuuaaga

SEQ ID NO: 889475 - RNA, 19 nt, Homo sapiens
  misc_RNA (1)...(19): siRNA sense strand
cagcuuauuagucaucaua

SEQ ID NO: 889476 - RNA, 19 nt, Homo sapiens
  misc_RNA (1)...(19): siRNA sense strand
ucagugauguguccguaga

SEQ ID NO: 889477 - RNA, 19 nt, Homo sapiens
  misc_RNA (1)...(19): siRNA sense strand
agagagauuuauacagaga

SEQ ID NO: 889478 - RNA, 19 nt, Homo sapiens
  misc_RNA (1)...(19): siRNA sense strand
caucagagaauucauacug

SEQ ID NO: 889479 - RNA, 19 nt, Homo sapiens
  misc_RNA (1)...(19): siRNA sense strand
caucagagaauucauacug

SEQ ID NO: 889480 - RNA, 19 nt, Homo sapiens
  misc_RNA (1)...(19): siRNA sense strand
ggugagaaacccuaugaau

SEQ ID NO: 889481 - RNA, 19 nt, Homo sapiens
  misc_RNA (1)...(19): siRNA sense strand
gggaaggcuuauucucaga

SEQ ID NO: 889482 - RNA, 19 nt, Homo sapiens
  misc_RNA (1)...(19): siRNA sense strand
ucagagcucacaacuuauu

SEQ ID NO: 889483 - RNA, 19 nt, Homo sapiens
  misc_RNA (1)...(19): siRNA sense strand
ggugagaagccuuaugaau

SEQ ID NO: 889484 - RNA, 19 nt, Homo sapiens
  misc_RNA (1)...(19): siRNA sense strand
caggugagaagccuuauga

SEQ ID NO: 889485 - RNA, 19 nt, Homo sapiens
  misc_RNA (1)...(19): siRNA sense strand
cgacaucacagaauucaca

SEQ ID NO: 889486 - RNA, 19 nt, Homo sapiens
  misc_RNA (1)...(19): siRNA sense strand
gaaggcuuauucucagagu

SEQ ID NO: 889487 - RNA, 19 nt, Homo sapiens
  misc_RNA (1)...(19): siRNA sense strand
gcucaggagucagugaugu

SEQ ID NO: 889488 - RNA, 19 nt, Homo sapiens
  misc_RNA (1)...(19): siRNA sense strand
cagaguucacagcuuauua

SEQ ID NO: 889489 - RNA, 19 nt, Homo sapiens
  misc_RNA (1)...(19): siRNA sense strand
agucagugauguucaguga

SEQ ID NO: 889490 - RNA, 19 nt, Homo sapiens
  misc_RNA (1)...(19): siRNA sense strand
acacaggugagaagccuua

SEQ ID NO: 889491 - RNA, 19 nt, Homo sapiens
  misc_RNA (1)...(19): siRNA sense strand
aaacuucacucgacaucag

SEQ ID NO: 889492 - RNA, 19 nt, Homo sapiens
  misc_RNA (1)...(19): siRNA sense strand
gaauguaaggaauguggaa

SEQ ID NO: 889493 - RNA, 19 nt, Homo sapiens
  misc_RNA (1)...(19): siRNA sense strand
ggcaagaaacccuuugaau

SEQ ID NO: 889494 - RNA, 19 nt, Homo sapiens
  misc_RNA (1)...(19): siRNA sense strand
gaauguaaggaauguggaa

SEQ ID NO: 889495 - RNA, 19 nt, Homo sapiens
  misc_RNA (1)...(19): siRNA sense strand
auaggcaguuuaagaaaga

SEQ ID NO: 889496 - RNA, 19 nt, Homo sapiens
  misc_RNA (1)...(19): siRNA sense strand
gcuuauuagucaucauaga

SEQ ID NO: 889497 - RNA, 19 nt, Homo sapiens
  misc_RNA (1)...(19): siRNA sense strand
gagugggaaugccugaaug

SEQ ID NO: 889498 - RNA, 19 nt, Homo sapiens
  misc_RNA (1)...(19): siRNA sense strand
gauaauucauaccauugag

SEQ ID NO: 889499 - RNA, 19 nt, Homo sapiens
  misc_RNA (1)...(19): siRNA sense strand
gaaacccuuugaauguaag

SEQ ID NO: 889500 - RNA, 19 nt, Homo sapiens
  misc_RNA (1)...(19): siRNA sense strand
gaauucauacuagugagaa

SEQ ID NO: 889501 - RNA, 19 nt, Homo sapiens
  misc_RNA (1)...(19): siRNA sense strand
uauagggaauguggaaaga

SEQ ID NO: 889502 - RNA, 19 nt, Homo sapiens
  misc_RNA (1)...(19): siRNA sense strand
uugagaagccuuaugaaug

SEQ ID NO: 889503 - RNA, 19 nt, Homo sapiens
  misc_RNA (1)...(19): siRNA sense strand
ggugagaaaccuuacgaau

SEQ ID NO: 889504 - RNA, 19 nt, Homo sapiens
  misc_RNA (1)...(19): siRNA sense strand
ggagugggaaugccugaau

SEQ ID NO: 889505 - RNA, 19 nt, Homo sapiens
  misc_RNA (1)...(19): siRNA sense strand
gaagaaggaugcuguuguu

SEQ ID NO: 889506 - RNA, 19 nt, Homo sapiens
  misc_RNA (1)...(19): siRNA sense strand
caggagagguucaaacaua

SEQ ID NO: 889507 - RNA, 19 nt, Homo sapiens
  misc_RNA (1)...(19): siRNA sense strand
gguccgagcuuuccgauau

SEQ ID NO: 889508 - RNA, 19 nt, Homo sapiens
  misc_RNA (1)...(19): siRNA sense strand
guucaaacauauccuugua

SEQ ID NO: 889509 - RNA, 19 nt, Homo sapiens
  misc_RNA (1)...(19): siRNA sense strand
ggacagugaugacaguugu

SEQ ID NO: 889510 - RNA, 19 nt, Homo sapiens
  misc_RNA (1)...(19): siRNA sense strand
ccaaggacagcaauuauuu

SEQ ID NO: 889511 - RNA, 19 nt, Homo sapiens
  misc_RNA (1)...(19): siRNA sense strand
ucaaacauauccuuguaga

SEQ ID NO: 889512 - RNA, 19 nt, Homo sapiens
  misc_RNA (1)...(19): siRNA sense strand
gggagaaagucaaaguaga

SEQ ID NO: 889513 - RNA, 19 nt, Homo sapiens
  misc_RNA (1)...(19): siRNA sense strand
aaacauauccuuguagaug

SEQ ID NO: 889514 - RNA, 19 nt, Homo sapiens
  misc_RNA (1)...(19): siRNA sense strand
caagauggaugaccucaac

SEQ ID NO: 889515 - RNA, 19 nt, Homo sapiens
  misc_RNA (1)...(19): siRNA sense strand
ucaugaugguggacaguua

SEQ ID NO: 889516 - RNA, 19 nt, Homo sapiens
  misc_RNA (1)...(19): siRNA sense strand
gcaagaucauugggaagaa

SEQ ID NO: 889517 - RNA, 19 nt, Homo sapiens
  misc_RNA (1)...(19): siRNA sense strand
gcaggaagguggugguuuu

SEQ ID NO: 889518 - RNA, 19 nt, Homo sapiens
  misc_RNA (1)...(19): siRNA sense strand
gagggucuguggcuuauca

SEQ ID NO: 889519 - RNA, 19 nt, Homo sapiens
  misc_RNA (1)...(19): siRNA sense strand
guagauggagauacuuuaa

SEQ ID NO: 889520 - RNA, 19 nt, Homo sapiens
  misc_RNA (1)...(19): siRNA sense strand
ggagaaagucaaaguagau

SEQ ID NO: 889521 - RNA, 19 nt, Homo sapiens
  misc_RNA (1)...(19): siRNA sense strand
gaaggacuaucccaagaac

SEQ ID NO: 889522 - RNA, 19 nt, Homo sapiens
  misc_RNA (1)...(19): siRNA sense strand
gcauugagccuguguccuu

SEQ ID NO: 889523 - RNA, 19 nt, Homo sapiens
  misc_RNA (1)...(19): siRNA sense strand
ggaggaagaggaagaggaa

SEQ ID NO: 889524 - RNA, 19 nt, Homo sapiens
  misc_RNA (1)...(19): siRNA sense strand
ggaagaaggaugcuguugu

SEQ ID NO: 889525 - RNA, 19 nt, Homo sapiens
  misc_RNA (1)...(19): siRNA sense strand
ggaaggacuaucccaagaa

SEQ ID NO: 889526 - RNA, 19 nt, Homo sapiens
  misc_RNA (1)...(19): siRNA sense strand
ggaagaggaggaagaggaa

SEQ ID NO: 889527 - RNA, 19 nt, Homo sapiens
  misc_RNA (1)...(19): siRNA sense strand
ugaccaaggacagcaauua

SEQ ID NO: 889528 - RNA, 19 nt, Homo sapiens
  misc_RNA (1)...(19): siRNA sense strand
agauagagccggagcauga

SEQ ID NO: 889529 - RNA, 19 nt, Homo sapiens
  misc_RNA (1)...(19): siRNA sense strand
gagccuguguccuuugaug

SEQ ID NO: 889530 - RNA, 19 nt, Homo sapiens
  misc_RNA (1)...(19): siRNA sense strand
gggccacgcuguuacaaag

SEQ ID NO: 889531 - RNA, 19 nt, Homo sapiens
  misc_RNA (1)...(19): siRNA sense strand
cggauuggcuguggcauug

SEQ ID NO: 889532 - RNA, 19 nt, Homo sapiens
  misc_RNA (1)...(19): siRNA sense strand
cggaaggacuaucccaaga

SEQ ID NO: 889533 - RNA, 19 nt, Homo sapiens
  misc_RNA (1)...(19): siRNA sense strand
gaccaaggacagcaauuau

SEQ ID NO: 889534 - RNA, 19 nt, Homo sapiens
  misc_RNA (1)...(19): siRNA sense strand
gaaagucaaaguagaucug

SEQ ID NO: 889535 - RNA, 19 nt, Homo sapiens
  misc_RNA (1)...(19): siRNA sense strand
cguggacccuggagagaaa

SEQ ID NO: 889536 - RNA, 19 nt, Homo sapiens
  misc_RNA (1)...(19): siRNA sense strand
cgggugggcucuaccauca

SEQ ID NO: 889537 - RNA, 19 nt, Homo sapiens
  misc_RNA (1)...(19): siRNA sense strand
gcacuaccgguuucugaau

SEQ ID NO: 889538 - RNA, 19 nt, Homo sapiens
  misc_RNA (1)...(19): siRNA sense strand
ggugggcucuaccaucaug

SEQ ID NO: 889539 - RNA, 19 nt, Homo sapiens
  misc_RNA (1)...(19): siRNA sense strand
gcagaccgcccagaucuuc

SEQ ID NO: 889540 - RNA, 19 nt, Homo sapiens
  misc_RNA (1)...(19): siRNA sense strand
gaacgugcggaaugucaug

SEQ ID NO: 889541 - RNA, 19 nt, Homo sapiens
  misc_RNA (1)...(19): siRNA sense strand
ggacagcaauuauuuugag

SEQ ID NO: 889542 - RNA, 19 nt, Homo sapiens
  misc_RNA (1)...(19): siRNA sense strand
ggaagaggaagaggaggaa

SEQ ID NO: 889543 - RNA, 19 nt, Homo sapiens
  misc_RNA (1)...(19): siRNA sense strand
cauggaaacucuggugaag

SEQ ID NO: 889544 - RNA, 19 nt, Homo sapiens
  misc_RNA (1)...(19): siRNA sense strand
aggagagguucaaacauau

SEQ ID NO: 889545 - RNA, 19 nt, Homo sapiens
  misc_RNA (1)...(19): siRNA sense strand
caagaucauugggaagaag

SEQ ID NO: 889546 - RNA, 19 nt, Homo sapiens
  misc_RNA (1)...(19): siRNA sense strand
caucaugggcuguggaauc

SEQ ID NO: 889547 - RNA, 19 nt, Homo sapiens
  misc_RNA (1)...(19): siRNA sense strand
cacuaccgguuucugaauu

SEQ ID NO: 889548 - RNA, 19 nt, Homo sapiens
  misc_RNA (1)...(19): siRNA sense strand
ggacaguuacgaggaugaa

SEQ ID NO: 889549 - RNA, 19 nt, Homo sapiens
  misc_RNA (1)...(19): siRNA sense strand
gauggcaagcuguacaaug

SEQ ID NO: 889550 - RNA, 19 nt, Homo sapiens
  misc_RNA (1)...(19): siRNA sense strand
cauugagccuguguccuuu

SEQ ID NO: 889551 - RNA, 19 nt, Homo sapiens
  misc_RNA (1)...(19): siRNA sense strand
gguggacaguuacgaggau

SEQ ID NO: 889552 - RNA, 19 nt, Homo sapiens
  misc_RNA (1)...(19): siRNA sense strand
ccagaucuucuucaccaaa

SEQ ID NO: 889553 - RNA, 19 nt, Homo sapiens
  misc_RNA (1)...(19): siRNA sense strand
cugguugccugacucugua

SEQ ID NO: 889554 - RNA, 19 nt, Homo sapiens
  misc_RNA (1)...(19): siRNA sense strand
ggcaagaucauugggaaga

SEQ ID NO: 889555 - RNA, 19 nt, Homo sapiens
  misc_RNA (1)...(19): siRNA sense strand
uagccuaccaugcugauga

SEQ ID NO: 889556 - RNA, 19 nt, Homo sapiens
  misc_RNA (1)...(19): siRNA sense strand
ggaagguggugguuuucuu

SEQ ID NO: 889557 - RNA, 19 nt, Homo sapiens
  misc_RNA (1)...(19): siRNA sense strand
guacuuagggaagggcaaa

SEQ ID NO: 889558 - RNA, 19 nt, Homo sapiens
  misc_RNA (1)...(19): siRNA sense strand
gaugauggcaagcuguaca

SEQ ID NO: 889559 - RNA, 19 nt, Homo sapiens
  misc_RNA (1)...(19): siRNA sense strand
ggagagguucaaacauauc

SEQ ID NO: 889560 - RNA, 19 nt, Homo sapiens
  misc_RNA (1)...(19): siRNA sense strand
gagaaagucaaaguagauc

SEQ ID NO: 889561 - RNA, 19 nt, Homo sapiens
  misc_RNA (1)...(19): siRNA sense strand
gcuggucccucaguacuac

SEQ ID NO: 889562 - RNA, 19 nt, Homo sapiens
  misc_RNA (1)...(19): siRNA sense strand
uguagauggagauacuuua

SEQ ID NO: 889563 - RNA, 19 nt, Homo sapiens
  misc_RNA (1)...(19): siRNA sense strand
gcugguugccugacucugu

SEQ ID NO: 889564 - RNA, 19 nt, Homo sapiens
  misc_RNA (1)...(19): siRNA sense strand
ggaagaggaagaggaagag

SEQ ID NO: 889565 - RNA, 19 nt, Homo sapiens
  misc_RNA (1)...(19): siRNA sense strand
acauauccuuguagaugga

SEQ ID NO: 889566 - RNA, 19 nt, Homo sapiens
  misc_RNA (1)...(19): siRNA sense strand
gggaagaaggaugcuguug

SEQ ID NO: 889567 - RNA, 19 nt, Homo sapiens
  misc_RNA (1)...(19): siRNA sense strand
gagguucaaacauauccuu

SEQ ID NO: 889568 - RNA, 19 nt, Homo sapiens
  misc_RNA (1)...(19): siRNA sense strand
gauaucaggagagguucaa

SEQ ID NO: 889569 - RNA, 19 nt, Homo sapiens
  misc_RNA (1)...(19): siRNA sense strand
auggcaagcuguacaaugg

SEQ ID NO: 889570 - RNA, 19 nt, Homo sapiens
  misc_RNA (1)...(19): siRNA sense strand
gugcagaccgcccagaucu

SEQ ID NO: 889571 - RNA, 19 nt, Homo sapiens
  misc_RNA (1)...(19): siRNA sense strand
gauuggcuguggcauugag

SEQ ID NO: 889572 - RNA, 19 nt, Homo sapiens
  misc_RNA (1)...(19): siRNA sense strand
ccuuguagauggagauacu

SEQ ID NO: 889573 - RNA, 19 nt, Homo sapiens
  misc_RNA (1)...(19): siRNA sense strand
gacaucaugggcuguggaa

SEQ ID NO: 889574 - RNA, 19 nt, Homo sapiens
  misc_RNA (1)...(19): siRNA sense strand
acuaccgguuucugaauug

SEQ ID NO: 889575 - RNA, 19 nt, Homo sapiens
  misc_RNA (1)...(19): siRNA sense strand
acaguuacgaggaugaaug

SEQ ID NO: 889576 - RNA, 19 nt, Homo sapiens
  misc_RNA (1)...(19): siRNA sense strand
ggaagaggauggggaagag

SEQ ID NO: 889577 - RNA, 19 nt, Homo sapiens
  misc_RNA (1)...(19): siRNA sense strand
gaacagagguggcgacuuc

SEQ ID NO: 889578 - RNA, 19 nt, Homo sapiens
  misc_RNA (1)...(19): siRNA sense strand
gaaacaagcugcccugguu

SEQ ID NO: 889579 - RNA, 19 nt, Homo sapiens
  misc_RNA (1)...(19): siRNA sense strand
ccaaagggcagaaauaaua

SEQ ID NO: 889580 - RNA, 19 nt, Homo sapiens
  misc_RNA (1)...(19): siRNA sense strand
gggcagaaauaauauguuu

SEQ ID NO: 889581 - RNA, 19 nt, Homo sapiens
  misc_RNA (1)...(19): siRNA sense strand
caacucaccuacugacaaa

SEQ ID NO: 889582 - RNA, 19 nt, Homo sapiens
  misc_RNA (1)...(19): siRNA sense strand
gaucucagcucuaaacaag

SEQ ID NO: 889583 - RNA, 19 nt, Homo sapiens
  misc_RNA (1)...(19): siRNA sense strand
ccaaauaaaccagauguua

SEQ ID NO: 889584 - RNA, 19 nt, Homo sapiens
  misc_RNA (1)...(19): siRNA sense strand
gcaucucucuucagccuua

SEQ ID NO: 889585 - RNA, 19 nt, Homo sapiens
  misc_RNA (1)...(19): siRNA sense strand
ggagagcaguggauugaga

SEQ ID NO: 889586 - RNA, 19 nt, Homo sapiens
  misc_RNA (1)...(19): siRNA sense strand
cagaguguguugaguuaua

SEQ ID NO: 889587 - RNA, 19 nt, Homo sapiens
  misc_RNA (1)...(19): siRNA sense strand
gcaagaguggcuaugaaua

SEQ ID NO: 889588 - RNA, 19 nt, Homo sapiens
  misc_RNA (1)...(19): siRNA sense strand
aaccagauguuacaaauga

SEQ ID NO: 889589 - RNA, 19 nt, Homo sapiens
  misc_RNA (1)...(19): siRNA sense strand
gcacacagaugagacgaau

SEQ ID NO: 889590 - RNA, 19 nt, Homo sapiens
  misc_RNA (1)...(19): siRNA sense strand
cuaccuugauuccagauua

SEQ ID NO: 889591 - RNA, 19 nt, Homo sapiens
  misc_RNA (1)...(19): siRNA sense strand
gagaaacagcauaggguua

SEQ ID NO: 889592 - RNA, 19 nt, Homo sapiens
  misc_RNA (1)...(19): siRNA sense strand
caggaauacuuguuugaaa

SEQ ID NO: 889593 - RNA, 19 nt, Homo sapiens
  misc_RNA (1)...(19): siRNA sense strand
ugaaaugacuggaaaauug

SEQ ID NO: 889594 - RNA, 19 nt, Homo sapiens
  misc_RNA (1)...(19): siRNA sense strand
gaaaggaucaaagaacuau

SEQ ID NO: 889595 - RNA, 19 nt, Homo sapiens
  misc_RNA (1)...(19): siRNA sense strand
gacaacuucuugaucauau

SEQ ID NO: 889596 - RNA, 19 nt, Homo sapiens
  misc_RNA (1)...(19): siRNA sense strand
gaagaggucugggcaagag

SEQ ID NO: 889597 - RNA, 19 nt, Homo sapiens
  misc_RNA (1)...(19): siRNA sense strand
gucagaguguguugaguua

SEQ ID NO: 889598 - RNA, 19 nt, Homo sapiens
  misc_RNA (1)...(19): siRNA sense strand
ggaaugcuugggagaguua

SEQ ID NO: 889599 - RNA, 19 nt, Homo sapiens
  misc_RNA (1)...(19): siRNA sense strand
ggauuaugcacaaacuuua

SEQ ID NO: 889600 - RNA, 19 nt, Homo sapiens
  misc_RNA (1)...(19): siRNA sense strand
gggcaagaguggcuaugaa

SEQ ID NO: 889601 - RNA, 19 nt, Homo sapiens
  misc_RNA (1)...(19): siRNA sense strand
ggacacaaucguucaguau

SEQ ID NO: 889602 - RNA, 19 nt, Homo sapiens
  misc_RNA (1)...(19): siRNA sense strand
gugaauauauuguggaucu

SEQ ID NO: 889603 - RNA, 19 nt, Homo sapiens
  misc_RNA (1)...(19): siRNA sense strand
cgaaguaucccgacggaaa

SEQ ID NO: 889604 - RNA, 19 nt, Homo sapiens
  misc_RNA (1)...(19): siRNA sense strand
gaagaggagaaacagcaua

SEQ ID NO: 889605 - RNA, 19 nt, Homo sapiens
  misc_RNA (1)...(19): siRNA sense strand
gauaggagaggcuaguauu

SEQ ID NO: 889606 - RNA, 19 nt, Homo sapiens
  misc_RNA (1)...(19): siRNA sense strand
ugacaaagaagacuacaug

SEQ ID NO: 889607 - RNA, 19 nt, Homo sapiens
  misc_RNA (1)...(19): siRNA sense strand
gaagugaagaggagaaaca

SEQ ID NO: 889608 - RNA, 19 nt, Homo sapiens
  misc_RNA (1)...(19): siRNA sense strand
gggauuaugcacaaacuuu

SEQ ID NO: 889609 - RNA, 19 nt, Homo sapiens
  misc_RNA (1)...(19): siRNA sense strand
auacugaaaugacuggaaa

SEQ ID NO: 889610 - RNA, 19 nt, Homo sapiens
  misc_RNA (1)...(19): siRNA sense strand
gagaguuaaucuuggucua

SEQ ID NO: 889611 - RNA, 19 nt, Homo sapiens
  misc_RNA (1)...(19): siRNA sense strand
gguuaaagcgccucucauu

SEQ ID NO: 889612 - RNA, 19 nt, Homo sapiens
  misc_RNA (1)...(19): siRNA sense strand
auagacaacuucuugauca

SEQ ID NO: 889613 - RNA, 19 nt, Homo sapiens
  misc_RNA (1)...(19): siRNA sense strand
gaccaaagagucaggaaug

SEQ ID NO: 889614 - RNA, 19 nt, Homo sapiens
  misc_RNA (1)...(19): siRNA sense strand
cagccuuaaugccuuauuu

SEQ ID NO: 889615 - RNA, 19 nt, Homo sapiens
  misc_RNA (1)...(19): siRNA sense strand
gaauagacaacuucuugau

SEQ ID NO: 889616 - RNA, 19 nt, Homo sapiens
  misc_RNA (1)...(19): siRNA sense strand
ugaccgaccuacgaacuuu

SEQ ID NO: 889617 - RNA, 19 nt, Homo sapiens
  misc_RNA (1)...(19): siRNA sense strand
agacuacgccuccacauga

SEQ ID NO: 889618 - RNA, 19 nt, Homo sapiens
  misc_RNA (1)...(19): siRNA sense strand
uaaacaagccgcagaagag

SEQ ID NO: 889619 - RNA, 19 nt, Homo sapiens
  misc_RNA (1)...(19): siRNA sense strand
caaauaaaccagauguuac

SEQ ID NO: 889620 - RNA, 19 nt, Homo sapiens
  misc_RNA (1)...(19): siRNA sense strand
ggacgaaagugggauacag

SEQ ID NO: 889621 - RNA, 19 nt, Homo sapiens
  misc_RNA (1)...(19): siRNA sense strand
gaccuacgaacuuuggaua

SEQ ID NO: 889622 - RNA, 19 nt, Homo sapiens
  misc_RNA (1)...(19): siRNA sense strand
ucauggacagcuaaauuua

SEQ ID NO: 889623 - RNA, 19 nt, Homo sapiens
  misc_RNA (1)...(19): siRNA sense strand
gcuaucaucaugcauguau

SEQ ID NO: 889624 - RNA, 19 nt, Homo sapiens
  misc_RNA (1)...(19): siRNA sense strand
caaagggcagaaauaauau

SEQ ID NO: 889625 - RNA, 19 nt, Homo sapiens
  misc_RNA (1)...(19): siRNA sense strand
ggucagaguguguugaguu

SEQ ID NO: 889626 - RNA, 19 nt, Homo sapiens
  misc_RNA (1)...(19): siRNA sense strand
aagccgaucucagcucuaa

SEQ ID NO: 889627 - RNA, 19 nt, Homo sapiens
  misc_RNA (1)...(19): siRNA sense strand
aaacagaggcuaggaaagu

SEQ ID NO: 889628 - RNA, 19 nt, Homo sapiens
  misc_RNA (1)...(19): siRNA sense strand
ccuacuuucuggaacuaua

SEQ ID NO: 889629 - RNA, 19 nt, Homo sapiens
  misc_RNA (1)...(19): siRNA sense strand
caaagagucaggaaugcuu

SEQ ID NO: 889630 - RNA, 19 nt, Homo sapiens
  misc_RNA (1)...(19): siRNA sense strand
gaauacuuguuugaaagga

SEQ ID NO: 889631 - RNA, 19 nt, Homo sapiens
  misc_RNA (1)...(19): siRNA sense strand
caaaucaggaauacuuguu

SEQ ID NO: 889632 - RNA, 19 nt, Homo sapiens
  misc_RNA (1)...(19): siRNA sense strand
uacgaacuuuggauacuuu

SEQ ID NO: 889633 - RNA, 19 nt, Homo sapiens
  misc_RNA (1)...(19): siRNA sense strand
gaguuaaucuuggucuauc

SEQ ID NO: 889634 - RNA, 19 nt, Homo sapiens
  misc_RNA (1)...(19): siRNA sense strand
ccuagugcuucccuuauug

SEQ ID NO: 889635 - RNA, 19 nt, Homo sapiens
  misc_RNA (1)...(19): siRNA sense strand
gaucauauggauucaugga

SEQ ID NO: 889636 - RNA, 19 nt, Homo sapiens
  misc_RNA (1)...(19): siRNA sense strand
aguaucagcuugccuguag

SEQ ID NO: 889637 - RNA, 19 nt, Homo sapiens
  misc_RNA (1)...(19): siRNA sense strand
agaaacagcauaggguuaa

SEQ ID NO: 889638 - RNA, 19 nt, Homo sapiens
  misc_RNA (1)...(19): siRNA sense strand
auaauaaguuggcgagcuu

SEQ ID NO: 889639 - RNA, 19 nt, Homo sapiens
  misc_RNA (1)...(19): siRNA sense strand
cauaaagaccaaagaguca

SEQ ID NO: 889640 - RNA, 19 nt, Homo sapiens
  misc_RNA (1)...(19): siRNA sense strand
aaacaagcugcccugguua

SEQ ID NO: 889641 - RNA, 19 nt, Homo sapiens
  misc_RNA (1)...(19): siRNA sense strand
guccagagcuacagauagg

SEQ ID NO: 889642 - RNA, 19 nt, Homo sapiens
  misc_RNA (1)...(19): siRNA sense strand
ucucagcacuuuguucaga

SEQ ID NO: 889643 - RNA, 19 nt, Homo sapiens
  misc_RNA (1)...(19): siRNA sense strand
aaucaggaauacuuguuug

SEQ ID NO: 889644 - RNA, 19 nt, Homo sapiens
  misc_RNA (1)...(19): siRNA sense strand
gaaaugacuggaaaauuga

SEQ ID NO: 889645 - RNA, 19 nt, Homo sapiens
  misc_RNA (1)...(19): siRNA sense strand
cacaaucguucaguaucua

SEQ ID NO: 889646 - RNA, 19 nt, Homo sapiens
  misc_RNA (1)...(19): siRNA sense strand
acacaaucguucaguaucu

SEQ ID NO: 889647 - RNA, 19 nt, Homo sapiens
  misc_RNA (1)...(19): siRNA sense strand
ggaucaaugagacaauauu

SEQ ID NO: 889648 - RNA, 19 nt, Homo sapiens
  misc_RNA (1)...(19): siRNA sense strand
gcccgucagugguuauaau

SEQ ID NO: 889649 - RNA, 19 nt, Homo sapiens
  misc_RNA (1)...(19): siRNA sense strand
ugaaaggaucaaagaacua

SEQ ID NO: 889650 - RNA, 19 nt, Homo sapiens
  misc_RNA (1)...(19): siRNA sense strand
cuucagccuuaaugccuua

SEQ ID NO: 889651 - RNA, 19 nt, Homo sapiens
  misc_RNA (1)...(19): siRNA sense strand
gaaacagcauaggguuaag

SEQ ID NO: 889652 - RNA, 19 nt, Homo sapiens
  misc_RNA (1)...(19): siRNA sense strand
agaaacagaggcuaggaaa

SEQ ID NO: 889653 - RNA, 19 nt, Homo sapiens
  misc_RNA (1)...(19): siRNA sense strand
cuacgaacuuuggauacuu

SEQ ID NO: 889654 - RNA, 19 nt, Homo sapiens
  misc_RNA (1)...(19): siRNA sense strand
aucuauggcuggaaugaua

SEQ ID NO: 889655 - RNA, 19 nt, Homo sapiens
  misc_RNA (1)...(19): siRNA sense strand
gacaaagaagacuacauga

SEQ ID NO: 889656 - RNA, 19 nt, Homo sapiens
  misc_RNA (1)...(19): siRNA sense strand
guucagacaccaaauaaac

SEQ ID NO: 889657 - RNA, 19 nt, Homo sapiens
  misc_RNA (1)...(19): siRNA sense strand
cuacaugaccgaccuacga

SEQ ID NO: 889658 - RNA, 19 nt, Homo sapiens
  misc_RNA (1)...(19): siRNA sense strand
gcaguccuacuuucuggaa

SEQ ID NO: 889659 - RNA, 19 nt, Homo sapiens
  misc_RNA (1)...(19): siRNA sense strand
gcauuuaucagagugcuau

SEQ ID NO: 889660 - RNA, 19 nt, Homo sapiens
  misc_RNA (1)...(19): siRNA sense strand
gacgaaagugggauacaga

SEQ ID NO: 889661 - RNA, 19 nt, Homo sapiens
  misc_RNA (1)...(19): siRNA sense strand
ucucagggagguuguauga

SEQ ID NO: 889662 - RNA, 19 nt, Homo sapiens
  misc_RNA (1)...(19): siRNA sense strand
uggacacaaucguucagua

SEQ ID NO: 889663 - RNA, 19 nt, Homo sapiens
  misc_RNA (1)...(19): siRNA sense strand
agacaacuucuugaucaua

SEQ ID NO: 889664 - RNA, 19 nt, Homo sapiens
  misc_RNA (1)...(19): siRNA sense strand
cuaaacaagccgcagaaga

SEQ ID NO: 889665 - RNA, 19 nt, Homo sapiens
  misc_RNA (1)...(19): siRNA sense strand
gguggcagugguucuuaua

SEQ ID NO: 889666 - RNA, 19 nt, Homo sapiens
  misc_RNA (1)...(19): siRNA sense strand
guggagagcaguggauuga

SEQ ID NO: 889667 - RNA, 19 nt, Homo sapiens
  misc_RNA (1)...(19): siRNA sense strand
uggcuggaaugauauauac

SEQ ID NO: 889668 - RNA, 19 nt, Homo sapiens
  misc_RNA (1)...(19): siRNA sense strand
uaucaacccuccccauuau

SEQ ID NO: 889669 - RNA, 19 nt, Homo sapiens
  misc_RNA (1)...(19): siRNA sense strand
aggaauacuuguuugaaag

SEQ ID NO: 889670 - RNA, 19 nt, Homo sapiens
  misc_RNA (1)...(19): siRNA sense strand
auaggagaggcuaguauua

SEQ ID NO: 889671 - RNA, 19 nt, Homo sapiens
  misc_RNA (1)...(19): siRNA sense strand
gauucuaccucuccuucca

SEQ ID NO: 889672 - RNA, 19 nt, Homo sapiens
  misc_RNA (1)...(19): siRNA sense strand
gaaacagaggcuaggaaag

SEQ ID NO: 889673 - RNA, 19 nt, Homo sapiens
  misc_RNA (1)...(19): siRNA sense strand
guauacaaccugccaaagg

SEQ ID NO: 889674 - RNA, 19 nt, Homo sapiens
  misc_RNA (1)...(19): siRNA sense strand
gcccuugcaucucucuuca

SEQ ID NO: 889675 - RNA, 19 nt, Homo sapiens
  misc_RNA (1)...(19): siRNA sense strand
uuggaucaaugagacaaua

SEQ ID NO: 889676 - RNA, 19 nt, Homo sapiens
  misc_RNA (1)...(19): siRNA sense strand
ugaauagacaacuucuuga

SEQ ID NO: 889677 - RNA, 19 nt, Homo sapiens
  misc_RNA (1)...(19): siRNA sense strand
gaacaugacuucuuuagau

SEQ ID NO: 889678 - RNA, 19 nt, Homo sapiens
  misc_RNA (1)...(19): siRNA sense strand
ggacaaguguuaucgcuua

SEQ ID NO: 889679 - RNA, 19 nt, Homo sapiens
  misc_RNA (1)...(19): siRNA sense strand
aaagagagcuggaaugaaa

SEQ ID NO: 889680 - RNA, 19 nt, Homo sapiens
  misc_RNA (1)...(19): siRNA sense strand
gaaugaacaugacuucuuu

SEQ ID NO: 889681 - RNA, 19 nt, Homo sapiens
  misc_RNA (1)...(19): siRNA sense strand
ggaaagugaugaagcauug

SEQ ID NO: 889682 - RNA, 19 nt, Homo sapiens
  misc_RNA (1)...(19): siRNA sense strand
gaagauccacuuauuguaa

SEQ ID NO: 889683 - RNA, 19 nt, Homo sapiens
  misc_RNA (1)...(19): siRNA sense strand
gcagaaaggcggcaaauug

SEQ ID NO: 889684 - RNA, 19 nt, Homo sapiens
  misc_RNA (1)...(19): siRNA sense strand
aaacagauaccuccuauuu

SEQ ID NO: 889685 - RNA, 19 nt, Homo sapiens
  misc_RNA (1)...(19): siRNA sense strand
gaaaagaccucaccaaaag

SEQ ID NO: 889686 - RNA, 19 nt, Homo sapiens
  misc_RNA (1)...(19): siRNA sense strand
ggaguuugcuuguuugaau

SEQ ID NO: 889687 - RNA, 19 nt, Homo sapiens
  misc_RNA (1)...(19): siRNA sense strand
caaaaugacugugcuaaua

SEQ ID NO: 889688 - RNA, 19 nt, Homo sapiens
  misc_RNA (1)...(19): siRNA sense strand
gcacaaaagucaacaaaau

SEQ ID NO: 889689 - RNA, 19 nt, Homo sapiens
  misc_RNA (1)...(19): siRNA sense strand
caaauuguaugcaguaaag

SEQ ID NO: 889690 - RNA, 19 nt, Homo sapiens
  misc_RNA (1)...(19): siRNA sense strand
ucaaagugcaguagaaaua

SEQ ID NO: 889691 - RNA, 19 nt, Homo sapiens
  misc_RNA (1)...(19): siRNA sense strand
gaaagucagcccuuagauu

SEQ ID NO: 889692 - RNA, 19 nt, Homo sapiens
  misc_RNA (1)...(19): siRNA sense strand
ucaagucucuccuacauau

SEQ ID NO: 889693 - RNA, 19 nt, Homo sapiens
  misc_RNA (1)...(19): siRNA sense strand
ucagaaccauccagaauga

SEQ ID NO: 889694 - RNA, 19 nt, Homo sapiens
  misc_RNA (1)...(19): siRNA sense strand
gaaaggcggcaaauuguau

SEQ ID NO: 889695 - RNA, 19 nt, Homo sapiens
  misc_RNA (1)...(19): siRNA sense strand
gcccuuagauucagauaga

SEQ ID NO: 889696 - RNA, 19 nt, Homo sapiens
  misc_RNA (1)...(19): siRNA sense strand
ggauuuaacacaccaauug

SEQ ID NO: 889697 - RNA, 19 nt, Homo sapiens
  misc_RNA (1)...(19): siRNA sense strand
agagauggcugugaaauau

SEQ ID NO: 889698 - RNA, 19 nt, Homo sapiens
  misc_RNA (1)...(19): siRNA sense strand
gaccguaucuggauuuagu

SEQ ID NO: 889699 - RNA, 19 nt, Homo sapiens
  misc_RNA (1)...(19): siRNA sense strand
cgagaacccugcuguacaa

SEQ ID NO: 889700 - RNA, 19 nt, Homo sapiens
  misc_RNA (1)...(19): siRNA sense strand
gaaaguccauuagaaaguc

SEQ ID NO: 889701 - RNA, 19 nt, Homo sapiens
  misc_RNA (1)...(19): siRNA sense strand
gaaugcaguugaaaaguua

SEQ ID NO: 889702 - RNA, 19 nt, Homo sapiens
  misc_RNA (1)...(19): siRNA sense strand
ucacagacauggaaucauc

SEQ ID NO: 889703 - RNA, 19 nt, Homo sapiens
  misc_RNA (1)...(19): siRNA sense strand
ugaaacaccacaacaagua

SEQ ID NO: 889704 - RNA, 19 nt, Homo sapiens
  misc_RNA (1)...(19): siRNA sense strand
gaucuggaguuagcucuuu

SEQ ID NO: 889705 - RNA, 19 nt, Homo sapiens
  misc_RNA (1)...(19): siRNA sense strand
ggacucguaugcccuaugu

SEQ ID NO: 889706 - RNA, 19 nt, Homo sapiens
  misc_RNA (1)...(19): siRNA sense strand
ugaaacagauaccuccuau

SEQ ID NO: 889707 - RNA, 19 nt, Homo sapiens
  misc_RNA (1)...(19): siRNA sense strand
aagcagacaugaucaacaa

SEQ ID NO: 889708 - RNA, 19 nt, Homo sapiens
  misc_RNA (1)...(19): siRNA sense strand
ggaaaaggcuggccacauc

SEQ ID NO: 889709 - RNA, 19 nt, Homo sapiens
  misc_RNA (1)...(19): siRNA sense strand
aauacaggcuuaacaguug

SEQ ID NO: 889710 - RNA, 19 nt, Homo sapiens
  misc_RNA (1)...(19): siRNA sense strand
gcccauucauuguccauuu

SEQ ID NO: 889711 - RNA, 19 nt, Homo sapiens
  misc_RNA (1)...(19): siRNA sense strand
guauaagcauaacgaaaug

SEQ ID NO: 889712 - RNA, 19 nt, Homo sapiens
  misc_RNA (1)...(19): siRNA sense strand
ccacagcagucccaaaugg

SEQ ID NO: 889713 - RNA, 19 nt, Homo sapiens
  misc_RNA (1)...(19): siRNA sense strand
caaguguuaucgcuuauca

SEQ ID NO: 889714 - RNA, 19 nt, Homo sapiens
  misc_RNA (1)...(19): siRNA sense strand
ucugaaacaucacagcuuu

SEQ ID NO: 889715 - RNA, 19 nt, Homo sapiens
  misc_RNA (1)...(19): siRNA sense strand
gaacccugcuguacaagag

SEQ ID NO: 889716 - RNA, 19 nt, Homo sapiens
  misc_RNA (1)...(19): siRNA sense strand
caaacaaugucuacuuggu

SEQ ID NO: 889717 - RNA, 19 nt, Homo sapiens
  misc_RNA (1)...(19): siRNA sense strand
ggaaugcaguugaaaaguu

SEQ ID NO: 889718 - RNA, 19 nt, Homo sapiens
  misc_RNA (1)...(19): siRNA sense strand
gccuuauucuagcaaauua

SEQ ID NO: 889719 - RNA, 19 nt, Homo sapiens
  misc_RNA (1)...(19): siRNA sense strand
ucaagacccugcaaacauc

SEQ ID NO: 889720 - RNA, 19 nt, Homo sapiens
  misc_RNA (1)...(19): siRNA sense strand
gagaugcacuggcacuaag

SEQ ID NO: 889721 - RNA, 19 nt, Homo sapiens
  misc_RNA (1)...(19): siRNA sense strand
guucauaucccauggcuau

SEQ ID NO: 889722 - RNA, 19 nt, Homo sapiens
  misc_RNA (1)...(19): siRNA sense strand
ggaaaguccauuagaaagu

SEQ ID NO: 889723 - RNA, 19 nt, Homo sapiens
  misc_RNA (1)...(19): siRNA sense strand
aaucaugucuugaaacagu

SEQ ID NO: 889724 - RNA, 19 nt, Homo sapiens
  misc_RNA (1)...(19): siRNA sense strand
gggaaaaucugcagcauca

SEQ ID NO: 889725 - RNA, 19 nt, Homo sapiens
  misc_RNA (1)...(19): siRNA sense strand
gaacucugauucaucuuuu

SEQ ID NO: 889726 - RNA, 19 nt, Homo sapiens
  misc_RNA (1)...(19): siRNA sense strand
acuggacgcucuuguguaa

SEQ ID NO: 889727 - RNA, 19 nt, Homo sapiens
  misc_RNA (1)...(19): siRNA sense strand
ccaggaaagugaugaagca

SEQ ID NO: 889728 - RNA, 19 nt, Homo sapiens
  misc_RNA (1)...(19): siRNA sense strand
gauccuguaugccacauca

SEQ ID NO: 889729 - RNA, 19 nt, Homo sapiens
  misc_RNA (1)...(19): siRNA sense strand
aacaaugucuacuugguaa

SEQ ID NO: 889730 - RNA, 19 nt, Homo sapiens
  misc_RNA (1)...(19): siRNA sense strand
gaaacaccacaacaaguau

SEQ ID NO: 889731 - RNA, 19 nt, Homo sapiens
  misc_RNA (1)...(19): siRNA sense strand
gaguuugcuuguuugaauu

SEQ ID NO: 889732 - RNA, 19 nt, Homo sapiens
  misc_RNA (1)...(19): siRNA sense strand
gaggagggcgugaauagga

SEQ ID NO: 889733 - RNA, 19 nt, Homo sapiens
  misc_RNA (1)...(19): siRNA sense strand
aaacaaugucuacuuggua

SEQ ID NO: 889734 - RNA, 19 nt, Homo sapiens
  misc_RNA (1)...(19): siRNA sense strand
gaugaugggcgaauucuag

SEQ ID NO: 889735 - RNA, 19 nt, Homo sapiens
  misc_RNA (1)...(19): siRNA sense strand
ugaacucgaugaagacugu

SEQ ID NO: 889736 - RNA, 19 nt, Homo sapiens
  misc_RNA (1)...(19): siRNA sense strand
ugugugaacucgaugaaga

SEQ ID NO: 889737 - RNA, 19 nt, Homo sapiens
  misc_RNA (1)...(19): siRNA sense strand
ggaaguuucuugggaagca

SEQ ID NO: 889738 - RNA, 19 nt, Homo sapiens
  misc_RNA (1)...(19): siRNA sense strand
ccauugagacgaaagguuu

SEQ ID NO: 889739 - RNA, 19 nt, Homo sapiens
  misc_RNA (1)...(19): siRNA sense strand
gcaaauuguaugcaguaaa

SEQ ID NO: 889740 - RNA, 19 nt, Homo sapiens
  misc_RNA (1)...(19): siRNA sense strand
gaagagauggcugugaaau

SEQ ID NO: 889741 - RNA, 19 nt, Homo sapiens
  misc_RNA (1)...(19): siRNA sense strand
uagaugcaauggauauuuc

SEQ ID NO: 889742 - RNA, 19 nt, Homo sapiens
  misc_RNA (1)...(19): siRNA sense strand
aauguuagguccuccuuug

SEQ ID NO: 889743 - RNA, 19 nt, Homo sapiens
  misc_RNA (1)...(19): siRNA sense strand
guacaagagaguaaccaaa

SEQ ID NO: 889744 - RNA, 19 nt, Homo sapiens
  misc_RNA (1)...(19): siRNA sense strand
aaagucagcccuuagauuc

SEQ ID NO: 889745 - RNA, 19 nt, Homo sapiens
  misc_RNA (1)...(19): siRNA sense strand
aaacaacaaacaccagaaa

SEQ ID NO: 889746 - RNA, 19 nt, Homo sapiens
  misc_RNA (1)...(19): siRNA sense strand
gcuaauaaggagaacauug

SEQ ID NO: 889747 - RNA, 19 nt, Homo sapiens
  misc_RNA (1)...(19): siRNA sense strand
acacaagucaguuagguuu

SEQ ID NO: 889748 - RNA, 19 nt, Homo sapiens
  misc_RNA (1)...(19): siRNA sense strand
cuaauuuacuccagucuag

SEQ ID NO: 889749 - RNA, 19 nt, Homo sapiens
  misc_RNA (1)...(19): siRNA sense strand
aaacaucacagcuuucuca

SEQ ID NO: 889750 - RNA, 19 nt, Homo sapiens
  misc_RNA (1)...(19): siRNA sense strand
gagauggcugugaaauaua

SEQ ID NO: 889751 - RNA, 19 nt, Homo sapiens
  misc_RNA (1)...(19): siRNA sense strand
gcucuagacuaccuucaca

SEQ ID NO: 889752 - RNA, 19 nt, Homo sapiens
  misc_RNA (1)...(19): siRNA sense strand
acagauaccuccuauuuug

SEQ ID NO: 889753 - RNA, 19 nt, Homo sapiens
  misc_RNA (1)...(19): siRNA sense strand
acaaagagagcuggaauga

SEQ ID NO: 889754 - RNA, 19 nt, Homo sapiens
  misc_RNA (1)...(19): siRNA sense strand
gguccaagcugagagagau

SEQ ID NO: 889755 - RNA, 19 nt, Homo sapiens
  misc_RNA (1)...(19): siRNA sense strand
aagagggacuacuuaaguu

SEQ ID NO: 889756 - RNA, 19 nt, Homo sapiens
  misc_RNA (1)...(19): siRNA sense strand
gaguuggaaugcaguugaa

SEQ ID NO: 889757 - RNA, 19 nt, Homo sapiens
  misc_RNA (1)...(19): siRNA sense strand
cauauuaaacugacggauu

SEQ ID NO: 889758 - RNA, 19 nt, Homo sapiens
  misc_RNA (1)...(19): siRNA sense strand
uagacuaccuucacagaca

SEQ ID NO: 889759 - RNA, 19 nt, Homo sapiens
  misc_RNA (1)...(19): siRNA sense strand
ccagccagaugaugaaaca

SEQ ID NO: 889760 - RNA, 19 nt, Homo sapiens
  misc_RNA (1)...(19): siRNA sense strand
gaugaaacaccacaacaag

SEQ ID NO: 889761 - RNA, 19 nt, Homo sapiens
  misc_RNA (1)...(19): siRNA sense strand
ucagauagaagcauuaaag

SEQ ID NO: 889762 - RNA, 19 nt, Homo sapiens
  misc_RNA (1)...(19): siRNA sense strand
uaacacaccaauugcagaa

SEQ ID NO: 889763 - RNA, 19 nt, Homo sapiens
  misc_RNA (1)...(19): siRNA sense strand
acacuacgccuuauucuag

SEQ ID NO: 889764 - RNA, 19 nt, Homo sapiens
  misc_RNA (1)...(19): siRNA sense strand
guaucuggauuuagucugu

SEQ ID NO: 889765 - RNA, 19 nt, Homo sapiens
  misc_RNA (1)...(19): siRNA sense strand
agauggcugugaaauauau

SEQ ID NO: 889766 - RNA, 19 nt, Homo sapiens
  misc_RNA (1)...(19): siRNA sense strand
gcacuuggaguuugcuugu

SEQ ID NO: 889767 - RNA, 19 nt, Homo sapiens
  misc_RNA (1)...(19): siRNA sense strand
gaggaauucagcauaguga

SEQ ID NO: 889768 - RNA, 19 nt, Homo sapiens
  misc_RNA (1)...(19): siRNA sense strand
cagaaaggcggcaaauugu

SEQ ID NO: 889769 - RNA, 19 nt, Homo sapiens
  misc_RNA (1)...(19): siRNA sense strand
ugucaagucucuccuacau

SEQ ID NO: 889770 - RNA, 19 nt, Homo sapiens
  misc_RNA (1)...(19): siRNA sense strand
gaguauaagcauaacgaaa

SEQ ID NO: 889771 - RNA, 19 nt, Homo sapiens
  misc_RNA (1)...(19): siRNA sense strand
gaaaaguuaugcgcaaaau

SEQ ID NO: 889772 - RNA, 19 nt, Homo sapiens
  misc_RNA (1)...(19): siRNA sense strand
ugcaaacaaugucuacuug

SEQ ID NO: 889773 - RNA, 19 nt, Homo sapiens
  misc_RNA (1)...(19): siRNA sense strand
cuaauaaggagaacauugu

SEQ ID NO: 889774 - RNA, 19 nt, Homo sapiens
  misc_RNA (1)...(19): siRNA sense strand
gucauccucucuucaguga

SEQ ID NO: 889775 - RNA, 19 nt, Homo sapiens
  misc_RNA (1)...(19): siRNA sense strand
cacaacaaguauuccagaa

SEQ ID NO: 889776 - RNA, 19 nt, Homo sapiens
  misc_RNA (1)...(19): siRNA sense strand
gaugaagacugugaaaaga

SEQ ID NO: 889777 - RNA, 19 nt, Homo sapiens
  misc_RNA (1)...(19): siRNA sense strand
gaagagagcuccuggcauu

SEQ ID NO: 889778 - RNA, 19 nt, Homo sapiens
  misc_RNA (1)...(19): siRNA sense strand
gggaauagcuggagauaca

SEQ ID NO: 889779 - RNA, 19 nt, Homo sapiens
  misc_RNA (1)...(19): siRNA sense strand
cgauuccggucuuuccuua

SEQ ID NO: 889780 - RNA, 19 nt, Homo sapiens
  misc_RNA (1)...(19): siRNA sense strand
acaaagggcucggacgauu

SEQ ID NO: 889781 - RNA, 19 nt, Homo sapiens
  misc_RNA (1)...(19): siRNA sense strand
ccaccucacucuucagaug

SEQ ID NO: 889782 - RNA, 19 nt, Homo sapiens
  misc_RNA (1)...(19): siRNA sense strand
uacaggaaauggcagagua

SEQ ID NO: 889783 - RNA, 19 nt, Homo sapiens
  misc_RNA (1)...(19): siRNA sense strand
ggaaauggcagaguacgau

SEQ ID NO: 889784 - RNA, 19 nt, Homo sapiens
  misc_RNA (1)...(19): siRNA sense strand
gaaauggcagaguacgauu

SEQ ID NO: 889785 - RNA, 19 nt, Homo sapiens
  misc_RNA (1)...(19): siRNA sense strand
cgaguuggcugucaguuuu

SEQ ID NO: 889786 - RNA, 19 nt, Homo sapiens
  misc_RNA (1)...(19): siRNA sense strand
cuaaccaccucacucuuca

SEQ ID NO: 889787 - RNA, 19 nt, Homo sapiens
  misc_RNA (1)...(19): siRNA sense strand
uuccuuagcugcucuccuu

SEQ ID NO: 889788 - RNA, 19 nt, Homo sapiens
  misc_RNA (1)...(19): siRNA sense strand
ccacaucuacccacaaggu

SEQ ID NO: 889789 - RNA, 19 nt, Homo sapiens
  misc_RNA (1)...(19): siRNA sense strand
ggucuaaccaccucacucu

SEQ ID NO: 889790 - RNA, 19 nt, Homo sapiens
  misc_RNA (1)...(19): siRNA sense strand
caaagggcucggacgauuc

SEQ ID NO: 889791 - RNA, 19 nt, Homo sapiens
  misc_RNA (1)...(19): siRNA sense strand
ccaugggucucuugaugag

SEQ ID NO: 889792 - RNA, 19 nt, Homo sapiens
  misc_RNA (1)...(19): siRNA sense strand
gaagcagggaagacagugu

SEQ ID NO: 889793 - RNA, 19 nt, Homo sapiens
  misc_RNA (1)...(19): siRNA sense strand
aagcagggaagacagugua

SEQ ID NO: 889794 - RNA, 19 nt, Homo sapiens
  misc_RNA (1)...(19): siRNA sense strand
uuucugcacuggagguuuc

SEQ ID NO: 889795 - RNA, 19 nt, Homo sapiens
  misc_RNA (1)...(19): siRNA sense strand
ccuguucccucccacaucu

SEQ ID NO: 889796 - RNA, 19 nt, Homo sapiens
  misc_RNA (1)...(19): siRNA sense strand
gagagcuccuggcauucca

SEQ ID NO: 889797 - RNA, 19 nt, Homo sapiens
  misc_RNA (1)...(19): siRNA sense strand
ucuaaccaccucacucuuc

SEQ ID NO: 889798 - RNA, 19 nt, Homo sapiens
  misc_RNA (1)...(19): siRNA sense strand
gcugucaguuuuauggauu

SEQ ID NO: 889799 - RNA, 19 nt, Homo sapiens
  misc_RNA (1)...(19): siRNA sense strand
ccaacaagacgggcaugga

SEQ ID NO: 889800 - RNA, 19 nt, Homo sapiens
  misc_RNA (1)...(19): siRNA sense strand
gaagacaagugguucagaa

SEQ ID NO: 889801 - RNA, 19 nt, Homo sapiens
  misc_RNA (1)...(19): siRNA sense strand
agaaagcucugacaaauau

SEQ ID NO: 889802 - RNA, 19 nt, Homo sapiens
  misc_RNA (1)...(19): siRNA sense strand
gcaggaaauugaagauaaa

SEQ ID NO: 889803 - RNA, 19 nt, Homo sapiens
  misc_RNA (1)...(19): siRNA sense strand
gaaccaggcuucugcuuca

SEQ ID NO: 889804 - RNA, 19 nt, Homo sapiens
  misc_RNA (1)...(19): siRNA sense strand
gaagacacuuugcuguuga

SEQ ID NO: 889805 - RNA, 19 nt, Homo sapiens
  misc_RNA (1)...(19): siRNA sense strand
agaaagcacugcaggagua

SEQ ID NO: 889806 - RNA, 19 nt, Homo sapiens
  misc_RNA (1)...(19): siRNA sense strand
gaucaaagaccauuucugu

SEQ ID NO: 889807 - RNA, 19 nt, Homo sapiens
  misc_RNA (1)...(19): siRNA sense strand
gagaaagcucugacaaaua

SEQ ID NO: 889808 - RNA, 19 nt, Homo sapiens
  misc_RNA (1)...(19): siRNA sense strand
ggacucagcaggaaauuga

SEQ ID NO: 889809 - RNA, 19 nt, Homo sapiens
  misc_RNA (1)...(19): siRNA sense strand
gcacuugcgucaucucaga

SEQ ID NO: 889810 - RNA, 19 nt, Homo sapiens
  misc_RNA (1)...(19): siRNA sense strand
gauagagacucagcugaaa

SEQ ID NO: 889811 - RNA, 19 nt, Homo sapiens
  misc_RNA (1)...(19): siRNA sense strand
gaaaagggauguccaggaa

SEQ ID NO: 889812 - RNA, 19 nt, Homo sapiens
  misc_RNA (1)...(19): siRNA sense strand
gaccauuucuguccauuug

SEQ ID NO: 889813 - RNA, 19 nt, Homo sapiens
  misc_RNA (1)...(19): siRNA sense strand
ugagaaagcucugacaaau

SEQ ID NO: 889814 - RNA, 19 nt, Homo sapiens
  misc_RNA (1)...(19): siRNA sense strand
gacaagugguucagaaaga

SEQ ID NO: 889815 - RNA, 19 nt, Homo sapiens
  misc_RNA (1)...(19): siRNA sense strand
gcaaauuggcagaggcuua

SEQ ID NO: 889816 - RNA, 19 nt, Homo sapiens
  misc_RNA (1)...(19): siRNA sense strand
gaagcgaauagcaguaaua

SEQ ID NO: 889817 - RNA, 19 nt, Homo sapiens
  misc_RNA (1)...(19): siRNA sense strand
gagaagauaucccagaaaa

SEQ ID NO: 889818 - RNA, 19 nt, Homo sapiens
  misc_RNA (1)...(19): siRNA sense strand
guugauagcugagguuaug

SEQ ID NO: 889819 - RNA, 19 nt, Homo sapiens
  misc_RNA (1)...(19): siRNA sense strand
cagaagaauuugaagacaa

SEQ ID NO: 889820 - RNA, 19 nt, Homo sapiens
  misc_RNA (1)...(19): siRNA sense strand
ccugaaaccuugccugaga

SEQ ID NO: 889821 - RNA, 19 nt, Homo sapiens
  misc_RNA (1)...(19): siRNA sense strand
agaaagcagugaugauguu

SEQ ID NO: 889822 - RNA, 19 nt, Homo sapiens
  misc_RNA (1)...(19): siRNA sense strand
ccugagagcucuuuauuuu

SEQ ID NO: 889823 - RNA, 19 nt, Homo sapiens
  misc_RNA (1)...(19): siRNA sense strand
ggcagaggcuuaccugaau

SEQ ID NO: 889824 - RNA, 19 nt, Homo sapiens
  misc_RNA (1)...(19): siRNA sense strand
ucaguuccauacagagaua

SEQ ID NO: 889825 - RNA, 19 nt, Homo sapiens
  misc_RNA (1)...(19): siRNA sense strand
cagcagcacuugcgucauc

SEQ ID NO: 889826 - RNA, 19 nt, Homo sapiens
  misc_RNA (1)...(19): siRNA sense strand
caaccaacacagaccauuu

SEQ ID NO: 889827 - RNA, 19 nt, Homo sapiens
  misc_RNA (1)...(19): siRNA sense strand
gaaagaucaaagaccauuu

SEQ ID NO: 889828 - RNA, 19 nt, Homo sapiens
  misc_RNA (1)...(19): siRNA sense strand
gaaaggguucagcuucaaa

SEQ ID NO: 889829 - RNA, 19 nt, Homo sapiens
  misc_RNA (1)...(19): siRNA sense strand
agaagacacuuugcuguug

SEQ ID NO: 889830 - RNA, 19 nt, Homo sapiens
  misc_RNA (1)...(19): siRNA sense strand
gcaggaguauuccaguauc

SEQ ID NO: 889831 - RNA, 19 nt, Homo sapiens
  misc_RNA (1)...(19): siRNA sense strand
agcaggaaauugaagauaa

SEQ ID NO: 889832 - RNA, 19 nt, Homo sapiens
  misc_RNA (1)...(19): siRNA sense strand
cgacaagaguaucagaaag

SEQ ID NO: 889833 - RNA, 19 nt, Homo sapiens
  misc_RNA (1)...(19): siRNA sense strand
gaaaaucaguuccauacag

SEQ ID NO: 889834 - RNA, 19 nt, Homo sapiens
  misc_RNA (1)...(19): siRNA sense strand
gacuguauccucagaagaa

SEQ ID NO: 889835 - RNA, 19 nt, Homo sapiens
  misc_RNA (1)...(19): siRNA sense strand
aagcagugaugauguugaa

SEQ ID NO: 889836 - RNA, 19 nt, Homo sapiens
  misc_RNA (1)...(19): siRNA sense strand
gaagugcugacucucaaga

SEQ ID NO: 889837 - RNA, 19 nt, Homo sapiens
  misc_RNA (1)...(19): siRNA sense strand
ccauuucuguccauuugaa

SEQ ID NO: 889838 - RNA, 19 nt, Homo sapiens
  misc_RNA (1)...(19): siRNA sense strand
gaaacagaaagcagugaug

SEQ ID NO: 889839 - RNA, 19 nt, Homo sapiens
  misc_RNA (1)...(19): siRNA sense strand
ggagaagauaucccagaaa

SEQ ID NO: 889840 - RNA, 19 nt, Homo sapiens
  misc_RNA (1)...(19): siRNA sense strand
aaccaacacagaccauuua

SEQ ID NO: 889841 - RNA, 19 nt, Homo sapiens
  misc_RNA (1)...(19): siRNA sense strand
agaagaauuugaagacaag

SEQ ID NO: 889842 - RNA, 19 nt, Homo sapiens
  misc_RNA (1)...(19): siRNA sense strand
ggaagcgaauagcaguaau

SEQ ID NO: 889843 - RNA, 19 nt, Homo sapiens
  misc_RNA (1)...(19): siRNA sense strand
gcagaggcuuaccugaauc

SEQ ID NO: 889844 - RNA, 19 nt, Homo sapiens
  misc_RNA (1)...(19): siRNA sense strand
gagguuaugggagaagaua

SEQ ID NO: 889845 - RNA, 19 nt, Homo sapiens
  misc_RNA (1)...(19): siRNA sense strand
aaacagaaagcagugauga

SEQ ID NO: 889846 - RNA, 19 nt, Homo sapiens
  misc_RNA (1)...(19): siRNA sense strand
gaaaagagagaaacagugu

SEQ ID NO: 889847 - RNA, 19 nt, Homo sapiens
  misc_RNA (1)...(19): siRNA sense strand
cuacagacgacaagaguau

SEQ ID NO: 889848 - RNA, 19 nt, Homo sapiens
  misc_RNA (1)...(19): siRNA sense strand
cagcacaguuucaccucaa

SEQ ID NO: 889849 - RNA, 19 nt, Homo sapiens
  misc_RNA (1)...(19): siRNA sense strand
gaaaauaaagcaaccaaca

SEQ ID NO: 889850 - RNA, 19 nt, Homo sapiens
  misc_RNA (1)...(19): siRNA sense strand
gcugcaaacuuggaaaaua

SEQ ID NO: 889851 - RNA, 19 nt, Homo sapiens
  misc_RNA (1)...(19): siRNA sense strand
caacacagaccauuuaacc

SEQ ID NO: 889852 - RNA, 19 nt, Homo sapiens
  misc_RNA (1)...(19): siRNA sense strand
ugacaaauauccaaaacug

SEQ ID NO: 889853 - RNA, 19 nt, Homo sapiens
  misc_RNA (1)...(19): siRNA sense strand
ugauuucuuugcauccuuu

SEQ ID NO: 889854 - RNA, 19 nt, Homo sapiens
  misc_RNA (1)...(19): siRNA sense strand
gcagugaugauguugaagu

SEQ ID NO: 889855 - RNA, 19 nt, Homo sapiens
  misc_RNA (1)...(19): siRNA sense strand
uagcaguaauagccagaaa

SEQ ID NO: 889856 - RNA, 19 nt, Homo sapiens
  misc_RNA (1)...(19): siRNA sense strand
gaaagcagugaugauguug

SEQ ID NO: 889857 - RNA, 19 nt, Homo sapiens
  misc_RNA (1)...(19): siRNA sense strand
gcagugguuuuaugaagaa

SEQ ID NO: 889858 - RNA, 19 nt, Homo sapiens
  misc_RNA (1)...(19): siRNA sense strand
cugcaggaguauuccagua

SEQ ID NO: 889859 - RNA, 19 nt, Homo sapiens
  misc_RNA (1)...(19): siRNA sense strand
ucagaagaauuugaagaca

SEQ ID NO: 889860 - RNA, 19 nt, Homo sapiens
  misc_RNA (1)...(19): siRNA sense strand
acccagaggugaagugugu

SEQ ID NO: 889861 - RNA, 19 nt, Homo sapiens
  misc_RNA (1)...(19): siRNA sense strand
ugauagagacucagcugaa

SEQ ID NO: 889862 - RNA, 19 nt, Homo sapiens
  misc_RNA (1)...(19): siRNA sense strand
uaucaaauccuucuuucca

SEQ ID NO: 889863 - RNA, 19 nt, Homo sapiens
  misc_RNA (1)...(19): siRNA sense strand
gaacuuggagaaaacaauu

SEQ ID NO: 889864 - RNA, 19 nt, Homo sapiens
  misc_RNA (1)...(19): siRNA sense strand
cugcaaacuuggaaaauaa

SEQ ID NO: 889865 - RNA, 19 nt, Homo sapiens
  misc_RNA (1)...(19): siRNA sense strand
cagcaggaaauugaagaua

SEQ ID NO: 889866 - RNA, 19 nt, Homo sapiens
  misc_RNA (1)...(19): siRNA sense strand
aaauaaagcaaccaacaca

SEQ ID NO: 889867 - RNA, 19 nt, Homo sapiens
  misc_RNA (1)...(19): siRNA sense strand
ugacugccuuggugacugu

SEQ ID NO: 889868 - RNA, 19 nt, Homo sapiens
  misc_RNA (1)...(19): siRNA sense strand
ccaggcuucugcuucaguu

SEQ ID NO: 889869 - RNA, 19 nt, Homo sapiens
  misc_RNA (1)...(19): siRNA sense strand
acagaaagcagugaugaug

SEQ ID NO: 889870 - RNA, 19 nt, Homo sapiens
  misc_RNA (1)...(19): siRNA sense strand
gcaugugccucuuuuauac

SEQ ID NO: 889871 - RNA, 19 nt, Homo sapiens
  misc_RNA (1)...(19): siRNA sense strand
cuuaaggacucagcaggaa

SEQ ID NO: 889872 - RNA, 19 nt, Homo sapiens
  misc_RNA (1)...(19): siRNA sense strand
gaaagcacugcaggaguau

SEQ ID NO: 889873 - RNA, 19 nt, Homo sapiens
  misc_RNA (1)...(19): siRNA sense strand
uguauccucagaagaauuu

SEQ ID NO: 889874 - RNA, 19 nt, Homo sapiens
  misc_RNA (1)...(19): siRNA sense strand
ugcugacucucaagaaauu

SEQ ID NO: 889875 - RNA, 19 nt, Homo sapiens
  misc_RNA (1)...(19): siRNA sense strand
gcucugacaaauauccaaa

SEQ ID NO: 889876 - RNA, 19 nt, Homo sapiens
  misc_RNA (1)...(19): siRNA sense strand
caaccaauuuugccaugaa

SEQ ID NO: 889877 - RNA, 19 nt, Homo sapiens
  misc_RNA (1)...(19): siRNA sense strand
aaaaucaguuccauacaga

SEQ ID NO: 889878 - RNA, 19 nt, Homo sapiens
  misc_RNA (1)...(19): siRNA sense strand
aaagaucaaagaccauuuc

SEQ ID NO: 889879 - RNA, 19 nt, Homo sapiens
  misc_RNA (1)...(19): siRNA sense strand
acaagugguucagaaagau

SEQ ID NO: 889880 - RNA, 19 nt, Homo sapiens
  misc_RNA (1)...(19): siRNA sense strand
aagaagacacuuugcuguu

SEQ ID NO: 889881 - RNA, 19 nt, Homo sapiens
  misc_RNA (1)...(19): siRNA sense strand
uaaggacucagcaggaaau

SEQ ID NO: 889882 - RNA, 19 nt, Homo sapiens
  misc_RNA (1)...(19): siRNA sense strand
aaggagaccuggccuacag

SEQ ID NO: 889883 - RNA, 19 nt, Homo sapiens
  misc_RNA (1)...(19): siRNA sense strand
ccagcuugcuauuuguuca

SEQ ID NO: 889884 - RNA, 19 nt, Homo sapiens
  misc_RNA (1)...(19): siRNA sense strand
gcaaccaacacagaccauu

SEQ ID NO: 889885 - RNA, 19 nt, Homo sapiens
  misc_RNA (1)...(19): siRNA sense strand
acacuuugcuguugauagc

SEQ ID NO: 889886 - RNA, 19 nt, Homo sapiens
  misc_RNA (1)...(19): siRNA sense strand
uggcagaggcuuaccugaa

SEQ ID NO: 889887 - RNA, 19 nt, Homo sapiens
  misc_RNA (1)...(19): siRNA sense strand
gcuauuuguucaaguuugc

SEQ ID NO: 889888 - RNA, 19 nt, Homo sapiens
  misc_RNA (1)...(19): siRNA sense strand
gcucaccuggguaggcaua

SEQ ID NO: 889889 - RNA, 19 nt, Homo sapiens
  misc_RNA (1)...(19): siRNA sense strand
agaaagaucaaagaccauu

SEQ ID NO: 889890 - RNA, 19 nt, Homo sapiens
  misc_RNA (1)...(19): siRNA sense strand
auaaagcaaccaacacaga

SEQ ID NO: 889891 - RNA, 19 nt, Homo sapiens
  misc_RNA (1)...(19): siRNA sense strand
agugcugacucucaagaaa

SEQ ID NO: 889892 - RNA, 19 nt, Homo sapiens
  misc_RNA (1)...(19): siRNA sense strand
gccugagagcucuuuauuu

SEQ ID NO: 889893 - RNA, 19 nt, Homo sapiens
  misc_RNA (1)...(19): siRNA sense strand
ugacaaaacuaucaaaucc

SEQ ID NO: 889894 - RNA, 19 nt, Homo sapiens
  misc_RNA (1)...(19): siRNA sense strand
cagugaugauguugaagug

SEQ ID NO: 889895 - RNA, 19 nt, Homo sapiens
  misc_RNA (1)...(19): siRNA sense strand
acuaucaaauccuucuuuc

SEQ ID NO: 889896 - RNA, 19 nt, Homo sapiens
  misc_RNA (1)...(19): siRNA sense strand
gacgacaagaguaucagaa

SEQ ID NO: 889897 - RNA, 19 nt, Homo sapiens
  misc_RNA (1)...(19): siRNA sense strand
acaagaguaucagaaagca

SEQ ID NO: 889898 - RNA, 19 nt, Homo sapiens
  misc_RNA (1)...(19): siRNA sense strand
aaaacuguauggcagaaaa

SEQ ID NO: 889899 - RNA, 19 nt, Homo sapiens
  misc_RNA (1)...(19): siRNA sense strand
cagaaagcagugaugaugu

SEQ ID NO: 889900 - RNA, 19 nt, Homo sapiens
  misc_RNA (1)...(19): siRNA sense strand
caaggaagaagaacaaaua

SEQ ID NO: 889901 - RNA, 19 nt, Homo sapiens
  misc_RNA (1)...(19): siRNA sense strand
gaagaagaacaaauacaga

SEQ ID NO: 889902 - RNA, 19 nt, Homo sapiens
  misc_RNA (1)...(19): siRNA sense strand
ggaagaagaacaaauacag

SEQ ID NO: 889903 - RNA, 19 nt, Homo sapiens
  misc_RNA (1)...(19): siRNA sense strand
caaaugggccucaggaucu

SEQ ID NO: 889904 - RNA, 19 nt, Homo sapiens
  misc_RNA (1)...(19): siRNA sense strand
gcauuucagugccaucuac

SEQ ID NO: 889905 - RNA, 19 nt, Homo sapiens
  misc_RNA (1)...(19): siRNA sense strand
ggcagacucccagaaguua

SEQ ID NO: 889906 - RNA, 19 nt, Homo sapiens
  misc_RNA (1)...(19): siRNA sense strand
gcaaagcuccgugcucucu

SEQ ID NO: 889907 - RNA, 19 nt, Homo sapiens
  misc_RNA (1)...(19): siRNA sense strand
ucccagaaguuaucuaugg

SEQ ID NO: 889908 - RNA, 19 nt, Homo sapiens
  misc_RNA (1)...(19): siRNA sense strand
aaagcuccgugcucucuug

SEQ ID NO: 889909 - RNA, 19 nt, Homo sapiens
  misc_RNA (1)...(19): siRNA sense strand
ucaaggccaggacgucaua

SEQ ID NO: 889910 - RNA, 19 nt, Homo sapiens
  misc_RNA (1)...(19): siRNA sense strand
uuccagggcucgcucaguu

SEQ ID NO: 889911 - RNA, 19 nt, Homo sapiens
  misc_RNA (1)...(19): siRNA sense strand
ugugaugagucgcuguuug

SEQ ID NO: 889912 - RNA, 19 nt, Homo sapiens
  misc_RNA (1)...(19): siRNA sense strand
gaucugaaggcgccagcuu

SEQ ID NO: 889913 - RNA, 19 nt, Homo sapiens
  misc_RNA (1)...(19): siRNA sense strand
ucacaccaaggaagaagaa

SEQ ID NO: 889914 - RNA, 19 nt, Homo sapiens
  misc_RNA (1)...(19): siRNA sense strand
ccaaggaagaagaacaaau

SEQ ID NO: 889915 - RNA, 19 nt, Homo sapiens
  misc_RNA (1)...(19): siRNA sense strand
caccaaggaagaagaacaa

SEQ ID NO: 889916 - RNA, 19 nt, Homo sapiens
  misc_RNA (1)...(19): siRNA sense strand
cggcagacucccagaaguu

SEQ ID NO: 889917 - RNA, 19 nt, Homo sapiens
  misc_RNA (1)...(19): siRNA sense strand
gcggcagacucccagaagu

SEQ ID NO: 889918 - RNA, 19 nt, Homo sapiens
  misc_RNA (1)...(19): siRNA sense strand
gcagacucccagaaguuau

SEQ ID NO: 889919 - RNA, 19 nt, Homo sapiens
  misc_RNA (1)...(19): siRNA sense strand
guggagaaggcuaacagaa

SEQ ID NO: 889920 - RNA, 19 nt, Homo sapiens
  misc_RNA (1)...(19): siRNA sense strand
gcaaaggggagcugugaga

SEQ ID NO: 889921 - RNA, 19 nt, Homo sapiens
  misc_RNA (1)...(19): siRNA sense strand
ggccaggacgucauaugug

SEQ ID NO: 889922 - RNA, 19 nt, Homo sapiens
  misc_RNA (1)...(19): siRNA sense strand
ucgcucaguuagcauuuca

SEQ ID NO: 889923 - RNA, 19 nt, Homo sapiens
  misc_RNA (1)...(19): siRNA sense strand
uggaugagacucuguuugg

SEQ ID NO: 889924 - RNA, 19 nt, Homo sapiens
  misc_RNA (1)...(19): siRNA sense strand
gggccacccagaaaccaaa

SEQ ID NO: 889925 - RNA, 19 nt, Homo sapiens
  misc_RNA (1)...(19): siRNA sense strand
gugaugagucgcuguuugg

SEQ ID NO: 889926 - RNA, 19 nt, Homo sapiens
  misc_RNA (1)...(19): siRNA sense strand
gaaagaaagugugaaccua

SEQ ID NO: 889927 - RNA, 19 nt, Homo sapiens
  misc_RNA (1)...(19): siRNA sense strand
gacgaucuguacccggaua

SEQ ID NO: 889928 - RNA, 19 nt, Homo sapiens
  misc_RNA (1)...(19): siRNA sense strand
uggagacgcugcuggaaga

SEQ ID NO: 889929 - RNA, 19 nt, Homo sapiens
  misc_RNA (1)...(19): siRNA sense strand
ucacggcucuggagaacau

SEQ ID NO: 889930 - RNA, 19 nt, Homo sapiens
  misc_RNA (1)...(19): siRNA sense strand
cagcagcauucgguacuuu

SEQ ID NO: 889931 - RNA, 19 nt, Homo sapiens
  misc_RNA (1)...(19): siRNA sense strand
cugcaacucuggucacuag

SEQ ID NO: 889932 - RNA, 19 nt, Homo sapiens
  misc_RNA (1)...(19): siRNA sense strand
aaagaaagugugaaccuau

SEQ ID NO: 889933 - RNA, 19 nt, Homo sapiens
  misc_RNA (1)...(19): siRNA sense strand
gugugaaccuaucaucaug

SEQ ID NO: 889934 - RNA, 19 nt, Homo sapiens
  misc_RNA (1)...(19): siRNA sense strand
gaugucagcaagugugaga

SEQ ID NO: 889935 - RNA, 19 nt, Homo sapiens
  misc_RNA (1)...(19): siRNA sense strand
ucuacaagcuacacgaaag

SEQ ID NO: 889936 - RNA, 19 nt, Homo sapiens
  misc_RNA (1)...(19): siRNA sense strand
gccgaacccgugcucauuu

SEQ ID NO: 889937 - RNA, 19 nt, Homo sapiens
  misc_RNA (1)...(19): siRNA sense strand
aagaaagugugaaccuauc

SEQ ID NO: 889938 - RNA, 19 nt, Homo sapiens
  misc_RNA (1)...(19): siRNA sense strand
gcagcauucgguacuuuga

SEQ ID NO: 889939 - RNA, 19 nt, Homo sapiens
  misc_RNA (1)...(19): siRNA sense strand
ccuagaagcggacgaaugg

SEQ ID NO: 889940 - RNA, 19 nt, Homo sapiens
  misc_RNA (1)...(19): siRNA sense strand
ugcacuaccugaacacguu

SEQ ID NO: 889941 - RNA, 19 nt, Homo sapiens
  misc_RNA (1)...(19): siRNA sense strand
auucgguacuuugagauua

SEQ ID NO: 889942 - RNA, 19 nt, Homo sapiens
  misc_RNA (1)...(19): siRNA sense strand
caagggcgacagcagcauu

SEQ ID NO: 889943 - RNA, 19 nt, Homo sapiens
  misc_RNA (1)...(19): siRNA sense strand
caagcuacacgaaagaaag

SEQ ID NO: 889944 - RNA, 19 nt, Homo sapiens
  misc_RNA (1)...(19): siRNA sense strand
cagcaucgucuaccugugu

SEQ ID NO: 889945 - RNA, 19 nt, Homo sapiens
  misc_RNA (1)...(19): siRNA sense strand
ccgaacccgugcucauuuc

SEQ ID NO: 889946 - RNA, 19 nt, Homo sapiens
  misc_RNA (1)...(19): siRNA sense strand
gaagcggacgaauggcuau

SEQ ID NO: 889947 - RNA, 19 nt, Homo sapiens
  misc_RNA (1)...(19): siRNA sense strand
gaaagugugaaccuaucau

SEQ ID NO: 889948 - RNA, 19 nt, Homo sapiens
  misc_RNA (1)...(19): siRNA sense strand
agacgcugcuggaagagau

SEQ ID NO: 889949 - RNA, 19 nt, Homo sapiens
  misc_RNA (1)...(19): siRNA sense strand
gcaucacggcucuggagaa

SEQ ID NO: 889950 - RNA, 19 nt, Homo sapiens
  misc_RNA (1)...(19): siRNA sense strand
ugcaggagauggacacaag

SEQ ID NO: 889951 - RNA, 19 nt, Homo sapiens
  misc_RNA (1)...(19): siRNA sense strand
caucacggcucuggagaac

SEQ ID NO: 889952 - RNA, 19 nt, Homo sapiens
  misc_RNA (1)...(19): siRNA sense strand
gcugagggacggcuaugug

SEQ ID NO: 889953 - RNA, 19 nt, Homo sapiens
  misc_RNA (1)...(19): siRNA sense strand
gacuggaugucagcaagug

SEQ ID NO: 889954 - RNA, 19 nt, Homo sapiens
  misc_RNA (1)...(19): siRNA sense strand
cuacaagcuacacgaaaga

SEQ ID NO: 889955 - RNA, 19 nt, Homo sapiens
  misc_RNA (1)...(19): siRNA sense strand
ucuggucacuagagguuug

SEQ ID NO: 889956 - RNA, 19 nt, Homo sapiens
  misc_RNA (1)...(19): siRNA sense strand
cgaaagaaagugugaaccu

SEQ ID NO: 889957 - RNA, 19 nt, Homo sapiens
  misc_RNA (1)...(19): siRNA sense strand
ccgcaagucagaccucuuc

SEQ ID NO: 889958 - RNA, 19 nt, Homo sapiens
  misc_RNA (1)...(19): siRNA sense strand
ggacuggaugucagcaagu

SEQ ID NO: 889959 - RNA, 19 nt, Homo sapiens
  misc_RNA (1)...(19): siRNA sense strand
cagcagagaugaacagaau

SEQ ID NO: 889960 - RNA, 19 nt, Homo sapiens
  misc_RNA (1)...(19): siRNA sense strand
gaacuugucgucacucuug

SEQ ID NO: 889961 - RNA, 19 nt, Homo sapiens
  misc_RNA (1)...(19): siRNA sense strand
gcagagaugaacagaauaa

SEQ ID NO: 889962 - RNA, 19 nt, Homo sapiens
  misc_RNA (1)...(19): siRNA sense strand
ccacugggauccuuucuca

SEQ ID NO: 889963 - RNA, 19 nt, Homo sapiens
  misc_RNA (1)...(19): siRNA sense strand
gcagaaggaucccgcaaac

SEQ ID NO: 889964 - RNA, 19 nt, Homo sapiens
  misc_RNA (1)...(19): siRNA sense strand
caagagaggaugcugagaa

SEQ ID NO: 889965 - RNA, 19 nt, Homo sapiens
  misc_RNA (1)...(19): siRNA sense strand
gcuacacacucuccuacaa

SEQ ID NO: 889966 - RNA, 19 nt, Homo sapiens
  misc_RNA (1)...(19): siRNA sense strand
aaacguggauuacgaggau

SEQ ID NO: 889967 - RNA, 19 nt, Homo sapiens
  misc_RNA (1)...(19): siRNA sense strand
gagaggaugcugagaacuu

SEQ ID NO: 889968 - RNA, 19 nt, Homo sapiens
  misc_RNA (1)...(19): siRNA sense strand
uggugaagcucuuggauga

SEQ ID NO: 889969 - RNA, 19 nt, Homo sapiens
  misc_RNA (1)...(19): siRNA sense strand
caaagccaguccuguguca

SEQ ID NO: 889970 - RNA, 19 nt, Homo sapiens
  misc_RNA (1)...(19): siRNA sense strand
cagaauaaccaccaaggaa

SEQ ID NO: 889971 - RNA, 19 nt, Homo sapiens
  misc_RNA (1)...(19): siRNA sense strand
gugaagcucuuggaugaug

SEQ ID NO: 889972 - RNA, 19 nt, Homo sapiens
  misc_RNA (1)...(19): siRNA sense strand
caacaaccgccacccuuug

SEQ ID NO: 889973 - RNA, 19 nt, Homo sapiens
  misc_RNA (1)...(19): siRNA sense strand
ggagagacccgccagaaac

SEQ ID NO: 889974 - RNA, 19 nt, Homo sapiens
  misc_RNA (1)...(19): siRNA sense strand
ccgcaaacguggauuacga

SEQ ID NO: 889975 - RNA, 19 nt, Homo sapiens
  misc_RNA (1)...(19): siRNA sense strand
gagaugaacagaauaacca

SEQ ID NO: 889976 - RNA, 19 nt, Homo sapiens
  misc_RNA (1)...(19): siRNA sense strand
ccaacaaccgccacccuuu

SEQ ID NO: 889977 - RNA, 19 nt, Homo sapiens
  misc_RNA (1)...(19): siRNA sense strand
ugucgucacucuuggaugu

SEQ ID NO: 889978 - RNA, 19 nt, Homo sapiens
  misc_RNA (1)...(19): siRNA sense strand
ugaugggacuuucaugauc

SEQ ID NO: 889979 - RNA, 19 nt, Homo sapiens
  misc_RNA (1)...(19): siRNA sense strand
uggcagagccugagaacga

SEQ ID NO: 889980 - RNA, 19 nt, Homo sapiens
  misc_RNA (1)...(19): siRNA sense strand
agaggaugcugagaacuug

SEQ ID NO: 889981 - RNA, 19 nt, Homo sapiens
  misc_RNA (1)...(19): siRNA sense strand
ugucaccaaucaaaggaaa

SEQ ID NO: 889982 - RNA, 19 nt, Homo sapiens
  misc_RNA (1)...(19): siRNA sense strand
cuacacacucuccuacaaa

SEQ ID NO: 889983 - RNA, 19 nt, Homo sapiens
  misc_RNA (1)...(19): siRNA sense strand
aaagccaccucgccacugu

SEQ ID NO: 889984 - RNA, 19 nt, Homo sapiens
  misc_RNA (1)...(19): siRNA sense strand
ggauuacgaggaucucuuc

SEQ ID NO: 889985 - RNA, 19 nt, Homo sapiens
  misc_RNA (1)...(19): siRNA sense strand
agaacuugcuggagucaca

SEQ ID NO: 889986 - RNA, 19 nt, Homo sapiens
  misc_RNA (1)...(19): siRNA sense strand
ggaaaaggcagccaagauc

SEQ ID NO: 889987 - RNA, 19 nt, Homo sapiens
  misc_RNA (1)...(19): siRNA sense strand
ggcagaaggaucccgcaaa

SEQ ID NO: 889988 - RNA, 19 nt, Homo sapiens
  misc_RNA (1)...(19): siRNA sense strand
gaaaaggcagccaagauca

SEQ ID NO: 889989 - RNA, 19 nt, Homo sapiens
  misc_RNA (1)...(19): siRNA sense strand
ugaacagaauaaccaccaa

SEQ ID NO: 889990 - RNA, 19 nt, Homo sapiens
  misc_RNA (1)...(19): siRNA sense strand
caacgcaguggccgaggaa

SEQ ID NO: 889991 - RNA, 19 nt, Homo sapiens
  misc_RNA (1)...(19): siRNA sense strand
gaagccgucagcagagaug

SEQ ID NO: 889992 - RNA, 19 nt, Homo sapiens
  misc_RNA (1)...(19): siRNA sense strand
guuccauggugcaaucuca

SEQ ID NO: 889993 - RNA, 19 nt, Homo sapiens
  misc_RNA (1)...(19): siRNA sense strand
gagagacccgccagaaacu

SEQ ID NO: 889994 - RNA, 19 nt, Homo sapiens
  misc_RNA (1)...(19): siRNA sense strand
ccucgccacugugaacuug

SEQ ID NO: 889995 - RNA, 19 nt, Homo sapiens
  misc_RNA (1)...(19): siRNA sense strand
aagagaggaugcugagaac

SEQ ID NO: 889996 - RNA, 19 nt, Homo sapiens
  misc_RNA (1)...(19): siRNA sense strand
ccaguccugugucaccaau

SEQ ID NO: 889997 - RNA, 19 nt, Homo sapiens
  misc_RNA (1)...(19): siRNA sense strand
agaaggaucccgcaaacgu

SEQ ID NO: 889998 - RNA, 19 nt, Homo sapiens
  misc_RNA (1)...(19): siRNA sense strand
gugguuccauggugcaauc

SEQ ID NO: 889999 - RNA, 19 nt, Homo sapiens
  misc_RNA (1)...(19): siRNA sense strand
gaaagguccccaccaggaa

SEQ ID NO: 890000 - RNA, 19 nt, Homo sapiens
  misc_RNA (1)...(19): siRNA sense strand
uggagagacccgccagaaa

SEQ ID NO: 890001 - RNA, 19 nt, Homo sapiens
  misc_RNA (1)...(19): siRNA sense strand
uacacacucuccuacaaag

SEQ ID NO: 890002 - RNA, 19 nt, Homo sapiens
  misc_RNA (1)...(19): siRNA sense strand
aguccugugucaccaauca

SEQ ID NO: 890003 - RNA, 19 nt, Homo sapiens
  misc_RNA (1)...(19): siRNA sense strand
gaaauuaccucucagacuu

SEQ ID NO: 890004 - RNA, 19 nt, Homo sapiens
  misc_RNA (1)...(19): siRNA sense strand
ucacagaggucacaucuuc

SEQ ID NO: 890005 - RNA, 19 nt, Homo sapiens
  misc_RNA (1)...(19): siRNA sense strand
gaaccucucuucacucaca

SEQ ID NO: 890006 - RNA, 19 nt, Homo sapiens
  misc_RNA (1)...(19): siRNA sense strand
gagauggugugcugaaguu

SEQ ID NO: 890007 - RNA, 19 nt, Homo sapiens
  misc_RNA (1)...(19): siRNA sense strand
caucugaaauuaccucuca

SEQ ID NO: 890008 - RNA, 19 nt, Homo sapiens
  misc_RNA (1)...(19): siRNA sense strand
gauggacccugcuccuuug

SEQ ID NO: 890009 - RNA, 19 nt, Homo sapiens
  misc_RNA (1)...(19): siRNA sense strand
ugaauggauugaugacaaa

SEQ ID NO: 890010 - RNA, 19 nt, Homo sapiens
  misc_RNA (1)...(19): siRNA sense strand
ggauggacccugcuccuuu

SEQ ID NO: 890011 - RNA, 19 nt, Homo sapiens
  misc_RNA (1)...(19): siRNA sense strand
gaucuggagucccggaaga

SEQ ID NO: 890012 - RNA, 19 nt, Homo sapiens
  misc_RNA (1)...(19): siRNA sense strand
guacaguccaggucuauga

SEQ ID NO: 890013 - RNA, 19 nt, Homo sapiens
  misc_RNA (1)...(19): siRNA sense strand
gaacacggagccaaguaga

SEQ ID NO: 890014 - RNA, 19 nt, Homo sapiens
  misc_RNA (1)...(19): siRNA sense strand
uagaaccucucuucacuca

SEQ ID NO: 890015 - RNA, 19 nt, Homo sapiens
  misc_RNA (1)...(19): siRNA sense strand
gggcgucuuugucuucuug

SEQ ID NO: 890016 - RNA, 19 nt, Homo sapiens
  misc_RNA (1)...(19): siRNA sense strand
guaccaggauuucuaugca

SEQ ID NO: 890017 - RNA, 19 nt, Homo sapiens
  misc_RNA (1)...(19): siRNA sense strand
gaggucacaucuuccuaga

SEQ ID NO: 890018 - RNA, 19 nt, Homo sapiens
  misc_RNA (1)...(19): siRNA sense strand
ccaaguagaaccucucuuc

SEQ ID NO: 890019 - RNA, 19 nt, Homo sapiens
  misc_RNA (1)...(19): siRNA sense strand
gcagacaccuuugccuucu

SEQ ID NO: 890020 - RNA, 19 nt, Homo sapiens
  misc_RNA (1)...(19): siRNA sense strand
caacaaaugaugccucucu

SEQ ID NO: 890021 - RNA, 19 nt, Homo sapiens
  misc_RNA (1)...(19): siRNA sense strand
gaccaaggacuuuguuauc

SEQ ID NO: 890022 - RNA, 19 nt, Homo sapiens
  misc_RNA (1)...(19): siRNA sense strand
ccacucgaguccuugaaug

SEQ ID NO: 890023 - RNA, 19 nt, Homo sapiens
  misc_RNA (1)...(19): siRNA sense strand
gggacuggguggaccuuug

SEQ ID NO: 890024 - RNA, 19 nt, Homo sapiens
  misc_RNA (1)...(19): siRNA sense strand
gggcuuauucccagaaaga

SEQ ID NO: 890025 - RNA, 19 nt, Homo sapiens
  misc_RNA (1)...(19): siRNA sense strand
ggucuaucuuugaucuaaa

SEQ ID NO: 890026 - RNA, 19 nt, Homo sapiens
  misc_RNA (1)...(19): siRNA sense strand
ccacguacaccucagaugu

SEQ ID NO: 890027 - RNA, 19 nt, Homo sapiens
  misc_RNA (1)...(19): siRNA sense strand
uugaauggauugaugacaa

SEQ ID NO: 890028 - RNA, 19 nt, Homo sapiens
  misc_RNA (1)...(19): siRNA sense strand
ccauugcugugcaugagaa

SEQ ID NO: 890029 - RNA, 19 nt, Homo sapiens
  misc_RNA (1)...(19): siRNA sense strand
gcuuggccaucucagguuu

SEQ ID NO: 890030 - RNA, 19 nt, Homo sapiens
  misc_RNA (1)...(19): siRNA sense strand
uggcaucccugcagaccaa

SEQ ID NO: 890031 - RNA, 19 nt, Homo sapiens
  misc_RNA (1)...(19): siRNA sense strand
ccagagcugcugcgaguga

SEQ ID NO: 890032 - RNA, 19 nt, Homo sapiens
  misc_RNA (1)...(19): siRNA sense strand
ccaaggacuuuguuaucag

SEQ ID NO: 890033 - RNA, 19 nt, Homo sapiens
  misc_RNA (1)...(19): siRNA sense strand
ggaacacggagccaagaug

SEQ ID NO: 890034 - RNA, 19 nt, Homo sapiens
  misc_RNA (1)...(19): siRNA sense strand
guccuugaauggauugaug

SEQ ID NO: 890035 - RNA, 19 nt, Homo sapiens
  misc_RNA (1)...(19): siRNA sense strand
gaucucugccauccuguga

SEQ ID NO: 890036 - RNA, 19 nt, Homo sapiens
  misc_RNA (1)...(19): siRNA sense strand
acagugaugucauuaaagc

SEQ ID NO: 890037 - RNA, 19 nt, Homo sapiens
  misc_RNA (1)...(19): siRNA sense strand
ggacuggguggaccuuugu

SEQ ID NO: 890038 - RNA, 19 nt, Homo sapiens
  misc_RNA (1)...(19): siRNA sense strand
gcuuguaccaggauuucua

SEQ ID NO: 890039 - RNA, 19 nt, Homo sapiens
  misc_RNA (1)...(19): siRNA sense strand
ggaacacggagccaaguag

SEQ ID NO: 890040 - RNA, 19 nt, Homo sapiens
  misc_RNA (1)...(19): siRNA sense strand
gcagaccaaggacuuuguu

SEQ ID NO: 890041 - RNA, 19 nt, Homo sapiens
  misc_RNA (1)...(19): siRNA sense strand
caaguagaaccucucuuca

SEQ ID NO: 890042 - RNA, 19 nt, Homo sapiens
  misc_RNA (1)...(19): siRNA sense strand
ggaaaacaagggcuuauuc

SEQ ID NO: 890043 - RNA, 19 nt, Homo sapiens
  misc_RNA (1)...(19): siRNA sense strand
accaaggacuuuguuauca

SEQ ID NO: 890044 - RNA, 19 nt, Homo sapiens
  misc_RNA (1)...(19): siRNA sense strand
ucaguccagugcccaguau

SEQ ID NO: 890045 - RNA, 19 nt, Homo sapiens
  misc_RNA (1)...(19): siRNA sense strand
gaugggcgucuuugucuuc

SEQ ID NO: 890046 - RNA, 19 nt, Homo sapiens
  misc_RNA (1)...(19): siRNA sense strand
aaagagauggugugcugaa

SEQ ID NO: 890047 - RNA, 19 nt, Homo sapiens
  misc_RNA (1)...(19): siRNA sense strand
guacaccucagaugucagu

SEQ ID NO: 890048 - RNA, 19 nt, Homo sapiens
  misc_RNA (1)...(19): siRNA sense strand
gggcaccguuggagaaucg

SEQ ID NO: 890049 - RNA, 19 nt, Homo sapiens
  misc_RNA (1)...(19): siRNA sense strand
aguagaaccucucuucacu

SEQ ID NO: 890050 - RNA, 19 nt, Homo sapiens
  misc_RNA (1)...(19): siRNA sense strand
acaggucuaucuuugaucu

SEQ ID NO: 890051 - RNA, 19 nt, Homo sapiens
  misc_RNA (1)...(19): siRNA sense strand
acacggagccaagauggaa

SEQ ID NO: 890052 - RNA, 19 nt, Homo sapiens
  misc_RNA (1)...(19): siRNA sense strand
guggaauccuugcgcuugu

SEQ ID NO: 890053 - RNA, 19 nt, Homo sapiens
  misc_RNA (1)...(19): siRNA sense strand
aaauuaccucucagacuuu

SEQ ID NO: 890054 - RNA, 19 nt, Homo sapiens
  misc_RNA (1)...(19): siRNA sense strand
aggucuaucuuugaucuaa

SEQ ID NO: 890055 - RNA, 19 nt, Homo sapiens
  misc_RNA (1)...(19): siRNA sense strand
uggaauccuugcgcuugua

SEQ ID NO: 890056 - RNA, 19 nt, Homo sapiens
  misc_RNA (1)...(19): siRNA sense strand
agaccaaggacuuuguuau

SEQ ID NO: 890057 - RNA, 19 nt, Homo sapiens
  misc_RNA (1)...(19): siRNA sense strand
cagaccaaggacuuuguua

SEQ ID NO: 890058 - RNA, 19 nt, Homo sapiens
  misc_RNA (1)...(19): siRNA sense strand
aagaauugcuuggccaucu

SEQ ID NO: 890059 - RNA, 19 nt, Homo sapiens
  misc_RNA (1)...(19): siRNA sense strand
ccuagaugcagacaccuuu

SEQ ID NO: 890060 - RNA, 19 nt, Homo sapiens
  misc_RNA (1)...(19): siRNA sense strand
ucgaguccuugaauggauu

SEQ ID NO: 890061 - RNA, 19 nt, Homo sapiens
  misc_RNA (1)...(19): siRNA sense strand
gcucagaugggcgucuuug

SEQ ID NO: 890062 - RNA, 19 nt, Homo sapiens
  misc_RNA (1)...(19): siRNA sense strand
ugaaauuaccucucagacu

SEQ ID NO: 890063 - RNA, 19 nt, Homo sapiens
  misc_RNA (1)...(19): siRNA sense strand
gaauugcuuggccaucuca

SEQ ID NO: 890064 - RNA, 19 nt, Homo sapiens
  misc_RNA (1)...(19): siRNA sense strand
ccccaggccugaagaauug

SEQ ID NO: 890065 - RNA, 19 nt, Homo sapiens
  misc_RNA (1)...(19): siRNA sense strand
cagaugggcgucuuugucu

SEQ ID NO: 890066 - RNA, 19 nt, Homo sapiens
  misc_RNA (1)...(19): siRNA sense strand
accaggauuucuaugcauu

SEQ ID NO: 890067 - RNA, 19 nt, Homo sapiens
  misc_RNA (1)...(19): siRNA sense strand
acgacuggcugguggaauc

SEQ ID NO: 890068 - RNA, 19 nt, Homo sapiens
  misc_RNA (1)...(19): siRNA sense strand
ucagaugggcgucuuuguc

SEQ ID NO: 890069 - RNA, 19 nt, Homo sapiens
  misc_RNA (1)...(19): siRNA sense strand
ggacgacuggcugguggaa

SEQ ID NO: 890070 - RNA, 19 nt, Homo sapiens
  misc_RNA (1)...(19): siRNA sense strand
gacagugaggagcugagua

SEQ ID NO: 890071 - RNA, 19 nt, Homo sapiens
  misc_RNA (1)...(19): siRNA sense strand
caagggcuuauucccagaa

SEQ ID NO: 890072 - RNA, 19 nt, Homo sapiens
  misc_RNA (1)...(19): siRNA sense strand
cuuuguugcuggcuaugaa

SEQ ID NO: 890073 - RNA, 19 nt, Homo sapiens
  misc_RNA (1)...(19): siRNA sense strand
acagugaggagcugaguag

SEQ ID NO: 890074 - RNA, 19 nt, Homo sapiens
  misc_RNA (1)...(19): siRNA sense strand
gagccacucgaguccuuga

SEQ ID NO: 890075 - RNA, 19 nt, Homo sapiens
  misc_RNA (1)...(19): siRNA sense strand
gaaauuggcuguguuaagu

SEQ ID NO: 890076 - RNA, 19 nt, Homo sapiens
  misc_RNA (1)...(19): siRNA sense strand
acacuucacucucaccuua

SEQ ID NO: 890077 - RNA, 19 nt, Homo sapiens
  misc_RNA (1)...(19): siRNA sense strand
gcaaaggcaucagaaauca

SEQ ID NO: 890078 - RNA, 19 nt, Homo sapiens
  misc_RNA (1)...(19): siRNA sense strand
ggagaaauacgcagaaaug

SEQ ID NO: 890079 - RNA, 19 nt, Homo sapiens
  misc_RNA (1)...(19): siRNA sense strand
gauauucucuucugugcuu

SEQ ID NO: 890080 - RNA, 19 nt, Homo sapiens
  misc_RNA (1)...(19): siRNA sense strand
ggaauuacccgcuuacuag

SEQ ID NO: 890081 - RNA, 19 nt, Homo sapiens
  misc_RNA (1)...(19): siRNA sense strand
agaaauggcucgagaaugg

SEQ ID NO: 890082 - RNA, 19 nt, Homo sapiens
  misc_RNA (1)...(19): siRNA sense strand
ccagcaauauccacaaauu

SEQ ID NO: 890083 - RNA, 19 nt, Homo sapiens
  misc_RNA (1)...(19): siRNA sense strand
ccacgaggauuucgauuuc

SEQ ID NO: 890084 - RNA, 19 nt, Homo sapiens
  misc_RNA (1)...(19): siRNA sense strand
uaugucagcuuugucuuua

SEQ ID NO: 890085 - RNA, 19 nt, Homo sapiens
  misc_RNA (1)...(19): siRNA sense strand
guucaggauucucucauuu

SEQ ID NO: 890086 - RNA, 19 nt, Homo sapiens
  misc_RNA (1)...(19): siRNA sense strand
guaauucucuggccacucu

SEQ ID NO: 890087 - RNA, 19 nt, Homo sapiens
  misc_RNA (1)...(19): siRNA sense strand
cuagagagcauuuccaauu

SEQ ID NO: 890088 - RNA, 19 nt, Homo sapiens
  misc_RNA (1)...(19): siRNA sense strand
uggcagauuuccacaguuu

SEQ ID NO: 890089 - RNA, 19 nt, Homo sapiens
  misc_RNA (1)...(19): siRNA sense strand
ggauacaaaucuuucucuu

SEQ ID NO: 890090 - RNA, 19 nt, Homo sapiens
  misc_RNA (1)...(19): siRNA sense strand
ccaagcaacuguguuacaa

SEQ ID NO: 890091 - RNA, 19 nt, Homo sapiens
  misc_RNA (1)...(19): siRNA sense strand
ucacaagauuccuauuuca

SEQ ID NO: 890092 - RNA, 19 nt, Homo sapiens
  misc_RNA (1)...(19): siRNA sense strand
ggauuucgauuucauuguc

SEQ ID NO: 890093 - RNA, 19 nt, Homo sapiens
  misc_RNA (1)...(19): siRNA sense strand
caucagaaaucaggcaaga

SEQ ID NO: 890094 - RNA, 19 nt, Homo sapiens
  misc_RNA (1)...(19): siRNA sense strand
gaugauagaaccagaguca

SEQ ID NO: 890095 - RNA, 19 nt, Homo sapiens
  misc_RNA (1)...(19): siRNA sense strand
cgagcuaccuccucauugu

SEQ ID NO: 890096 - RNA, 19 nt, Homo sapiens
  misc_RNA (1)...(19): siRNA sense strand
ggaacuggccaccuaucua

SEQ ID NO: 890097 - RNA, 19 nt, Homo sapiens
  misc_RNA (1)...(19): siRNA sense strand
ccagauaugucagcuuugu

SEQ ID NO: 890098 - RNA, 19 nt, Homo sapiens
  misc_RNA (1)...(19): siRNA sense strand
uagagagcauuuccaauuc

SEQ ID NO: 890099 - RNA, 19 nt, Homo sapiens
  misc_RNA (1)...(19): siRNA sense strand
gcagaaauggcucgagaau

SEQ ID NO: 890100 - RNA, 19 nt, Homo sapiens
  misc_RNA (1)...(19): siRNA sense strand
gagagcauuuccaauucuu

SEQ ID NO: 890101 - RNA, 19 nt, Homo sapiens
  misc_RNA (1)...(19): siRNA sense strand
caacucuucuaaugaggaa

SEQ ID NO: 890102 - RNA, 19 nt, Homo sapiens
  misc_RNA (1)...(19): siRNA sense strand
gcucacagaggcucaugua

SEQ ID NO: 890103 - RNA, 19 nt, Homo sapiens
  misc_RNA (1)...(19): siRNA sense strand
guaccaaagcagaauguuu

SEQ ID NO: 890104 - RNA, 19 nt, Homo sapiens
  misc_RNA (1)...(19): siRNA sense strand
gaacuggccaccuaucuac

SEQ ID NO: 890105 - RNA, 19 nt, Homo sapiens
  misc_RNA (1)...(19): siRNA sense strand
caggcaagaucuacaacuu

SEQ ID NO: 890106 - RNA, 19 nt, Homo sapiens
  misc_RNA (1)...(19): siRNA sense strand
cugcaagucugaugauaga

SEQ ID NO: 890107 - RNA, 19 nt, Homo sapiens
  misc_RNA (1)...(19): siRNA sense strand
ccggaaugcuuacuauuuc

SEQ ID NO: 890108 - RNA, 19 nt, Homo sapiens
  misc_RNA (1)...(19): siRNA sense strand
gccggaaugcuuacuauuu

SEQ ID NO: 890109 - RNA, 19 nt, Homo sapiens
  misc_RNA (1)...(19): siRNA sense strand
ccaccuaucuacugcaagu

SEQ ID NO: 890110 - RNA, 19 nt, Homo sapiens
  misc_RNA (1)...(19): siRNA sense strand
ucuaagacuuggauucgaa

SEQ ID NO: 890111 - RNA, 19 nt, Homo sapiens
  misc_RNA (1)...(19): siRNA sense strand
gucacaagauuccuauuuc

SEQ ID NO: 890112 - RNA, 19 nt, Homo sapiens
  misc_RNA (1)...(19): siRNA sense strand
ccacaaauucuccaacugu

SEQ ID NO: 890113 - RNA, 19 nt, Homo sapiens
  misc_RNA (1)...(19): siRNA sense strand
ggcaagaucuacaacuucu

SEQ ID NO: 890114 - RNA, 19 nt, Homo sapiens
  misc_RNA (1)...(19): siRNA sense strand
cuccagauaugucagcuuu

SEQ ID NO: 890115 - RNA, 19 nt, Homo sapiens
  misc_RNA (1)...(19): siRNA sense strand
aagaggaauuacccgcuua

SEQ ID NO: 890116 - RNA, 19 nt, Homo sapiens
  misc_RNA (1)...(19): siRNA sense strand
ugucagcuuugucuuuaaa

SEQ ID NO: 890117 - RNA, 19 nt, Homo sapiens
  misc_RNA (1)...(19): siRNA sense strand
gauuaugaggccagcaaua

SEQ ID NO: 890118 - RNA, 19 nt, Homo sapiens
  misc_RNA (1)...(19): siRNA sense strand
acaaaucuuucucuuccuu

SEQ ID NO: 890119 - RNA, 19 nt, Homo sapiens
  misc_RNA (1)...(19): siRNA sense strand
ucaggauucucucauuuca

SEQ ID NO: 890120 - RNA, 19 nt, Homo sapiens
  misc_RNA (1)...(19): siRNA sense strand
cuuccucccuugugaaauu

SEQ ID NO: 890121 - RNA, 19 nt, Homo sapiens
  misc_RNA (1)...(19): siRNA sense strand
gcaaguggcaugaagaaaa

SEQ ID NO: 890122 - RNA, 19 nt, Homo sapiens
  misc_RNA (1)...(19): siRNA sense strand
gaagguauuauggcagauu

SEQ ID NO: 890123 - RNA, 19 nt, Homo sapiens
  misc_RNA (1)...(19): siRNA sense strand
gauacaaaucuuucucuuc

SEQ ID NO: 890124 - RNA, 19 nt, Homo sapiens
  misc_RNA (1)...(19): siRNA sense strand
gaauuacccgcuuacuaga

SEQ ID NO: 890125 - RNA, 19 nt, Homo sapiens
  misc_RNA (1)...(19): siRNA sense strand
ggcaaaggcaucagaaauc

SEQ ID NO: 890126 - RNA, 19 nt, Homo sapiens
  misc_RNA (1)...(19): siRNA sense strand
caaaaugguuguauuggau

SEQ ID NO: 890127 - RNA, 19 nt, Homo sapiens
  misc_RNA (1)...(19): siRNA sense strand
caaaucuuucucuuccuua

SEQ ID NO: 890128 - RNA, 19 nt, Homo sapiens
  misc_RNA (1)...(19): siRNA sense strand
ggaacaaagaucaaacaca

SEQ ID NO: 890129 - RNA, 19 nt, Homo sapiens
  misc_RNA (1)...(19): siRNA sense strand
gcagauuuccacaguuuua

SEQ ID NO: 890130 - RNA, 19 nt, Homo sapiens
  misc_RNA (1)...(19): siRNA sense strand
gaucaaacacacccauugg

SEQ ID NO: 890131 - RNA, 19 nt, Homo sapiens
  misc_RNA (1)...(19): siRNA sense strand
ggauuauucuagcaacaca

SEQ ID NO: 890132 - RNA, 19 nt, Homo sapiens
  misc_RNA (1)...(19): siRNA sense strand
ucaaggagcccucuaagac

SEQ ID NO: 890133 - RNA, 19 nt, Homo sapiens
  misc_RNA (1)...(19): siRNA sense strand
caagaucuacaacuucuca

SEQ ID NO: 890134 - RNA, 19 nt, Homo sapiens
  misc_RNA (1)...(19): siRNA sense strand
cagccggaaugcuuacuau

SEQ ID NO: 890135 - RNA, 19 nt, Homo sapiens
  misc_RNA (1)...(19): siRNA sense strand
uaccaaagcagaauguuuc

SEQ ID NO: 890136 - RNA, 19 nt, Homo sapiens
  misc_RNA (1)...(19): siRNA sense strand
cacagaggcucauguacca

SEQ ID NO: 890137 - RNA, 19 nt, Homo sapiens
  misc_RNA (1)...(19): siRNA sense strand
gaaaucaggcaagaucuac

SEQ ID NO: 890138 - RNA, 19 nt, Homo sapiens
  misc_RNA (1)...(19): siRNA sense strand
ucagaaaucaggcaagauc

SEQ ID NO: 890139 - RNA, 19 nt, Homo sapiens
  misc_RNA (1)...(19): siRNA sense strand
caggcaugcuuguaccaaa

SEQ ID NO: 890140 - RNA, 19 nt, Homo sapiens
  misc_RNA (1)...(19): siRNA sense strand
gaggaacaaagaucaaaca

SEQ ID NO: 890141 - RNA, 19 nt, Homo sapiens
  misc_RNA (1)...(19): siRNA sense strand
aaggagcccucuaagacuu

SEQ ID NO: 890142 - RNA, 19 nt, Homo sapiens
  misc_RNA (1)...(19): siRNA sense strand
gaggauuucgauuucauug

SEQ ID NO: 890143 - RNA, 19 nt, Homo sapiens
  misc_RNA (1)...(19): siRNA sense strand
gcuaaggguugggaguuca

SEQ ID NO: 890144 - RNA, 19 nt, Homo sapiens
  misc_RNA (1)...(19): siRNA sense strand
caacugguguuugaagcau

SEQ ID NO: 890145 - RNA, 19 nt, Homo sapiens
  misc_RNA (1)...(19): siRNA sense strand
ugugaaauuggcuguguua

SEQ ID NO: 890146 - RNA, 19 nt, Homo sapiens
  misc_RNA (1)...(19): siRNA sense strand
ggaaugcuuacuauuucuu

SEQ ID NO: 890147 - RNA, 19 nt, Homo sapiens
  misc_RNA (1)...(19): siRNA sense strand
aagguauuauggcagauuu

SEQ ID NO: 890148 - RNA, 19 nt, Homo sapiens
  misc_RNA (1)...(19): siRNA sense strand
caaguggcaugaagaaaau

SEQ ID NO: 890149 - RNA, 19 nt, Homo sapiens
  misc_RNA (1)...(19): siRNA sense strand
uauggcagauuuccacagu

SEQ ID NO: 890150 - RNA, 19 nt, Homo sapiens
  misc_RNA (1)...(19): siRNA sense strand
gauguggccaugugggauu

SEQ ID NO: 890151 - RNA, 19 nt, Homo sapiens
  misc_RNA (1)...(19): siRNA sense strand
agaaaucaggcaagaucua

SEQ ID NO: 890152 - RNA, 19 nt, Homo sapiens
  misc_RNA (1)...(19): siRNA sense strand
caagcaacuguguuacaaa

SEQ ID NO: 890153 - RNA, 19 nt, Homo sapiens
  misc_RNA (1)...(19): siRNA sense strand
agucacaagauuccuauuu

SEQ ID NO: 890154 - RNA, 19 nt, Homo sapiens
  misc_RNA (1)...(19): siRNA sense strand
gauuucgauuucauuguca

SEQ ID NO: 890155 - RNA, 19 nt, Homo sapiens
  misc_RNA (1)...(19): siRNA sense strand
aaggagaaauacgcagaaa

SEQ ID NO: 890156 - RNA, 19 nt, Homo sapiens
  misc_RNA (1)...(19): siRNA sense strand
gguugggaguucaggauuc

SEQ ID NO: 890157 - RNA, 19 nt, Homo sapiens
  misc_RNA (1)...(19): siRNA sense strand
ggccaccuaucuacugcaa

SEQ ID NO: 890158 - RNA, 19 nt, Homo sapiens
  misc_RNA (1)...(19): siRNA sense strand
cuucugugcuuuagcuguu

SEQ ID NO: 890159 - RNA, 19 nt, Homo sapiens
  misc_RNA (1)...(19): siRNA sense strand
uccaauucuuccagcaaua

SEQ ID NO: 890160 - RNA, 19 nt, Homo sapiens
  misc_RNA (1)...(19): siRNA sense strand
uuucaacucuucuaaugag

SEQ ID NO: 890161 - RNA, 19 nt, Homo sapiens
  misc_RNA (1)...(19): siRNA sense strand
gaaauggcucgagaaugga

SEQ ID NO: 890162 - RNA, 19 nt, Homo sapiens
  misc_RNA (1)...(19): siRNA sense strand
ugaaauuggcuguguuaag

SEQ ID NO: 890163 - RNA, 19 nt, Homo sapiens
  misc_RNA (1)...(19): siRNA sense strand
ggccagcaauagugugaca

SEQ ID NO: 890164 - RNA, 19 nt, Homo sapiens
  misc_RNA (1)...(19): siRNA sense strand
gaggccagcaauaguguga

SEQ ID NO: 890165 - RNA, 19 nt, Homo sapiens
  misc_RNA (1)...(19): siRNA sense strand
gugcaaguggcaugaagaa

SEQ ID NO: 890166 - RNA, 19 nt, Homo sapiens
  misc_RNA (1)...(19): siRNA sense strand
uuaaguauucucuccaaga

SEQ ID NO: 890167 - RNA, 19 nt, Homo sapiens
  misc_RNA (1)...(19): siRNA sense strand
gaaugcuuacuauuucuuc

SEQ ID NO: 890168 - RNA, 19 nt, Homo sapiens
  misc_RNA (1)...(19): siRNA sense strand
ccaauucuuccagcaauau

SEQ ID NO: 890169 - RNA, 19 nt, Homo sapiens
  misc_RNA (1)...(19): siRNA sense strand
gcaagucugaugauagaac

SEQ ID NO: 890170 - RNA, 19 nt, Homo sapiens
  misc_RNA (1)...(19): siRNA sense strand
gggcauaaccaagcaacug

SEQ ID NO: 890171 - RNA, 19 nt, Homo sapiens
  misc_RNA (1)...(19): siRNA sense strand
gaggaggccaggcaugcuu

SEQ ID NO: 890172 - RNA, 19 nt, Homo sapiens
  misc_RNA (1)...(19): siRNA sense strand
uaaugaggaacaaagauca

SEQ ID NO: 890173 - RNA, 19 nt, Homo sapiens
  misc_RNA (1)...(19): siRNA sense strand
ucucucauuucaacucuuc

SEQ ID NO: 890174 - RNA, 19 nt, Homo sapiens
  misc_RNA (1)...(19): siRNA sense strand
gggcguuaccagaagcuaa

SEQ ID NO: 890175 - RNA, 19 nt, Homo sapiens
  misc_RNA (1)...(19): siRNA sense strand
ugaagaaggacucuacuua

SEQ ID NO: 890176 - RNA, 19 nt, Homo sapiens
  misc_RNA (1)...(19): siRNA sense strand
ucaauuaauuccaccagua

SEQ ID NO: 890177 - RNA, 19 nt, Homo sapiens
  misc_RNA (1)...(19): siRNA sense strand
gaaacaacuuuaugaacuc

SEQ ID NO: 890178 - RNA, 19 nt, Homo sapiens
  misc_RNA (1)...(19): siRNA sense strand
gagcaguggcuauucauuu

SEQ ID NO: 890179 - RNA, 19 nt, Homo sapiens
  misc_RNA (1)...(19): siRNA sense strand
ucaaagaagucguaaagag

SEQ ID NO: 890180 - RNA, 19 nt, Homo sapiens
  misc_RNA (1)...(19): siRNA sense strand
cauaggauuucagccauua

SEQ ID NO: 890181 - RNA, 19 nt, Homo sapiens
  misc_RNA (1)...(19): siRNA sense strand
gaagaaggacucuacuuag

SEQ ID NO: 890182 - RNA, 19 nt, Homo sapiens
  misc_RNA (1)...(19): siRNA sense strand
cuacuuagauucugaagcu

SEQ ID NO: 890183 - RNA, 19 nt, Homo sapiens
  misc_RNA (1)...(19): siRNA sense strand
caauuaauuccaccaguaa

SEQ ID NO: 890184 - RNA, 19 nt, Homo sapiens
  misc_RNA (1)...(19): siRNA sense strand
gacuagaccugaccuugau

SEQ ID NO: 890185 - RNA, 19 nt, Homo sapiens
  misc_RNA (1)...(19): siRNA sense strand
aaagagccauucuccugaa

SEQ ID NO: 890186 - RNA, 19 nt, Homo sapiens
  misc_RNA (1)...(19): siRNA sense strand
agaagcaagugaagaagga

SEQ ID NO: 890187 - RNA, 19 nt, Homo sapiens
  misc_RNA (1)...(19): siRNA sense strand
caucaaagaagucguaaag

SEQ ID NO: 890188 - RNA, 19 nt, Homo sapiens
  misc_RNA (1)...(19): siRNA sense strand
acauauggccagcacuuua

SEQ ID NO: 890189 - RNA, 19 nt, Homo sapiens
  misc_RNA (1)...(19): siRNA sense strand
cugaagcuguguuagacua

SEQ ID NO: 890190 - RNA, 19 nt, Homo sapiens
  misc_RNA (1)...(19): siRNA sense strand
ugacuagaccugaccuuga

SEQ ID NO: 890191 - RNA, 19 nt, Homo sapiens
  misc_RNA (1)...(19): siRNA sense strand
uguagaaugccuucacuuu

SEQ ID NO: 890192 - RNA, 19 nt, Homo sapiens
  misc_RNA (1)...(19): siRNA sense strand
uuucaucucuggacucuca

SEQ ID NO: 890193 - RNA, 19 nt, Homo sapiens
  misc_RNA (1)...(19): siRNA sense strand
uggacucucagaucaauua

SEQ ID NO: 890194 - RNA, 19 nt, Homo sapiens
  misc_RNA (1)...(19): siRNA sense strand
uagacuacgugaugacuag

SEQ ID NO: 890195 - RNA, 19 nt, Homo sapiens
  misc_RNA (1)...(19): siRNA sense strand
guucaucaaagaagucgua

SEQ ID NO: 890196 - RNA, 19 nt, Homo sapiens
  misc_RNA (1)...(19): siRNA sense strand
guggagcaguggcuauuca

SEQ ID NO: 890197 - RNA, 19 nt, Homo sapiens
  misc_RNA (1)...(19): siRNA sense strand
ugaaggagaagcaagugaa

SEQ ID NO: 890198 - RNA, 19 nt, Homo sapiens
  misc_RNA (1)...(19): siRNA sense strand
ccacauauggccagcacuu

SEQ ID NO: 890199 - RNA, 19 nt, Homo sapiens
  misc_RNA (1)...(19): siRNA sense strand
ugcguuaccuuccuuuaug

SEQ ID NO: 890200 - RNA, 19 nt, Homo sapiens
  misc_RNA (1)...(19): siRNA sense strand
caccaguaaugaugaaaca

SEQ ID NO: 890201 - RNA, 19 nt, Homo sapiens
  misc_RNA (1)...(19): siRNA sense strand
gaccugaccuugauaaaac

SEQ ID NO: 890202 - RNA, 19 nt, Homo sapiens
  misc_RNA (1)...(19): siRNA sense strand
gaaggagaagcaagugaag

SEQ ID NO: 890203 - RNA, 19 nt, Homo sapiens
  misc_RNA (1)...(19): siRNA sense strand
cauauggccagcacuuuau

SEQ ID NO: 890204 - RNA, 19 nt, Homo sapiens
  misc_RNA (1)...(19): siRNA sense strand
agcaguggcuauucauuug

SEQ ID NO: 890205 - RNA, 19 nt, Homo sapiens
  misc_RNA (1)...(19): siRNA sense strand
ggccagcacuuuauuuuca

SEQ ID NO: 890206 - RNA, 19 nt, Homo sapiens
  misc_RNA (1)...(19): siRNA sense strand
uagaaugccuucacuuuuc

SEQ ID NO: 890207 - RNA, 19 nt, Homo sapiens
  misc_RNA (1)...(19): siRNA sense strand
ggagcaguggcuauucauu

SEQ ID NO: 890208 - RNA, 19 nt, Homo sapiens
  misc_RNA (1)...(19): siRNA sense strand
gaugcguuaccuuccuuua

SEQ ID NO: 890209 - RNA, 19 nt, Homo sapiens
  misc_RNA (1)...(19): siRNA sense strand
cuauucauuuggcuucuga

SEQ ID NO: 890210 - RNA, 19 nt, Homo sapiens
  misc_RNA (1)...(19): siRNA sense strand
guagaaugccuucacuuuu

SEQ ID NO: 890211 - RNA, 19 nt, Homo sapiens
  misc_RNA (1)...(19): siRNA sense strand
gcagugccaaggcuauuuc

SEQ ID NO: 890212 - RNA, 19 nt, Homo sapiens
  misc_RNA (1)...(19): siRNA sense strand
ggacucucagaucaauuaa

SEQ ID NO: 890213 - RNA, 19 nt, Homo sapiens
  misc_RNA (1)...(19): siRNA sense strand
acauaggauuucagccauu

SEQ ID NO: 890214 - RNA, 19 nt, Homo sapiens
  misc_RNA (1)...(19): siRNA sense strand
uuaauuccaccaguaauga

SEQ ID NO: 890215 - RNA, 19 nt, Homo sapiens
  misc_RNA (1)...(19): siRNA sense strand
aggagaagcaagugaagaa

SEQ ID NO: 890216 - RNA, 19 nt, Homo sapiens
  misc_RNA (1)...(19): siRNA sense strand
uguguuagacuacgugaug

SEQ ID NO: 890217 - RNA, 19 nt, Homo sapiens
  misc_RNA (1)...(19): siRNA sense strand
gaagucguaaagagccauu

SEQ ID NO: 890218 - RNA, 19 nt, Homo sapiens
  misc_RNA (1)...(19): siRNA sense strand
gcuauuucacugcacuuga

SEQ ID NO: 890219 - RNA, 19 nt, Homo sapiens
  misc_RNA (1)...(19): siRNA sense strand
gugaagaaggacucuacuu

SEQ ID NO: 890220 - RNA, 19 nt, Homo sapiens
  misc_RNA (1)...(19): siRNA sense strand
cuagaccugaccuugauaa

SEQ ID NO: 890221 - RNA, 19 nt, Homo sapiens
  misc_RNA (1)...(19): siRNA sense strand
gcguuaccuuccuuuaugg

SEQ ID NO: 890222 - RNA, 19 nt, Homo sapiens
  misc_RNA (1)...(19): siRNA sense strand
caguaaugaugaaacaacu

SEQ ID NO: 890223 - RNA, 19 nt, Homo sapiens
  misc_RNA (1)...(19): siRNA sense strand
uaugguggagaacacauuu

SEQ ID NO: 890224 - RNA, 19 nt, Homo sapiens
  misc_RNA (1)...(19): siRNA sense strand
guguuagacuacgugauga

SEQ ID NO: 890225 - RNA, 19 nt, Homo sapiens
  misc_RNA (1)...(19): siRNA sense strand
gugaaggagaagcaaguga

SEQ ID NO: 890226 - RNA, 19 nt, Homo sapiens
  misc_RNA (1)...(19): siRNA sense strand
gaagaaggcugugacauua

SEQ ID NO: 890227 - RNA, 19 nt, Homo sapiens
  misc_RNA (1)...(19): siRNA sense strand
gaacaagucagcccauuaa

SEQ ID NO: 890228 - RNA, 19 nt, Homo sapiens
  misc_RNA (1)...(19): siRNA sense strand
gcaacgaacuucuuaggaa

SEQ ID NO: 890229 - RNA, 19 nt, Homo sapiens
  misc_RNA (1)...(19): siRNA sense strand
gaaauggacuuccuuaugc

SEQ ID NO: 890230 - RNA, 19 nt, Homo sapiens
  misc_RNA (1)...(19): siRNA sense strand
gcacacaguuucuuuagau

SEQ ID NO: 890231 - RNA, 19 nt, Homo sapiens
  misc_RNA (1)...(19): siRNA sense strand
gaaauauggcuuugaauga

SEQ ID NO: 890232 - RNA, 19 nt, Homo sapiens
  misc_RNA (1)...(19): siRNA sense strand
gaaagaaaguccauugcau

SEQ ID NO: 890233 - RNA, 19 nt, Homo sapiens
  misc_RNA (1)...(19): siRNA sense strand
ggagguucuuuauuucuua

SEQ ID NO: 890234 - RNA, 19 nt, Homo sapiens
  misc_RNA (1)...(19): siRNA sense strand
ccaaagaccuugaaaacua

SEQ ID NO: 890235 - RNA, 19 nt, Homo sapiens
  misc_RNA (1)...(19): siRNA sense strand
gaucacguuuggcugaaua

SEQ ID NO: 890236 - RNA, 19 nt, Homo sapiens
  misc_RNA (1)...(19): siRNA sense strand
ggaaauauggcuuugaaug

SEQ ID NO: 890237 - RNA, 19 nt, Homo sapiens
  misc_RNA (1)...(19): siRNA sense strand
ucaaagaacucagcaagga

SEQ ID NO: 890238 - RNA, 19 nt, Homo sapiens
  misc_RNA (1)...(19): siRNA sense strand
ccagaaaugaguacuguua

SEQ ID NO: 890239 - RNA, 19 nt, Homo sapiens
  misc_RNA (1)...(19): siRNA sense strand
gaaaagaacuucacaaagc

SEQ ID NO: 890240 - RNA, 19 nt, Homo sapiens
  misc_RNA (1)...(19): siRNA sense strand
gacauuagauacucaagug

SEQ ID NO: 890241 - RNA, 19 nt, Homo sapiens
  misc_RNA (1)...(19): siRNA sense strand
caacaauaccagaggaaua

SEQ ID NO: 890242 - RNA, 19 nt, Homo sapiens
  misc_RNA (1)...(19): siRNA sense strand
uauagaagaucaugagugu

SEQ ID NO: 890243 - RNA, 19 nt, Homo sapiens
  misc_RNA (1)...(19): siRNA sense strand
gaacaucuucauucuucua

SEQ ID NO: 890244 - RNA, 19 nt, Homo sapiens
  misc_RNA (1)...(19): siRNA sense strand
gaaaugaguacuguuauca

SEQ ID NO: 890245 - RNA, 19 nt, Homo sapiens
  misc_RNA (1)...(19): siRNA sense strand
aagaagagcucagacaguu

SEQ ID NO: 890246 - RNA, 19 nt, Homo sapiens
  misc_RNA (1)...(19): siRNA sense strand
ugaagaaggcugugacauu

SEQ ID NO: 890247 - RNA, 19 nt, Homo sapiens
  misc_RNA (1)...(19): siRNA sense strand
gaaaguccauugcauucag

SEQ ID NO: 890248 - RNA, 19 nt, Homo sapiens
  misc_RNA (1)...(19): siRNA sense strand
gcaaggugcccuauggaaa

SEQ ID NO: 890249 - RNA, 19 nt, Homo sapiens
  misc_RNA (1)...(19): siRNA sense strand
gaacuucacaaagcaguaa

SEQ ID NO: 890250 - RNA, 19 nt, Homo sapiens
  misc_RNA (1)...(19): siRNA sense strand
ggcacacacuggagagaua

SEQ ID NO: 890251 - RNA, 19 nt, Homo sapiens
  misc_RNA (1)...(19): siRNA sense strand
caguggaaauguucuguuu

SEQ ID NO: 890252 - RNA, 19 nt, Homo sapiens
  misc_RNA (1)...(19): siRNA sense strand
ucagaagggugguuuaugg

SEQ ID NO: 890253 - RNA, 19 nt, Homo sapiens
  misc_RNA (1)...(19): siRNA sense strand
gauuaccaguauaggauaa

SEQ ID NO: 890254 - RNA, 19 nt, Homo sapiens
  misc_RNA (1)...(19): siRNA sense strand
ugagcaggcuguaauugaa

SEQ ID NO: 890255 - RNA, 19 nt, Homo sapiens
  misc_RNA (1)...(19): siRNA sense strand
caaggacugcccuaaagua

SEQ ID NO: 890256 - RNA, 19 nt, Homo sapiens
  misc_RNA (1)...(19): siRNA sense strand
guggaaauguucuguuuag

SEQ ID NO: 890257 - RNA, 19 nt, Homo sapiens
  misc_RNA (1)...(19): siRNA sense strand
gaauaggaaccucuacuuc

SEQ ID NO: 890258 - RNA, 19 nt, Homo sapiens
  misc_RNA (1)...(19): siRNA sense strand
caucauggaucacguuugg

SEQ ID NO: 890259 - RNA, 19 nt, Homo sapiens
  misc_RNA (1)...(19): siRNA sense strand
gcccuaaaguacagagaaa

SEQ ID NO: 890260 - RNA, 19 nt, Homo sapiens
  misc_RNA (1)...(19): siRNA sense strand
ucugagauauccacacauu

SEQ ID NO: 890261 - RNA, 19 nt, Homo sapiens
  misc_RNA (1)...(19): siRNA sense strand
gaucaugagugugcugugu

SEQ ID NO: 890262 - RNA, 19 nt, Homo sapiens
  misc_RNA (1)...(19): siRNA sense strand
gagaaacugugcaagaaaa

SEQ ID NO: 890263 - RNA, 19 nt, Homo sapiens
  misc_RNA (1)...(19): siRNA sense strand
ccgagaaacugugcaagaa

SEQ ID NO: 890264 - RNA, 19 nt, Homo sapiens
  misc_RNA (1)...(19): siRNA sense strand
gcaaaucuagaccgagaaa

SEQ ID NO: 890265 - RNA, 19 nt, Homo sapiens
  misc_RNA (1)...(19): siRNA sense strand
ggacugcccuaaaguacag

SEQ ID NO: 890266 - RNA, 19 nt, Homo sapiens
  misc_RNA (1)...(19): siRNA sense strand
ggcaacaucagccaagaua

SEQ ID NO: 890267 - RNA, 19 nt, Homo sapiens
  misc_RNA (1)...(19): siRNA sense strand
cagcguacuuuacaauuca

SEQ ID NO: 890268 - RNA, 19 nt, Homo sapiens
  misc_RNA (1)...(19): siRNA sense strand
uacauuggcagcaugauua

SEQ ID NO: 890269 - RNA, 19 nt, Homo sapiens
  misc_RNA (1)...(19): siRNA sense strand
ggauucuccugcacuuaaa

SEQ ID NO: 890270 - RNA, 19 nt, Homo sapiens
  misc_RNA (1)...(19): siRNA sense strand
aaagaaaguccauugcauu

SEQ ID NO: 890271 - RNA, 19 nt, Homo sapiens
  misc_RNA (1)...(19): siRNA sense strand
uuauaucuguggaguauga

SEQ ID NO: 890272 - RNA, 19 nt, Homo sapiens
  misc_RNA (1)...(19): siRNA sense strand
cgaacaagucagcccauua

SEQ ID NO: 890273 - RNA, 19 nt, Homo sapiens
  misc_RNA (1)...(19): siRNA sense strand
ggaagagcaagucagauga

SEQ ID NO: 890274 - RNA, 19 nt, Homo sapiens
  misc_RNA (1)...(19): siRNA sense strand
agagagugaucuucgcuuu

SEQ ID NO: 890275 - RNA, 19 nt, Homo sapiens
  misc_RNA (1)...(19): siRNA sense strand
ggaaagaaaguccauugca

SEQ ID NO: 890276 - RNA, 19 nt, Homo sapiens
  misc_RNA (1)...(19): siRNA sense strand
gagucuagcugcucagaag

SEQ ID NO: 890277 - RNA, 19 nt, Homo sapiens
  misc_RNA (1)...(19): siRNA sense strand
gaagaagagcucagacagu

SEQ ID NO: 890278 - RNA, 19 nt, Homo sapiens
  misc_RNA (1)...(19): siRNA sense strand
gacaguugcuggcuuccuu

SEQ ID NO: 890279 - RNA, 19 nt, Homo sapiens
  misc_RNA (1)...(19): siRNA sense strand
caucuucauucuucuauag

SEQ ID NO: 890280 - RNA, 19 nt, Homo sapiens
  misc_RNA (1)...(19): siRNA sense strand
ccuaaaguacagagaaaua

SEQ ID NO: 890281 - RNA, 19 nt, Homo sapiens
  misc_RNA (1)...(19): siRNA sense strand
ggacuuccuuaugcugaaa

SEQ ID NO: 890282 - RNA, 19 nt, Homo sapiens
  misc_RNA (1)...(19): siRNA sense strand
caaagaccuugaaaacuaa

SEQ ID NO: 890283 - RNA, 19 nt, Homo sapiens
  misc_RNA (1)...(19): siRNA sense strand
guacagagaaauauaaugc

SEQ ID NO: 890284 - RNA, 19 nt, Homo sapiens
  misc_RNA (1)...(19): siRNA sense strand
cacaaggacugcccuaaag

SEQ ID NO: 890285 - RNA, 19 nt, Homo sapiens
  misc_RNA (1)...(19): siRNA sense strand
gaaagcagucagagucuag

SEQ ID NO: 890286 - RNA, 19 nt, Homo sapiens
  misc_RNA (1)...(19): siRNA sense strand
ucgugaagcuuuagccaaa

SEQ ID NO: 890287 - RNA, 19 nt, Homo sapiens
  misc_RNA (1)...(19): siRNA sense strand
uggaaacacuaccaaccua

SEQ ID NO: 890288 - RNA, 19 nt, Homo sapiens
  misc_RNA (1)...(19): siRNA sense strand
ucacaaggacugcccuaaa

SEQ ID NO: 890289 - RNA, 19 nt, Homo sapiens
  misc_RNA (1)...(19): siRNA sense strand
caucauggcagaagcaaug

SEQ ID NO: 890290 - RNA, 19 nt, Homo sapiens
  misc_RNA (1)...(19): siRNA sense strand
agaaggcugugacauuaga

SEQ ID NO: 890291 - RNA, 19 nt, Homo sapiens
  misc_RNA (1)...(19): siRNA sense strand
ccagcguacuuuacaauuc

SEQ ID NO: 890292 - RNA, 19 nt, Homo sapiens
  misc_RNA (1)...(19): siRNA sense strand
gaggaugaagacagauaua

SEQ ID NO: 890293 - RNA, 19 nt, Homo sapiens
  misc_RNA (1)...(19): siRNA sense strand
ucacaaagcaguaagaaaa

SEQ ID NO: 890294 - RNA, 19 nt, Homo sapiens
  misc_RNA (1)...(19): siRNA sense strand
uaauuccuguggauguuaa

SEQ ID NO: 890295 - RNA, 19 nt, Homo sapiens
  misc_RNA (1)...(19): siRNA sense strand
uauggaggaugaagacaga

SEQ ID NO: 890296 - RNA, 19 nt, Homo sapiens
  misc_RNA (1)...(19): siRNA sense strand
gaugaagacagauauacga

SEQ ID NO: 890297 - RNA, 19 nt, Homo sapiens
  misc_RNA (1)...(19): siRNA sense strand
cacacaguuucuuuagaua

SEQ ID NO: 890298 - RNA, 19 nt, Homo sapiens
  misc_RNA (1)...(19): siRNA sense strand
gagcaggcuguaauugaaa

SEQ ID NO: 890299 - RNA, 19 nt, Homo sapiens
  misc_RNA (1)...(19): siRNA sense strand
uaugggagcagcauucaaa

SEQ ID NO: 890300 - RNA, 19 nt, Homo sapiens
  misc_RNA (1)...(19): siRNA sense strand
ugagauauccacacauugu

SEQ ID NO: 890301 - RNA, 19 nt, Homo sapiens
  misc_RNA (1)...(19): siRNA sense strand
ugaaagcagucagagucua

SEQ ID NO: 890302 - RNA, 19 nt, Homo sapiens
  misc_RNA (1)...(19): siRNA sense strand
augaguguauccaguauuu

SEQ ID NO: 890303 - RNA, 19 nt, Homo sapiens
  misc_RNA (1)...(19): siRNA sense strand
gcugaauacacuguuaaua

SEQ ID NO: 890304 - RNA, 19 nt, Homo sapiens
  misc_RNA (1)...(19): siRNA sense strand
agaaaugaguacuguuauc

SEQ ID NO: 890305 - RNA, 19 nt, Homo sapiens
  misc_RNA (1)...(19): siRNA sense strand
gaaguucuggcccugaaga

SEQ ID NO: 890306 - RNA, 19 nt, Homo sapiens
  misc_RNA (1)...(19): siRNA sense strand
agaaauauaaugcguguca

SEQ ID NO: 890307 - RNA, 19 nt, Homo sapiens
  misc_RNA (1)...(19): siRNA sense strand
guuaauauucgcuaucuuc

SEQ ID NO: 890308 - RNA, 19 nt, Homo sapiens
  misc_RNA (1)...(19): siRNA sense strand
gaauuauaucuguggagua

SEQ ID NO: 890309 - RNA, 19 nt, Homo sapiens
  misc_RNA (1)...(19): siRNA sense strand
ucaagccugugauccgaaa

SEQ ID NO: 890310 - RNA, 19 nt, Homo sapiens
  misc_RNA (1)...(19): siRNA sense strand
aagaugacuuucuggaguu

SEQ ID NO: 890311 - RNA, 19 nt, Homo sapiens
  misc_RNA (1)...(19): siRNA sense strand
aaagaacucagcaaggauu

SEQ ID NO: 890312 - RNA, 19 nt, Homo sapiens
  misc_RNA (1)...(19): siRNA sense strand
aauauucgcuaucuucucu

SEQ ID NO: 890313 - RNA, 19 nt, Homo sapiens
  misc_RNA (1)...(19): siRNA sense strand
caugggaggucuucuuguc

SEQ ID NO: 890314 - RNA, 19 nt, Homo sapiens
  misc_RNA (1)...(19): siRNA sense strand
cccaagacaugguuagcaa

SEQ ID NO: 890315 - RNA, 19 nt, Homo sapiens
  misc_RNA (1)...(19): siRNA sense strand
caagucagcccauuaaagc

SEQ ID NO: 890316 - RNA, 19 nt, Homo sapiens
  misc_RNA (1)...(19): siRNA sense strand
cgagaaacugugcaagaaa

SEQ ID NO: 890317 - RNA, 19 nt, Homo sapiens
  misc_RNA (1)...(19): siRNA sense strand
uagaugaguguauccagua

SEQ ID NO: 890318 - RNA, 19 nt, Homo sapiens
  misc_RNA (1)...(19): siRNA sense strand
aacaauaccagaggaauaa

SEQ ID NO: 890319 - RNA, 19 nt, Homo sapiens
  misc_RNA (1)...(19): siRNA sense strand
gggaggucuucuugucaaa

SEQ ID NO: 890320 - RNA, 19 nt, Homo sapiens
  misc_RNA (1)...(19): siRNA sense strand
gugagcaggcuguaauuga

SEQ ID NO: 890321 - RNA, 19 nt, Homo sapiens
  misc_RNA (1)...(19): siRNA sense strand
uuggaaauauggcuuugaa

SEQ ID NO: 890322 - RNA, 19 nt, Homo sapiens
  misc_RNA (1)...(19): siRNA sense strand
gggauaggccagugguuug

SEQ ID NO: 890323 - RNA, 19 nt, Homo sapiens
  misc_RNA (1)...(19): siRNA sense strand
uuaggagguucuuuauuuc

SEQ ID NO: 890324 - RNA, 19 nt, Homo sapiens
  misc_RNA (1)...(19): siRNA sense strand
cuguggauguuaaccauuu

SEQ ID NO: 890325 - RNA, 19 nt, Homo sapiens
  misc_RNA (1)...(19): siRNA sense strand
gaaacacuaccaaccuaca

SEQ ID NO: 890326 - RNA, 19 nt, Homo sapiens
  misc_RNA (1)...(19): siRNA sense strand
gaacaacgcaucagagaaa

SEQ ID NO: 890327 - RNA, 19 nt, Homo sapiens
  misc_RNA (1)...(19): siRNA sense strand
caagagaacuucccagaug

SEQ ID NO: 890328 - RNA, 19 nt, Homo sapiens
  misc_RNA (1)...(19): siRNA sense strand
ggaaggugcugccugaaga

SEQ ID NO: 890329 - RNA, 19 nt, Homo sapiens
  misc_RNA (1)...(19): siRNA sense strand
gcaaugaagcaguugguua

SEQ ID NO: 890330 - RNA, 19 nt, Homo sapiens
  misc_RNA (1)...(19): siRNA sense strand
gaagaagacacuuagaaga

SEQ ID NO: 890331 - RNA, 19 nt, Homo sapiens
  misc_RNA (1)...(19): siRNA sense strand
gaagacacuuagaagaaga

SEQ ID NO: 890332 - RNA, 19 nt, Homo sapiens
  misc_RNA (1)...(19): siRNA sense strand
aaacgaagagcaagaagua

SEQ ID NO: 890333 - RNA, 19 nt, Homo sapiens
  misc_RNA (1)...(19): siRNA sense strand
ugagaaggaucuaaacgaa

SEQ ID NO: 890334 - RNA, 19 nt, Homo sapiens
  misc_RNA (1)...(19): siRNA sense strand
gagaagaagacacuuagaa

SEQ ID NO: 890335 - RNA, 19 nt, Homo sapiens
  misc_RNA (1)...(19): siRNA sense strand
ggaauuagaagaucaucaa

SEQ ID NO: 890336 - RNA, 19 nt, Homo sapiens
  misc_RNA (1)...(19): siRNA sense strand
gaacuggaauuagaagauc

SEQ ID NO: 890337 - RNA, 19 nt, Homo sapiens
  misc_RNA (1)...(19): siRNA sense strand
ggacaucagggaccucuuu

SEQ ID NO: 890338 - RNA, 19 nt, Homo sapiens
  misc_RNA (1)...(19): siRNA sense strand
caaugaagcaguugguuaa

SEQ ID NO: 890339 - RNA, 19 nt, Homo sapiens
  misc_RNA (1)...(19): siRNA sense strand
gggacaaacucgucgauuc

SEQ ID NO: 890340 - RNA, 19 nt, Homo sapiens
  misc_RNA (1)...(19): siRNA sense strand
agaaggaucuaaacgaaga

SEQ ID NO: 890341 - RNA, 19 nt, Homo sapiens
  misc_RNA (1)...(19): siRNA sense strand
gagcagaaacugagagaga

SEQ ID NO: 890342 - RNA, 19 nt, Homo sapiens
  misc_RNA (1)...(19): siRNA sense strand
aaagugaguuugcaagaga

SEQ ID NO: 890343 - RNA, 19 nt, Homo sapiens
  misc_RNA (1)...(19): siRNA sense strand
gaggagagccagaaagaug

SEQ ID NO: 890344 - RNA, 19 nt, Homo sapiens
  misc_RNA (1)...(19): siRNA sense strand
gaaagugaguuugcaagag

SEQ ID NO: 890345 - RNA, 19 nt, Homo sapiens
  misc_RNA (1)...(19): siRNA sense strand
ccaagaauccagacaaaga

SEQ ID NO: 890346 - RNA, 19 nt, Homo sapiens
  misc_RNA (1)...(19): siRNA sense strand
gaagaaagaagcuagaaaa

SEQ ID NO: 890347 - RNA, 19 nt, Homo sapiens
  misc_RNA (1)...(19): siRNA sense strand
caaacucgucgauuccuua

SEQ ID NO: 890348 - RNA, 19 nt, Homo sapiens
  misc_RNA (1)...(19): siRNA sense strand
ucaccgagcugaugcaagu

SEQ ID NO: 890349 - RNA, 19 nt, Homo sapiens
  misc_RNA (1)...(19): siRNA sense strand
cagcuuuccuugcaguuaa

SEQ ID NO: 890350 - RNA, 19 nt, Homo sapiens
  misc_RNA (1)...(19): siRNA sense strand
ccagaaagaugagaaggau

SEQ ID NO: 890351 - RNA, 19 nt, Homo sapiens
  misc_RNA (1)...(19): siRNA sense strand
gaagaagaaagaagcuaga

SEQ ID NO: 890352 - RNA, 19 nt, Homo sapiens
  misc_RNA (1)...(19): siRNA sense strand
acacuuagaagaagaaaga

SEQ ID NO: 890353 - RNA, 19 nt, Homo sapiens
  misc_RNA (1)...(19): siRNA sense strand
gcaguugguuaagcaagaa

SEQ ID NO: 890354 - RNA, 19 nt, Homo sapiens
  misc_RNA (1)...(19): siRNA sense strand
caagaauccagacaaagaa

SEQ ID NO: 890355 - RNA, 19 nt, Homo sapiens
  misc_RNA (1)...(19): siRNA sense strand
aagaagacacuuagaagaa

SEQ ID NO: 890356 - RNA, 19 nt, Homo sapiens
  misc_RNA (1)...(19): siRNA sense strand
ccacacuccucgagaaagu

SEQ ID NO: 890357 - RNA, 19 nt, Homo sapiens
  misc_RNA (1)...(19): siRNA sense strand
ggccugcacucgcucauuc

SEQ ID NO: 890358 - RNA, 19 nt, Homo sapiens
  misc_RNA (1)...(19): siRNA sense strand
gagagaaaaugcucaagga

SEQ ID NO: 890359 - RNA, 19 nt, Homo sapiens
  misc_RNA (1)...(19): siRNA sense strand
gcagaaacugagagagaaa

SEQ ID NO: 890360 - RNA, 19 nt, Homo sapiens
  misc_RNA (1)...(19): siRNA sense strand
aaagcagacuggagcagaa

SEQ ID NO: 890361 - RNA, 19 nt, Homo sapiens
  misc_RNA (1)...(19): siRNA sense strand
ugaagcaguugguuaagca

SEQ ID NO: 890362 - RNA, 19 nt, Homo sapiens
  misc_RNA (1)...(19): siRNA sense strand
ggaacuggaauuagaagau

SEQ ID NO: 890363 - RNA, 19 nt, Homo sapiens
  misc_RNA (1)...(19): siRNA sense strand
gaacuucccagaugcuucu

SEQ ID NO: 890364 - RNA, 19 nt, Homo sapiens
  misc_RNA (1)...(19): siRNA sense strand
ggaacaacgcaucagagaa

SEQ ID NO: 890365 - RNA, 19 nt, Homo sapiens
  misc_RNA (1)...(19): siRNA sense strand
gcaagagaacuucccagau

SEQ ID NO: 890366 - RNA, 19 nt, Homo sapiens
  misc_RNA (1)...(19): siRNA sense strand
ggaaugguuuaagcugguu

SEQ ID NO: 890367 - RNA, 19 nt, Homo sapiens
  misc_RNA (1)...(19): siRNA sense strand
aaaccaguccucagccuuu

SEQ ID NO: 890368 - RNA, 19 nt, Homo sapiens
  misc_RNA (1)...(19): siRNA sense strand
gagaguuuccuccaagaau

SEQ ID NO: 890369 - RNA, 19 nt, Homo sapiens
  misc_RNA (1)...(19): siRNA sense strand
caaggucuuuccugcacuu

SEQ ID NO: 890370 - RNA, 19 nt, Homo sapiens
  misc_RNA (1)...(19): siRNA sense strand
gaggaggccgugugcuaaa

SEQ ID NO: 890371 - RNA, 19 nt, Homo sapiens
  misc_RNA (1)...(19): siRNA sense strand
gcgaggagaagcagauuca

SEQ ID NO: 890372 - RNA, 19 nt, Homo sapiens
  misc_RNA (1)...(19): siRNA sense strand
gcaagugauugagcaaagg

SEQ ID NO: 890373 - RNA, 19 nt, Homo sapiens
  misc_RNA (1)...(19): siRNA sense strand
gaaaagugcugagaauggu

SEQ ID NO: 890374 - RNA, 19 nt, Homo sapiens
  misc_RNA (1)...(19): siRNA sense strand
uagaggaggccgugugcua

SEQ ID NO: 890375 - RNA, 19 nt, Homo sapiens
  misc_RNA (1)...(19): siRNA sense strand
cgaagagcaagaaguauuc

SEQ ID NO: 890376 - RNA, 19 nt, Homo sapiens
  misc_RNA (1)...(19): siRNA sense strand
agucggagcuccuaaucau

SEQ ID NO: 890377 - RNA, 19 nt, Homo sapiens
  misc_RNA (1)...(19): siRNA sense strand
ggagaagaagacacuuaga

SEQ ID NO: 890378 - RNA, 19 nt, Homo sapiens
  misc_RNA (1)...(19): siRNA sense strand
agaagacacuuagaagaag

SEQ ID NO: 890379 - RNA, 19 nt, Homo sapiens
  misc_RNA (1)...(19): siRNA sense strand
cuccaagaauccagacaaa

SEQ ID NO: 890380 - RNA, 19 nt, Homo sapiens
  misc_RNA (1)...(19): siRNA sense strand
gagcugaugcaagugauug

SEQ ID NO: 890381 - RNA, 19 nt, Homo sapiens
  misc_RNA (1)...(19): siRNA sense strand
ccagaaaagugcugagaau

SEQ ID NO: 890382 - RNA, 19 nt, Homo sapiens
  misc_RNA (1)...(19): siRNA sense strand
aaggagaagaagacacuua

SEQ ID NO: 890383 - RNA, 19 nt, Homo sapiens
  misc_RNA (1)...(19): siRNA sense strand
uaaaggagaagaagacacu

SEQ ID NO: 890384 - RNA, 19 nt, Homo sapiens
  misc_RNA (1)...(19): siRNA sense strand
gguuaagcaagaagaauug

SEQ ID NO: 890385 - RNA, 19 nt, Homo sapiens
  misc_RNA (1)...(19): siRNA sense strand
gcaagaagaauugaaaaga

SEQ ID NO: 890386 - RNA, 19 nt, Homo sapiens
  misc_RNA (1)...(19): siRNA sense strand
aaccaguccucagccuuua

SEQ ID NO: 890387 - RNA, 19 nt, Homo sapiens
  misc_RNA (1)...(19): siRNA sense strand
gcagaugaagaauuugauc

SEQ ID NO: 890388 - RNA, 19 nt, Homo sapiens
  misc_RNA (1)...(19): siRNA sense strand
cucugcagaugaagaauuu

SEQ ID NO: 890389 - RNA, 19 nt, Homo sapiens
  misc_RNA (1)...(19): siRNA sense strand
ucagagcacagguaacaga

SEQ ID NO: 890390 - RNA, 19 nt, Homo sapiens
  misc_RNA (1)...(19): siRNA sense strand
ggucuuuccugcacuuagg

SEQ ID NO: 890391 - RNA, 19 nt, Homo sapiens
  misc_RNA (1)...(19): siRNA sense strand
uuugaaagcuucguauucu

SEQ ID NO: 890392 - RNA, 19 nt, Homo sapiens
  misc_RNA (1)...(19): siRNA sense strand
ccgaggaccagcacuuuga

SEQ ID NO: 890393 - RNA, 19 nt, Homo sapiens
  misc_RNA (1)...(19): siRNA sense strand
ggacaaacucgucgauucc

SEQ ID NO: 890394 - RNA, 19 nt, Homo sapiens
  misc_RNA (1)...(19): siRNA sense strand
gaagagcaagaaguauuca

SEQ ID NO: 890395 - RNA, 19 nt, Homo sapiens
  misc_RNA (1)...(19): siRNA sense strand
caaggaggagagccagaaa

SEQ ID NO: 890396 - RNA, 19 nt, Homo sapiens
  misc_RNA (1)...(19): siRNA sense strand
ggugcugccugaagauagu

SEQ ID NO: 890397 - RNA, 19 nt, Homo sapiens
  misc_RNA (1)...(19): siRNA sense strand
gugcagacuccaagaacuu

SEQ ID NO: 890398 - RNA, 19 nt, Homo sapiens
  misc_RNA (1)...(19): siRNA sense strand
ggaucuaaacgaagagcaa

SEQ ID NO: 890399 - RNA, 19 nt, Homo sapiens
  misc_RNA (1)...(19): siRNA sense strand
agaagaaagaagcuagaaa

SEQ ID NO: 890400 - RNA, 19 nt, Homo sapiens
  misc_RNA (1)...(19): siRNA sense strand
agaguuuccuccaagaauc

SEQ ID NO: 890401 - RNA, 19 nt, Homo sapiens
  misc_RNA (1)...(19): siRNA sense strand
acgaagagcaagaaguauu

SEQ ID NO: 890402 - RNA, 19 nt, Homo sapiens
  misc_RNA (1)...(19): siRNA sense strand
gcacagcuuuugcaggaau

SEQ ID NO: 890403 - RNA, 19 nt, Homo sapiens
  misc_RNA (1)...(19): siRNA sense strand
gaggugcagacuccaagaa

SEQ ID NO: 890404 - RNA, 19 nt, Homo sapiens
  misc_RNA (1)...(19): siRNA sense strand
gaggaccagcacuuugaaa

SEQ ID NO: 890405 - RNA, 19 nt, Homo sapiens
  misc_RNA (1)...(19): siRNA sense strand
agaagaagacacuuagaag

SEQ ID NO: 890406 - RNA, 19 nt, Homo sapiens
  misc_RNA (1)...(19): siRNA sense strand
ccucagagcacagguaaca

SEQ ID NO: 890407 - RNA, 19 nt, Homo sapiens
  misc_RNA (1)...(19): siRNA sense strand
agaaagugaguuugcaaga

SEQ ID NO: 890408 - RNA, 19 nt, Homo sapiens
  misc_RNA (1)...(19): siRNA sense strand
ccagcuuuccuugcaguua

SEQ ID NO: 890409 - RNA, 19 nt, Homo sapiens
  misc_RNA (1)...(19): siRNA sense strand
gaaggugcugccugaagau

SEQ ID NO: 890410 - RNA, 19 nt, Homo sapiens
  misc_RNA (1)...(19): siRNA sense strand
ccucagacucaaagacaaa

SEQ ID NO: 890411 - RNA, 19 nt, Homo sapiens
  misc_RNA (1)...(19): siRNA sense strand
cgagaaagugaguuugcaa

SEQ ID NO: 890412 - RNA, 19 nt, Homo sapiens
  misc_RNA (1)...(19): siRNA sense strand
gccagaaagaugagaagga

SEQ ID NO: 890413 - RNA, 19 nt, Homo sapiens
  misc_RNA (1)...(19): siRNA sense strand
agcagaaacugagagagaa

SEQ ID NO: 890414 - RNA, 19 nt, Homo sapiens
  misc_RNA (1)...(19): siRNA sense strand
caagaagaauugaaaagac

SEQ ID NO: 890415 - RNA, 19 nt, Homo sapiens
  misc_RNA (1)...(19): siRNA sense strand
gggccaagcaagaauccaa

SEQ ID NO: 890416 - RNA, 19 nt, Homo sapiens
  misc_RNA (1)...(19): siRNA sense strand
caagaacuuuccccucaga

SEQ ID NO: 890417 - RNA, 19 nt, Homo sapiens
  misc_RNA (1)...(19): siRNA sense strand
gcaguuaaaggagaagaag

SEQ ID NO: 890418 - RNA, 19 nt, Homo sapiens
  misc_RNA (1)...(19): siRNA sense strand
acaaacucgucgauuccuu

SEQ ID NO: 890419 - RNA, 19 nt, Homo sapiens
  misc_RNA (1)...(19): siRNA sense strand
uaaacgaagagcaagaagu

SEQ ID NO: 890420 - RNA, 19 nt, Homo sapiens
  misc_RNA (1)...(19): siRNA sense strand
auuagaagaucaucaaagc

SEQ ID NO: 890421 - RNA, 19 nt, Homo sapiens
  misc_RNA (1)...(19): siRNA sense strand
ggugcagacuccaagaacu

SEQ ID NO: 890422 - RNA, 19 nt, Homo sapiens
  misc_RNA (1)...(19): siRNA sense strand
acucgucgauuccuuagag

SEQ ID NO: 890423 - RNA, 19 nt, Homo sapiens
  misc_RNA (1)...(19): siRNA sense strand
agaggaggccgugugcuaa

SEQ ID NO: 890424 - RNA, 19 nt, Homo sapiens
  misc_RNA (1)...(19): siRNA sense strand
ucaaggaggagagccagaa

SEQ ID NO: 890425 - RNA, 19 nt, Homo sapiens
  misc_RNA (1)...(19): siRNA sense strand
ggccaagcaagaauccaaa

SEQ ID NO: 890426 - RNA, 19 nt, Homo sapiens
  misc_RNA (1)...(19): siRNA sense strand
gaagagaacuccaaaugaa

SEQ ID NO: 890427 - RNA, 19 nt, Homo sapiens
  misc_RNA (1)...(19): siRNA sense strand
gaaauagcauugaaagaga

SEQ ID NO: 890428 - RNA, 19 nt, Homo sapiens
  misc_RNA (1)...(19): siRNA sense strand
gagaaagaguaucaaauga

SEQ ID NO: 890429 - RNA, 19 nt, Homo sapiens
  misc_RNA (1)...(19): siRNA sense strand
ggagaggagucgaaguaua

SEQ ID NO: 890430 - RNA, 19 nt, Homo sapiens
  misc_RNA (1)...(19): siRNA sense strand
gaaaggccaucaucauuca

SEQ ID NO: 890431 - RNA, 19 nt, Homo sapiens
  misc_RNA (1)...(19): siRNA sense strand
caagauaugucuacaaugg

SEQ ID NO: 890432 - RNA, 19 nt, Homo sapiens
  misc_RNA (1)...(19): siRNA sense strand
cagcagcuauuacaugaua

SEQ ID NO: 890433 - RNA, 19 nt, Homo sapiens
  misc_RNA (1)...(19): siRNA sense strand
ccagaacaaucacaacuuu

SEQ ID NO: 890434 - RNA, 19 nt, Homo sapiens
  misc_RNA (1)...(19): siRNA sense strand
gcuaagaagccuaaacaua

SEQ ID NO: 890435 - RNA, 19 nt, Homo sapiens
  misc_RNA (1)...(19): siRNA sense strand
ggagaaagaguaucaaaug

SEQ ID NO: 890436 - RNA, 19 nt, Homo sapiens
  misc_RNA (1)...(19): siRNA sense strand
caaaugauguugcugacaa

SEQ ID NO: 890437 - RNA, 19 nt, Homo sapiens
  misc_RNA (1)...(19): siRNA sense strand
agaagucgcucaagggaua

SEQ ID NO: 890438 - RNA, 19 nt, Homo sapiens
  misc_RNA (1)...(19): siRNA sense strand
cgagagagacguagaagua

SEQ ID NO: 890439 - RNA, 19 nt, Homo sapiens
  misc_RNA (1)...(19): siRNA sense strand
gaucaacguggaaaucuua

SEQ ID NO: 890440 - RNA, 19 nt, Homo sapiens
  misc_RNA (1)...(19): siRNA sense strand
gacaacaggcauauauuua

SEQ ID NO: 890441 - RNA, 19 nt, Homo sapiens
  misc_RNA (1)...(19): siRNA sense strand
gaacagcagcuauuacaug

SEQ ID NO: 890442 - RNA, 19 nt, Homo sapiens
  misc_RNA (1)...(19): siRNA sense strand
gagaaaggccaucaucauu

SEQ ID NO: 890443 - RNA, 19 nt, Homo sapiens
  misc_RNA (1)...(19): siRNA sense strand
gcauaaaggugaggcuaaa

SEQ ID NO: 890444 - RNA, 19 nt, Homo sapiens
  misc_RNA (1)...(19): siRNA sense strand
ugucacagaugaagaaauu

SEQ ID NO: 890445 - RNA, 19 nt, Homo sapiens
  misc_RNA (1)...(19): siRNA sense strand
gaacaaccaccaggaauga

SEQ ID NO: 890446 - RNA, 19 nt, Homo sapiens
  misc_RNA (1)...(19): siRNA sense strand
gaguagaucuccaacaauc

SEQ ID NO: 890447 - RNA, 19 nt, Homo sapiens
  misc_RNA (1)...(19): siRNA sense strand
gaaauuggagaaagaaaga

SEQ ID NO: 890448 - RNA, 19 nt, Homo sapiens
  misc_RNA (1)...(19): siRNA sense strand
cauaagacaugauucuaga

SEQ ID NO: 890449 - RNA, 19 nt, Homo sapiens
  misc_RNA (1)...(19): siRNA sense strand
gaacagucauaagcauaaa

SEQ ID NO: 890450 - RNA, 19 nt, Homo sapiens
  misc_RNA (1)...(19): siRNA sense strand
gauucaaacuucaacagaa

SEQ ID NO: 890451 - RNA, 19 nt, Homo sapiens
  misc_RNA (1)...(19): siRNA sense strand
ggaacagucauaagcauaa

SEQ ID NO: 890452 - RNA, 19 nt, Homo sapiens
  misc_RNA (1)...(19): siRNA sense strand
gaaacgagaaagugaaaga

SEQ ID NO: 890453 - RNA, 19 nt, Homo sapiens
  misc_RNA (1)...(19): siRNA sense strand
acaacaacguucacaauug

SEQ ID NO: 890454 - RNA, 19 nt, Homo sapiens
  misc_RNA (1)...(19): siRNA sense strand
caaacaaucaugggaauuu

SEQ ID NO: 890455 - RNA, 19 nt, Homo sapiens
  misc_RNA (1)...(19): siRNA sense strand
ucaaaggucugguaagaag

SEQ ID NO: 890456 - RNA, 19 nt, Homo sapiens
  misc_RNA (1)...(19): siRNA sense strand
gauccaagccagauugauu

SEQ ID NO: 890457 - RNA, 19 nt, Homo sapiens
  misc_RNA (1)...(19): siRNA sense strand
agaagaaauuggagaaaga

SEQ ID NO: 890458 - RNA, 19 nt, Homo sapiens
  misc_RNA (1)...(19): siRNA sense strand
ggaaggagcaguucugagu

SEQ ID NO: 890459 - RNA, 19 nt, Homo sapiens
  misc_RNA (1)...(19): siRNA sense strand
ggagaaagaaagaauggaa

SEQ ID NO: 890460 - RNA, 19 nt, Homo sapiens
  misc_RNA (1)...(19): siRNA sense strand
cuaagaagccuaaacauag

SEQ ID NO: 890461 - RNA, 19 nt, Homo sapiens
  misc_RNA (1)...(19): siRNA sense strand
auaaacagauggaagaaga

SEQ ID NO: 890462 - RNA, 19 nt, Homo sapiens
  misc_RNA (1)...(19): siRNA sense strand
ggaagaagaagacacugaa

SEQ ID NO: 890463 - RNA, 19 nt, Homo sapiens
  misc_RNA (1)...(19): siRNA sense strand
ugacaacaggcauauauuu

SEQ ID NO: 890464 - RNA, 19 nt, Homo sapiens
  misc_RNA (1)...(19): siRNA sense strand
aaacagaaaggguuacaaa

SEQ ID NO: 890465 - RNA, 19 nt, Homo sapiens
  misc_RNA (1)...(19): siRNA sense strand
ggaaucugguccaaacaau

SEQ ID NO: 890466 - RNA, 19 nt, Homo sapiens
  misc_RNA (1)...(19): siRNA sense strand
ugacacugaugaugaagaa

SEQ ID NO: 890467 - RNA, 19 nt, Homo sapiens
  misc_RNA (1)...(19): siRNA sense strand
cgucagcguucaccuauug

SEQ ID NO: 890468 - RNA, 19 nt, Homo sapiens
  misc_RNA (1)...(19): siRNA sense strand
uaagaagccuaaacauagu

SEQ ID NO: 890469 - RNA, 19 nt, Homo sapiens
  misc_RNA (1)...(19): siRNA sense strand
caacgaaagcuccugcaaa

SEQ ID NO: 890470 - RNA, 19 nt, Homo sapiens
  misc_RNA (1)...(19): siRNA sense strand
cacagaagaugcugaagga

SEQ ID NO: 890471 - RNA, 19 nt, Homo sapiens
  misc_RNA (1)...(19): siRNA sense strand
gaagagaaaggccaucauc

SEQ ID NO: 890472 - RNA, 19 nt, Homo sapiens
  misc_RNA (1)...(19): siRNA sense strand
gagaggagucgaaguauag

SEQ ID NO: 890473 - RNA, 19 nt, Homo sapiens
  misc_RNA (1)...(19): siRNA sense strand
gaaagagaaagacgacgaa

SEQ ID NO: 890474 - RNA, 19 nt, Homo sapiens
  misc_RNA (1)...(19): siRNA sense strand
gcuauuacaugauaaacag

SEQ ID NO: 890475 - RNA, 19 nt, Homo sapiens
  misc_RNA (1)...(19): siRNA sense strand
gaagaagaagacacugaaa

SEQ ID NO: 890476 - RNA, 19 nt, Homo sapiens
  misc_RNA (1)...(19): siRNA sense strand
gaagaaauuggagaaagaa

SEQ ID NO: 890477 - RNA, 19 nt, Homo sapiens
  misc_RNA (1)...(19): siRNA sense strand
gauuucauccuccuuauug

SEQ ID NO: 890478 - RNA, 19 nt, Homo sapiens
  misc_RNA (1)...(19): siRNA sense strand
ucucaaaggucugguaaga

SEQ ID NO: 890479 - RNA, 19 nt, Homo sapiens
  misc_RNA (1)...(19): siRNA sense strand
cacugaugaugaagaauua

SEQ ID NO: 890480 - RNA, 19 nt, Homo sapiens
  misc_RNA (1)...(19): siRNA sense strand
caacaggcauauauuuaac

SEQ ID NO: 890481 - RNA, 19 nt, Homo sapiens
  misc_RNA (1)...(19): siRNA sense strand
uagucaggaugauagauua

SEQ ID NO: 890482 - RNA, 19 nt, Homo sapiens
  misc_RNA (1)...(19): siRNA sense strand
gguagucccaguagcaaua

SEQ ID NO: 890483 - RNA, 19 nt, Homo sapiens
  misc_RNA (1)...(19): siRNA sense strand
gcaaguagugggaaaguca

SEQ ID NO: 890484 - RNA, 19 nt, Homo sapiens
  misc_RNA (1)...(19): siRNA sense strand
gaagaauuacggcaucgaa

SEQ ID NO: 890485 - RNA, 19 nt, Homo sapiens
  misc_RNA (1)...(19): siRNA sense strand
agacguagcaggaguagaa

SEQ ID NO: 890486 - RNA, 19 nt, Homo sapiens
  misc_RNA (1)...(19): siRNA sense strand
gcacagugacccugagaug

SEQ ID NO: 890487 - RNA, 19 nt, Homo sapiens
  misc_RNA (1)...(19): siRNA sense strand
gaaaaguacuaccaaagau

SEQ ID NO: 890488 - RNA, 19 nt, Homo sapiens
  misc_RNA (1)...(19): siRNA sense strand
gguaaagauuagagauaga

SEQ ID NO: 890489 - RNA, 19 nt, Homo sapiens
  misc_RNA (1)...(19): siRNA sense strand
ggguaaagauuagagauag

SEQ ID NO: 890490 - RNA, 19 nt, Homo sapiens
  misc_RNA (1)...(19): siRNA sense strand
caaaugaaaccacaucagu

SEQ ID NO: 890491 - RNA, 19 nt, Homo sapiens
  misc_RNA (1)...(19): siRNA sense strand
ugaaccaguuugacuauca

SEQ ID NO: 890492 - RNA, 19 nt, Homo sapiens
  misc_RNA (1)...(19): siRNA sense strand
ccucagagaaguaaauuug

SEQ ID NO: 890493 - RNA, 19 nt, Homo sapiens
  misc_RNA (1)...(19): siRNA sense strand
ggacauuguuccuccuucu

SEQ ID NO: 890494 - RNA, 19 nt, Homo sapiens
  misc_RNA (1)...(19): siRNA sense strand
gagucgaaguauagauaaa

SEQ ID NO: 890495 - RNA, 19 nt, Homo sapiens
  misc_RNA (1)...(19): siRNA sense strand
gggcuaggguaaagauuag

SEQ ID NO: 890496 - RNA, 19 nt, Homo sapiens
  misc_RNA (1)...(19): siRNA sense strand
agcaauagcagaacuagua

SEQ ID NO: 890497 - RNA, 19 nt, Homo sapiens
  misc_RNA (1)...(19): siRNA sense strand
cagcaaacagaaaggguua

SEQ ID NO: 890498 - RNA, 19 nt, Homo sapiens
  misc_RNA (1)...(19): siRNA sense strand
gaaauucugcuggauguca

SEQ ID NO: 890499 - RNA, 19 nt, Homo sapiens
  misc_RNA (1)...(19): siRNA sense strand
gaggagaaagaguaucaaa

SEQ ID NO: 890500 - RNA, 19 nt, Homo sapiens
  misc_RNA (1)...(19): siRNA sense strand
gcaaacacaagucuaaguc

SEQ ID NO: 890501 - RNA, 19 nt, Homo sapiens
  misc_RNA (1)...(19): siRNA sense strand
gcaauagggcuaggguaaa

SEQ ID NO: 890502 - RNA, 19 nt, Homo sapiens
  misc_RNA (1)...(19): siRNA sense strand
aacagcagcuauuacauga

SEQ ID NO: 890503 - RNA, 19 nt, Homo sapiens
  misc_RNA (1)...(19): siRNA sense strand
cagaagaaauuggagaaag

SEQ ID NO: 890504 - RNA, 19 nt, Homo sapiens
  misc_RNA (1)...(19): siRNA sense strand
ggagucgaaguauagauaa

SEQ ID NO: 890505 - RNA, 19 nt, Homo sapiens
  misc_RNA (1)...(19): siRNA sense strand
gggaacagucauaagcaua

SEQ ID NO: 890506 - RNA, 19 nt, Homo sapiens
  misc_RNA (1)...(19): siRNA sense strand
caauagggcuaggguaaag

SEQ ID NO: 890507 - RNA, 19 nt, Homo sapiens
  misc_RNA (1)...(19): siRNA sense strand
cagaaaggguuacaaaaga

SEQ ID NO: 890508 - RNA, 19 nt, Homo sapiens
  misc_RNA (1)...(19): siRNA sense strand
gcaaagcaugguagaacaa

SEQ ID NO: 890509 - RNA, 19 nt, Homo sapiens
  misc_RNA (1)...(19): siRNA sense strand
ggaugucacagaugaagaa

SEQ ID NO: 890510 - RNA, 19 nt, Homo sapiens
  misc_RNA (1)...(19): siRNA sense strand
gaaagaaagaauggaacaa

SEQ ID NO: 890511 - RNA, 19 nt, Homo sapiens
  misc_RNA (1)...(19): siRNA sense strand
caaagaugcacaccgcaaa

SEQ ID NO: 890512 - RNA, 19 nt, Homo sapiens
  misc_RNA (1)...(19): siRNA sense strand
gcaaagaaaagaaggcuaa

SEQ ID NO: 890513 - RNA, 19 nt, Homo sapiens
  misc_RNA (1)...(19): siRNA sense strand
guagucaggaugauagauu

SEQ ID NO: 890514 - RNA, 19 nt, Homo sapiens
  misc_RNA (1)...(19): siRNA sense strand
agagaaagacgacgaaauc

SEQ ID NO: 890515 - RNA, 19 nt, Homo sapiens
  misc_RNA (1)...(19): siRNA sense strand
caccaggaaugaugccaaa

SEQ ID NO: 890516 - RNA, 19 nt, Homo sapiens
  misc_RNA (1)...(19): siRNA sense strand
gcauauauuuaaccagaac

SEQ ID NO: 890517 - RNA, 19 nt, Homo sapiens
  misc_RNA (1)...(19): siRNA sense strand
uagacaggauaguaagaaa

SEQ ID NO: 890518 - RNA, 19 nt, Homo sapiens
  misc_RNA (1)...(19): siRNA sense strand
caaagaaagggaacgugaa

SEQ ID NO: 890519 - RNA, 19 nt, Homo sapiens
  misc_RNA (1)...(19): siRNA sense strand
agaagagaacuccaaauga

SEQ ID NO: 890520 - RNA, 19 nt, Homo sapiens
  misc_RNA (1)...(19): siRNA sense strand
aagaagagaacuccaaaug

SEQ ID NO: 890521 - RNA, 19 nt, Homo sapiens
  misc_RNA (1)...(19): siRNA sense strand
acggugaugugguuaauga

SEQ ID NO: 890522 - RNA, 19 nt, Homo sapiens
  misc_RNA (1)...(19): siRNA sense strand
agauaugucuacaauggaa

SEQ ID NO: 890523 - RNA, 19 nt, Homo sapiens
  misc_RNA (1)...(19): siRNA sense strand
gaagaugagaggagugaca

SEQ ID NO: 890524 - RNA, 19 nt, Homo sapiens
  misc_RNA (1)...(19): siRNA sense strand
cuaaagaacaagagaggaa

SEQ ID NO: 890525 - RNA, 19 nt, Homo sapiens
  misc_RNA (1)...(19): siRNA sense strand
gagagacguagaaguagaa

SEQ ID NO: 890526 - RNA, 19 nt, Homo sapiens
  misc_RNA (1)...(19): siRNA sense strand
gauaacagauagcacauua

SEQ ID NO: 890527 - RNA, 19 nt, Homo sapiens
  misc_RNA (1)...(19): siRNA sense strand
ggcaagauguucucaauua

SEQ ID NO: 890528 - RNA, 19 nt, Homo sapiens
  misc_RNA (1)...(19): siRNA sense strand
ggaagaguguguucagaua

SEQ ID NO: 890529 - RNA, 19 nt, Homo sapiens
  misc_RNA (1)...(19): siRNA sense strand
gcacgcagcuagaagauga

SEQ ID NO: 890530 - RNA, 19 nt, Homo sapiens
  misc_RNA (1)...(19): siRNA sense strand
gcaagauguucucaauuaa

SEQ ID NO: 890531 - RNA, 19 nt, Homo sapiens
  misc_RNA (1)...(19): siRNA sense strand
gcagcgaauugaccuauuu

SEQ ID NO: 890532 - RNA, 19 nt, Homo sapiens
  misc_RNA (1)...(19): siRNA sense strand
gaacuccuguuacggauau

SEQ ID NO: 890533 - RNA, 19 nt, Homo sapiens
  misc_RNA (1)...(19): siRNA sense strand
cuaaauggguguacaaaga

SEQ ID NO: 890534 - RNA, 19 nt, Homo sapiens
  misc_RNA (1)...(19): siRNA sense strand
gcccugaacuggugacuuu

SEQ ID NO: 890535 - RNA, 19 nt, Homo sapiens
  misc_RNA (1)...(19): siRNA sense strand
gaaggucucauuacuauau

SEQ ID NO: 890536 - RNA, 19 nt, Homo sapiens
  misc_RNA (1)...(19): siRNA sense strand
ucucaaggccuuauucuua

SEQ ID NO: 890537 - RNA, 19 nt, Homo sapiens
  misc_RNA (1)...(19): siRNA sense strand
gaauugccaugaacuugaa

SEQ ID NO: 890538 - RNA, 19 nt, Homo sapiens
  misc_RNA (1)...(19): siRNA sense strand
guacuagccuuagcaaguu

SEQ ID NO: 890539 - RNA, 19 nt, Homo sapiens
  misc_RNA (1)...(19): siRNA sense strand
gcacauuaauccaacuuuc

SEQ ID NO: 890540 - RNA, 19 nt, Homo sapiens
  misc_RNA (1)...(19): siRNA sense strand
cgaauugaccuauuugauu

SEQ ID NO: 890541 - RNA, 19 nt, Homo sapiens
  misc_RNA (1)...(19): siRNA sense strand
gggagacaaugcauuaaga

SEQ ID NO: 890542 - RNA, 19 nt, Homo sapiens
  misc_RNA (1)...(19): siRNA sense strand
gcacaaaacugcaggaaca

SEQ ID NO: 890543 - RNA, 19 nt, Homo sapiens
  misc_RNA (1)...(19): siRNA sense strand
gaacauugaaguacugaau

SEQ ID NO: 890544 - RNA, 19 nt, Homo sapiens
  misc_RNA (1)...(19): siRNA sense strand
gaagaguguguucagauaa

SEQ ID NO: 890545 - RNA, 19 nt, Homo sapiens
  misc_RNA (1)...(19): siRNA sense strand
ccaaagaacuccuguuacg

SEQ ID NO: 890546 - RNA, 19 nt, Homo sapiens
  misc_RNA (1)...(19): siRNA sense strand
ggaauugccaugaacuuga

SEQ ID NO: 890547 - RNA, 19 nt, Homo sapiens
  misc_RNA (1)...(19): siRNA sense strand
agacagcgcuucugcagau

SEQ ID NO: 890548 - RNA, 19 nt, Homo sapiens
  misc_RNA (1)...(19): siRNA sense strand
uuacgaaaguuaagucuuc

SEQ ID NO: 890549 - RNA, 19 nt, Homo sapiens
  misc_RNA (1)...(19): siRNA sense strand
ggacaacugcccacuaauc

SEQ ID NO: 890550 - RNA, 19 nt, Homo sapiens
  misc_RNA (1)...(19): siRNA sense strand
ugagggauguccacuguug

SEQ ID NO: 890551 - RNA, 19 nt, Homo sapiens
  misc_RNA (1)...(19): siRNA sense strand
gcaaaucacagaugaaggu

SEQ ID NO: 890552 - RNA, 19 nt, Homo sapiens
  misc_RNA (1)...(19): siRNA sense strand
ugacuuggcuuccuguaca

SEQ ID NO: 890553 - RNA, 19 nt, Homo sapiens
  misc_RNA (1)...(19): siRNA sense strand
ggacccauuuacccaauau

SEQ ID NO: 890554 - RNA, 19 nt, Homo sapiens
  misc_RNA (1)...(19): siRNA sense strand
ugauugagcuggacaacug

SEQ ID NO: 890555 - RNA, 19 nt, Homo sapiens
  misc_RNA (1)...(19): siRNA sense strand
caacagacgcuacauguac

SEQ ID NO: 890556 - RNA, 19 nt, Homo sapiens
  misc_RNA (1)...(19): siRNA sense strand
uaacagaugugggcuuuac

SEQ ID NO: 890557 - RNA, 19 nt, Homo sapiens
  misc_RNA (1)...(19): siRNA sense strand
gcccacggcuuagaauauu

SEQ ID NO: 890558 - RNA, 19 nt, Homo sapiens
  misc_RNA (1)...(19): siRNA sense strand
cagagggugccauaaguua

SEQ ID NO: 890559 - RNA, 19 nt, Homo sapiens
  misc_RNA (1)...(19): siRNA sense strand
aaauagugaugaagcugua

SEQ ID NO: 890560 - RNA, 19 nt, Homo sapiens
  misc_RNA (1)...(19): siRNA sense strand
gaugaagcuguaaucaaua

SEQ ID NO: 890561 - RNA, 19 nt, Homo sapiens
  misc_RNA (1)...(19): siRNA sense strand
gcaggaacauugaaguacu

SEQ ID NO: 890562 - RNA, 19 nt, Homo sapiens
  misc_RNA (1)...(19): siRNA sense strand
cucaaggccuuauucuuaa

SEQ ID NO: 890563 - RNA, 19 nt, Homo sapiens
  misc_RNA (1)...(19): siRNA sense strand
cuggacaacugcccacuaa

SEQ ID NO: 890564 - RNA, 19 nt, Homo sapiens
  misc_RNA (1)...(19): siRNA sense strand
ggagacaaugcauuaagaa

SEQ ID NO: 890565 - RNA, 19 nt, Homo sapiens
  misc_RNA (1)...(19): siRNA sense strand
agaugaagcucucaaguac

SEQ ID NO: 890566 - RNA, 19 nt, Homo sapiens
  misc_RNA (1)...(19): siRNA sense strand
ggauggcauucaagcacua

SEQ ID NO: 890567 - RNA, 19 nt, Homo sapiens
  misc_RNA (1)...(19): siRNA sense strand
gaaguacugaaucuaaaug

SEQ ID NO: 890568 - RNA, 19 nt, Homo sapiens
  misc_RNA (1)...(19): siRNA sense strand
ucccaaagaacuccuguua

SEQ ID NO: 890569 - RNA, 19 nt, Homo sapiens
  misc_RNA (1)...(19): siRNA sense strand
gcagagggugccauaaguu

SEQ ID NO: 890570 - RNA, 19 nt, Homo sapiens
  misc_RNA (1)...(19): siRNA sense strand
aagaugaagcucucaagua

SEQ ID NO: 890571 - RNA, 19 nt, Homo sapiens
  misc_RNA (1)...(19): siRNA sense strand
gagcagguuugagauguuc

SEQ ID NO: 890572 - RNA, 19 nt, Homo sapiens
  misc_RNA (1)...(19): siRNA sense strand
gcuugcaaaucacagauga

SEQ ID NO: 890573 - RNA, 19 nt, Homo sapiens
  misc_RNA (1)...(19): siRNA sense strand
gacaacagacgcuacaugu

SEQ ID NO: 890574 - RNA, 19 nt, Homo sapiens
  misc_RNA (1)...(19): siRNA sense strand
ucaaggccuuauucuuaaa

SEQ ID NO: 890575 - RNA, 19 nt, Homo sapiens
  misc_RNA (1)...(19): siRNA sense strand
cagaacugcccacggcuua

SEQ ID NO: 890576 - RNA, 19 nt, Homo sapiens
  misc_RNA (1)...(19): siRNA sense strand
gaagaugaagcucucaagu

SEQ ID NO: 890577 - RNA, 19 nt, Homo sapiens
  misc_RNA (1)...(19): siRNA sense strand
gacaacugcccacuaauca

SEQ ID NO: 890578 - RNA, 19 nt, Homo sapiens
  misc_RNA (1)...(19): siRNA sense strand
gaacugcccacggcuuaga

SEQ ID NO: 890579 - RNA, 19 nt, Homo sapiens
  misc_RNA (1)...(19): siRNA sense strand
guggcaagauguucucaau

SEQ ID NO: 890580 - RNA, 19 nt, Homo sapiens
  misc_RNA (1)...(19): siRNA sense strand
guucucaaauagugaugaa

SEQ ID NO: 890581 - RNA, 19 nt, Homo sapiens
  misc_RNA (1)...(19): siRNA sense strand
gccgaguaguggagaauau

SEQ ID NO: 890582 - RNA, 19 nt, Homo sapiens
  misc_RNA (1)...(19): siRNA sense strand
ugaaugcucuaggucagaa

SEQ ID NO: 890583 - RNA, 19 nt, Homo sapiens
  misc_RNA (1)...(19): siRNA sense strand
ggauauugagggccgagua

SEQ ID NO: 890584 - RNA, 19 nt, Homo sapiens
  misc_RNA (1)...(19): siRNA sense strand
caacugcccacuaaucaca

SEQ ID NO: 890585 - RNA, 19 nt, Homo sapiens
  misc_RNA (1)...(19): siRNA sense strand
uuggagcaguugaacauuu

SEQ ID NO: 890586 - RNA, 19 nt, Homo sapiens
  misc_RNA (1)...(19): siRNA sense strand
gacaaugcauuaagaaccu

SEQ ID NO: 890587 - RNA, 19 nt, Homo sapiens
  misc_RNA (1)...(19): siRNA sense strand
gaaucuaaauggguguaca

SEQ ID NO: 890588 - RNA, 19 nt, Homo sapiens
  misc_RNA (1)...(19): siRNA sense strand
ccaacuuucuauacacugu

SEQ ID NO: 890589 - RNA, 19 nt, Homo sapiens
  misc_RNA (1)...(19): siRNA sense strand
caagagcagguuugagaug

SEQ ID NO: 890590 - RNA, 19 nt, Homo sapiens
  misc_RNA (1)...(19): siRNA sense strand
gagacucaggacccauuua

SEQ ID NO: 890591 - RNA, 19 nt, Homo sapiens
  misc_RNA (1)...(19): siRNA sense strand
cgaguaguggagaauauuu

SEQ ID NO: 890592 - RNA, 19 nt, Homo sapiens
  misc_RNA (1)...(19): siRNA sense strand
gccaugaacuugaaaagau

SEQ ID NO: 890593 - RNA, 19 nt, Homo sapiens
  misc_RNA (1)...(19): siRNA sense strand
aaccaaggauggcauucaa

SEQ ID NO: 890594 - RNA, 19 nt, Homo sapiens
  misc_RNA (1)...(19): siRNA sense strand
guaacuggcagcgaauuga

SEQ ID NO: 890595 - RNA, 19 nt, Homo sapiens
  misc_RNA (1)...(19): siRNA sense strand
acacuguccucgacuucaa

SEQ ID NO: 890596 - RNA, 19 nt, Homo sapiens
  misc_RNA (1)...(19): siRNA sense strand
gaacuggugacuuugaacu

SEQ ID NO: 890597 - RNA, 19 nt, Homo sapiens
  misc_RNA (1)...(19): siRNA sense strand
agugggagacaaugcauua

SEQ ID NO: 890598 - RNA, 19 nt, Homo sapiens
  misc_RNA (1)...(19): siRNA sense strand
ggaaguggcaagauguucu

SEQ ID NO: 890599 - RNA, 19 nt, Homo sapiens
  misc_RNA (1)...(19): siRNA sense strand
uauuggaaguggcaagaug

SEQ ID NO: 890600 - RNA, 19 nt, Homo sapiens
  misc_RNA (1)...(19): siRNA sense strand
gaagcucucaaguacauag

SEQ ID NO: 890601 - RNA, 19 nt, Homo sapiens
  misc_RNA (1)...(19): siRNA sense strand
gcgaauugaccuauuugau

SEQ ID NO: 890602 - RNA, 19 nt, Homo sapiens
  misc_RNA (1)...(19): siRNA sense strand
caggaacauugaaguacug

SEQ ID NO: 890603 - RNA, 19 nt, Homo sapiens
  misc_RNA (1)...(19): siRNA sense strand
uggagcaguugaacauuuc

SEQ ID NO: 890604 - RNA, 19 nt, Homo sapiens
  misc_RNA (1)...(19): siRNA sense strand
acagauagcacauuaaucc

SEQ ID NO: 890605 - RNA, 19 nt, Homo sapiens
  misc_RNA (1)...(19): siRNA sense strand
ggcagcgaauugaccuauu

SEQ ID NO: 890606 - RNA, 19 nt, Homo sapiens
  misc_RNA (1)...(19): siRNA sense strand
gggcuggaaucaagagacu

SEQ ID NO: 890607 - RNA, 19 nt, Homo sapiens
  misc_RNA (1)...(19): siRNA sense strand
acccauuuacccaauauua

SEQ ID NO: 890608 - RNA, 19 nt, Homo sapiens
  misc_RNA (1)...(19): siRNA sense strand
acaacagacgcuacaugua

SEQ ID NO: 890609 - RNA, 19 nt, Homo sapiens
  misc_RNA (1)...(19): siRNA sense strand
cccauuuacccaauauuaa

SEQ ID NO: 890610 - RNA, 19 nt, Homo sapiens
  misc_RNA (1)...(19): siRNA sense strand
cacacgggcuggaaucaag

SEQ ID NO: 890611 - RNA, 19 nt, Homo sapiens
  misc_RNA (1)...(19): siRNA sense strand
uuaccacucuagccaggaa

SEQ ID NO: 890612 - RNA, 19 nt, Homo sapiens
  misc_RNA (1)...(19): siRNA sense strand
auuaacagaugugggcuuu

SEQ ID NO: 890613 - RNA, 19 nt, Homo sapiens
  misc_RNA (1)...(19): siRNA sense strand
aaacaugucucuaaaagcu

SEQ ID NO: 890614 - RNA, 19 nt, Homo sapiens
  misc_RNA (1)...(19): siRNA sense strand
guuaagucuucguggaugu

SEQ ID NO: 890615 - RNA, 19 nt, Homo sapiens
  misc_RNA (1)...(19): siRNA sense strand
caaaucacacgggcuggaa

SEQ ID NO: 890616 - RNA, 19 nt, Homo sapiens
  misc_RNA (1)...(19): siRNA sense strand
guucucaauuaacagaugu

SEQ ID NO: 890617 - RNA, 19 nt, Homo sapiens
  misc_RNA (1)...(19): siRNA sense strand
cauaaguuacaaucccuuu

SEQ ID NO: 890618 - RNA, 19 nt, Homo sapiens
  misc_RNA (1)...(19): siRNA sense strand
acauugaaguacugaaucu

SEQ ID NO: 890619 - RNA, 19 nt, Homo sapiens
  misc_RNA (1)...(19): siRNA sense strand
aagagcagguuugagaugu

SEQ ID NO: 890620 - RNA, 19 nt, Homo sapiens
  misc_RNA (1)...(19): siRNA sense strand
gauauugagggccgaguag

SEQ ID NO: 890621 - RNA, 19 nt, Homo sapiens
  misc_RNA (1)...(19): siRNA sense strand
augaagcucucaaguacau

SEQ ID NO: 890622 - RNA, 19 nt, Homo sapiens
  misc_RNA (1)...(19): siRNA sense strand
gagggugccauaaguuaca

SEQ ID NO: 890623 - RNA, 19 nt, Homo sapiens
  misc_RNA (1)...(19): siRNA sense strand
gcuggaaucaagagacuca

SEQ ID NO: 890624 - RNA, 19 nt, Homo sapiens
  misc_RNA (1)...(19): siRNA sense strand
ucauagccuugagcggaua

SEQ ID NO: 890625 - RNA, 19 nt, Homo sapiens
  misc_RNA (1)...(19): siRNA sense strand
caagauguucucaauuaac

SEQ ID NO: 890626 - RNA, 19 nt, Homo sapiens
  misc_RNA (1)...(19): siRNA sense strand
gcaaggaguugguguugau

SEQ ID NO: 890627 - RNA, 19 nt, Homo sapiens
  misc_RNA (1)...(19): siRNA sense strand
ccaaagaagaggaggagua

SEQ ID NO: 890628 - RNA, 19 nt, Homo sapiens
  misc_RNA (1)...(19): siRNA sense strand
aagaagaggaggaguauuu

SEQ ID NO: 890629 - RNA, 19 nt, Homo sapiens
  misc_RNA (1)...(19): siRNA sense strand
ggauggggauguugaauuu

SEQ ID NO: 890630 - RNA, 19 nt, Homo sapiens
  misc_RNA (1)...(19): siRNA sense strand
ggacgcugguggacggauu

SEQ ID NO: 890631 - RNA, 19 nt, Homo sapiens
  misc_RNA (1)...(19): siRNA sense strand
caaagaagaggaggaguau

SEQ ID NO: 890632 - RNA, 19 nt, Homo sapiens
  misc_RNA (1)...(19): siRNA sense strand
caccaccuguaaucuacua

SEQ ID NO: 890633 - RNA, 19 nt, Homo sapiens
  misc_RNA (1)...(19): siRNA sense strand
ggaggaguauuugcuucga

SEQ ID NO: 890634 - RNA, 19 nt, Homo sapiens
  misc_RNA (1)...(19): siRNA sense strand
guauuugcuucgacagguu

SEQ ID NO: 890635 - RNA, 19 nt, Homo sapiens
  misc_RNA (1)...(19): siRNA sense strand
ugacuucaucuccaaagaa

SEQ ID NO: 890636 - RNA, 19 nt, Homo sapiens
  misc_RNA (1)...(19): siRNA sense strand
caccuguaaucuacuaugu

SEQ ID NO: 890637 - RNA, 19 nt, Homo sapiens
  misc_RNA (1)...(19): siRNA sense strand
ugucaaaccucagccucuu

SEQ ID NO: 890638 - RNA, 19 nt, Homo sapiens
  misc_RNA (1)...(19): siRNA sense strand
ggcaccaccuguaaucuac

SEQ ID NO: 890639 - RNA, 19 nt, Homo sapiens
  misc_RNA (1)...(19): siRNA sense strand
cuaugucccugacuucauc

SEQ ID NO: 890640 - RNA, 19 nt, Homo sapiens
  misc_RNA (1)...(19): siRNA sense strand
ucuacuaugucccugacuu

SEQ ID NO: 890641 - RNA, 19 nt, Homo sapiens
  misc_RNA (1)...(19): siRNA sense strand
gaagaggaggaguauuugc

SEQ ID NO: 890642 - RNA, 19 nt, Homo sapiens
  misc_RNA (1)...(19): siRNA sense strand
ggauugggugcaaggaguu

SEQ ID NO: 890643 - RNA, 19 nt, Homo sapiens
  misc_RNA (1)...(19): siRNA sense strand
gugcaaggaguugguguug

SEQ ID NO: 890644 - RNA, 19 nt, Homo sapiens
  misc_RNA (1)...(19): siRNA sense strand
agaagaggaggaguauuug

SEQ ID NO: 890645 - RNA, 19 nt, Homo sapiens
  misc_RNA (1)...(19): siRNA sense strand
gcgcuacguggacaaagug

SEQ ID NO: 890646 - RNA, 19 nt, Homo sapiens
  misc_RNA (1)...(19): siRNA sense strand
gcaaggaguugguguugau

SEQ ID NO: 890647 - RNA, 19 nt, Homo sapiens
  misc_RNA (1)...(19): siRNA sense strand
ccaaagaagaggaggagua

SEQ ID NO: 890648 - RNA, 19 nt, Homo sapiens
  misc_RNA (1)...(19): siRNA sense strand
aagaagaggaggaguauuu

SEQ ID NO: 890649 - RNA, 19 nt, Homo sapiens
  misc_RNA (1)...(19): siRNA sense strand
ggauggggauguugaauuu

SEQ ID NO: 890650 - RNA, 19 nt, Homo sapiens
  misc_RNA (1)...(19): siRNA sense strand
ggacgcugguggacggauu

SEQ ID NO: 890651 - RNA, 19 nt, Homo sapiens
  misc_RNA (1)...(19): siRNA sense strand
caaagaagaggaggaguau

SEQ ID NO: 890652 - RNA, 19 nt, Homo sapiens
  misc_RNA (1)...(19): siRNA sense strand
acaccgugcuggacuucua

SEQ ID NO: 890653 - RNA, 19 nt, Homo sapiens
  misc_RNA (1)...(19): siRNA sense strand
caccaccuguaaucuacua

SEQ ID NO: 890654 - RNA, 19 nt, Homo sapiens
  misc_RNA (1)...(19): siRNA sense strand
ggaggaguauuugcuucga

SEQ ID NO: 890655 - RNA, 19 nt, Homo sapiens
  misc_RNA (1)...(19): siRNA sense strand
guauuugcuucgacagguu

SEQ ID NO: 890656 - RNA, 19 nt, Homo sapiens
  misc_RNA (1)...(19): siRNA sense strand
ugacuucaucuccaaagaa

SEQ ID NO: 890657 - RNA, 19 nt, Homo sapiens
  misc_RNA (1)...(19): siRNA sense strand
caccuguaaucuacuaugu

SEQ ID NO: 890658 - RNA, 19 nt, Homo sapiens
  misc_RNA (1)...(19): siRNA sense strand
ugucaaaccucagccucuu

SEQ ID NO: 890659 - RNA, 19 nt, Homo sapiens
  misc_RNA (1)...(19): siRNA sense strand
ggcaccaccuguaaucuac

SEQ ID NO: 890660 - RNA, 19 nt, Homo sapiens
  misc_RNA (1)...(19): siRNA sense strand
cuaugucccugacuucauc

SEQ ID NO: 890661 - RNA, 19 nt, Homo sapiens
  misc_RNA (1)...(19): siRNA sense strand
cuaaccauguccucgugaa

SEQ ID NO: 890662 - RNA, 19 nt, Homo sapiens
  misc_RNA (1)...(19): siRNA sense strand
ucuacuaugucccugacuu

SEQ ID NO: 890663 - RNA, 19 nt, Homo sapiens
  misc_RNA (1)...(19): siRNA sense strand
gaagaggaggaguauuugc

SEQ ID NO: 890664 - RNA, 19 nt, Homo sapiens
  misc_RNA (1)...(19): siRNA sense strand
ggauugggugcaaggaguu

SEQ ID NO: 890665 - RNA, 19 nt, Homo sapiens
  misc_RNA (1)...(19): siRNA sense strand
gugcaaggaguugguguug

SEQ ID NO: 890666 - RNA, 19 nt, Homo sapiens
  misc_RNA (1)...(19): siRNA sense strand
agaagaggaggaguauuug

SEQ ID NO: 890667 - RNA, 19 nt, Homo sapiens
  misc_RNA (1)...(19): siRNA sense strand
gcgcuacguggacaaagug

SEQ ID NO: 890668 - RNA, 19 nt, Homo sapiens
  misc_RNA (1)...(19): siRNA sense strand
caagcuggaugaccucuuu

SEQ ID NO: 890669 - RNA, 19 nt, Homo sapiens
  misc_RNA (1)...(19): siRNA sense strand
gaacaucaccucgaccauu

SEQ ID NO: 890670 - RNA, 19 nt, Homo sapiens
  misc_RNA (1)...(19): siRNA sense strand
caaugucgaugcuuucaug

SEQ ID NO: 890671 - RNA, 19 nt, Homo sapiens
  misc_RNA (1)...(19): siRNA sense strand
gaacauccgccuggccaaa

SEQ ID NO: 890672 - RNA, 19 nt, Homo sapiens
  misc_RNA (1)...(19): siRNA sense strand
gcggugagccauucaguga

SEQ ID NO: 890673 - RNA, 19 nt, Homo sapiens
  misc_RNA (1)...(19): siRNA sense strand
gaacagccugaucauccua

SEQ ID NO: 890674 - RNA, 19 nt, Homo sapiens
  misc_RNA (1)...(19): siRNA sense strand
aacaucaccucgaccauug

SEQ ID NO: 890675 - RNA, 19 nt, Homo sapiens
  misc_RNA (1)...(19): siRNA sense strand
caaggccggugggaauuuc

SEQ ID NO: 890676 - RNA, 19 nt, Homo sapiens
  misc_RNA (1)...(19): siRNA sense strand
ccacggacgcauagacaau

SEQ ID NO: 890677 - RNA, 19 nt, Homo sapiens
  misc_RNA (1)...(19): siRNA sense strand
ccaaggccggugggaauuu

SEQ ID NO: 890678 - RNA, 19 nt, Homo sapiens
  misc_RNA (1)...(19): siRNA sense strand
cuggaugaccucuuuguga

SEQ ID NO: 890679 - RNA, 19 nt, Homo sapiens
  misc_RNA (1)...(19): siRNA sense strand
ugucgaugcuuucaugaac

SEQ ID NO: 890680 - RNA, 19 nt, Homo sapiens
  misc_RNA (1)...(19): siRNA sense strand
ugaaggagcggaccaucuc

SEQ ID NO: 890681 - RNA, 19 nt, Homo sapiens
  misc_RNA (1)...(19): siRNA sense strand
caucgggugcgaaacuuug

SEQ ID NO: 890682 - RNA, 19 nt, Homo sapiens
  misc_RNA (1)...(19): siRNA sense strand
ucugagaacagccugauca

SEQ ID NO: 890683 - RNA, 19 nt, Homo sapiens
  misc_RNA (1)...(19): siRNA sense strand
ggaagugcauuucaagauc

SEQ ID NO: 890684 - RNA, 19 nt, Homo sapiens
  misc_RNA (1)...(19): siRNA sense strand
gcaaagaaggaauaucuga

SEQ ID NO: 890685 - RNA, 19 nt, Homo sapiens
  misc_RNA (1)...(19): siRNA sense strand
ccaagaacccgaagaagaa

SEQ ID NO: 890686 - RNA, 19 nt, Homo sapiens
  misc_RNA (1)...(19): siRNA sense strand
ggaaguggcugccuaugac

SEQ ID NO: 890687 - RNA, 19 nt, Homo sapiens
  misc_RNA (1)...(19): siRNA sense strand
caacgaagacuaugagauc

SEQ ID NO: 890688 - RNA, 19 nt, Homo sapiens
  misc_RNA (1)...(19): siRNA sense strand
gaagugcauuucaagaucu

SEQ ID NO: 890689 - RNA, 19 nt, Homo sapiens
  misc_RNA (1)...(19): siRNA sense strand
gaacaacgaagacuaugag

SEQ ID NO: 890690 - RNA, 19 nt, Homo sapiens
  misc_RNA (1)...(19): siRNA sense strand
gccaagaacccgaagaaga

SEQ ID NO: 890691 - RNA, 19 nt, Homo sapiens
  misc_RNA (1)...(19): siRNA sense strand
gaagacagaagcagcaaag

SEQ ID NO: 890692 - RNA, 19 nt, Homo sapiens
  misc_RNA (1)...(19): siRNA sense strand
gggcuagccucgucuccaa

SEQ ID NO: 890693 - RNA, 19 nt, Homo sapiens
  misc_RNA (1)...(19): siRNA sense strand
caaagaaggaauaucugaa

SEQ ID NO: 890694 - RNA, 19 nt, Homo sapiens
  misc_RNA (1)...(19): siRNA sense strand
cagcaaagaaggaauaucu

SEQ ID NO: 890695 - RNA, 19 nt, Homo sapiens
  misc_RNA (1)...(19): siRNA sense strand
cgagaacaacgaagacuau

SEQ ID NO: 890696 - RNA, 19 nt, Homo sapiens
  misc_RNA (1)...(19): siRNA sense strand
gacagaagcagcaaagaag

SEQ ID NO: 890697 - RNA, 19 nt, Homo sapiens
  misc_RNA (1)...(19): siRNA sense strand
agacagaagcagcaaagaa

SEQ ID NO: 890698 - RNA, 19 nt, Homo sapiens
  misc_RNA (1)...(19): siRNA sense strand
caagagcacucaggcaaac

SEQ ID NO: 890699 - RNA, 19 nt, Homo sapiens
  misc_RNA (1)...(19): siRNA sense strand
ccaagcagcccauguaugc

SEQ ID NO: 890700 - RNA, 19 nt, Homo sapiens
  misc_RNA (1)...(19): siRNA sense strand
gcgagaacaacgaagacua

SEQ ID NO: 890701 - RNA, 19 nt, Homo sapiens
  misc_RNA (1)...(19): siRNA sense strand
ggacuucccgcacaucucu

SEQ ID NO: 890702 - RNA, 19 nt, Homo sapiens
  misc_RNA (1)...(19): siRNA sense strand
gaacagaagcaggccuaca

SEQ ID NO: 890703 - RNA, 19 nt, Homo sapiens
  misc_RNA (1)...(19): siRNA sense strand
aagcagcaaagaaggaaua

SEQ ID NO: 890704 - RNA, 19 nt, Homo sapiens
  misc_RNA (1)...(19): siRNA sense strand
ggaccucccagccaucaug

SEQ ID NO: 890705 - RNA, 19 nt, Homo sapiens
  misc_RNA (1)...(19): siRNA sense strand
ccaagagcacucaggcaaa

SEQ ID NO: 890706 - RNA, 19 nt, Homo sapiens
  misc_RNA (1)...(19): siRNA sense strand
ggacagccugggagaggaa

SEQ ID NO: 890707 - RNA, 19 nt, Homo sapiens
  misc_RNA (1)...(19): siRNA sense strand
caaccagccagaccuacaa

SEQ ID NO: 890708 - RNA, 19 nt, Homo sapiens
  misc_RNA (1)...(19): siRNA sense strand
ggaagacagaagcagcaaa

SEQ ID NO: 890709 - RNA, 19 nt, Homo sapiens
  misc_RNA (1)...(19): siRNA sense strand
ggaagaggagucggaagug

SEQ ID NO: 890710 - RNA, 19 nt, Homo sapiens
  misc_RNA (1)...(19): siRNA sense strand
gaucaaggugagaccaaga

SEQ ID NO: 890711 - RNA, 19 nt, Homo sapiens
  misc_RNA (1)...(19): siRNA sense strand
cggaaguggcugccuauga

SEQ ID NO: 890712 - RNA, 19 nt, Homo sapiens
  misc_RNA (1)...(19): siRNA sense strand
cacccaagcagcccaugua

SEQ ID NO: 890713 - RNA, 19 nt, Homo sapiens
  misc_RNA (1)...(19): siRNA sense strand
agucggaagugcauuucaa

SEQ ID NO: 890714 - RNA, 19 nt, Homo sapiens
  misc_RNA (1)...(19): siRNA sense strand
aaagaaggaauaucugaag

SEQ ID NO: 890715 - RNA, 19 nt, Homo sapiens
  misc_RNA (1)...(19): siRNA sense strand
acccagagcuccugucaac

SEQ ID NO: 890716 - RNA, 19 nt, Homo sapiens
  misc_RNA (1)...(19): siRNA sense strand
aaaagaaggaccccaauga

SEQ ID NO: 890717 - RNA, 19 nt, Homo sapiens
  misc_RNA (1)...(19): siRNA sense strand
ggcaaacccaccagccaaa

SEQ ID NO: 890718 - RNA, 19 nt, Homo sapiens
  misc_RNA (1)...(19): siRNA sense strand
ggccuacgcacucuucuuc

SEQ ID NO: 890719 - RNA, 19 nt, Homo sapiens
  misc_RNA (1)...(19): siRNA sense strand
ccagagcuccugucaacca

SEQ ID NO: 890720 - RNA, 19 nt, Homo sapiens
  misc_RNA (1)...(19): siRNA sense strand
ccagagcgagaacaacgaa

SEQ ID NO: 890721 - RNA, 19 nt, Homo sapiens
  misc_RNA (1)...(19): siRNA sense strand
cagaagcagcaaagaagga

SEQ ID NO: 890722 - RNA, 19 nt, Homo sapiens
  misc_RNA (1)...(19): siRNA sense strand
cggaagugcauuucaagau

SEQ ID NO: 890723 - RNA, 19 nt, Homo sapiens
  misc_RNA (1)...(19): siRNA sense strand
agaacaacgaagacuauga

SEQ ID NO: 890724 - RNA, 19 nt, Homo sapiens
  misc_RNA (1)...(19): siRNA sense strand
cagaagcaggccuacaaga

SEQ ID NO: 890725 - RNA, 19 nt, Homo sapiens
  misc_RNA (1)...(19): siRNA sense strand
aacagaagcaggccuacaa

SEQ ID NO: 890726 - RNA, 19 nt, Homo sapiens
  misc_RNA (1)...(19): siRNA sense strand
gagaacaacgaagacuaug

SEQ ID NO: 890727 - RNA, 19 nt, Homo sapiens
  misc_RNA (1)...(19): siRNA sense strand
gcuagccucgucuccaaga

SEQ ID NO: 890728 - RNA, 19 nt, Homo sapiens
  misc_RNA (1)...(19): siRNA sense strand
ccuacaagaggaagacaga

SEQ ID NO: 890729 - RNA, 19 nt, Homo sapiens
  misc_RNA (1)...(19): siRNA sense strand
agaagcaggccuacaagag

SEQ ID NO: 890730 - RNA, 19 nt, Homo sapiens
  misc_RNA (1)...(19): siRNA sense strand
gagaagaacuugcucuaug

SEQ ID NO: 890731 - RNA, 19 nt, Homo sapiens
  misc_RNA (1)...(19): siRNA sense strand
ggccggagcugaaauuuaa

SEQ ID NO: 890732 - RNA, 19 nt, Homo sapiens
  misc_RNA (1)...(19): siRNA sense strand
ccacugaaguccacugaga

SEQ ID NO: 890733 - RNA, 19 nt, Homo sapiens
  misc_RNA (1)...(19): siRNA sense strand
agaagaacuugcucuauga

SEQ ID NO: 890734 - RNA, 19 nt, Homo sapiens
  misc_RNA (1)...(19): siRNA sense strand
caagggagccucuuucuca

SEQ ID NO: 890735 - RNA, 19 nt, Homo sapiens
  misc_RNA (1)...(19): siRNA sense strand
gaaucacucuaccuucuug

SEQ ID NO: 890736 - RNA, 19 nt, Homo sapiens
  misc_RNA (1)...(19): siRNA sense strand
agacaagggucaccaagga

SEQ ID NO: 890737 - RNA, 19 nt, Homo sapiens
  misc_RNA (1)...(19): siRNA sense strand
cagcagaucuuccgcucuu

SEQ ID NO: 890738 - RNA, 19 nt, Homo sapiens
  misc_RNA (1)...(19): siRNA sense strand
gcaagcuucugucccaguu

SEQ ID NO: 890739 - RNA, 19 nt, Homo sapiens
  misc_RNA (1)...(19): siRNA sense strand
caaggucccugacaacaag

SEQ ID NO: 890740 - RNA, 19 nt, Homo sapiens
  misc_RNA (1)...(19): siRNA sense strand
cagcgaggaugcccuauca

SEQ ID NO: 890741 - RNA, 19 nt, Homo sapiens
  misc_RNA (1)...(19): siRNA sense strand
cccaacaggugaugccaua

SEQ ID NO: 890742 - RNA, 19 nt, Homo sapiens
  misc_RNA (1)...(19): siRNA sense strand
gccgagacuucgaaacaaa

SEQ ID NO: 890743 - RNA, 19 nt, Homo sapiens
  misc_RNA (1)...(19): siRNA sense strand
acaagaaugugcuggacaa

SEQ ID NO: 890744 - RNA, 19 nt, Homo sapiens
  misc_RNA (1)...(19): siRNA sense strand
cauccaaggucccugacaa

SEQ ID NO: 890745 - RNA, 19 nt, Homo sapiens
  misc_RNA (1)...(19): siRNA sense strand
ggagaggcaccacuugaug

SEQ ID NO: 890746 - RNA, 19 nt, Homo sapiens
  misc_RNA (1)...(19): siRNA sense strand
acaagaacaacccgaagua

SEQ ID NO: 890747 - RNA, 19 nt, Homo sapiens
  misc_RNA (1)...(19): siRNA sense strand
gcagcaggcaggacuguga

SEQ ID NO: 890748 - RNA, 19 nt, Homo sapiens
  misc_RNA (1)...(19): siRNA sense strand
agaggcagcucccaguguu

SEQ ID NO: 890749 - RNA, 19 nt, Homo sapiens
  misc_RNA (1)...(19): siRNA sense strand
gaaguacacagggaauguu

SEQ ID NO: 890750 - RNA, 19 nt, Homo sapiens
  misc_RNA (1)...(19): siRNA sense strand
aaauuuaacgcaccuguga

SEQ ID NO: 890751 - RNA, 19 nt, Homo sapiens
  misc_RNA (1)...(19): siRNA sense strand
gaacaacccgaaguacaca

SEQ ID NO: 890752 - RNA, 19 nt, Homo sapiens
  misc_RNA (1)...(19): siRNA sense strand
acccgcagcugggauguua

SEQ ID NO: 890753 - RNA, 19 nt, Homo sapiens
  misc_RNA (1)...(19): siRNA sense strand
aaacaaaguggaaguggau

SEQ ID NO: 890754 - RNA, 19 nt, Homo sapiens
  misc_RNA (1)...(19): siRNA sense strand
ggaccgcaguaccucuuuc

SEQ ID NO: 890755 - RNA, 19 nt, Homo sapiens
  misc_RNA (1)...(19): siRNA sense strand
ucacgaaucacucuaccuu

SEQ ID NO: 890756 - RNA, 19 nt, Homo sapiens
  misc_RNA (1)...(19): siRNA sense strand
caccaguguucacgaauca

SEQ ID NO: 890757 - RNA, 19 nt, Homo sapiens
  misc_RNA (1)...(19): siRNA sense strand
ccaccaguguucacgaauc

SEQ ID NO: 890758 - RNA, 19 nt, Homo sapiens
  misc_RNA (1)...(19): siRNA sense strand
caacaggugaugccauaca

SEQ ID NO: 890759 - RNA, 19 nt, Homo sapiens
  misc_RNA (1)...(19): siRNA sense strand
gggaauggcauaaacuuuu

SEQ ID NO: 890760 - RNA, 19 nt, Homo sapiens
  misc_RNA (1)...(19): siRNA sense strand
agaaugugcuggacaagac

SEQ ID NO: 890761 - RNA, 19 nt, Homo sapiens
  misc_RNA (1)...(19): siRNA sense strand
ccacugagacauccaaggu

SEQ ID NO: 890762 - RNA, 19 nt, Homo sapiens
  misc_RNA (1)...(19): siRNA sense strand
cuacauguccagccgagaa

SEQ ID NO: 890763 - RNA, 19 nt, Homo sapiens
  misc_RNA (1)...(19): siRNA sense strand
ccaaggucccugacaacaa

SEQ ID NO: 890764 - RNA, 19 nt, Homo sapiens
  misc_RNA (1)...(19): siRNA sense strand
gacaagaacaacccgaagu

SEQ ID NO: 890765 - RNA, 19 nt, Homo sapiens
  misc_RNA (1)...(19): siRNA sense strand
cagccgagacuucgaaaca

SEQ ID NO: 890766 - RNA, 19 nt, Homo sapiens
  misc_RNA (1)...(19): siRNA sense strand
gacgguugcugacaagaac

SEQ ID NO: 890767 - RNA, 19 nt, Homo sapiens
  misc_RNA (1)...(19): siRNA sense strand
acucuaccuucuugcagua

SEQ ID NO: 890768 - RNA, 19 nt, Homo sapiens
  misc_RNA (1)...(19): siRNA sense strand
ggucaagggagccucuuuc

SEQ ID NO: 890769 - RNA, 19 nt, Homo sapiens
  misc_RNA (1)...(19): siRNA sense strand
ccuaauggcaggagaugga

SEQ ID NO: 890770 - RNA, 19 nt, Homo sapiens
  misc_RNA (1)...(19): siRNA sense strand
gaagaacuugcucuaugag

SEQ ID NO: 890771 - RNA, 19 nt, Homo sapiens
  misc_RNA (1)...(19): siRNA sense strand
cgagaagaacuugcucuau

SEQ ID NO: 890772 - RNA, 19 nt, Homo sapiens
  misc_RNA (1)...(19): siRNA sense strand
acgaaucacucuaccuucu

SEQ ID NO: 890773 - RNA, 19 nt, Homo sapiens
  misc_RNA (1)...(19): siRNA sense strand
aauuaucccuacccucaga

SEQ ID NO: 890774 - RNA, 19 nt, Homo sapiens
  misc_RNA (1)...(19): siRNA sense strand
ccgagaagaacuugcucua

SEQ ID NO: 890775 - RNA, 19 nt, Homo sapiens
  misc_RNA (1)...(19): siRNA sense strand
cgaaguacacagggaaugu

SEQ ID NO: 890776 - RNA, 19 nt, Homo sapiens
  misc_RNA (1)...(19): siRNA sense strand
gggcagccgagacuucgaa

SEQ ID NO: 890777 - RNA, 19 nt, Homo sapiens
  misc_RNA (1)...(19): siRNA sense strand
gcagaugggacagcagauc

SEQ ID NO: 890778 - RNA, 19 nt, Homo sapiens
  misc_RNA (1)...(19): siRNA sense strand
ugacgguugcugacaagaa

SEQ ID NO: 890779 - RNA, 19 nt, Homo sapiens
  misc_RNA (1)...(19): siRNA sense strand
aggcaccacuugauggaau

SEQ ID NO: 890780 - RNA, 19 nt, Homo sapiens
  misc_RNA (1)...(19): siRNA sense strand
caggagauggaccgcagua

SEQ ID NO: 890781 - RNA, 19 nt, Homo sapiens
  misc_RNA (1)...(19): siRNA sense strand
gcaggcaggacugugauuc

SEQ ID NO: 890782 - RNA, 19 nt, Homo sapiens
  misc_RNA (1)...(19): siRNA sense strand
cgaaucacucuaccuucuu

SEQ ID NO: 890783 - RNA, 19 nt, Homo sapiens
  misc_RNA (1)...(19): siRNA sense strand
ugaaguccacugagacauc

SEQ ID NO: 890784 - RNA, 19 nt, Homo sapiens
  misc_RNA (1)...(19): siRNA sense strand
aacaggugaugccauacaa

SEQ ID NO: 890785 - RNA, 19 nt, Homo sapiens
  misc_RNA (1)...(19): siRNA sense strand
gaggcagcucccaguguuu

SEQ ID NO: 890786 - RNA, 19 nt, Homo sapiens
  misc_RNA (1)...(19): siRNA sense strand
cuaccuucuugcaguauca

SEQ ID NO: 890787 - RNA, 19 nt, Homo sapiens
  misc_RNA (1)...(19): siRNA sense strand
gugaggaggguugcuguga

SEQ ID NO: 890788 - RNA, 19 nt, Homo sapiens
  misc_RNA (1)...(19): siRNA sense strand
ggcaccacuugauggaaug

SEQ ID NO: 890789 - RNA, 19 nt, Homo sapiens
  misc_RNA (1)...(19): siRNA sense strand
ccagugggaauggcauaaa

SEQ ID NO: 890790 - RNA, 19 nt, Homo sapiens
  misc_RNA (1)...(19): siRNA sense strand
gagauggaccgcaguaccu

SEQ ID NO: 890791 - RNA, 19 nt, Homo sapiens
  misc_RNA (1)...(19): siRNA sense strand
gcagcgaggaugcccuauc

SEQ ID NO: 890792 - RNA, 19 nt, Homo sapiens
  misc_RNA (1)...(19): siRNA sense strand
aagaacaacccgaaguaca

SEQ ID NO: 890793 - RNA, 19 nt, Homo sapiens
  misc_RNA (1)...(19): siRNA sense strand
caagaacaacccgaaguac

SEQ ID NO: 890794 - RNA, 19 nt, Homo sapiens
  misc_RNA (1)...(19): siRNA sense strand
gcccaagaaaccuacaugu

SEQ ID NO: 890795 - RNA, 19 nt, Homo sapiens
  misc_RNA (1)...(19): siRNA sense strand
ccuaggugacuccaacuug

SEQ ID NO: 890796 - RNA, 19 nt, Homo sapiens
  misc_RNA (1)...(19): siRNA sense strand
cagaauaucuugcccuaga

SEQ ID NO: 890797 - RNA, 19 nt, Homo sapiens
  misc_RNA (1)...(19): siRNA sense strand
caugugaacuugccuguga

SEQ ID NO: 890798 - RNA, 19 nt, Homo sapiens
  misc_RNA (1)...(19): siRNA sense strand
gcaaaagcauucgaucuua

SEQ ID NO: 890799 - RNA, 19 nt, Homo sapiens
  misc_RNA (1)...(19): siRNA sense strand
gauguccucuucccucuug

SEQ ID NO: 890800 - RNA, 19 nt, Homo sapiens
  misc_RNA (1)...(19): siRNA sense strand
gaacuuacugaugcucuuu

SEQ ID NO: 890801 - RNA, 19 nt, Homo sapiens
  misc_RNA (1)...(19): siRNA sense strand
gaggucagguggguuaucu

SEQ ID NO: 890802 - RNA, 19 nt, Homo sapiens
  misc_RNA (1)...(19): siRNA sense strand
caaaagcauucgaucuuau

SEQ ID NO: 890803 - RNA, 19 nt, Homo sapiens
  misc_RNA (1)...(19): siRNA sense strand
guggaggucagguggguua

SEQ ID NO: 890804 - RNA, 19 nt, Homo sapiens
  misc_RNA (1)...(19): siRNA sense strand
ucagguggguuaucuucug

SEQ ID NO: 890805 - RNA, 19 nt, Homo sapiens
  misc_RNA (1)...(19): siRNA sense strand
ggucagguggguuaucuuc

SEQ ID NO: 890806 - RNA, 19 nt, Homo sapiens
  misc_RNA (1)...(19): siRNA sense strand
gcuuuaaagacucgauuug

SEQ ID NO: 890807 - RNA, 19 nt, Homo sapiens
  misc_RNA (1)...(19): siRNA sense strand
ugcccuagauguccucuuc

SEQ ID NO: 890808 - RNA, 19 nt, Homo sapiens
  misc_RNA (1)...(19): siRNA sense strand
cuccuucacuggcuucaug

SEQ ID NO: 890809 - RNA, 19 nt, Homo sapiens
  misc_RNA (1)...(19): siRNA sense strand
gagguguacguguuaguca

SEQ ID NO: 890810 - RNA, 19 nt, Homo sapiens
  misc_RNA (1)...(19): siRNA sense strand
agaacuuacugaugcucuu

SEQ ID NO: 890811 - RNA, 19 nt, Homo sapiens
  misc_RNA (1)...(19): siRNA sense strand
ggagguguacguguuaguc

SEQ ID NO: 890812 - RNA, 19 nt, Homo sapiens
  misc_RNA (1)...(19): siRNA sense strand
caaagacgcagcugcaugu

SEQ ID NO: 890813 - RNA, 19 nt, Homo sapiens
  misc_RNA (1)...(19): siRNA sense strand
agagugauguggcccaaau

SEQ ID NO: 890814 - RNA, 19 nt, Homo sapiens
  misc_RNA (1)...(19): siRNA sense strand
ugauguggcccaaauguca

SEQ ID NO: 890815 - RNA, 19 nt, Homo sapiens
  misc_RNA (1)...(19): siRNA sense strand
cagcagugccagugucaga

SEQ ID NO: 890816 - RNA, 19 nt, Homo sapiens
  misc_RNA (1)...(19): siRNA sense strand
cagaagagcuguucacauc

SEQ ID NO: 890817 - RNA, 19 nt, Homo sapiens
  misc_RNA (1)...(19): siRNA sense strand
ggaaucaagugcuaagauc

SEQ ID NO: 890818 - RNA, 19 nt, Homo sapiens
  misc_RNA (1)...(19): siRNA sense strand
ggagccaccugcagcauug

SEQ ID NO: 890819 - RNA, 19 nt, Homo sapiens
  misc_RNA (1)...(19): siRNA sense strand
gaacaauuccacuaucaau

SEQ ID NO: 890820 - RNA, 19 nt, Homo sapiens
  misc_RNA (1)...(19): siRNA sense strand
gaagagcuguucacaucuc

SEQ ID NO: 890821 - RNA, 19 nt, Homo sapiens
  misc_RNA (1)...(19): siRNA sense strand
agaagcagccggacagaua

SEQ ID NO: 890822 - RNA, 19 nt, Homo sapiens
  misc_RNA (1)...(19): siRNA sense strand
gaacaggugaauaaguuug

SEQ ID NO: 890823 - RNA, 19 nt, Homo sapiens
  misc_RNA (1)...(19): siRNA sense strand
aggaacaggugaauaaguu

SEQ ID NO: 890824 - RNA, 19 nt, Homo sapiens
  misc_RNA (1)...(19): siRNA sense strand
gcgaguagcugugauugca

SEQ ID NO: 890825 - RNA, 19 nt, Homo sapiens
  misc_RNA (1)...(19): siRNA sense strand
gaccaugggacuccucuuu

SEQ ID NO: 890826 - RNA, 19 nt, Homo sapiens
  misc_RNA (1)...(19): siRNA sense strand
ggaacaggugaauaaguuu

SEQ ID NO: 890827 - RNA, 19 nt, Homo sapiens
  misc_RNA (1)...(19): siRNA sense strand
gcauugaggaggagaagga

SEQ ID NO: 890828 - RNA, 19 nt, Homo sapiens
  misc_RNA (1)...(19): siRNA sense strand
ccaugggacuccucuuugu

SEQ ID NO: 890829 - RNA, 19 nt, Homo sapiens
  misc_RNA (1)...(19): siRNA sense strand
aggaggaacaggugaauaa

SEQ ID NO: 890830 - RNA, 19 nt, Homo sapiens
  misc_RNA (1)...(19): siRNA sense strand
ucgaacaauuccacuauca

SEQ ID NO: 890831 - RNA, 19 nt, Homo sapiens
  misc_RNA (1)...(19): siRNA sense strand
gaaucaagugcuaagauca

SEQ ID NO: 890832 - RNA, 19 nt, Homo sapiens
  misc_RNA (1)...(19): siRNA sense strand
gaucauccuuaccgagucu

SEQ ID NO: 890833 - RNA, 19 nt, Homo sapiens
  misc_RNA (1)...(19): siRNA sense strand
acacagagcagggaugguu

SEQ ID NO: 890834 - RNA, 19 nt, Homo sapiens
  misc_RNA (1)...(19): siRNA sense strand
gaagcagccggacagauag

SEQ ID NO: 890835 - RNA, 19 nt, Homo sapiens
  misc_RNA (1)...(19): siRNA sense strand
gcagaagagcuguucacau

SEQ ID NO: 890836 - RNA, 19 nt, Homo sapiens
  misc_RNA (1)...(19): siRNA sense strand
gaggaggaacaggugaaua

SEQ ID NO: 890837 - RNA, 19 nt, Homo sapiens
  misc_RNA (1)...(19): siRNA sense strand
agauagcaaugagcgagua

SEQ ID NO: 890838 - RNA, 19 nt, Homo sapiens
  misc_RNA (1)...(19): siRNA sense strand
guucgaacaauuccacuau

SEQ ID NO: 890839 - RNA, 19 nt, Homo sapiens
  misc_RNA (1)...(19): siRNA sense strand
gaggaacaggugaauaagu

SEQ ID NO: 890840 - RNA, 19 nt, Homo sapiens
  misc_RNA (1)...(19): siRNA sense strand
ggaggagaaggaaucugaa

SEQ ID NO: 890841 - RNA, 19 nt, Homo sapiens
  misc_RNA (1)...(19): siRNA sense strand
agucugaccuugacauugc

SEQ ID NO: 890842 - RNA, 19 nt, Homo sapiens
  misc_RNA (1)...(19): siRNA sense strand
acaauuccacuaucaauac

SEQ ID NO: 890843 - RNA, 19 nt, Homo sapiens
  misc_RNA (1)...(19): siRNA sense strand
aaacgggagccaccggaaa

SEQ ID NO: 890844 - RNA, 19 nt, Homo sapiens
  misc_RNA (1)...(19): siRNA sense strand
cgaacaauuccacuaucaa

SEQ ID NO: 890845 - RNA, 19 nt, Homo sapiens
  misc_RNA (1)...(19): siRNA sense strand
gcuguucacaucuccauca

SEQ ID NO: 890846 - RNA, 19 nt, Homo sapiens
  misc_RNA (1)...(19): siRNA sense strand
ggugaauaaguuuguucua

SEQ ID NO: 890847 - RNA, 19 nt, Homo sapiens
  misc_RNA (1)...(19): siRNA sense strand
caauuccacuaucaauacu

SEQ ID NO: 890848 - RNA, 19 nt, Homo sapiens
  misc_RNA (1)...(19): siRNA sense strand
gagcgaguagcugugauug

SEQ ID NO: 890849 - RNA, 19 nt, Homo sapiens
  misc_RNA (1)...(19): siRNA sense strand
aaucaagugcuaagaucaa

SEQ ID NO: 890850 - RNA, 19 nt, Homo sapiens
  misc_RNA (1)...(19): siRNA sense strand
gaggagaaggaaucugaag

SEQ ID NO: 890851 - RNA, 19 nt, Homo sapiens
  misc_RNA (1)...(19): siRNA sense strand
aggaggagaaggaaucuga

SEQ ID NO: 890852 - RNA, 19 nt, Homo sapiens
  misc_RNA (1)...(19): siRNA sense strand
gccuggagcugauguugcu

SEQ ID NO: 890853 - RNA, 19 nt, Homo sapiens
  misc_RNA (1)...(19): siRNA sense strand
cgagucugaccuugacauu

SEQ ID NO: 890854 - RNA, 19 nt, Homo sapiens
  misc_RNA (1)...(19): siRNA sense strand
caucauggaaggccuagag

SEQ ID NO: 890855 - RNA, 19 nt, Homo sapiens
  misc_RNA (1)...(19): siRNA sense strand
ggaggaacaggugaauaag

SEQ ID NO: 890856 - RNA, 19 nt, Homo sapiens
  misc_RNA (1)...(19): siRNA sense strand
gagaagcagccggacagau

SEQ ID NO: 890857 - RNA, 19 nt, Homo sapiens
  misc_RNA (1)...(19): siRNA sense strand
uuaccgagucugaccuuga

SEQ ID NO: 890858 - RNA, 19 nt, Homo sapiens
  misc_RNA (1)...(19): siRNA sense strand
gggagccaccggaaauaca

SEQ ID NO: 890859 - RNA, 19 nt, Homo sapiens
  misc_RNA (1)...(19): siRNA sense strand
uagagaagcuauucaguuu

SEQ ID NO: 890860 - RNA, 19 nt, Homo sapiens
  misc_RNA (1)...(19): siRNA sense strand
cagagcugcugaacaauua

SEQ ID NO: 890861 - RNA, 19 nt, Homo sapiens
  misc_RNA (1)...(19): siRNA sense strand
gccaagaaaugugggauua

SEQ ID NO: 890862 - RNA, 19 nt, Homo sapiens
  misc_RNA (1)...(19): siRNA sense strand
caccagagcugcugaacaa

SEQ ID NO: 890863 - RNA, 19 nt, Homo sapiens
  misc_RNA (1)...(19): siRNA sense strand
gaugugcacugccaagaaa

SEQ ID NO: 890864 - RNA, 19 nt, Homo sapiens
  misc_RNA (1)...(19): siRNA sense strand
gaacaaauucaacgggaaa

SEQ ID NO: 890865 - RNA, 19 nt, Homo sapiens
  misc_RNA (1)...(19): siRNA sense strand
acacaagaguuaccuagaa

SEQ ID NO: 890866 - RNA, 19 nt, Homo sapiens
  misc_RNA (1)...(19): siRNA sense strand
cagaaacaauggaacaaau

SEQ ID NO: 890867 - RNA, 19 nt, Homo sapiens
  misc_RNA (1)...(19): siRNA sense strand
gaaacaauggaacaaauuc

SEQ ID NO: 890868 - RNA, 19 nt, Homo sapiens
  misc_RNA (1)...(19): siRNA sense strand
gaacaaacuagaugacaag

SEQ ID NO: 890869 - RNA, 19 nt, Homo sapiens
  misc_RNA (1)...(19): siRNA sense strand
ugacauugagguugaauuu

SEQ ID NO: 890870 - RNA, 19 nt, Homo sapiens
  misc_RNA (1)...(19): siRNA sense strand
agagucagcugaugaguuc

SEQ ID NO: 890871 - RNA, 19 nt, Homo sapiens
  misc_RNA (1)...(19): siRNA sense strand
ugaacaaacuagaugacaa

SEQ ID NO: 890872 - RNA, 19 nt, Homo sapiens
  misc_RNA (1)...(19): siRNA sense strand
gccuccagcuauuaucuua

SEQ ID NO: 890873 - RNA, 19 nt, Homo sapiens
  misc_RNA (1)...(19): siRNA sense strand
gaaaugugggauuagguuu

SEQ ID NO: 890874 - RNA, 19 nt, Homo sapiens
  misc_RNA (1)...(19): siRNA sense strand
gcagaaacaauggaacaaa

SEQ ID NO: 890875 - RNA, 19 nt, Homo sapiens
  misc_RNA (1)...(19): siRNA sense strand
caagaaaugugggauuagg

SEQ ID NO: 890876 - RNA, 19 nt, Homo sapiens
  misc_RNA (1)...(19): siRNA sense strand
aggaagaccugaacaaacu

SEQ ID NO: 890877 - RNA, 19 nt, Homo sapiens
  misc_RNA (1)...(19): siRNA sense strand
ccagagcugcugaacaauu

SEQ ID NO: 890878 - RNA, 19 nt, Homo sapiens
  misc_RNA (1)...(19): siRNA sense strand
aaagaaagagcaucaugga

SEQ ID NO: 890879 - RNA, 19 nt, Homo sapiens
  misc_RNA (1)...(19): siRNA sense strand
caacgggaaacaaccauug

SEQ ID NO: 890880 - RNA, 19 nt, Homo sapiens
  misc_RNA (1)...(19): siRNA sense strand
agaguuaccuagaacaagu

SEQ ID NO: 890881 - RNA, 19 nt, Homo sapiens
  misc_RNA (1)...(19): siRNA sense strand
cuagagaagcuauucaguu

SEQ ID NO: 890882 - RNA, 19 nt, Homo sapiens
  misc_RNA (1)...(19): siRNA sense strand
ggacacagagucagcugau

SEQ ID NO: 890883 - RNA, 19 nt, Homo sapiens
  misc_RNA (1)...(19): siRNA sense strand
uuuaugacauugagguuga

SEQ ID NO: 890884 - RNA, 19 nt, Homo sapiens
  misc_RNA (1)...(19): siRNA sense strand
acacagagucagcugauga

SEQ ID NO: 890885 - RNA, 19 nt, Homo sapiens
  misc_RNA (1)...(19): siRNA sense strand
aaaauucgccagcgcauua

SEQ ID NO: 890886 - RNA, 19 nt, Homo sapiens
  misc_RNA (1)...(19): siRNA sense strand
caagaguuaccuagaacaa

SEQ ID NO: 890887 - RNA, 19 nt, Homo sapiens
  misc_RNA (1)...(19): siRNA sense strand
ggaagaccugaacaaacua

SEQ ID NO: 890888 - RNA, 19 nt, Homo sapiens
  misc_RNA (1)...(19): siRNA sense strand
caaauucaacgggaaacaa

SEQ ID NO: 890889 - RNA, 19 nt, Homo sapiens
  misc_RNA (1)...(19): siRNA sense strand
gaccugaacaaacuagaug

SEQ ID NO: 890890 - RNA, 19 nt, Homo sapiens
  misc_RNA (1)...(19): siRNA sense strand
ugaggaagaccugaacaaa

SEQ ID NO: 890891 - RNA, 19 nt, Homo sapiens
  misc_RNA (1)...(19): siRNA sense strand
gaggaagaccugaacaaac

SEQ ID NO: 890892 - RNA, 19 nt, Homo sapiens
  misc_RNA (1)...(19): siRNA sense strand
gagcugcugaacaauuaaa

SEQ ID NO: 890893 - RNA, 19 nt, Homo sapiens
  misc_RNA (1)...(19): siRNA sense strand
gaaaucaaggggaaaauuc

SEQ ID NO: 890894 - RNA, 19 nt, Homo sapiens
  misc_RNA (1)...(19): siRNA sense strand
gaauaauccgcgacacaag

SEQ ID NO: 890895 - RNA, 19 nt, Homo sapiens
  misc_RNA (1)...(19): siRNA sense strand
gaagaccugaacaaacuag

SEQ ID NO: 890896 - RNA, 19 nt, Homo sapiens
  misc_RNA (1)...(19): siRNA sense strand
ggaaacaaccauugauccu

SEQ ID NO: 890897 - RNA, 19 nt, Homo sapiens
  misc_RNA (1)...(19): siRNA sense strand
gacacaagaguuaccuaga

SEQ ID NO: 890898 - RNA, 19 nt, Homo sapiens
  misc_RNA (1)...(19): siRNA sense strand
agaaaugugggauuagguu

SEQ ID NO: 890899 - RNA, 19 nt, Homo sapiens
  misc_RNA (1)...(19): siRNA sense strand
gguuucagccuccagcuau

SEQ ID NO: 890900 - RNA, 19 nt, Homo sapiens
  misc_RNA (1)...(19): siRNA sense strand
cacaagaguuaccuagaac

SEQ ID NO: 890901 - RNA, 19 nt, Homo sapiens
  misc_RNA (1)...(19): siRNA sense strand
gaguuaccuagaacaagua

SEQ ID NO: 890902 - RNA, 19 nt, Homo sapiens
  misc_RNA (1)...(19): siRNA sense strand
gcaccagagcugcugaaca

SEQ ID NO: 890903 - RNA, 19 nt, Homo sapiens
  misc_RNA (1)...(19): siRNA sense strand
agaauaauccgcgacacaa

SEQ ID NO: 890904 - RNA, 19 nt, Homo sapiens
  misc_RNA (1)...(19): siRNA sense strand
cagagucagcugaugaguu

SEQ ID NO: 890905 - RNA, 19 nt, Homo sapiens
  misc_RNA (1)...(19): siRNA sense strand
cugcugaacaauuaaagaa

SEQ ID NO: 890906 - RNA, 19 nt, Homo sapiens
  misc_RNA (1)...(19): siRNA sense strand
aauaauccgcgacacaaga

SEQ ID NO: 890907 - RNA, 19 nt, Homo sapiens
  misc_RNA (1)...(19): siRNA sense strand
ucuaugagagugaaaucaa

SEQ ID NO: 890908 - RNA, 19 nt, Homo sapiens
  misc_RNA (1)...(19): siRNA sense strand
cuuaaucuaugagagugaa

SEQ ID NO: 890909 - RNA, 19 nt, Homo sapiens
  misc_RNA (1)...(19): siRNA sense strand
gacacagagucagcugaug

SEQ ID NO: 890910 - RNA, 19 nt, Homo sapiens
  misc_RNA (1)...(19): siRNA sense strand
acauugagguugaauuucc

SEQ ID NO: 890911 - RNA, 19 nt, Homo sapiens
  misc_RNA (1)...(19): siRNA sense strand
aaugugggauuagguuuca

SEQ ID NO: 890912 - RNA, 19 nt, Homo sapiens
  misc_RNA (1)...(19): siRNA sense strand
guuucagccuccagcuauu

SEQ ID NO: 890913 - RNA, 19 nt, Homo sapiens
  misc_RNA (1)...(19): siRNA sense strand
cuaugagagugaaaucaag

SEQ ID NO: 890914 - RNA, 19 nt, Homo sapiens
  misc_RNA (1)...(19): siRNA sense strand
caaaagaaagagcaucaug

SEQ ID NO: 890915 - RNA, 19 nt, Homo sapiens
  misc_RNA (1)...(19): siRNA sense strand
gaaauucgcuggccaaauc

SEQ ID NO: 890916 - RNA, 19 nt, Homo sapiens
  misc_RNA (1)...(19): siRNA sense strand
gaucuucugugacauucua

SEQ ID NO: 890917 - RNA, 19 nt, Homo sapiens
  misc_RNA (1)...(19): siRNA sense strand
ggaagcgucuggaagaugu

SEQ ID NO: 890918 - RNA, 19 nt, Homo sapiens
  misc_RNA (1)...(19): siRNA sense strand
ggaacauccucuccaaguu

SEQ ID NO: 890919 - RNA, 19 nt, Homo sapiens
  misc_RNA (1)...(19): siRNA sense strand
ggagaugugugacaaaguc

SEQ ID NO: 890920 - RNA, 19 nt, Homo sapiens
  misc_RNA (1)...(19): siRNA sense strand
gauauacugugccaaguca

SEQ ID NO: 890921 - RNA, 19 nt, Homo sapiens
  misc_RNA (1)...(19): siRNA sense strand
guggagaucuucugugaca

SEQ ID NO: 890922 - RNA, 19 nt, Homo sapiens
  misc_RNA (1)...(19): siRNA sense strand
ggaaggagagauauacugu

SEQ ID NO: 890923 - RNA, 19 nt, Homo sapiens
  misc_RNA (1)...(19): siRNA sense strand
ggagaucuucugugacauu

SEQ ID NO: 890924 - RNA, 19 nt, Homo sapiens
  misc_RNA (1)...(19): siRNA sense strand
ucacggauguggagaucuu

SEQ ID NO: 890925 - RNA, 19 nt, Homo sapiens
  misc_RNA (1)...(19): siRNA sense strand
gaguguggaaggagagaua

SEQ ID NO: 890926 - RNA, 19 nt, Homo sapiens
  misc_RNA (1)...(19): siRNA sense strand
gagaucuucugugacauuc

SEQ ID NO: 890927 - RNA, 19 nt, Homo sapiens
  misc_RNA (1)...(19): siRNA sense strand
gagauauacugugccaagu

SEQ ID NO: 890928 - RNA, 19 nt, Homo sapiens
  misc_RNA (1)...(19): siRNA sense strand
acagucaccucaagaacau

SEQ ID NO: 890929 - RNA, 19 nt, Homo sapiens
  misc_RNA (1)...(19): siRNA sense strand
cgggagaaguucaucaucu

SEQ ID NO: 890930 - RNA, 19 nt, Homo sapiens
  misc_RNA (1)...(19): siRNA sense strand
gacagucaccucaagaaca

SEQ ID NO: 890931 - RNA, 19 nt, Homo sapiens
  misc_RNA (1)...(19): siRNA sense strand
gggcugacuuuagugacaa

SEQ ID NO: 890932 - RNA, 19 nt, Homo sapiens
  misc_RNA (1)...(19): siRNA sense strand
caggagaugugugacaaag

SEQ ID NO: 890933 - RNA, 19 nt, Homo sapiens
  misc_RNA (1)...(19): siRNA sense strand
ggaaauucgcuggccaaau

SEQ ID NO: 890934 - RNA, 19 nt, Homo sapiens
  misc_RNA (1)...(19): siRNA sense strand
cugagaagcccuaccugaa

SEQ ID NO: 890935 - RNA, 19 nt, Homo sapiens
  misc_RNA (1)...(19): siRNA sense strand
ugagaagcccuaccugaag

SEQ ID NO: 890936 - RNA, 19 nt, Homo sapiens
  misc_RNA (1)...(19): siRNA sense strand
caagucaggcaggaaauuc

SEQ ID NO: 890937 - RNA, 19 nt, Homo sapiens
  misc_RNA (1)...(19): siRNA sense strand
gacuccagcucccuacagu

SEQ ID NO: 890938 - RNA, 19 nt, Homo sapiens
  misc_RNA (1)...(19): siRNA sense strand
ccaagucaggcaggaaauu

SEQ ID NO: 890939 - RNA, 19 nt, Homo sapiens
  misc_RNA (1)...(19): siRNA sense strand
cagcgccacuguguacuuc

SEQ ID NO: 890940 - RNA, 19 nt, Homo sapiens
  misc_RNA (1)...(19): siRNA sense strand
auguggagaucuucuguga

SEQ ID NO: 890941 - RNA, 19 nt, Homo sapiens
  misc_RNA (1)...(19): siRNA sense strand
gccaaauccgggagaaguu

SEQ ID NO: 890942 - RNA, 19 nt, Homo sapiens
  misc_RNA (1)...(19): siRNA sense strand
guucacggauguggagauc

SEQ ID NO: 890943 - RNA, 19 nt, Homo sapiens
  misc_RNA (1)...(19): siRNA sense strand
ggaguuccgccaccucuac

SEQ ID NO: 890944 - RNA, 19 nt, Homo sapiens
  misc_RNA (1)...(19): siRNA sense strand
cggaacauccucuccaagu

SEQ ID NO: 890945 - RNA, 19 nt, Homo sapiens
  misc_RNA (1)...(19): siRNA sense strand
ugacaaaguccagaucucu

SEQ ID NO: 890946 - RNA, 19 nt, Homo sapiens
  misc_RNA (1)...(19): siRNA sense strand
ccagggcugacuuuaguga

SEQ ID NO: 890947 - RNA, 19 nt, Homo sapiens
  misc_RNA (1)...(19): siRNA sense strand
aaggcgagguggacuucuu

SEQ ID NO: 890948 - RNA, 19 nt, Homo sapiens
  misc_RNA (1)...(19): siRNA sense strand
ggacacgugcaccggaaca

SEQ ID NO: 890949 - RNA, 19 nt, Homo sapiens
  misc_RNA (1)...(19): siRNA sense strand
ggccaaauccgggagaagu

SEQ ID NO: 890950 - RNA, 19 nt, Homo sapiens
  misc_RNA (1)...(19): siRNA sense strand
ggaccagggaggugugaag

SEQ ID NO: 890951 - RNA, 19 nt, Homo sapiens
  misc_RNA (1)...(19): siRNA sense strand
ggauguggagaucuucugu

SEQ ID NO: 890952 - RNA, 19 nt, Homo sapiens
  misc_RNA (1)...(19): siRNA sense strand
cgaaguguguccgcgucuu

SEQ ID NO: 890953 - RNA, 19 nt, Homo sapiens
  misc_RNA (1)...(19): siRNA sense strand
caaggcaccugggcaaaau

SEQ ID NO: 890954 - RNA, 19 nt, Homo sapiens
  misc_RNA (1)...(19): siRNA sense strand
caagcacaacaacaucaga

SEQ ID NO: 890955 - RNA, 19 nt, Homo sapiens
  misc_RNA (1)...(19): siRNA sense strand
gugacaaaguccagaucuc

SEQ ID NO: 890956 - RNA, 19 nt, Homo sapiens
  misc_RNA (1)...(19): siRNA sense strand
uccaggagaugugugacaa

SEQ ID NO: 890957 - RNA, 19 nt, Homo sapiens
  misc_RNA (1)...(19): siRNA sense strand
ccaaauccgggagaaguuc

SEQ ID NO: 890958 - RNA, 19 nt, Homo sapiens
  misc_RNA (1)...(19): siRNA sense strand
gaacagaagaccucaggaa

SEQ ID NO: 890959 - RNA, 19 nt, Homo sapiens
  misc_RNA (1)...(19): siRNA sense strand
cagaagaccucaggaauca

SEQ ID NO: 890960 - RNA, 19 nt, Homo sapiens
  misc_RNA (1)...(19): siRNA sense strand
gaagaccucaggaaucaug

SEQ ID NO: 890961 - RNA, 19 nt, Homo sapiens
  misc_RNA (1)...(19): siRNA sense strand
uauaagaccuucucuaccu

SEQ ID NO: 890962 - RNA, 19 nt, Homo sapiens
  misc_RNA (1)...(19): siRNA sense strand
gcuauaagaccuucucuac

SEQ ID NO: 890963 - RNA, 19 nt, Homo sapiens
  misc_RNA (1)...(19): siRNA sense strand
ccaugaugcuucucacugu

SEQ ID NO: 890964 - RNA, 19 nt, Homo sapiens
  misc_RNA (1)...(19): siRNA sense strand
guccgagucuaccacuauu

SEQ ID NO: 890965 - RNA, 19 nt, Homo sapiens
  misc_RNA (1)...(19): siRNA sense strand
acagaagaccucaggaauc

SEQ ID NO: 890966 - RNA, 19 nt, Homo sapiens
  misc_RNA (1)...(19): siRNA sense strand
ugaugcuucucacugugua

SEQ ID NO: 890967 - RNA, 19 nt, Homo sapiens
  misc_RNA (1)...(19): siRNA sense strand
gcugacauuggcuauaaga

SEQ ID NO: 890968 - RNA, 19 nt, Homo sapiens
  misc_RNA (1)...(19): siRNA sense strand
gaugaaaccucacucuuac

SEQ ID NO: 890969 - RNA, 19 nt, Homo sapiens
  misc_RNA (1)...(19): siRNA sense strand
cgaugaaaccucacucuua

SEQ ID NO: 890970 - RNA, 19 nt, Homo sapiens
  misc_RNA (1)...(19): siRNA sense strand
ccgcgucucuaccgccaua

SEQ ID NO: 890971 - RNA, 19 nt, Homo sapiens
  misc_RNA (1)...(19): siRNA sense strand
cagcagcggacccgaaaga

SEQ ID NO: 890972 - RNA, 19 nt, Homo sapiens
  misc_RNA (1)...(19): siRNA sense strand
ccuuuggacucccagauuc

SEQ ID NO: 890973 - RNA, 19 nt, Homo sapiens
  misc_RNA (1)...(19): siRNA sense strand
cugcagcgccacacaagaa

SEQ ID NO: 890974 - RNA, 19 nt, Homo sapiens
  misc_RNA (1)...(19): siRNA sense strand
gaaccgaugaaaccucacu

SEQ ID NO: 890975 - RNA, 19 nt, Homo sapiens
  misc_RNA (1)...(19): siRNA sense strand
cacagcagcggacccgaaa

SEQ ID NO: 890976 - RNA, 19 nt, Homo sapiens
  misc_RNA (1)...(19): siRNA sense strand
gggaauagcuuauccaauc

SEQ ID NO: 890977 - RNA, 19 nt, Homo sapiens
  misc_RNA (1)...(19): siRNA sense strand
ccaagaagccgcucagaua

SEQ ID NO: 890978 - RNA, 19 nt, Homo sapiens
  misc_RNA (1)...(19): siRNA sense strand
gcucagauaugaagcauca

SEQ ID NO: 890979 - RNA, 19 nt, Homo sapiens
  misc_RNA (1)...(19): siRNA sense strand
gaugggaucccuaauauga

SEQ ID NO: 890980 - RNA, 19 nt, Homo sapiens
  misc_RNA (1)...(19): siRNA sense strand
ggaauagcuuauccaauca

SEQ ID NO: 890981 - RNA, 19 nt, Homo sapiens
  misc_RNA (1)...(19): siRNA sense strand
gauaugaagcaucaacaaa

SEQ ID NO: 890982 - RNA, 19 nt, Homo sapiens
  misc_RNA (1)...(19): siRNA sense strand
ugggaucccuaauaugaua

SEQ ID NO: 890983 - RNA, 19 nt, Homo sapiens
  misc_RNA (1)...(19): siRNA sense strand
agaagccgcucagauauga

SEQ ID NO: 890984 - RNA, 19 nt, Homo sapiens
  misc_RNA (1)...(19): siRNA sense strand
caagaagccgcucagauau

SEQ ID NO: 890985 - RNA, 19 nt, Homo sapiens
  misc_RNA (1)...(19): siRNA sense strand
guaagaagcaagaagaagu

SEQ ID NO: 890986 - RNA, 19 nt, Homo sapiens
  misc_RNA (1)...(19): siRNA sense strand
uugaugggaucccuaauau

SEQ ID NO: 890987 - RNA, 19 nt, Homo sapiens
  misc_RNA (1)...(19): siRNA sense strand
aaaguaagaagcaagaaga

SEQ ID NO: 890988 - RNA, 19 nt, Homo sapiens
  misc_RNA (1)...(19): siRNA sense strand
uaaugaagaguugggaaua

SEQ ID NO: 890989 - RNA, 19 nt, Homo sapiens
  misc_RNA (1)...(19): siRNA sense strand
ccacaggcagcuaggauga

SEQ ID NO: 890990 - RNA, 19 nt, Homo sapiens
  misc_RNA (1)...(19): siRNA sense strand
gaagaguugggaauagcuu

SEQ ID NO: 890991 - RNA, 19 nt, Homo sapiens
  misc_RNA (1)...(19): siRNA sense strand
uaagaagcaagaagaagug

SEQ ID NO: 890992 - RNA, 19 nt, Homo sapiens
  misc_RNA (1)...(19): siRNA sense strand
caaaguaagaagcaagaag

SEQ ID NO: 890993 - RNA, 19 nt, Homo sapiens
  misc_RNA (1)...(19): siRNA sense strand
aaugaagaguugggaauag

SEQ ID NO: 890994 - RNA, 19 nt, Homo sapiens
  misc_RNA (1)...(19): siRNA sense strand
ucauugaugggaucccuaa

SEQ ID NO: 890995 - RNA, 19 nt, Homo sapiens
  misc_RNA (1)...(19): siRNA sense strand
ugugcccgcucuccaagaa

SEQ ID NO: 890996 - RNA, 19 nt, Homo sapiens
  misc_RNA (1)...(19): siRNA sense strand
auugaugggaucccuaaua

SEQ ID NO: 890997 - RNA, 19 nt, Homo sapiens
  misc_RNA (1)...(19): siRNA sense strand
gaauagcuuauccaaucau

SEQ ID NO: 890998 - RNA, 19 nt, Homo sapiens
  misc_RNA (1)...(19): siRNA sense strand
aagaagccgcucagauaug

SEQ ID NO: 890999 - RNA, 19 nt, Homo sapiens
  misc_RNA (1)...(19): siRNA sense strand
acaggcagcuaggaugaca

SEQ ID NO: 891000 - RNA, 19 nt, Homo sapiens
  misc_RNA (1)...(19): siRNA sense strand
agacagaacugggagaaua

SEQ ID NO: 891001 - RNA, 19 nt, Homo sapiens
  misc_RNA (1)...(19): siRNA sense strand
ccaauaugcuugauacguu

SEQ ID NO: 891002 - RNA, 19 nt, Homo sapiens
  misc_RNA (1)...(19): siRNA sense strand
ggacgcccaucaccaauga

SEQ ID NO: 891003 - RNA, 19 nt, Homo sapiens
  misc_RNA (1)...(19): siRNA sense strand
gaagggcucucagaugaug

SEQ ID NO: 891004 - RNA, 19 nt, Homo sapiens
  misc_RNA (1)...(19): siRNA sense strand
ucagggaccucaccaaugu

SEQ ID NO: 891005 - RNA, 19 nt, Homo sapiens
  misc_RNA (1)...(19): siRNA sense strand
acaaggaccucuucucugu

SEQ ID NO: 891006 - RNA, 19 nt, Homo sapiens
  misc_RNA (1)...(19): siRNA sense strand
uugaagggcucucagauga

SEQ ID NO: 891007 - RNA, 19 nt, Homo sapiens
  misc_RNA (1)...(19): siRNA sense strand
ggacaaggaccucuucucu

SEQ ID NO: 891008 - RNA, 19 nt, Homo sapiens
  misc_RNA (1)...(19): siRNA sense strand
gggcuauaguauuucauuu

SEQ ID NO: 891009 - RNA, 19 nt, Homo sapiens
  misc_RNA (1)...(19): siRNA sense strand
ccagacacuugacuucuau

SEQ ID NO: 891010 - RNA, 19 nt, Homo sapiens
  misc_RNA (1)...(19): siRNA sense strand
ugacuucuauggcauucaa

SEQ ID NO: 891011 - RNA, 19 nt, Homo sapiens
  misc_RNA (1)...(19): siRNA sense strand
gcuaaaagaugaccagaca

SEQ ID NO: 891012 - RNA, 19 nt, Homo sapiens
  misc_RNA (1)...(19): siRNA sense strand
acagggaggcggucuuuaa

SEQ ID NO: 891013 - RNA, 19 nt, Homo sapiens
  misc_RNA (1)...(19): siRNA sense strand
cacagcagcuccucuuaca

SEQ ID NO: 891014 - RNA, 19 nt, Homo sapiens
  misc_RNA (1)...(19): siRNA sense strand
aaagaugaccagacacuug

SEQ ID NO: 891015 - RNA, 19 nt, Homo sapiens
  misc_RNA (1)...(19): siRNA sense strand
ccucagcagugacccuauu

SEQ ID NO: 891016 - RNA, 19 nt, Homo sapiens
  misc_RNA (1)...(19): siRNA sense strand
ugucuucgcugaucccaau

SEQ ID NO: 891017 - RNA, 19 nt, Homo sapiens
  misc_RNA (1)...(19): siRNA sense strand
cgaaaguccuggccugaac

SEQ ID NO: 891018 - RNA, 19 nt, Homo sapiens
  misc_RNA (1)...(19): siRNA sense strand
gcacagcagcuccucuuac

SEQ ID NO: 891019 - RNA, 19 nt, Homo sapiens
  misc_RNA (1)...(19): siRNA sense strand
gaucccaauaugcuugaua

SEQ ID NO: 891020 - RNA, 19 nt, Homo sapiens
  misc_RNA (1)...(19): siRNA sense strand
ugagagaguuccggguguu

SEQ ID NO: 891021 - RNA, 19 nt, Homo sapiens
  misc_RNA (1)...(19): siRNA sense strand
acccugagcugauugaucu

SEQ ID NO: 891022 - RNA, 19 nt, Homo sapiens
  misc_RNA (1)...(19): siRNA sense strand
accagacacuugacuucua

SEQ ID NO: 891023 - RNA, 19 nt, Homo sapiens
  misc_RNA (1)...(19): siRNA sense strand
gaccagccacuuacuccaa

SEQ ID NO: 891024 - RNA, 19 nt, Homo sapiens
  misc_RNA (1)...(19): siRNA sense strand
acuccaaagucuauucuuc

SEQ ID NO: 891025 - RNA, 19 nt, Homo sapiens
  misc_RNA (1)...(19): siRNA sense strand
aagaugaccagacacuuga

SEQ ID NO: 891026 - RNA, 19 nt, Homo sapiens
  misc_RNA (1)...(19): siRNA sense strand
uccacacccucuagcagua

SEQ ID NO: 891027 - RNA, 19 nt, Homo sapiens
  misc_RNA (1)...(19): siRNA sense strand
aggaugacuuucacccaaa

SEQ ID NO: 891028 - RNA, 19 nt, Homo sapiens
  misc_RNA (1)...(19): siRNA sense strand
ucacccagcccucgucaau

SEQ ID NO: 891029 - RNA, 19 nt, Homo sapiens
  misc_RNA (1)...(19): siRNA sense strand
ggaccucuucucugucuuc

SEQ ID NO: 891030 - RNA, 19 nt, Homo sapiens
  misc_RNA (1)...(19): siRNA sense strand
cuacuguggucggaagcua

SEQ ID NO: 891031 - RNA, 19 nt, Homo sapiens
  misc_RNA (1)...(19): siRNA sense strand
caauaaggagucucuggau

SEQ ID NO: 891032 - RNA, 19 nt, Homo sapiens
  misc_RNA (1)...(19): siRNA sense strand
cggaaccuguggacaaagu

SEQ ID NO: 891033 - RNA, 19 nt, Homo sapiens
  misc_RNA (1)...(19): siRNA sense strand
gcgaaaguccuggccugaa

SEQ ID NO: 891034 - RNA, 19 nt, Homo sapiens
  misc_RNA (1)...(19): siRNA sense strand
ggaugacuuucacccaaac

SEQ ID NO: 891035 - RNA, 19 nt, Homo sapiens
  misc_RNA (1)...(19): siRNA sense strand
gucggaagcuaaaagauga

SEQ ID NO: 891036 - RNA, 19 nt, Homo sapiens
  misc_RNA (1)...(19): siRNA sense strand
auaaggagucucuggauca

SEQ ID NO: 891037 - RNA, 19 nt, Homo sapiens
  misc_RNA (1)...(19): siRNA sense strand
gcucagcaauaaggagucu

SEQ ID NO: 891038 - RNA, 19 nt, Homo sapiens
  misc_RNA (1)...(19): siRNA sense strand
uuacagggaggcggucuuu

SEQ ID NO: 891039 - RNA, 19 nt, Homo sapiens
  misc_RNA (1)...(19): siRNA sense strand
cagccaagcccuacagcau

SEQ ID NO: 891040 - RNA, 19 nt, Homo sapiens
  misc_RNA (1)...(19): siRNA sense strand
cagggacgcccaucaccaa

SEQ ID NO: 891041 - RNA, 19 nt, Homo sapiens
  misc_RNA (1)...(19): siRNA sense strand
cagaugaugaggaugacuu

SEQ ID NO: 891042 - RNA, 19 nt, Homo sapiens
  misc_RNA (1)...(19): siRNA sense strand
auucuucgguugccagaga

SEQ ID NO: 891043 - RNA, 19 nt, Homo sapiens
  misc_RNA (1)...(19): siRNA sense strand
ggcuauaguauuucauuuc

SEQ ID NO: 891044 - RNA, 19 nt, Homo sapiens
  misc_RNA (1)...(19): siRNA sense strand
ugaccagacacuugacuuc

SEQ ID NO: 891045 - RNA, 19 nt, Homo sapiens
  misc_RNA (1)...(19): siRNA sense strand
aagcagcccuggagcucau

SEQ ID NO: 891046 - RNA, 19 nt, Homo sapiens
  misc_RNA (1)...(19): siRNA sense strand
aaggaccucuucucugucu

SEQ ID NO: 891047 - RNA, 19 nt, Homo sapiens
  misc_RNA (1)...(19): siRNA sense strand
uaaggagucucuggaucag

SEQ ID NO: 891048 - RNA, 19 nt, Homo sapiens
  misc_RNA (1)...(19): siRNA sense strand
gguccacuguccauguucu

SEQ ID NO: 891049 - RNA, 19 nt, Homo sapiens
  misc_RNA (1)...(19): siRNA sense strand
uccagacccugagcugauu

SEQ ID NO: 891050 - RNA, 19 nt, Homo sapiens
  misc_RNA (1)...(19): siRNA sense strand
gacagaacugggagaauac

SEQ ID NO: 891051 - RNA, 19 nt, Homo sapiens
  misc_RNA (1)...(19): siRNA sense strand
uggguccacuguccauguu

SEQ ID NO: 891052 - RNA, 19 nt, Homo sapiens
  misc_RNA (1)...(19): siRNA sense strand
ccucagggaccucaccaau

SEQ ID NO: 891053 - RNA, 19 nt, Homo sapiens
  misc_RNA (1)...(19): siRNA sense strand
gagagaguuccggguguug

SEQ ID NO: 891054 - RNA, 19 nt, Homo sapiens
  misc_RNA (1)...(19): siRNA sense strand
guccuggccugaaccugau

SEQ ID NO: 891055 - RNA, 19 nt, Homo sapiens
  misc_RNA (1)...(19): siRNA sense strand
ggaaaggcaugcacacgau

SEQ ID NO: 891056 - RNA, 19 nt, Homo sapiens
  misc_RNA (1)...(19): siRNA sense strand
ccaucagacuggucaauca

SEQ ID NO: 891057 - RNA, 19 nt, Homo sapiens
  misc_RNA (1)...(19): siRNA sense strand
gcacacgauguuaugagaa

SEQ ID NO: 891058 - RNA, 19 nt, Homo sapiens
  misc_RNA (1)...(19): siRNA sense strand
gcaugcacacgauguuaug

SEQ ID NO: 891059 - RNA, 19 nt, Homo sapiens
  misc_RNA (1)...(19): siRNA sense strand
aaucacggaugacuuucug

SEQ ID NO: 891060 - RNA, 19 nt, Homo sapiens
  misc_RNA (1)...(19): siRNA sense strand
acuggucaaucacggauga

SEQ ID NO: 891061 - RNA, 19 nt, Homo sapiens
  misc_RNA (1)...(19): siRNA sense strand
ugcacacgauguuaugaga

SEQ ID NO: 891062 - RNA, 19 nt, Homo sapiens
  misc_RNA (1)...(19): siRNA sense strand
cacacgauguuaugagaac

SEQ ID NO: 891063 - RNA, 19 nt, Homo sapiens
  misc_RNA (1)...(19): siRNA sense strand
ggcaugcacacgauguuau

SEQ ID NO: 891064 - RNA, 19 nt, Homo sapiens
  misc_RNA (1)...(19): siRNA sense strand
ggaagucacagaacaguaa

SEQ ID NO: 891065 - RNA, 19 nt, Homo sapiens
  misc_RNA (1)...(19): siRNA sense strand
cagaagacaggaagcauuu

SEQ ID NO: 891066 - RNA, 19 nt, Homo sapiens
  misc_RNA (1)...(19): siRNA sense strand
gaagacaggaagcauuuca

SEQ ID NO: 891067 - RNA, 19 nt, Homo sapiens
  misc_RNA (1)...(19): siRNA sense strand
gaacagaagacaggaagca

SEQ ID NO: 891068 - RNA, 19 nt, Homo sapiens
  misc_RNA (1)...(19): siRNA sense strand
gaacaguaauacgcuagca

SEQ ID NO: 891069 - RNA, 19 nt, Homo sapiens
  misc_RNA (1)...(19): siRNA sense strand
gaagaacagaagacaggaa

SEQ ID NO: 891070 - RNA, 19 nt, Homo sapiens
  misc_RNA (1)...(19): siRNA sense strand
ucacagggaagucacagaa

SEQ ID NO: 891071 - RNA, 19 nt, Homo sapiens
  misc_RNA (1)...(19): siRNA sense strand
acagggaagucacagaaca

SEQ ID NO: 891072 - RNA, 19 nt, Homo sapiens
  misc_RNA (1)...(19): siRNA sense strand
gggaagucacagaacagua

SEQ ID NO: 891073 - RNA, 19 nt, Homo sapiens
  misc_RNA (1)...(19): siRNA sense strand
gaagucacagaacaguaau

SEQ ID NO: 891074 - RNA, 19 nt, Homo sapiens
  misc_RNA (1)...(19): siRNA sense strand
acagaagacaggaagcauu

SEQ ID NO: 891075 - RNA, 19 nt, Homo sapiens
  misc_RNA (1)...(19): siRNA sense strand
agacaggaagcauuucaga

SEQ ID NO: 891076 - RNA, 19 nt, Homo sapiens
  misc_RNA (1)...(19): siRNA sense strand
gggcaugaagaacagaaga

SEQ ID NO: 891077 - RNA, 19 nt, Homo sapiens
  misc_RNA (1)...(19): siRNA sense strand
gcaugaagaacagaagaca

SEQ ID NO: 891078 - RNA, 19 nt, Homo sapiens
  misc_RNA (1)...(19): siRNA sense strand
gcagaggucacagggaagu

SEQ ID NO: 891079 - RNA, 19 nt, Homo sapiens
  misc_RNA (1)...(19): siRNA sense strand
cagcuucccgggucauuca

SEQ ID NO: 891080 - RNA, 19 nt, Homo sapiens
  misc_RNA (1)...(19): siRNA sense strand
gaacaaacucugaagauga

SEQ ID NO: 891081 - RNA, 19 nt, Homo sapiens
  misc_RNA (1)...(19): siRNA sense strand
cgaacaaacucugaagaug

SEQ ID NO: 891082 - RNA, 19 nt, Homo sapiens
  misc_RNA (1)...(19): siRNA sense strand
ccaagaacccgaacaaacu

SEQ ID NO: 891083 - RNA, 19 nt, Homo sapiens
  misc_RNA (1)...(19): siRNA sense strand
gaacccgaacaaacucuga

SEQ ID NO: 891084 - RNA, 19 nt, Homo sapiens
  misc_RNA (1)...(19): siRNA sense strand
gaagcuauuugaguuugag

SEQ ID NO: 891085 - RNA, 19 nt, Homo sapiens
  misc_RNA (1)...(19): siRNA sense strand
ugaagcuauuugaguuuga

SEQ ID NO: 891086 - RNA, 19 nt, Homo sapiens
  misc_RNA (1)...(19): siRNA sense strand
gccaagaacccgaacaaac

SEQ ID NO: 891087 - RNA, 19 nt, Homo sapiens
  misc_RNA (1)...(19): siRNA sense strand
aacaaacucugaagaugag

SEQ ID NO: 891088 - RNA, 19 nt, Homo sapiens
  misc_RNA (1)...(19): siRNA sense strand
uccugaagcuauuugaguu

SEQ ID NO: 891089 - RNA, 19 nt, Homo sapiens
  misc_RNA (1)...(19): siRNA sense strand
cugaagcuauuugaguuug

SEQ ID NO: 891090 - RNA, 19 nt, Homo sapiens
  misc_RNA (1)...(19): siRNA sense strand
ccgaacaaacucugaagau

SEQ ID NO: 891091 - RNA, 19 nt, Homo sapiens
  misc_RNA (1)...(19): siRNA sense strand
caagaacccgaacaaacuc

SEQ ID NO: 891092 - RNA, 19 nt, Homo sapiens
  misc_RNA (1)...(19): siRNA sense strand
caaacucugaagaugagaa

SEQ ID NO: 891093 - RNA, 19 nt, Homo sapiens
  misc_RNA (1)...(19): siRNA sense strand
ccugaagcuauuugaguuu

SEQ ID NO: 891094 - RNA, 19 nt, Homo sapiens
  misc_RNA (1)...(19): siRNA sense strand
ucacagagauauucuauga

SEQ ID NO: 891095 - RNA, 19 nt, Homo sapiens
  misc_RNA (1)...(19): siRNA sense strand
gagagaagcuggccacaga

SEQ ID NO: 891096 - RNA, 19 nt, Homo sapiens
  misc_RNA (1)...(19): siRNA sense strand
gaaugugacucucaucuug

SEQ ID NO: 891097 - RNA, 19 nt, Homo sapiens
  misc_RNA (1)...(19): siRNA sense strand
gaagcuggccacagaauug

SEQ ID NO: 891098 - RNA, 19 nt, Homo sapiens
  misc_RNA (1)...(19): siRNA sense strand
ggucaaacuggcaauauuu

SEQ ID NO: 891099 - RNA, 19 nt, Homo sapiens
  misc_RNA (1)...(19): siRNA sense strand
caucuugguuggaaacaaa

SEQ ID NO: 891100 - RNA, 19 nt, Homo sapiens
  misc_RNA (1)...(19): siRNA sense strand
gaaacaaagcugacuugga

SEQ ID NO: 891101 - RNA, 19 nt, Homo sapiens
  misc_RNA (1)...(19): siRNA sense strand
gugcuggucuacgacauua

SEQ ID NO: 891102 - RNA, 19 nt, Homo sapiens
  misc_RNA (1)...(19): siRNA sense strand
agacacugcuggucaggaa

SEQ ID NO: 891103 - RNA, 19 nt, Homo sapiens
  misc_RNA (1)...(19): siRNA sense strand
uuaacaagaugcucaccaa

SEQ ID NO: 891104 - RNA, 19 nt, Homo sapiens
  misc_RNA (1)...(19): siRNA sense strand
ccaagaaugugacucucau

SEQ ID NO: 891105 - RNA, 19 nt, Homo sapiens
  misc_RNA (1)...(19): siRNA sense strand
gcaagccauuaacaagaug

SEQ ID NO: 891106 - RNA, 19 nt, Homo sapiens
  misc_RNA (1)...(19): siRNA sense strand
agaauuggcuugugcuuuu

SEQ ID NO: 891107 - RNA, 19 nt, Homo sapiens
  misc_RNA (1)...(19): siRNA sense strand
caagcaagccauuaacaag

SEQ ID NO: 891108 - RNA, 19 nt, Homo sapiens
  misc_RNA (1)...(19): siRNA sense strand
ggaggucaaacuggcaaua

SEQ ID NO: 891109 - RNA, 19 nt, Homo sapiens
  misc_RNA (1)...(19): siRNA sense strand
ucaccaaaaucaguaguua

SEQ ID NO: 891110 - RNA, 19 nt, Homo sapiens
  misc_RNA (1)...(19): siRNA sense strand
gcacagaagaaggagagaa

SEQ ID NO: 891111 - RNA, 19 nt, Homo sapiens
  misc_RNA (1)...(19): siRNA sense strand
ccaggcagguuagcacaga

SEQ ID NO: 891112 - RNA, 19 nt, Homo sapiens
  misc_RNA (1)...(19): siRNA sense strand
ucaagcaagccauuaacaa

SEQ ID NO: 891113 - RNA, 19 nt, Homo sapiens
  misc_RNA (1)...(19): siRNA sense strand
uaacaagaugcucaccaaa

SEQ ID NO: 891114 - RNA, 19 nt, Homo sapiens
  misc_RNA (1)...(19): siRNA sense strand
gagaagcuggccacagaau

SEQ ID NO: 891115 - RNA, 19 nt, Homo sapiens
  misc_RNA (1)...(19): siRNA sense strand
gcuuugugcuggucuacga

SEQ ID NO: 891116 - RNA, 19 nt, Homo sapiens
  misc_RNA (1)...(19): siRNA sense strand
ugagauuucugaccaaacg

SEQ ID NO: 891117 - RNA, 19 nt, Homo sapiens
  misc_RNA (1)...(19): siRNA sense strand
gaccacuccaggcagguua

SEQ ID NO: 891118 - RNA, 19 nt, Homo sapiens
  misc_RNA (1)...(19): siRNA sense strand
gaggucaaacuggcaauau

SEQ ID NO: 891119 - RNA, 19 nt, Homo sapiens
  misc_RNA (1)...(19): siRNA sense strand
aagcaagccauuaacaaga

SEQ ID NO: 891120 - RNA, 19 nt, Homo sapiens
  misc_RNA (1)...(19): siRNA sense strand
ucaggaagauaccauucag

SEQ ID NO: 891121 - RNA, 19 nt, Homo sapiens
  misc_RNA (1)...(19): siRNA sense strand
acaagaugcucaccaaaau

SEQ ID NO: 891122 - RNA, 19 nt, Homo sapiens
  misc_RNA (1)...(19): siRNA sense strand
aggucaaacuggcaauauu

SEQ ID NO: 891123 - RNA, 19 nt, Homo sapiens
  misc_RNA (1)...(19): siRNA sense strand
gcagguuagcacagaagaa

SEQ ID NO: 891124 - RNA, 19 nt, Homo sapiens
  misc_RNA (1)...(19): siRNA sense strand
cagaauuggcuugugcuuu

SEQ ID NO: 891125 - RNA, 19 nt, Homo sapiens
  misc_RNA (1)...(19): siRNA sense strand
gcucuuguagugagauuuc

SEQ ID NO: 891126 - RNA, 19 nt, Homo sapiens
  misc_RNA (1)...(19): siRNA sense strand
ccaagcaaccaucgaugau

SEQ ID NO: 891127 - RNA, 19 nt, Homo sapiens
  misc_RNA (1)...(19): siRNA sense strand
gguuagcacagaagaagga

SEQ ID NO: 891128 - RNA, 19 nt, Homo sapiens
  misc_RNA (1)...(19): siRNA sense strand
acucucaucuugguuggaa

SEQ ID NO: 891129 - RNA, 19 nt, Homo sapiens
  misc_RNA (1)...(19): siRNA sense strand
gcaugucaagcaagccauu

SEQ ID NO: 891130 - RNA, 19 nt, Homo sapiens
  misc_RNA (1)...(19): siRNA sense strand
caccacgcaugucaagcaa

SEQ ID NO: 891131 - RNA, 19 nt, Homo sapiens
  misc_RNA (1)...(19): siRNA sense strand
agcaagccauuaacaagau

SEQ ID NO: 891132 - RNA, 19 nt, Homo sapiens
  misc_RNA (1)...(19): siRNA sense strand
ggucaggaagauaccauuc

SEQ ID NO: 891133 - RNA, 19 nt, Homo sapiens
  misc_RNA (1)...(19): siRNA sense strand
ccaccacgcaugucaagca

SEQ ID NO: 891134 - RNA, 19 nt, Homo sapiens
  misc_RNA (1)...(19): siRNA sense strand
uuacugaccgaggaaguuu

SEQ ID NO: 891135 - RNA, 19 nt, Homo sapiens
  misc_RNA (1)...(19): siRNA sense strand
cagcucuuguagugagauu

SEQ ID NO: 891136 - RNA, 19 nt, Homo sapiens
  misc_RNA (1)...(19): siRNA sense strand
gcagcuccaccacgcaugu

SEQ ID NO: 891137 - RNA, 19 nt, Homo sapiens
  misc_RNA (1)...(19): siRNA sense strand
caugucaagcaagccauua

SEQ ID NO: 891138 - RNA, 19 nt, Homo sapiens
  misc_RNA (1)...(19): siRNA sense strand
uggaaacaaagcugacuug

SEQ ID NO: 891139 - RNA, 19 nt, Homo sapiens
  misc_RNA (1)...(19): siRNA sense strand
ggaccacuccaggcagguu

SEQ ID NO: 891140 - RNA, 19 nt, Homo sapiens
  misc_RNA (1)...(19): siRNA sense strand
ggaacauccugaaguuuaa

SEQ ID NO: 891141 - RNA, 19 nt, Homo sapiens
  misc_RNA (1)...(19): siRNA sense strand
uaucaaggcugaaggagaa

SEQ ID NO: 891142 - RNA, 19 nt, Homo sapiens
  misc_RNA (1)...(19): siRNA sense strand
gaagagaaggugagaaguu

SEQ ID NO: 891143 - RNA, 19 nt, Homo sapiens
  misc_RNA (1)...(19): siRNA sense strand
ugacugacauggaagagaa

SEQ ID NO: 891144 - RNA, 19 nt, Homo sapiens
  misc_RNA (1)...(19): siRNA sense strand
aagagaaggugagaaguug

SEQ ID NO: 891145 - RNA, 19 nt, Homo sapiens
  misc_RNA (1)...(19): siRNA sense strand
gaucaugccaccaguguag

SEQ ID NO: 891146 - RNA, 19 nt, Homo sapiens
  misc_RNA (1)...(19): siRNA sense strand
ggugagaaguugugaaacg

SEQ ID NO: 891147 - RNA, 19 nt, Homo sapiens
  misc_RNA (1)...(19): siRNA sense strand
caaggacaccagcaacuga

SEQ ID NO: 891148 - RNA, 19 nt, Homo sapiens
  misc_RNA (1)...(19): siRNA sense strand
ccaccggcguugaguacuu

SEQ ID NO: 891149 - RNA, 19 nt, Homo sapiens
  misc_RNA (1)...(19): siRNA sense strand
uggaugccauucugacuga

SEQ ID NO: 891150 - RNA, 19 nt, Homo sapiens
  misc_RNA (1)...(19): siRNA sense strand
gguguugggcucuucauug

SEQ ID NO: 891151 - RNA, 19 nt, Homo sapiens
  misc_RNA (1)...(19): siRNA sense strand
ggacaccagcaacugaaga

SEQ ID NO: 891152 - RNA, 19 nt, Homo sapiens
  misc_RNA (1)...(19): siRNA sense strand
gcucuucauugguguggau

SEQ ID NO: 891153 - RNA, 19 nt, Homo sapiens
  misc_RNA (1)...(19): siRNA sense strand
gagaaggugagaaguugug

SEQ ID NO: 891154 - RNA, 19 nt, Homo sapiens
  misc_RNA (1)...(19): siRNA sense strand
cauucugacugacauggaa

SEQ ID NO: 891155 - RNA, 19 nt, Homo sapiens
  misc_RNA (1)...(19): siRNA sense strand
ugaaugucuuggagaagga

SEQ ID NO: 891156 - RNA, 19 nt, Homo sapiens
  misc_RNA (1)...(19): siRNA sense strand
guguugggcucuucauugg

SEQ ID NO: 891157 - RNA, 19 nt, Homo sapiens
  misc_RNA (1)...(19): siRNA sense strand
gaaggagaacuacguuuug

SEQ ID NO: 891158 - RNA, 19 nt, Homo sapiens
  misc_RNA (1)...(19): siRNA sense strand
gaaggugagaaguugugaa

SEQ ID NO: 891159 - RNA, 19 nt, Homo sapiens
  misc_RNA (1)...(19): siRNA sense strand
ucaaagaugaggccacaag

SEQ ID NO: 891160 - RNA, 19 nt, Homo sapiens
  misc_RNA (1)...(19): siRNA sense strand
aaggugagaaguugugaaa

SEQ ID NO: 891161 - RNA, 19 nt, Homo sapiens
  misc_RNA (1)...(19): siRNA sense strand
cacggcaggugguggcaaa

SEQ ID NO: 891162 - RNA, 19 nt, Homo sapiens
  misc_RNA (1)...(19): siRNA sense strand
aaagcuggaugccauucug

SEQ ID NO: 891163 - RNA, 19 nt, Homo sapiens
  misc_RNA (1)...(19): siRNA sense strand
aaagaugaggccacaagga

SEQ ID NO: 891164 - RNA, 19 nt, Homo sapiens
  misc_RNA (1)...(19): siRNA sense strand
gcaaagcuggaugccauuc

SEQ ID NO: 891165 - RNA, 19 nt, Homo sapiens
  misc_RNA (1)...(19): siRNA sense strand
gcugaaggagaacuacguu

SEQ ID NO: 891166 - RNA, 19 nt, Homo sapiens
  misc_RNA (1)...(19): siRNA sense strand
caaggcugaaggagaacua

SEQ ID NO: 891167 - RNA, 19 nt, Homo sapiens
  misc_RNA (1)...(19): siRNA sense strand
ggaucaugccaccagugua

SEQ ID NO: 891168 - RNA, 19 nt, Homo sapiens
  misc_RNA (1)...(19): siRNA sense strand
ugaaggagaacuacguuuu

SEQ ID NO: 891169 - RNA, 19 nt, Homo sapiens
  misc_RNA (1)...(19): siRNA sense strand
gaacauccugaaguuuaag

SEQ ID NO: 891170 - RNA, 19 nt, Homo sapiens
  misc_RNA (1)...(19): siRNA sense strand
gcuucagccuggacaaugc

SEQ ID NO: 891171 - RNA, 19 nt, Homo sapiens
  misc_RNA (1)...(19): siRNA sense strand
ggaagagaaggugagaagu

SEQ ID NO: 891172 - RNA, 19 nt, Homo sapiens
  misc_RNA (1)...(19): siRNA sense strand
uggaagagaaggugagaag

SEQ ID NO: 891173 - RNA, 19 nt, Homo sapiens
  misc_RNA (1)...(19): siRNA sense strand
ggaacauccugaaguuuaa

SEQ ID NO: 891174 - RNA, 19 nt, Homo sapiens
  misc_RNA (1)...(19): siRNA sense strand
uaucaaggcugaaggagaa

SEQ ID NO: 891175 - RNA, 19 nt, Homo sapiens
  misc_RNA (1)...(19): siRNA sense strand
gaagagaaggugagaaguu

SEQ ID NO: 891176 - RNA, 19 nt, Homo sapiens
  misc_RNA (1)...(19): siRNA sense strand
caccugagcucccugauug

SEQ ID NO: 891177 - RNA, 19 nt, Homo sapiens
  misc_RNA (1)...(19): siRNA sense strand
ugacugacauggaagagaa

SEQ ID NO: 891178 - RNA, 19 nt, Homo sapiens
  misc_RNA (1)...(19): siRNA sense strand
cgaggauccuguuaagauu

SEQ ID NO: 891179 - RNA, 19 nt, Homo sapiens
  misc_RNA (1)...(19): siRNA sense strand
cagaauacaucgauugcau

SEQ ID NO: 891180 - RNA, 19 nt, Homo sapiens
  misc_RNA (1)...(19): siRNA sense strand
gaauacaucgauugcauca

SEQ ID NO: 891181 - RNA, 19 nt, Homo sapiens
  misc_RNA (1)...(19): siRNA sense strand
aagagaaggugagaaguug

SEQ ID NO: 891182 - RNA, 19 nt, Homo sapiens
  misc_RNA (1)...(19): siRNA sense strand
ugacaucagucccuacaag

SEQ ID NO: 891183 - RNA, 19 nt, Homo sapiens
  misc_RNA (1)...(19): siRNA sense strand
gaucaugccaccaguguag

SEQ ID NO: 891184 - RNA, 19 nt, Homo sapiens
  misc_RNA (1)...(19): siRNA sense strand
ggugagaaguugugaaacg

SEQ ID NO: 891185 - RNA, 19 nt, Homo sapiens
  misc_RNA (1)...(19): siRNA sense strand
caaggacaccagcaacuga

SEQ ID NO: 891186 - RNA, 19 nt, Homo sapiens
  misc_RNA (1)...(19): siRNA sense strand
gggcagaauacaucgauug

SEQ ID NO: 891187 - RNA, 19 nt, Homo sapiens
  misc_RNA (1)...(19): siRNA sense strand
ccaccggcguugaguacuu

SEQ ID NO: 891188 - RNA, 19 nt, Homo sapiens
  misc_RNA (1)...(19): siRNA sense strand
uggaugccauucugacuga

SEQ ID NO: 891189 - RNA, 19 nt, Homo sapiens
  misc_RNA (1)...(19): siRNA sense strand
gguguugggcucuucauug

SEQ ID NO: 891190 - RNA, 19 nt, Homo sapiens
  misc_RNA (1)...(19): siRNA sense strand
ggacaccagcaacugaaga

SEQ ID NO: 891191 - RNA, 19 nt, Homo sapiens
  misc_RNA (1)...(19): siRNA sense strand
ccgaggauccuguuaagau

SEQ ID NO: 891192 - RNA, 19 nt, Homo sapiens
  misc_RNA (1)...(19): siRNA sense strand
cccaagggcaguacaugua

SEQ ID NO: 891193 - RNA, 19 nt, Homo sapiens
  misc_RNA (1)...(19): siRNA sense strand
gaggauccuguuaagauug

SEQ ID NO: 891194 - RNA, 19 nt, Homo sapiens
  misc_RNA (1)...(19): siRNA sense strand
caucagucccuacaaguuc

SEQ ID NO: 891195 - RNA, 19 nt, Homo sapiens
  misc_RNA (1)...(19): siRNA sense strand
gagaaggugagaaguugug

SEQ ID NO: 891196 - RNA, 19 nt, Homo sapiens
  misc_RNA (1)...(19): siRNA sense strand
gcucuucauugguguggau

SEQ ID NO: 891197 - RNA, 19 nt, Homo sapiens
  misc_RNA (1)...(19): siRNA sense strand
cauucugacugacauggaa

SEQ ID NO: 891198 - RNA, 19 nt, Homo sapiens
  misc_RNA (1)...(19): siRNA sense strand
ugaaugucuuggagaagga

SEQ ID NO: 891199 - RNA, 19 nt, Homo sapiens
  misc_RNA (1)...(19): siRNA sense strand
guguugggcucuucauugg

SEQ ID NO: 891200 - RNA, 19 nt, Homo sapiens
  misc_RNA (1)...(19): siRNA sense strand
gaaggagaacuacguuuug

SEQ ID NO: 891201 - RNA, 19 nt, Homo sapiens
  misc_RNA (1)...(19): siRNA sense strand
caacggcucaucagcucuu

SEQ ID NO: 891202 - RNA, 19 nt, Homo sapiens
  misc_RNA (1)...(19): siRNA sense strand
gaaggugagaaguugugaa

SEQ ID NO: 891203 - RNA, 19 nt, Homo sapiens
  misc_RNA (1)...(19): siRNA sense strand
cugagucucugcccagugu

SEQ ID NO: 891204 - RNA, 19 nt, Homo sapiens
  misc_RNA (1)...(19): siRNA sense strand
aaggugagaaguugugaaa

SEQ ID NO: 891205 - RNA, 19 nt, Homo sapiens
  misc_RNA (1)...(19): siRNA sense strand
cacggcaggugguggcaaa

SEQ ID NO: 891206 - RNA, 19 nt, Homo sapiens
  misc_RNA (1)...(19): siRNA sense strand
ucaaagaugaggccacaag

SEQ ID NO: 891207 - RNA, 19 nt, Homo sapiens
  misc_RNA (1)...(19): siRNA sense strand
aaagcuggaugccauucug

SEQ ID NO: 891208 - RNA, 19 nt, Homo sapiens
  misc_RNA (1)...(19): siRNA sense strand
ccaccugagcucccugauu

SEQ ID NO: 891209 - RNA, 19 nt, Homo sapiens
  misc_RNA (1)...(19): siRNA sense strand
ugagcucccugauugacau

SEQ ID NO: 891210 - RNA, 19 nt, Homo sapiens
  misc_RNA (1)...(19): siRNA sense strand
gcaaagcuggaugccauuc

SEQ ID NO: 891211 - RNA, 19 nt, Homo sapiens
  misc_RNA (1)...(19): siRNA sense strand
gcugaaggagaacuacguu

SEQ ID NO: 891212 - RNA, 19 nt, Homo sapiens
  misc_RNA (1)...(19): siRNA sense strand
caaggcugaaggagaacua

SEQ ID NO: 891213 - RNA, 19 nt, Homo sapiens
  misc_RNA (1)...(19): siRNA sense strand
aaagaugaggccacaagga

SEQ ID NO: 891214 - RNA, 19 nt, Homo sapiens
  misc_RNA (1)...(19): siRNA sense strand
ggaucaugccaccagugua

SEQ ID NO: 891215 - RNA, 19 nt, Homo sapiens
  misc_RNA (1)...(19): siRNA sense strand
gacaucagucccuacaagu

SEQ ID NO: 891216 - RNA, 19 nt, Homo sapiens
  misc_RNA (1)...(19): siRNA sense strand
gaacauccugaaguuuaag

SEQ ID NO: 891217 - RNA, 19 nt, Homo sapiens
  misc_RNA (1)...(19): siRNA sense strand
ugaaggagaacuacguuuu

SEQ ID NO: 891218 - RNA, 19 nt, Homo sapiens
  misc_RNA (1)...(19): siRNA sense strand
gcuucagccuggacaaugc

SEQ ID NO: 891219 - RNA, 19 nt, Homo sapiens
  misc_RNA (1)...(19): siRNA sense strand
ggaagagaaggugagaagu

SEQ ID NO: 891220 - RNA, 19 nt, Homo sapiens
  misc_RNA (1)...(19): siRNA sense strand
uggaagagaaggugagaag

SEQ ID NO: 891221 - RNA, 19 nt, Homo sapiens
  misc_RNA (1)...(19): siRNA sense strand
ggaauuugcuucaacauug

SEQ ID NO: 891222 - RNA, 19 nt, Homo sapiens
  misc_RNA (1)...(19): siRNA sense strand
ggaaugguauuguggaauu

SEQ ID NO: 891223 - RNA, 19 nt, Homo sapiens
  misc_RNA (1)...(19): siRNA sense strand
gagaauaugaugucaagua

SEQ ID NO: 891224 - RNA, 19 nt, Homo sapiens
  misc_RNA (1)...(19): siRNA sense strand
ccauuguugugaccuauua

SEQ ID NO: 891225 - RNA, 19 nt, Homo sapiens
  misc_RNA (1)...(19): siRNA sense strand
gcaggaauuugcuucaaca

SEQ ID NO: 891226 - RNA, 19 nt, Homo sapiens
  misc_RNA (1)...(19): siRNA sense strand
guugugaccuauuauguug

SEQ ID NO: 891227 - RNA, 19 nt, Homo sapiens
  misc_RNA (1)...(19): siRNA sense strand
aaagaaaacuuccacacua

SEQ ID NO: 891228 - RNA, 19 nt, Homo sapiens
  misc_RNA (1)...(19): siRNA sense strand
cuccacagcuguugagaaa

SEQ ID NO: 891229 - RNA, 19 nt, Homo sapiens
  misc_RNA (1)...(19): siRNA sense strand
gcuugucaguuuaucaauu

SEQ ID NO: 891230 - RNA, 19 nt, Homo sapiens
  misc_RNA (1)...(19): siRNA sense strand
ccuauuauguugacuucuu

SEQ ID NO: 891231 - RNA, 19 nt, Homo sapiens
  misc_RNA (1)...(19): siRNA sense strand
ggaauuggagaauaugaug

SEQ ID NO: 891232 - RNA, 19 nt, Homo sapiens
  misc_RNA (1)...(19): siRNA sense strand
cauucuggauucuggauuu

SEQ ID NO: 891233 - RNA, 19 nt, Homo sapiens
  misc_RNA (1)...(19): siRNA sense strand
gaccuauuauguugacuuc

SEQ ID NO: 891234 - RNA, 19 nt, Homo sapiens
  misc_RNA (1)...(19): siRNA sense strand
gaaugguauuguggaauug

SEQ ID NO: 891235 - RNA, 19 nt, Homo sapiens
  misc_RNA (1)...(19): siRNA sense strand
ccuuguugcuugucaguuu

SEQ ID NO: 891236 - RNA, 19 nt, Homo sapiens
  misc_RNA (1)...(19): siRNA sense strand
cauuaccacugccuccuuu

SEQ ID NO: 891237 - RNA, 19 nt, Homo sapiens
  misc_RNA (1)...(19): siRNA sense strand
gcagugccuuguugcuugu

SEQ ID NO: 891238 - RNA, 19 nt, Homo sapiens
  misc_RNA (1)...(19): siRNA sense strand
gaauuugcuucaacauugc

SEQ ID NO: 891239 - RNA, 19 nt, Homo sapiens
  misc_RNA (1)...(19): siRNA sense strand
cuugucaguuuaucaauug

SEQ ID NO: 891240 - RNA, 19 nt, Homo sapiens
  misc_RNA (1)...(19): siRNA sense strand
gcuucaacauugcuuuaug

SEQ ID NO: 891241 - RNA, 19 nt, Homo sapiens
  misc_RNA (1)...(19): siRNA sense strand
uggagaauaugaugucaag

SEQ ID NO: 891242 - RNA, 19 nt, Homo sapiens
  misc_RNA (1)...(19): siRNA sense strand
ucacuccauuguuguuguu

SEQ ID NO: 891243 - RNA, 19 nt, Homo sapiens
  misc_RNA (1)...(19): siRNA sense strand
guuguuguuuacccaguuu

SEQ ID NO: 891244 - RNA, 19 nt, Homo sapiens
  misc_RNA (1)...(19): siRNA sense strand
acuagcagcugguuucucu

SEQ ID NO: 891245 - RNA, 19 nt, Homo sapiens
  misc_RNA (1)...(19): siRNA sense strand
aauaugaugucaaguaucc

SEQ ID NO: 891246 - RNA, 19 nt, Homo sapiens
  misc_RNA (1)...(19): siRNA sense strand
cuuguugcuugucaguuua

SEQ ID NO: 891247 - RNA, 19 nt, Homo sapiens
  misc_RNA (1)...(19): siRNA sense strand
cauccauuguugugaccua

SEQ ID NO: 891248 - RNA, 19 nt, Homo sapiens
  misc_RNA (1)...(19): siRNA sense strand
uaucacacuccuuggauga

SEQ ID NO: 891249 - RNA, 19 nt, Homo sapiens
  misc_RNA (1)...(19): siRNA sense strand
gaauuggagaauaugaugu

SEQ ID NO: 891250 - RNA, 19 nt, Homo sapiens
  misc_RNA (1)...(19): siRNA sense strand
acuccauuguuguuguuua

SEQ ID NO: 891251 - RNA, 19 nt, Homo sapiens
  misc_RNA (1)...(19): siRNA sense strand
cuucaacauugcuuuaugg

SEQ ID NO: 891252 - RNA, 19 nt, Homo sapiens
  misc_RNA (1)...(19): siRNA sense strand
accacugccuccuuuauug

SEQ ID NO: 891253 - RNA, 19 nt, Homo sapiens
  misc_RNA (1)...(19): siRNA sense strand
gaauaugaugucaaguauc

SEQ ID NO: 891254 - RNA, 19 nt, Homo sapiens
  misc_RNA (1)...(19): siRNA sense strand
cugcauagucuaccuggaa

SEQ ID NO: 891255 - RNA, 19 nt, Homo sapiens
  misc_RNA (1)...(19): siRNA sense strand
uaccacugccuccuuuauu

SEQ ID NO: 891256 - RNA, 19 nt, Homo sapiens
  misc_RNA (1)...(19): siRNA sense strand
caagacuuaauauccauuc

SEQ ID NO: 891257 - RNA, 19 nt, Homo sapiens
  misc_RNA (1)...(19): siRNA sense strand
aaggagaaaccucuuccaa

SEQ ID NO: 891258 - RNA, 19 nt, Homo sapiens
  misc_RNA (1)...(19): siRNA sense strand
uuguggaauuggagaauau

SEQ ID NO: 891259 - RNA, 19 nt, Homo sapiens
  misc_RNA (1)...(19): siRNA sense strand
gaaaccuccacagcuguug

SEQ ID NO: 891260 - RNA, 19 nt, Homo sapiens
  misc_RNA (1)...(19): siRNA sense strand
gcacagaucagagaagcua

SEQ ID NO: 891261 - RNA, 19 nt, Homo sapiens
  misc_RNA (1)...(19): siRNA sense strand
gcaacaaccucuggcucuu

SEQ ID NO: 891262 - RNA, 19 nt, Homo sapiens
  misc_RNA (1)...(19): siRNA sense strand
gcuugcagauguucauuca

SEQ ID NO: 891263 - RNA, 19 nt, Homo sapiens
  misc_RNA (1)...(19): siRNA sense strand
gaaguuuccauacccuuug

SEQ ID NO: 891264 - RNA, 19 nt, Homo sapiens
  misc_RNA (1)...(19): siRNA sense strand
uugcagauguucauucaga

SEQ ID NO: 891265 - RNA, 19 nt, Homo sapiens
  misc_RNA (1)...(19): siRNA sense strand
gccuuuggcuugcagaugu

SEQ ID NO: 891266 - RNA, 19 nt, Homo sapiens
  misc_RNA (1)...(19): siRNA sense strand
gaguggagucggagaaaug

SEQ ID NO: 891267 - RNA, 19 nt, Homo sapiens
  misc_RNA (1)...(19): siRNA sense strand
gacaggagcacagaucaga

SEQ ID NO: 891268 - RNA, 19 nt, Homo sapiens
  misc_RNA (1)...(19): siRNA sense strand
gagaguggagucggagaaa

SEQ ID NO: 891269 - RNA, 19 nt, Homo sapiens
  misc_RNA (1)...(19): siRNA sense strand
ccaaagacaggagcacaga

SEQ ID NO: 891270 - RNA, 19 nt, Homo sapiens
  misc_RNA (1)...(19): siRNA sense strand
caacaaccucuggcucuuc

SEQ ID NO: 891271 - RNA, 19 nt, Homo sapiens
  misc_RNA (1)...(19): siRNA sense strand
caggagcacagaucagaga

SEQ ID NO: 891272 - RNA, 19 nt, Homo sapiens
  misc_RNA (1)...(19): siRNA sense strand
caggcucuguggucagcua

SEQ ID NO: 891273 - RNA, 19 nt, Homo sapiens
  misc_RNA (1)...(19): siRNA sense strand
aaagacaggagcacagauc

SEQ ID NO: 891274 - RNA, 19 nt, Homo sapiens
  misc_RNA (1)...(19): siRNA sense strand
ccagucacacgccuucaug

SEQ ID NO: 891275 - RNA, 19 nt, Homo sapiens
  misc_RNA (1)...(19): siRNA sense strand
agauguucauucagaggaa

SEQ ID NO: 891276 - RNA, 19 nt, Homo sapiens
  misc_RNA (1)...(19): siRNA sense strand
cgagaguggagucggagaa

SEQ ID NO: 891277 - RNA, 19 nt, Homo sapiens
  misc_RNA (1)...(19): siRNA sense strand
gcacacagcuuucaauguc

SEQ ID NO: 891278 - RNA, 19 nt, Homo sapiens
  misc_RNA (1)...(19): siRNA sense strand
gaaagaauccucaaaccaa

SEQ ID NO: 891279 - RNA, 19 nt, Homo sapiens
  misc_RNA (1)...(19): siRNA sense strand
gaaggaugauuucguuaug

SEQ ID NO: 891280 - RNA, 19 nt, Homo sapiens
  misc_RNA (1)...(19): siRNA sense strand
gauuaccucuucugucuuu

SEQ ID NO: 891281 - RNA, 19 nt, Homo sapiens
  misc_RNA (1)...(19): siRNA sense strand
gacaguggacauauuguua

SEQ ID NO: 891282 - RNA, 19 nt, Homo sapiens
  misc_RNA (1)...(19): siRNA sense strand
aaauacagauuaccucuuc

SEQ ID NO: 891283 - RNA, 19 nt, Homo sapiens
  misc_RNA (1)...(19): siRNA sense strand
gagaagaguuccuguuuug

SEQ ID NO: 891284 - RNA, 19 nt, Homo sapiens
  misc_RNA (1)...(19): siRNA sense strand
gacaauggaucauauuagg

SEQ ID NO: 891285 - RNA, 19 nt, Homo sapiens
  misc_RNA (1)...(19): siRNA sense strand
guggacauauuguuaaaug

SEQ ID NO: 891286 - RNA, 19 nt, Homo sapiens
  misc_RNA (1)...(19): siRNA sense strand
guggagcccuuugucaaua

SEQ ID NO: 891287 - RNA, 19 nt, Homo sapiens
  misc_RNA (1)...(19): siRNA sense strand
gaacagacauuuucuuacu

SEQ ID NO: 891288 - RNA, 19 nt, Homo sapiens
  misc_RNA (1)...(19): siRNA sense strand
ggaaggaugauuucguuau

SEQ ID NO: 891289 - RNA, 19 nt, Homo sapiens
  misc_RNA (1)...(19): siRNA sense strand
gcccauaucuggaaacaac

SEQ ID NO: 891290 - RNA, 19 nt, Homo sapiens
  misc_RNA (1)...(19): siRNA sense strand
ucaaagacccaaauguuau

SEQ ID NO: 891291 - RNA, 19 nt, Homo sapiens
  misc_RNA (1)...(19): siRNA sense strand
ugugauccauuucucauuu

SEQ ID NO: 891292 - RNA, 19 nt, Homo sapiens
  misc_RNA (1)...(19): siRNA sense strand
auaaggaucuggugagugu

SEQ ID NO: 891293 - RNA, 19 nt, Homo sapiens
  misc_RNA (1)...(19): siRNA sense strand
caaagacccaaauguuauu

SEQ ID NO: 891294 - RNA, 19 nt, Homo sapiens
  misc_RNA (1)...(19): siRNA sense strand
gaagauauuguacgagaca

SEQ ID NO: 891295 - RNA, 19 nt, Homo sapiens
  misc_RNA (1)...(19): siRNA sense strand
auuaggaacugaagugaaa

SEQ ID NO: 891296 - RNA, 19 nt, Homo sapiens
  misc_RNA (1)...(19): siRNA sense strand
ggacaauggaucauauuag

SEQ ID NO: 891297 - RNA, 19 nt, Homo sapiens
  misc_RNA (1)...(19): siRNA sense strand
uagagaagaguuccuguuu

SEQ ID NO: 891298 - RNA, 19 nt, Homo sapiens
  misc_RNA (1)...(19): siRNA sense strand
caauggaucauauuaggaa

SEQ ID NO: 891299 - RNA, 19 nt, Homo sapiens
  misc_RNA (1)...(19): siRNA sense strand
gaugaguuacgaagaguuu

SEQ ID NO: 891300 - RNA, 19 nt, Homo sapiens
  misc_RNA (1)...(19): siRNA sense strand
gcugguaugugcuauccuu

SEQ ID NO: 891301 - RNA, 19 nt, Homo sapiens
  misc_RNA (1)...(19): siRNA sense strand
guacgagacaguggacaua

SEQ ID NO: 891302 - RNA, 19 nt, Homo sapiens
  misc_RNA (1)...(19): siRNA sense strand
gaucauauuaggaacugaa

SEQ ID NO: 891303 - RNA, 19 nt, Homo sapiens
  misc_RNA (1)...(19): siRNA sense strand
gaaacaacaaagcuuaucu

SEQ ID NO: 891304 - RNA, 19 nt, Homo sapiens
  misc_RNA (1)...(19): siRNA sense strand
gcaaagaaucaugaacaga

SEQ ID NO: 891305 - RNA, 19 nt, Homo sapiens
  misc_RNA (1)...(19): siRNA sense strand
uucaaagacccaaauguua

SEQ ID NO: 891306 - RNA, 19 nt, Homo sapiens
  misc_RNA (1)...(19): siRNA sense strand
cagcaaagaaucaugaaca

SEQ ID NO: 891307 - RNA, 19 nt, Homo sapiens
  misc_RNA (1)...(19): siRNA sense strand
caguggacauauuguuaaa

SEQ ID NO: 891308 - RNA, 19 nt, Homo sapiens
  misc_RNA (1)...(19): siRNA sense strand
ucggaaggaugauuucguu

SEQ ID NO: 891309 - RNA, 19 nt, Homo sapiens
  misc_RNA (1)...(19): siRNA sense strand
ugaugaagauauuguacga

SEQ ID NO: 891310 - RNA, 19 nt, Homo sapiens
  misc_RNA (1)...(19): siRNA sense strand
ccaaauguuauucccaauu

SEQ ID NO: 891311 - RNA, 19 nt, Homo sapiens
  misc_RNA (1)...(19): siRNA sense strand
cgagacaguggacauauug

SEQ ID NO: 891312 - RNA, 19 nt, Homo sapiens
  misc_RNA (1)...(19): siRNA sense strand
ggaugugauuagcccauau

SEQ ID NO: 891313 - RNA, 19 nt, Homo sapiens
  misc_RNA (1)...(19): siRNA sense strand
aaagaaucaugaacagaca

SEQ ID NO: 891314 - RNA, 19 nt, Homo sapiens
  misc_RNA (1)...(19): siRNA sense strand
ccucuucugucuuuaaagu

SEQ ID NO: 891315 - RNA, 19 nt, Homo sapiens
  misc_RNA (1)...(19): siRNA sense strand
ggugaguguucgaaagaau

SEQ ID NO: 891316 - RNA, 19 nt, Homo sapiens
  misc_RNA (1)...(19): siRNA sense strand
ucgguuauaugaugaagau

SEQ ID NO: 891317 - RNA, 19 nt, Homo sapiens
  misc_RNA (1)...(19): siRNA sense strand
gauuagcccauaucuggaa

SEQ ID NO: 891318 - RNA, 19 nt, Homo sapiens
  misc_RNA (1)...(19): siRNA sense strand
uuucaaagacccaaauguu

SEQ ID NO: 891319 - RNA, 19 nt, Homo sapiens
  misc_RNA (1)...(19): siRNA sense strand
ggaaacaacaaagcuuauc

SEQ ID NO: 891320 - RNA, 19 nt, Homo sapiens
  misc_RNA (1)...(19): siRNA sense strand
caauaugaggaugugauua

SEQ ID NO: 891321 - RNA, 19 nt, Homo sapiens
  misc_RNA (1)...(19): siRNA sense strand
gcuaguggaagacucagaa

SEQ ID NO: 891322 - RNA, 19 nt, Homo sapiens
  misc_RNA (1)...(19): siRNA sense strand
ccaaccagauagagaagag

SEQ ID NO: 891323 - RNA, 19 nt, Homo sapiens
  misc_RNA (1)...(19): siRNA sense strand
acaguggacauauuguuaa

SEQ ID NO: 891324 - RNA, 19 nt, Homo sapiens
  misc_RNA (1)...(19): siRNA sense strand
gcuuaugauucugcuggua

SEQ ID NO: 891325 - RNA, 19 nt, Homo sapiens
  misc_RNA (1)...(19): siRNA sense strand
cgaaagaauccucaaacca

SEQ ID NO: 891326 - RNA, 19 nt, Homo sapiens
  misc_RNA (1)...(19): siRNA sense strand
ucaauaugaggaugugauu

SEQ ID NO: 891327 - RNA, 19 nt, Homo sapiens
  misc_RNA (1)...(19): siRNA sense strand
cauauuaggaacugaagug

SEQ ID NO: 891328 - RNA, 19 nt, Homo sapiens
  misc_RNA (1)...(19): siRNA sense strand
uggacaauggaucauauua

SEQ ID NO: 891329 - RNA, 19 nt, Homo sapiens
  misc_RNA (1)...(19): siRNA sense strand
uaccucuucugucuuuaaa

SEQ ID NO: 891330 - RNA, 19 nt, Homo sapiens
  misc_RNA (1)...(19): siRNA sense strand
cuggaaacaacaaagcuua

SEQ ID NO: 891331 - RNA, 19 nt, Homo sapiens
  misc_RNA (1)...(19): siRNA sense strand
ggagcccuuugucaauaug

SEQ ID NO: 891332 - RNA, 19 nt, Homo sapiens
  misc_RNA (1)...(19): siRNA sense strand
acgagacaguggacauauu

SEQ ID NO: 891333 - RNA, 19 nt, Homo sapiens
  misc_RNA (1)...(19): siRNA sense strand
ucuggacaauggaucauau

SEQ ID NO: 891334 - RNA, 19 nt, Homo sapiens
  misc_RNA (1)...(19): siRNA sense strand
cagccaaccagauagagaa

SEQ ID NO: 891335 - RNA, 19 nt, Homo sapiens
  misc_RNA (1)...(19): siRNA sense strand
aggcgucaccuucauguuu

SEQ ID NO: 891336 - RNA, 19 nt, Homo sapiens
  misc_RNA (1)...(19): siRNA sense strand
gguggagcccuuugucaau

SEQ ID NO: 891337 - RNA, 19 nt, Homo sapiens
  misc_RNA (1)...(19): siRNA sense strand
aauaugaggaugugauuag

SEQ ID NO: 891338 - RNA, 19 nt, Homo sapiens
  misc_RNA (1)...(19): siRNA sense strand
uaucaggcgucaccuucau

SEQ ID NO: 891339 - RNA, 19 nt, Homo sapiens
  misc_RNA (1)...(19): siRNA sense strand
gugauccauuucucauuuc

SEQ ID NO: 891340 - RNA, 19 nt, Homo sapiens
  misc_RNA (1)...(19): siRNA sense strand
gaaucaugaacagacauuu

SEQ ID NO: 891341 - RNA, 19 nt, Homo sapiens
  misc_RNA (1)...(19): siRNA sense strand
auauucagccaaccagaua

SEQ ID NO: 891342 - RNA, 19 nt, Homo sapiens
  misc_RNA (1)...(19): siRNA sense strand
auccauuucucauuucuga

SEQ ID NO: 891343 - RNA, 19 nt, Homo sapiens
  misc_RNA (1)...(19): siRNA sense strand
ccauuucucauuucugaug

SEQ ID NO: 891344 - RNA, 19 nt, Homo sapiens
  misc_RNA (1)...(19): siRNA sense strand
gguaugugcuauccuucag

SEQ ID NO: 891345 - RNA, 19 nt, Homo sapiens
  misc_RNA (1)...(19): siRNA sense strand
guucgaaagaauccucaaa

SEQ ID NO: 891346 - RNA, 19 nt, Homo sapiens
  misc_RNA (1)...(19): siRNA sense strand
gcuuugaccagaccuuuca

SEQ ID NO: 891347 - RNA, 19 nt, Homo sapiens
  misc_RNA (1)...(19): siRNA sense strand
agacaguggacauauuguu

SEQ ID NO: 891348 - RNA, 19 nt, Homo sapiens
  misc_RNA (1)...(19): siRNA sense strand
ccuaucggaaggaugauuu

SEQ ID NO: 891349 - RNA, 19 nt, Homo sapiens
  misc_RNA (1)...(19): siRNA sense strand
agagaagaguuccuguuuu

SEQ ID NO: 891350 - RNA, 19 nt, Homo sapiens
  misc_RNA (1)...(19): siRNA sense strand
acacagcuuucaaugucau

SEQ ID NO: 891351 - RNA, 19 nt, Homo sapiens
  misc_RNA (1)...(19): siRNA sense strand
ccaagaaaauacagauuac

SEQ ID NO: 891352 - RNA, 19 nt, Homo sapiens
  misc_RNA (1)...(19): siRNA sense strand
uggagcccuuugucaauau

SEQ ID NO: 891353 - RNA, 19 nt, Homo sapiens
  misc_RNA (1)...(19): siRNA sense strand
ucugaugaguuacgaagag

SEQ ID NO: 891354 - RNA, 19 nt, Homo sapiens
  misc_RNA (1)...(19): siRNA sense strand
cuauaaggaucuggugagu

SEQ ID NO: 891355 - RNA, 19 nt, Homo sapiens
  misc_RNA (1)...(19): siRNA sense strand
aguuucagcuuaugauucu

SEQ ID NO: 891356 - RNA, 19 nt, Homo sapiens
  misc_RNA (1)...(19): siRNA sense strand
gaguuccuguuuugucuuu

SEQ ID NO: 891357 - RNA, 19 nt, Homo sapiens
  misc_RNA (1)...(19): siRNA sense strand
ggcgucaccuucauguuuu

SEQ ID NO: 891358 - RNA, 19 nt, Homo sapiens
  misc_RNA (1)...(19): siRNA sense strand
uuaccucuucugucuuuaa

SEQ ID NO: 891359 - RNA, 19 nt, Homo sapiens
  misc_RNA (1)...(19): siRNA sense strand
aggaugugauuagcccaua

SEQ ID NO: 891360 - RNA, 19 nt, Homo sapiens
  misc_RNA (1)...(19): siRNA sense strand
uaaauguuccuugcacaca

SEQ ID NO: 891361 - RNA, 19 nt, Homo sapiens
  misc_RNA (1)...(19): siRNA sense strand
cggaaggaugauuucguua

SEQ ID NO: 891362 - RNA, 19 nt, Homo sapiens
  misc_RNA (1)...(19): siRNA sense strand
cuucagcaaagaaucauga

SEQ ID NO: 891363 - RNA, 19 nt, Homo sapiens
  misc_RNA (1)...(19): siRNA sense strand
gaugugauuagcccauauc

SEQ ID NO: 891364 - RNA, 19 nt, Homo sapiens
  misc_RNA (1)...(19): siRNA sense strand
gaagcuauaaauguuccuu

SEQ ID NO: 891365 - RNA, 19 nt, Homo sapiens
  misc_RNA (1)...(19): siRNA sense strand
gaucuggugaguguucgaa

SEQ ID NO: 891366 - RNA, 19 nt, Homo sapiens
  misc_RNA (1)...(19): siRNA sense strand
ccagaccuuucaguccuau

SEQ ID NO: 891367 - RNA, 19 nt, Homo sapiens
  misc_RNA (1)...(19): siRNA sense strand
agaaucaugaacagacauu

SEQ ID NO: 891368 - RNA, 19 nt, Homo sapiens
  misc_RNA (1)...(19): siRNA sense strand
ccagaaacccagugcauua

SEQ ID NO: 891369 - RNA, 19 nt, Homo sapiens
  misc_RNA (1)...(19): siRNA sense strand
uaauguagcugaaguuauc

SEQ ID NO: 891370 - RNA, 19 nt, Homo sapiens
  misc_RNA (1)...(19): siRNA sense strand
gaacaaguaugugcugucu

SEQ ID NO: 891371 - RNA, 19 nt, Homo sapiens
  misc_RNA (1)...(19): siRNA sense strand
caacagcaguucaagaucu

SEQ ID NO: 891372 - RNA, 19 nt, Homo sapiens
  misc_RNA (1)...(19): siRNA sense strand
ccugcuaccuggcuucuua

SEQ ID NO: 891373 - RNA, 19 nt, Homo sapiens
  misc_RNA (1)...(19): siRNA sense strand
gaaaacaucuccugcaaag

SEQ ID NO: 891374 - RNA, 19 nt, Homo sapiens
  misc_RNA (1)...(19): siRNA sense strand
aaacugggcuggguagaga

SEQ ID NO: 891375 - RNA, 19 nt, Homo sapiens
  misc_RNA (1)...(19): siRNA sense strand
acaaguaugugcugucugu

SEQ ID NO: 891376 - RNA, 19 nt, Homo sapiens
  misc_RNA (1)...(19): siRNA sense strand
cuucuuaccucacgaacaa

SEQ ID NO: 891377 - RNA, 19 nt, Homo sapiens
  misc_RNA (1)...(19): siRNA sense strand
gaaauuuaccuacccuaca

SEQ ID NO: 891378 - RNA, 19 nt, Homo sapiens
  misc_RNA (1)...(19): siRNA sense strand
caggaugccuucccuucaa

SEQ ID NO: 891379 - RNA, 19 nt, Homo sapiens
  misc_RNA (1)...(19): siRNA sense strand
guagagaucaacagcaguu

SEQ ID NO: 891380 - RNA, 19 nt, Homo sapiens
  misc_RNA (1)...(19): siRNA sense strand
cuacagaagucccagaaac

SEQ ID NO: 891381 - RNA, 19 nt, Homo sapiens
  misc_RNA (1)...(19): siRNA sense strand
gaucuguagugcccucuuc

SEQ ID NO: 891382 - RNA, 19 nt, Homo sapiens
  misc_RNA (1)...(19): siRNA sense strand
cauaauguagcugaaguua

SEQ ID NO: 891383 - RNA, 19 nt, Homo sapiens
  misc_RNA (1)...(19): siRNA sense strand
uuaccuacccuacauuauu

SEQ ID NO: 891384 - RNA, 19 nt, Homo sapiens
  misc_RNA (1)...(19): siRNA sense strand
gaucaacagcaguucaaga

SEQ ID NO: 891385 - RNA, 19 nt, Homo sapiens
  misc_RNA (1)...(19): siRNA sense strand
cugucugucuugaaauuua

SEQ ID NO: 891386 - RNA, 19 nt, Homo sapiens
  misc_RNA (1)...(19): siRNA sense strand
uaccuacccuacauuauuc

SEQ ID NO: 891387 - RNA, 19 nt, Homo sapiens
  misc_RNA (1)...(19): siRNA sense strand
aaauuuaccuacccuacau

SEQ ID NO: 891388 - RNA, 19 nt, Homo sapiens
  misc_RNA (1)...(19): siRNA sense strand
uagcugaaguuaucaucug

SEQ ID NO: 891389 - RNA, 19 nt, Homo sapiens
  misc_RNA (1)...(19): siRNA sense strand
gagaucaacagcaguucaa

SEQ ID NO: 891390 - RNA, 19 nt, Homo sapiens
  misc_RNA (1)...(19): siRNA sense strand
guggguaccagaaguguuu

SEQ ID NO: 891391 - RNA, 19 nt, Homo sapiens
  misc_RNA (1)...(19): siRNA sense strand
cagaaacccagugcauuaa

SEQ ID NO: 891392 - RNA, 19 nt, Homo sapiens
  misc_RNA (1)...(19): siRNA sense strand
gcaggaugccuucccuuca

SEQ ID NO: 891393 - RNA, 19 nt, Homo sapiens
  misc_RNA (1)...(19): siRNA sense strand
guuuguggguauaaucuau

SEQ ID NO: 891394 - RNA, 19 nt, Homo sapiens
  misc_RNA (1)...(19): siRNA sense strand
ugugcugucugucuugaaa

SEQ ID NO: 891395 - RNA, 19 nt, Homo sapiens
  misc_RNA (1)...(19): siRNA sense strand
gcucauugguggacuuuug

SEQ ID NO: 891396 - RNA, 19 nt, Homo sapiens
  misc_RNA (1)...(19): siRNA sense strand
gcauaauguagcugaaguu

SEQ ID NO: 891397 - RNA, 19 nt, Homo sapiens
  misc_RNA (1)...(19): siRNA sense strand
cccaggggcuuauaaaauu

SEQ ID NO: 891398 - RNA, 19 nt, Homo sapiens
  misc_RNA (1)...(19): siRNA sense strand
gaaacugggcuggguagag

SEQ ID NO: 891399 - RNA, 19 nt, Homo sapiens
  misc_RNA (1)...(19): siRNA sense strand
gaugccuucccuucaauga

SEQ ID NO: 891400 - RNA, 19 nt, Homo sapiens
  misc_RNA (1)...(19): siRNA sense strand
gcaguucaagaucucaugu

SEQ ID NO: 891401 - RNA, 19 nt, Homo sapiens
  misc_RNA (1)...(19): siRNA sense strand
uuucucacuuugcauaaug

SEQ ID NO: 891402 - RNA, 19 nt, Homo sapiens
  misc_RNA (1)...(19): siRNA sense strand
ccagagcauuguccagacu

SEQ ID NO: 891403 - RNA, 19 nt, Homo sapiens
  misc_RNA (1)...(19): siRNA sense strand
guguuucucacuuugcaua

SEQ ID NO: 891404 - RNA, 19 nt, Homo sapiens
  misc_RNA (1)...(19): siRNA sense strand
uaccagaaguguuuucaga

SEQ ID NO: 891405 - RNA, 19 nt, Homo sapiens
  misc_RNA (1)...(19): siRNA sense strand
cugcuucagugcuguuugu

SEQ ID NO: 891406 - RNA, 19 nt, Homo sapiens
  misc_RNA (1)...(19): siRNA sense strand
gacuggccauuccuguguu

SEQ ID NO: 891407 - RNA, 19 nt, Homo sapiens
  misc_RNA (1)...(19): siRNA sense strand
aguucaagaucucauguuc

SEQ ID NO: 891408 - RNA, 19 nt, Homo sapiens
  misc_RNA (1)...(19): siRNA sense strand
aguaugugcugucugucuu

SEQ ID NO: 891409 - RNA, 19 nt, Homo sapiens
  misc_RNA (1)...(19): siRNA sense strand
ugcugucugucuugaaauu

SEQ ID NO: 891410 - RNA, 19 nt, Homo sapiens
  misc_RNA (1)...(19): siRNA sense strand
uaugugcugucugucuuga

SEQ ID NO: 891411 - RNA, 19 nt, Homo sapiens
  misc_RNA (1)...(19): siRNA sense strand
agacuggccauuccugugu

SEQ ID NO: 891412 - RNA, 19 nt, Homo sapiens
  misc_RNA (1)...(19): siRNA sense strand
uaacagaacucggauauaa

SEQ ID NO: 891413 - RNA, 19 nt, Homo sapiens
  misc_RNA (1)...(19): siRNA sense strand
cgacauggaucacacaaua

SEQ ID NO: 891414 - RNA, 19 nt, Homo sapiens
  misc_RNA (1)...(19): siRNA sense strand
gaacucggauauaaugucu

SEQ ID NO: 891415 - RNA, 19 nt, Homo sapiens
  misc_RNA (1)...(19): siRNA sense strand
gaaacuggaugagaaagca

SEQ ID NO: 891416 - RNA, 19 nt, Homo sapiens
  misc_RNA (1)...(19): siRNA sense strand
gaaucuauccuaugucuuc

SEQ ID NO: 891417 - RNA, 19 nt, Homo sapiens
  misc_RNA (1)...(19): siRNA sense strand
ccaugaaucuauccuaugu

SEQ ID NO: 891418 - RNA, 19 nt, Homo sapiens
  misc_RNA (1)...(19): siRNA sense strand
gaacaguuuacuaccauga

SEQ ID NO: 891419 - RNA, 19 nt, Homo sapiens
  misc_RNA (1)...(19): siRNA sense strand
guacuacucaccuggcuuu

SEQ ID NO: 891420 - RNA, 19 nt, Homo sapiens
  misc_RNA (1)...(19): siRNA sense strand
acucggauauaaugucuuu

SEQ ID NO: 891421 - RNA, 19 nt, Homo sapiens
  misc_RNA (1)...(19): siRNA sense strand
guccuuggcucagagagua

SEQ ID NO: 891422 - RNA, 19 nt, Homo sapiens
  misc_RNA (1)...(19): siRNA sense strand
uaccaugaaucuauccuau

SEQ ID NO: 891423 - RNA, 19 nt, Homo sapiens
  misc_RNA (1)...(19): siRNA sense strand
ucacacuacucuucuugau

SEQ ID NO: 891424 - RNA, 19 nt, Homo sapiens
  misc_RNA (1)...(19): siRNA sense strand
ccugguaccucauugcaau

SEQ ID NO: 891425 - RNA, 19 nt, Homo sapiens
  misc_RNA (1)...(19): siRNA sense strand
uguugaaacuggaugagaa

SEQ ID NO: 891426 - RNA, 19 nt, Homo sapiens
  misc_RNA (1)...(19): siRNA sense strand
acagaacucggauauaaug

SEQ ID NO: 891427 - RNA, 19 nt, Homo sapiens
  misc_RNA (1)...(19): siRNA sense strand
gaugagaaagcaccuugga

SEQ ID NO: 891428 - RNA, 19 nt, Homo sapiens
  misc_RNA (1)...(19): siRNA sense strand
cauggaucacacaauauua

SEQ ID NO: 891429 - RNA, 19 nt, Homo sapiens
  misc_RNA (1)...(19): siRNA sense strand
ucuauccuaugucuucauu

SEQ ID NO: 891430 - RNA, 19 nt, Homo sapiens
  misc_RNA (1)...(19): siRNA sense strand
uuacuaccaugaaucuauc

SEQ ID NO: 891431 - RNA, 19 nt, Homo sapiens
  misc_RNA (1)...(19): siRNA sense strand
acauggaucacacaauauu

SEQ ID NO: 891432 - RNA, 19 nt, Homo sapiens
  misc_RNA (1)...(19): siRNA sense strand
gagaaagcaccuuggaacu

SEQ ID NO: 891433 - RNA, 19 nt, Homo sapiens
  misc_RNA (1)...(19): siRNA sense strand
ccuaugucuucauuccuuu

SEQ ID NO: 891434 - RNA, 19 nt, Homo sapiens
  misc_RNA (1)...(19): siRNA sense strand
guugaaacuggaugagaaa

SEQ ID NO: 891435 - RNA, 19 nt, Homo sapiens
  misc_RNA (1)...(19): siRNA sense strand
agaauguccuuggcucaga

SEQ ID NO: 891436 - RNA, 19 nt, Homo sapiens
  misc_RNA (1)...(19): siRNA sense strand
acaguuuacuaccaugaau

SEQ ID NO: 891437 - RNA, 19 nt, Homo sapiens
  misc_RNA (1)...(19): siRNA sense strand
gguguaagucuggcuuuga

SEQ ID NO: 891438 - RNA, 19 nt, Homo sapiens
  misc_RNA (1)...(19): siRNA sense strand
gucuggauauuugauacua

SEQ ID NO: 891439 - RNA, 19 nt, Homo sapiens
  misc_RNA (1)...(19): siRNA sense strand
gacauggaucacacaauau

SEQ ID NO: 891440 - RNA, 19 nt, Homo sapiens
  misc_RNA (1)...(19): siRNA sense strand
uggaacaguuuacuaccau

SEQ ID NO: 891441 - RNA, 19 nt, Homo sapiens
  misc_RNA (1)...(19): siRNA sense strand
acucugugcuaaacuggaa

SEQ ID NO: 891442 - RNA, 19 nt, Homo sapiens
  misc_RNA (1)...(19): siRNA sense strand
cuucuuguccugcugauug

SEQ ID NO: 891443 - RNA, 19 nt, Homo sapiens
  misc_RNA (1)...(19): siRNA sense strand
ugucuucauuccuuuaugg

SEQ ID NO: 891444 - RNA, 19 nt, Homo sapiens
  misc_RNA (1)...(19): siRNA sense strand
cuacucaccuggcuuuuca

SEQ ID NO: 891445 - RNA, 19 nt, Homo sapiens
  misc_RNA (1)...(19): siRNA sense strand
agaaagcaccuuggaacug

SEQ ID NO: 891446 - RNA, 19 nt, Homo sapiens
  misc_RNA (1)...(19): siRNA sense strand
uccuaugucuucauuccuu

SEQ ID NO: 891447 - RNA, 19 nt, Homo sapiens
  misc_RNA (1)...(19): siRNA sense strand
uuuaacagaacucggauau

SEQ ID NO: 891448 - RNA, 19 nt, Homo sapiens
  misc_RNA (1)...(19): siRNA sense strand
uuaacagaacucggauaua

SEQ ID NO: 891449 - RNA, 19 nt, Homo sapiens
  misc_RNA (1)...(19): siRNA sense strand
ccacugcaguaaucaucua

SEQ ID NO: 891450 - RNA, 19 nt, Homo sapiens
  misc_RNA (1)...(19): siRNA sense strand
cuggauaucuggguuauug

SEQ ID NO: 891451 - RNA, 19 nt, Homo sapiens
  misc_RNA (1)...(19): siRNA sense strand
ggacucauccgauccuuag

SEQ ID NO: 891452 - RNA, 19 nt, Homo sapiens
  misc_RNA (1)...(19): siRNA sense strand
caucaugaccucguuguug

SEQ ID NO: 891453 - RNA, 19 nt, Homo sapiens
  misc_RNA (1)...(19): siRNA sense strand
ggccaccauugucaucaug

SEQ ID NO: 891454 - RNA, 19 nt, Homo sapiens
  misc_RNA (1)...(19): siRNA sense strand
gugcccagccacugcagua

SEQ ID NO: 891455 - RNA, 19 nt, Homo sapiens
  misc_RNA (1)...(19): siRNA sense strand
ggauaucuggguuauuguc

SEQ ID NO: 891456 - RNA, 19 nt, Homo sapiens
  misc_RNA (1)...(19): siRNA sense strand
cccagccacugcaguaauc

SEQ ID NO: 891457 - RNA, 19 nt, Homo sapiens
  misc_RNA (1)...(19): siRNA sense strand
gcacaaauuuaaccaaaca

SEQ ID NO: 891458 - RNA, 19 nt, Homo sapiens
  misc_RNA (1)...(19): siRNA sense strand
aaggagaacuggaauuuga

SEQ ID NO: 891459 - RNA, 19 nt, Homo sapiens
  misc_RNA (1)...(19): siRNA sense strand
gagccaaggcacaaauuua

SEQ ID NO: 891460 - RNA, 19 nt, Homo sapiens
  misc_RNA (1)...(19): siRNA sense strand
uaaaggagaacuggaauuu

SEQ ID NO: 891461 - RNA, 19 nt, Homo sapiens
  misc_RNA (1)...(19): siRNA sense strand
ugacaaaccuagccacagu

SEQ ID NO: 891462 - RNA, 19 nt, Homo sapiens
  misc_RNA (1)...(19): siRNA sense strand
gaaccugggugccuaaacg

SEQ ID NO: 891463 - RNA, 19 nt, Homo sapiens
  misc_RNA (1)...(19): siRNA sense strand
uagauaagguaacugacaa

SEQ ID NO: 891464 - RNA, 19 nt, Homo sapiens
  misc_RNA (1)...(19): siRNA sense strand
ggagccaaggcacaaauuu

SEQ ID NO: 891465 - RNA, 19 nt, Homo sapiens
  misc_RNA (1)...(19): siRNA sense strand
ccaaaguacugggauuaca

SEQ ID NO: 891466 - RNA, 19 nt, Homo sapiens
  misc_RNA (1)...(19): siRNA sense strand
aggcacaaauuuaaccaaa

SEQ ID NO: 891467 - RNA, 19 nt, Homo sapiens
  misc_RNA (1)...(19): siRNA sense strand
ggccugguccugugcauuu

SEQ ID NO: 891468 - RNA, 19 nt, Homo sapiens
  misc_RNA (1)...(19): siRNA sense strand
gaacccagagccuucuuca

SEQ ID NO: 891469 - RNA, 19 nt, Homo sapiens
  misc_RNA (1)...(19): siRNA sense strand
ccacagaacccugccuuuc

SEQ ID NO: 891470 - RNA, 19 nt, Homo sapiens
  misc_RNA (1)...(19): siRNA sense strand
gccucagccucccaaagua

SEQ ID NO: 891471 - RNA, 19 nt, Homo sapiens
  misc_RNA (1)...(19): siRNA sense strand
agccaaggcacaaauuuaa

SEQ ID NO: 891472 - RNA, 19 nt, Homo sapiens
  misc_RNA (1)...(19): siRNA sense strand
cacagaacccugccuuuca

SEQ ID NO: 891473 - RNA, 19 nt, Homo sapiens
  misc_RNA (1)...(19): siRNA sense strand
agaagcagcgucccucaga

SEQ ID NO: 891474 - RNA, 19 nt, Homo sapiens
  misc_RNA (1)...(19): siRNA sense strand
gaacuccugaccucaagca

SEQ ID NO: 891475 - RNA, 19 nt, Homo sapiens
  misc_RNA (1)...(19): siRNA sense strand
cuccugaccucaagcaauc

SEQ ID NO: 891476 - RNA, 19 nt, Homo sapiens
  misc_RNA (1)...(19): siRNA sense strand
cuaaaggagaacuggaauu

SEQ ID NO: 891477 - RNA, 19 nt, Homo sapiens
  misc_RNA (1)...(19): siRNA sense strand
acagaacccugccuuucag

SEQ ID NO: 891478 - RNA, 19 nt, Homo sapiens
  misc_RNA (1)...(19): siRNA sense strand
ucaccaccaucuccguugu

SEQ ID NO: 891479 - RNA, 19 nt, Homo sapiens
  misc_RNA (1)...(19): siRNA sense strand
gcuggaacgucugcaggau

SEQ ID NO: 891480 - RNA, 19 nt, Homo sapiens
  misc_RNA (1)...(19): siRNA sense strand
ccacaccgcuugggaaccu

SEQ ID NO: 891481 - RNA, 19 nt, Homo sapiens
  misc_RNA (1)...(19): siRNA sense strand
caaaguacugggauuacag

SEQ ID NO: 891482 - RNA, 19 nt, Homo sapiens
  misc_RNA (1)...(19): siRNA sense strand
caccaucuccguuguuucu

SEQ ID NO: 891483 - RNA, 19 nt, Homo sapiens
  misc_RNA (1)...(19): siRNA sense strand
ggcacaaauuuaaccaaac

SEQ ID NO: 891484 - RNA, 19 nt, Homo sapiens
  misc_RNA (1)...(19): siRNA sense strand
aaaggagaacuggaauuug

SEQ ID NO: 891485 - RNA, 19 nt, Homo sapiens
  misc_RNA (1)...(19): siRNA sense strand
ggagaacuggaauuugaac

SEQ ID NO: 891486 - RNA, 19 nt, Homo sapiens
  misc_RNA (1)...(19): siRNA sense strand
gcauugagcuccacuguau

SEQ ID NO: 891487 - RNA, 19 nt, Homo sapiens
  misc_RNA (1)...(19): siRNA sense strand
gaagguaccugcagagcuu

SEQ ID NO: 891488 - RNA, 19 nt, Homo sapiens
  misc_RNA (1)...(19): siRNA sense strand
ggaagacacagcaaagaua

SEQ ID NO: 891489 - RNA, 19 nt, Homo sapiens
  misc_RNA (1)...(19): siRNA sense strand
gaaagaaggagcagauaga

SEQ ID NO: 891490 - RNA, 19 nt, Homo sapiens
  misc_RNA (1)...(19): siRNA sense strand
gcaaugguacugugucuuu

SEQ ID NO: 891491 - RNA, 19 nt, Homo sapiens
  misc_RNA (1)...(19): siRNA sense strand
ugacaaaucccgaaagcua

SEQ ID NO: 891492 - RNA, 19 nt, Homo sapiens
  misc_RNA (1)...(19): siRNA sense strand
ggagaguaauccauacaga

SEQ ID NO: 891493 - RNA, 19 nt, Homo sapiens
  misc_RNA (1)...(19): siRNA sense strand
gaagaggaaacaaguauca

SEQ ID NO: 891494 - RNA, 19 nt, Homo sapiens
  misc_RNA (1)...(19): siRNA sense strand
uaucaaagcugcucguucu

SEQ ID NO: 891495 - RNA, 19 nt, Homo sapiens
  misc_RNA (1)...(19): siRNA sense strand
agacuaaacuacucucgaa

SEQ ID NO: 891496 - RNA, 19 nt, Homo sapiens
  misc_RNA (1)...(19): siRNA sense strand
gaagacacagcaaagauau

SEQ ID NO: 891497 - RNA, 19 nt, Homo sapiens
  misc_RNA (1)...(19): siRNA sense strand
uggcaaagauucucuguca

SEQ ID NO: 891498 - RNA, 19 nt, Homo sapiens
  misc_RNA (1)...(19): siRNA sense strand
gaaagcuaccacauucuaa

SEQ ID NO: 891499 - RNA, 19 nt, Homo sapiens
  misc_RNA (1)...(19): siRNA sense strand
uaacaaagaagcuuaugug

SEQ ID NO: 891500 - RNA, 19 nt, Homo sapiens
  misc_RNA (1)...(19): siRNA sense strand
ugaaggcccugcuagagaa

SEQ ID NO: 891501 - RNA, 19 nt, Homo sapiens
  misc_RNA (1)...(19): siRNA sense strand
gcaaagauucucugucauc

SEQ ID NO: 891502 - RNA, 19 nt, Homo sapiens
  misc_RNA (1)...(19): siRNA sense strand
gcuaugacccgcaggcuaa

SEQ ID NO: 891503 - RNA, 19 nt, Homo sapiens
  misc_RNA (1)...(19): siRNA sense strand
ggaaacaaguaucaaagcu

SEQ ID NO: 891504 - RNA, 19 nt, Homo sapiens
  misc_RNA (1)...(19): siRNA sense strand
uagagaggcugggcuauga

SEQ ID NO: 891505 - RNA, 19 nt, Homo sapiens
  misc_RNA (1)...(19): siRNA sense strand
cugcagagcuuauuugucu

SEQ ID NO: 891506 - RNA, 19 nt, Homo sapiens
  misc_RNA (1)...(19): siRNA sense strand
caaugguacugugucuuua

SEQ ID NO: 891507 - RNA, 19 nt, Homo sapiens
  misc_RNA (1)...(19): siRNA sense strand
ucgauggccuggagaguaa

SEQ ID NO: 891508 - RNA, 19 nt, Homo sapiens
  misc_RNA (1)...(19): siRNA sense strand
cgaaagcuaccacauucua

SEQ ID NO: 891509 - RNA, 19 nt, Homo sapiens
  misc_RNA (1)...(19): siRNA sense strand
ggcuacagcuucagaaaca

SEQ ID NO: 891510 - RNA, 19 nt, Homo sapiens
  misc_RNA (1)...(19): siRNA sense strand
uuaaagaagucucggaucu

SEQ ID NO: 891511 - RNA, 19 nt, Homo sapiens
  misc_RNA (1)...(19): siRNA sense strand
gagaguaauccauacagaa

SEQ ID NO: 891512 - RNA, 19 nt, Homo sapiens
  misc_RNA (1)...(19): siRNA sense strand
gggaaugggugacguuguc

SEQ ID NO: 891513 - RNA, 19 nt, Homo sapiens
  misc_RNA (1)...(19): siRNA sense strand
gacauccgguuucuccauu

SEQ ID NO: 891514 - RNA, 19 nt, Homo sapiens
  misc_RNA (1)...(19): siRNA sense strand
ggaaagaaggagcagauag

SEQ ID NO: 891515 - RNA, 19 nt, Homo sapiens
  misc_RNA (1)...(19): siRNA sense strand
gaaguucugucgcauugac

SEQ ID NO: 891516 - RNA, 19 nt, Homo sapiens
  misc_RNA (1)...(19): siRNA sense strand
gaagacaccuggcuuuugg

SEQ ID NO: 891517 - RNA, 19 nt, Homo sapiens
  misc_RNA (1)...(19): siRNA sense strand
ggagcuccguccucagaga

SEQ ID NO: 891518 - RNA, 19 nt, Homo sapiens
  misc_RNA (1)...(19): siRNA sense strand
cccgaaagcuaccacauuc

SEQ ID NO: 891519 - RNA, 19 nt, Homo sapiens
  misc_RNA (1)...(19): siRNA sense strand
gaagaaaccccgagaaugg

SEQ ID NO: 891520 - RNA, 19 nt, Homo sapiens
  misc_RNA (1)...(19): siRNA sense strand
agaagucucggaucucuaa

SEQ ID NO: 891521 - RNA, 19 nt, Homo sapiens
  misc_RNA (1)...(19): siRNA sense strand
aagacaaacuucagaccaa

SEQ ID NO: 891522 - RNA, 19 nt, Homo sapiens
  misc_RNA (1)...(19): siRNA sense strand
gaggaagaggaaacaagua

SEQ ID NO: 891523 - RNA, 19 nt, Homo sapiens
  misc_RNA (1)...(19): siRNA sense strand
ccacaucuaugacaaucag

SEQ ID NO: 891524 - RNA, 19 nt, Homo sapiens
  misc_RNA (1)...(19): siRNA sense strand
ggaagaggaaggucaugga

SEQ ID NO: 891525 - RNA, 19 nt, Homo sapiens
  misc_RNA (1)...(19): siRNA sense strand
uaacacggcuugaguuccu

SEQ ID NO: 891526 - RNA, 19 nt, Homo sapiens
  misc_RNA (1)...(19): siRNA sense strand
gaagaggaaggucauggau

SEQ ID NO: 891527 - RNA, 19 nt, Homo sapiens
  misc_RNA (1)...(19): siRNA sense strand
gauaugccaggcugacauu

SEQ ID NO: 891528 - RNA, 19 nt, Homo sapiens
  misc_RNA (1)...(19): siRNA sense strand
gguacugugucuuuaugga

SEQ ID NO: 891529 - RNA, 19 nt, Homo sapiens
  misc_RNA (1)...(19): siRNA sense strand
aaagaagucucggaucucu

SEQ ID NO: 891530 - RNA, 19 nt, Homo sapiens
  misc_RNA (1)...(19): siRNA sense strand
gaggaaacaaguaucaaag

SEQ ID NO: 891531 - RNA, 19 nt, Homo sapiens
  misc_RNA (1)...(19): siRNA sense strand
gggaagacacagcaaagau

SEQ ID NO: 891532 - RNA, 19 nt, Homo sapiens
  misc_RNA (1)...(19): siRNA sense strand
cggcaagccuggugaagag

SEQ ID NO: 891533 - RNA, 19 nt, Homo sapiens
  misc_RNA (1)...(19): siRNA sense strand
agucagaacccuuacaaug

SEQ ID NO: 891534 - RNA, 19 nt, Homo sapiens
  misc_RNA (1)...(19): siRNA sense strand
cuaaacuacucucgaacug

SEQ ID NO: 891535 - RNA, 19 nt, Homo sapiens
  misc_RNA (1)...(19): siRNA sense strand
ucauguggcugcccuugau

SEQ ID NO: 891536 - RNA, 19 nt, Homo sapiens
  misc_RNA (1)...(19): siRNA sense strand
gggaaagaaggagcagaua

SEQ ID NO: 891537 - RNA, 19 nt, Homo sapiens
  misc_RNA (1)...(19): siRNA sense strand
gugaaggcccugcuagaga

SEQ ID NO: 891538 - RNA, 19 nt, Homo sapiens
  misc_RNA (1)...(19): siRNA sense strand
ggacacagcaaugguacug

SEQ ID NO: 891539 - RNA, 19 nt, Homo sapiens
  misc_RNA (1)...(19): siRNA sense strand
caagaaagacaaacuucag

SEQ ID NO: 891540 - RNA, 19 nt, Homo sapiens
  misc_RNA (1)...(19): siRNA sense strand
ccaagaaagacaaacuuca

SEQ ID NO: 891541 - RNA, 19 nt, Homo sapiens
  misc_RNA (1)...(19): siRNA sense strand
ggaagugguccagaaguuc

SEQ ID NO: 891542 - RNA, 19 nt, Homo sapiens
  misc_RNA (1)...(19): siRNA sense strand
guaccugcagagcuuauuu

SEQ ID NO: 891543 - RNA, 19 nt, Homo sapiens
  misc_RNA (1)...(19): siRNA sense strand
gcugaagaucuuugacuug

SEQ ID NO: 891544 - RNA, 19 nt, Homo sapiens
  misc_RNA (1)...(19): siRNA sense strand
gaguaacacggcuugaguu

SEQ ID NO: 891545 - RNA, 19 nt, Homo sapiens
  misc_RNA (1)...(19): siRNA sense strand
uugauuggguaacaaagaa

SEQ ID NO: 891546 - RNA, 19 nt, Homo sapiens
  misc_RNA (1)...(19): siRNA sense strand
aaagcuaccacauucuaaa

SEQ ID NO: 891547 - RNA, 19 nt, Homo sapiens
  misc_RNA (1)...(19): siRNA sense strand
agaggaaacaaguaucaaa

SEQ ID NO: 891548 - RNA, 19 nt, Homo sapiens
  misc_RNA (1)...(19): siRNA sense strand
guaacaaagaagcuuaugu

SEQ ID NO: 891549 - RNA, 19 nt, Homo sapiens
  misc_RNA (1)...(19): siRNA sense strand
agucucggaucucuaagaa

SEQ ID NO: 891550 - RNA, 19 nt, Homo sapiens
  misc_RNA (1)...(19): siRNA sense strand
ucaaagcugcucguucuga

SEQ ID NO: 891551 - RNA, 19 nt, Homo sapiens
  misc_RNA (1)...(19): siRNA sense strand
ggaguccagcuaugaagga

SEQ ID NO: 891552 - RNA, 19 nt, Homo sapiens
  misc_RNA (1)...(19): siRNA sense strand
ggacauccgguuucuccau

SEQ ID NO: 891553 - RNA, 19 nt, Homo sapiens
  misc_RNA (1)...(19): siRNA sense strand
uguggaggcuguggacauu

SEQ ID NO: 891554 - RNA, 19 nt, Homo sapiens
  misc_RNA (1)...(19): siRNA sense strand
ggaagaggaaacaaguauc

SEQ ID NO: 891555 - RNA, 19 nt, Homo sapiens
  misc_RNA (1)...(19): siRNA sense strand
caagccuggugaagaggaa

SEQ ID NO: 891556 - RNA, 19 nt, Homo sapiens
  misc_RNA (1)...(19): siRNA sense strand
ggaggugaaggcccugcua

SEQ ID NO: 891557 - RNA, 19 nt, Homo sapiens
  misc_RNA (1)...(19): siRNA sense strand
acaaugccgucauccaucu

SEQ ID NO: 891558 - RNA, 19 nt, Homo sapiens
  misc_RNA (1)...(19): siRNA sense strand
gcggcucgauguuaugagu

SEQ ID NO: 891559 - RNA, 19 nt, Homo sapiens
  misc_RNA (1)...(19): siRNA sense strand
gauuguggcagcucugaau

SEQ ID NO: 891560 - RNA, 19 nt, Homo sapiens
  misc_RNA (1)...(19): siRNA sense strand
aagcuuaugugcgagauca

SEQ ID NO: 891561 - RNA, 19 nt, Homo sapiens
  misc_RNA (1)...(19): siRNA sense strand
cagccaagcacuuugacuu

SEQ ID NO: 891562 - RNA, 19 nt, Homo sapiens
  misc_RNA (1)...(19): siRNA sense strand
gcugcugcuugcugaagaa

SEQ ID NO: 891563 - RNA, 19 nt, Homo sapiens
  misc_RNA (1)...(19): siRNA sense strand
aaacuucagaccaagagaa

SEQ ID NO: 891564 - RNA, 19 nt, Homo sapiens
  misc_RNA (1)...(19): siRNA sense strand
uuuggacccuacagacuaa

SEQ ID NO: 891565 - RNA, 19 nt, Homo sapiens
  misc_RNA (1)...(19): siRNA sense strand
guuuggacccuacagacua

SEQ ID NO: 891566 - RNA, 19 nt, Homo sapiens
  misc_RNA (1)...(19): siRNA sense strand
gcaguuuggacccuacaga

SEQ ID NO: 891567 - RNA, 19 nt, Homo sapiens
  misc_RNA (1)...(19): siRNA sense strand
gcauugacaaaucccgaaa

SEQ ID NO: 891568 - RNA, 19 nt, Homo sapiens
  misc_RNA (1)...(19): siRNA sense strand
gugcauggccuucaguucu

SEQ ID NO: 891569 - RNA, 19 nt, Homo sapiens
  misc_RNA (1)...(19): siRNA sense strand
cagcaaugguacugugucu

SEQ ID NO: 891570 - RNA, 19 nt, Homo sapiens
  misc_RNA (1)...(19): siRNA sense strand
cuucagaccaagagaaaga

SEQ ID NO: 891571 - RNA, 19 nt, Homo sapiens
  misc_RNA (1)...(19): siRNA sense strand
gacccuacagacuaaacua

SEQ ID NO: 891572 - RNA, 19 nt, Homo sapiens
  misc_RNA (1)...(19): siRNA sense strand
uuaugagucagaacccuua

SEQ ID NO: 891573 - RNA, 19 nt, Homo sapiens
  misc_RNA (1)...(19): siRNA sense strand
ugaggaagaggaaacaagu

SEQ ID NO: 891574 - RNA, 19 nt, Homo sapiens
  misc_RNA (1)...(19): siRNA sense strand
cgaguaacacggcuugagu

SEQ ID NO: 891575 - RNA, 19 nt, Homo sapiens
  misc_RNA (1)...(19): siRNA sense strand
gaaccgcuggcuccacauc

SEQ ID NO: 891576 - RNA, 19 nt, Homo sapiens
  misc_RNA (1)...(19): siRNA sense strand
ggcugaagcugaggaagag

SEQ ID NO: 891577 - RNA, 19 nt, Homo sapiens
  misc_RNA (1)...(19): siRNA sense strand
agccaaagccaaagcagaa

SEQ ID NO: 891578 - RNA, 19 nt, Homo sapiens
  misc_RNA (1)...(19): siRNA sense strand
cuccagggccuccucguaa

SEQ ID NO: 891579 - RNA, 19 nt, Homo sapiens
  misc_RNA (1)...(19): siRNA sense strand
agccucaggucccgaagaa

SEQ ID NO: 891580 - RNA, 19 nt, Homo sapiens
  misc_RNA (1)...(19): siRNA sense strand
ugagucagaacccuuacaa

SEQ ID NO: 891581 - RNA, 19 nt, Homo sapiens
  misc_RNA (1)...(19): siRNA sense strand
ggcauugagcuccacugua

SEQ ID NO: 891582 - RNA, 19 nt, Homo sapiens
  misc_RNA (1)...(19): siRNA sense strand
gacaaacuucagaccaaga

SEQ ID NO: 891583 - RNA, 19 nt, Homo sapiens
  misc_RNA (1)...(19): siRNA sense strand
gcccaagaaagacaaacuu

SEQ ID NO: 891584 - RNA, 19 nt, Homo sapiens
  misc_RNA (1)...(19): siRNA sense strand
gucagaacccuuacaaugc

SEQ ID NO: 891585 - RNA, 19 nt, Homo sapiens
  misc_RNA (1)...(19): siRNA sense strand
aagaaagacaaacuucaga

SEQ ID NO: 891586 - RNA, 19 nt, Homo sapiens
  misc_RNA (1)...(19): siRNA sense strand
gcacaaaccucuucuguua

SEQ ID NO: 891587 - RNA, 19 nt, Homo sapiens
  misc_RNA (1)...(19): siRNA sense strand
ggacggcccuucacccuaa

SEQ ID NO: 891588 - RNA, 19 nt, Homo sapiens
  misc_RNA (1)...(19): siRNA sense strand
ggaaggacacagaauauuu

SEQ ID NO: 891589 - RNA, 19 nt, Homo sapiens
  misc_RNA (1)...(19): siRNA sense strand
ucacagacaucuccuuuca

SEQ ID NO: 891590 - RNA, 19 nt, Homo sapiens
  misc_RNA (1)...(19): siRNA sense strand
gaagagccgcugcuuacua

SEQ ID NO: 891591 - RNA, 19 nt, Homo sapiens
  misc_RNA (1)...(19): siRNA sense strand
agaggaagcuagaccauga

SEQ ID NO: 891592 - RNA, 19 nt, Homo sapiens
  misc_RNA (1)...(19): siRNA sense strand
gcagugcugugaugaaauc

SEQ ID NO: 891593 - RNA, 19 nt, Homo sapiens
  misc_RNA (1)...(19): siRNA sense strand
gaaggacacagaauauuuc

SEQ ID NO: 891594 - RNA, 19 nt, Homo sapiens
  misc_RNA (1)...(19): siRNA sense strand
acagacaucuccuuucaga

SEQ ID NO: 891595 - RNA, 19 nt, Homo sapiens
  misc_RNA (1)...(19): siRNA sense strand
ggacacagaauauuucaag

SEQ ID NO: 891596 - RNA, 19 nt, Homo sapiens
  misc_RNA (1)...(19): siRNA sense strand
acacagagaugauccuagu

SEQ ID NO: 891597 - RNA, 19 nt, Homo sapiens
  misc_RNA (1)...(19): siRNA sense strand
gaagcuagaccaugagauc

SEQ ID NO: 891598 - RNA, 19 nt, Homo sapiens
  misc_RNA (1)...(19): siRNA sense strand
gaaaggcacaaaccucuuc

SEQ ID NO: 891599 - RNA, 19 nt, Homo sapiens
  misc_RNA (1)...(19): siRNA sense strand
acacggaguugcagaggaa

SEQ ID NO: 891600 - RNA, 19 nt, Homo sapiens
  misc_RNA (1)...(19): siRNA sense strand
gggaagagccgcugcuuac

SEQ ID NO: 891601 - RNA, 19 nt, Homo sapiens
  misc_RNA (1)...(19): siRNA sense strand
aagagccgcugcuuacuau

SEQ ID NO: 891602 - RNA, 19 nt, Homo sapiens
  misc_RNA (1)...(19): siRNA sense strand
gaggcucuguggcagcuuu

SEQ ID NO: 891603 - RNA, 19 nt, Homo sapiens
  misc_RNA (1)...(19): siRNA sense strand
cuauugagccgcuggauga

SEQ ID NO: 891604 - RNA, 19 nt, Homo sapiens
  misc_RNA (1)...(19): siRNA sense strand
gagccgcugcuuacuauug

SEQ ID NO: 891605 - RNA, 19 nt, Homo sapiens
  misc_RNA (1)...(19): siRNA sense strand
gacacagaauauuucaaga

SEQ ID NO: 891606 - RNA, 19 nt, Homo sapiens
  misc_RNA (1)...(19): siRNA sense strand
ggacacagagaugauccua

SEQ ID NO: 891607 - RNA, 19 nt, Homo sapiens
  misc_RNA (1)...(19): siRNA sense strand
aagcaucaguaaccaguau

SEQ ID NO: 891608 - RNA, 19 nt, Homo sapiens
  misc_RNA (1)...(19): siRNA sense strand
gacaggacccucacagaca

SEQ ID NO: 891609 - RNA, 19 nt, Homo sapiens
  misc_RNA (1)...(19): siRNA sense strand
cacccuggcuggcaauguu

SEQ ID NO: 891610 - RNA, 19 nt, Homo sapiens
  misc_RNA (1)...(19): siRNA sense strand
cacagaauauuucaagaac

SEQ ID NO: 891611 - RNA, 19 nt, Homo sapiens
  misc_RNA (1)...(19): siRNA sense strand
gcagaacugggcacaagug

SEQ ID NO: 891612 - RNA, 19 nt, Homo sapiens
  misc_RNA (1)...(19): siRNA sense strand
gggccuguguggaagaaga

SEQ ID NO: 891613 - RNA, 19 nt, Homo sapiens
  misc_RNA (1)...(19): siRNA sense strand
gaccaugagauccggauga

SEQ ID NO: 891614 - RNA, 19 nt, Homo sapiens
  misc_RNA (1)...(19): siRNA sense strand
gacagaaagucgggaagca

SEQ ID NO: 891615 - RNA, 19 nt, Homo sapiens
  misc_RNA (1)...(19): siRNA sense strand
gcucagccucucugcauga

SEQ ID NO: 891616 - RNA, 19 nt, Homo sapiens
  misc_RNA (1)...(19): siRNA sense strand
cacacacccuucagacaga

SEQ ID NO: 891617 - RNA, 19 nt, Homo sapiens
  misc_RNA (1)...(19): siRNA sense strand
guggaaggacacagaauau

SEQ ID NO: 891618 - RNA, 19 nt, Homo sapiens
  misc_RNA (1)...(19): siRNA sense strand
ccucacagacaucuccuuu

SEQ ID NO: 891619 - RNA, 19 nt, Homo sapiens
  misc_RNA (1)...(19): siRNA sense strand
cccaagcacuggcaaagca

SEQ ID NO: 891620 - RNA, 19 nt, Homo sapiens
  misc_RNA (1)...(19): siRNA sense strand
cuauugcugucaacaagga

SEQ ID NO: 891621 - RNA, 19 nt, Homo sapiens
  misc_RNA (1)...(19): siRNA sense strand
gauggauuccgcacacaug

SEQ ID NO: 891622 - RNA, 19 nt, Homo sapiens
  misc_RNA (1)...(19): siRNA sense strand
acaagugcauggaguucug

SEQ ID NO: 891623 - RNA, 19 nt, Homo sapiens
  misc_RNA (1)...(19): siRNA sense strand
accaagagccugcuagugu

SEQ ID NO: 891624 - RNA, 19 nt, Homo sapiens
  misc_RNA (1)...(19): siRNA sense strand
ggcacaaaccucuucuguu

SEQ ID NO: 891625 - RNA, 19 nt, Homo sapiens
  misc_RNA (1)...(19): siRNA sense strand
gcucuacauucggcagaug

SEQ ID NO: 891626 - RNA, 19 nt, Homo sapiens
  misc_RNA (1)...(19): siRNA sense strand
ggaccugaauaugcucuac

SEQ ID NO: 891627 - RNA, 19 nt, Homo sapiens
  misc_RNA (1)...(19): siRNA sense strand
acaggacccucacagacau

SEQ ID NO: 891628 - RNA, 19 nt, Homo sapiens
  misc_RNA (1)...(19): siRNA sense strand
ggcuggcaauguuuacaga

SEQ ID NO: 891629 - RNA, 19 nt, Homo sapiens
  misc_RNA (1)...(19): siRNA sense strand
gaugaugaggugacacaca

SEQ ID NO: 891630 - RNA, 19 nt, Homo sapiens
  misc_RNA (1)...(19): siRNA sense strand
gcucuaggacggcccuuca

SEQ ID NO: 891631 - RNA, 19 nt, Homo sapiens
  misc_RNA (1)...(19): siRNA sense strand
uggaggaccugaauaugcu

SEQ ID NO: 891632 - RNA, 19 nt, Homo sapiens
  misc_RNA (1)...(19): siRNA sense strand
ucgcagcggugacagacau

SEQ ID NO: 891633 - RNA, 19 nt, Homo sapiens
  misc_RNA (1)...(19): siRNA sense strand
gcagaggaagcuagaccau

SEQ ID NO: 891634 - RNA, 19 nt, Homo sapiens
  misc_RNA (1)...(19): siRNA sense strand
gggaugaugaggugacaca

SEQ ID NO: 891635 - RNA, 19 nt, Homo sapiens
  misc_RNA (1)...(19): siRNA sense strand
cagcucagccucucugcau

SEQ ID NO: 891636 - RNA, 19 nt, Homo sapiens
  misc_RNA (1)...(19): siRNA sense strand
cagcagugcaagauggauu

SEQ ID NO: 891637 - RNA, 19 nt, Homo sapiens
  misc_RNA (1)...(19): siRNA sense strand
uacuauugcugucaacaag

SEQ ID NO: 891638 - RNA, 19 nt, Homo sapiens
  misc_RNA (1)...(19): siRNA sense strand
caaagcagggguccuugua

SEQ ID NO: 891639 - RNA, 19 nt, Homo sapiens
  misc_RNA (1)...(19): siRNA sense strand
uguggcagcuuuucuuuga

SEQ ID NO: 891640 - RNA, 19 nt, Homo sapiens
  misc_RNA (1)...(19): siRNA sense strand
gugcauggaguucugaaag

SEQ ID NO: 891641 - RNA, 19 nt, Homo sapiens
  misc_RNA (1)...(19): siRNA sense strand
gacacacacccuucagaca

SEQ ID NO: 891642 - RNA, 19 nt, Homo sapiens
  misc_RNA (1)...(19): siRNA sense strand
acaaaccucuucuguuacc

SEQ ID NO: 891643 - RNA, 19 nt, Homo sapiens
  misc_RNA (1)...(19): siRNA sense strand
ugacaucgcagcggugaca

SEQ ID NO: 891644 - RNA, 19 nt, Homo sapiens
  misc_RNA (1)...(19): siRNA sense strand
ggacugggcuuccgaaaug

SEQ ID NO: 891645 - RNA, 19 nt, Homo sapiens
  misc_RNA (1)...(19): siRNA sense strand
ggacaucgauggagugcuu

SEQ ID NO: 891646 - RNA, 19 nt, Homo sapiens
  misc_RNA (1)...(19): siRNA sense strand
gcaaggagcugagauacga

SEQ ID NO: 891647 - RNA, 19 nt, Homo sapiens
  misc_RNA (1)...(19): siRNA sense strand
ggaaaccauuuaccagaaa

SEQ ID NO: 891648 - RNA, 19 nt, Homo sapiens
  misc_RNA (1)...(19): siRNA sense strand
gggaacaucuuacaacaca

SEQ ID NO: 891649 - RNA, 19 nt, Homo sapiens
  misc_RNA (1)...(19): siRNA sense strand
gggcugggcuuuggaguga

SEQ ID NO: 891650 - RNA, 19 nt, Homo sapiens
  misc_RNA (1)...(19): siRNA sense strand
gugauaacccuaugucuga

SEQ ID NO: 891651 - RNA, 19 nt, Homo sapiens
  misc_RNA (1)...(19): siRNA sense strand
gaucccugcugcucugaaa

SEQ ID NO: 891652 - RNA, 19 nt, Homo sapiens
  misc_RNA (1)...(19): siRNA sense strand
cauccucacuuaccaguau

SEQ ID NO: 891653 - RNA, 19 nt, Homo sapiens
  misc_RNA (1)...(19): siRNA sense strand
caaguuauccucucucaca

SEQ ID NO: 891654 - RNA, 19 nt, Homo sapiens
  misc_RNA (1)...(19): siRNA sense strand
ccacgggcaccgagacuua

SEQ ID NO: 891655 - RNA, 19 nt, Homo sapiens
  misc_RNA (1)...(19): siRNA sense strand
gcaaggagggcugggcuuu

SEQ ID NO: 891656 - RNA, 19 nt, Homo sapiens
  misc_RNA (1)...(19): siRNA sense strand
uggaaaccauuuaccagaa

SEQ ID NO: 891657 - RNA, 19 nt, Homo sapiens
  misc_RNA (1)...(19): siRNA sense strand
guacaggcgucuacaaucc

SEQ ID NO: 891658 - RNA, 19 nt, Homo sapiens
  misc_RNA (1)...(19): siRNA sense strand
gaaaccauuuaccagaaag

SEQ ID NO: 891659 - RNA, 19 nt, Homo sapiens
  misc_RNA (1)...(19): siRNA sense strand
cgagguggaugcagaccaa

SEQ ID NO: 891660 - RNA, 19 nt, Homo sapiens
  misc_RNA (1)...(19): siRNA sense strand
guuuggacauggcaccuuu

SEQ ID NO: 891661 - RNA, 19 nt, Homo sapiens
  misc_RNA (1)...(19): siRNA sense strand
aagccaagaugcccagguu

SEQ ID NO: 891662 - RNA, 19 nt, Homo sapiens
  misc_RNA (1)...(19): siRNA sense strand
caccgagacuuaugcuuca

SEQ ID NO: 891663 - RNA, 19 nt, Homo sapiens
  misc_RNA (1)...(19): siRNA sense strand
gagauacgagggccugaug

SEQ ID NO: 891664 - RNA, 19 nt, Homo sapiens
  misc_RNA (1)...(19): siRNA sense strand
aacccagcauccucacuua

SEQ ID NO: 891665 - RNA, 19 nt, Homo sapiens
  misc_RNA (1)...(19): siRNA sense strand
acauggaucuccuguggau

SEQ ID NO: 891666 - RNA, 19 nt, Homo sapiens
  misc_RNA (1)...(19): siRNA sense strand
ccucccacguggugaauga

SEQ ID NO: 891667 - RNA, 19 nt, Homo sapiens
  misc_RNA (1)...(19): siRNA sense strand
gccaagaugcccagguuug

SEQ ID NO: 891668 - RNA, 19 nt, Homo sapiens
  misc_RNA (1)...(19): siRNA sense strand
caucuuacaacacagcaaa

SEQ ID NO: 891669 - RNA, 19 nt, Homo sapiens
  misc_RNA (1)...(19): siRNA sense strand
ggaugcagaccaaguuauc

SEQ ID NO: 891670 - RNA, 19 nt, Homo sapiens
  misc_RNA (1)...(19): siRNA sense strand
ucuaugcugugggugauaa

SEQ ID NO: 891671 - RNA, 19 nt, Homo sapiens
  misc_RNA (1)...(19): siRNA sense strand
gccugcagcugaucaugga

SEQ ID NO: 891672 - RNA, 19 nt, Homo sapiens
  misc_RNA (1)...(19): siRNA sense strand
ucagagcccacccaccuuu

SEQ ID NO: 891673 - RNA, 19 nt, Homo sapiens
  misc_RNA (1)...(19): siRNA sense strand
gauguccuccucagcaaug

SEQ ID NO: 891674 - RNA, 19 nt, Homo sapiens
  misc_RNA (1)...(19): siRNA sense strand
ccaaccuguuccaccagua

SEQ ID NO: 891675 - RNA, 19 nt, Homo sapiens
  misc_RNA (1)...(19): siRNA sense strand
caaaugcugggaacaucuu

SEQ ID NO: 891676 - RNA, 19 nt, Homo sapiens
  misc_RNA (1)...(19): siRNA sense strand
guggaugcagaccaaguua

SEQ ID NO: 891677 - RNA, 19 nt, Homo sapiens
  misc_RNA (1)...(19): siRNA sense strand
gguggaugcagaccaaguu

SEQ ID NO: 891678 - RNA, 19 nt, Homo sapiens
  misc_RNA (1)...(19): siRNA sense strand
uacaaaugcugggaacauc

SEQ ID NO: 891679 - RNA, 19 nt, Homo sapiens
  misc_RNA (1)...(19): siRNA sense strand
gcucuaugcugugggugau

SEQ ID NO: 891680 - RNA, 19 nt, Homo sapiens
  misc_RNA (1)...(19): siRNA sense strand
aaacccagcauccucacuu

SEQ ID NO: 891681 - RNA, 19 nt, Homo sapiens
  misc_RNA (1)...(19): siRNA sense strand
cguggugaaugacgugaau

SEQ ID NO: 891682 - RNA, 19 nt, Homo sapiens
  misc_RNA (1)...(19): siRNA sense strand
cccuaugucugacguauac

SEQ ID NO: 891683 - RNA, 19 nt, Homo sapiens
  misc_RNA (1)...(19): siRNA sense strand
gcagaaggcaacgcaugau

SEQ ID NO: 891684 - RNA, 19 nt, Homo sapiens
  misc_RNA (1)...(19): siRNA sense strand
cugggaacaucuuacaaca

SEQ ID NO: 891685 - RNA, 19 nt, Homo sapiens
  misc_RNA (1)...(19): siRNA sense strand
cacggagccuguccuugga

SEQ ID NO: 891686 - RNA, 19 nt, Homo sapiens
  misc_RNA (1)...(19): siRNA sense strand
gauggccuuuccucugcuu

SEQ ID NO: 891687 - RNA, 19 nt, Homo sapiens
  misc_RNA (1)...(19): siRNA sense strand
agaccaaguuauccucucu

SEQ ID NO: 891688 - RNA, 19 nt, Homo sapiens
  misc_RNA (1)...(19): siRNA sense strand
gggacugggcuuccgaaau

SEQ ID NO: 891689 - RNA, 19 nt, Homo sapiens
  misc_RNA (1)...(19): siRNA sense strand
caaggagggcugggcuuug

SEQ ID NO: 891690 - RNA, 19 nt, Homo sapiens
  misc_RNA (1)...(19): siRNA sense strand
cagcaacagcccucagcaa

SEQ ID NO: 891691 - RNA, 19 nt, Homo sapiens
  misc_RNA (1)...(19): siRNA sense strand
cagaaggcaacgcaugaug

SEQ ID NO: 891692 - RNA, 19 nt, Homo sapiens
  misc_RNA (1)...(19): siRNA sense strand
caagaugcccagguuugga

SEQ ID NO: 891693 - RNA, 19 nt, Homo sapiens
  misc_RNA (1)...(19): siRNA sense strand
cguccuagccagcaacaug

SEQ ID NO: 891694 - RNA, 19 nt, Homo sapiens
  misc_RNA (1)...(19): siRNA sense strand
cgggcaaggagcugagaua

SEQ ID NO: 891695 - RNA, 19 nt, Homo sapiens
  misc_RNA (1)...(19): siRNA sense strand
uggauguccuccucagcaa

SEQ ID NO: 891696 - RNA, 19 nt, Homo sapiens
  misc_RNA (1)...(19): siRNA sense strand
uccgaaggcuggugaacuc

SEQ ID NO: 891697 - RNA, 19 nt, Homo sapiens
  misc_RNA (1)...(19): siRNA sense strand
gcugggaacaucuuacaac

SEQ ID NO: 891698 - RNA, 19 nt, Homo sapiens
  misc_RNA (1)...(19): siRNA sense strand
aaggagggcugggcuuugg

SEQ ID NO: 891699 - RNA, 19 nt, Homo sapiens
  misc_RNA (1)...(19): siRNA sense strand
ggacugggcuuccgaaaug

SEQ ID NO: 891700 - RNA, 19 nt, Homo sapiens
  misc_RNA (1)...(19): siRNA sense strand
ggacaucgauggagugcuu

SEQ ID NO: 891701 - RNA, 19 nt, Homo sapiens
  misc_RNA (1)...(19): siRNA sense strand
gcaaggagcugagauacga

SEQ ID NO: 891702 - RNA, 19 nt, Homo sapiens
  misc_RNA (1)...(19): siRNA sense strand
ggaaaccauuuaccagaaa

SEQ ID NO: 891703 - RNA, 19 nt, Homo sapiens
  misc_RNA (1)...(19): siRNA sense strand
gggaacaucuuacaacaca

SEQ ID NO: 891704 - RNA, 19 nt, Homo sapiens
  misc_RNA (1)...(19): siRNA sense strand
gggcugggcuuuggaguga

SEQ ID NO: 891705 - RNA, 19 nt, Homo sapiens
  misc_RNA (1)...(19): siRNA sense strand
gugauaacccuaugucuga

SEQ ID NO: 891706 - RNA, 19 nt, Homo sapiens
  misc_RNA (1)...(19): siRNA sense strand
gaucccugcugcucugaaa

SEQ ID NO: 891707 - RNA, 19 nt, Homo sapiens
  misc_RNA (1)...(19): siRNA sense strand
cauccucacuuaccaguau

SEQ ID NO: 891708 - RNA, 19 nt, Homo sapiens
  misc_RNA (1)...(19): siRNA sense strand
caaguuauccucucucaca

SEQ ID NO: 891709 - RNA, 19 nt, Homo sapiens
  misc_RNA (1)...(19): siRNA sense strand
ccacgggcaccgagacuua

SEQ ID NO: 891710 - RNA, 19 nt, Homo sapiens
  misc_RNA (1)...(19): siRNA sense strand
gcaaggagggcugggcuuu

SEQ ID NO: 891711 - RNA, 19 nt, Homo sapiens
  misc_RNA (1)...(19): siRNA sense strand
uggaaaccauuuaccagaa

SEQ ID NO: 891712 - RNA, 19 nt, Homo sapiens
  misc_RNA (1)...(19): siRNA sense strand
guacaggcgucuacaaucc

SEQ ID NO: 891713 - RNA, 19 nt, Homo sapiens
  misc_RNA (1)...(19): siRNA sense strand
gaaaccauuuaccagaaag

SEQ ID NO: 891714 - RNA, 19 nt, Homo sapiens
  misc_RNA (1)...(19): siRNA sense strand
cgagguggaugcagaccaa

SEQ ID NO: 891715 - RNA, 19 nt, Homo sapiens
  misc_RNA (1)...(19): siRNA sense strand
guuuggacauggcaccuuu

SEQ ID NO: 891716 - RNA, 19 nt, Homo sapiens
  misc_RNA (1)...(19): siRNA sense strand
aagccaagaugcccagguu

SEQ ID NO: 891717 - RNA, 19 nt, Homo sapiens
  misc_RNA (1)...(19): siRNA sense strand
caccgagacuuaugcuuca

SEQ ID NO: 891718 - RNA, 19 nt, Homo sapiens
  misc_RNA (1)...(19): siRNA sense strand
gagauacgagggccugaug

SEQ ID NO: 891719 - RNA, 19 nt, Homo sapiens
  misc_RNA (1)...(19): siRNA sense strand
aacccagcauccucacuua

SEQ ID NO: 891720 - RNA, 19 nt, Homo sapiens
  misc_RNA (1)...(19): siRNA sense strand
acauggaucuccuguggau

SEQ ID NO: 891721 - RNA, 19 nt, Homo sapiens
  misc_RNA (1)...(19): siRNA sense strand
ccucccacguggugaauga

SEQ ID NO: 891722 - RNA, 19 nt, Homo sapiens
  misc_RNA (1)...(19): siRNA sense strand
gccaagaugcccagguuug

SEQ ID NO: 891723 - RNA, 19 nt, Homo sapiens
  misc_RNA (1)...(19): siRNA sense strand
caucuuacaacacagcaaa

SEQ ID NO: 891724 - RNA, 19 nt, Homo sapiens
  misc_RNA (1)...(19): siRNA sense strand
ggaugcagaccaaguuauc

SEQ ID NO: 891725 - RNA, 19 nt, Homo sapiens
  misc_RNA (1)...(19): siRNA sense strand
ucuaugcugugggugauaa

SEQ ID NO: 891726 - RNA, 19 nt, Homo sapiens
  misc_RNA (1)...(19): siRNA sense strand
gccugcagcugaucaugga

SEQ ID NO: 891727 - RNA, 19 nt, Homo sapiens
  misc_RNA (1)...(19): siRNA sense strand
ucagagcccacccaccuuu

SEQ ID NO: 891728 - RNA, 19 nt, Homo sapiens
  misc_RNA (1)...(19): siRNA sense strand
gauguccuccucagcaaug

SEQ ID NO: 891729 - RNA, 19 nt, Homo sapiens
  misc_RNA (1)...(19): siRNA sense strand
ccaaccuguuccaccagua

SEQ ID NO: 891730 - RNA, 19 nt, Homo sapiens
  misc_RNA (1)...(19): siRNA sense strand
caaaugcugggaacaucuu

SEQ ID NO: 891731 - RNA, 19 nt, Homo sapiens
  misc_RNA (1)...(19): siRNA sense strand
guggaugcagaccaaguua

SEQ ID NO: 891732 - RNA, 19 nt, Homo sapiens
  misc_RNA (1)...(19): siRNA sense strand
gguggaugcagaccaaguu

SEQ ID NO: 891733 - RNA, 19 nt, Homo sapiens
  misc_RNA (1)...(19): siRNA sense strand
uacaaaugcugggaacauc

SEQ ID NO: 891734 - RNA, 19 nt, Homo sapiens
  misc_RNA (1)...(19): siRNA sense strand
gcucuaugcugugggugau

SEQ ID NO: 891735 - RNA, 19 nt, Homo sapiens
  misc_RNA (1)...(19): siRNA sense strand
aaacccagcauccucacuu

SEQ ID NO: 891736 - RNA, 19 nt, Homo sapiens
  misc_RNA (1)...(19): siRNA sense strand
cguggugaaugacgugaau

SEQ ID NO: 891737 - RNA, 19 nt, Homo sapiens
  misc_RNA (1)...(19): siRNA sense strand
cccuaugucugacguauac

SEQ ID NO: 891738 - RNA, 19 nt, Homo sapiens
  misc_RNA (1)...(19): siRNA sense strand
gcagaaggcaacgcaugau

SEQ ID NO: 891739 - RNA, 19 nt, Homo sapiens
  misc_RNA (1)...(19): siRNA sense strand
cugggaacaucuuacaaca

SEQ ID NO: 891740 - RNA, 19 nt, Homo sapiens
  misc_RNA (1)...(19): siRNA sense strand
cacggagccuguccuugga

SEQ ID NO: 891741 - RNA, 19 nt, Homo sapiens
  misc_RNA (1)...(19): siRNA sense strand
gauggccuuuccucugcuu

SEQ ID NO: 891742 - RNA, 19 nt, Homo sapiens
  misc_RNA (1)...(19): siRNA sense strand
agaccaaguuauccucucu

SEQ ID NO: 891743 - RNA, 19 nt, Homo sapiens
  misc_RNA (1)...(19): siRNA sense strand
gggacugggcuuccgaaau

SEQ ID NO: 891744 - RNA, 19 nt, Homo sapiens
  misc_RNA (1)...(19): siRNA sense strand
caaggagggcugggcuuug

SEQ ID NO: 891745 - RNA, 19 nt, Homo sapiens
  misc_RNA (1)...(19): siRNA sense strand
cagcaacagcccucagcaa

SEQ ID NO: 891746 - RNA, 19 nt, Homo sapiens
  misc_RNA (1)...(19): siRNA sense strand
cagaaggcaacgcaugaug

SEQ ID NO: 891747 - RNA, 19 nt, Homo sapiens
  misc_RNA (1)...(19): siRNA sense strand
caagaugcccagguuugga

SEQ ID NO: 891748 - RNA, 19 nt, Homo sapiens
  misc_RNA (1)...(19): siRNA sense strand
cguccuagccagcaacaug

SEQ ID NO: 891749 - RNA, 19 nt, Homo sapiens
  misc_RNA (1)...(19): siRNA sense strand
cgggcaaggagcugagaua

SEQ ID NO: 891750 - RNA, 19 nt, Homo sapiens
  misc_RNA (1)...(19): siRNA sense strand
uggauguccuccucagcaa

SEQ ID NO: 891751 - RNA, 19 nt, Homo sapiens
  misc_RNA (1)...(19): siRNA sense strand
uccgaaggcuggugaacuc

SEQ ID NO: 891752 - RNA, 19 nt, Homo sapiens
  misc_RNA (1)...(19): siRNA sense strand
gcugggaacaucuuacaac

SEQ ID NO: 891753 - RNA, 19 nt, Homo sapiens
  misc_RNA (1)...(19): siRNA sense strand
aaggagggcugggcuuugg

SEQ ID NO: 891754 - RNA, 19 nt, Homo sapiens
  misc_RNA (1)...(19): siRNA sense strand
gaugaucccugugcagaua

SEQ ID NO: 891755 - RNA, 19 nt, Homo sapiens
  misc_RNA (1)...(19): siRNA sense strand
gaagggagcgucuuuccua

SEQ ID NO: 891756 - RNA, 19 nt, Homo sapiens
  misc_RNA (1)...(19): siRNA sense strand
gcaacuuucuaaacuauga

SEQ ID NO: 891757 - RNA, 19 nt, Homo sapiens
  misc_RNA (1)...(19): siRNA sense strand
cuacaacucuucuacaugu

SEQ ID NO: 891758 - RNA, 19 nt, Homo sapiens
  misc_RNA (1)...(19): siRNA sense strand
gacaguaucagaaacauuu

SEQ ID NO: 891759 - RNA, 19 nt, Homo sapiens
  misc_RNA (1)...(19): siRNA sense strand
caagcaacuuucuaaacua

SEQ ID NO: 891760 - RNA, 19 nt, Homo sapiens
  misc_RNA (1)...(19): siRNA sense strand
ucacaaugguuccuucuga

SEQ ID NO: 891761 - RNA, 19 nt, Homo sapiens
  misc_RNA (1)...(19): siRNA sense strand
aaacgaagcauauugaaga

SEQ ID NO: 891762 - RNA, 19 nt, Homo sapiens
  misc_RNA (1)...(19): siRNA sense strand
cgaagcauauugaagaaga

SEQ ID NO: 891763 - RNA, 19 nt, Homo sapiens
  misc_RNA (1)...(19): siRNA sense strand
ggacaaauuucagcugauc

SEQ ID NO: 891764 - RNA, 19 nt, Homo sapiens
  misc_RNA (1)...(19): siRNA sense strand
cagcugauccucacuauug

SEQ ID NO: 891765 - RNA, 19 nt, Homo sapiens
  misc_RNA (1)...(19): siRNA sense strand
acacauaguuccuccacaa

SEQ ID NO: 891766 - RNA, 19 nt, Homo sapiens
  misc_RNA (1)...(19): siRNA sense strand
gcggaugacugccucaaug

SEQ ID NO: 891767 - RNA, 19 nt, Homo sapiens
  misc_RNA (1)...(19): siRNA sense strand
acacauaguuccuccacaa

SEQ ID NO: 891768 - RNA, 19 nt, Homo sapiens
  misc_RNA (1)...(19): siRNA sense strand
agaaguagcucaagcaacu

SEQ ID NO: 891769 - RNA, 19 nt, Homo sapiens
  misc_RNA (1)...(19): siRNA sense strand
guguuaagcugcauaauac

SEQ ID NO: 891770 - RNA, 19 nt, Homo sapiens
  misc_RNA (1)...(19): siRNA sense strand
gaacuugauugacgaagac

SEQ ID NO: 891771 - RNA, 19 nt, Homo sapiens
  misc_RNA (1)...(19): siRNA sense strand
ucaagcaacuuucuaaacu

SEQ ID NO: 891772 - RNA, 19 nt, Homo sapiens
  misc_RNA (1)...(19): siRNA sense strand
gcagaaaccacaagugaca

SEQ ID NO: 891773 - RNA, 19 nt, Homo sapiens
  misc_RNA (1)...(19): siRNA sense strand
gcaauuagaaguagcucaa

SEQ ID NO: 891774 - RNA, 19 nt, Homo sapiens
  misc_RNA (1)...(19): siRNA sense strand
cagcaaauacaccuucuuu

SEQ ID NO: 891775 - RNA, 19 nt, Homo sapiens
  misc_RNA (1)...(19): siRNA sense strand
gaagaagagaacuugauug

SEQ ID NO: 891776 - RNA, 19 nt, Homo sapiens
  misc_RNA (1)...(19): siRNA sense strand
agacuugcauagugaaauu

SEQ ID NO: 891777 - RNA, 19 nt, Homo sapiens
  misc_RNA (1)...(19): siRNA sense strand
cauaguuccuccacaauuc

SEQ ID NO: 891778 - RNA, 19 nt, Homo sapiens
  misc_RNA (1)...(19): siRNA sense strand
cauaguuccuccacaauuc

SEQ ID NO: 891779 - RNA, 19 nt, Homo sapiens
  misc_RNA (1)...(19): siRNA sense strand
gaagauuucagugacagua

SEQ ID NO: 891780 - RNA, 19 nt, Homo sapiens
  misc_RNA (1)...(19): siRNA sense strand
guauuuggcacaucuguuu

SEQ ID NO: 891781 - RNA, 19 nt, Homo sapiens
  misc_RNA (1)...(19): siRNA sense strand
agaagacaaucaaucauca

SEQ ID NO: 891782 - RNA, 19 nt, Homo sapiens
  misc_RNA (1)...(19): siRNA sense strand
acagcaagaucaaauaaca

SEQ ID NO: 891783 - RNA, 19 nt, Homo sapiens
  misc_RNA (1)...(19): siRNA sense strand
caaggcaacucagcugaug

SEQ ID NO: 891784 - RNA, 19 nt, Homo sapiens
  misc_RNA (1)...(19): siRNA sense strand
gaaacacaaaguaacaaug

SEQ ID NO: 891785 - RNA, 19 nt, Homo sapiens
  misc_RNA (1)...(19): siRNA sense strand
ccacagaaacugcgacuag

SEQ ID NO: 891786 - RNA, 19 nt, Homo sapiens
  misc_RNA (1)...(19): siRNA sense strand
ucacagcaagaucaaauaa

SEQ ID NO: 891787 - RNA, 19 nt, Homo sapiens
  misc_RNA (1)...(19): siRNA sense strand
agaaacauuugacccagaa

SEQ ID NO: 891788 - RNA, 19 nt, Homo sapiens
  misc_RNA (1)...(19): siRNA sense strand
aaagccaucauucaucuua

SEQ ID NO: 891789 - RNA, 19 nt, Homo sapiens
  misc_RNA (1)...(19): siRNA sense strand
gacuagugguccuacagua

SEQ ID NO: 891790 - RNA, 19 nt, Homo sapiens
  misc_RNA (1)...(19): siRNA sense strand
aagaagagaacuugauuga

SEQ ID NO: 891791 - RNA, 19 nt, Homo sapiens
  misc_RNA (1)...(19): siRNA sense strand
gcaaauacaccuucuuucc

SEQ ID NO: 891792 - RNA, 19 nt, Homo sapiens
  misc_RNA (1)...(19): siRNA sense strand
agaagacugugacugagaa

SEQ ID NO: 891793 - RNA, 19 nt, Homo sapiens
  misc_RNA (1)...(19): siRNA sense strand
uggcacaucuguuuaugga

SEQ ID NO: 891794 - RNA, 19 nt, Homo sapiens
  misc_RNA (1)...(19): siRNA sense strand
cagcacaggucccagcaau

SEQ ID NO: 891795 - RNA, 19 nt, Homo sapiens
  misc_RNA (1)...(19): siRNA sense strand
uuagcuaccucugacauaa

SEQ ID NO: 891796 - RNA, 19 nt, Homo sapiens
  misc_RNA (1)...(19): siRNA sense strand
gagucaaccacaaauguaa

SEQ ID NO: 891797 - RNA, 19 nt, Homo sapiens
  misc_RNA (1)...(19): siRNA sense strand
ggauaacggccuccagaga

SEQ ID NO: 891798 - RNA, 19 nt, Homo sapiens
  misc_RNA (1)...(19): siRNA sense strand
cgacaggcuucaccaaucu

SEQ ID NO: 891799 - RNA, 19 nt, Homo sapiens
  misc_RNA (1)...(19): siRNA sense strand
ugaagaagagaacuugauu

SEQ ID NO: 891800 - RNA, 19 nt, Homo sapiens
  misc_RNA (1)...(19): siRNA sense strand
uguguuaagcugcauaaua

SEQ ID NO: 891801 - RNA, 19 nt, Homo sapiens
  misc_RNA (1)...(19): siRNA sense strand
gcugauaccacugaaacua

SEQ ID NO: 891802 - RNA, 19 nt, Homo sapiens
  misc_RNA (1)...(19): siRNA sense strand
guaaccagacugcggauga

SEQ ID NO: 891803 - RNA, 19 nt, Homo sapiens
  misc_RNA (1)...(19): siRNA sense strand
gacagugagucaaccacaa

SEQ ID NO: 891804 - RNA, 19 nt, Homo sapiens
  misc_RNA (1)...(19): siRNA sense strand
gcuagcaccacagcaaaua

SEQ ID NO: 891805 - RNA, 19 nt, Homo sapiens
  misc_RNA (1)...(19): siRNA sense strand
aaacacagccaccaaccaa

SEQ ID NO: 891806 - RNA, 19 nt, Homo sapiens
  misc_RNA (1)...(19): siRNA sense strand
caccaucgcuggcauuguc

SEQ ID NO: 891807 - RNA, 19 nt, Homo sapiens
  misc_RNA (1)...(19): siRNA sense strand
gagaagacugugacugaga

SEQ ID NO: 891808 - RNA, 19 nt, Homo sapiens
  misc_RNA (1)...(19): siRNA sense strand
ccacagaagacaaucaauc

SEQ ID NO: 891809 - RNA, 19 nt, Homo sapiens
  misc_RNA (1)...(19): siRNA sense strand
cgacuguaaggacaaauuu

SEQ ID NO: 891810 - RNA, 19 nt, Homo sapiens
  misc_RNA (1)...(19): siRNA sense strand
caaccacaaauguaaauuc

SEQ ID NO: 891811 - RNA, 19 nt, Homo sapiens
  misc_RNA (1)...(19): siRNA sense strand
gcaaaucugaccugcaaag

SEQ ID NO: 891812 - RNA, 19 nt, Homo sapiens
  misc_RNA (1)...(19): siRNA sense strand
guaagaaaggaaagguauu

SEQ ID NO: 891813 - RNA, 19 nt, Homo sapiens
  misc_RNA (1)...(19): siRNA sense strand
cacaaugguuccuucugaa

SEQ ID NO: 891814 - RNA, 19 nt, Homo sapiens
  misc_RNA (1)...(19): siRNA sense strand
ccacaagugacaaugagaa

SEQ ID NO: 891815 - RNA, 19 nt, Homo sapiens
  misc_RNA (1)...(19): siRNA sense strand
gaugacugccucaaugguu

SEQ ID NO: 891816 - RNA, 19 nt, Homo sapiens
  misc_RNA (1)...(19): siRNA sense strand
ugagucaaccacaaaugua

SEQ ID NO: 891817 - RNA, 19 nt, Homo sapiens
  misc_RNA (1)...(19): siRNA sense strand
gcaugauaauugcauugau

SEQ ID NO: 891818 - RNA, 19 nt, Homo sapiens
  misc_RNA (1)...(19): siRNA sense strand
gcucaagcaacuuucuaaa

SEQ ID NO: 891819 - RNA, 19 nt, Homo sapiens
  misc_RNA (1)...(19): siRNA sense strand
uaagaaaggaaagguauuc

SEQ ID NO: 891820 - RNA, 19 nt, Homo sapiens
  misc_RNA (1)...(19): siRNA sense strand
ccacuggcaccgcuuuauu

SEQ ID NO: 891821 - RNA, 19 nt, Homo sapiens
  misc_RNA (1)...(19): siRNA sense strand
gagaccagcacccuaaaca

SEQ ID NO: 891822 - RNA, 19 nt, Homo sapiens
  misc_RNA (1)...(19): siRNA sense strand
gggagcgucuuuccuaagg

SEQ ID NO: 891823 - RNA, 19 nt, Homo sapiens
  misc_RNA (1)...(19): siRNA sense strand
ugauaccacugaaacuaau

SEQ ID NO: 891824 - RNA, 19 nt, Homo sapiens
  misc_RNA (1)...(19): siRNA sense strand
uggcagaaaccacaaguga

SEQ ID NO: 891825 - RNA, 19 nt, Homo sapiens
  misc_RNA (1)...(19): siRNA sense strand
cauaaucaccgcuucaucu

SEQ ID NO: 891826 - RNA, 19 nt, Homo sapiens
  misc_RNA (1)...(19): siRNA sense strand
gacgaagacuuucaaaauc

SEQ ID NO: 891827 - RNA, 19 nt, Homo sapiens
  misc_RNA (1)...(19): siRNA sense strand
agaacuugauugacgaaga

SEQ ID NO: 891828 - RNA, 19 nt, Homo sapiens
  misc_RNA (1)...(19): siRNA sense strand
ucaccaagaucugaaaugc

SEQ ID NO: 891829 - RNA, 19 nt, Homo sapiens
  misc_RNA (1)...(19): siRNA sense strand
ucagugacaguaucagaaa

SEQ ID NO: 891830 - RNA, 19 nt, Homo sapiens
  misc_RNA (1)...(19): siRNA sense strand
cacagaagacaaucaauca

SEQ ID NO: 891831 - RNA, 19 nt, Homo sapiens
  misc_RNA (1)...(19): siRNA sense strand
caucauucaucuuacucuu

SEQ ID NO: 891832 - RNA, 19 nt, Homo sapiens
  misc_RNA (1)...(19): siRNA sense strand
gaagcauauugaagaagag

SEQ ID NO: 891833 - RNA, 19 nt, Homo sapiens
  misc_RNA (1)...(19): siRNA sense strand
cagaagacaaucaaucauc

SEQ ID NO: 891834 - RNA, 19 nt, Homo sapiens
  misc_RNA (1)...(19): siRNA sense strand
agagacagccagaugcaaa

SEQ ID NO: 891835 - RNA, 19 nt, Homo sapiens
  misc_RNA (1)...(19): siRNA sense strand
gcgugcugaugacaaguuu

SEQ ID NO: 891836 - RNA, 19 nt, Homo sapiens
  misc_RNA (1)...(19): siRNA sense strand
cuacauguaagaaaggaaa

SEQ ID NO: 891837 - RNA, 19 nt, Homo sapiens
  misc_RNA (1)...(19): siRNA sense strand
guuuagaaggguauuacua

SEQ ID NO: 891838 - RNA, 19 nt, Homo sapiens
  misc_RNA (1)...(19): siRNA sense strand
aaaccacaagugacaauga

SEQ ID NO: 891839 - RNA, 19 nt, Homo sapiens
  misc_RNA (1)...(19): siRNA sense strand
ugaaaugcgugcugaugac

SEQ ID NO: 891840 - RNA, 19 nt, Homo sapiens
  misc_RNA (1)...(19): siRNA sense strand
aagggagcgucuuuccuaa

SEQ ID NO: 891841 - RNA, 19 nt, Homo sapiens
  misc_RNA (1)...(19): siRNA sense strand
gcuaaugggaacugccaaa

SEQ ID NO: 891842 - RNA, 19 nt, Homo sapiens
  misc_RNA (1)...(19): siRNA sense strand
cugugcagauaauucguua

SEQ ID NO: 891843 - RNA, 19 nt, Homo sapiens
  misc_RNA (1)...(19): siRNA sense strand
ucauucaucuuacucuucu

SEQ ID NO: 891844 - RNA, 19 nt, Homo sapiens
  misc_RNA (1)...(19): siRNA sense strand
gacaaugagaagacuguga

SEQ ID NO: 891845 - RNA, 19 nt, Homo sapiens
  misc_RNA (1)...(19): siRNA sense strand
caacucuucuacauguaag

SEQ ID NO: 891846 - RNA, 19 nt, Homo sapiens
  misc_RNA (1)...(19): siRNA sense strand
gguauuacuacaacucuuc

SEQ ID NO: 891847 - RNA, 19 nt, Homo sapiens
  misc_RNA (1)...(19): siRNA sense strand
agaaggguauuacuacaac

SEQ ID NO: 891848 - RNA, 19 nt, Homo sapiens
  misc_RNA (1)...(19): siRNA sense strand
cuucugaaacacaaaguaa

SEQ ID NO: 891849 - RNA, 19 nt, Homo sapiens
  misc_RNA (1)...(19): siRNA sense strand
ucgacaggcuucaccaauc

SEQ ID NO: 891850 - RNA, 19 nt, Homo sapiens
  misc_RNA (1)...(19): siRNA sense strand
ugacugccucaaugguuua

SEQ ID NO: 891851 - RNA, 19 nt, Homo sapiens
  misc_RNA (1)...(19): siRNA sense strand
aacauuccauggccuauca

SEQ ID NO: 891852 - RNA, 19 nt, Homo sapiens
  misc_RNA (1)...(19): siRNA sense strand
uuagaaggguauuacuaca

SEQ ID NO: 891853 - RNA, 19 nt, Homo sapiens
  misc_RNA (1)...(19): siRNA sense strand
ugacgaagacuuucaaaau

SEQ ID NO: 891854 - RNA, 19 nt, Homo sapiens
  misc_RNA (1)...(19): siRNA sense strand
cagcauagaucgauacuug

SEQ ID NO: 891855 - RNA, 19 nt, Homo sapiens
  misc_RNA (1)...(19): siRNA sense strand
ggaaauaccauuguuguuu

SEQ ID NO: 891856 - RNA, 19 nt, Homo sapiens
  misc_RNA (1)...(19): siRNA sense strand
caucaacccugucuucuau

SEQ ID NO: 891857 - RNA, 19 nt, Homo sapiens
  misc_RNA (1)...(19): siRNA sense strand
gcacucaggucgucaucaa

SEQ ID NO: 891858 - RNA, 19 nt, Homo sapiens
  misc_RNA (1)...(19): siRNA sense strand
ucaaaucccuuacauccuu

SEQ ID NO: 891859 - RNA, 19 nt, Homo sapiens
  misc_RNA (1)...(19): siRNA sense strand
ggaacagcaguaauauuua

SEQ ID NO: 891860 - RNA, 19 nt, Homo sapiens
  misc_RNA (1)...(19): siRNA sense strand
uggaacagcaguaauauuu

SEQ ID NO: 891861 - RNA, 19 nt, Homo sapiens
  misc_RNA (1)...(19): siRNA sense strand
ggaguuaugccaauggaaa

SEQ ID NO: 891862 - RNA, 19 nt, Homo sapiens
  misc_RNA (1)...(19): siRNA sense strand
gcucaugaacuccuacuuu

SEQ ID NO: 891863 - RNA, 19 nt, Homo sapiens
  misc_RNA (1)...(19): siRNA sense strand
ccaacuacaaccucauuua

SEQ ID NO: 891864 - RNA, 19 nt, Homo sapiens
  misc_RNA (1)...(19): siRNA sense strand
uaaguauccuuuccgagaa

SEQ ID NO: 891865 - RNA, 19 nt, Homo sapiens
  misc_RNA (1)...(19): siRNA sense strand
aauggaaacuggauauaug

SEQ ID NO: 891866 - RNA, 19 nt, Homo sapiens
  misc_RNA (1)...(19): siRNA sense strand
gaacuccuacuuucauuca

SEQ ID NO: 891867 - RNA, 19 nt, Homo sapiens
  misc_RNA (1)...(19): siRNA sense strand
ucaacccugucuucuauuu

SEQ ID NO: 891868 - RNA, 19 nt, Homo sapiens
  misc_RNA (1)...(19): siRNA sense strand
ggagacgugcucugcauaa

SEQ ID NO: 891869 - RNA, 19 nt, Homo sapiens
  misc_RNA (1)...(19): siRNA sense strand
ggcuacaucuucucucuga

SEQ ID NO: 891870 - RNA, 19 nt, Homo sapiens
  misc_RNA (1)...(19): siRNA sense strand
gacaauggcaccaccugua

SEQ ID NO: 891871 - RNA, 19 nt, Homo sapiens
  misc_RNA (1)...(19): siRNA sense strand
ggcaccaccuguaaugauu

SEQ ID NO: 891872 - RNA, 19 nt, Homo sapiens
  misc_RNA (1)...(19): siRNA sense strand
ggaguuggaagcaguauca

SEQ ID NO: 891873 - RNA, 19 nt, Homo sapiens
  misc_RNA (1)...(19): siRNA sense strand
cagaugggcucaugaacuc

SEQ ID NO: 891874 - RNA, 19 nt, Homo sapiens
  misc_RNA (1)...(19): siRNA sense strand
caacugagacacaacuuca

SEQ ID NO: 891875 - RNA, 19 nt, Homo sapiens
  misc_RNA (1)...(19): siRNA sense strand
ugaaaagccucucaacuug

SEQ ID NO: 891876 - RNA, 19 nt, Homo sapiens
  misc_RNA (1)...(19): siRNA sense strand
caaaucccuuacauccuuu

SEQ ID NO: 891877 - RNA, 19 nt, Homo sapiens
  misc_RNA (1)...(19): siRNA sense strand
guaaucuucucugugcuuu

SEQ ID NO: 891878 - RNA, 19 nt, Homo sapiens
  misc_RNA (1)...(19): siRNA sense strand
caaccucuauaccagcauu

SEQ ID NO: 891879 - RNA, 19 nt, Homo sapiens
  misc_RNA (1)...(19): siRNA sense strand
ugaaucaacugagacacaa

SEQ ID NO: 891880 - RNA, 19 nt, Homo sapiens
  misc_RNA (1)...(19): siRNA sense strand
gcagaggaauaggcagguu

SEQ ID NO: 891881 - RNA, 19 nt, Homo sapiens
  misc_RNA (1)...(19): siRNA sense strand
agauugcucucuuccuaaa

SEQ ID NO: 891882 - RNA, 19 nt, Homo sapiens
  misc_RNA (1)...(19): siRNA sense strand
caauggaaacuggauauau

SEQ ID NO: 891883 - RNA, 19 nt, Homo sapiens
  misc_RNA (1)...(19): siRNA sense strand
gcaccaccuguaaugauuu

SEQ ID NO: 891884 - RNA, 19 nt, Homo sapiens
  misc_RNA (1)...(19): siRNA sense strand
gcauucucuuucucacuuu

SEQ ID NO: 891885 - RNA, 19 nt, Homo sapiens
  misc_RNA (1)...(19): siRNA sense strand
gcauagaucgauacuugau

SEQ ID NO: 891886 - RNA, 19 nt, Homo sapiens
  misc_RNA (1)...(19): siRNA sense strand
caacuacaaccucauuuac

SEQ ID NO: 891887 - RNA, 19 nt, Homo sapiens
  misc_RNA (1)...(19): siRNA sense strand
guaaugauuuugcaaguuc

SEQ ID NO: 891888 - RNA, 19 nt, Homo sapiens
  misc_RNA (1)...(19): siRNA sense strand
gcagaugggcucaugaacu

SEQ ID NO: 891889 - RNA, 19 nt, Homo sapiens
  misc_RNA (1)...(19): siRNA sense strand
acaauggcaccaccuguaa

SEQ ID NO: 891890 - RNA, 19 nt, Homo sapiens
  misc_RNA (1)...(19): siRNA sense strand
ccaauggaaacuggauaua

SEQ ID NO: 891891 - RNA, 19 nt, Homo sapiens
  misc_RNA (1)...(19): siRNA sense strand
caaccgauaugugcuucau

SEQ ID NO: 891892 - RNA, 19 nt, Homo sapiens
  misc_RNA (1)...(19): siRNA sense strand
gugggaguccuuggaaaua

SEQ ID NO: 891893 - RNA, 19 nt, Homo sapiens
  misc_RNA (1)...(19): siRNA sense strand
ccucucaacuuggucauca

SEQ ID NO: 891894 - RNA, 19 nt, Homo sapiens
  misc_RNA (1)...(19): siRNA sense strand
cucaugaacuccuacuuuc

SEQ ID NO: 891895 - RNA, 19 nt, Homo sapiens
  misc_RNA (1)...(19): siRNA sense strand
ggucaucauggcaguggua

SEQ ID NO: 891896 - RNA, 19 nt, Homo sapiens
  misc_RNA (1)...(19): siRNA sense strand
caacuucaaaucccuuaca

SEQ ID NO: 891897 - RNA, 19 nt, Homo sapiens
  misc_RNA (1)...(19): siRNA sense strand
cauagaucgauacuugaua

SEQ ID NO: 891898 - RNA, 19 nt, Homo sapiens
  misc_RNA (1)...(19): siRNA sense strand
uuaaucuccuuggccauuu

SEQ ID NO: 891899 - RNA, 19 nt, Homo sapiens
  misc_RNA (1)...(19): siRNA sense strand
gagacgugcucugcauaag

SEQ ID NO: 891900 - RNA, 19 nt, Homo sapiens
  misc_RNA (1)...(19): siRNA sense strand
caucaacuccuuuuacauu

SEQ ID NO: 891901 - RNA, 19 nt, Homo sapiens
  misc_RNA (1)...(19): siRNA sense strand
caucauggcagugguaauc

SEQ ID NO: 891902 - RNA, 19 nt, Homo sapiens
  misc_RNA (1)...(19): siRNA sense strand
uagcagaugggcucaugaa

SEQ ID NO: 891903 - RNA, 19 nt, Homo sapiens
  misc_RNA (1)...(19): siRNA sense strand
gaacaccuucugcaaaaga

SEQ ID NO: 891904 - RNA, 19 nt, Homo sapiens
  misc_RNA (1)...(19): siRNA sense strand
ucaucaacccugucuucua

SEQ ID NO: 891905 - RNA, 19 nt, Homo sapiens
  misc_RNA (1)...(19): siRNA sense strand
gguaaucuucucugugcuu

SEQ ID NO: 891906 - RNA, 19 nt, Homo sapiens
  misc_RNA (1)...(19): siRNA sense strand
uaaucuccuuggccauuug

SEQ ID NO: 891907 - RNA, 19 nt, Homo sapiens
  misc_RNA (1)...(19): siRNA sense strand
ccaugcugauaaggaguua

SEQ ID NO: 891908 - RNA, 19 nt, Homo sapiens
  misc_RNA (1)...(19): siRNA sense strand
gccaauggaaacuggauau

SEQ ID NO: 891909 - RNA, 19 nt, Homo sapiens
  misc_RNA (1)...(19): siRNA sense strand
gaguuacuacccauacuuc

SEQ ID NO: 891910 - RNA, 19 nt, Homo sapiens
  misc_RNA (1)...(19): siRNA sense strand
aguacuaccuuuccauuuu

SEQ ID NO: 891911 - RNA, 19 nt, Homo sapiens
  misc_RNA (1)...(19): siRNA sense strand
ucauggcagugguaaucuu

SEQ ID NO: 891912 - RNA, 19 nt, Homo sapiens
  misc_RNA (1)...(19): siRNA sense strand
ucccuuacauccuuuagca

SEQ ID NO: 891913 - RNA, 19 nt, Homo sapiens
  misc_RNA (1)...(19): siRNA sense strand
ugagacacaacuucaaauc

SEQ ID NO: 891914 - RNA, 19 nt, Homo sapiens
  misc_RNA (1)...(19): siRNA sense strand
agcauucucuuucucacuu

SEQ ID NO: 891915 - RNA, 19 nt, Homo sapiens
  misc_RNA (1)...(19): siRNA sense strand
acuacaaccucauuuacag

SEQ ID NO: 891916 - RNA, 19 nt, Homo sapiens
  misc_RNA (1)...(19): siRNA sense strand
ccuuggaaauaccauuguu

SEQ ID NO: 891917 - RNA, 19 nt, Homo sapiens
  misc_RNA (1)...(19): siRNA sense strand
ccuuuggccuuucugaaca

SEQ ID NO: 891918 - RNA, 19 nt, Homo sapiens
  misc_RNA (1)...(19): siRNA sense strand
acuccuacuuucauucaga

SEQ ID NO: 891919 - RNA, 19 nt, Homo sapiens
  misc_RNA (1)...(19): siRNA sense strand
cugcauaagcaaccgauau

SEQ ID NO: 891920 - RNA, 19 nt, Homo sapiens
  misc_RNA (1)...(19): siRNA sense strand
ggucgucaucaacuccuuu

SEQ ID NO: 891921 - RNA, 19 nt, Homo sapiens
  misc_RNA (1)...(19): siRNA sense strand
cuucaugccaaccucuaua

SEQ ID NO: 891922 - RNA, 19 nt, Homo sapiens
  misc_RNA (1)...(19): siRNA sense strand
gagaucacuucagggacau

SEQ ID NO: 891923 - RNA, 19 nt, Homo sapiens
  misc_RNA (1)...(19): siRNA sense strand
cuacugcucugccccuuga

SEQ ID NO: 891924 - RNA, 19 nt, Homo sapiens
  misc_RNA (1)...(19): siRNA sense strand
ccucucugucucugacuua

SEQ ID NO: 891925 - RNA, 19 nt, Homo sapiens
  misc_RNA (1)...(19): siRNA sense strand
cagcaguaauauuuaucuc

SEQ ID NO: 891926 - RNA, 19 nt, Homo sapiens
  misc_RNA (1)...(19): siRNA sense strand
ugucaucaacccugucuuc

SEQ ID NO: 891927 - RNA, 19 nt, Homo sapiens
  misc_RNA (1)...(19): siRNA sense strand
aggcugcccuggaaaagua

SEQ ID NO: 891928 - RNA, 19 nt, Homo sapiens
  misc_RNA (1)...(19): siRNA sense strand
uaucacgucaugcggaaug

SEQ ID NO: 891929 - RNA, 19 nt, Homo sapiens
  misc_RNA (1)...(19): siRNA sense strand
uauaccagcauucucuuuc

SEQ ID NO: 891930 - RNA, 19 nt, Homo sapiens
  misc_RNA (1)...(19): siRNA sense strand
ccaagaaccugcugucucu

SEQ ID NO: 891931 - RNA, 19 nt, Homo sapiens
  misc_RNA (1)...(19): siRNA sense strand
ggaagccucucccaaagcu

SEQ ID NO: 891932 - RNA, 19 nt, Homo sapiens
  misc_RNA (1)...(19): siRNA sense strand
ccaaagcucccaaccacuu

SEQ ID NO: 891933 - RNA, 19 nt, Homo sapiens
  misc_RNA (1)...(19): siRNA sense strand
cuaaagaagcaccugauga

SEQ ID NO: 891934 - RNA, 19 nt, Homo sapiens
  misc_RNA (1)...(19): siRNA sense strand
uaaagaagcaccugaugag

SEQ ID NO: 891935 - RNA, 19 nt, Homo sapiens
  misc_RNA (1)...(19): siRNA sense strand
gcuaaagaagcaccugaug

SEQ ID NO: 891936 - RNA, 19 nt, Homo sapiens
  misc_RNA (1)...(19): siRNA sense strand
ucagaaagggaaccacuca

SEQ ID NO: 891937 - RNA, 19 nt, Homo sapiens
  misc_RNA (1)...(19): siRNA sense strand
gccaucagccgcucuccaa

SEQ ID NO: 891938 - RNA, 19 nt, Homo sapiens
  misc_RNA (1)...(19): siRNA sense strand
gcaggaggcgcagcuaaag

SEQ ID NO: 891939 - RNA, 19 nt, Homo sapiens
  misc_RNA (1)...(19): siRNA sense strand
cuuccaggcuugcgagugu

SEQ ID NO: 891940 - RNA, 19 nt, Homo sapiens
  misc_RNA (1)...(19): siRNA sense strand
uugcgagugucacaaaugu

SEQ ID NO: 891941 - RNA, 19 nt, Homo sapiens
  misc_RNA (1)...(19): siRNA sense strand
cagcaggaggcgcagcuaa

SEQ ID NO: 891942 - RNA, 19 nt, Homo sapiens
  misc_RNA (1)...(19): siRNA sense strand
aggcgcagcuaaagaagca

SEQ ID NO: 891943 - RNA, 19 nt, Homo sapiens
  misc_RNA (1)...(19): siRNA sense strand
cccaaccacuucagaaagg

SEQ ID NO: 891944 - RNA, 19 nt, Homo sapiens
  misc_RNA (1)...(19): siRNA sense strand
gcucccaaccacuucagaa

SEQ ID NO: 891945 - RNA, 19 nt, Homo sapiens
  misc_RNA (1)...(19): siRNA sense strand
gcuugcgagugucacaaau

SEQ ID NO: 891946 - RNA, 19 nt, Homo sapiens
  misc_RNA (1)...(19): siRNA sense strand
caaagcucccaaccacuuc

SEQ ID NO: 891947 - RNA, 19 nt, Homo sapiens
  misc_RNA (1)...(19): siRNA sense strand
aggaggcgcagcuaaagaa

SEQ ID NO: 891948 - RNA, 19 nt, Homo sapiens
  misc_RNA (1)...(19): siRNA sense strand
ggaugcaucucccucuuga

SEQ ID NO: 891949 - RNA, 19 nt, Homo sapiens
  misc_RNA (1)...(19): siRNA sense strand
gcaucucccucuugagcua

SEQ ID NO: 891950 - RNA, 19 nt, Homo sapiens
  misc_RNA (1)...(19): siRNA sense strand
ggaaggagaacaacaugcu

SEQ ID NO: 891951 - RNA, 19 nt, Homo sapiens
  misc_RNA (1)...(19): siRNA sense strand
ccaucucgcugccuauugg

SEQ ID NO: 891952 - RNA, 19 nt, Homo sapiens
  misc_RNA (1)...(19): siRNA sense strand
ucacugggaaggagaacaa

SEQ ID NO: 891953 - RNA, 19 nt, Homo sapiens
  misc_RNA (1)...(19): siRNA sense strand
gcccgagacccacaucuuc

SEQ ID NO: 891954 - RNA, 19 nt, Homo sapiens
  misc_RNA (1)...(19): siRNA sense strand
gaggcucugcugacucuga

SEQ ID NO: 891955 - RNA, 19 nt, Homo sapiens
  misc_RNA (1)...(19): siRNA sense strand
ccauccgugucaggaauuu

SEQ ID NO: 891956 - RNA, 19 nt, Homo sapiens
  misc_RNA (1)...(19): siRNA sense strand
gcucugcugacucugagaa

SEQ ID NO: 891957 - RNA, 19 nt, Homo sapiens
  misc_RNA (1)...(19): siRNA sense strand
ucaggaauuugaccaucag

SEQ ID NO: 891958 - RNA, 19 nt, Homo sapiens
  misc_RNA (1)...(19): siRNA sense strand
cugaggcucugcugacucu

SEQ ID NO: 891959 - RNA, 19 nt, Homo sapiens
  misc_RNA (1)...(19): siRNA sense strand
ggaugcaucucccucuuga

SEQ ID NO: 891960 - RNA, 19 nt, Homo sapiens
  misc_RNA (1)...(19): siRNA sense strand
gcaucucccucuugagcua

SEQ ID NO: 891961 - RNA, 19 nt, Homo sapiens
  misc_RNA (1)...(19): siRNA sense strand
ggaaggagaacaacaugcu

SEQ ID NO: 891962 - RNA, 19 nt, Homo sapiens
  misc_RNA (1)...(19): siRNA sense strand
ccaucucgcugccuauugg

SEQ ID NO: 891963 - RNA, 19 nt, Homo sapiens
  misc_RNA (1)...(19): siRNA sense strand
ucacugggaaggagaacaa

SEQ ID NO: 891964 - RNA, 19 nt, Homo sapiens
  misc_RNA (1)...(19): siRNA sense strand
gcccgagacccacaucuuc

SEQ ID NO: 891965 - RNA, 19 nt, Homo sapiens
  misc_RNA (1)...(19): siRNA sense strand
gaggcucugcugacucuga

SEQ ID NO: 891966 - RNA, 19 nt, Homo sapiens
  misc_RNA (1)...(19): siRNA sense strand
ccauccgugucaggaauuu

SEQ ID NO: 891967 - RNA, 19 nt, Homo sapiens
  misc_RNA (1)...(19): siRNA sense strand
gcucugcugacucugagaa

SEQ ID NO: 891968 - RNA, 19 nt, Homo sapiens
  misc_RNA (1)...(19): siRNA sense strand
ucaggaauuugaccaucag

SEQ ID NO: 891969 - RNA, 19 nt, Homo sapiens
  misc_RNA (1)...(19): siRNA sense strand
cugaggcucugcugacucu

SEQ ID NO: 891970 - RNA, 19 nt, Homo sapiens
  misc_RNA (1)...(19): siRNA sense strand
ccaagaagaucaucauuaa

SEQ ID NO: 891971 - RNA, 19 nt, Homo sapiens
  misc_RNA (1)...(19): siRNA sense strand
ggucuuagcuacagcaaua

SEQ ID NO: 891972 - RNA, 19 nt, Homo sapiens
  misc_RNA (1)...(19): siRNA sense strand
gaacagacuugggaacaaa

SEQ ID NO: 891973 - RNA, 19 nt, Homo sapiens
  misc_RNA (1)...(19): siRNA sense strand
gguauuacaugaaaccuuu

SEQ ID NO: 891974 - RNA, 19 nt, Homo sapiens
  misc_RNA (1)...(19): siRNA sense strand
ggaacaagcugacccuuuu

SEQ ID NO: 891975 - RNA, 19 nt, Homo sapiens
  misc_RNA (1)...(19): siRNA sense strand
gccaagaagaucaucauua

SEQ ID NO: 891976 - RNA, 19 nt, Homo sapiens
  misc_RNA (1)...(19): siRNA sense strand
gcaauuggagcuuaucuug

SEQ ID NO: 891977 - RNA, 19 nt, Homo sapiens
  misc_RNA (1)...(19): siRNA sense strand
uaaaggguuuguugucauu

SEQ ID NO: 891978 - RNA, 19 nt, Homo sapiens
  misc_RNA (1)...(19): siRNA sense strand
guacuuugcuguuaucucu

SEQ ID NO: 891979 - RNA, 19 nt, Homo sapiens
  misc_RNA (1)...(19): siRNA sense strand
gaucugcauuacaguguuu

SEQ ID NO: 891980 - RNA, 19 nt, Homo sapiens
  misc_RNA (1)...(19): siRNA sense strand
gaacauaccaauuuaagcu

SEQ ID NO: 891981 - RNA, 19 nt, Homo sapiens
  misc_RNA (1)...(19): siRNA sense strand
gaccauagucuugaguuua

SEQ ID NO: 891982 - RNA, 19 nt, Homo sapiens
  misc_RNA (1)...(19): siRNA sense strand
uuaaagaacugccaauaac

SEQ ID NO: 891983 - RNA, 19 nt, Homo sapiens
  misc_RNA (1)...(19): siRNA sense strand
ggaacagacuugggaacaa

SEQ ID NO: 891984 - RNA, 19 nt, Homo sapiens
  misc_RNA (1)...(19): siRNA sense strand
ccaauuccuuuaaugaaga

SEQ ID NO: 891985 - RNA, 19 nt, Homo sapiens
  misc_RNA (1)...(19): siRNA sense strand
uaacaggaauucgaggauu

SEQ ID NO: 891986 - RNA, 19 nt, Homo sapiens
  misc_RNA (1)...(19): siRNA sense strand
ugaggucaauuggaaauaa

SEQ ID NO: 891987 - RNA, 19 nt, Homo sapiens
  misc_RNA (1)...(19): siRNA sense strand
gcacuuguuucacgaacug

SEQ ID NO: 891988 - RNA, 19 nt, Homo sapiens
  misc_RNA (1)...(19): siRNA sense strand
ucacagccauccucauaau

SEQ ID NO: 891989 - RNA, 19 nt, Homo sapiens
  misc_RNA (1)...(19): siRNA sense strand
gaacugccaauaacaggaa

SEQ ID NO: 891990 - RNA, 19 nt, Homo sapiens
  misc_RNA (1)...(19): siRNA sense strand
uagcagauauaacccaaga

SEQ ID NO: 891991 - RNA, 19 nt, Homo sapiens
  misc_RNA (1)...(19): siRNA sense strand
aacaggaauucgaggauua

SEQ ID NO: 891992 - RNA, 19 nt, Homo sapiens
  misc_RNA (1)...(19): siRNA sense strand
aaagaaguauggcuuaugg

SEQ ID NO: 891993 - RNA, 19 nt, Homo sapiens
  misc_RNA (1)...(19): siRNA sense strand
cggcuuaauucaaggagua

SEQ ID NO: 891994 - RNA, 19 nt, Homo sapiens
  misc_RNA (1)...(19): siRNA sense strand
cuuaugaggucaauuggaa

SEQ ID NO: 891995 - RNA, 19 nt, Homo sapiens
  misc_RNA (1)...(19): siRNA sense strand
ggcauucuuuccauuauug

SEQ ID NO: 891996 - RNA, 19 nt, Homo sapiens
  misc_RNA (1)...(19): siRNA sense strand
gaaagaaguauggcuuaug

SEQ ID NO: 891997 - RNA, 19 nt, Homo sapiens
  misc_RNA (1)...(19): siRNA sense strand
gcaccacuuugaacagaau

SEQ ID NO: 891998 - RNA, 19 nt, Homo sapiens
  misc_RNA (1)...(19): siRNA sense strand
guaaaggguuuguugucau

SEQ ID NO: 891999 - RNA, 19 nt, Homo sapiens
  misc_RNA (1)...(19): siRNA sense strand
ccaagagcaugaaagaagu

SEQ ID NO: 892000 - RNA, 19 nt, Homo sapiens
  misc_RNA (1)...(19): siRNA sense strand
gcagccaugucuagcauca

SEQ ID NO: 892001 - RNA, 19 nt, Homo sapiens
  misc_RNA (1)...(19): siRNA sense strand
gaaaguguugcagcguuua

SEQ ID NO: 892002 - RNA, 19 nt, Homo sapiens
  misc_RNA (1)...(19): siRNA sense strand
agaaaguguugcagcguuu

SEQ ID NO: 892003 - RNA, 19 nt, Homo sapiens
  misc_RNA (1)...(19): siRNA sense strand
ugaaagaaguauggcuuau

SEQ ID NO: 892004 - RNA, 19 nt, Homo sapiens
  misc_RNA (1)...(19): siRNA sense strand
gguuuguugucauuccuua

SEQ ID NO: 892005 - RNA, 19 nt, Homo sapiens
  misc_RNA (1)...(19): siRNA sense strand
gucuugaguuuacuuauga

SEQ ID NO: 892006 - RNA, 19 nt, Homo sapiens
  misc_RNA (1)...(19): siRNA sense strand
guaucaugcuggccaagaa

SEQ ID NO: 892007 - RNA, 19 nt, Homo sapiens
  misc_RNA (1)...(19): siRNA sense strand
gggaacaagcugacccuuu

SEQ ID NO: 892008 - RNA, 19 nt, Homo sapiens
  misc_RNA (1)...(19): siRNA sense strand
uauuacaguuggcauggua

SEQ ID NO: 892009 - RNA, 19 nt, Homo sapiens
  misc_RNA (1)...(19): siRNA sense strand
ggugguacuuugcuguuau

SEQ ID NO: 892010 - RNA, 19 nt, Homo sapiens
  misc_RNA (1)...(19): siRNA sense strand
cuuaaagaacugccaauaa

SEQ ID NO: 892011 - RNA, 19 nt, Homo sapiens
  misc_RNA (1)...(19): siRNA sense strand
caaggaaugauaacaggaa

SEQ ID NO: 892012 - RNA, 19 nt, Homo sapiens
  misc_RNA (1)...(19): siRNA sense strand
aauuggagcuuaucuugga

SEQ ID NO: 892013 - RNA, 19 nt, Homo sapiens
  misc_RNA (1)...(19): siRNA sense strand
cagagucguugccugagaa

SEQ ID NO: 892014 - RNA, 19 nt, Homo sapiens
  misc_RNA (1)...(19): siRNA sense strand
ggcccucccuuccuauuug

SEQ ID NO: 892015 - RNA, 19 nt, Homo sapiens
  misc_RNA (1)...(19): siRNA sense strand
uuacaguguuucucuccua

SEQ ID NO: 892016 - RNA, 19 nt, Homo sapiens
  misc_RNA (1)...(19): siRNA sense strand
cggccaagauuccauagug

SEQ ID NO: 892017 - RNA, 19 nt, Homo sapiens
  misc_RNA (1)...(19): siRNA sense strand
uuacuuaugaggucaauug

SEQ ID NO: 892018 - RNA, 19 nt, Homo sapiens
  misc_RNA (1)...(19): siRNA sense strand
uccggaacauaccaauuua

SEQ ID NO: 892019 - RNA, 19 nt, Homo sapiens
  misc_RNA (1)...(19): siRNA sense strand
cuuguugccuuguuuauuc

SEQ ID NO: 892020 - RNA, 19 nt, Homo sapiens
  misc_RNA (1)...(19): siRNA sense strand
cagcaccacuuugaacaga

SEQ ID NO: 892021 - RNA, 19 nt, Homo sapiens
  misc_RNA (1)...(19): siRNA sense strand
gcuguuaucucuguuucug

SEQ ID NO: 892022 - RNA, 19 nt, Homo sapiens
  misc_RNA (1)...(19): siRNA sense strand
agucacagccauccucaua

SEQ ID NO: 892023 - RNA, 19 nt, Homo sapiens
  misc_RNA (1)...(19): siRNA sense strand
ggaauucgaggauuaugca

SEQ ID NO: 892024 - RNA, 19 nt, Homo sapiens
  misc_RNA (1)...(19): siRNA sense strand
ucaacagggugucguucaa

SEQ ID NO: 892025 - RNA, 19 nt, Homo sapiens
  misc_RNA (1)...(19): siRNA sense strand
agaagaucaucauuaagga

SEQ ID NO: 892026 - RNA, 19 nt, Homo sapiens
  misc_RNA (1)...(19): siRNA sense strand
gagcaugaaagaaguaugg

SEQ ID NO: 892027 - RNA, 19 nt, Homo sapiens
  misc_RNA (1)...(19): siRNA sense strand
caagagcaugaaagaagua

SEQ ID NO: 892028 - RNA, 19 nt, Homo sapiens
  misc_RNA (1)...(19): siRNA sense strand
ucagaaccuuggaugaugu

SEQ ID NO: 892029 - RNA, 19 nt, Homo sapiens
  misc_RNA (1)...(19): siRNA sense strand
ggaguaaaggguuuguugu

SEQ ID NO: 892030 - RNA, 19 nt, Homo sapiens
  misc_RNA (1)...(19): siRNA sense strand
ggcccucuauggauucauu

SEQ ID NO: 892031 - RNA, 19 nt, Homo sapiens
  misc_RNA (1)...(19): siRNA sense strand
gaggucaauuggaaauaag

SEQ ID NO: 892032 - RNA, 19 nt, Homo sapiens
  misc_RNA (1)...(19): siRNA sense strand
gcaguuaucgucaucuuuu

SEQ ID NO: 892033 - RNA, 19 nt, Homo sapiens
  misc_RNA (1)...(19): siRNA sense strand
ccagagucguugccugaga

SEQ ID NO: 892034 - RNA, 19 nt, Homo sapiens
  misc_RNA (1)...(19): siRNA sense strand
gugcugcugaucugcauua

SEQ ID NO: 892035 - RNA, 19 nt, Homo sapiens
  misc_RNA (1)...(19): siRNA sense strand
ugaacagaauuccaucauc

SEQ ID NO: 892036 - RNA, 19 nt, Homo sapiens
  misc_RNA (1)...(19): siRNA sense strand
uaaagaacugccaauaaca

SEQ ID NO: 892037 - RNA, 19 nt, Homo sapiens
  misc_RNA (1)...(19): siRNA sense strand
uuuacugggucuaggauuu

SEQ ID NO: 892038 - RNA, 19 nt, Homo sapiens
  misc_RNA (1)...(19): siRNA sense strand
uugcauacguagcagauau

SEQ ID NO: 892039 - RNA, 19 nt, Homo sapiens
  misc_RNA (1)...(19): siRNA sense strand
guauggcuuugguucagaa

SEQ ID NO: 892040 - RNA, 19 nt, Homo sapiens
  misc_RNA (1)...(19): siRNA sense strand
ccauagugcugcugaucug

SEQ ID NO: 892041 - RNA, 19 nt, Homo sapiens
  misc_RNA (1)...(19): siRNA sense strand
ggacugguuucagcaacau

SEQ ID NO: 892042 - RNA, 19 nt, Homo sapiens
  misc_RNA (1)...(19): siRNA sense strand
gaacggcuuaauucaagga

SEQ ID NO: 892043 - RNA, 19 nt, Homo sapiens
  misc_RNA (1)...(19): siRNA sense strand
gccaggagaggccaaagaa

SEQ ID NO: 892044 - RNA, 19 nt, Homo sapiens
  misc_RNA (1)...(19): siRNA sense strand
gcccucagcaccacuuuga

SEQ ID NO: 892045 - RNA, 19 nt, Homo sapiens
  misc_RNA (1)...(19): siRNA sense strand
guccugcaauuggagcuua

SEQ ID NO: 892046 - RNA, 19 nt, Homo sapiens
  misc_RNA (1)...(19): siRNA sense strand
gcauacguagcagauauaa

SEQ ID NO: 892047 - RNA, 19 nt, Homo sapiens
  misc_RNA (1)...(19): siRNA sense strand
aggccaauauuccagcuuu

SEQ ID NO: 892048 - RNA, 19 nt, Homo sapiens
  misc_RNA (1)...(19): siRNA sense strand
caccaguccugcaauugga

SEQ ID NO: 892049 - RNA, 19 nt, Homo sapiens
  misc_RNA (1)...(19): siRNA sense strand
aguaaaggguuuguuguca

SEQ ID NO: 892050 - RNA, 19 nt, Homo sapiens
  misc_RNA (1)...(19): siRNA sense strand
agucuugaguuuacuuaug

SEQ ID NO: 892051 - RNA, 19 nt, Homo sapiens
  misc_RNA (1)...(19): siRNA sense strand
aagaagaucaucauuaagg

SEQ ID NO: 892052 - RNA, 19 nt, Homo sapiens
  misc_RNA (1)...(19): siRNA sense strand
gaguaaaggguuuguuguc

SEQ ID NO: 892053 - RNA, 19 nt, Homo sapiens
  misc_RNA (1)...(19): siRNA sense strand
ccauguggaacuuaaagaa

SEQ ID NO: 892054 - RNA, 19 nt, Homo sapiens
  misc_RNA (1)...(19): siRNA sense strand
gggugucguucaaggaaug

SEQ ID NO: 892055 - RNA, 19 nt, Homo sapiens
  misc_RNA (1)...(19): siRNA sense strand
uggcauucuuuccauuauu

SEQ ID NO: 892056 - RNA, 19 nt, Homo sapiens
  misc_RNA (1)...(19): siRNA sense strand
ccucagacagauaaugaaa

SEQ ID NO: 892057 - RNA, 19 nt, Homo sapiens
  misc_RNA (1)...(19): siRNA sense strand
cccaauuccuuuaaugaag

SEQ ID NO: 892058 - RNA, 19 nt, Homo sapiens
  misc_RNA (1)...(19): siRNA sense strand
gcugucagugcacuuguuu

SEQ ID NO: 892059 - RNA, 19 nt, Homo sapiens
  misc_RNA (1)...(19): siRNA sense strand
gguauggcuuugguucaga

SEQ ID NO: 892060 - RNA, 19 nt, Homo sapiens
  misc_RNA (1)...(19): siRNA sense strand
cugcugaucugcauuacag

SEQ ID NO: 892061 - RNA, 19 nt, Homo sapiens
  misc_RNA (1)...(19): siRNA sense strand
gcuuauuggugcucuuucu

SEQ ID NO: 892062 - RNA, 19 nt, Homo sapiens
  misc_RNA (1)...(19): siRNA sense strand
uagcagccaugucuagcau

SEQ ID NO: 892063 - RNA, 19 nt, Homo sapiens
  misc_RNA (1)...(19): siRNA sense strand
gcaguagcagccaugucua

SEQ ID NO: 892064 - RNA, 19 nt, Homo sapiens
  misc_RNA (1)...(19): siRNA sense strand
gcaguccuuggcauucuuu

SEQ ID NO: 892065 - RNA, 19 nt, Homo sapiens
  misc_RNA (1)...(19): siRNA sense strand
cugaugaacggcuuaauuc

SEQ ID NO: 892066 - RNA, 19 nt, Homo sapiens
  misc_RNA (1)...(19): siRNA sense strand
ucugaugaacggcuuaauu

SEQ ID NO: 892067 - RNA, 19 nt, Homo sapiens
  misc_RNA (1)...(19): siRNA sense strand
uaccucagacagauaauga

SEQ ID NO: 892068 - RNA, 19 nt, Homo sapiens
  misc_RNA (1)...(19): siRNA sense strand
cagccauccucauaauaca

SEQ ID NO: 892069 - RNA, 19 nt, Homo sapiens
  misc_RNA (1)...(19): siRNA sense strand
auucgaggauuaugcaaug

SEQ ID NO: 892070 - RNA, 19 nt, Homo sapiens
  misc_RNA (1)...(19): siRNA sense strand
gaacaaagagguaaaggaa

SEQ ID NO: 892071 - RNA, 19 nt, Homo sapiens
  misc_RNA (1)...(19): siRNA sense strand
ccaggaaaguaaucaguua

SEQ ID NO: 892072 - RNA, 19 nt, Homo sapiens
  misc_RNA (1)...(19): siRNA sense strand
gaucaaccauggcuagaga

SEQ ID NO: 892073 - RNA, 19 nt, Homo sapiens
  misc_RNA (1)...(19): siRNA sense strand
caaaugaggcugaacuauu

SEQ ID NO: 892074 - RNA, 19 nt, Homo sapiens
  misc_RNA (1)...(19): siRNA sense strand
aaaugaggcugaacuauuc

SEQ ID NO: 892075 - RNA, 19 nt, Homo sapiens
  misc_RNA (1)...(19): siRNA sense strand
acauguggcucccaucuaa

SEQ ID NO: 892076 - RNA, 19 nt, Homo sapiens
  misc_RNA (1)...(19): siRNA sense strand
caaguacaguuccacaaau

SEQ ID NO: 892077 - RNA, 19 nt, Homo sapiens
  misc_RNA (1)...(19): siRNA sense strand
ggaaaguaaucaguuaugg

SEQ ID NO: 892078 - RNA, 19 nt, Homo sapiens
  misc_RNA (1)...(19): siRNA sense strand
gaaaggcauuugggacaug

SEQ ID NO: 892079 - RNA, 19 nt, Homo sapiens
  misc_RNA (1)...(19): siRNA sense strand
aagacacagugcuuacuua

SEQ ID NO: 892080 - RNA, 19 nt, Homo sapiens
  misc_RNA (1)...(19): siRNA sense strand
ggaguucauucuguuaguu

SEQ ID NO: 892081 - RNA, 19 nt, Homo sapiens
  misc_RNA (1)...(19): siRNA sense strand
gaugguuucucucuucugu

SEQ ID NO: 892082 - RNA, 19 nt, Homo sapiens
  misc_RNA (1)...(19): siRNA sense strand
gccgucaugugcuuugaua

SEQ ID NO: 892083 - RNA, 19 nt, Homo sapiens
  misc_RNA (1)...(19): siRNA sense strand
gcuagagauuccacccuuu

SEQ ID NO: 892084 - RNA, 19 nt, Homo sapiens
  misc_RNA (1)...(19): siRNA sense strand
gcuaaagacacagugcuua

SEQ ID NO: 892085 - RNA, 19 nt, Homo sapiens
  misc_RNA (1)...(19): siRNA sense strand
gagauuccacccuuuguga

SEQ ID NO: 892086 - RNA, 19 nt, Homo sapiens
  misc_RNA (1)...(19): siRNA sense strand
caaaugcugguaaacauau

SEQ ID NO: 892087 - RNA, 19 nt, Homo sapiens
  misc_RNA (1)...(19): siRNA sense strand
gugcuuacuuaccuuacua

SEQ ID NO: 892088 - RNA, 19 nt, Homo sapiens
  misc_RNA (1)...(19): siRNA sense strand
auuaguggcuuuagcaauu

SEQ ID NO: 892089 - RNA, 19 nt, Homo sapiens
  misc_RNA (1)...(19): siRNA sense strand
cacaaaugcugguaaacau

SEQ ID NO: 892090 - RNA, 19 nt, Homo sapiens
  misc_RNA (1)...(19): siRNA sense strand
ggaacaaagagguaaagga

SEQ ID NO: 892091 - RNA, 19 nt, Homo sapiens
  misc_RNA (1)...(19): siRNA sense strand
ggccuuggguuccacagaa

SEQ ID NO: 892092 - RNA, 19 nt, Homo sapiens
  misc_RNA (1)...(19): siRNA sense strand
gaccuuugcuauaccacaa

SEQ ID NO: 892093 - RNA, 19 nt, Homo sapiens
  misc_RNA (1)...(19): siRNA sense strand
ccucuccauuacucaauua

SEQ ID NO: 892094 - RNA, 19 nt, Homo sapiens
  misc_RNA (1)...(19): siRNA sense strand
gcaaaugaggcugaacuau

SEQ ID NO: 892095 - RNA, 19 nt, Homo sapiens
  misc_RNA (1)...(19): siRNA sense strand
uguaaucucccucaaagaa

SEQ ID NO: 892096 - RNA, 19 nt, Homo sapiens
  misc_RNA (1)...(19): siRNA sense strand
gaaaguaaucaguuauggu

SEQ ID NO: 892097 - RNA, 19 nt, Homo sapiens
  misc_RNA (1)...(19): siRNA sense strand
guaaucucccucaaagaaa

SEQ ID NO: 892098 - RNA, 19 nt, Homo sapiens
  misc_RNA (1)...(19): siRNA sense strand
ucucuucuguggaaucauu

SEQ ID NO: 892099 - RNA, 19 nt, Homo sapiens
  misc_RNA (1)...(19): siRNA sense strand
ccacaaaugcugguaaaca

SEQ ID NO: 892100 - RNA, 19 nt, Homo sapiens
  misc_RNA (1)...(19): siRNA sense strand
caugugcuuugauagguuu

SEQ ID NO: 892101 - RNA, 19 nt, Homo sapiens
  misc_RNA (1)...(19): siRNA sense strand
acaaaugcugguaaacaua

SEQ ID NO: 892102 - RNA, 19 nt, Homo sapiens
  misc_RNA (1)...(19): siRNA sense strand
gacaaucuuuggcaaucug

SEQ ID NO: 892103 - RNA, 19 nt, Homo sapiens
  misc_RNA (1)...(19): siRNA sense strand
acaaguacaguuccacaaa

SEQ ID NO: 892104 - RNA, 19 nt, Homo sapiens
  misc_RNA (1)...(19): siRNA sense strand
ugucacauguggauuucaa

SEQ ID NO: 892105 - RNA, 19 nt, Homo sapiens
  misc_RNA (1)...(19): siRNA sense strand
cuccauuacucaauuauca

SEQ ID NO: 892106 - RNA, 19 nt, Homo sapiens
  misc_RNA (1)...(19): siRNA sense strand
uuugauagguuuguagcua

SEQ ID NO: 892107 - RNA, 19 nt, Homo sapiens
  misc_RNA (1)...(19): siRNA sense strand
agugugcuauuccuucuaa

SEQ ID NO: 892108 - RNA, 19 nt, Homo sapiens
  misc_RNA (1)...(19): siRNA sense strand
gaguucauucuguuaguuu

SEQ ID NO: 892109 - RNA, 19 nt, Homo sapiens
  misc_RNA (1)...(19): siRNA sense strand
cuaauuguggugucacuuu

SEQ ID NO: 892110 - RNA, 19 nt, Homo sapiens
  misc_RNA (1)...(19): siRNA sense strand
gagaauccagucugcugaa

SEQ ID NO: 892111 - RNA, 19 nt, Homo sapiens
  misc_RNA (1)...(19): siRNA sense strand
acacagugcuuacuuaccu

SEQ ID NO: 892112 - RNA, 19 nt, Homo sapiens
  misc_RNA (1)...(19): siRNA sense strand
uccuauaucuugacaaucu

SEQ ID NO: 892113 - RNA, 19 nt, Homo sapiens
  misc_RNA (1)...(19): siRNA sense strand
uccgcaaguuguccuauuu

SEQ ID NO: 892114 - RNA, 19 nt, Homo sapiens
  misc_RNA (1)...(19): siRNA sense strand
ucccugcucugcucaaguu

SEQ ID NO: 892115 - RNA, 19 nt, Homo sapiens
  misc_RNA (1)...(19): siRNA sense strand
aaguacaguuccacaaaug

SEQ ID NO: 892116 - RNA, 19 nt, Homo sapiens
  misc_RNA (1)...(19): siRNA sense strand
ggcaaucugacaauaauuc

SEQ ID NO: 892117 - RNA, 19 nt, Homo sapiens
  misc_RNA (1)...(19): siRNA sense strand
ggacauguggcucccaucu

SEQ ID NO: 892118 - RNA, 19 nt, Homo sapiens
  misc_RNA (1)...(19): siRNA sense strand
ugacacucauccuuauauc

SEQ ID NO: 892119 - RNA, 19 nt, Homo sapiens
  misc_RNA (1)...(19): siRNA sense strand
aaagguugguugcaaagag

SEQ ID NO: 892120 - RNA, 19 nt, Homo sapiens
  misc_RNA (1)...(19): siRNA sense strand
cgaaaggcauuugggacau

SEQ ID NO: 892121 - RNA, 19 nt, Homo sapiens
  misc_RNA (1)...(19): siRNA sense strand
gugcuuugauagguuugua

SEQ ID NO: 892122 - RNA, 19 nt, Homo sapiens
  misc_RNA (1)...(19): siRNA sense strand
ccccuuauauauacacuua

SEQ ID NO: 892123 - RNA, 19 nt, Homo sapiens
  misc_RNA (1)...(19): siRNA sense strand
cuucaucagugugcuauuc

SEQ ID NO: 892124 - RNA, 19 nt, Homo sapiens
  misc_RNA (1)...(19): siRNA sense strand
gugacacucauccuuauau

SEQ ID NO: 892125 - RNA, 19 nt, Homo sapiens
  misc_RNA (1)...(19): siRNA sense strand
ugcaacaccaggaaaguaa

SEQ ID NO: 892126 - RNA, 19 nt, Homo sapiens
  misc_RNA (1)...(19): siRNA sense strand
aaagacacagugcuuacuu

SEQ ID NO: 892127 - RNA, 19 nt, Homo sapiens
  misc_RNA (1)...(19): siRNA sense strand
guuucucucuucuguggaa

SEQ ID NO: 892128 - RNA, 19 nt, Homo sapiens
  misc_RNA (1)...(19): siRNA sense strand
gacauguggcucccaucua

SEQ ID NO: 892129 - RNA, 19 nt, Homo sapiens
  misc_RNA (1)...(19): siRNA sense strand
ucaugugcuuugauagguu

SEQ ID NO: 892130 - RNA, 19 nt, Homo sapiens
  misc_RNA (1)...(19): siRNA sense strand
uccaagcaguguugagaau

SEQ ID NO: 892131 - RNA, 19 nt, Homo sapiens
  misc_RNA (1)...(19): siRNA sense strand
cuaauacccgugacacuca

SEQ ID NO: 892132 - RNA, 19 nt, Homo sapiens
  misc_RNA (1)...(19): siRNA sense strand
uuggcaaucugacaauaau

SEQ ID NO: 892133 - RNA, 19 nt, Homo sapiens
  misc_RNA (1)...(19): siRNA sense strand
caagcaguguugagaaucc

SEQ ID NO: 892134 - RNA, 19 nt, Homo sapiens
  misc_RNA (1)...(19): siRNA sense strand
ccgugacacucauccuuau

SEQ ID NO: 892135 - RNA, 19 nt, Homo sapiens
  misc_RNA (1)...(19): siRNA sense strand
uuugucggccucuccauua

SEQ ID NO: 892136 - RNA, 19 nt, Homo sapiens
  misc_RNA (1)...(19): siRNA sense strand
caacaccaggaaaguaauc

SEQ ID NO: 892137 - RNA, 19 nt, Homo sapiens
  misc_RNA (1)...(19): siRNA sense strand
cuagagauuccacccuuug

SEQ ID NO: 892138 - RNA, 19 nt, Homo sapiens
  misc_RNA (1)...(19): siRNA sense strand
acauguggauuucaaacuc

SEQ ID NO: 892139 - RNA, 19 nt, Homo sapiens
  misc_RNA (1)...(19): siRNA sense strand
uaaucucccucaaagaaaa

SEQ ID NO: 892140 - RNA, 19 nt, Homo sapiens
  misc_RNA (1)...(19): siRNA sense strand
uuaaaagguugguugcaaa

SEQ ID NO: 892141 - RNA, 19 nt, Homo sapiens
  misc_RNA (1)...(19): siRNA sense strand
cccgugacacucauccuua

SEQ ID NO: 892142 - RNA, 19 nt, Homo sapiens
  misc_RNA (1)...(19): siRNA sense strand
ugacacaacagcaaaugag

SEQ ID NO: 892143 - RNA, 19 nt, Homo sapiens
  misc_RNA (1)...(19): siRNA sense strand
ggcuuuagcaauucaguau

SEQ ID NO: 892144 - RNA, 19 nt, Homo sapiens
  misc_RNA (1)...(19): siRNA sense strand
uggcccagcuuuucauuuu

SEQ ID NO: 892145 - RNA, 19 nt, Homo sapiens
  misc_RNA (1)...(19): siRNA sense strand
gcaacaccaggaaaguaau

SEQ ID NO: 892146 - RNA, 19 nt, Homo sapiens
  misc_RNA (1)...(19): siRNA sense strand
ucucacuccuggaccuuug

SEQ ID NO: 892147 - RNA, 19 nt, Homo sapiens
  misc_RNA (1)...(19): siRNA sense strand
gauuccacccuuugugaug

SEQ ID NO: 892148 - RNA, 19 nt, Homo sapiens
  misc_RNA (1)...(19): siRNA sense strand
ugaauccccuuauauauac

SEQ ID NO: 892149 - RNA, 19 nt, Homo sapiens
  misc_RNA (1)...(19): siRNA sense strand
acacuuaagaugccacugu

SEQ ID NO: 892150 - RNA, 19 nt, Homo sapiens
  misc_RNA (1)...(19): siRNA sense strand
gauuaguggcuuuagcaau

SEQ ID NO: 892151 - RNA, 19 nt, Homo sapiens
  misc_RNA (1)...(19): siRNA sense strand
gaggcucugcuuccaguug

SEQ ID NO: 892152 - RNA, 19 nt, Homo sapiens
  misc_RNA (1)...(19): siRNA sense strand
gcaaucugacaauaauucu

SEQ ID NO: 892153 - RNA, 19 nt, Homo sapiens
  misc_RNA (1)...(19): siRNA sense strand
ccacaccccuauguacuuu

SEQ ID NO: 892154 - RNA, 19 nt, Homo sapiens
  misc_RNA (1)...(19): siRNA sense strand
aauccagucugcugaaggu

SEQ ID NO: 892155 - RNA, 19 nt, Homo sapiens
  misc_RNA (1)...(19): siRNA sense strand
cacucauccuuauaucgua

SEQ ID NO: 892156 - RNA, 19 nt, Homo sapiens
  misc_RNA (1)...(19): siRNA sense strand
caaguuguccuguguugac

SEQ ID NO: 892157 - RNA, 19 nt, Homo sapiens
  misc_RNA (1)...(19): siRNA sense strand
gccucuccauuacucaauu

SEQ ID NO: 892158 - RNA, 19 nt, Homo sapiens
  misc_RNA (1)...(19): siRNA sense strand
uuccacaaaugcugguaaa

SEQ ID NO: 892159 - RNA, 19 nt, Homo sapiens
  misc_RNA (1)...(19): siRNA sense strand
caggaaaguaaucaguuau

SEQ ID NO: 892160 - RNA, 19 nt, Homo sapiens
  misc_RNA (1)...(19): siRNA sense strand
auuguaaucucccucaaag

SEQ ID NO: 892161 - RNA, 19 nt, Homo sapiens
  misc_RNA (1)...(19): siRNA sense strand
ucagugugcuauuccuucu

SEQ ID NO: 892162 - RNA, 19 nt, Homo sapiens
  misc_RNA (1)...(19): siRNA sense strand
ggauuaguggcuuuagcaa

SEQ ID NO: 892163 - RNA, 19 nt, Homo sapiens
  misc_RNA (1)...(19): siRNA sense strand
ccaccuggacacuuaagau

SEQ ID NO: 892164 - RNA, 19 nt, Homo sapiens
  misc_RNA (1)...(19): siRNA sense strand
acagugcuuacuuaccuua

SEQ ID NO: 892165 - RNA, 19 nt, Homo sapiens
  misc_RNA (1)...(19): siRNA sense strand
gaauuggguaaauaagagu

SEQ ID NO: 892166 - RNA, 19 nt, Homo sapiens
  misc_RNA (1)...(19): siRNA sense strand
cugaauccccuuauauaua

SEQ ID NO: 892167 - RNA, 19 nt, Homo sapiens
  misc_RNA (1)...(19): siRNA sense strand
ugacaaucuuuggcaaucu

SEQ ID NO: 892168 - RNA, 19 nt, Homo sapiens
  misc_RNA (1)...(19): siRNA sense strand
uaauuguggugucacuuuu

SEQ ID NO: 892169 - RNA, 19 nt, Homo sapiens
  misc_RNA (1)...(19): siRNA sense strand
ucaaccauggcuagagauu

SEQ ID NO: 892170 - RNA, 19 nt, Homo sapiens
  misc_RNA (1)...(19): siRNA sense strand
ggaaagagcucaaagauuu

SEQ ID NO: 892171 - RNA, 19 nt, Homo sapiens
  misc_RNA (1)...(19): siRNA sense strand
gaagagggcugaacgauuc

SEQ ID NO: 892172 - RNA, 19 nt, Homo sapiens
  misc_RNA (1)...(19): siRNA sense strand
gcagagcgcuuugggauug

SEQ ID NO: 892173 - RNA, 19 nt, Homo sapiens
  misc_RNA (1)...(19): siRNA sense strand
ggaauaaagcaagaucuua

SEQ ID NO: 892174 - RNA, 19 nt, Homo sapiens
  misc_RNA (1)...(19): siRNA sense strand
gcagcuagguuugggauuu

SEQ ID NO: 892175 - RNA, 19 nt, Homo sapiens
  misc_RNA (1)...(19): siRNA sense strand
aaaggucugucaucugaua

SEQ ID NO: 892176 - RNA, 19 nt, Homo sapiens
  misc_RNA (1)...(19): siRNA sense strand
caaaaggucugucaucuga

SEQ ID NO: 892177 - RNA, 19 nt, Homo sapiens
  misc_RNA (1)...(19): siRNA sense strand
gaaggaaagagcucaaaga

SEQ ID NO: 892178 - RNA, 19 nt, Homo sapiens
  misc_RNA (1)...(19): siRNA sense strand
ggaggcaaaugaagaagau

SEQ ID NO: 892179 - RNA, 19 nt, Homo sapiens
  misc_RNA (1)...(19): siRNA sense strand
gcuaaagcuugccgaacua

SEQ ID NO: 892180 - RNA, 19 nt, Homo sapiens
  misc_RNA (1)...(19): siRNA sense strand
gaagaaacaaagcccauug

SEQ ID NO: 892181 - RNA, 19 nt, Homo sapiens
  misc_RNA (1)...(19): siRNA sense strand
gaaagucugaagaugauga

SEQ ID NO: 892182 - RNA, 19 nt, Homo sapiens
  misc_RNA (1)...(19): siRNA sense strand
gaaauaccacagacugaga

SEQ ID NO: 892183 - RNA, 19 nt, Homo sapiens
  misc_RNA (1)...(19): siRNA sense strand
uggauaagcugaaggaaag

SEQ ID NO: 892184 - RNA, 19 nt, Homo sapiens
  misc_RNA (1)...(19): siRNA sense strand
ccugugagcuuggagagua

SEQ ID NO: 892185 - RNA, 19 nt, Homo sapiens
  misc_RNA (1)...(19): siRNA sense strand
ugaagaacaugcugaagag

SEQ ID NO: 892186 - RNA, 19 nt, Homo sapiens
  misc_RNA (1)...(19): siRNA sense strand
ugaaacagaggaagaagaa

SEQ ID NO: 892187 - RNA, 19 nt, Homo sapiens
  misc_RNA (1)...(19): siRNA sense strand
ccaagggaauaaagcaaga

SEQ ID NO: 892188 - RNA, 19 nt, Homo sapiens
  misc_RNA (1)...(19): siRNA sense strand
ucugucaucugauaacaaa

SEQ ID NO: 892189 - RNA, 19 nt, Homo sapiens
  misc_RNA (1)...(19): siRNA sense strand
gaagaugaugagaaacuga

SEQ ID NO: 892190 - RNA, 19 nt, Homo sapiens
  misc_RNA (1)...(19): siRNA sense strand
gaagauguacugggagaug

SEQ ID NO: 892191 - RNA, 19 nt, Homo sapiens
  misc_RNA (1)...(19): siRNA sense strand
gucugaagaugaugagaaa

SEQ ID NO: 892192 - RNA, 19 nt, Homo sapiens
  misc_RNA (1)...(19): siRNA sense strand
gagaugaaacagaggaaga

SEQ ID NO: 892193 - RNA, 19 nt, Homo sapiens
  misc_RNA (1)...(19): siRNA sense strand
gcaagaucuuauccacaga

SEQ ID NO: 892194 - RNA, 19 nt, Homo sapiens
  misc_RNA (1)...(19): siRNA sense strand
ucucuucaaucuccagaaa

SEQ ID NO: 892195 - RNA, 19 nt, Homo sapiens
  misc_RNA (1)...(19): siRNA sense strand
gagcuuggagaguaagaaa

SEQ ID NO: 892196 - RNA, 19 nt, Homo sapiens
  misc_RNA (1)...(19): siRNA sense strand
gaaggagcgauuugggauu

SEQ ID NO: 892197 - RNA, 19 nt, Homo sapiens
  misc_RNA (1)...(19): siRNA sense strand
gaagaggaggcaaaugaag

SEQ ID NO: 892198 - RNA, 19 nt, Homo sapiens
  misc_RNA (1)...(19): siRNA sense strand
gaaccacagaggauacaga

SEQ ID NO: 892199 - RNA, 19 nt, Homo sapiens
  misc_RNA (1)...(19): siRNA sense strand
gggaauaaagcaagaucuu

SEQ ID NO: 892200 - RNA, 19 nt, Homo sapiens
  misc_RNA (1)...(19): siRNA sense strand
cugaagaggaggcaaauga

SEQ ID NO: 892201 - RNA, 19 nt, Homo sapiens
  misc_RNA (1)...(19): siRNA sense strand
gaagaaaguggugaaaauu

SEQ ID NO: 892202 - RNA, 19 nt, Homo sapiens
  misc_RNA (1)...(19): siRNA sense strand
uaacuuggauaagcugaag

SEQ ID NO: 892203 - RNA, 19 nt, Homo sapiens
  misc_RNA (1)...(19): siRNA sense strand
gaacuaaagcaagaauguc

SEQ ID NO: 892204 - RNA, 19 nt, Homo sapiens
  misc_RNA (1)...(19): siRNA sense strand
cgaacuaaagcaagaaugu

SEQ ID NO: 892205 - RNA, 19 nt, Homo sapiens
  misc_RNA (1)...(19): siRNA sense strand
gguuugggauuucuucagu

SEQ ID NO: 892206 - RNA, 19 nt, Homo sapiens
  misc_RNA (1)...(19): siRNA sense strand
ggcaaaugaagaagaugua

SEQ ID NO: 892207 - RNA, 19 nt, Homo sapiens
  misc_RNA (1)...(19): siRNA sense strand
uuucuucaguuccaacaaa

SEQ ID NO: 892208 - RNA, 19 nt, Homo sapiens
  misc_RNA (1)...(19): siRNA sense strand
aaggagcgauuugggauug

SEQ ID NO: 892209 - RNA, 19 nt, Homo sapiens
  misc_RNA (1)...(19): siRNA sense strand
ugaagaggaggcaaaugaa

SEQ ID NO: 892210 - RNA, 19 nt, Homo sapiens
  misc_RNA (1)...(19): siRNA sense strand
caucugauaacaaaccuau

SEQ ID NO: 892211 - RNA, 19 nt, Homo sapiens
  misc_RNA (1)...(19): siRNA sense strand
agaagaaaguggugaaaau

SEQ ID NO: 892212 - RNA, 19 nt, Homo sapiens
  misc_RNA (1)...(19): siRNA sense strand
agaagagggcugaacgauu

SEQ ID NO: 892213 - RNA, 19 nt, Homo sapiens
  misc_RNA (1)...(19): siRNA sense strand
ggauacagaggcaaagaag

SEQ ID NO: 892214 - RNA, 19 nt, Homo sapiens
  misc_RNA (1)...(19): siRNA sense strand
ccacagacuccaggcauau

SEQ ID NO: 892215 - RNA, 19 nt, Homo sapiens
  misc_RNA (1)...(19): siRNA sense strand
gcagaagagggcugaacga

SEQ ID NO: 892216 - RNA, 19 nt, Homo sapiens
  misc_RNA (1)...(19): siRNA sense strand
gaaacagaggaagaagaaa

SEQ ID NO: 892217 - RNA, 19 nt, Homo sapiens
  misc_RNA (1)...(19): siRNA sense strand
ugaagaugaugagaaacug

SEQ ID NO: 892218 - RNA, 19 nt, Homo sapiens
  misc_RNA (1)...(19): siRNA sense strand
cagcuagguuugggauuuc

SEQ ID NO: 892219 - RNA, 19 nt, Homo sapiens
  misc_RNA (1)...(19): siRNA sense strand
cagaggaagaagaaacaaa

SEQ ID NO: 892220 - RNA, 19 nt, Homo sapiens
  misc_RNA (1)...(19): siRNA sense strand
ggagaccaagggaauaaag

SEQ ID NO: 892221 - RNA, 19 nt, Homo sapiens
  misc_RNA (1)...(19): siRNA sense strand
uccacagacuccaggcaua

SEQ ID NO: 892222 - RNA, 19 nt, Homo sapiens
  misc_RNA (1)...(19): siRNA sense strand
aagauguacugggagauga

SEQ ID NO: 892223 - RNA, 19 nt, Homo sapiens
  misc_RNA (1)...(19): siRNA sense strand
agacugagagaaugcagaa

SEQ ID NO: 892224 - RNA, 19 nt, Homo sapiens
  misc_RNA (1)...(19): siRNA sense strand
ugagcucccugucaaagag

SEQ ID NO: 892225 - RNA, 19 nt, Homo sapiens
  misc_RNA (1)...(19): siRNA sense strand
aaacagaggaagaagaaac

SEQ ID NO: 892226 - RNA, 19 nt, Homo sapiens
  misc_RNA (1)...(19): siRNA sense strand
ggucugucaucugauaaca

SEQ ID NO: 892227 - RNA, 19 nt, Homo sapiens
  misc_RNA (1)...(19): siRNA sense strand
gauacagaggcaaagaaga

SEQ ID NO: 892228 - RNA, 19 nt, Homo sapiens
  misc_RNA (1)...(19): siRNA sense strand
cagaggauacagaggcaaa

SEQ ID NO: 892229 - RNA, 19 nt, Homo sapiens
  misc_RNA (1)...(19): siRNA sense strand
uugaagaacaugcugaaga

SEQ ID NO: 892230 - RNA, 19 nt, Homo sapiens
  misc_RNA (1)...(19): siRNA sense strand
agaggaggcaaaugaagaa

SEQ ID NO: 892231 - RNA, 19 nt, Homo sapiens
  misc_RNA (1)...(19): siRNA sense strand
gaggauacagaggcaaaga

SEQ ID NO: 892232 - RNA, 19 nt, Homo sapiens
  misc_RNA (1)...(19): siRNA sense strand
gaccaagggaauaaagcaa

SEQ ID NO: 892233 - RNA, 19 nt, Homo sapiens
  misc_RNA (1)...(19): siRNA sense strand
aaggaaagagcucaaagau

SEQ ID NO: 892234 - RNA, 19 nt, Homo sapiens
  misc_RNA (1)...(19): siRNA sense strand
aagaggaggcaaaugaaga

SEQ ID NO: 892235 - RNA, 19 nt, Homo sapiens
  misc_RNA (1)...(19): siRNA sense strand
aagaaacaaagcccauuga

SEQ ID NO: 892236 - RNA, 19 nt, Homo sapiens
  misc_RNA (1)...(19): siRNA sense strand
aaaugaagaagauguacug

SEQ ID NO: 892237 - RNA, 19 nt, Homo sapiens
  misc_RNA (1)...(19): siRNA sense strand
aaagaggaaggagcgauuu

SEQ ID NO: 892238 - RNA, 19 nt, Homo sapiens
  misc_RNA (1)...(19): siRNA sense strand
ucuucaaucuccagaaagu

SEQ ID NO: 892239 - RNA, 19 nt, Homo sapiens
  misc_RNA (1)...(19): siRNA sense strand
aggaaagagcucaaagauu

SEQ ID NO: 892240 - RNA, 19 nt, Homo sapiens
  misc_RNA (1)...(19): siRNA sense strand
uaccacagacugagagaau

SEQ ID NO: 892241 - RNA, 19 nt, Homo sapiens
  misc_RNA (1)...(19): siRNA sense strand
gaaugucuugcucgugguu

SEQ ID NO: 892242 - RNA, 19 nt, Homo sapiens
  misc_RNA (1)...(19): siRNA sense strand
ucaauguaccugugagcuu

SEQ ID NO: 892243 - RNA, 19 nt, Homo sapiens
  misc_RNA (1)...(19): siRNA sense strand
cagagaagaaaguggugaa

SEQ ID NO: 892244 - RNA, 19 nt, Homo sapiens
  misc_RNA (1)...(19): siRNA sense strand
gcaaagaagaggaaaagag

SEQ ID NO: 892245 - RNA, 19 nt, Homo sapiens
  misc_RNA (1)...(19): siRNA sense strand
gcaaaugaagaagauguac

SEQ ID NO: 892246 - RNA, 19 nt, Homo sapiens
  misc_RNA (1)...(19): siRNA sense strand
ggagcgauuugggauuguc

SEQ ID NO: 892247 - RNA, 19 nt, Homo sapiens
  misc_RNA (1)...(19): siRNA sense strand
auacagaggcaaagaagag

SEQ ID NO: 892248 - RNA, 19 nt, Homo sapiens
  misc_RNA (1)...(19): siRNA sense strand
gauguacugggagaugaaa

SEQ ID NO: 892249 - RNA, 19 nt, Homo sapiens
  misc_RNA (1)...(19): siRNA sense strand
uaaagcuugccgaacuaaa

SEQ ID NO: 892250 - RNA, 19 nt, Homo sapiens
  misc_RNA (1)...(19): siRNA sense strand
agaggaagaagaaacaaag

SEQ ID NO: 892251 - RNA, 19 nt, Homo sapiens
  misc_RNA (1)...(19): siRNA sense strand
agauuugguuugaaugucu

SEQ ID NO: 892252 - RNA, 19 nt, Homo sapiens
  misc_RNA (1)...(19): siRNA sense strand
gagaagaaaguggugaaaa

SEQ ID NO: 892253 - RNA, 19 nt, Homo sapiens
  misc_RNA (1)...(19): siRNA sense strand
caacaaaaggucugucauc

SEQ ID NO: 892254 - RNA, 19 nt, Homo sapiens
  misc_RNA (1)...(19): siRNA sense strand
guuugggauuucuucaguu

SEQ ID NO: 892255 - RNA, 19 nt, Homo sapiens
  misc_RNA (1)...(19): siRNA sense strand
aaagcuugccgaacuaaag

SEQ ID NO: 892256 - RNA, 19 nt, Homo sapiens
  misc_RNA (1)...(19): siRNA sense strand
acugagagaaugcagaaga

SEQ ID NO: 892257 - RNA, 19 nt, Homo sapiens
  misc_RNA (1)...(19): siRNA sense strand
cuaaagcuugccgaacuaa

SEQ ID NO: 892258 - RNA, 19 nt, Homo sapiens
  misc_RNA (1)...(19): siRNA sense strand
ggagcucccuucccuaaug

SEQ ID NO: 892259 - RNA, 19 nt, Homo sapiens
  misc_RNA (1)...(19): siRNA sense strand
ggauggcacucaugaccuu

SEQ ID NO: 892260 - RNA, 19 nt, Homo sapiens
  misc_RNA (1)...(19): siRNA sense strand
uuacuuugcuacacaggua

SEQ ID NO: 892261 - RNA, 19 nt, Homo sapiens
  misc_RNA (1)...(19): siRNA sense strand
gcacucgagcagucuauuu

SEQ ID NO: 892262 - RNA, 19 nt, Homo sapiens
  misc_RNA (1)...(19): siRNA sense strand
agagcgacuuggccaaaua

SEQ ID NO: 892263 - RNA, 19 nt, Homo sapiens
  misc_RNA (1)...(19): siRNA sense strand
ggucuucucucuggucaug

SEQ ID NO: 892264 - RNA, 19 nt, Homo sapiens
  misc_RNA (1)...(19): siRNA sense strand
cgacuuggccaaauacuca

SEQ ID NO: 892265 - RNA, 19 nt, Homo sapiens
  misc_RNA (1)...(19): siRNA sense strand
ccgcaggcaucaccuaugu

SEQ ID NO: 892266 - RNA, 19 nt, Homo sapiens
  misc_RNA (1)...(19): siRNA sense strand
uggaggcccugcucucuga

SEQ ID NO: 892267 - RNA, 19 nt, Homo sapiens
  misc_RNA (1)...(19): siRNA sense strand
ccauuuacuuugcuacaca

SEQ ID NO: 892268 - RNA, 19 nt, Homo sapiens
  misc_RNA (1)...(19): siRNA sense strand
gucuaugccuucaugauca

SEQ ID NO: 892269 - RNA, 19 nt, Homo sapiens
  misc_RNA (1)...(19): siRNA sense strand
guagaggagaaguucauga

SEQ ID NO: 892270 - RNA, 19 nt, Homo sapiens
  misc_RNA (1)...(19): siRNA sense strand
gagcucccuucccuaaugg

SEQ ID NO: 892271 - RNA, 19 nt, Homo sapiens
  misc_RNA (1)...(19): siRNA sense strand
ccggaaagcccagcucuug

SEQ ID NO: 892272 - RNA, 19 nt, Homo sapiens
  misc_RNA (1)...(19): siRNA sense strand
ggucaaccugcuaaccuuu

SEQ ID NO: 892273 - RNA, 19 nt, Homo sapiens
  misc_RNA (1)...(19): siRNA sense strand
gcagcuggauggcacucau

SEQ ID NO: 892274 - RNA, 19 nt, Homo sapiens
  misc_RNA (1)...(19): siRNA sense strand
cagguaguauuugacaaga

SEQ ID NO: 892275 - RNA, 19 nt, Homo sapiens
  misc_RNA (1)...(19): siRNA sense strand
cagcucagccagucuguca

SEQ ID NO: 892276 - RNA, 19 nt, Homo sapiens
  misc_RNA (1)...(19): siRNA sense strand
ggaaagcccagcucuugcu

SEQ ID NO: 892277 - RNA, 19 nt, Homo sapiens
  misc_RNA (1)...(19): siRNA sense strand
ucuggucgccauuuacuuu

SEQ ID NO: 892278 - RNA, 19 nt, Homo sapiens
  misc_RNA (1)...(19): siRNA sense strand
ugggucuggucgccauuua

SEQ ID NO: 892279 - RNA, 19 nt, Homo sapiens
  misc_RNA (1)...(19): siRNA sense strand
ccggagacacuaugaugaa

SEQ ID NO: 892280 - RNA, 19 nt, Homo sapiens
  misc_RNA (1)...(19): siRNA sense strand
agguguuccugcccaaaua

SEQ ID NO: 892281 - RNA, 19 nt, Homo sapiens
  misc_RNA (1)...(19): siRNA sense strand
gcccggagacacuaugaug

SEQ ID NO: 892282 - RNA, 19 nt, Homo sapiens
  misc_RNA (1)...(19): siRNA sense strand
ccugcucucugaccucuuc

SEQ ID NO: 892283 - RNA, 19 nt, Homo sapiens
  misc_RNA (1)...(19): siRNA sense strand
gucugucacugccuauaug

SEQ ID NO: 892284 - RNA, 19 nt, Homo sapiens
  misc_RNA (1)...(19): siRNA sense strand
acacagguaguauuugaca

SEQ ID NO: 892285 - RNA, 19 nt, Homo sapiens
  misc_RNA (1)...(19): siRNA sense strand
aggagaaguucaugaccau

SEQ ID NO: 892286 - RNA, 19 nt, Homo sapiens
  misc_RNA (1)...(19): siRNA sense strand
cuggagcucccuucccuaa

SEQ ID NO: 892287 - RNA, 19 nt, Homo sapiens
  misc_RNA (1)...(19): siRNA sense strand
ggaaagauaccauaagaaa

SEQ ID NO: 892288 - RNA, 19 nt, Homo sapiens
  misc_RNA (1)...(19): siRNA sense strand
gaaauugucccuauugauu

SEQ ID NO: 892289 - RNA, 19 nt, Homo sapiens
  misc_RNA (1)...(19): siRNA sense strand
gcaaagcccuggaugauag

SEQ ID NO: 892290 - RNA, 19 nt, Homo sapiens
  misc_RNA (1)...(19): siRNA sense strand
gaagagacguggcgauugu

SEQ ID NO: 892291 - RNA, 19 nt, Homo sapiens
  misc_RNA (1)...(19): siRNA sense strand
gaaauacagagaaagcuua

SEQ ID NO: 892292 - RNA, 19 nt, Homo sapiens
  misc_RNA (1)...(19): siRNA sense strand
ccaaacggcuggugugauu

SEQ ID NO: 892293 - RNA, 19 nt, Homo sapiens
  misc_RNA (1)...(19): siRNA sense strand
acaaacagcuuaugcaaau

SEQ ID NO: 892294 - RNA, 19 nt, Homo sapiens
  misc_RNA (1)...(19): siRNA sense strand
gcagauaauugcccaagga

SEQ ID NO: 892295 - RNA, 19 nt, Homo sapiens
  misc_RNA (1)...(19): siRNA sense strand
gaaaucggcucaaacuucu

SEQ ID NO: 892296 - RNA, 19 nt, Homo sapiens
  misc_RNA (1)...(19): siRNA sense strand
gagaacagcugauagaaaa

SEQ ID NO: 892297 - RNA, 19 nt, Homo sapiens
  misc_RNA (1)...(19): siRNA sense strand
ggagugggaucacgacuau

SEQ ID NO: 892298 - RNA, 19 nt, Homo sapiens
  misc_RNA (1)...(19): siRNA sense strand
ggaaauugcuauugcucaa

SEQ ID NO: 892299 - RNA, 19 nt, Homo sapiens
  misc_RNA (1)...(19): siRNA sense strand
ggagaaacauuugugcuau

SEQ ID NO: 892300 - RNA, 19 nt, Homo sapiens
  misc_RNA (1)...(19): siRNA sense strand
ggaaaucggcucaaacuuc

SEQ ID NO: 892301 - RNA, 19 nt, Homo sapiens
  misc_RNA (1)...(19): siRNA sense strand
gaucugcagcucacuaaua

SEQ ID NO: 892302 - RNA, 19 nt, Homo sapiens
  misc_RNA (1)...(19): siRNA sense strand
gcaaggaguugaggaugaa

SEQ ID NO: 892303 - RNA, 19 nt, Homo sapiens
  misc_RNA (1)...(19): siRNA sense strand
uaaccuugaugcagagaua

SEQ ID NO: 892304 - RNA, 19 nt, Homo sapiens
  misc_RNA (1)...(19): siRNA sense strand
aaauacagcuccaacaaau

SEQ ID NO: 892305 - RNA, 19 nt, Homo sapiens
  misc_RNA (1)...(19): siRNA sense strand
cuacaaaggcuacaugaaa

SEQ ID NO: 892306 - RNA, 19 nt, Homo sapiens
  misc_RNA (1)...(19): siRNA sense strand
gcauguagccucaaacaga

SEQ ID NO: 892307 - RNA, 19 nt, Homo sapiens
  misc_RNA (1)...(19): siRNA sense strand
guggaaagauaccauaaga

SEQ ID NO: 892308 - RNA, 19 nt, Homo sapiens
  misc_RNA (1)...(19): siRNA sense strand
caaggaagaacuaaagaaa

SEQ ID NO: 892309 - RNA, 19 nt, Homo sapiens
  misc_RNA (1)...(19): siRNA sense strand
gauaauugcccaaggagaa

SEQ ID NO: 892310 - RNA, 19 nt, Homo sapiens
  misc_RNA (1)...(19): siRNA sense strand
gaacauugacagaaggaaa

SEQ ID NO: 892311 - RNA, 19 nt, Homo sapiens
  misc_RNA (1)...(19): siRNA sense strand
ggagaacagcugauagaaa

SEQ ID NO: 892312 - RNA, 19 nt, Homo sapiens
  misc_RNA (1)...(19): siRNA sense strand
gcacugacauccagaccau

SEQ ID NO: 892313 - RNA, 19 nt, Homo sapiens
  misc_RNA (1)...(19): siRNA sense strand
gcagcucacuaauauugaa

SEQ ID NO: 892314 - RNA, 19 nt, Homo sapiens
  misc_RNA (1)...(19): siRNA sense strand
cggaagaaauacagagaaa

SEQ ID NO: 892315 - RNA, 19 nt, Homo sapiens
  misc_RNA (1)...(19): siRNA sense strand
ucaaggagcuccagaaagc

SEQ ID NO: 892316 - RNA, 19 nt, Homo sapiens
  misc_RNA (1)...(19): siRNA sense strand
cgaaugcaguagcaguaua

SEQ ID NO: 892317 - RNA, 19 nt, Homo sapiens
  misc_RNA (1)...(19): siRNA sense strand
gagaaacauuugugcuaug

SEQ ID NO: 892318 - RNA, 19 nt, Homo sapiens
  misc_RNA (1)...(19): siRNA sense strand
ccacauagcagguccacaa

SEQ ID NO: 892319 - RNA, 19 nt, Homo sapiens
  misc_RNA (1)...(19): siRNA sense strand
gaaagcaaagcaucugaga

SEQ ID NO: 892320 - RNA, 19 nt, Homo sapiens
  misc_RNA (1)...(19): siRNA sense strand
ggaccuggcucgcucacau

SEQ ID NO: 892321 - RNA, 19 nt, Homo sapiens
  misc_RNA (1)...(19): siRNA sense strand
caaguagucagcaggauuu

SEQ ID NO: 892322 - RNA, 19 nt, Homo sapiens
  misc_RNA (1)...(19): siRNA sense strand
ucacugaaccacaauaaga

SEQ ID NO: 892323 - RNA, 19 nt, Homo sapiens
  misc_RNA (1)...(19): siRNA sense strand
ugaagagacuggagcacaa

SEQ ID NO: 892324 - RNA, 19 nt, Homo sapiens
  misc_RNA (1)...(19): siRNA sense strand
gagaacgacuugcuaaagc

SEQ ID NO: 892325 - RNA, 19 nt, Homo sapiens
  misc_RNA (1)...(19): siRNA sense strand
ggugaaugcugaaggaaca

SEQ ID NO: 892326 - RNA, 19 nt, Homo sapiens
  misc_RNA (1)...(19): siRNA sense strand
caaacagcuuaugcaaaua

SEQ ID NO: 892327 - RNA, 19 nt, Homo sapiens
  misc_RNA (1)...(19): siRNA sense strand
gaccaucacaaacagcuua

SEQ ID NO: 892328 - RNA, 19 nt, Homo sapiens
  misc_RNA (1)...(19): siRNA sense strand
ggaggucagucgucauauc

SEQ ID NO: 892329 - RNA, 19 nt, Homo sapiens
  misc_RNA (1)...(19): siRNA sense strand
gcuaaagccagccaugaaa

SEQ ID NO: 892330 - RNA, 19 nt, Homo sapiens
  misc_RNA (1)...(19): siRNA sense strand
agaaguggcagcaguuuaa

SEQ ID NO: 892331 - RNA, 19 nt, Homo sapiens
  misc_RNA (1)...(19): siRNA sense strand
ugcagcagcuugauaagaa

SEQ ID NO: 892332 - RNA, 19 nt, Homo sapiens
  misc_RNA (1)...(19): siRNA sense strand
ccaaggagaacagcugaua

SEQ ID NO: 892333 - RNA, 19 nt, Homo sapiens
  misc_RNA (1)...(19): siRNA sense strand
gcugugcccucuccaacaa

SEQ ID NO: 892334 - RNA, 19 nt, Homo sapiens
  misc_RNA (1)...(19): siRNA sense strand
agccaugguuugcuucuua

SEQ ID NO: 892335 - RNA, 19 nt, Homo sapiens
  misc_RNA (1)...(19): siRNA sense strand
gaagaaauacagagaaagc

SEQ ID NO: 892336 - RNA, 19 nt, Homo sapiens
  misc_RNA (1)...(19): siRNA sense strand
gaaguuauuagacguguca

SEQ ID NO: 892337 - RNA, 19 nt, Homo sapiens
  misc_RNA (1)...(19): siRNA sense strand
gaaaugagccaugguuugc

SEQ ID NO: 892338 - RNA, 19 nt, Homo sapiens
  misc_RNA (1)...(19): siRNA sense strand
ugacgcagcuggaacugau

SEQ ID NO: 892339 - RNA, 19 nt, Homo sapiens
  misc_RNA (1)...(19): siRNA sense strand
ccaucgagcuccagaucaa

SEQ ID NO: 892340 - RNA, 19 nt, Homo sapiens
  misc_RNA (1)...(19): siRNA sense strand
gaucaucgaggaggaacua

SEQ ID NO: 892341 - RNA, 19 nt, Homo sapiens
  misc_RNA (1)...(19): siRNA sense strand
ccacagugcccuagaguca

SEQ ID NO: 892342 - RNA, 19 nt, Homo sapiens
  misc_RNA (1)...(19): siRNA sense strand
gaagagacuggagcacaaa

SEQ ID NO: 892343 - RNA, 19 nt, Homo sapiens
  misc_RNA (1)...(19): siRNA sense strand
aaauaaagcaugagcuguu

SEQ ID NO: 892344 - RNA, 19 nt, Homo sapiens
  misc_RNA (1)...(19): siRNA sense strand
gggcuugccugccuuguac

SEQ ID NO: 892345 - RNA, 19 nt, Homo sapiens
  misc_RNA (1)...(19): siRNA sense strand
gaagcacaguacagguguu

SEQ ID NO: 892346 - RNA, 19 nt, Homo sapiens
  misc_RNA (1)...(19): siRNA sense strand
gaucgcuugucgcagauga

SEQ ID NO: 892347 - RNA, 19 nt, Homo sapiens
  misc_RNA (1)...(19): siRNA sense strand
agcaggagcuucagagaga

SEQ ID NO: 892348 - RNA, 19 nt, Homo sapiens
  misc_RNA (1)...(19): siRNA sense strand
caaaugggagaacgacuug

SEQ ID NO: 892349 - RNA, 19 nt, Homo sapiens
  misc_RNA (1)...(19): siRNA sense strand
ggagaacgacuugcuaaag

SEQ ID NO: 892350 - RNA, 19 nt, Homo sapiens
  misc_RNA (1)...(19): siRNA sense strand
ggcaaagcccuggaugaua

SEQ ID NO: 892351 - RNA, 19 nt, Homo sapiens
  misc_RNA (1)...(19): siRNA sense strand
aaauugcuauugcucaaga

SEQ ID NO: 892352 - RNA, 19 nt, Homo sapiens
  misc_RNA (1)...(19): siRNA sense strand
gaaauuucuggaugacuau

SEQ ID NO: 892353 - RNA, 19 nt, Homo sapiens
  misc_RNA (1)...(19): siRNA sense strand
cauguagccucaaacagau

SEQ ID NO: 892354 - RNA, 19 nt, Homo sapiens
  misc_RNA (1)...(19): siRNA sense strand
uauuagacgugucaaguag

SEQ ID NO: 892355 - RNA, 19 nt, Homo sapiens
  misc_RNA (1)...(19): siRNA sense strand
gcuagacaccagcuacaaa

SEQ ID NO: 892356 - RNA, 19 nt, Homo sapiens
  misc_RNA (1)...(19): siRNA sense strand
aaauaucauucgcagcaaa

SEQ ID NO: 892357 - RNA, 19 nt, Homo sapiens
  misc_RNA (1)...(19): siRNA sense strand
ggaccacagugcccuagag

SEQ ID NO: 892358 - RNA, 19 nt, Homo sapiens
  misc_RNA (1)...(19): siRNA sense strand
ccacagccuuccuccaauc

SEQ ID NO: 892359 - RNA, 19 nt, Homo sapiens
  misc_RNA (1)...(19): siRNA sense strand
ccaaggaagaacuaaagaa

SEQ ID NO: 892360 - RNA, 19 nt, Homo sapiens
  misc_RNA (1)...(19): siRNA sense strand
ugaaaugagccaugguuug

SEQ ID NO: 892361 - RNA, 19 nt, Homo sapiens
  misc_RNA (1)...(19): siRNA sense strand
caagaggaaauugcuauug

SEQ ID NO: 892362 - RNA, 19 nt, Homo sapiens
  misc_RNA (1)...(19): siRNA sense strand
gaaagauaccauaagaaac

SEQ ID NO: 892363 - RNA, 19 nt, Homo sapiens
  misc_RNA (1)...(19): siRNA sense strand
agugugauguucaagcuaa

SEQ ID NO: 892364 - RNA, 19 nt, Homo sapiens
  misc_RNA (1)...(19): siRNA sense strand
gggagaaccgcacugauuc

SEQ ID NO: 892365 - RNA, 19 nt, Homo sapiens
  misc_RNA (1)...(19): siRNA sense strand
uuuguuaaccugcauagua

SEQ ID NO: 892366 - RNA, 19 nt, Homo sapiens
  misc_RNA (1)...(19): siRNA sense strand
aauaaagcaugagcuguug

SEQ ID NO: 892367 - RNA, 19 nt, Homo sapiens
  misc_RNA (1)...(19): siRNA sense strand
ucacaaacagcuuaugcaa

SEQ ID NO: 892368 - RNA, 19 nt, Homo sapiens
  misc_RNA (1)...(19): siRNA sense strand
cuauacaguugccaaggaa

SEQ ID NO: 892369 - RNA, 19 nt, Homo sapiens
  misc_RNA (1)...(19): siRNA sense strand
ggucagucgucauaucaag

SEQ ID NO: 892370 - RNA, 19 nt, Homo sapiens
  misc_RNA (1)...(19): siRNA sense strand
gaggucagucgucauauca

SEQ ID NO: 892371 - RNA, 19 nt, Homo sapiens
  misc_RNA (1)...(19): siRNA sense strand
cagaaguggcagcaguuua

SEQ ID NO: 892372 - RNA, 19 nt, Homo sapiens
  misc_RNA (1)...(19): siRNA sense strand
gaaugcaguagcaguauag

SEQ ID NO: 892373 - RNA, 19 nt, Homo sapiens
  misc_RNA (1)...(19): siRNA sense strand
ucacgacuaugaccucagu

SEQ ID NO: 892374 - RNA, 19 nt, Homo sapiens
  misc_RNA (1)...(19): siRNA sense strand
agagagacauagagaagca

SEQ ID NO: 892375 - RNA, 19 nt, Homo sapiens
  misc_RNA (1)...(19): siRNA sense strand
agcaugagcuguuggaauc

SEQ ID NO: 892376 - RNA, 19 nt, Homo sapiens
  misc_RNA (1)...(19): siRNA sense strand
gugccaggguuuccaugaa

SEQ ID NO: 892377 - RNA, 19 nt, Homo sapiens
  misc_RNA (1)...(19): siRNA sense strand
ugaaacugcugggcgaaug

SEQ ID NO: 892378 - RNA, 19 nt, Homo sapiens
  misc_RNA (1)...(19): siRNA sense strand
gaaaggaggcugaaaaucg

SEQ ID NO: 892379 - RNA, 19 nt, Homo sapiens
  misc_RNA (1)...(19): siRNA sense strand
gaccuggagucugcaaugu

SEQ ID NO: 892380 - RNA, 19 nt, Homo sapiens
  misc_RNA (1)...(19): siRNA sense strand
ggaccuggagucugcaaug

SEQ ID NO: 892381 - RNA, 19 nt, Homo sapiens
  misc_RNA (1)...(19): siRNA sense strand
gagcacgaccucucagaca

SEQ ID NO: 892382 - RNA, 19 nt, Homo sapiens
  misc_RNA (1)...(19): siRNA sense strand
cagcaggaaauuucacuga

SEQ ID NO: 892383 - RNA, 19 nt, Homo sapiens
  misc_RNA (1)...(19): siRNA sense strand
ucacgaaggcaaccagaga

SEQ ID NO: 892384 - RNA, 19 nt, Homo sapiens
  misc_RNA (1)...(19): siRNA sense strand
ggagaaccgcacugauuca

SEQ ID NO: 892385 - RNA, 19 nt, Homo sapiens
  misc_RNA (1)...(19): siRNA sense strand
gcaaguguagucucucaca

SEQ ID NO: 892386 - RNA, 19 nt, Homo sapiens
  misc_RNA (1)...(19): siRNA sense strand
caacuuugcccggucauuc

SEQ ID NO: 892387 - RNA, 19 nt, Homo sapiens
  misc_RNA (1)...(19): siRNA sense strand
ggaaagauaccauaagaaa

SEQ ID NO: 892388 - RNA, 19 nt, Homo sapiens
  misc_RNA (1)...(19): siRNA sense strand
gaaauugucccuauugauu

SEQ ID NO: 892389 - RNA, 19 nt, Homo sapiens
  misc_RNA (1)...(19): siRNA sense strand
gcaaagcccuggaugauag

SEQ ID NO: 892390 - RNA, 19 nt, Homo sapiens
  misc_RNA (1)...(19): siRNA sense strand
gaagagacguggcgauugu

SEQ ID NO: 892391 - RNA, 19 nt, Homo sapiens
  misc_RNA (1)...(19): siRNA sense strand
gaaauacagagaaagcuua

SEQ ID NO: 892392 - RNA, 19 nt, Homo sapiens
  misc_RNA (1)...(19): siRNA sense strand
ccaaacggcuggugugauu

SEQ ID NO: 892393 - RNA, 19 nt, Homo sapiens
  misc_RNA (1)...(19): siRNA sense strand
acaaacagcuuaugcaaau

SEQ ID NO: 892394 - RNA, 19 nt, Homo sapiens
  misc_RNA (1)...(19): siRNA sense strand
gcagauaauugcccaagga

SEQ ID NO: 892395 - RNA, 19 nt, Homo sapiens
  misc_RNA (1)...(19): siRNA sense strand
gaaaucggcucaaacuucu

SEQ ID NO: 892396 - RNA, 19 nt, Homo sapiens
  misc_RNA (1)...(19): siRNA sense strand
gagaacagcugauagaaaa

SEQ ID NO: 892397 - RNA, 19 nt, Homo sapiens
  misc_RNA (1)...(19): siRNA sense strand
ggagugggaucacgacuau

SEQ ID NO: 892398 - RNA, 19 nt, Homo sapiens
  misc_RNA (1)...(19): siRNA sense strand
ggaaauugcuauugcucaa

SEQ ID NO: 892399 - RNA, 19 nt, Homo sapiens
  misc_RNA (1)...(19): siRNA sense strand
ggagaaacauuugugcuau

SEQ ID NO: 892400 - RNA, 19 nt, Homo sapiens
  misc_RNA (1)...(19): siRNA sense strand
ggaaaucggcucaaacuuc

SEQ ID NO: 892401 - RNA, 19 nt, Homo sapiens
  misc_RNA (1)...(19): siRNA sense strand
gaucugcagcucacuaaua

SEQ ID NO: 892402 - RNA, 19 nt, Homo sapiens
  misc_RNA (1)...(19): siRNA sense strand
gcaaggaguugaggaugaa

SEQ ID NO: 892403 - RNA, 19 nt, Homo sapiens
  misc_RNA (1)...(19): siRNA sense strand
uaaccuugaugcagagaua

SEQ ID NO: 892404 - RNA, 19 nt, Homo sapiens
  misc_RNA (1)...(19): siRNA sense strand
aaauacagcuccaacaaau

SEQ ID NO: 892405 - RNA, 19 nt, Homo sapiens
  misc_RNA (1)...(19): siRNA sense strand
cuacaaaggcuacaugaaa

SEQ ID NO: 892406 - RNA, 19 nt, Homo sapiens
  misc_RNA (1)...(19): siRNA sense strand
gcauguagccucaaacaga

SEQ ID NO: 892407 - RNA, 19 nt, Homo sapiens
  misc_RNA (1)...(19): siRNA sense strand
guggaaagauaccauaaga

SEQ ID NO: 892408 - RNA, 19 nt, Homo sapiens
  misc_RNA (1)...(19): siRNA sense strand
caaggaagaacuaaagaaa

SEQ ID NO: 892409 - RNA, 19 nt, Homo sapiens
  misc_RNA (1)...(19): siRNA sense strand
gauaauugcccaaggagaa

SEQ ID NO: 892410 - RNA, 19 nt, Homo sapiens
  misc_RNA (1)...(19): siRNA sense strand
gaacauugacagaaggaaa

SEQ ID NO: 892411 - RNA, 19 nt, Homo sapiens
  misc_RNA (1)...(19): siRNA sense strand
ggagaacagcugauagaaa

SEQ ID NO: 892412 - RNA, 19 nt, Homo sapiens
  misc_RNA (1)...(19): siRNA sense strand
gcacugacauccagaccau

SEQ ID NO: 892413 - RNA, 19 nt, Homo sapiens
  misc_RNA (1)...(19): siRNA sense strand
gcagcucacuaauauugaa

SEQ ID NO: 892414 - RNA, 19 nt, Homo sapiens
  misc_RNA (1)...(19): siRNA sense strand
cggaagaaauacagagaaa

SEQ ID NO: 892415 - RNA, 19 nt, Homo sapiens
  misc_RNA (1)...(19): siRNA sense strand
ucaaggagcuccagaaagc

SEQ ID NO: 892416 - RNA, 19 nt, Homo sapiens
  misc_RNA (1)...(19): siRNA sense strand
cgaaugcaguagcaguaua

SEQ ID NO: 892417 - RNA, 19 nt, Homo sapiens
  misc_RNA (1)...(19): siRNA sense strand
gagaaacauuugugcuaug

SEQ ID NO: 892418 - RNA, 19 nt, Homo sapiens
  misc_RNA (1)...(19): siRNA sense strand
ccacauagcagguccacaa

SEQ ID NO: 892419 - RNA, 19 nt, Homo sapiens
  misc_RNA (1)...(19): siRNA sense strand
gaaagcaaagcaucugaga

SEQ ID NO: 892420 - RNA, 19 nt, Homo sapiens
  misc_RNA (1)...(19): siRNA sense strand
ggaccuggcucgcucacau

SEQ ID NO: 892421 - RNA, 19 nt, Homo sapiens
  misc_RNA (1)...(19): siRNA sense strand
caaguagucagcaggauuu

SEQ ID NO: 892422 - RNA, 19 nt, Homo sapiens
  misc_RNA (1)...(19): siRNA sense strand
ucacugaaccacaauaaga

SEQ ID NO: 892423 - RNA, 19 nt, Homo sapiens
  misc_RNA (1)...(19): siRNA sense strand
ugaagagacuggagcacaa

SEQ ID NO: 892424 - RNA, 19 nt, Homo sapiens
  misc_RNA (1)...(19): siRNA sense strand
gagaacgacuugcuaaagc

SEQ ID NO: 892425 - RNA, 19 nt, Homo sapiens
  misc_RNA (1)...(19): siRNA sense strand
ggugaaugcugaaggaaca

SEQ ID NO: 892426 - RNA, 19 nt, Homo sapiens
  misc_RNA (1)...(19): siRNA sense strand
caaacagcuuaugcaaaua

SEQ ID NO: 892427 - RNA, 19 nt, Homo sapiens
  misc_RNA (1)...(19): siRNA sense strand
gaccaucacaaacagcuua

SEQ ID NO: 892428 - RNA, 19 nt, Homo sapiens
  misc_RNA (1)...(19): siRNA sense strand
ggaggucagucgucauauc

SEQ ID NO: 892429 - RNA, 19 nt, Homo sapiens
  misc_RNA (1)...(19): siRNA sense strand
gcuaaagccagccaugaaa

SEQ ID NO: 892430 - RNA, 19 nt, Homo sapiens
  misc_RNA (1)...(19): siRNA sense strand
agaaguggcagcaguuuaa

SEQ ID NO: 892431 - RNA, 19 nt, Homo sapiens
  misc_RNA (1)...(19): siRNA sense strand
ugcagcagcuugauaagaa

SEQ ID NO: 892432 - RNA, 19 nt, Homo sapiens
  misc_RNA (1)...(19): siRNA sense strand
ccaaggagaacagcugaua

SEQ ID NO: 892433 - RNA, 19 nt, Homo sapiens
  misc_RNA (1)...(19): siRNA sense strand
gcugugcccucuccaacaa

SEQ ID NO: 892434 - RNA, 19 nt, Homo sapiens
  misc_RNA (1)...(19): siRNA sense strand
agccaugguuugcuucuua

SEQ ID NO: 892435 - RNA, 19 nt, Homo sapiens
  misc_RNA (1)...(19): siRNA sense strand
gaagaaauacagagaaagc

SEQ ID NO: 892436 - RNA, 19 nt, Homo sapiens
  misc_RNA (1)...(19): siRNA sense strand
gaaguuauuagacguguca

SEQ ID NO: 892437 - RNA, 19 nt, Homo sapiens
  misc_RNA (1)...(19): siRNA sense strand
gaaaugagccaugguuugc

SEQ ID NO: 892438 - RNA, 19 nt, Homo sapiens
  misc_RNA (1)...(19): siRNA sense strand
ugacgcagcuggaacugau

SEQ ID NO: 892439 - RNA, 19 nt, Homo sapiens
  misc_RNA (1)...(19): siRNA sense strand
ccaucgagcuccagaucaa

SEQ ID NO: 892440 - RNA, 19 nt, Homo sapiens
  misc_RNA (1)...(19): siRNA sense strand
gaucaucgaggaggaacua

SEQ ID NO: 892441 - RNA, 19 nt, Homo sapiens
  misc_RNA (1)...(19): siRNA sense strand
ccacagugcccuagaguca

SEQ ID NO: 892442 - RNA, 19 nt, Homo sapiens
  misc_RNA (1)...(19): siRNA sense strand
gaagagacuggagcacaaa

SEQ ID NO: 892443 - RNA, 19 nt, Homo sapiens
  misc_RNA (1)...(19): siRNA sense strand
aaauaaagcaugagcuguu

SEQ ID NO: 892444 - RNA, 19 nt, Homo sapiens
  misc_RNA (1)...(19): siRNA sense strand
gggcuugccugccuuguac

SEQ ID NO: 892445 - RNA, 19 nt, Homo sapiens
  misc_RNA (1)...(19): siRNA sense strand
gaagcacaguacagguguu

SEQ ID NO: 892446 - RNA, 19 nt, Homo sapiens
  misc_RNA (1)...(19): siRNA sense strand
gaucgcuugucgcagauga

SEQ ID NO: 892447 - RNA, 19 nt, Homo sapiens
  misc_RNA (1)...(19): siRNA sense strand
agcaggagcuucagagaga

SEQ ID NO: 892448 - RNA, 19 nt, Homo sapiens
  misc_RNA (1)...(19): siRNA sense strand
caaaugggagaacgacuug

SEQ ID NO: 892449 - RNA, 19 nt, Homo sapiens
  misc_RNA (1)...(19): siRNA sense strand
ggagaacgacuugcuaaag

SEQ ID NO: 892450 - RNA, 19 nt, Homo sapiens
  misc_RNA (1)...(19): siRNA sense strand
ggcaaagcccuggaugaua

SEQ ID NO: 892451 - RNA, 19 nt, Homo sapiens
  misc_RNA (1)...(19): siRNA sense strand
aaauugcuauugcucaaga

SEQ ID NO: 892452 - RNA, 19 nt, Homo sapiens
  misc_RNA (1)...(19): siRNA sense strand
gaaauuucuggaugacuau

SEQ ID NO: 892453 - RNA, 19 nt, Homo sapiens
  misc_RNA (1)...(19): siRNA sense strand
cauguagccucaaacagau

SEQ ID NO: 892454 - RNA, 19 nt, Homo sapiens
  misc_RNA (1)...(19): siRNA sense strand
uauuagacgugucaaguag

SEQ ID NO: 892455 - RNA, 19 nt, Homo sapiens
  misc_RNA (1)...(19): siRNA sense strand
gcuagacaccagcuacaaa

SEQ ID NO: 892456 - RNA, 19 nt, Homo sapiens
  misc_RNA (1)...(19): siRNA sense strand
aaauaucauucgcagcaaa

SEQ ID NO: 892457 - RNA, 19 nt, Homo sapiens
  misc_RNA (1)...(19): siRNA sense strand
ggaccacagugcccuagag

SEQ ID NO: 892458 - RNA, 19 nt, Homo sapiens
  misc_RNA (1)...(19): siRNA sense strand
ccacagccuuccuccaauc

SEQ ID NO: 892459 - RNA, 19 nt, Homo sapiens
  misc_RNA (1)...(19): siRNA sense strand
ccaaggaagaacuaaagaa

SEQ ID NO: 892460 - RNA, 19 nt, Homo sapiens
  misc_RNA (1)...(19): siRNA sense strand
ugaaaugagccaugguuug

SEQ ID NO: 892461 - RNA, 19 nt, Homo sapiens
  misc_RNA (1)...(19): siRNA sense strand
caagaggaaauugcuauug

SEQ ID NO: 892462 - RNA, 19 nt, Homo sapiens
  misc_RNA (1)...(19): siRNA sense strand
gaaagauaccauaagaaac

SEQ ID NO: 892463 - RNA, 19 nt, Homo sapiens
  misc_RNA (1)...(19): siRNA sense strand
agugugauguucaagcuaa

SEQ ID NO: 892464 - RNA, 19 nt, Homo sapiens
  misc_RNA (1)...(19): siRNA sense strand
gggagaaccgcacugauuc

SEQ ID NO: 892465 - RNA, 19 nt, Homo sapiens
  misc_RNA (1)...(19): siRNA sense strand
uuuguuaaccugcauagua

SEQ ID NO: 892466 - RNA, 19 nt, Homo sapiens
  misc_RNA (1)...(19): siRNA sense strand
aauaaagcaugagcuguug

SEQ ID NO: 892467 - RNA, 19 nt, Homo sapiens
  misc_RNA (1)...(19): siRNA sense strand
ucacaaacagcuuaugcaa

SEQ ID NO: 892468 - RNA, 19 nt, Homo sapiens
  misc_RNA (1)...(19): siRNA sense strand
cuauacaguugccaaggaa

SEQ ID NO: 892469 - RNA, 19 nt, Homo sapiens
  misc_RNA (1)...(19): siRNA sense strand
ggucagucgucauaucaag

SEQ ID NO: 892470 - RNA, 19 nt, Homo sapiens
  misc_RNA (1)...(19): siRNA sense strand
gaggucagucgucauauca

SEQ ID NO: 892471 - RNA, 19 nt, Homo sapiens
  misc_RNA (1)...(19): siRNA sense strand
cagaaguggcagcaguuua

SEQ ID NO: 892472 - RNA, 19 nt, Homo sapiens
  misc_RNA (1)...(19): siRNA sense strand
gaaugcaguagcaguauag

SEQ ID NO: 892473 - RNA, 19 nt, Homo sapiens
  misc_RNA (1)...(19): siRNA sense strand
ucacgacuaugaccucagu

SEQ ID NO: 892474 - RNA, 19 nt, Homo sapiens
  misc_RNA (1)...(19): siRNA sense strand
agagagacauagagaagca

SEQ ID NO: 892475 - RNA, 19 nt, Homo sapiens
  misc_RNA (1)...(19): siRNA sense strand
agcaugagcuguuggaauc

SEQ ID NO: 892476 - RNA, 19 nt, Homo sapiens
  misc_RNA (1)...(19): siRNA sense strand
gugccaggguuuccaugaa

SEQ ID NO: 892477 - RNA, 19 nt, Homo sapiens
  misc_RNA (1)...(19): siRNA sense strand
ugaaacugcugggcgaaug

SEQ ID NO: 892478 - RNA, 19 nt, Homo sapiens
  misc_RNA (1)...(19): siRNA sense strand
gaaaggaggcugaaaaucg

SEQ ID NO: 892479 - RNA, 19 nt, Homo sapiens
  misc_RNA (1)...(19): siRNA sense strand
gaccuggagucugcaaugu

SEQ ID NO: 892480 - RNA, 19 nt, Homo sapiens
  misc_RNA (1)...(19): siRNA sense strand
ggaccuggagucugcaaug

SEQ ID NO: 892481 - RNA, 19 nt, Homo sapiens
  misc_RNA (1)...(19): siRNA sense strand
gagcacgaccucucagaca

SEQ ID NO: 892482 - RNA, 19 nt, Homo sapiens
  misc_RNA (1)...(19): siRNA sense strand
cagcaggaaauuucacuga

SEQ ID NO: 892483 - RNA, 19 nt, Homo sapiens
  misc_RNA (1)...(19): siRNA sense strand
ucacgaaggcaaccagaga

SEQ ID NO: 892484 - RNA, 19 nt, Homo sapiens
  misc_RNA (1)...(19): siRNA sense strand
ggagaaccgcacugauuca

SEQ ID NO: 892485 - RNA, 19 nt, Homo sapiens
  misc_RNA (1)...(19): siRNA sense strand
gcaaguguagucucucaca

SEQ ID NO: 892486 - RNA, 19 nt, Homo sapiens
  misc_RNA (1)...(19): siRNA sense strand
caacuuugcccggucauuc

SEQ ID NO: 892487 - RNA, 19 nt, Homo sapiens
  misc_RNA (1)...(19): siRNA sense strand
ggaaagauaccauaagaaa

SEQ ID NO: 892488 - RNA, 19 nt, Homo sapiens
  misc_RNA (1)...(19): siRNA sense strand
gaaauugucccuauugauu

SEQ ID NO: 892489 - RNA, 19 nt, Homo sapiens
  misc_RNA (1)...(19): siRNA sense strand
gcaaagcccuggaugauag

SEQ ID NO: 892490 - RNA, 19 nt, Homo sapiens
  misc_RNA (1)...(19): siRNA sense strand
gaagagacguggcgauugu

SEQ ID NO: 892491 - RNA, 19 nt, Homo sapiens
  misc_RNA (1)...(19): siRNA sense strand
gaaauacagagaaagcuua

SEQ ID NO: 892492 - RNA, 19 nt, Homo sapiens
  misc_RNA (1)...(19): siRNA sense strand
ccaaacggcuggugugauu

SEQ ID NO: 892493 - RNA, 19 nt, Homo sapiens
  misc_RNA (1)...(19): siRNA sense strand
acaaacagcuuaugcaaau

SEQ ID NO: 892494 - RNA, 19 nt, Homo sapiens
  misc_RNA (1)...(19): siRNA sense strand
gcagauaauugcccaagga

SEQ ID NO: 892495 - RNA, 19 nt, Homo sapiens
  misc_RNA (1)...(19): siRNA sense strand
gaaaucggcucaaacuucu

SEQ ID NO: 892496 - RNA, 19 nt, Homo sapiens
  misc_RNA (1)...(19): siRNA sense strand
gagaacagcugauagaaaa

SEQ ID NO: 892497 - RNA, 19 nt, Homo sapiens
  misc_RNA (1)...(19): siRNA sense strand
ggagugggaucacgacuau

SEQ ID NO: 892498 - RNA, 19 nt, Homo sapiens
  misc_RNA (1)...(19): siRNA sense strand
ggagaaacauuugugcuau

SEQ ID NO: 892499 - RNA, 19 nt, Homo sapiens
  misc_RNA (1)...(19): siRNA sense strand
ggaaaucggcucaaacuuc

SEQ ID NO: 892500 - RNA, 19 nt, Homo sapiens
  misc_RNA (1)...(19): siRNA sense strand
gaucugcagcucacuaaua

SEQ ID NO: 892501 - RNA, 19 nt, Homo sapiens
  misc_RNA (1)...(19): siRNA sense strand
gcaaggaguugaggaugaa

SEQ ID NO: 892502 - RNA, 19 nt, Homo sapiens
  misc_RNA (1)...(19): siRNA sense strand
uaaccuugaugcagagaua

SEQ ID NO: 892503 - RNA, 19 nt, Homo sapiens
  misc_RNA (1)...(19): siRNA sense strand
cuacaaaggcuacaugaaa

SEQ ID NO: 892504 - RNA, 19 nt, Homo sapiens
  misc_RNA (1)...(19): siRNA sense strand
gcauguagccucaaacaga

SEQ ID NO: 892505 - RNA, 19 nt, Homo sapiens
  misc_RNA (1)...(19): siRNA sense strand
guggaaagauaccauaaga

SEQ ID NO: 892506 - RNA, 19 nt, Homo sapiens
  misc_RNA (1)...(19): siRNA sense strand
caaggaagaacuaaagaaa

SEQ ID NO: 892507 - RNA, 19 nt, Homo sapiens
  misc_RNA (1)...(19): siRNA sense strand
gauaauugcccaaggagaa

SEQ ID NO: 892508 - RNA, 19 nt, Homo sapiens
  misc_RNA (1)...(19): siRNA sense strand
gaacauugacagaaggaaa

SEQ ID NO: 892509 - RNA, 19 nt, Homo sapiens
  misc_RNA (1)...(19): siRNA sense strand
ggagaacagcugauagaaa

SEQ ID NO: 892510 - RNA, 19 nt, Homo sapiens
  misc_RNA (1)...(19): siRNA sense strand
gcacugacauccagaccau

SEQ ID NO: 892511 - RNA, 19 nt, Homo sapiens
  misc_RNA (1)...(19): siRNA sense strand
gcagcucacuaauauugaa

SEQ ID NO: 892512 - RNA, 19 nt, Homo sapiens
  misc_RNA (1)...(19): siRNA sense strand
cggaagaaauacagagaaa

SEQ ID NO: 892513 - RNA, 19 nt, Homo sapiens
  misc_RNA (1)...(19): siRNA sense strand
ucaaggagcuccagaaagc

SEQ ID NO: 892514 - RNA, 19 nt, Homo sapiens
  misc_RNA (1)...(19): siRNA sense strand
cgaaugcaguagcaguaua

SEQ ID NO: 892515 - RNA, 19 nt, Homo sapiens
  misc_RNA (1)...(19): siRNA sense strand
gagaaacauuugugcuaug

SEQ ID NO: 892516 - RNA, 19 nt, Homo sapiens
  misc_RNA (1)...(19): siRNA sense strand
ccacauagcagguccacaa

SEQ ID NO: 892517 - RNA, 19 nt, Homo sapiens
  misc_RNA (1)...(19): siRNA sense strand
gaaagcaaagcaucugaga

SEQ ID NO: 892518 - RNA, 19 nt, Homo sapiens
  misc_RNA (1)...(19): siRNA sense strand
ggaccuggcucgcucacau

SEQ ID NO: 892519 - RNA, 19 nt, Homo sapiens
  misc_RNA (1)...(19): siRNA sense strand
caaguagucagcaggauuu

SEQ ID NO: 892520 - RNA, 19 nt, Homo sapiens
  misc_RNA (1)...(19): siRNA sense strand
ucacugaaccacaauaaga

SEQ ID NO: 892521 - RNA, 19 nt, Homo sapiens
  misc_RNA (1)...(19): siRNA sense strand
ugaagagacuggagcacaa

SEQ ID NO: 892522 - RNA, 19 nt, Homo sapiens
  misc_RNA (1)...(19): siRNA sense strand
gagaacgacuugcuaaagc

SEQ ID NO: 892523 - RNA, 19 nt, Homo sapiens
  misc_RNA (1)...(19): siRNA sense strand
ggugaaugcugaaggaaca

SEQ ID NO: 892524 - RNA, 19 nt, Homo sapiens
  misc_RNA (1)...(19): siRNA sense strand
caaacagcuuaugcaaaua

SEQ ID NO: 892525 - RNA, 19 nt, Homo sapiens
  misc_RNA (1)...(19): siRNA sense strand
gaccaucacaaacagcuua

SEQ ID NO: 892526 - RNA, 19 nt, Homo sapiens
  misc_RNA (1)...(19): siRNA sense strand
ggaggucagucgucauauc

SEQ ID NO: 892527 - RNA, 19 nt, Homo sapiens
  misc_RNA (1)...(19): siRNA sense strand
ugcagcagcuugauaagaa

SEQ ID NO: 892528 - RNA, 19 nt, Homo sapiens
  misc_RNA (1)...(19): siRNA sense strand
agaaguggcagcaguuuaa

SEQ ID NO: 892529 - RNA, 19 nt, Homo sapiens
  misc_RNA (1)...(19): siRNA sense strand
gcuaaagccagccaugaaa

SEQ ID NO: 892530 - RNA, 19 nt, Homo sapiens
  misc_RNA (1)...(19): siRNA sense strand
ccaaggagaacagcugaua

SEQ ID NO: 892531 - RNA, 19 nt, Homo sapiens
  misc_RNA (1)...(19): siRNA sense strand
gcugugcccucuccaacaa

SEQ ID NO: 892532 - RNA, 19 nt, Homo sapiens
  misc_RNA (1)...(19): siRNA sense strand
agccaugguuugcuucuua

SEQ ID NO: 892533 - RNA, 19 nt, Homo sapiens
  misc_RNA (1)...(19): siRNA sense strand
gaagaaauacagagaaagc

SEQ ID NO: 892534 - RNA, 19 nt, Homo sapiens
  misc_RNA (1)...(19): siRNA sense strand
gaaguuauuagacguguca

SEQ ID NO: 892535 - RNA, 19 nt, Homo sapiens
  misc_RNA (1)...(19): siRNA sense strand
gaaaugagccaugguuugc

SEQ ID NO: 892536 - RNA, 19 nt, Homo sapiens
  misc_RNA (1)...(19): siRNA sense strand
ugacgcagcuggaacugau

SEQ ID NO: 892537 - RNA, 19 nt, Homo sapiens
  misc_RNA (1)...(19): siRNA sense strand
ccaucgagcuccagaucaa

SEQ ID NO: 892538 - RNA, 19 nt, Homo sapiens
  misc_RNA (1)...(19): siRNA sense strand
gaucaucgaggaggaacua

SEQ ID NO: 892539 - RNA, 19 nt, Homo sapiens
  misc_RNA (1)...(19): siRNA sense strand
ccacagugcccuagaguca

SEQ ID NO: 892540 - RNA, 19 nt, Homo sapiens
  misc_RNA (1)...(19): siRNA sense strand
gaagagacuggagcacaaa

SEQ ID NO: 892541 - RNA, 19 nt, Homo sapiens
  misc_RNA (1)...(19): siRNA sense strand
aaauaaagcaugagcuguu

SEQ ID NO: 892542 - RNA, 19 nt, Homo sapiens
  misc_RNA (1)...(19): siRNA sense strand
gggcuugccugccuuguac

SEQ ID NO: 892543 - RNA, 19 nt, Homo sapiens
  misc_RNA (1)...(19): siRNA sense strand
gaagcacaguacagguguu

SEQ ID NO: 892544 - RNA, 19 nt, Homo sapiens
  misc_RNA (1)...(19): siRNA sense strand
gaucgcuugucgcagauga

SEQ ID NO: 892545 - RNA, 19 nt, Homo sapiens
  misc_RNA (1)...(19): siRNA sense strand
agcaggagcuucagagaga

SEQ ID NO: 892546 - RNA, 19 nt, Homo sapiens
  misc_RNA (1)...(19): siRNA sense strand
ggcaaagcccuggaugaua

SEQ ID NO: 892547 - RNA, 19 nt, Homo sapiens
  misc_RNA (1)...(19): siRNA sense strand
ggagaacgacuugcuaaag

SEQ ID NO: 892548 - RNA, 19 nt, Homo sapiens
  misc_RNA (1)...(19): siRNA sense strand
gaaauuucuggaugacuau

SEQ ID NO: 892549 - RNA, 19 nt, Homo sapiens
  misc_RNA (1)...(19): siRNA sense strand
cauguagccucaaacagau

SEQ ID NO: 892550 - RNA, 19 nt, Homo sapiens
  misc_RNA (1)...(19): siRNA sense strand
uauuagacgugucaaguag

SEQ ID NO: 892551 - RNA, 19 nt, Homo sapiens
  misc_RNA (1)...(19): siRNA sense strand
gcuagacaccagcuacaaa

SEQ ID NO: 892552 - RNA, 19 nt, Homo sapiens
  misc_RNA (1)...(19): siRNA sense strand
aaauaucauucgcagcaaa

SEQ ID NO: 892553 - RNA, 19 nt, Homo sapiens
  misc_RNA (1)...(19): siRNA sense strand
ggaccacagugcccuagag

SEQ ID NO: 892554 - RNA, 19 nt, Homo sapiens
  misc_RNA (1)...(19): siRNA sense strand
ccacagccuuccuccaauc

SEQ ID NO: 892555 - RNA, 19 nt, Homo sapiens
  misc_RNA (1)...(19): siRNA sense strand
ccaaggaagaacuaaagaa

SEQ ID NO: 892556 - RNA, 19 nt, Homo sapiens
  misc_RNA (1)...(19): siRNA sense strand
ugaaaugagccaugguuug

SEQ ID NO: 892557 - RNA, 19 nt, Homo sapiens
  misc_RNA (1)...(19): siRNA sense strand
gaaagauaccauaagaaac

SEQ ID NO: 892558 - RNA, 19 nt, Homo sapiens
  misc_RNA (1)...(19): siRNA sense strand
agugugauguucaagcuaa

SEQ ID NO: 892559 - RNA, 19 nt, Homo sapiens
  misc_RNA (1)...(19): siRNA sense strand
gggagaaccgcacugauuc

SEQ ID NO: 892560 - RNA, 19 nt, Homo sapiens
  misc_RNA (1)...(19): siRNA sense strand
uuuguuaaccugcauagua

SEQ ID NO: 892561 - RNA, 19 nt, Homo sapiens
  misc_RNA (1)...(19): siRNA sense strand
aauaaagcaugagcuguug

SEQ ID NO: 892562 - RNA, 19 nt, Homo sapiens
  misc_RNA (1)...(19): siRNA sense strand
ucacaaacagcuuaugcaa

SEQ ID NO: 892563 - RNA, 19 nt, Homo sapiens
  misc_RNA (1)...(19): siRNA sense strand
cuauacaguugccaaggaa

SEQ ID NO: 892564 - RNA, 19 nt, Homo sapiens
  misc_RNA (1)...(19): siRNA sense strand
ggucagucgucauaucaag

SEQ ID NO: 892565 - RNA, 19 nt, Homo sapiens
  misc_RNA (1)...(19): siRNA sense strand
gaggucagucgucauauca

SEQ ID NO: 892566 - RNA, 19 nt, Homo sapiens
  misc_RNA (1)...(19): siRNA sense strand
cagaaguggcagcaguuua

SEQ ID NO: 892567 - RNA, 19 nt, Homo sapiens
  misc_RNA (1)...(19): siRNA sense strand
gaaugcaguagcaguauag

SEQ ID NO: 892568 - RNA, 19 nt, Homo sapiens
  misc_RNA (1)...(19): siRNA sense strand
ucacgacuaugaccucagu

SEQ ID NO: 892569 - RNA, 19 nt, Homo sapiens
  misc_RNA (1)...(19): siRNA sense strand
agagagacauagagaagca

SEQ ID NO: 892570 - RNA, 19 nt, Homo sapiens
  misc_RNA (1)...(19): siRNA sense strand
agcaugagcuguuggaauc

SEQ ID NO: 892571 - RNA, 19 nt, Homo sapiens
  misc_RNA (1)...(19): siRNA sense strand
gugccaggguuuccaugaa

SEQ ID NO: 892572 - RNA, 19 nt, Homo sapiens
  misc_RNA (1)...(19): siRNA sense strand
ugaaacugcugggcgaaug

SEQ ID NO: 892573 - RNA, 19 nt, Homo sapiens
  misc_RNA (1)...(19): siRNA sense strand
gaaaggaggcugaaaaucg

SEQ ID NO: 892574 - RNA, 19 nt, Homo sapiens
  misc_RNA (1)...(19): siRNA sense strand
gaccuggagucugcaaugu

SEQ ID NO: 892575 - RNA, 19 nt, Homo sapiens
  misc_RNA (1)...(19): siRNA sense strand
ggaccuggagucugcaaug

SEQ ID NO: 892576 - RNA, 19 nt, Homo sapiens
  misc_RNA (1)...(19): siRNA sense strand
gagcacgaccucucagaca

SEQ ID NO: 892577 - RNA, 19 nt, Homo sapiens
  misc_RNA (1)...(19): siRNA sense strand
cagcaggaaauuucacuga

SEQ ID NO: 892578 - RNA, 19 nt, Homo sapiens
  misc_RNA (1)...(19): siRNA sense strand
ucacgaaggcaaccagaga

SEQ ID NO: 892579 - RNA, 19 nt, Homo sapiens
  misc_RNA (1)...(19): siRNA sense strand
ggagaaccgcacugauuca

SEQ ID NO: 892580 - RNA, 19 nt, Homo sapiens
  misc_RNA (1)...(19): siRNA sense strand
auacagagaaagcuuaaug

SEQ ID NO: 892581 - RNA, 19 nt, Homo sapiens
  misc_RNA (1)...(19): siRNA sense strand
caacuuugcccggucauuc

SEQ ID NO: 892582 - RNA, 19 nt, Homo sapiens
  misc_RNA (1)...(19): siRNA sense strand
gcaaguguagucucucaca

SEQ ID NO: 892583 - RNA, 19 nt, Homo sapiens
  misc_RNA (1)...(19): siRNA sense strand
uacaaaggcuacaugaaac

SEQ ID NO: 892584 - RNA, 19 nt, Homo sapiens
  misc_RNA (1)...(19): siRNA sense strand
ggacacggaggaggaguug

SEQ ID NO: 892585 - RNA, 19 nt, Homo sapiens
  misc_RNA (1)...(19): siRNA sense strand
ggaaggagcaccccaaaca

SEQ ID NO: 892586 - RNA, 19 nt, Homo sapiens
  misc_RNA (1)...(19): siRNA sense strand
gggagaacgacuugcuaaa

SEQ ID NO: 892587 - RNA, 19 nt, Homo sapiens
  misc_RNA (1)...(19): siRNA sense strand
gaagacagcugaagaauuu

SEQ ID NO: 892588 - RNA, 19 nt, Homo sapiens
  misc_RNA (1)...(19): siRNA sense strand
ggagaaaccuggcaucuau

SEQ ID NO: 892589 - RNA, 19 nt, Homo sapiens
  misc_RNA (1)...(19): siRNA sense strand
acaaaccgcucauuauuua

SEQ ID NO: 892590 - RNA, 19 nt, Homo sapiens
  misc_RNA (1)...(19): siRNA sense strand
gaaaguggcucaaauaaaa

SEQ ID NO: 892591 - RNA, 19 nt, Homo sapiens
  misc_RNA (1)...(19): siRNA sense strand
gaaaggagcagaguaugua

SEQ ID NO: 892592 - RNA, 19 nt, Homo sapiens
  misc_RNA (1)...(19): siRNA sense strand
caaagagccuguucaccua

SEQ ID NO: 892593 - RNA, 19 nt, Homo sapiens
  misc_RNA (1)...(19): siRNA sense strand
caaagaugcuaaugaaguu

SEQ ID NO: 892594 - RNA, 19 nt, Homo sapiens
  misc_RNA (1)...(19): siRNA sense strand
gggaacagauauuuauuug

SEQ ID NO: 892595 - RNA, 19 nt, Homo sapiens
  misc_RNA (1)...(19): siRNA sense strand
gaauggaacaucaaagaaa

SEQ ID NO: 892596 - RNA, 19 nt, Homo sapiens
  misc_RNA (1)...(19): siRNA sense strand
gaggaaggcugcaaugaag

SEQ ID NO: 892597 - RNA, 19 nt, Homo sapiens
  misc_RNA (1)...(19): siRNA sense strand
gagaaaguggcucaaauaa

SEQ ID NO: 892598 - RNA, 19 nt, Homo sapiens
  misc_RNA (1)...(19): siRNA sense strand
aaacucauauggugaauuc

SEQ ID NO: 892599 - RNA, 19 nt, Homo sapiens
  misc_RNA (1)...(19): siRNA sense strand
gcaaagaugcuaaugaagu

SEQ ID NO: 892600 - RNA, 19 nt, Homo sapiens
  misc_RNA (1)...(19): siRNA sense strand
gacaaaccgcucauuauuu

SEQ ID NO: 892601 - RNA, 19 nt, Homo sapiens
  misc_RNA (1)...(19): siRNA sense strand
ggagaaaggagcagaguau

SEQ ID NO: 892602 - RNA, 19 nt, Homo sapiens
  misc_RNA (1)...(19): siRNA sense strand
uggcaaagaugcuaaugaa

SEQ ID NO: 892603 - RNA, 19 nt, Homo sapiens
  misc_RNA (1)...(19): siRNA sense strand
gacaagaggacaccaauug

SEQ ID NO: 892604 - RNA, 19 nt, Homo sapiens
  misc_RNA (1)...(19): siRNA sense strand
uuuaaggacuggagagaua

SEQ ID NO: 892605 - RNA, 19 nt, Homo sapiens
  misc_RNA (1)...(19): siRNA sense strand
aaagacaaaccgcucauua

SEQ ID NO: 892606 - RNA, 19 nt, Homo sapiens
  misc_RNA (1)...(19): siRNA sense strand
aaauguaccuugagacaga

SEQ ID NO: 892607 - RNA, 19 nt, Homo sapiens
  misc_RNA (1)...(19): siRNA sense strand
gcaaaugccacacgagaug

SEQ ID NO: 892608 - RNA, 19 nt, Homo sapiens
  misc_RNA (1)...(19): siRNA sense strand
gaugucauguuacuagaug

SEQ ID NO: 892609 - RNA, 19 nt, Homo sapiens
  misc_RNA (1)...(19): siRNA sense strand
ugauuuagcugaagaugau

SEQ ID NO: 892610 - RNA, 19 nt, Homo sapiens
  misc_RNA (1)...(19): siRNA sense strand
gagauaaagaucagaguga

SEQ ID NO: 892611 - RNA, 19 nt, Homo sapiens
  misc_RNA (1)...(19): siRNA sense strand
gaagaaugcuuuauuuugg

SEQ ID NO: 892612 - RNA, 19 nt, Homo sapiens
  misc_RNA (1)...(19): siRNA sense strand
agacaaaccgcucauuauu

SEQ ID NO: 892613 - RNA, 19 nt, Homo sapiens
  misc_RNA (1)...(19): siRNA sense strand
aaacaccaaucuucaaaca

SEQ ID NO: 892614 - RNA, 19 nt, Homo sapiens
  misc_RNA (1)...(19): siRNA sense strand
ggaaagguaaagaugcuaa

SEQ ID NO: 892615 - RNA, 19 nt, Homo sapiens
  misc_RNA (1)...(19): siRNA sense strand
gaaaaccccuucucaaugg

SEQ ID NO: 892616 - RNA, 19 nt, Homo sapiens
  misc_RNA (1)...(19): siRNA sense strand
agagaaaguggcucaaaua

SEQ ID NO: 892617 - RNA, 19 nt, Homo sapiens
  misc_RNA (1)...(19): siRNA sense strand
cagagaaaguggcucaaau

SEQ ID NO: 892618 - RNA, 19 nt, Homo sapiens
  misc_RNA (1)...(19): siRNA sense strand
uuacaagaauggaacauca

SEQ ID NO: 892619 - RNA, 19 nt, Homo sapiens
  misc_RNA (1)...(19): siRNA sense strand
uggcaaugcugcugucuga

SEQ ID NO: 892620 - RNA, 19 nt, Homo sapiens
  misc_RNA (1)...(19): siRNA sense strand
gcaucuaucaccagaauug

SEQ ID NO: 892621 - RNA, 19 nt, Homo sapiens
  misc_RNA (1)...(19): siRNA sense strand
gguggugacugcuacauca

SEQ ID NO: 892622 - RNA, 19 nt, Homo sapiens
  misc_RNA (1)...(19): siRNA sense strand
ggaugaugguucuggcaaa

SEQ ID NO: 892623 - RNA, 19 nt, Homo sapiens
  misc_RNA (1)...(19): siRNA sense strand
acaccaaucuucaaacagu

SEQ ID NO: 892624 - RNA, 19 nt, Homo sapiens
  misc_RNA (1)...(19): siRNA sense strand
caccaauugucaucauaaa

SEQ ID NO: 892625 - RNA, 19 nt, Homo sapiens
  misc_RNA (1)...(19): siRNA sense strand
caaugcugcugucugaaga

SEQ ID NO: 892626 - RNA, 19 nt, Homo sapiens
  misc_RNA (1)...(19): siRNA sense strand
uaccagaccucaccacuac

SEQ ID NO: 892627 - RNA, 19 nt, Homo sapiens
  misc_RNA (1)...(19): siRNA sense strand
gcgaggagccagaggaguu

SEQ ID NO: 892628 - RNA, 19 nt, Homo sapiens
  misc_RNA (1)...(19): siRNA sense strand
ggagguugauguugaugca

SEQ ID NO: 892629 - RNA, 19 nt, Homo sapiens
  misc_RNA (1)...(19): siRNA sense strand
ccagaauuguggagguuga

SEQ ID NO: 892630 - RNA, 19 nt, Homo sapiens
  misc_RNA (1)...(19): siRNA sense strand
ugacugugguggcagaaga

SEQ ID NO: 892631 - RNA, 19 nt, Homo sapiens
  misc_RNA (1)...(19): siRNA sense strand
gccaugagccacccacauu

SEQ ID NO: 892632 - RNA, 19 nt, Homo sapiens
  misc_RNA (1)...(19): siRNA sense strand
acuggaagauuuguuauug

SEQ ID NO: 892633 - RNA, 19 nt, Homo sapiens
  misc_RNA (1)...(19): siRNA sense strand
cuacacgccucuuucaagu

SEQ ID NO: 892634 - RNA, 19 nt, Homo sapiens
  misc_RNA (1)...(19): siRNA sense strand
agaaaguggcucaaauaaa

SEQ ID NO: 892635 - RNA, 19 nt, Homo sapiens
  misc_RNA (1)...(19): siRNA sense strand
cgggaaaguuuaugucaca

SEQ ID NO: 892636 - RNA, 19 nt, Homo sapiens
  misc_RNA (1)...(19): siRNA sense strand
ugaagacagcugaagaauu

SEQ ID NO: 892637 - RNA, 19 nt, Homo sapiens
  misc_RNA (1)...(19): siRNA sense strand
ccaggaugauuuagcugaa

SEQ ID NO: 892638 - RNA, 19 nt, Homo sapiens
  misc_RNA (1)...(19): siRNA sense strand
ggacuggagagauaaagau

SEQ ID NO: 892639 - RNA, 19 nt, Homo sapiens
  misc_RNA (1)...(19): siRNA sense strand
gagaggaaggcugcaauga

SEQ ID NO: 892640 - RNA, 19 nt, Homo sapiens
  misc_RNA (1)...(19): siRNA sense strand
gaccauccaccucggcuuu

SEQ ID NO: 892641 - RNA, 19 nt, Homo sapiens
  misc_RNA (1)...(19): siRNA sense strand
caaugaagacagcugaaga

SEQ ID NO: 892642 - RNA, 19 nt, Homo sapiens
  misc_RNA (1)...(19): siRNA sense strand
caucugcguuccugacugu

SEQ ID NO: 892643 - RNA, 19 nt, Homo sapiens
  misc_RNA (1)...(19): siRNA sense strand
ggagauuuggcguguagaa

SEQ ID NO: 892644 - RNA, 19 nt, Homo sapiens
  misc_RNA (1)...(19): siRNA sense strand
guucacccaggaugauuua

SEQ ID NO: 892645 - RNA, 19 nt, Homo sapiens
  misc_RNA (1)...(19): siRNA sense strand
gcaaugcugcugucugaag

SEQ ID NO: 892646 - RNA, 19 nt, Homo sapiens
  misc_RNA (1)...(19): siRNA sense strand
caucauacucuacaccuau

SEQ ID NO: 892647 - RNA, 19 nt, Homo sapiens
  misc_RNA (1)...(19): siRNA sense strand
uaucccagaggacagauua

SEQ ID NO: 892648 - RNA, 19 nt, Homo sapiens
  misc_RNA (1)...(19): siRNA sense strand
uggcaucuaucaccagaau

SEQ ID NO: 892649 - RNA, 19 nt, Homo sapiens
  misc_RNA (1)...(19): siRNA sense strand
aagaauggaacaucaaaga

SEQ ID NO: 892650 - RNA, 19 nt, Homo sapiens
  misc_RNA (1)...(19): siRNA sense strand
ggaaaguuuaugucacaga

SEQ ID NO: 892651 - RNA, 19 nt, Homo sapiens
  misc_RNA (1)...(19): siRNA sense strand
gaagagauuccaggagagu

SEQ ID NO: 892652 - RNA, 19 nt, Homo sapiens
  misc_RNA (1)...(19): siRNA sense strand
guggagauuuggcguguag

SEQ ID NO: 892653 - RNA, 19 nt, Homo sapiens
  misc_RNA (1)...(19): siRNA sense strand
gaugaugguucuggcaaag

SEQ ID NO: 892654 - RNA, 19 nt, Homo sapiens
  misc_RNA (1)...(19): siRNA sense strand
ccacggggcugccaaacaa

SEQ ID NO: 892655 - RNA, 19 nt, Homo sapiens
  misc_RNA (1)...(19): siRNA sense strand
gaaagguaaagaugcuaau

SEQ ID NO: 892656 - RNA, 19 nt, Homo sapiens
  misc_RNA (1)...(19): siRNA sense strand
ccaaacaaauuuucguaug

SEQ ID NO: 892657 - RNA, 19 nt, Homo sapiens
  misc_RNA (1)...(19): siRNA sense strand
guucuggaauucccuugga

SEQ ID NO: 892658 - RNA, 19 nt, Homo sapiens
  misc_RNA (1)...(19): siRNA sense strand
agaggaaggcugcaaugaa

SEQ ID NO: 892659 - RNA, 19 nt, Homo sapiens
  misc_RNA (1)...(19): siRNA sense strand
gcuugggaacagauauuua

SEQ ID NO: 892660 - RNA, 19 nt, Homo sapiens
  misc_RNA (1)...(19): siRNA sense strand
gagaguucacccaggauga

SEQ ID NO: 892661 - RNA, 19 nt, Homo sapiens
  misc_RNA (1)...(19): siRNA sense strand
ugauguugaugcaaauuca

SEQ ID NO: 892662 - RNA, 19 nt, Homo sapiens
  misc_RNA (1)...(19): siRNA sense strand
gagauuuggcguguagaaa

SEQ ID NO: 892663 - RNA, 19 nt, Homo sapiens
  misc_RNA (1)...(19): siRNA sense strand
aaguuuaugucacagagaa

SEQ ID NO: 892664 - RNA, 19 nt, Homo sapiens
  misc_RNA (1)...(19): siRNA sense strand
aauggaacaucaaagaaag

SEQ ID NO: 892665 - RNA, 19 nt, Homo sapiens
  misc_RNA (1)...(19): siRNA sense strand
gggauuccagcaaguggua

SEQ ID NO: 892666 - RNA, 19 nt, Homo sapiens
  misc_RNA (1)...(19): siRNA sense strand
cuggaagauuuguuauuga

SEQ ID NO: 892667 - RNA, 19 nt, Homo sapiens
  misc_RNA (1)...(19): siRNA sense strand
acacaguucuccgcagaug

SEQ ID NO: 892668 - RNA, 19 nt, Homo sapiens
  misc_RNA (1)...(19): siRNA sense strand
gcugcugucugaagaaugc

SEQ ID NO: 892669 - RNA, 19 nt, Homo sapiens
  misc_RNA (1)...(19): siRNA sense strand
gagacaagaggacaccaau

SEQ ID NO: 892670 - RNA, 19 nt, Homo sapiens
  misc_RNA (1)...(19): siRNA sense strand
aacuauacaugguuucaga

SEQ ID NO: 892671 - RNA, 19 nt, Homo sapiens
  misc_RNA (1)...(19): siRNA sense strand
aagacaaaccgcucauuau

SEQ ID NO: 892672 - RNA, 19 nt, Homo sapiens
  misc_RNA (1)...(19): siRNA sense strand
aaacaaugguaggauccaa

SEQ ID NO: 892673 - RNA, 19 nt, Homo sapiens
  misc_RNA (1)...(19): siRNA sense strand
gaccucaccacuacuggaa

SEQ ID NO: 892674 - RNA, 19 nt, Homo sapiens
  misc_RNA (1)...(19): siRNA sense strand
acaagaauggaacaucaaa

SEQ ID NO: 892675 - RNA, 19 nt, Homo sapiens
  misc_RNA (1)...(19): siRNA sense strand
gaugcaaguggcuccauga

SEQ ID NO: 892676 - RNA, 19 nt, Homo sapiens
  misc_RNA (1)...(19): siRNA sense strand
auacaugguuucagaugca

SEQ ID NO: 892677 - RNA, 19 nt, Homo sapiens
  misc_RNA (1)...(19): siRNA sense strand
caccagaauuguggagguu

SEQ ID NO: 892678 - RNA, 19 nt, Homo sapiens
  misc_RNA (1)...(19): siRNA sense strand
caaagacaaaccgcucauu

SEQ ID NO: 892679 - RNA, 19 nt, Homo sapiens
  misc_RNA (1)...(19): siRNA sense strand
guauggaaagguaaagaug

SEQ ID NO: 892680 - RNA, 19 nt, Homo sapiens
  misc_RNA (1)...(19): siRNA sense strand
caaacaaauuuucguaugg

SEQ ID NO: 892681 - RNA, 19 nt, Homo sapiens
  misc_RNA (1)...(19): siRNA sense strand
ggugacugcuacaucauac

SEQ ID NO: 892682 - RNA, 19 nt, Homo sapiens
  misc_RNA (1)...(19): siRNA sense strand
agaauggaacaucaaagaa

SEQ ID NO: 892683 - RNA, 19 nt, Homo sapiens
  misc_RNA (1)...(19): siRNA sense strand
acaccaauugucaucauaa

SEQ ID NO: 892684 - RNA, 19 nt, Homo sapiens
  misc_RNA (1)...(19): siRNA sense strand
gagaaaggagcagaguaug

SEQ ID NO: 892685 - RNA, 19 nt, Homo sapiens
  misc_RNA (1)...(19): siRNA sense strand
guccugaaacugccacaaa

SEQ ID NO: 892686 - RNA, 19 nt, Homo sapiens
  misc_RNA (1)...(19): siRNA sense strand
gaauuguggagguugaugu

SEQ ID NO: 892687 - RNA, 19 nt, Homo sapiens
  misc_RNA (1)...(19): siRNA sense strand
ggaaugugauggagacguu

SEQ ID NO: 892688 - RNA, 19 nt, Homo sapiens
  misc_RNA (1)...(19): siRNA sense strand
ggagacagcccuugagauc

SEQ ID NO: 892689 - RNA, 19 nt, Homo sapiens
  misc_RNA (1)...(19): siRNA sense strand
caauagugcuggcuaccuu

SEQ ID NO: 892690 - RNA, 19 nt, Homo sapiens
  misc_RNA (1)...(19): siRNA sense strand
aagauguccugaagucaua

SEQ ID NO: 892691 - RNA, 19 nt, Homo sapiens
  misc_RNA (1)...(19): siRNA sense strand
ccaaaugggugaccaagac

SEQ ID NO: 892692 - RNA, 19 nt, Homo sapiens
  misc_RNA (1)...(19): siRNA sense strand
gaagauguccugaagucau

SEQ ID NO: 892693 - RNA, 19 nt, Homo sapiens
  misc_RNA (1)...(19): siRNA sense strand
gcaugaaaauucccaagga

SEQ ID NO: 892694 - RNA, 19 nt, Homo sapiens
  misc_RNA (1)...(19): siRNA sense strand
ccaagaggaaugugaugga

SEQ ID NO: 892695 - RNA, 19 nt, Homo sapiens
  misc_RNA (1)...(19): siRNA sense strand
agacagcccuugagauccu

SEQ ID NO: 892696 - RNA, 19 nt, Homo sapiens
  misc_RNA (1)...(19): siRNA sense strand
ggaagauguccugaaguca

SEQ ID NO: 892697 - RNA, 19 nt, Homo sapiens
  misc_RNA (1)...(19): siRNA sense strand
gaaugugauggagacguuu

SEQ ID NO: 892698 - RNA, 19 nt, Homo sapiens
  misc_RNA (1)...(19): siRNA sense strand
ggcuggacccucaauagug

SEQ ID NO: 892699 - RNA, 19 nt, Homo sapiens
  misc_RNA (1)...(19): siRNA sense strand
gaaagucacuggaugaaca

SEQ ID NO: 892700 - RNA, 19 nt, Homo sapiens
  misc_RNA (1)...(19): siRNA sense strand
gaaagauaauguacaguga

SEQ ID NO: 892701 - RNA, 19 nt, Homo sapiens
  misc_RNA (1)...(19): siRNA sense strand
agaaagaacuagacaacua

SEQ ID NO: 892702 - RNA, 19 nt, Homo sapiens
  misc_RNA (1)...(19): siRNA sense strand
gagaaggaaucgaagaauu

SEQ ID NO: 892703 - RNA, 19 nt, Homo sapiens
  misc_RNA (1)...(19): siRNA sense strand
caagauaaguuccaugaau

SEQ ID NO: 892704 - RNA, 19 nt, Homo sapiens
  misc_RNA (1)...(19): siRNA sense strand
caaaagaguuggaauugua

SEQ ID NO: 892705 - RNA, 19 nt, Homo sapiens
  misc_RNA (1)...(19): siRNA sense strand
gauuucagcuuucuucuca

SEQ ID NO: 892706 - RNA, 19 nt, Homo sapiens
  misc_RNA (1)...(19): siRNA sense strand
gaaaccauaauacugcuua

SEQ ID NO: 892707 - RNA, 19 nt, Homo sapiens
  misc_RNA (1)...(19): siRNA sense strand
uagcugaucuuccggguuu

SEQ ID NO: 892708 - RNA, 19 nt, Homo sapiens
  misc_RNA (1)...(19): siRNA sense strand
aagaggaacuucagacaaa

SEQ ID NO: 892709 - RNA, 19 nt, Homo sapiens
  misc_RNA (1)...(19): siRNA sense strand
guacggaaauuucaucgau

SEQ ID NO: 892710 - RNA, 19 nt, Homo sapiens
  misc_RNA (1)...(19): siRNA sense strand
agaaggaaucgaagaauua

SEQ ID NO: 892711 - RNA, 19 nt, Homo sapiens
  misc_RNA (1)...(19): siRNA sense strand
gaaggaaucgaagaauuaa

SEQ ID NO: 892712 - RNA, 19 nt, Homo sapiens
  misc_RNA (1)...(19): siRNA sense strand
gaaaggccagaaacgaaua

SEQ ID NO: 892713 - RNA, 19 nt, Homo sapiens
  misc_RNA (1)...(19): siRNA sense strand
acaaauuccucaagcauau

SEQ ID NO: 892714 - RNA, 19 nt, Homo sapiens
  misc_RNA (1)...(19): siRNA sense strand
gagcacauaugaacaaagg

SEQ ID NO: 892715 - RNA, 19 nt, Homo sapiens
  misc_RNA (1)...(19): siRNA sense strand
gaacuuggaaagauaaugu

SEQ ID NO: 892716 - RNA, 19 nt, Homo sapiens
  misc_RNA (1)...(19): siRNA sense strand
ggaaaauccucuuugcuaa

SEQ ID NO: 892717 - RNA, 19 nt, Homo sapiens
  misc_RNA (1)...(19): siRNA sense strand
ggaauggguuauccucguu

SEQ ID NO: 892718 - RNA, 19 nt, Homo sapiens
  misc_RNA (1)...(19): siRNA sense strand
ccauaauacugcuuacaaa

SEQ ID NO: 892719 - RNA, 19 nt, Homo sapiens
  misc_RNA (1)...(19): siRNA sense strand
gauacaaugucuucuacug

SEQ ID NO: 892720 - RNA, 19 nt, Homo sapiens
  misc_RNA (1)...(19): siRNA sense strand
gcacauaugaacaaaggaa

SEQ ID NO: 892721 - RNA, 19 nt, Homo sapiens
  misc_RNA (1)...(19): siRNA sense strand
gaacaggccaaccaggaaa

SEQ ID NO: 892722 - RNA, 19 nt, Homo sapiens
  misc_RNA (1)...(19): siRNA sense strand
uaaguuccaugaauugaug

SEQ ID NO: 892723 - RNA, 19 nt, Homo sapiens
  misc_RNA (1)...(19): siRNA sense strand
cagaacagaaugacuuuaa

SEQ ID NO: 892724 - RNA, 19 nt, Homo sapiens
  misc_RNA (1)...(19): siRNA sense strand
gcauugcaguugcguguug

SEQ ID NO: 892725 - RNA, 19 nt, Homo sapiens
  misc_RNA (1)...(19): siRNA sense strand
gaaauuucaucgauaagcu

SEQ ID NO: 892726 - RNA, 19 nt, Homo sapiens
  misc_RNA (1)...(19): siRNA sense strand
gacaaaaccugcacucuug

SEQ ID NO: 892727 - RNA, 19 nt, Homo sapiens
  misc_RNA (1)...(19): siRNA sense strand
cugaaaggcuccaaaggaa

SEQ ID NO: 892728 - RNA, 19 nt, Homo sapiens
  misc_RNA (1)...(19): siRNA sense strand
cuaguaggauucccaaaug

SEQ ID NO: 892729 - RNA, 19 nt, Homo sapiens
  misc_RNA (1)...(19): siRNA sense strand
guacagugauuucaaacag

SEQ ID NO: 892730 - RNA, 19 nt, Homo sapiens
  misc_RNA (1)...(19): siRNA sense strand
agagaggacuguagaguuc

SEQ ID NO: 892731 - RNA, 19 nt, Homo sapiens
  misc_RNA (1)...(19): siRNA sense strand
cuacugagccaccaucaaa

SEQ ID NO: 892732 - RNA, 19 nt, Homo sapiens
  misc_RNA (1)...(19): siRNA sense strand
agacagguauccucggaaa

SEQ ID NO: 892733 - RNA, 19 nt, Homo sapiens
  misc_RNA (1)...(19): siRNA sense strand
uaagaaagucacuggauga

SEQ ID NO: 892734 - RNA, 19 nt, Homo sapiens
  misc_RNA (1)...(19): siRNA sense strand
ggagcaaacagcaaaauua

SEQ ID NO: 892735 - RNA, 19 nt, Homo sapiens
  misc_RNA (1)...(19): siRNA sense strand
gcagauuacgcauuuacaa

SEQ ID NO: 892736 - RNA, 19 nt, Homo sapiens
  misc_RNA (1)...(19): siRNA sense strand
acggaaauuucaucgauaa

SEQ ID NO: 892737 - RNA, 19 nt, Homo sapiens
  misc_RNA (1)...(19): siRNA sense strand
ggaauuguacaaagaggaa

SEQ ID NO: 892738 - RNA, 19 nt, Homo sapiens
  misc_RNA (1)...(19): siRNA sense strand
ccucaagcauauagaaaga

SEQ ID NO: 892739 - RNA, 19 nt, Homo sapiens
  misc_RNA (1)...(19): siRNA sense strand
gauaauguacagugauuuc

SEQ ID NO: 892740 - RNA, 19 nt, Homo sapiens
  misc_RNA (1)...(19): siRNA sense strand
gaaacaguugcuuaauuug

SEQ ID NO: 892741 - RNA, 19 nt, Homo sapiens
  misc_RNA (1)...(19): siRNA sense strand
gaaagaacuagacaacuac

SEQ ID NO: 892742 - RNA, 19 nt, Homo sapiens
  misc_RNA (1)...(19): siRNA sense strand
guggauuucugauacaaug

SEQ ID NO: 892743 - RNA, 19 nt, Homo sapiens
  misc_RNA (1)...(19): siRNA sense strand
caaaauuagugcacugaaa

SEQ ID NO: 892744 - RNA, 19 nt, Homo sapiens
  misc_RNA (1)...(19): siRNA sense strand
gggaggauccgguggaaug

SEQ ID NO: 892745 - RNA, 19 nt, Homo sapiens
  misc_RNA (1)...(19): siRNA sense strand
gccugaacuuggaaagaua

SEQ ID NO: 892746 - RNA, 19 nt, Homo sapiens
  misc_RNA (1)...(19): siRNA sense strand
aauugcagauuacgcauuu

SEQ ID NO: 892747 - RNA, 19 nt, Homo sapiens
  misc_RNA (1)...(19): siRNA sense strand
ucagaaaguacggaaauuu

SEQ ID NO: 892748 - RNA, 19 nt, Homo sapiens
  misc_RNA (1)...(19): siRNA sense strand
agaacuagacaacuacuuu

SEQ ID NO: 892749 - RNA, 19 nt, Homo sapiens
  misc_RNA (1)...(19): siRNA sense strand
gcauauagaaagaacuaga

SEQ ID NO: 892750 - RNA, 19 nt, Homo sapiens
  misc_RNA (1)...(19): siRNA sense strand
caaaggaaugggccacaaa

SEQ ID NO: 892751 - RNA, 19 nt, Homo sapiens
  misc_RNA (1)...(19): siRNA sense strand
ggugaugucuggguuguag

SEQ ID NO: 892752 - RNA, 19 nt, Homo sapiens
  misc_RNA (1)...(19): siRNA sense strand
guuuguggcuggaguagga

SEQ ID NO: 892753 - RNA, 19 nt, Homo sapiens
  misc_RNA (1)...(19): siRNA sense strand
caucaaagcaugcuguuac

SEQ ID NO: 892754 - RNA, 19 nt, Homo sapiens
  misc_RNA (1)...(19): siRNA sense strand
uacggaaauuucaucgaua

SEQ ID NO: 892755 - RNA, 19 nt, Homo sapiens
  misc_RNA (1)...(19): siRNA sense strand
gcuccagaauccuaaagau

SEQ ID NO: 892756 - RNA, 19 nt, Homo sapiens
  misc_RNA (1)...(19): siRNA sense strand
gcacugaaaggcuccaaag

SEQ ID NO: 892757 - RNA, 19 nt, Homo sapiens
  misc_RNA (1)...(19): siRNA sense strand
guagaguuccaacauauca

SEQ ID NO: 892758 - RNA, 19 nt, Homo sapiens
  misc_RNA (1)...(19): siRNA sense strand
gauaaguuccaugaauuga

SEQ ID NO: 892759 - RNA, 19 nt, Homo sapiens
  misc_RNA (1)...(19): siRNA sense strand
cacaaauuccucaagcaua

SEQ ID NO: 892760 - RNA, 19 nt, Homo sapiens
  misc_RNA (1)...(19): siRNA sense strand
gaaaggcuccaaaggaaaa

SEQ ID NO: 892761 - RNA, 19 nt, Homo sapiens
  misc_RNA (1)...(19): siRNA sense strand
gaucuuccggguuuaauag

SEQ ID NO: 892762 - RNA, 19 nt, Homo sapiens
  misc_RNA (1)...(19): siRNA sense strand
ggaaucgaagaauuaaaga

SEQ ID NO: 892763 - RNA, 19 nt, Homo sapiens
  misc_RNA (1)...(19): siRNA sense strand
acuguagaguuccaacaua

SEQ ID NO: 892764 - RNA, 19 nt, Homo sapiens
  misc_RNA (1)...(19): siRNA sense strand
caaagaggaacuucagaca

SEQ ID NO: 892765 - RNA, 19 nt, Homo sapiens
  misc_RNA (1)...(19): siRNA sense strand
gauuacgcauuuacaacau

SEQ ID NO: 892766 - RNA, 19 nt, Homo sapiens
  misc_RNA (1)...(19): siRNA sense strand
guacaaagaggaacuucag

SEQ ID NO: 892767 - RNA, 19 nt, Homo sapiens
  misc_RNA (1)...(19): siRNA sense strand
gaguuggaauuguacaaag

SEQ ID NO: 892768 - RNA, 19 nt, Homo sapiens
  misc_RNA (1)...(19): siRNA sense strand
aaggaggucuuggugguaa

SEQ ID NO: 892769 - RNA, 19 nt, Homo sapiens
  misc_RNA (1)...(19): siRNA sense strand
caaagcaugcuguuacuac

SEQ ID NO: 892770 - RNA, 19 nt, Homo sapiens
  misc_RNA (1)...(19): siRNA sense strand
ugaugcacuucauaagaaa

SEQ ID NO: 892771 - RNA, 19 nt, Homo sapiens
  misc_RNA (1)...(19): siRNA sense strand
gcaaacagcaaaauuagug

SEQ ID NO: 892772 - RNA, 19 nt, Homo sapiens
  misc_RNA (1)...(19): siRNA sense strand
ggagaaggaaucgaagaau

SEQ ID NO: 892773 - RNA, 19 nt, Homo sapiens
  misc_RNA (1)...(19): siRNA sense strand
guugauauuucuggauuuc

SEQ ID NO: 892774 - RNA, 19 nt, Homo sapiens
  misc_RNA (1)...(19): siRNA sense strand
gaacuagacaacuacuuuu

SEQ ID NO: 892775 - RNA, 19 nt, Homo sapiens
  misc_RNA (1)...(19): siRNA sense strand
caaauuccucaagcauaua

SEQ ID NO: 892776 - RNA, 19 nt, Homo sapiens
  misc_RNA (1)...(19): siRNA sense strand
gaaggagcacauaugaaca

SEQ ID NO: 892777 - RNA, 19 nt, Homo sapiens
  misc_RNA (1)...(19): siRNA sense strand
gcccagaacagaaugacuu

SEQ ID NO: 892778 - RNA, 19 nt, Homo sapiens
  misc_RNA (1)...(19): siRNA sense strand
aauggguuauccucguuua

SEQ ID NO: 892779 - RNA, 19 nt, Homo sapiens
  misc_RNA (1)...(19): siRNA sense strand
cuguagaguuccaacauau

SEQ ID NO: 892780 - RNA, 19 nt, Homo sapiens
  misc_RNA (1)...(19): siRNA sense strand
cagagaggacuguagaguu

SEQ ID NO: 892781 - RNA, 19 nt, Homo sapiens
  misc_RNA (1)...(19): siRNA sense strand
gcaguugcguguuguucag

SEQ ID NO: 892782 - RNA, 19 nt, Homo sapiens
  misc_RNA (1)...(19): siRNA sense strand
gccuguggguauuucagua

SEQ ID NO: 892783 - RNA, 19 nt, Homo sapiens
  misc_RNA (1)...(19): siRNA sense strand
aaaauggacuugccagaug

SEQ ID NO: 892784 - RNA, 19 nt, Homo sapiens
  misc_RNA (1)...(19): siRNA sense strand
guucagaaaguacggaaau

SEQ ID NO: 892785 - RNA, 19 nt, Homo sapiens
  misc_RNA (1)...(19): siRNA sense strand
acagugauuucaaacagau

SEQ ID NO: 892786 - RNA, 19 nt, Homo sapiens
  misc_RNA (1)...(19): siRNA sense strand
auagaaggagcacauauga

SEQ ID NO: 892787 - RNA, 19 nt, Homo sapiens
  misc_RNA (1)...(19): siRNA sense strand
ugccagaugcccaagauaa

SEQ ID NO: 892788 - RNA, 19 nt, Homo sapiens
  misc_RNA (1)...(19): siRNA sense strand
gcacucuuggcaguuaaua

SEQ ID NO: 892789 - RNA, 19 nt, Homo sapiens
  misc_RNA (1)...(19): siRNA sense strand
gaauggguuauccucguuu

SEQ ID NO: 892790 - RNA, 19 nt, Homo sapiens
  misc_RNA (1)...(19): siRNA sense strand
ugaaaggcuccaaaggaaa

SEQ ID NO: 892791 - RNA, 19 nt, Homo sapiens
  misc_RNA (1)...(19): siRNA sense strand
aacaguugcuuaauuugug

SEQ ID NO: 892792 - RNA, 19 nt, Homo sapiens
  misc_RNA (1)...(19): siRNA sense strand
auuaaagccugaacuugga

SEQ ID NO: 892793 - RNA, 19 nt, Homo sapiens
  misc_RNA (1)...(19): siRNA sense strand
ugaaaggccagaaacgaau

SEQ ID NO: 892794 - RNA, 19 nt, Homo sapiens
  misc_RNA (1)...(19): siRNA sense strand
uaauagaaggagcacauau

SEQ ID NO: 892795 - RNA, 19 nt, Homo sapiens
  misc_RNA (1)...(19): siRNA sense strand
acucuuggcaguuaauaaa

SEQ ID NO: 892796 - RNA, 19 nt, Homo sapiens
  misc_RNA (1)...(19): siRNA sense strand
aaagaggaacuucagacaa

SEQ ID NO: 892797 - RNA, 19 nt, Homo sapiens
  misc_RNA (1)...(19): siRNA sense strand
ccacaaauuccucaagcau

SEQ ID NO: 892798 - RNA, 19 nt, Homo sapiens
  misc_RNA (1)...(19): siRNA sense strand
ucaagcauauagaaagaac

SEQ ID NO: 892799 - RNA, 19 nt, Homo sapiens
  misc_RNA (1)...(19): siRNA sense strand
gaacuugcauagugauuaa

SEQ ID NO: 892800 - RNA, 19 nt, Homo sapiens
  misc_RNA (1)...(19): siRNA sense strand
gaauggaacuugcauagug

SEQ ID NO: 892801 - RNA, 19 nt, Homo sapiens
  misc_RNA (1)...(19): siRNA sense strand
gcucaaccuuuauggauuu

SEQ ID NO: 892802 - RNA, 19 nt, Homo sapiens
  misc_RNA (1)...(19): siRNA sense strand
gcauagugauuaaugaaga

SEQ ID NO: 892803 - RNA, 19 nt, Homo sapiens
  misc_RNA (1)...(19): siRNA sense strand
gaacaugcuuuucagguuu

SEQ ID NO: 892804 - RNA, 19 nt, Homo sapiens
  misc_RNA (1)...(19): siRNA sense strand
ggaacuugcauagugauua

SEQ ID NO: 892805 - RNA, 19 nt, Homo sapiens
  misc_RNA (1)...(19): siRNA sense strand
ggaaaauaguggaaaguga

SEQ ID NO: 892806 - RNA, 19 nt, Homo sapiens
  misc_RNA (1)...(19): siRNA sense strand
gagaauggaacuugcauag

SEQ ID NO: 892807 - RNA, 19 nt, Homo sapiens
  misc_RNA (1)...(19): siRNA sense strand
uucgacagcucaaccuuua

SEQ ID NO: 892808 - RNA, 19 nt, Homo sapiens
  misc_RNA (1)...(19): siRNA sense strand
ucagaagccuccacuaggu

SEQ ID NO: 892809 - RNA, 19 nt, Homo sapiens
  misc_RNA (1)...(19): siRNA sense strand
guuagaaaguccaaguuac

SEQ ID NO: 892810 - RNA, 19 nt, Homo sapiens
  misc_RNA (1)...(19): siRNA sense strand
aauggaacuugcauaguga

SEQ ID NO: 892811 - RNA, 19 nt, Homo sapiens
  misc_RNA (1)...(19): siRNA sense strand
caaccuuuauggauuuagu

SEQ ID NO: 892812 - RNA, 19 nt, Homo sapiens
  misc_RNA (1)...(19): siRNA sense strand
uucagaaacucaagauguu

SEQ ID NO: 892813 - RNA, 19 nt, Homo sapiens
  misc_RNA (1)...(19): siRNA sense strand
agacuuacggucaaugauu

SEQ ID NO: 892814 - RNA, 19 nt, Homo sapiens
  misc_RNA (1)...(19): siRNA sense strand
uguuagaaaguccaaguua

SEQ ID NO: 892815 - RNA, 19 nt, Homo sapiens
  misc_RNA (1)...(19): siRNA sense strand
aguggaaagugaccaauuc

SEQ ID NO: 892816 - RNA, 19 nt, Homo sapiens
  misc_RNA (1)...(19): siRNA sense strand
cgacagcucaaccuuuaug

SEQ ID NO: 892817 - RNA, 19 nt, Homo sapiens
  misc_RNA (1)...(19): siRNA sense strand
caggaaacuuuggaaaaua

SEQ ID NO: 892818 - RNA, 19 nt, Homo sapiens
  misc_RNA (1)...(19): siRNA sense strand
cacuaggucuccauugugu

SEQ ID NO: 892819 - RNA, 19 nt, Homo sapiens
  misc_RNA (1)...(19): siRNA sense strand
aguccaaguuacacaguuu

SEQ ID NO: 892820 - RNA, 19 nt, Homo sapiens
  misc_RNA (1)...(19): siRNA sense strand
ccaggaaacuuuggaaaau

SEQ ID NO: 892821 - RNA, 19 nt, Homo sapiens
  misc_RNA (1)...(19): siRNA sense strand
aaucgucugucuuaagcaa

SEQ ID NO: 892822 - RNA, 19 nt, Homo sapiens
  misc_RNA (1)...(19): siRNA sense strand
cagcucaaccuuuauggau

SEQ ID NO: 892823 - RNA, 19 nt, Homo sapiens
  misc_RNA (1)...(19): siRNA sense strand
ccagauaaagaugaugauu

SEQ ID NO: 892824 - RNA, 19 nt, Homo sapiens
  misc_RNA (1)...(19): siRNA sense strand
agaaucgucugucuuaagc

SEQ ID NO: 892825 - RNA, 19 nt, Homo sapiens
  misc_RNA (1)...(19): siRNA sense strand
guucgacagcucaaccuuu

SEQ ID NO: 892826 - RNA, 19 nt, Homo sapiens
  misc_RNA (1)...(19): siRNA sense strand
uuagaaaguccaaguuaca

SEQ ID NO: 892827 - RNA, 19 nt, Homo sapiens
  misc_RNA (1)...(19): siRNA sense strand
cuucagaaacucaagaugu

SEQ ID NO: 892828 - RNA, 19 nt, Homo sapiens
  misc_RNA (1)...(19): siRNA sense strand
ccacuaggucuccauugug

SEQ ID NO: 892829 - RNA, 19 nt, Homo sapiens
  misc_RNA (1)...(19): siRNA sense strand
cuaggucuccauuguguga

SEQ ID NO: 892830 - RNA, 19 nt, Homo sapiens
  misc_RNA (1)...(19): siRNA sense strand
uccacuaggucuccauugu

SEQ ID NO: 892831 - RNA, 19 nt, Homo sapiens
  misc_RNA (1)...(19): siRNA sense strand
ugagccagauaaagaugau

SEQ ID NO: 892832 - RNA, 19 nt, Homo sapiens
  misc_RNA (1)...(19): siRNA sense strand
ucagacuuacggucaauga

SEQ ID NO: 892833 - RNA, 19 nt, Homo sapiens
  misc_RNA (1)...(19): siRNA sense strand
gacucagacuuacggucaa

SEQ ID NO: 892834 - RNA, 19 nt, Homo sapiens
  misc_RNA (1)...(19): siRNA sense strand
cuugcauagugauuaauga

SEQ ID NO: 892835 - RNA, 19 nt, Homo sapiens
  misc_RNA (1)...(19): siRNA sense strand
gaacuugcauagugauuaa

SEQ ID NO: 892836 - RNA, 19 nt, Homo sapiens
  misc_RNA (1)...(19): siRNA sense strand
gaauggaacuugcauagug

SEQ ID NO: 892837 - RNA, 19 nt, Homo sapiens
  misc_RNA (1)...(19): siRNA sense strand
gcucaaccuuuauggauuu

SEQ ID NO: 892838 - RNA, 19 nt, Homo sapiens
  misc_RNA (1)...(19): siRNA sense strand
gcauagugauuaaugaaga

SEQ ID NO: 892839 - RNA, 19 nt, Homo sapiens
  misc_RNA (1)...(19): siRNA sense strand
gaacaugcuuuucagguuu

SEQ ID NO: 892840 - RNA, 19 nt, Homo sapiens
  misc_RNA (1)...(19): siRNA sense strand
ggaacuugcauagugauua

SEQ ID NO: 892841 - RNA, 19 nt, Homo sapiens
  misc_RNA (1)...(19): siRNA sense strand
ggaaaauaguggaaaguga

SEQ ID NO: 892842 - RNA, 19 nt, Homo sapiens
  misc_RNA (1)...(19): siRNA sense strand
gagaauggaacuugcauag

SEQ ID NO: 892843 - RNA, 19 nt, Homo sapiens
  misc_RNA (1)...(19): siRNA sense strand
uucgacagcucaaccuuua

SEQ ID NO: 892844 - RNA, 19 nt, Homo sapiens
  misc_RNA (1)...(19): siRNA sense strand
ucagaagccuccacuaggu

SEQ ID NO: 892845 - RNA, 19 nt, Homo sapiens
  misc_RNA (1)...(19): siRNA sense strand
guuagaaaguccaaguuac

SEQ ID NO: 892846 - RNA, 19 nt, Homo sapiens
  misc_RNA (1)...(19): siRNA sense strand
aauggaacuugcauaguga

SEQ ID NO: 892847 - RNA, 19 nt, Homo sapiens
  misc_RNA (1)...(19): siRNA sense strand
caaccuuuauggauuuagu

SEQ ID NO: 892848 - RNA, 19 nt, Homo sapiens
  misc_RNA (1)...(19): siRNA sense strand
uucagaaacucaagauguu

SEQ ID NO: 892849 - RNA, 19 nt, Homo sapiens
  misc_RNA (1)...(19): siRNA sense strand
agacuuacggucaaugauu

SEQ ID NO: 892850 - RNA, 19 nt, Homo sapiens
  misc_RNA (1)...(19): siRNA sense strand
uguuagaaaguccaaguua

SEQ ID NO: 892851 - RNA, 19 nt, Homo sapiens
  misc_RNA (1)...(19): siRNA sense strand
aguggaaagugaccaauuc

SEQ ID NO: 892852 - RNA, 19 nt, Homo sapiens
  misc_RNA (1)...(19): siRNA sense strand
cgacagcucaaccuuuaug

SEQ ID NO: 892853 - RNA, 19 nt, Homo sapiens
  misc_RNA (1)...(19): siRNA sense strand
caggaaacuuuggaaaaua

SEQ ID NO: 892854 - RNA, 19 nt, Homo sapiens
  misc_RNA (1)...(19): siRNA sense strand
cacuaggucuccauugugu

SEQ ID NO: 892855 - RNA, 19 nt, Homo sapiens
  misc_RNA (1)...(19): siRNA sense strand
aguccaaguuacacaguuu

SEQ ID NO: 892856 - RNA, 19 nt, Homo sapiens
  misc_RNA (1)...(19): siRNA sense strand
ccaggaaacuuuggaaaau

SEQ ID NO: 892857 - RNA, 19 nt, Homo sapiens
  misc_RNA (1)...(19): siRNA sense strand
aaucgucugucuuaagcaa

SEQ ID NO: 892858 - RNA, 19 nt, Homo sapiens
  misc_RNA (1)...(19): siRNA sense strand
cagcucaaccuuuauggau

SEQ ID NO: 892859 - RNA, 19 nt, Homo sapiens
  misc_RNA (1)...(19): siRNA sense strand
ccagauaaagaugaugauu

SEQ ID NO: 892860 - RNA, 19 nt, Homo sapiens
  misc_RNA (1)...(19): siRNA sense strand
agaaucgucugucuuaagc

SEQ ID NO: 892861 - RNA, 19 nt, Homo sapiens
  misc_RNA (1)...(19): siRNA sense strand
guucgacagcucaaccuuu

SEQ ID NO: 892862 - RNA, 19 nt, Homo sapiens
  misc_RNA (1)...(19): siRNA sense strand
uuagaaaguccaaguuaca

SEQ ID NO: 892863 - RNA, 19 nt, Homo sapiens
  misc_RNA (1)...(19): siRNA sense strand
cuucagaaacucaagaugu

SEQ ID NO: 892864 - RNA, 19 nt, Homo sapiens
  misc_RNA (1)...(19): siRNA sense strand
ccacuaggucuccauugug

SEQ ID NO: 892865 - RNA, 19 nt, Homo sapiens
  misc_RNA (1)...(19): siRNA sense strand
cuaggucuccauuguguga

SEQ ID NO: 892866 - RNA, 19 nt, Homo sapiens
  misc_RNA (1)...(19): siRNA sense strand
uccacuaggucuccauugu

SEQ ID NO: 892867 - RNA, 19 nt, Homo sapiens
  misc_RNA (1)...(19): siRNA sense strand
ugagccagauaaagaugau

SEQ ID NO: 892868 - RNA, 19 nt, Homo sapiens
  misc_RNA (1)...(19): siRNA sense strand
ucagacuuacggucaauga

SEQ ID NO: 892869 - RNA, 19 nt, Homo sapiens
  misc_RNA (1)...(19): siRNA sense strand
gacucagacuuacggucaa

SEQ ID NO: 892870 - RNA, 19 nt, Homo sapiens
  misc_RNA (1)...(19): siRNA sense strand
cuugcauagugauuaauga

SEQ ID NO: 892871 - RNA, 19 nt, Homo sapiens
  misc_RNA (1)...(19): siRNA sense strand
ggagaaaugugaccuguua

SEQ ID NO: 892872 - RNA, 19 nt, Homo sapiens
  misc_RNA (1)...(19): siRNA sense strand
ggaagaaccuaaggaauua

SEQ ID NO: 892873 - RNA, 19 nt, Homo sapiens
  misc_RNA (1)...(19): siRNA sense strand
ggugauaacuuguuuguaa

SEQ ID NO: 892874 - RNA, 19 nt, Homo sapiens
  misc_RNA (1)...(19): siRNA sense strand
gaacaaguguauacaacua

SEQ ID NO: 892875 - RNA, 19 nt, Homo sapiens
  misc_RNA (1)...(19): siRNA sense strand
gaauaucccuucauugaug

SEQ ID NO: 892876 - RNA, 19 nt, Homo sapiens
  misc_RNA (1)...(19): siRNA sense strand
uaaggaaggugauaacuug

SEQ ID NO: 892877 - RNA, 19 nt, Homo sapiens
  misc_RNA (1)...(19): siRNA sense strand
gaacagagaccaaagaaag

SEQ ID NO: 892878 - RNA, 19 nt, Homo sapiens
  misc_RNA (1)...(19): siRNA sense strand
gaaacaaaccucuucagaa

SEQ ID NO: 892879 - RNA, 19 nt, Homo sapiens
  misc_RNA (1)...(19): siRNA sense strand
ggacagcguuauucucauu

SEQ ID NO: 892880 - RNA, 19 nt, Homo sapiens
  misc_RNA (1)...(19): siRNA sense strand
ggaaggugauaacuuguuu

SEQ ID NO: 892881 - RNA, 19 nt, Homo sapiens
  misc_RNA (1)...(19): siRNA sense strand
gaagaagagagaaauagua

SEQ ID NO: 892882 - RNA, 19 nt, Homo sapiens
  misc_RNA (1)...(19): siRNA sense strand
ggaaucagaaugucagaua

SEQ ID NO: 892883 - RNA, 19 nt, Homo sapiens
  misc_RNA (1)...(19): siRNA sense strand
gaaucagaaugucagauaa

SEQ ID NO: 892884 - RNA, 19 nt, Homo sapiens
  misc_RNA (1)...(19): siRNA sense strand
gggaagaaccuaaggaauu

SEQ ID NO: 892885 - RNA, 19 nt, Homo sapiens
  misc_RNA (1)...(19): siRNA sense strand
agaauuaccucucuaagga

SEQ ID NO: 892886 - RNA, 19 nt, Homo sapiens
  misc_RNA (1)...(19): siRNA sense strand
cagaauaucccuucauuga

SEQ ID NO: 892887 - RNA, 19 nt, Homo sapiens
  misc_RNA (1)...(19): siRNA sense strand
ggaaacuucaugcuuauuu

SEQ ID NO: 892888 - RNA, 19 nt, Homo sapiens
  misc_RNA (1)...(19): siRNA sense strand
ggaagacacuaaagaugau

SEQ ID NO: 892889 - RNA, 19 nt, Homo sapiens
  misc_RNA (1)...(19): siRNA sense strand
aaagaaagauagagcaugu

SEQ ID NO: 892890 - RNA, 19 nt, Homo sapiens
  misc_RNA (1)...(19): siRNA sense strand
gaagagagaaauaguagau

SEQ ID NO: 892891 - RNA, 19 nt, Homo sapiens
  misc_RNA (1)...(19): siRNA sense strand
aggaaacaauccagaaaua

SEQ ID NO: 892892 - RNA, 19 nt, Homo sapiens
  misc_RNA (1)...(19): siRNA sense strand
ccagaaauauugacagaca

SEQ ID NO: 892893 - RNA, 19 nt, Homo sapiens
  misc_RNA (1)...(19): siRNA sense strand
cagaagagaaucagaauau

SEQ ID NO: 892894 - RNA, 19 nt, Homo sapiens
  misc_RNA (1)...(19): siRNA sense strand
caaaugaaaucuccguuac

SEQ ID NO: 892895 - RNA, 19 nt, Homo sapiens
  misc_RNA (1)...(19): siRNA sense strand
caaccaauuuaucugauga

SEQ ID NO: 892896 - RNA, 19 nt, Homo sapiens
  misc_RNA (1)...(19): siRNA sense strand
aaugugaccuguuaacaaa

SEQ ID NO: 892897 - RNA, 19 nt, Homo sapiens
  misc_RNA (1)...(19): siRNA sense strand
gcaauggauucaaaugauc

SEQ ID NO: 892898 - RNA, 19 nt, Homo sapiens
  misc_RNA (1)...(19): siRNA sense strand
gcagaacagucagaauaga

SEQ ID NO: 892899 - RNA, 19 nt, Homo sapiens
  misc_RNA (1)...(19): siRNA sense strand
ccaaaugaaaucuccguua

SEQ ID NO: 892900 - RNA, 19 nt, Homo sapiens
  misc_RNA (1)...(19): siRNA sense strand
caaagaauuaccucucuaa

SEQ ID NO: 892901 - RNA, 19 nt, Homo sapiens
  misc_RNA (1)...(19): siRNA sense strand
gaucaggacccaucucaga

SEQ ID NO: 892902 - RNA, 19 nt, Homo sapiens
  misc_RNA (1)...(19): siRNA sense strand
ccaaagaauuaccucucua

SEQ ID NO: 892903 - RNA, 19 nt, Homo sapiens
  misc_RNA (1)...(19): siRNA sense strand
gaagaugucaguggagaaa

SEQ ID NO: 892904 - RNA, 19 nt, Homo sapiens
  misc_RNA (1)...(19): siRNA sense strand
ugcaggaccucauaaguuu

SEQ ID NO: 892905 - RNA, 19 nt, Homo sapiens
  misc_RNA (1)...(19): siRNA sense strand
aagcagaacagucagaaua

SEQ ID NO: 892906 - RNA, 19 nt, Homo sapiens
  misc_RNA (1)...(19): siRNA sense strand
ucucauugccugucauuua

SEQ ID NO: 892907 - RNA, 19 nt, Homo sapiens
  misc_RNA (1)...(19): siRNA sense strand
gaagaggagaauaaacaaa

SEQ ID NO: 892908 - RNA, 19 nt, Homo sapiens
  misc_RNA (1)...(19): siRNA sense strand
gaggaaaacucauuagaau

SEQ ID NO: 892909 - RNA, 19 nt, Homo sapiens
  misc_RNA (1)...(19): siRNA sense strand
aaggugcucugcaucuuua

SEQ ID NO: 892910 - RNA, 19 nt, Homo sapiens
  misc_RNA (1)...(19): siRNA sense strand
gacaagaguagguaauaaa

SEQ ID NO: 892911 - RNA, 19 nt, Homo sapiens
  misc_RNA (1)...(19): siRNA sense strand
agacaagaguagguaauaa

SEQ ID NO: 892912 - RNA, 19 nt, Homo sapiens
  misc_RNA (1)...(19): siRNA sense strand
gaagaggaagacauugaaa

SEQ ID NO: 892913 - RNA, 19 nt, Homo sapiens
  misc_RNA (1)...(19): siRNA sense strand
gagaaagaguuuugaagaa

SEQ ID NO: 892914 - RNA, 19 nt, Homo sapiens
  misc_RNA (1)...(19): siRNA sense strand
ggaaacaauccagaaauau

SEQ ID NO: 892915 - RNA, 19 nt, Homo sapiens
  misc_RNA (1)...(19): siRNA sense strand
ggcaauggauucaaaugau

SEQ ID NO: 892916 - RNA, 19 nt, Homo sapiens
  misc_RNA (1)...(19): siRNA sense strand
ugcggaaacuucaugcuua

SEQ ID NO: 892917 - RNA, 19 nt, Homo sapiens
  misc_RNA (1)...(19): siRNA sense strand
acaacacaccaaagaauua

SEQ ID NO: 892918 - RNA, 19 nt, Homo sapiens
  misc_RNA (1)...(19): siRNA sense strand
gagcuaccauuaucacaag

SEQ ID NO: 892919 - RNA, 19 nt, Homo sapiens
  misc_RNA (1)...(19): siRNA sense strand
aaagaaugccuuagaauca

SEQ ID NO: 892920 - RNA, 19 nt, Homo sapiens
  misc_RNA (1)...(19): siRNA sense strand
caaagaaugccuuagaauc

SEQ ID NO: 892921 - RNA, 19 nt, Homo sapiens
  misc_RNA (1)...(19): siRNA sense strand
gcggaaacuucaugcuuau

SEQ ID NO: 892922 - RNA, 19 nt, Homo sapiens
  misc_RNA (1)...(19): siRNA sense strand
uuacauagucauccugaua

SEQ ID NO: 892923 - RNA, 19 nt, Homo sapiens
  misc_RNA (1)...(19): siRNA sense strand
gaaaagaccagaagagaau

SEQ ID NO: 892924 - RNA, 19 nt, Homo sapiens
  misc_RNA (1)...(19): siRNA sense strand
guuuauaugugaacagaga

SEQ ID NO: 892925 - RNA, 19 nt, Homo sapiens
  misc_RNA (1)...(19): siRNA sense strand
agacagagagaaagaguuu

SEQ ID NO: 892926 - RNA, 19 nt, Homo sapiens
  misc_RNA (1)...(19): siRNA sense strand
cagaaugucagauaaaguu

SEQ ID NO: 892927 - RNA, 19 nt, Homo sapiens
  misc_RNA (1)...(19): siRNA sense strand
gacaacacaccaaagaauu

SEQ ID NO: 892928 - RNA, 19 nt, Homo sapiens
  misc_RNA (1)...(19): siRNA sense strand
uuacugaggccaaaugaaa

SEQ ID NO: 892929 - RNA, 19 nt, Homo sapiens
  misc_RNA (1)...(19): siRNA sense strand
gaugacugcucuggcauga

SEQ ID NO: 892930 - RNA, 19 nt, Homo sapiens
  misc_RNA (1)...(19): siRNA sense strand
acaaacuacugauaggaaa

SEQ ID NO: 892931 - RNA, 19 nt, Homo sapiens
  misc_RNA (1)...(19): siRNA sense strand
gaaauaggcauaccauagc

SEQ ID NO: 892932 - RNA, 19 nt, Homo sapiens
  misc_RNA (1)...(19): siRNA sense strand
ggacccaucucagagugaa

SEQ ID NO: 892933 - RNA, 19 nt, Homo sapiens
  misc_RNA (1)...(19): siRNA sense strand
ggacagccaagacuuaaca

SEQ ID NO: 892934 - RNA, 19 nt, Homo sapiens
  misc_RNA (1)...(19): siRNA sense strand
gggagucacuucugauuuu

SEQ ID NO: 892935 - RNA, 19 nt, Homo sapiens
  misc_RNA (1)...(19): siRNA sense strand
gaaacuauggauucauuca

SEQ ID NO: 892936 - RNA, 19 nt, Homo sapiens
  misc_RNA (1)...(19): siRNA sense strand
uguaaugaauucaguggaa

SEQ ID NO: 892937 - RNA, 19 nt, Homo sapiens
  misc_RNA (1)...(19): siRNA sense strand
aaugaaaucuccguuacuu

SEQ ID NO: 892938 - RNA, 19 nt, Homo sapiens
  misc_RNA (1)...(19): siRNA sense strand
aaacagaagaggaacagaa

SEQ ID NO: 892939 - RNA, 19 nt, Homo sapiens
  misc_RNA (1)...(19): siRNA sense strand
agauagagcauguaaguug

SEQ ID NO: 892940 - RNA, 19 nt, Homo sapiens
  misc_RNA (1)...(19): siRNA sense strand
aaagauagagcauguaagu

SEQ ID NO: 892941 - RNA, 19 nt, Homo sapiens
  misc_RNA (1)...(19): siRNA sense strand
uaagagaggaacaagugua

SEQ ID NO: 892942 - RNA, 19 nt, Homo sapiens
  misc_RNA (1)...(19): siRNA sense strand
ggaaaacucauuagaauuc

SEQ ID NO: 892943 - RNA, 19 nt, Homo sapiens
  misc_RNA (1)...(19): siRNA sense strand
ugaaagguuugauagaaag

SEQ ID NO: 892944 - RNA, 19 nt, Homo sapiens
  misc_RNA (1)...(19): siRNA sense strand
cucauugccugucauuuaa

SEQ ID NO: 892945 - RNA, 19 nt, Homo sapiens
  misc_RNA (1)...(19): siRNA sense strand
gaaaugugaccuguuaaca

SEQ ID NO: 892946 - RNA, 19 nt, Homo sapiens
  misc_RNA (1)...(19): siRNA sense strand
gacaaacuacugauaggaa

SEQ ID NO: 892947 - RNA, 19 nt, Homo sapiens
  misc_RNA (1)...(19): siRNA sense strand
gggcaauggauucaaauga

SEQ ID NO: 892948 - RNA, 19 nt, Homo sapiens
  misc_RNA (1)...(19): siRNA sense strand
agaaagauagagcauguaa

SEQ ID NO: 892949 - RNA, 19 nt, Homo sapiens
  misc_RNA (1)...(19): siRNA sense strand
ugacugcucuggcaugaag

SEQ ID NO: 892950 - RNA, 19 nt, Homo sapiens
  misc_RNA (1)...(19): siRNA sense strand
gugacuggauauaaagaaa

SEQ ID NO: 892951 - RNA, 19 nt, Homo sapiens
  misc_RNA (1)...(19): siRNA sense strand
ucacaaccaauuuaucuga

SEQ ID NO: 892952 - RNA, 19 nt, Homo sapiens
  misc_RNA (1)...(19): siRNA sense strand
ugaggacagccaagacuua

SEQ ID NO: 892953 - RNA, 19 nt, Homo sapiens
  misc_RNA (1)...(19): siRNA sense strand
gacagacaaacuacugaua

SEQ ID NO: 892954 - RNA, 19 nt, Homo sapiens
  misc_RNA (1)...(19): siRNA sense strand
gaccagaagagaaucagaa

SEQ ID NO: 892955 - RNA, 19 nt, Homo sapiens
  misc_RNA (1)...(19): siRNA sense strand
ggguuugccuuucaauuag

SEQ ID NO: 892956 - RNA, 19 nt, Homo sapiens
  misc_RNA (1)...(19): siRNA sense strand
gaggacagccaagacuuaa

SEQ ID NO: 892957 - RNA, 19 nt, Homo sapiens
  misc_RNA (1)...(19): siRNA sense strand
agacuaaggugcucugcau

SEQ ID NO: 892958 - RNA, 19 nt, Homo sapiens
  misc_RNA (1)...(19): siRNA sense strand
gugaagaggagaauaaaca

SEQ ID NO: 892959 - RNA, 19 nt, Homo sapiens
  misc_RNA (1)...(19): siRNA sense strand
gcaggaccucauaaguuua

SEQ ID NO: 892960 - RNA, 19 nt, Homo sapiens
  misc_RNA (1)...(19): siRNA sense strand
ugaaaucuccguuacuugu

SEQ ID NO: 892961 - RNA, 19 nt, Homo sapiens
  misc_RNA (1)...(19): siRNA sense strand
uaaagauccuaaagacagu

SEQ ID NO: 892962 - RNA, 19 nt, Homo sapiens
  misc_RNA (1)...(19): siRNA sense strand
gagugaagaggaagacauu

SEQ ID NO: 892963 - RNA, 19 nt, Homo sapiens
  misc_RNA (1)...(19): siRNA sense strand
uggaagacacuaaagauga

SEQ ID NO: 892964 - RNA, 19 nt, Homo sapiens
  misc_RNA (1)...(19): siRNA sense strand
agaaauaggcauaccauag

SEQ ID NO: 892965 - RNA, 19 nt, Homo sapiens
  misc_RNA (1)...(19): siRNA sense strand
gcucuggcaugaagguaga

SEQ ID NO: 892966 - RNA, 19 nt, Homo sapiens
  misc_RNA (1)...(19): siRNA sense strand
caaaaccuuuccuguguaa

SEQ ID NO: 892967 - RNA, 19 nt, Homo sapiens
  misc_RNA (1)...(19): siRNA sense strand
acuaaaugaugcaggguuu

SEQ ID NO: 892968 - RNA, 19 nt, Homo sapiens
  misc_RNA (1)...(19): siRNA sense strand
cagacaagaguagguaaua

SEQ ID NO: 892969 - RNA, 19 nt, Homo sapiens
  misc_RNA (1)...(19): siRNA sense strand
acagugaagaggagaauaa

SEQ ID NO: 892970 - RNA, 19 nt, Homo sapiens
  misc_RNA (1)...(19): siRNA sense strand
gagaggaacaaguguauac

SEQ ID NO: 892971 - RNA, 19 nt, Homo sapiens
  misc_RNA (1)...(19): siRNA sense strand
gaaauaguccuaagaaaca

SEQ ID NO: 892972 - RNA, 19 nt, Homo sapiens
  misc_RNA (1)...(19): siRNA sense strand
gcaagaaauuggagaacuu

SEQ ID NO: 892973 - RNA, 19 nt, Homo sapiens
  misc_RNA (1)...(19): siRNA sense strand
gcacaggccucuggaaaug

SEQ ID NO: 892974 - RNA, 19 nt, Homo sapiens
  misc_RNA (1)...(19): siRNA sense strand
caucuaacaugucauuuga

SEQ ID NO: 892975 - RNA, 19 nt, Homo sapiens
  misc_RNA (1)...(19): siRNA sense strand
ggacuaagacguacaaaca

SEQ ID NO: 892976 - RNA, 19 nt, Homo sapiens
  misc_RNA (1)...(19): siRNA sense strand
cgaaagaggcgacgaaaug

SEQ ID NO: 892977 - RNA, 19 nt, Homo sapiens
  misc_RNA (1)...(19): siRNA sense strand
gaauggagcagcaagaaau

SEQ ID NO: 892978 - RNA, 19 nt, Homo sapiens
  misc_RNA (1)...(19): siRNA sense strand
uugaggagcuguuggaauu

SEQ ID NO: 892979 - RNA, 19 nt, Homo sapiens
  misc_RNA (1)...(19): siRNA sense strand
ggaaauaguccuaagaaac

SEQ ID NO: 892980 - RNA, 19 nt, Homo sapiens
  misc_RNA (1)...(19): siRNA sense strand
ggaaaugucagccaagauc

SEQ ID NO: 892981 - RNA, 19 nt, Homo sapiens
  misc_RNA (1)...(19): siRNA sense strand
caagauccgaguaccauuu

SEQ ID NO: 892982 - RNA, 19 nt, Homo sapiens
  misc_RNA (1)...(19): siRNA sense strand
gagaggagcaugagaaacu

SEQ ID NO: 892983 - RNA, 19 nt, Homo sapiens
  misc_RNA (1)...(19): siRNA sense strand
agagaaagagcuugugaaa

SEQ ID NO: 892984 - RNA, 19 nt, Homo sapiens
  misc_RNA (1)...(19): siRNA sense strand
ggcacuagcugagaaguuc

SEQ ID NO: 892985 - RNA, 19 nt, Homo sapiens
  misc_RNA (1)...(19): siRNA sense strand
uggaaauaguccuaagaaa

SEQ ID NO: 892986 - RNA, 19 nt, Homo sapiens
  misc_RNA (1)...(19): siRNA sense strand
gaaacgcagcaagaaauug

SEQ ID NO: 892987 - RNA, 19 nt, Homo sapiens
  misc_RNA (1)...(19): siRNA sense strand
uaagacguacaaacaauug

SEQ ID NO: 892988 - RNA, 19 nt, Homo sapiens
  misc_RNA (1)...(19): siRNA sense strand
caaaacauaccaauucuug

SEQ ID NO: 892989 - RNA, 19 nt, Homo sapiens
  misc_RNA (1)...(19): siRNA sense strand
acuaagacguacaaacaau

SEQ ID NO: 892990 - RNA, 19 nt, Homo sapiens
  misc_RNA (1)...(19): siRNA sense strand
gcagcaagaaauuggagaa

SEQ ID NO: 892991 - RNA, 19 nt, Homo sapiens
  misc_RNA (1)...(19): siRNA sense strand
ugaaacgcagcaagaaauu

SEQ ID NO: 892992 - RNA, 19 nt, Homo sapiens
  misc_RNA (1)...(19): siRNA sense strand
aaagagaaagagcuuguga

SEQ ID NO: 892993 - RNA, 19 nt, Homo sapiens
  misc_RNA (1)...(19): siRNA sense strand
cgaaagagaaagagcuugu

SEQ ID NO: 892994 - RNA, 19 nt, Homo sapiens
  misc_RNA (1)...(19): siRNA sense strand
gacccucgcuuugaugauc

SEQ ID NO: 892995 - RNA, 19 nt, Homo sapiens
  misc_RNA (1)...(19): siRNA sense strand
aauauaauccugagguguu

SEQ ID NO: 892996 - RNA, 19 nt, Homo sapiens
  misc_RNA (1)...(19): siRNA sense strand
cauccgagcgaaagagaaa

SEQ ID NO: 892997 - RNA, 19 nt, Homo sapiens
  misc_RNA (1)...(19): siRNA sense strand
ugacaaaacauaccaauuc

SEQ ID NO: 892998 - RNA, 19 nt, Homo sapiens
  misc_RNA (1)...(19): siRNA sense strand
gaaagaggcgacgaaaugc

SEQ ID NO: 892999 - RNA, 19 nt, Homo sapiens
  misc_RNA (1)...(19): siRNA sense strand
gcaacugcuucagcgaaug

SEQ ID NO: 893000 - RNA, 19 nt, Homo sapiens
  misc_RNA (1)...(19): siRNA sense strand
caggagaggagcaugagaa

SEQ ID NO: 893001 - RNA, 19 nt, Homo sapiens
  misc_RNA (1)...(19): siRNA sense strand
caauugguagcuggaaaua

SEQ ID NO: 893002 - RNA, 19 nt, Homo sapiens
  misc_RNA (1)...(19): siRNA sense strand
uagcugagaaguucaagga

SEQ ID NO: 893003 - RNA, 19 nt, Homo sapiens
  misc_RNA (1)...(19): siRNA sense strand
cgaauggagcagcaagaaa

SEQ ID NO: 893004 - RNA, 19 nt, Homo sapiens
  misc_RNA (1)...(19): siRNA sense strand
gaaugacauccgagcgaaa

SEQ ID NO: 893005 - RNA, 19 nt, Homo sapiens
  misc_RNA (1)...(19): siRNA sense strand
cgucagguuguucccauua

SEQ ID NO: 893006 - RNA, 19 nt, Homo sapiens
  misc_RNA (1)...(19): siRNA sense strand
gaaagagaaagagcuugug

SEQ ID NO: 893007 - RNA, 19 nt, Homo sapiens
  misc_RNA (1)...(19): siRNA sense strand
gcaccuggcccugaagcaa

SEQ ID NO: 893008 - RNA, 19 nt, Homo sapiens
  misc_RNA (1)...(19): siRNA sense strand
gcgaauggagcagcaagaa

SEQ ID NO: 893009 - RNA, 19 nt, Homo sapiens
  misc_RNA (1)...(19): siRNA sense strand
gacguacaaacaauuggua

SEQ ID NO: 893010 - RNA, 19 nt, Homo sapiens
  misc_RNA (1)...(19): siRNA sense strand
cuaagacguacaaacaauu

SEQ ID NO: 893011 - RNA, 19 nt, Homo sapiens
  misc_RNA (1)...(19): siRNA sense strand
auugguagcuggaaauagu

SEQ ID NO: 893012 - RNA, 19 nt, Homo sapiens
  misc_RNA (1)...(19): siRNA sense strand
ggaauugcagagccaagug

SEQ ID NO: 893013 - RNA, 19 nt, Homo sapiens
  misc_RNA (1)...(19): siRNA sense strand
gacuaagacguacaaacaa

SEQ ID NO: 893014 - RNA, 19 nt, Homo sapiens
  misc_RNA (1)...(19): siRNA sense strand
cagguuguucccauuagua

SEQ ID NO: 893015 - RNA, 19 nt, Homo sapiens
  misc_RNA (1)...(19): siRNA sense strand
caagaaauuggagaacuuc

SEQ ID NO: 893016 - RNA, 19 nt, Homo sapiens
  misc_RNA (1)...(19): siRNA sense strand
agaaauggcacagcaggaa

SEQ ID NO: 893017 - RNA, 19 nt, Homo sapiens
  misc_RNA (1)...(19): siRNA sense strand
ucgcuuugaugaucuguca

SEQ ID NO: 893018 - RNA, 19 nt, Homo sapiens
  misc_RNA (1)...(19): siRNA sense strand
aagcacaggccucuggaaa

SEQ ID NO: 893019 - RNA, 19 nt, Homo sapiens
  misc_RNA (1)...(19): siRNA sense strand
uggcacagcaggaacgaaa

SEQ ID NO: 893020 - RNA, 19 nt, Homo sapiens
  misc_RNA (1)...(19): siRNA sense strand
auauaauccugagguguuu

SEQ ID NO: 893021 - RNA, 19 nt, Homo sapiens
  misc_RNA (1)...(19): siRNA sense strand
gcuggaaauaguccuaaga

SEQ ID NO: 893022 - RNA, 19 nt, Homo sapiens
  misc_RNA (1)...(19): siRNA sense strand
gaggagcuguuggaauugc

SEQ ID NO: 893023 - RNA, 19 nt, Homo sapiens
  misc_RNA (1)...(19): siRNA sense strand
cugaaacgcagcaagaaau

SEQ ID NO: 893024 - RNA, 19 nt, Homo sapiens
  misc_RNA (1)...(19): siRNA sense strand
gaacuucuugagucgaaag

SEQ ID NO: 893025 - RNA, 19 nt, Homo sapiens
  misc_RNA (1)...(19): siRNA sense strand
aaacgcagcaagaaauugg

SEQ ID NO: 893026 - RNA, 19 nt, Homo sapiens
  misc_RNA (1)...(19): siRNA sense strand
aacaauugguagcuggaaa

SEQ ID NO: 893027 - RNA, 19 nt, Homo sapiens
  misc_RNA (1)...(19): siRNA sense strand
gcaaggacaggagacaucu

SEQ ID NO: 893028 - RNA, 19 nt, Homo sapiens
  misc_RNA (1)...(19): siRNA sense strand
gacaaaacauaccaauucu

SEQ ID NO: 893029 - RNA, 19 nt, Homo sapiens
  misc_RNA (1)...(19): siRNA sense strand
cuggaaaugucagccaaga

SEQ ID NO: 893030 - RNA, 19 nt, Homo sapiens
  misc_RNA (1)...(19): siRNA sense strand
guacaaacaauugguagcu

SEQ ID NO: 893031 - RNA, 19 nt, Homo sapiens
  misc_RNA (1)...(19): siRNA sense strand
cuggaaauaguccuaagaa

SEQ ID NO: 893032 - RNA, 19 nt, Homo sapiens
  misc_RNA (1)...(19): siRNA sense strand
ucagguuguucccauuagu

SEQ ID NO: 893033 - RNA, 19 nt, Homo sapiens
  misc_RNA (1)...(19): siRNA sense strand
ggcaaggacaggagacauc

SEQ ID NO: 893034 - RNA, 19 nt, Homo sapiens
  misc_RNA (1)...(19): siRNA sense strand
gacauccgagcgaaagaga

SEQ ID NO: 893035 - RNA, 19 nt, Homo sapiens
  misc_RNA (1)...(19): siRNA sense strand
ccgggacccucgcuuugau

SEQ ID NO: 893036 - RNA, 19 nt, Homo sapiens
  misc_RNA (1)...(19): siRNA sense strand
guagcuggaaauaguccua

SEQ ID NO: 893037 - RNA, 19 nt, Homo sapiens
  misc_RNA (1)...(19): siRNA sense strand
caacugcuucagcgaaugg

SEQ ID NO: 893038 - RNA, 19 nt, Homo sapiens
  misc_RNA (1)...(19): siRNA sense strand
auccugagguguuugacaa

SEQ ID NO: 893039 - RNA, 19 nt, Homo sapiens
  misc_RNA (1)...(19): siRNA sense strand
gcacugagcucaaccauug

SEQ ID NO: 893040 - RNA, 19 nt, Homo sapiens
  misc_RNA (1)...(19): siRNA sense strand
cagaagauuugccuuauua

SEQ ID NO: 893041 - RNA, 19 nt, Homo sapiens
  misc_RNA (1)...(19): siRNA sense strand
acacugaggucauaaauaa

SEQ ID NO: 893042 - RNA, 19 nt, Homo sapiens
  misc_RNA (1)...(19): siRNA sense strand
ggaauucaguuggcauuua

SEQ ID NO: 893043 - RNA, 19 nt, Homo sapiens
  misc_RNA (1)...(19): siRNA sense strand
gaauucaguuggcauuuaa

SEQ ID NO: 893044 - RNA, 19 nt, Homo sapiens
  misc_RNA (1)...(19): siRNA sense strand
cacaagcgauuucuuauuu

SEQ ID NO: 893045 - RNA, 19 nt, Homo sapiens
  misc_RNA (1)...(19): siRNA sense strand
gcauuuaaguggugaauau

SEQ ID NO: 893046 - RNA, 19 nt, Homo sapiens
  misc_RNA (1)...(19): siRNA sense strand
gaaguucccuaagccuuua

SEQ ID NO: 893047 - RNA, 19 nt, Homo sapiens
  misc_RNA (1)...(19): siRNA sense strand
cagcucagauuguagaaua

SEQ ID NO: 893048 - RNA, 19 nt, Homo sapiens
  misc_RNA (1)...(19): siRNA sense strand
gcuaaccuguguccaaaua

SEQ ID NO: 893049 - RNA, 19 nt, Homo sapiens
  misc_RNA (1)...(19): siRNA sense strand
gaaaucagcauucguuaug

SEQ ID NO: 893050 - RNA, 19 nt, Homo sapiens
  misc_RNA (1)...(19): siRNA sense strand
ucaauggagugauaaagua

SEQ ID NO: 893051 - RNA, 19 nt, Homo sapiens
  misc_RNA (1)...(19): siRNA sense strand
gaaauccucucacuucaag

SEQ ID NO: 893052 - RNA, 19 nt, Homo sapiens
  misc_RNA (1)...(19): siRNA sense strand
gcagaagauuugccuuauu

SEQ ID NO: 893053 - RNA, 19 nt, Homo sapiens
  misc_RNA (1)...(19): siRNA sense strand
ccaagauacuucauauuug

SEQ ID NO: 893054 - RNA, 19 nt, Homo sapiens
  misc_RNA (1)...(19): siRNA sense strand
caagagagauguugaugag

SEQ ID NO: 893055 - RNA, 19 nt, Homo sapiens
  misc_RNA (1)...(19): siRNA sense strand
gaugagcauuuaagaauca

SEQ ID NO: 893056 - RNA, 19 nt, Homo sapiens
  misc_RNA (1)...(19): siRNA sense strand
gaauggaacuugaaaauca

SEQ ID NO: 893057 - RNA, 19 nt, Homo sapiens
  misc_RNA (1)...(19): siRNA sense strand
gcuaucagguuucuuguuc

SEQ ID NO: 893058 - RNA, 19 nt, Homo sapiens
  misc_RNA (1)...(19): siRNA sense strand
ucgaaucacucuggcauua

SEQ ID NO: 893059 - RNA, 19 nt, Homo sapiens
  misc_RNA (1)...(19): siRNA sense strand
gaaucacucuggcauuaau

SEQ ID NO: 893060 - RNA, 19 nt, Homo sapiens
  misc_RNA (1)...(19): siRNA sense strand
gguccaagauacuucauau

SEQ ID NO: 893061 - RNA, 19 nt, Homo sapiens
  misc_RNA (1)...(19): siRNA sense strand
gacagaugcugagcccuua

SEQ ID NO: 893062 - RNA, 19 nt, Homo sapiens
  misc_RNA (1)...(19): siRNA sense strand
gugagaagaagcugaguua

SEQ ID NO: 893063 - RNA, 19 nt, Homo sapiens
  misc_RNA (1)...(19): siRNA sense strand
gaugcagacuuuguucuuu

SEQ ID NO: 893064 - RNA, 19 nt, Homo sapiens
  misc_RNA (1)...(19): siRNA sense strand
cagcgcagcucagauugua

SEQ ID NO: 893065 - RNA, 19 nt, Homo sapiens
  misc_RNA (1)...(19): siRNA sense strand
uggaauaccugcagaagau

SEQ ID NO: 893066 - RNA, 19 nt, Homo sapiens
  misc_RNA (1)...(19): siRNA sense strand
gcaguugccguguguaauu

SEQ ID NO: 893067 - RNA, 19 nt, Homo sapiens
  misc_RNA (1)...(19): siRNA sense strand
cagauggccucccaccuuu

SEQ ID NO: 893068 - RNA, 19 nt, Homo sapiens
  misc_RNA (1)...(19): siRNA sense strand
gguaacgccucguguuguu

SEQ ID NO: 893069 - RNA, 19 nt, Homo sapiens
  misc_RNA (1)...(19): siRNA sense strand
caaaucauguggucaagag

SEQ ID NO: 893070 - RNA, 19 nt, Homo sapiens
  misc_RNA (1)...(19): siRNA sense strand
gcagauggccucccaccuu

SEQ ID NO: 893071 - RNA, 19 nt, Homo sapiens
  misc_RNA (1)...(19): siRNA sense strand
gaagauuugccuuauuaug

SEQ ID NO: 893072 - RNA, 19 nt, Homo sapiens
  misc_RNA (1)...(19): siRNA sense strand
uaagauaguucgucacacu

SEQ ID NO: 893073 - RNA, 19 nt, Homo sapiens
  misc_RNA (1)...(19): siRNA sense strand
uaagaacuauggcgcugaa

SEQ ID NO: 893074 - RNA, 19 nt, Homo sapiens
  misc_RNA (1)...(19): siRNA sense strand
acaggaauaucaguacuuu

SEQ ID NO: 893075 - RNA, 19 nt, Homo sapiens
  misc_RNA (1)...(19): siRNA sense strand
guacuuugaugaacucagu

SEQ ID NO: 893076 - RNA, 19 nt, Homo sapiens
  misc_RNA (1)...(19): siRNA sense strand
caagcgauuucuuauuuag

SEQ ID NO: 893077 - RNA, 19 nt, Homo sapiens
  misc_RNA (1)...(19): siRNA sense strand
gagagcaguugccgugugu

SEQ ID NO: 893078 - RNA, 19 nt, Homo sapiens
  misc_RNA (1)...(19): siRNA sense strand
gugacacgcucagaaguaa

SEQ ID NO: 893079 - RNA, 19 nt, Homo sapiens
  misc_RNA (1)...(19): siRNA sense strand
gugauaaaguaguucgaaa

SEQ ID NO: 893080 - RNA, 19 nt, Homo sapiens
  misc_RNA (1)...(19): siRNA sense strand
uaaccuguguccaaauaug

SEQ ID NO: 893081 - RNA, 19 nt, Homo sapiens
  misc_RNA (1)...(19): siRNA sense strand
ggacuucugugagcucugu

SEQ ID NO: 893082 - RNA, 19 nt, Homo sapiens
  misc_RNA (1)...(19): siRNA sense strand
ggcacuaucuuacuuagca

SEQ ID NO: 893083 - RNA, 19 nt, Homo sapiens
  misc_RNA (1)...(19): siRNA sense strand
gaauaccugcagaagauuu

SEQ ID NO: 893084 - RNA, 19 nt, Homo sapiens
  misc_RNA (1)...(19): siRNA sense strand
gagcaguugccguguguaa

SEQ ID NO: 893085 - RNA, 19 nt, Homo sapiens
  misc_RNA (1)...(19): siRNA sense strand
augcagacuuuguucuuua

SEQ ID NO: 893086 - RNA, 19 nt, Homo sapiens
  misc_RNA (1)...(19): siRNA sense strand
gagagaugcagccaugaaa

SEQ ID NO: 893087 - RNA, 19 nt, Homo sapiens
  misc_RNA (1)...(19): siRNA sense strand
ucagaaaucagcauucguu

SEQ ID NO: 893088 - RNA, 19 nt, Homo sapiens
  misc_RNA (1)...(19): siRNA sense strand
gaaaacaucaucucuuaug

SEQ ID NO: 893089 - RNA, 19 nt, Homo sapiens
  misc_RNA (1)...(19): siRNA sense strand
ccacaagcgauuucuuauu

SEQ ID NO: 893090 - RNA, 19 nt, Homo sapiens
  misc_RNA (1)...(19): siRNA sense strand
ggagaagugugagaagaag

SEQ ID NO: 893091 - RNA, 19 nt, Homo sapiens
  misc_RNA (1)...(19): siRNA sense strand
uaugggauguucgagauaa

SEQ ID NO: 893092 - RNA, 19 nt, Homo sapiens
  misc_RNA (1)...(19): siRNA sense strand
ggaaauccucucacuucaa

SEQ ID NO: 893093 - RNA, 19 nt, Homo sapiens
  misc_RNA (1)...(19): siRNA sense strand
gaagaguugcucccugaga

SEQ ID NO: 893094 - RNA, 19 nt, Homo sapiens
  misc_RNA (1)...(19): siRNA sense strand
gaugcuaucagguuucuug

SEQ ID NO: 893095 - RNA, 19 nt, Homo sapiens
  misc_RNA (1)...(19): siRNA sense strand
cagcauucguuauggagaa

SEQ ID NO: 893096 - RNA, 19 nt, Homo sapiens
  misc_RNA (1)...(19): siRNA sense strand
uaaaguaguucgaaaagug

SEQ ID NO: 893097 - RNA, 19 nt, Homo sapiens
  misc_RNA (1)...(19): siRNA sense strand
guccaaauaugaucucuac

SEQ ID NO: 893098 - RNA, 19 nt, Homo sapiens
  misc_RNA (1)...(19): siRNA sense strand
gaacaagcuuuucccacaa

SEQ ID NO: 893099 - RNA, 19 nt, Homo sapiens
  misc_RNA (1)...(19): siRNA sense strand
uaucagcgcagcucagauu

SEQ ID NO: 893100 - RNA, 19 nt, Homo sapiens
  misc_RNA (1)...(19): siRNA sense strand
aaacauggacaggccaaua

SEQ ID NO: 893101 - RNA, 19 nt, Homo sapiens
  misc_RNA (1)...(19): siRNA sense strand
ugaggaacaucuccagcaa

SEQ ID NO: 893102 - RNA, 19 nt, Homo sapiens
  misc_RNA (1)...(19): siRNA sense strand
gcagacaaugugcaacaaa

SEQ ID NO: 893103 - RNA, 19 nt, Homo sapiens
  misc_RNA (1)...(19): siRNA sense strand
aggaacaucuccagcaaug

SEQ ID NO: 893104 - RNA, 19 nt, Homo sapiens
  misc_RNA (1)...(19): siRNA sense strand
gagcucaaccauugggaaa

SEQ ID NO: 893105 - RNA, 19 nt, Homo sapiens
  misc_RNA (1)...(19): siRNA sense strand
cugcugggcuguuugcauu

SEQ ID NO: 893106 - RNA, 19 nt, Homo sapiens
  misc_RNA (1)...(19): siRNA sense strand
gacacugaggucauaaaua

SEQ ID NO: 893107 - RNA, 19 nt, Homo sapiens
  misc_RNA (1)...(19): siRNA sense strand
ggauuucuucuguguauau

SEQ ID NO: 893108 - RNA, 19 nt, Homo sapiens
  misc_RNA (1)...(19): siRNA sense strand
ccucaaggucugaaaguuu

SEQ ID NO: 893109 - RNA, 19 nt, Homo sapiens
  misc_RNA (1)...(19): siRNA sense strand
uagagggaauggaacuuga

SEQ ID NO: 893110 - RNA, 19 nt, Homo sapiens
  misc_RNA (1)...(19): siRNA sense strand
aagaguugcucccugagaa

SEQ ID NO: 893111 - RNA, 19 nt, Homo sapiens
  misc_RNA (1)...(19): siRNA sense strand
ucauuccguuugucuaauu

SEQ ID NO: 893112 - RNA, 19 nt, Homo sapiens
  misc_RNA (1)...(19): siRNA sense strand
aggaauaucaguacuuuga

SEQ ID NO: 893113 - RNA, 19 nt, Homo sapiens
  misc_RNA (1)...(19): siRNA sense strand
gggauguucgagauaauaa

SEQ ID NO: 893114 - RNA, 19 nt, Homo sapiens
  misc_RNA (1)...(19): siRNA sense strand
gacccgagcucugccacuu

SEQ ID NO: 893115 - RNA, 19 nt, Homo sapiens
  misc_RNA (1)...(19): siRNA sense strand
gauguucgagauaauaaga

SEQ ID NO: 893116 - RNA, 19 nt, Homo sapiens
  misc_RNA (1)...(19): siRNA sense strand
agauguugaugagcauuua

SEQ ID NO: 893117 - RNA, 19 nt, Homo sapiens
  misc_RNA (1)...(19): siRNA sense strand
agacuuuguucuuuacguu

SEQ ID NO: 893118 - RNA, 19 nt, Homo sapiens
  misc_RNA (1)...(19): siRNA sense strand
gagauguugaugagcauuu

SEQ ID NO: 893119 - RNA, 19 nt, Homo sapiens
  misc_RNA (1)...(19): siRNA sense strand
uuacuuagcagacaaugug

SEQ ID NO: 893120 - RNA, 19 nt, Homo sapiens
  misc_RNA (1)...(19): siRNA sense strand
cucaaggucugaaaguuug

SEQ ID NO: 893121 - RNA, 19 nt, Homo sapiens
  misc_RNA (1)...(19): siRNA sense strand
gagcauuuaagaaucaaga

SEQ ID NO: 893122 - RNA, 19 nt, Homo sapiens
  misc_RNA (1)...(19): siRNA sense strand
cagaaaucagcauucguua

SEQ ID NO: 893123 - RNA, 19 nt, Homo sapiens
  misc_RNA (1)...(19): siRNA sense strand
uguguaauuugcagaaguu

SEQ ID NO: 893124 - RNA, 19 nt, Homo sapiens
  misc_RNA (1)...(19): siRNA sense strand
uaaaaguguugaagaguug

SEQ ID NO: 893125 - RNA, 19 nt, Homo sapiens
  misc_RNA (1)...(19): siRNA sense strand
agucugggauuauaucaau

SEQ ID NO: 893126 - RNA, 19 nt, Homo sapiens
  misc_RNA (1)...(19): siRNA sense strand
ccucucacuucaagauuug

SEQ ID NO: 893127 - RNA, 19 nt, Homo sapiens
  misc_RNA (1)...(19): siRNA sense strand
cugcagaagauuugccuua

SEQ ID NO: 893128 - RNA, 19 nt, Homo sapiens
  misc_RNA (1)...(19): siRNA sense strand
gagagauuaugggauguuc

SEQ ID NO: 893129 - RNA, 19 nt, Homo sapiens
  misc_RNA (1)...(19): siRNA sense strand
caauaccuccggaaggaaa

SEQ ID NO: 893130 - RNA, 19 nt, Homo sapiens
  misc_RNA (1)...(19): siRNA sense strand
gcugacuacugcccuuuca

SEQ ID NO: 893131 - RNA, 19 nt, Homo sapiens
  misc_RNA (1)...(19): siRNA sense strand
ucccacaagcgauuucuua

SEQ ID NO: 893132 - RNA, 19 nt, Homo sapiens
  misc_RNA (1)...(19): siRNA sense strand
gauuauaucaauggaguga

SEQ ID NO: 893133 - RNA, 19 nt, Homo sapiens
  misc_RNA (1)...(19): siRNA sense strand
gagggaauggaacuugaaa

SEQ ID NO: 893134 - RNA, 19 nt, Homo sapiens
  misc_RNA (1)...(19): siRNA sense strand
caguugccguguguaauuu

SEQ ID NO: 893135 - RNA, 19 nt, Homo sapiens
  misc_RNA (1)...(19): siRNA sense strand
aaguucaucuuaaggcaaa

SEQ ID NO: 893136 - RNA, 19 nt, Homo sapiens
  misc_RNA (1)...(19): siRNA sense strand
gcucagauuguagaauauu

SEQ ID NO: 893137 - RNA, 19 nt, Homo sapiens
  misc_RNA (1)...(19): siRNA sense strand
cuggauuucuucuguguau

SEQ ID NO: 893138 - RNA, 19 nt, Homo sapiens
  misc_RNA (1)...(19): siRNA sense strand
ccucauuccguuugucuaa

SEQ ID NO: 893139 - RNA, 19 nt, Homo sapiens
  misc_RNA (1)...(19): siRNA sense strand
gcacauacauucaucauaa

SEQ ID NO: 893140 - RNA, 19 nt, Homo sapiens
  misc_RNA (1)...(19): siRNA sense strand
ggacggcucuccagacaua

SEQ ID NO: 893141 - RNA, 19 nt, Homo sapiens
  misc_RNA (1)...(19): siRNA sense strand
ccaaugaacugaucaagga

SEQ ID NO: 893142 - RNA, 19 nt, Homo sapiens
  misc_RNA (1)...(19): siRNA sense strand
ggacagaggaagagaagaa

SEQ ID NO: 893143 - RNA, 19 nt, Homo sapiens
  misc_RNA (1)...(19): siRNA sense strand
gcgaguaugucaagaacuu

SEQ ID NO: 893144 - RNA, 19 nt, Homo sapiens
  misc_RNA (1)...(19): siRNA sense strand
ccagaaggcugacaaggau

SEQ ID NO: 893145 - RNA, 19 nt, Homo sapiens
  misc_RNA (1)...(19): siRNA sense strand
gaagauguacggcgaguau

SEQ ID NO: 893146 - RNA, 19 nt, Homo sapiens
  misc_RNA (1)...(19): siRNA sense strand
ucaacagcaugauccuuua

SEQ ID NO: 893147 - RNA, 19 nt, Homo sapiens
  misc_RNA (1)...(19): siRNA sense strand
gaaccugacucugagaaca

SEQ ID NO: 893148 - RNA, 19 nt, Homo sapiens
  misc_RNA (1)...(19): siRNA sense strand
aaacacagcacauacauuc

SEQ ID NO: 893149 - RNA, 19 nt, Homo sapiens
  misc_RNA (1)...(19): siRNA sense strand
ccagaaaacuauccucuaa

SEQ ID NO: 893150 - RNA, 19 nt, Homo sapiens
  misc_RNA (1)...(19): siRNA sense strand
uguaagagcuguggugaga

SEQ ID NO: 893151 - RNA, 19 nt, Homo sapiens
  misc_RNA (1)...(19): siRNA sense strand
gcaugauccuuuacugugu

SEQ ID NO: 893152 - RNA, 19 nt, Homo sapiens
  misc_RNA (1)...(19): siRNA sense strand
gugaggaaccugacucuga

SEQ ID NO: 893153 - RNA, 19 nt, Homo sapiens
  misc_RNA (1)...(19): siRNA sense strand
gaacagcgaaaccuucaag

SEQ ID NO: 893154 - RNA, 19 nt, Homo sapiens
  misc_RNA (1)...(19): siRNA sense strand
gagaagcagagcuguaaga

SEQ ID NO: 893155 - RNA, 19 nt, Homo sapiens
  misc_RNA (1)...(19): siRNA sense strand
gaucaaggagggccaaauc

SEQ ID NO: 893156 - RNA, 19 nt, Homo sapiens
  misc_RNA (1)...(19): siRNA sense strand
gagauuguuuccugacaca

SEQ ID NO: 893157 - RNA, 19 nt, Homo sapiens
  misc_RNA (1)...(19): siRNA sense strand
gaagucaucaugggcauau

SEQ ID NO: 893158 - RNA, 19 nt, Homo sapiens
  misc_RNA (1)...(19): siRNA sense strand
ucaugggcauauucucuaa

SEQ ID NO: 893159 - RNA, 19 nt, Homo sapiens
  misc_RNA (1)...(19): siRNA sense strand
gggaagugcuccgaguuca

SEQ ID NO: 893160 - RNA, 19 nt, Homo sapiens
  misc_RNA (1)...(19): siRNA sense strand
cagccucucuccagacaug

SEQ ID NO: 893161 - RNA, 19 nt, Homo sapiens
  misc_RNA (1)...(19): siRNA sense strand
cagaaacugucagccaaga

SEQ ID NO: 893162 - RNA, 19 nt, Homo sapiens
  misc_RNA (1)...(19): siRNA sense strand
gcucaaggacuaucugaag

SEQ ID NO: 893163 - RNA, 19 nt, Homo sapiens
  misc_RNA (1)...(19): siRNA sense strand
ggccaaauccagaaacugu

SEQ ID NO: 893164 - RNA, 19 nt, Homo sapiens
  misc_RNA (1)...(19): siRNA sense strand
gggcauauucucuaacauc

SEQ ID NO: 893165 - RNA, 19 nt, Homo sapiens
  misc_RNA (1)...(19): siRNA sense strand
cagaggaagagaagaaaga

SEQ ID NO: 893166 - RNA, 19 nt, Homo sapiens
  misc_RNA (1)...(19): siRNA sense strand
caaacacagcacauacauu

SEQ ID NO: 893167 - RNA, 19 nt, Homo sapiens
  misc_RNA (1)...(19): siRNA sense strand
agaaaacuauccucuaaga

SEQ ID NO: 893168 - RNA, 19 nt, Homo sapiens
  misc_RNA (1)...(19): siRNA sense strand
gagaagcacaaacagaaca

SEQ ID NO: 893169 - RNA, 19 nt, Homo sapiens
  misc_RNA (1)...(19): siRNA sense strand
ucgagaagcacaaacagaa

SEQ ID NO: 893170 - RNA, 19 nt, Homo sapiens
  misc_RNA (1)...(19): siRNA sense strand
gaagagaagaaagaaugga

SEQ ID NO: 893171 - RNA, 19 nt, Homo sapiens
  misc_RNA (1)...(19): siRNA sense strand
ggcauauucucuaacaucu

SEQ ID NO: 893172 - RNA, 19 nt, Homo sapiens
  misc_RNA (1)...(19): siRNA sense strand
gaagugcuccgaguucaag

SEQ ID NO: 893173 - RNA, 19 nt, Homo sapiens
  misc_RNA (1)...(19): siRNA sense strand
gcugagugguagcuuaaag

SEQ ID NO: 893174 - RNA, 19 nt, Homo sapiens
  misc_RNA (1)...(19): siRNA sense strand
gagcugaagacgcggauca

SEQ ID NO: 893175 - RNA, 19 nt, Homo sapiens
  misc_RNA (1)...(19): siRNA sense strand
gaaacugucagccaagaac

SEQ ID NO: 893176 - RNA, 19 nt, Homo sapiens
  misc_RNA (1)...(19): siRNA sense strand
ggaagagaagaaagaaugg

SEQ ID NO: 893177 - RNA, 19 nt, Homo sapiens
  misc_RNA (1)...(19): siRNA sense strand
caucauaacaggaagaaaa

SEQ ID NO: 893178 - RNA, 19 nt, Homo sapiens
  misc_RNA (1)...(19): siRNA sense strand
ggaagugcuccgaguucaa

SEQ ID NO: 893179 - RNA, 19 nt, Homo sapiens
  misc_RNA (1)...(19): siRNA sense strand
ggacagcgggaucgacagu

SEQ ID NO: 893180 - RNA, 19 nt, Homo sapiens
  misc_RNA (1)...(19): siRNA sense strand
gcucaugggccagaaguuc

SEQ ID NO: 893181 - RNA, 19 nt, Homo sapiens
  misc_RNA (1)...(19): siRNA sense strand
gaguaugucaagaacuuug

SEQ ID NO: 893182 - RNA, 19 nt, Homo sapiens
  misc_RNA (1)...(19): siRNA sense strand
aggaagagaagaaagaaug

SEQ ID NO: 893183 - RNA, 19 nt, Homo sapiens
  misc_RNA (1)...(19): siRNA sense strand
cucaaggacuaucugaaga

SEQ ID NO: 893184 - RNA, 19 nt, Homo sapiens
  misc_RNA (1)...(19): siRNA sense strand
guacggcgaguaugucaag

SEQ ID NO: 893185 - RNA, 19 nt, Homo sapiens
  misc_RNA (1)...(19): siRNA sense strand
cagagauuguuuccugaca

SEQ ID NO: 893186 - RNA, 19 nt, Homo sapiens
  misc_RNA (1)...(19): siRNA sense strand
agccgugucugcagagauu

SEQ ID NO: 893187 - RNA, 19 nt, Homo sapiens
  misc_RNA (1)...(19): siRNA sense strand
ucaacuccaucaccaagag

SEQ ID NO: 893188 - RNA, 19 nt, Homo sapiens
  misc_RNA (1)...(19): siRNA sense strand
cagaacagcgaaaccuuca

SEQ ID NO: 893189 - RNA, 19 nt, Homo sapiens
  misc_RNA (1)...(19): siRNA sense strand
ccaaacacagcacauacau

SEQ ID NO: 893190 - RNA, 19 nt, Homo sapiens
  misc_RNA (1)...(19): siRNA sense strand
ccaaauccagaaacuguca

SEQ ID NO: 893191 - RNA, 19 nt, Homo sapiens
  misc_RNA (1)...(19): siRNA sense strand
ggagggccaaauccagaaa

SEQ ID NO: 893192 - RNA, 19 nt, Homo sapiens
  misc_RNA (1)...(19): siRNA sense strand
ccgaggagaccuaugugaa

SEQ ID NO: 893193 - RNA, 19 nt, Homo sapiens
  misc_RNA (1)...(19): siRNA sense strand
gcacaccgaggagaccuau

SEQ ID NO: 893194 - RNA, 19 nt, Homo sapiens
  misc_RNA (1)...(19): siRNA sense strand
gacagaggaagagaagaaa

SEQ ID NO: 893195 - RNA, 19 nt, Homo sapiens
  misc_RNA (1)...(19): siRNA sense strand
ucucuaacaucuccuccau

SEQ ID NO: 893196 - RNA, 19 nt, Homo sapiens
  misc_RNA (1)...(19): siRNA sense strand
cgaggagaccuaugugaag

SEQ ID NO: 893197 - RNA, 19 nt, Homo sapiens
  misc_RNA (1)...(19): siRNA sense strand
aggagaagcagagcuguaa

SEQ ID NO: 893198 - RNA, 19 nt, Homo sapiens
  misc_RNA (1)...(19): siRNA sense strand
cagcaugauccuuuacugu

SEQ ID NO: 893199 - RNA, 19 nt, Homo sapiens
  misc_RNA (1)...(19): siRNA sense strand
gcggucaucugugggaagu

SEQ ID NO: 893200 - RNA, 19 nt, Homo sapiens
  misc_RNA (1)...(19): siRNA sense strand
gauaucgucaagccaaaca

SEQ ID NO: 893201 - RNA, 19 nt, Homo sapiens
  misc_RNA (1)...(19): siRNA sense strand
caguguggcuggagagaac

SEQ ID NO: 893202 - RNA, 19 nt, Homo sapiens
  misc_RNA (1)...(19): siRNA sense strand
caucaugggcauauucucu

SEQ ID NO: 893203 - RNA, 19 nt, Homo sapiens
  misc_RNA (1)...(19): siRNA sense strand
gaggaagagaagaaagaau

SEQ ID NO: 893204 - RNA, 19 nt, Homo sapiens
  misc_RNA (1)...(19): siRNA sense strand
gccaaacacagcacauaca

SEQ ID NO: 893205 - RNA, 19 nt, Homo sapiens
  misc_RNA (1)...(19): siRNA sense strand
acaccgaggagaccuaugu

SEQ ID NO: 893206 - RNA, 19 nt, Homo sapiens
  misc_RNA (1)...(19): siRNA sense strand
ucuaagaccagacgugaca

SEQ ID NO: 893207 - RNA, 19 nt, Homo sapiens
  misc_RNA (1)...(19): siRNA sense strand
agagaagaaagaauggauu

SEQ ID NO: 893208 - RNA, 19 nt, Homo sapiens
  misc_RNA (1)...(19): siRNA sense strand
cccagaaggcugacaagga

SEQ ID NO: 893209 - RNA, 19 nt, Homo sapiens
  misc_RNA (1)...(19): siRNA sense strand
uucaacagcaugauccuuu

SEQ ID NO: 893210 - RNA, 19 nt, Homo sapiens
  misc_RNA (1)...(19): siRNA sense strand
cgccaccucuuccuguuca

SEQ ID NO: 893211 - RNA, 19 nt, Homo sapiens
  misc_RNA (1)...(19): siRNA sense strand
cggaggagugggacacaaa

SEQ ID NO: 893212 - RNA, 19 nt, Homo sapiens
  misc_RNA (1)...(19): siRNA sense strand
cacagcacauacauucauc

SEQ ID NO: 893213 - RNA, 19 nt, Homo sapiens
  misc_RNA (1)...(19): siRNA sense strand
acacagcacauacauucau

SEQ ID NO: 893214 - RNA, 19 nt, Homo sapiens
  misc_RNA (1)...(19): siRNA sense strand
aagccaaacacagcacaua

SEQ ID NO: 893215 - RNA, 19 nt, Homo sapiens
  misc_RNA (1)...(19): siRNA sense strand
gcuccccacuguuuaaaga

SEQ ID NO: 893216 - RNA, 19 nt, Homo sapiens
  misc_RNA (1)...(19): siRNA sense strand
ggugcaggauaucgucaag

SEQ ID NO: 893217 - RNA, 19 nt, Homo sapiens
  misc_RNA (1)...(19): siRNA sense strand
gccuccaggugcaggauau

SEQ ID NO: 893218 - RNA, 19 nt, Homo sapiens
  misc_RNA (1)...(19): siRNA sense strand
ggaguacgcuggcaauuuc

SEQ ID NO: 893219 - RNA, 19 nt, Homo sapiens
  misc_RNA (1)...(19): siRNA sense strand
ggugauagcagaaaugaug

SEQ ID NO: 893220 - RNA, 19 nt, Homo sapiens
  misc_RNA (1)...(19): siRNA sense strand
ggaaaugucccuggcagaa

SEQ ID NO: 893221 - RNA, 19 nt, Homo sapiens
  misc_RNA (1)...(19): siRNA sense strand
gcagaagaacugaaucaug

SEQ ID NO: 893222 - RNA, 19 nt, Homo sapiens
  misc_RNA (1)...(19): siRNA sense strand
agacuagccuggaagaguu

SEQ ID NO: 893223 - RNA, 19 nt, Homo sapiens
  misc_RNA (1)...(19): siRNA sense strand
ggagauggaagucaugaga

SEQ ID NO: 893224 - RNA, 19 nt, Homo sapiens
  misc_RNA (1)...(19): siRNA sense strand
aggcauacguuuccauuau

SEQ ID NO: 893225 - RNA, 19 nt, Homo sapiens
  misc_RNA (1)...(19): siRNA sense strand
aagcagaaguuggaacaaa

SEQ ID NO: 893226 - RNA, 19 nt, Homo sapiens
  misc_RNA (1)...(19): siRNA sense strand
aaaugucccuggcagaaga

SEQ ID NO: 893227 - RNA, 19 nt, Homo sapiens
  misc_RNA (1)...(19): siRNA sense strand
ucaauguacuggagaugga

SEQ ID NO: 893228 - RNA, 19 nt, Homo sapiens
  misc_RNA (1)...(19): siRNA sense strand
gaaaugauggagcuuggau

SEQ ID NO: 893229 - RNA, 19 nt, Homo sapiens
  misc_RNA (1)...(19): siRNA sense strand
ccagaaugcugagagaauc

SEQ ID NO: 893230 - RNA, 19 nt, Homo sapiens
  misc_RNA (1)...(19): siRNA sense strand
agaagaagcagaaguugga

SEQ ID NO: 893231 - RNA, 19 nt, Homo sapiens
  misc_RNA (1)...(19): siRNA sense strand
caaggcauacguuuccauu

SEQ ID NO: 893232 - RNA, 19 nt, Homo sapiens
  misc_RNA (1)...(19): siRNA sense strand
gagauggaagucaugagaa

SEQ ID NO: 893233 - RNA, 19 nt, Homo sapiens
  misc_RNA (1)...(19): siRNA sense strand
ccuggaagaguucaaugua

SEQ ID NO: 893234 - RNA, 19 nt, Homo sapiens
  misc_RNA (1)...(19): siRNA sense strand
gaagaagcagaaguuggaa

SEQ ID NO: 893235 - RNA, 19 nt, Homo sapiens
  misc_RNA (1)...(19): siRNA sense strand
gaaaugucccuggcagaag

SEQ ID NO: 893236 - RNA, 19 nt, Homo sapiens
  misc_RNA (1)...(19): siRNA sense strand
ccaaggcggagauggaaau

SEQ ID NO: 893237 - RNA, 19 nt, Homo sapiens
  misc_RNA (1)...(19): siRNA sense strand
uggaagaguucaauguacu

SEQ ID NO: 893238 - RNA, 19 nt, Homo sapiens
  misc_RNA (1)...(19): siRNA sense strand
ggaagaguucaauguacug

SEQ ID NO: 893239 - RNA, 19 nt, Homo sapiens
  misc_RNA (1)...(19): siRNA sense strand
agauggaagucaugagaag

SEQ ID NO: 893240 - RNA, 19 nt, Homo sapiens
  misc_RNA (1)...(19): siRNA sense strand
aggcggagauggaaauguc

SEQ ID NO: 893241 - RNA, 19 nt, Homo sapiens
  misc_RNA (1)...(19): siRNA sense strand
agacagcuguaugcaguca

SEQ ID NO: 893242 - RNA, 19 nt, Homo sapiens
  misc_RNA (1)...(19): siRNA sense strand
cccagaagaagcagaaguu

SEQ ID NO: 893243 - RNA, 19 nt, Homo sapiens
  misc_RNA (1)...(19): siRNA sense strand
gauggaagucaugagaaga

SEQ ID NO: 893244 - RNA, 19 nt, Homo sapiens
  misc_RNA (1)...(19): siRNA sense strand
gaagcagaaguuggaacaa

SEQ ID NO: 893245 - RNA, 19 nt, Homo sapiens
  misc_RNA (1)...(19): siRNA sense strand
gagaagacagcuguaugca

SEQ ID NO: 893246 - RNA, 19 nt, Homo sapiens
  misc_RNA (1)...(19): siRNA sense strand
ccagaagaagcagaaguug

SEQ ID NO: 893247 - RNA, 19 nt, Homo sapiens
  misc_RNA (1)...(19): siRNA sense strand
ugagaagacagcuguaugc

SEQ ID NO: 893248 - RNA, 19 nt, Homo sapiens
  misc_RNA (1)...(19): siRNA sense strand
aggaguacgcuggcaauuu

SEQ ID NO: 893249 - RNA, 19 nt, Homo sapiens
  misc_RNA (1)...(19): siRNA sense strand
acaccaaggcggagaugga

SEQ ID NO: 893250 - RNA, 19 nt, Homo sapiens
  misc_RNA (1)...(19): siRNA sense strand
cagacuagccuggaagagu

SEQ ID NO: 893251 - RNA, 19 nt, Homo sapiens
  misc_RNA (1)...(19): siRNA sense strand
caugagaagacagcuguau

SEQ ID NO: 893252 - RNA, 19 nt, Homo sapiens
  misc_RNA (1)...(19): siRNA sense strand
cuggaagaguucaauguac

SEQ ID NO: 893253 - RNA, 19 nt, Homo sapiens
  misc_RNA (1)...(19): siRNA sense strand
ucgagucgcucuucagcua

SEQ ID NO: 893254 - RNA, 19 nt, Homo sapiens
  misc_RNA (1)...(19): siRNA sense strand
gccgcaagguggacauuau

SEQ ID NO: 893255 - RNA, 19 nt, Homo sapiens
  misc_RNA (1)...(19): siRNA sense strand
acaacacgcuggccuacga

SEQ ID NO: 893256 - RNA, 19 nt, Homo sapiens
  misc_RNA (1)...(19): siRNA sense strand
cagcaggccaccaagauga

SEQ ID NO: 893257 - RNA, 19 nt, Homo sapiens
  misc_RNA (1)...(19): siRNA sense strand
guacucgaacuaccuguug

SEQ ID NO: 893258 - RNA, 19 nt, Homo sapiens
  misc_RNA (1)...(19): siRNA sense strand
gcagcaggccaccaagaug

SEQ ID NO: 893259 - RNA, 19 nt, Homo sapiens
  misc_RNA (1)...(19): siRNA sense strand
gagcugcgagcaccaguuc

SEQ ID NO: 893260 - RNA, 19 nt, Homo sapiens
  misc_RNA (1)...(19): siRNA sense strand
caugaucgccgaguacuuc

SEQ ID NO: 893261 - RNA, 19 nt, Homo sapiens
  misc_RNA (1)...(19): siRNA sense strand
caacuucucggcgcacuuc

SEQ ID NO: 893262 - RNA, 19 nt, Homo sapiens
  misc_RNA (1)...(19): siRNA sense strand
gcccagcaccgucuauguc

SEQ ID NO: 893263 - RNA, 19 nt, Homo sapiens
  misc_RNA (1)...(19): siRNA sense strand
caacauggauuuccucaga

SEQ ID NO: 893264 - RNA, 19 nt, Homo sapiens
  misc_RNA (1)...(19): siRNA sense strand
ggaagcagaugaagaaaca

SEQ ID NO: 893265 - RNA, 19 nt, Homo sapiens
  misc_RNA (1)...(19): siRNA sense strand
gaagaugacaugaagauug

SEQ ID NO: 893266 - RNA, 19 nt, Homo sapiens
  misc_RNA (1)...(19): siRNA sense strand
gaagauugaugagaaaugu

SEQ ID NO: 893267 - RNA, 19 nt, Homo sapiens
  misc_RNA (1)...(19): siRNA sense strand
gcacagguguuauccuaug

SEQ ID NO: 893268 - RNA, 19 nt, Homo sapiens
  misc_RNA (1)...(19): siRNA sense strand
gcuauaugcuggagacaaa

SEQ ID NO: 893269 - RNA, 19 nt, Homo sapiens
  misc_RNA (1)...(19): siRNA sense strand
uaaaugagcucagaagaca

SEQ ID NO: 893270 - RNA, 19 nt, Homo sapiens
  misc_RNA (1)...(19): siRNA sense strand
gaacaagugauccauauuc

SEQ ID NO: 893271 - RNA, 19 nt, Homo sapiens
  misc_RNA (1)...(19): siRNA sense strand
gaagaaacauuugaaucug

SEQ ID NO: 893272 - RNA, 19 nt, Homo sapiens
  misc_RNA (1)...(19): siRNA sense strand
gagcucagaagacaacuua

SEQ ID NO: 893273 - RNA, 19 nt, Homo sapiens
  misc_RNA (1)...(19): siRNA sense strand
gaacugaagcccuauguca

SEQ ID NO: 893274 - RNA, 19 nt, Homo sapiens
  misc_RNA (1)...(19): siRNA sense strand
ggagagaaguggguugcua

SEQ ID NO: 893275 - RNA, 19 nt, Homo sapiens
  misc_RNA (1)...(19): siRNA sense strand
gagacaaacugguagaagu

SEQ ID NO: 893276 - RNA, 19 nt, Homo sapiens
  misc_RNA (1)...(19): siRNA sense strand
ggaagaagaagaugacaug

SEQ ID NO: 893277 - RNA, 19 nt, Homo sapiens
  misc_RNA (1)...(19): siRNA sense strand
auaaagccaucgaauauga

SEQ ID NO: 893278 - RNA, 19 nt, Homo sapiens
  misc_RNA (1)...(19): siRNA sense strand
gguguuauccuaugaggua

SEQ ID NO: 893279 - RNA, 19 nt, Homo sapiens
  misc_RNA (1)...(19): siRNA sense strand
gaaguggguugcuauaugc

SEQ ID NO: 893280 - RNA, 19 nt, Homo sapiens
  misc_RNA (1)...(19): siRNA sense strand
gcacaaucauguucaaggu

SEQ ID NO: 893281 - RNA, 19 nt, Homo sapiens
  misc_RNA (1)...(19): siRNA sense strand
caagucaacccuaucaauu

SEQ ID NO: 893282 - RNA, 19 nt, Homo sapiens
  misc_RNA (1)...(19): siRNA sense strand
aagaugacaugaagauuga

SEQ ID NO: 893283 - RNA, 19 nt, Homo sapiens
  misc_RNA (1)...(19): siRNA sense strand
agaagaagaugacaugaag

SEQ ID NO: 893284 - RNA, 19 nt, Homo sapiens
  misc_RNA (1)...(19): siRNA sense strand
gaauaugagguguaugaaa

SEQ ID NO: 893285 - RNA, 19 nt, Homo sapiens
  misc_RNA (1)...(19): siRNA sense strand
gaauggaguuucaguugag

SEQ ID NO: 893286 - RNA, 19 nt, Homo sapiens
  misc_RNA (1)...(19): siRNA sense strand
gaugaagaccuacaagaga

SEQ ID NO: 893287 - RNA, 19 nt, Homo sapiens
  misc_RNA (1)...(19): siRNA sense strand
ggaguauggugaguacaaa

SEQ ID NO: 893288 - RNA, 19 nt, Homo sapiens
  misc_RNA (1)...(19): siRNA sense strand
gaggauuguuuguuuagug

SEQ ID NO: 893289 - RNA, 19 nt, Homo sapiens
  misc_RNA (1)...(19): siRNA sense strand
gaaggaaagaucuguguca

SEQ ID NO: 893290 - RNA, 19 nt, Homo sapiens
  misc_RNA (1)...(19): siRNA sense strand
gcuccaggcuccacacuuc

SEQ ID NO: 893291 - RNA, 19 nt, Homo sapiens
  misc_RNA (1)...(19): siRNA sense strand
gguuauuacugacuacuau

SEQ ID NO: 893292 - RNA, 19 nt, Homo sapiens
  misc_RNA (1)...(19): siRNA sense strand
ccaagguuauuacugacua

SEQ ID NO: 893293 - RNA, 19 nt, Homo sapiens
  misc_RNA (1)...(19): siRNA sense strand
gcucagaagacaacuuauu

SEQ ID NO: 893294 - RNA, 19 nt, Homo sapiens
  misc_RNA (1)...(19): siRNA sense strand
acaugaagauugaugagaa

SEQ ID NO: 893295 - RNA, 19 nt, Homo sapiens
  misc_RNA (1)...(19): siRNA sense strand
agaaguggguugcuauaug

SEQ ID NO: 893296 - RNA, 19 nt, Homo sapiens
  misc_RNA (1)...(19): siRNA sense strand
cagcagagaugugaaugga

SEQ ID NO: 893297 - RNA, 19 nt, Homo sapiens
  misc_RNA (1)...(19): siRNA sense strand
aaauuuagcccaaagaaug

SEQ ID NO: 893298 - RNA, 19 nt, Homo sapiens
  misc_RNA (1)...(19): siRNA sense strand
caugaagauugaugagaaa

SEQ ID NO: 893299 - RNA, 19 nt, Homo sapiens
  misc_RNA (1)...(19): siRNA sense strand
gagcagauccaccagacaa

SEQ ID NO: 893300 - RNA, 19 nt, Homo sapiens
  misc_RNA (1)...(19): siRNA sense strand
gaauggagugugucucuug

SEQ ID NO: 893301 - RNA, 19 nt, Homo sapiens
  misc_RNA (1)...(19): siRNA sense strand
caucgaauaugagguguau

SEQ ID NO: 893302 - RNA, 19 nt, Homo sapiens
  misc_RNA (1)...(19): siRNA sense strand
cacgauagcucagaaagau

SEQ ID NO: 893303 - RNA, 19 nt, Homo sapiens
  misc_RNA (1)...(19): siRNA sense strand
agaaggacaugaagcuuuc

SEQ ID NO: 893304 - RNA, 19 nt, Homo sapiens
  misc_RNA (1)...(19): siRNA sense strand
acauggauuuccucagaua

SEQ ID NO: 893305 - RNA, 19 nt, Homo sapiens
  misc_RNA (1)...(19): siRNA sense strand
gaauuuaaucccagccauu

SEQ ID NO: 893306 - RNA, 19 nt, Homo sapiens
  misc_RNA (1)...(19): siRNA sense strand
agacaaguaccgccucaua

SEQ ID NO: 893307 - RNA, 19 nt, Homo sapiens
  misc_RNA (1)...(19): siRNA sense strand
acgaggagguggugaggua

SEQ ID NO: 893308 - RNA, 19 nt, Homo sapiens
  misc_RNA (1)...(19): siRNA sense strand
gagugugucucuuguacga

SEQ ID NO: 893309 - RNA, 19 nt, Homo sapiens
  misc_RNA (1)...(19): siRNA sense strand
cgauagcucagaaagauuu

SEQ ID NO: 893310 - RNA, 19 nt, Homo sapiens
  misc_RNA (1)...(19): siRNA sense strand
ccuaugagguaguggaguu

SEQ ID NO: 893311 - RNA, 19 nt, Homo sapiens
  misc_RNA (1)...(19): siRNA sense strand
ugaaugggcgugaguauca

SEQ ID NO: 893312 - RNA, 19 nt, Homo sapiens
  misc_RNA (1)...(19): siRNA sense strand
ugagguaguggaguuauua

SEQ ID NO: 893313 - RNA, 19 nt, Homo sapiens
  misc_RNA (1)...(19): siRNA sense strand
acacacuacucguacuaaa

SEQ ID NO: 893314 - RNA, 19 nt, Homo sapiens
  misc_RNA (1)...(19): siRNA sense strand
gcagaugaagaaacauuug

SEQ ID NO: 893315 - RNA, 19 nt, Homo sapiens
  misc_RNA (1)...(19): siRNA sense strand
cagaagacaacuuauugaa

SEQ ID NO: 893316 - RNA, 19 nt, Homo sapiens
  misc_RNA (1)...(19): siRNA sense strand
uccaagagcugagacaaau

SEQ ID NO: 893317 - RNA, 19 nt, Homo sapiens
  misc_RNA (1)...(19): siRNA sense strand
aauaugagguguaugaaac

SEQ ID NO: 893318 - RNA, 19 nt, Homo sapiens
  misc_RNA (1)...(19): siRNA sense strand
cugaacaagugauccauau

SEQ ID NO: 893319 - RNA, 19 nt, Homo sapiens
  misc_RNA (1)...(19): siRNA sense strand
guggaguuauuacgugaaa

SEQ ID NO: 893320 - RNA, 19 nt, Homo sapiens
  misc_RNA (1)...(19): siRNA sense strand
ggaugaagaccuacaagag

SEQ ID NO: 893321 - RNA, 19 nt, Homo sapiens
  misc_RNA (1)...(19): siRNA sense strand
gaaaugaaugggcgugagu

SEQ ID NO: 893322 - RNA, 19 nt, Homo sapiens
  misc_RNA (1)...(19): siRNA sense strand
gaagaagaagaugacauga

SEQ ID NO: 893323 - RNA, 19 nt, Homo sapiens
  misc_RNA (1)...(19): siRNA sense strand
ucaaacaguccuugucgaa

SEQ ID NO: 893324 - RNA, 19 nt, Homo sapiens
  misc_RNA (1)...(19): siRNA sense strand
cuccaggaauuuaaagaaa

SEQ ID NO: 893325 - RNA, 19 nt, Homo sapiens
  misc_RNA (1)...(19): siRNA sense strand
ucgaauaugagguguauga

SEQ ID NO: 893326 - RNA, 19 nt, Homo sapiens
  misc_RNA (1)...(19): siRNA sense strand
agaauggccucucccagau

SEQ ID NO: 893327 - RNA, 19 nt, Homo sapiens
  misc_RNA (1)...(19): siRNA sense strand
ucaacccuaucaauuucua

SEQ ID NO: 893328 - RNA, 19 nt, Homo sapiens
  misc_RNA (1)...(19): siRNA sense strand
ccucacaccugccucaagu

SEQ ID NO: 893329 - RNA, 19 nt, Homo sapiens
  misc_RNA (1)...(19): siRNA sense strand
ccaggaggaucccgacauc

SEQ ID NO: 893330 - RNA, 19 nt, Homo sapiens
  misc_RNA (1)...(19): siRNA sense strand
caaggugguuccagucucu

SEQ ID NO: 893331 - RNA, 19 nt, Homo sapiens
  misc_RNA (1)...(19): siRNA sense strand
gagagaaguggguugcuau

SEQ ID NO: 893332 - RNA, 19 nt, Homo sapiens
  misc_RNA (1)...(19): siRNA sense strand
ggacaugaagcuuucuaca

SEQ ID NO: 893333 - RNA, 19 nt, Homo sapiens
  misc_RNA (1)...(19): siRNA sense strand
ugagguguaugaaacaauc

SEQ ID NO: 893334 - RNA, 19 nt, Homo sapiens
  misc_RNA (1)...(19): siRNA sense strand
ccuagagccucaggauauu

SEQ ID NO: 893335 - RNA, 19 nt, Homo sapiens
  misc_RNA (1)...(19): siRNA sense strand
gaccuagagccucaggaua

SEQ ID NO: 893336 - RNA, 19 nt, Homo sapiens
  misc_RNA (1)...(19): siRNA sense strand
ugagaaauguguggaagca

SEQ ID NO: 893337 - RNA, 19 nt, Homo sapiens
  misc_RNA (1)...(19): siRNA sense strand
gaagaagaugacaugaaga

SEQ ID NO: 893338 - RNA, 19 nt, Homo sapiens
  misc_RNA (1)...(19): siRNA sense strand
gaggcacaaucauguucaa

SEQ ID NO: 893339 - RNA, 19 nt, Homo sapiens
  misc_RNA (1)...(19): siRNA sense strand
cgaugcaugugcccaguug

SEQ ID NO: 893340 - RNA, 19 nt, Homo sapiens
  misc_RNA (1)...(19): siRNA sense strand
gucacaggaugcuggagua

SEQ ID NO: 893341 - RNA, 19 nt, Homo sapiens
  misc_RNA (1)...(19): siRNA sense strand
ccuaucaauuucuauggaa

SEQ ID NO: 893342 - RNA, 19 nt, Homo sapiens
  misc_RNA (1)...(19): siRNA sense strand
agucaacccuaucaauuuc

SEQ ID NO: 893343 - RNA, 19 nt, Homo sapiens
  misc_RNA (1)...(19): siRNA sense strand
augcacagguguuauccua

SEQ ID NO: 893344 - RNA, 19 nt, Homo sapiens
  misc_RNA (1)...(19): siRNA sense strand
gauacagucagacaaagga

SEQ ID NO: 893345 - RNA, 19 nt, Homo sapiens
  misc_RNA (1)...(19): siRNA sense strand
guaccagcaacauggauuu

SEQ ID NO: 893346 - RNA, 19 nt, Homo sapiens
  misc_RNA (1)...(19): siRNA sense strand
cccaaagaauggaaacuca

SEQ ID NO: 893347 - RNA, 19 nt, Homo sapiens
  misc_RNA (1)...(19): siRNA sense strand
ucagaagacaacuuauuga

SEQ ID NO: 893348 - RNA, 19 nt, Homo sapiens
  misc_RNA (1)...(19): siRNA sense strand
ugcaagagcugagucuguu

SEQ ID NO: 893349 - RNA, 19 nt, Homo sapiens
  misc_RNA (1)...(19): siRNA sense strand
ggaagcaacgggaauucug

SEQ ID NO: 893350 - RNA, 19 nt, Homo sapiens
  misc_RNA (1)...(19): siRNA sense strand
gagaaguggguugcuauau

SEQ ID NO: 893351 - RNA, 19 nt, Homo sapiens
  misc_RNA (1)...(19): siRNA sense strand
augccaagguuauuacuga

SEQ ID NO: 893352 - RNA, 19 nt, Homo sapiens
  misc_RNA (1)...(19): siRNA sense strand
ggaccuagagccucaggau

SEQ ID NO: 893353 - RNA, 19 nt, Homo sapiens
  misc_RNA (1)...(19): siRNA sense strand
acaggaugcuggaguaugg

SEQ ID NO: 893354 - RNA, 19 nt, Homo sapiens
  misc_RNA (1)...(19): siRNA sense strand
gagcugagucuguucuaca

SEQ ID NO: 893355 - RNA, 19 nt, Homo sapiens
  misc_RNA (1)...(19): siRNA sense strand
ccacacacuacucguacua

SEQ ID NO: 893356 - RNA, 19 nt, Homo sapiens
  misc_RNA (1)...(19): siRNA sense strand
aagaaggacaugaagcuuu

SEQ ID NO: 893357 - RNA, 19 nt, Homo sapiens
  misc_RNA (1)...(19): siRNA sense strand
gcagauccaccagacaaga

SEQ ID NO: 893358 - RNA, 19 nt, Homo sapiens
  misc_RNA (1)...(19): siRNA sense strand
cagaagacaaggaggaguu

SEQ ID NO: 893359 - RNA, 19 nt, Homo sapiens
  misc_RNA (1)...(19): siRNA sense strand
aagucaacccuaucaauuu

SEQ ID NO: 893360 - RNA, 19 nt, Homo sapiens
  misc_RNA (1)...(19): siRNA sense strand
guaaaugagcucagaagac

SEQ ID NO: 893361 - RNA, 19 nt, Homo sapiens
  misc_RNA (1)...(19): siRNA sense strand
gcgacgcccuucagacaag

SEQ ID NO: 893362 - RNA, 19 nt, Homo sapiens
  misc_RNA (1)...(19): siRNA sense strand
uguggaagcagaugaagaa

SEQ ID NO: 893363 - RNA, 19 nt, Homo sapiens
  misc_RNA (1)...(19): siRNA sense strand
gaacacugaugaccaggau

SEQ ID NO: 893364 - RNA, 19 nt, Homo sapiens
  misc_RNA (1)...(19): siRNA sense strand
ugaccaggaugcagaggua

SEQ ID NO: 893365 - RNA, 19 nt, Homo sapiens
  misc_RNA (1)...(19): siRNA sense strand
gagaagugcuaccugaucu

SEQ ID NO: 893366 - RNA, 19 nt, Homo sapiens
  misc_RNA (1)...(19): siRNA sense strand
acaaggagaacacugauga

SEQ ID NO: 893367 - RNA, 19 nt, Homo sapiens
  misc_RNA (1)...(19): siRNA sense strand
ucacugaccguccuguuug

SEQ ID NO: 893368 - RNA, 19 nt, Homo sapiens
  misc_RNA (1)...(19): siRNA sense strand
gcgcagaaggugcucaaga

SEQ ID NO: 893369 - RNA, 19 nt, Homo sapiens
  misc_RNA (1)...(19): siRNA sense strand
gcggaggcuuggugucaga

SEQ ID NO: 893370 - RNA, 19 nt, Homo sapiens
  misc_RNA (1)...(19): siRNA sense strand
gcaaaugccgcuggaagca

SEQ ID NO: 893371 - RNA, 19 nt, Homo sapiens
  misc_RNA (1)...(19): siRNA sense strand
ccaccuccaucaucuuucu

SEQ ID NO: 893372 - RNA, 19 nt, Homo sapiens
  misc_RNA (1)...(19): siRNA sense strand
caccaccuccaucaucuuu

SEQ ID NO: 893373 - RNA, 19 nt, Homo sapiens
  misc_RNA (1)...(19): siRNA sense strand
ugaccguccuguuugauac

SEQ ID NO: 893374 - RNA, 19 nt, Homo sapiens
  misc_RNA (1)...(19): siRNA sense strand
cgagaagugcuaccugauc

SEQ ID NO: 893375 - RNA, 19 nt, Homo sapiens
  misc_RNA (1)...(19): siRNA sense strand
cgcagaaggugcucaagac

SEQ ID NO: 893376 - RNA, 19 nt, Homo sapiens
  misc_RNA (1)...(19): siRNA sense strand
gagacuuccagccaagcua

SEQ ID NO: 893377 - RNA, 19 nt, Homo sapiens
  misc_RNA (1)...(19): siRNA sense strand
cccaagugcucgagaugca

SEQ ID NO: 893378 - RNA, 19 nt, Homo sapiens
  misc_RNA (1)...(19): siRNA sense strand
cacugaccguccuguuuga

SEQ ID NO: 893379 - RNA, 19 nt, Homo sapiens
  misc_RNA (1)...(19): siRNA sense strand
gacaaggagaacacugaug

SEQ ID NO: 893380 - RNA, 19 nt, Homo sapiens
  misc_RNA (1)...(19): siRNA sense strand
gagaagagcuccaaagaga

SEQ ID NO: 893381 - RNA, 19 nt, Homo sapiens
  misc_RNA (1)...(19): siRNA sense strand
gagcagaacuauauagauu

SEQ ID NO: 893382 - RNA, 19 nt, Homo sapiens
  misc_RNA (1)...(19): siRNA sense strand
caacugagccuccaacaua

SEQ ID NO: 893383 - RNA, 19 nt, Homo sapiens
  misc_RNA (1)...(19): siRNA sense strand
ccagagaacuucauaagga

SEQ ID NO: 893384 - RNA, 19 nt, Homo sapiens
  misc_RNA (1)...(19): siRNA sense strand
ggaaugaucucaaagacau

SEQ ID NO: 893385 - RNA, 19 nt, Homo sapiens
  misc_RNA (1)...(19): siRNA sense strand
gaagaucuguggagaaagu

SEQ ID NO: 893386 - RNA, 19 nt, Homo sapiens
  misc_RNA (1)...(19): siRNA sense strand
ggagaaaguuccaggaugu

SEQ ID NO: 893387 - RNA, 19 nt, Homo sapiens
  misc_RNA (1)...(19): siRNA sense strand
ggaggaaaguuacaacaug

SEQ ID NO: 893388 - RNA, 19 nt, Homo sapiens
  misc_RNA (1)...(19): siRNA sense strand
gaaaagauccuuaaacuug

SEQ ID NO: 893389 - RNA, 19 nt, Homo sapiens
  misc_RNA (1)...(19): siRNA sense strand
ccaaagagauugaaguaca

SEQ ID NO: 893390 - RNA, 19 nt, Homo sapiens
  misc_RNA (1)...(19): siRNA sense strand
gagcccagcugcuagauau

SEQ ID NO: 893391 - RNA, 19 nt, Homo sapiens
  misc_RNA (1)...(19): siRNA sense strand
gaagagcuccaaagagauu

SEQ ID NO: 893392 - RNA, 19 nt, Homo sapiens
  misc_RNA (1)...(19): siRNA sense strand
gcugaaauauguaggaaau

SEQ ID NO: 893393 - RNA, 19 nt, Homo sapiens
  misc_RNA (1)...(19): siRNA sense strand
ccaaggaguuugagacaga

SEQ ID NO: 893394 - RNA, 19 nt, Homo sapiens
  misc_RNA (1)...(19): siRNA sense strand
uagaagaucuguggagaaa

SEQ ID NO: 893395 - RNA, 19 nt, Homo sapiens
  misc_RNA (1)...(19): siRNA sense strand
gaaacuacaggaugccaua

SEQ ID NO: 893396 - RNA, 19 nt, Homo sapiens
  misc_RNA (1)...(19): siRNA sense strand
gaagaauaaucuagaagag

SEQ ID NO: 893397 - RNA, 19 nt, Homo sapiens
  misc_RNA (1)...(19): siRNA sense strand
gaacacaacagugcucuga

SEQ ID NO: 893398 - RNA, 19 nt, Homo sapiens
  misc_RNA (1)...(19): siRNA sense strand
acagaaaggaagacaauua

SEQ ID NO: 893399 - RNA, 19 nt, Homo sapiens
  misc_RNA (1)...(19): siRNA sense strand
gcucaacccacucuuuaua

SEQ ID NO: 893400 - RNA, 19 nt, Homo sapiens
  misc_RNA (1)...(19): siRNA sense strand
aggauguacucaagaauua

SEQ ID NO: 893401 - RNA, 19 nt, Homo sapiens
  misc_RNA (1)...(19): siRNA sense strand
ccuuaaacuugcugaaaua

SEQ ID NO: 893402 - RNA, 19 nt, Homo sapiens
  misc_RNA (1)...(19): siRNA sense strand
acauaggaauggagaauuu

SEQ ID NO: 893403 - RNA, 19 nt, Homo sapiens
  misc_RNA (1)...(19): siRNA sense strand
caacagugcucugaaccuu

SEQ ID NO: 893404 - RNA, 19 nt, Homo sapiens
  misc_RNA (1)...(19): siRNA sense strand
gagaaagauuguugauaag

SEQ ID NO: 893405 - RNA, 19 nt, Homo sapiens
  misc_RNA (1)...(19): siRNA sense strand
acagugcucugaaccuuaa

SEQ ID NO: 893406 - RNA, 19 nt, Homo sapiens
  misc_RNA (1)...(19): siRNA sense strand
ggaauugguccuuguacaa

SEQ ID NO: 893407 - RNA, 19 nt, Homo sapiens
  misc_RNA (1)...(19): siRNA sense strand
cagcucaacccacucuuua

SEQ ID NO: 893408 - RNA, 19 nt, Homo sapiens
  misc_RNA (1)...(19): siRNA sense strand
caggaugccauaacuauuu

SEQ ID NO: 893409 - RNA, 19 nt, Homo sapiens
  misc_RNA (1)...(19): siRNA sense strand
ccaaggugaugguggacua

SEQ ID NO: 893410 - RNA, 19 nt, Homo sapiens
  misc_RNA (1)...(19): siRNA sense strand
gaaauuugaaaccgaagaa

SEQ ID NO: 893411 - RNA, 19 nt, Homo sapiens
  misc_RNA (1)...(19): siRNA sense strand
gaagaugagaaccgguaua

SEQ ID NO: 893412 - RNA, 19 nt, Homo sapiens
  misc_RNA (1)...(19): siRNA sense strand
acaaugucaucaagucuuu

SEQ ID NO: 893413 - RNA, 19 nt, Homo sapiens
  misc_RNA (1)...(19): siRNA sense strand
ccauggagcagaacuauau

SEQ ID NO: 893414 - RNA, 19 nt, Homo sapiens
  misc_RNA (1)...(19): siRNA sense strand
cauguggaaugaucucaaa

SEQ ID NO: 893415 - RNA, 19 nt, Homo sapiens
  misc_RNA (1)...(19): siRNA sense strand
gaaccgguauauccguaau

SEQ ID NO: 893416 - RNA, 19 nt, Homo sapiens
  misc_RNA (1)...(19): siRNA sense strand
agacaugaauuuagaagag

SEQ ID NO: 893417 - RNA, 19 nt, Homo sapiens
  misc_RNA (1)...(19): siRNA sense strand
guacaacugcgaaaacuua

SEQ ID NO: 893418 - RNA, 19 nt, Homo sapiens
  misc_RNA (1)...(19): siRNA sense strand
gauccucagccaaacauuu

SEQ ID NO: 893419 - RNA, 19 nt, Homo sapiens
  misc_RNA (1)...(19): siRNA sense strand
gacucacccuggaaaguaa

SEQ ID NO: 893420 - RNA, 19 nt, Homo sapiens
  misc_RNA (1)...(19): siRNA sense strand
gagauugaaguacagauga

SEQ ID NO: 893421 - RNA, 19 nt, Homo sapiens
  misc_RNA (1)...(19): siRNA sense strand
gacaugaauuuagaagaga

SEQ ID NO: 893422 - RNA, 19 nt, Homo sapiens
  misc_RNA (1)...(19): siRNA sense strand
aaacuuaaggcccaaagaa

SEQ ID NO: 893423 - RNA, 19 nt, Homo sapiens
  misc_RNA (1)...(19): siRNA sense strand
caacuaucaaagcaacuua

SEQ ID NO: 893424 - RNA, 19 nt, Homo sapiens
  misc_RNA (1)...(19): siRNA sense strand
caucaguauugacuccuaa

SEQ ID NO: 893425 - RNA, 19 nt, Homo sapiens
  misc_RNA (1)...(19): siRNA sense strand
cagaaaggaagacaauuau

SEQ ID NO: 893426 - RNA, 19 nt, Homo sapiens
  misc_RNA (1)...(19): siRNA sense strand
gcagccacuugcacaaugu

SEQ ID NO: 893427 - RNA, 19 nt, Homo sapiens
  misc_RNA (1)...(19): siRNA sense strand
gaugguggacuacauagga

SEQ ID NO: 893428 - RNA, 19 nt, Homo sapiens
  misc_RNA (1)...(19): siRNA sense strand
gaugagaaccgguauaucc

SEQ ID NO: 893429 - RNA, 19 nt, Homo sapiens
  misc_RNA (1)...(19): siRNA sense strand
caaagagauugaaguacag

SEQ ID NO: 893430 - RNA, 19 nt, Homo sapiens
  misc_RNA (1)...(19): siRNA sense strand
ugagaaagagauucacuau

SEQ ID NO: 893431 - RNA, 19 nt, Homo sapiens
  misc_RNA (1)...(19): siRNA sense strand
aacaacauccaaccacuua

SEQ ID NO: 893432 - RNA, 19 nt, Homo sapiens
  misc_RNA (1)...(19): siRNA sense strand
ggugaugguggacuacaua

SEQ ID NO: 893433 - RNA, 19 nt, Homo sapiens
  misc_RNA (1)...(19): siRNA sense strand
gucaucaagucuuuagcua

SEQ ID NO: 893434 - RNA, 19 nt, Homo sapiens
  misc_RNA (1)...(19): siRNA sense strand
ucaaggcccugagaaagau

SEQ ID NO: 893435 - RNA, 19 nt, Homo sapiens
  misc_RNA (1)...(19): siRNA sense strand
ggagaacagaguagaagau

SEQ ID NO: 893436 - RNA, 19 nt, Homo sapiens
  misc_RNA (1)...(19): siRNA sense strand
gaccagagaacuucauaag

SEQ ID NO: 893437 - RNA, 19 nt, Homo sapiens
  misc_RNA (1)...(19): siRNA sense strand
gcaccuggagaacagagua

SEQ ID NO: 893438 - RNA, 19 nt, Homo sapiens
  misc_RNA (1)...(19): siRNA sense strand
ccagaagaacuuagucaga

SEQ ID NO: 893439 - RNA, 19 nt, Homo sapiens
  misc_RNA (1)...(19): siRNA sense strand
gagaaaguuccaggaugua

SEQ ID NO: 893440 - RNA, 19 nt, Homo sapiens
  misc_RNA (1)...(19): siRNA sense strand
ccauccaggugauaaacaa

SEQ ID NO: 893441 - RNA, 19 nt, Homo sapiens
  misc_RNA (1)...(19): siRNA sense strand
aggacaagcuggccaagga

SEQ ID NO: 893442 - RNA, 19 nt, Homo sapiens
  misc_RNA (1)...(19): siRNA sense strand
cagagcauguggaaugauc

SEQ ID NO: 893443 - RNA, 19 nt, Homo sapiens
  misc_RNA (1)...(19): siRNA sense strand
ggcaagaucaugauacaca

SEQ ID NO: 893444 - RNA, 19 nt, Homo sapiens
  misc_RNA (1)...(19): siRNA sense strand
caggauguacucaagaauu

SEQ ID NO: 893445 - RNA, 19 nt, Homo sapiens
  misc_RNA (1)...(19): siRNA sense strand
gaucucaaagacaugaauu

SEQ ID NO: 893446 - RNA, 19 nt, Homo sapiens
  misc_RNA (1)...(19): siRNA sense strand
gaacgagugguggacugua

SEQ ID NO: 893447 - RNA, 19 nt, Homo sapiens
  misc_RNA (1)...(19): siRNA sense strand
uggaagcccuaaccaagga

SEQ ID NO: 893448 - RNA, 19 nt, Homo sapiens
  misc_RNA (1)...(19): siRNA sense strand
agacucacccuggaaagua

SEQ ID NO: 893449 - RNA, 19 nt, Homo sapiens
  misc_RNA (1)...(19): siRNA sense strand
caaggaguuugagacagaa

SEQ ID NO: 893450 - RNA, 19 nt, Homo sapiens
  misc_RNA (1)...(19): siRNA sense strand
agacagaaaggaagacaau

SEQ ID NO: 893451 - RNA, 19 nt, Homo sapiens
  misc_RNA (1)...(19): siRNA sense strand
ggaaauuugaaaccgaaga

SEQ ID NO: 893452 - RNA, 19 nt, Homo sapiens
  misc_RNA (1)...(19): siRNA sense strand
cagcaucccagaagaacuu

SEQ ID NO: 893453 - RNA, 19 nt, Homo sapiens
  misc_RNA (1)...(19): siRNA sense strand
guauauccguaaugacaag

SEQ ID NO: 893454 - RNA, 19 nt, Homo sapiens
  misc_RNA (1)...(19): siRNA sense strand
guagaagaucuguggagaa

SEQ ID NO: 893455 - RNA, 19 nt, Homo sapiens
  misc_RNA (1)...(19): siRNA sense strand
ggagcagaacuauauagau

SEQ ID NO: 893456 - RNA, 19 nt, Homo sapiens
  misc_RNA (1)...(19): siRNA sense strand
ggaagucaagaccagagaa

SEQ ID NO: 893457 - RNA, 19 nt, Homo sapiens
  misc_RNA (1)...(19): siRNA sense strand
gcccuuguccauacguaua

SEQ ID NO: 893458 - RNA, 19 nt, Homo sapiens
  misc_RNA (1)...(19): siRNA sense strand
ucaacccacucuuuauagu

SEQ ID NO: 893459 - RNA, 19 nt, Homo sapiens
  misc_RNA (1)...(19): siRNA sense strand
gugaaaagauccuuaaacu

SEQ ID NO: 893460 - RNA, 19 nt, Homo sapiens
  misc_RNA (1)...(19): siRNA sense strand
aacgagugguggacuguaa

SEQ ID NO: 893461 - RNA, 19 nt, Homo sapiens
  misc_RNA (1)...(19): siRNA sense strand
ggugauaaacaacauccaa

SEQ ID NO: 893462 - RNA, 19 nt, Homo sapiens
  misc_RNA (1)...(19): siRNA sense strand
gaaaagguacaacaaagug

SEQ ID NO: 893463 - RNA, 19 nt, Homo sapiens
  misc_RNA (1)...(19): siRNA sense strand
acacaacagugcucugaac

SEQ ID NO: 893464 - RNA, 19 nt, Homo sapiens
  misc_RNA (1)...(19): siRNA sense strand
gggcagcaucccagaagaa

SEQ ID NO: 893465 - RNA, 19 nt, Homo sapiens
  misc_RNA (1)...(19): siRNA sense strand
agauugaaguacagaugaa

SEQ ID NO: 893466 - RNA, 19 nt, Homo sapiens
  misc_RNA (1)...(19): siRNA sense strand
gagaaagagauucacuauc

SEQ ID NO: 893467 - RNA, 19 nt, Homo sapiens
  misc_RNA (1)...(19): siRNA sense strand
gaugagaagagcuccaaag

SEQ ID NO: 893468 - RNA, 19 nt, Homo sapiens
  misc_RNA (1)...(19): siRNA sense strand
gagaacagaguagaagauc

SEQ ID NO: 893469 - RNA, 19 nt, Homo sapiens
  misc_RNA (1)...(19): siRNA sense strand
ucagccaguucuugaagga

SEQ ID NO: 893470 - RNA, 19 nt, Homo sapiens
  misc_RNA (1)...(19): siRNA sense strand
gccgugagagugaagauga

SEQ ID NO: 893471 - RNA, 19 nt, Homo sapiens
  misc_RNA (1)...(19): siRNA sense strand
gaacuucauaaggacauug

SEQ ID NO: 893472 - RNA, 19 nt, Homo sapiens
  misc_RNA (1)...(19): siRNA sense strand
gauaaacaacauccaacca

SEQ ID NO: 893473 - RNA, 19 nt, Homo sapiens
  misc_RNA (1)...(19): siRNA sense strand
ucaucaguauugacuccua

SEQ ID NO: 893474 - RNA, 19 nt, Homo sapiens
  misc_RNA (1)...(19): siRNA sense strand
gcccugagaaagauuguug

SEQ ID NO: 893475 - RNA, 19 nt, Homo sapiens
  misc_RNA (1)...(19): siRNA sense strand
guaaugacaaggaauuggu

SEQ ID NO: 893476 - RNA, 19 nt, Homo sapiens
  misc_RNA (1)...(19): siRNA sense strand
aaggcaagaucaugauaca

SEQ ID NO: 893477 - RNA, 19 nt, Homo sapiens
  misc_RNA (1)...(19): siRNA sense strand
uccaggauguacucaagaa

SEQ ID NO: 893478 - RNA, 19 nt, Homo sapiens
  misc_RNA (1)...(19): siRNA sense strand
guuccaggauguacucaag

SEQ ID NO: 893479 - RNA, 19 nt, Homo sapiens
  misc_RNA (1)...(19): siRNA sense strand
aaacaacauccaaccacuu

SEQ ID NO: 893480 - RNA, 19 nt, Homo sapiens
  misc_RNA (1)...(19): siRNA sense strand
guacauagcuccugagguu

SEQ ID NO: 893481 - RNA, 19 nt, Homo sapiens
  misc_RNA (1)...(19): siRNA sense strand
gcagauaacucauaggaau

SEQ ID NO: 893482 - RNA, 19 nt, Homo sapiens
  misc_RNA (1)...(19): siRNA sense strand
caagaaaccuuuugcaaua

SEQ ID NO: 893483 - RNA, 19 nt, Homo sapiens
  misc_RNA (1)...(19): siRNA sense strand
gaucacauaugcuuuacuu

SEQ ID NO: 893484 - RNA, 19 nt, Homo sapiens
  misc_RNA (1)...(19): siRNA sense strand
agacaaggcuuuacaggaa

SEQ ID NO: 893485 - RNA, 19 nt, Homo sapiens
  misc_RNA (1)...(19): siRNA sense strand
caagagaaacuuaaggaua

SEQ ID NO: 893486 - RNA, 19 nt, Homo sapiens
  misc_RNA (1)...(19): siRNA sense strand
ggaucaaguuuacauggua

SEQ ID NO: 893487 - RNA, 19 nt, Homo sapiens
  misc_RNA (1)...(19): siRNA sense strand
gaaggacuuuauagacaaa

SEQ ID NO: 893488 - RNA, 19 nt, Homo sapiens
  misc_RNA (1)...(19): siRNA sense strand
gcgaaggacuuuauagaca

SEQ ID NO: 893489 - RNA, 19 nt, Homo sapiens
  misc_RNA (1)...(19): siRNA sense strand
gaugguugcugaugggauu

SEQ ID NO: 893490 - RNA, 19 nt, Homo sapiens
  misc_RNA (1)...(19): siRNA sense strand
gaucugcacagucuucuaa

SEQ ID NO: 893491 - RNA, 19 nt, Homo sapiens
  misc_RNA (1)...(19): siRNA sense strand
gcagaagaccaccaagaaa

SEQ ID NO: 893492 - RNA, 19 nt, Homo sapiens
  misc_RNA (1)...(19): siRNA sense strand
aagagaaacuuaaggauag

SEQ ID NO: 893493 - RNA, 19 nt, Homo sapiens
  misc_RNA (1)...(19): siRNA sense strand
gcucuuugaucgacucauu

SEQ ID NO: 893494 - RNA, 19 nt, Homo sapiens
  misc_RNA (1)...(19): siRNA sense strand
agacugaggaucaaguuua

SEQ ID NO: 893495 - RNA, 19 nt, Homo sapiens
  misc_RNA (1)...(19): siRNA sense strand
cgaaggacuuuauagacaa

SEQ ID NO: 893496 - RNA, 19 nt, Homo sapiens
  misc_RNA (1)...(19): siRNA sense strand
gcacgaaggucaaaaccaa

SEQ ID NO: 893497 - RNA, 19 nt, Homo sapiens
  misc_RNA (1)...(19): siRNA sense strand
gaaaaccucuuauacuauc

SEQ ID NO: 893498 - RNA, 19 nt, Homo sapiens
  misc_RNA (1)...(19): siRNA sense strand
ucucacaaauccaggcaua

SEQ ID NO: 893499 - RNA, 19 nt, Homo sapiens
  misc_RNA (1)...(19): siRNA sense strand
gguuagccaucguuacauu

SEQ ID NO: 893500 - RNA, 19 nt, Homo sapiens
  misc_RNA (1)...(19): siRNA sense strand
gcucagggauccuuuacag

SEQ ID NO: 893501 - RNA, 19 nt, Homo sapiens
  misc_RNA (1)...(19): siRNA sense strand
gagcagaagaccaccaaga

SEQ ID NO: 893502 - RNA, 19 nt, Homo sapiens
  misc_RNA (1)...(19): siRNA sense strand
gaccaucccugggugauca

SEQ ID NO: 893503 - RNA, 19 nt, Homo sapiens
  misc_RNA (1)...(19): siRNA sense strand
ggugaagagucgaaaauuu

SEQ ID NO: 893504 - RNA, 19 nt, Homo sapiens
  misc_RNA (1)...(19): siRNA sense strand
cugaugggauuagguauuu

SEQ ID NO: 893505 - RNA, 19 nt, Homo sapiens
  misc_RNA (1)...(19): siRNA sense strand
acaggaagauucugaaagg

SEQ ID NO: 893506 - RNA, 19 nt, Homo sapiens
  misc_RNA (1)...(19): siRNA sense strand
ucacauaugcuuuacuuag

SEQ ID NO: 893507 - RNA, 19 nt, Homo sapiens
  misc_RNA (1)...(19): siRNA sense strand
gcugcagggucuuccauga

SEQ ID NO: 893508 - RNA, 19 nt, Homo sapiens
  misc_RNA (1)...(19): siRNA sense strand
cugaaaaccucuuauacua

SEQ ID NO: 893509 - RNA, 19 nt, Homo sapiens
  misc_RNA (1)...(19): siRNA sense strand
gagaagcgugcgugucuga

SEQ ID NO: 893510 - RNA, 19 nt, Homo sapiens
  misc_RNA (1)...(19): siRNA sense strand
aggcauauguggagcaaga

SEQ ID NO: 893511 - RNA, 19 nt, Homo sapiens
  misc_RNA (1)...(19): siRNA sense strand
gacaucaaagcucuuauug

SEQ ID NO: 893512 - RNA, 19 nt, Homo sapiens
  misc_RNA (1)...(19): siRNA sense strand
ugacaucaaagcucuuauu

SEQ ID NO: 893513 - RNA, 19 nt, Homo sapiens
  misc_RNA (1)...(19): siRNA sense strand
gcgcugcagauaacucaua

SEQ ID NO: 893514 - RNA, 19 nt, Homo sapiens
  misc_RNA (1)...(19): siRNA sense strand
aguggugacuggacaauga

SEQ ID NO: 893515 - RNA, 19 nt, Homo sapiens
  misc_RNA (1)...(19): siRNA sense strand
ggccaagcauuucccacuu

SEQ ID NO: 893516 - RNA, 19 nt, Homo sapiens
  misc_RNA (1)...(19): siRNA sense strand
ggacuuuauagacaaacua

SEQ ID NO: 893517 - RNA, 19 nt, Homo sapiens
  misc_RNA (1)...(19): siRNA sense strand
ugccagguaugacaucaaa

SEQ ID NO: 893518 - RNA, 19 nt, Homo sapiens
  misc_RNA (1)...(19): siRNA sense strand
gcaagagaaacuuaaggau

SEQ ID NO: 893519 - RNA, 19 nt, Homo sapiens
  misc_RNA (1)...(19): siRNA sense strand
ucacaaauccaggcauaug

SEQ ID NO: 893520 - RNA, 19 nt, Homo sapiens
  misc_RNA (1)...(19): siRNA sense strand
gcugaugggauuagguauu

SEQ ID NO: 893521 - RNA, 19 nt, Homo sapiens
  misc_RNA (1)...(19): siRNA sense strand
cuaagucacauuauucuca

SEQ ID NO: 893522 - RNA, 19 nt, Homo sapiens
  misc_RNA (1)...(19): siRNA sense strand
gauaacucauaggaaucua

SEQ ID NO: 893523 - RNA, 19 nt, Homo sapiens
  misc_RNA (1)...(19): siRNA sense strand
ccacuuggcgaaggacuuu

SEQ ID NO: 893524 - RNA, 19 nt, Homo sapiens
  misc_RNA (1)...(19): siRNA sense strand
ccagugcaguggacaugug

SEQ ID NO: 893525 - RNA, 19 nt, Homo sapiens
  misc_RNA (1)...(19): siRNA sense strand
gcaauaaaagugauggaaa

SEQ ID NO: 893526 - RNA, 19 nt, Homo sapiens
  misc_RNA (1)...(19): siRNA sense strand
gagaaacuuaaggauagua

SEQ ID NO: 893527 - RNA, 19 nt, Homo sapiens
  misc_RNA (1)...(19): siRNA sense strand
gacugaggaucaaguuuac

SEQ ID NO: 893528 - RNA, 19 nt, Homo sapiens
  misc_RNA (1)...(19): siRNA sense strand
gaaacuuaaggauaguaga

SEQ ID NO: 893529 - RNA, 19 nt, Homo sapiens
  misc_RNA (1)...(19): siRNA sense strand
gugaagagucgaaaauuuu

SEQ ID NO: 893530 - RNA, 19 nt, Homo sapiens
  misc_RNA (1)...(19): siRNA sense strand
guggagcaagagaaacuua

SEQ ID NO: 893531 - RNA, 19 nt, Homo sapiens
  misc_RNA (1)...(19): siRNA sense strand
uaugacaucaaagcucuua

SEQ ID NO: 893532 - RNA, 19 nt, Homo sapiens
  misc_RNA (1)...(19): siRNA sense strand
gagacugaggaucaaguuu

SEQ ID NO: 893533 - RNA, 19 nt, Homo sapiens
  misc_RNA (1)...(19): siRNA sense strand
agucuucuaagucacauua

SEQ ID NO: 893534 - RNA, 19 nt, Homo sapiens
  misc_RNA (1)...(19): siRNA sense strand
gaugaugaaagccagacaa

SEQ ID NO: 893535 - RNA, 19 nt, Homo sapiens
  misc_RNA (1)...(19): siRNA sense strand
cagaagaccaccaagaaac

SEQ ID NO: 893536 - RNA, 19 nt, Homo sapiens
  misc_RNA (1)...(19): siRNA sense strand
guggacaugugggcucuug

SEQ ID NO: 893537 - RNA, 19 nt, Homo sapiens
  misc_RNA (1)...(19): siRNA sense strand
ggacaugugggcucuuggu

SEQ ID NO: 893538 - RNA, 19 nt, Homo sapiens
  misc_RNA (1)...(19): siRNA sense strand
acaaggcuuuacaggaaga

SEQ ID NO: 893539 - RNA, 19 nt, Homo sapiens
  misc_RNA (1)...(19): siRNA sense strand
gaagauucugaaaggcaaa

SEQ ID NO: 893540 - RNA, 19 nt, Homo sapiens
  misc_RNA (1)...(19): siRNA sense strand
uagagaagcgugcgugucu

SEQ ID NO: 893541 - RNA, 19 nt, Homo sapiens
  misc_RNA (1)...(19): siRNA sense strand
ggagcaagagaaacuuaag

SEQ ID NO: 893542 - RNA, 19 nt, Homo sapiens
  misc_RNA (1)...(19): siRNA sense strand
caauaaaagugauggaaac

SEQ ID NO: 893543 - RNA, 19 nt, Homo sapiens
  misc_RNA (1)...(19): siRNA sense strand
cacauuauucucacaaauc

SEQ ID NO: 893544 - RNA, 19 nt, Homo sapiens
  misc_RNA (1)...(19): siRNA sense strand
gucacauuauucucacaaa

SEQ ID NO: 893545 - RNA, 19 nt, Homo sapiens
  misc_RNA (1)...(19): siRNA sense strand
gcggauuccugccuuuuga

SEQ ID NO: 893546 - RNA, 19 nt, Homo sapiens
  misc_RNA (1)...(19): siRNA sense strand
cacauaugcuuuacuuagc

SEQ ID NO: 893547 - RNA, 19 nt, Homo sapiens
  misc_RNA (1)...(19): siRNA sense strand
agagagggaagguagagaa

SEQ ID NO: 893548 - RNA, 19 nt, Homo sapiens
  misc_RNA (1)...(19): siRNA sense strand
gcauauguggagcaagaga

SEQ ID NO: 893549 - RNA, 19 nt, Homo sapiens
  misc_RNA (1)...(19): siRNA sense strand
ccaggcauauguggagcaa

SEQ ID NO: 893550 - RNA, 19 nt, Homo sapiens
  misc_RNA (1)...(19): siRNA sense strand
uggcgaaggacuuuauaga

SEQ ID NO: 893551 - RNA, 19 nt, Homo sapiens
  misc_RNA (1)...(19): siRNA sense strand
gcaggguugucaggguaga

SEQ ID NO: 893552 - RNA, 19 nt, Homo sapiens
  misc_RNA (1)...(19): siRNA sense strand
uuacaggaagauucugaaa

SEQ ID NO: 893553 - RNA, 19 nt, Homo sapiens
  misc_RNA (1)...(19): siRNA sense strand
ccaagaaaccuuuugcaau

SEQ ID NO: 893554 - RNA, 19 nt, Homo sapiens
  misc_RNA (1)...(19): siRNA sense strand
auaguagaaucgccacugu

SEQ ID NO: 893555 - RNA, 19 nt, Homo sapiens
  misc_RNA (1)...(19): siRNA sense strand
gagcaagagaaacuuaagg

SEQ ID NO: 893556 - RNA, 19 nt, Homo sapiens
  misc_RNA (1)...(19): siRNA sense strand
ugcacagucuucuaaguca

SEQ ID NO: 893557 - RNA, 19 nt, Homo sapiens
  misc_RNA (1)...(19): siRNA sense strand
gauucugaaaggcaaauau

SEQ ID NO: 893558 - RNA, 19 nt, Homo sapiens
  misc_RNA (1)...(19): siRNA sense strand
cuucuaagucacauuauuc

SEQ ID NO: 893559 - RNA, 19 nt, Homo sapiens
  misc_RNA (1)...(19): siRNA sense strand
agagggccauaucccgaaa

SEQ ID NO: 893560 - RNA, 19 nt, Homo sapiens
  misc_RNA (1)...(19): siRNA sense strand
agcagaagaccaccaagaa

SEQ ID NO: 893561 - RNA, 19 nt, Homo sapiens
  misc_RNA (1)...(19): siRNA sense strand
gacaaugaagacacucugu

SEQ ID NO: 893562 - RNA, 19 nt, Homo sapiens
  misc_RNA (1)...(19): siRNA sense strand
uggagaucuuugagacuga

SEQ ID NO: 893563 - RNA, 19 nt, Homo sapiens
  misc_RNA (1)...(19): siRNA sense strand
cacaaauccaggcauaugu

SEQ ID NO: 893564 - RNA, 19 nt, Homo sapiens
  misc_RNA (1)...(19): siRNA sense strand
gagagggaagguagagaag

SEQ ID NO: 893565 - RNA, 19 nt, Homo sapiens
  misc_RNA (1)...(19): siRNA sense strand
cugcagauaacucauagga

SEQ ID NO: 893566 - RNA, 19 nt, Homo sapiens
  misc_RNA (1)...(19): siRNA sense strand
ucaggauccuccagauggu

SEQ ID NO: 893567 - RNA, 19 nt, Homo sapiens
  misc_RNA (1)...(19): siRNA sense strand
acaaauccaggcauaugug

SEQ ID NO: 893568 - RNA, 19 nt, Homo sapiens
  misc_RNA (1)...(19): siRNA sense strand
auacuaucauccaggugaa

SEQ ID NO: 893569 - RNA, 19 nt, Homo sapiens
  misc_RNA (1)...(19): siRNA sense strand
gcaagaagcuggagaagua

SEQ ID NO: 893570 - RNA, 19 nt, Homo sapiens
  misc_RNA (1)...(19): siRNA sense strand
ggacggaaaucuucgagua

SEQ ID NO: 893571 - RNA, 19 nt, Homo sapiens
  misc_RNA (1)...(19): siRNA sense strand
gcauggagguuauucuuaa

SEQ ID NO: 893572 - RNA, 19 nt, Homo sapiens
  misc_RNA (1)...(19): siRNA sense strand
ggagagagguuucaccaau

SEQ ID NO: 893573 - RNA, 19 nt, Homo sapiens
  misc_RNA (1)...(19): siRNA sense strand
gcuaugagcucagucagua

SEQ ID NO: 893574 - RNA, 19 nt, Homo sapiens
  misc_RNA (1)...(19): siRNA sense strand
ucacuaggcugcucuacua

SEQ ID NO: 893575 - RNA, 19 nt, Homo sapiens
  misc_RNA (1)...(19): siRNA sense strand
guacauaagguggauauua

SEQ ID NO: 893576 - RNA, 19 nt, Homo sapiens
  misc_RNA (1)...(19): siRNA sense strand
gaucgaagcccaccaagaa

SEQ ID NO: 893577 - RNA, 19 nt, Homo sapiens
  misc_RNA (1)...(19): siRNA sense strand
ggaauaugcuuauggaagu

SEQ ID NO: 893578 - RNA, 19 nt, Homo sapiens
  misc_RNA (1)...(19): siRNA sense strand
ggaggaauaugcuuaugga

SEQ ID NO: 893579 - RNA, 19 nt, Homo sapiens
  misc_RNA (1)...(19): siRNA sense strand
ugucuggaguugacuauua

SEQ ID NO: 893580 - RNA, 19 nt, Homo sapiens
  misc_RNA (1)...(19): siRNA sense strand
gcaaucaguuguauucaag

SEQ ID NO: 893581 - RNA, 19 nt, Homo sapiens
  misc_RNA (1)...(19): siRNA sense strand
gaggucagcuggugcaugu

SEQ ID NO: 893582 - RNA, 19 nt, Homo sapiens
  misc_RNA (1)...(19): siRNA sense strand
gccaagaggucauuuccaa

SEQ ID NO: 893583 - RNA, 19 nt, Homo sapiens
  misc_RNA (1)...(19): siRNA sense strand
ugacaucgcugagcugcua

SEQ ID NO: 893584 - RNA, 19 nt, Homo sapiens
  misc_RNA (1)...(19): siRNA sense strand
ggaaggagcauacaaagag

SEQ ID NO: 893585 - RNA, 19 nt, Homo sapiens
  misc_RNA (1)...(19): siRNA sense strand
ccaaagcacccaugaaguu

SEQ ID NO: 893586 - RNA, 19 nt, Homo sapiens
  misc_RNA (1)...(19): siRNA sense strand
gagagagguuucaccaaug

SEQ ID NO: 893587 - RNA, 19 nt, Homo sapiens
  misc_RNA (1)...(19): siRNA sense strand
aagaggagaugagaaguuu

SEQ ID NO: 893588 - RNA, 19 nt, Homo sapiens
  misc_RNA (1)...(19): siRNA sense strand
ccuacucgcucagauauuu

SEQ ID NO: 893589 - RNA, 19 nt, Homo sapiens
  misc_RNA (1)...(19): siRNA sense strand
cagagaguguuuccuuuga

SEQ ID NO: 893590 - RNA, 19 nt, Homo sapiens
  misc_RNA (1)...(19): siRNA sense strand
gcuagaccacgaaguauuu

SEQ ID NO: 893591 - RNA, 19 nt, Homo sapiens
  misc_RNA (1)...(19): siRNA sense strand
ggaacagucugggaggaaa

SEQ ID NO: 893592 - RNA, 19 nt, Homo sapiens
  misc_RNA (1)...(19): siRNA sense strand
gagacccacuuccaaucua

SEQ ID NO: 893593 - RNA, 19 nt, Homo sapiens
  misc_RNA (1)...(19): siRNA sense strand
gaaggugguuaucgcaauc

SEQ ID NO: 893594 - RNA, 19 nt, Homo sapiens
  misc_RNA (1)...(19): siRNA sense strand
aaagguagcaggagacauu

SEQ ID NO: 893595 - RNA, 19 nt, Homo sapiens
  misc_RNA (1)...(19): siRNA sense strand
ggaggcagcuggagcaaaa

SEQ ID NO: 893596 - RNA, 19 nt, Homo sapiens
  misc_RNA (1)...(19): siRNA sense strand
gggaagauguacauaaggu

SEQ ID NO: 893597 - RNA, 19 nt, Homo sapiens
  misc_RNA (1)...(19): siRNA sense strand
gaauucauaucagagcuau

SEQ ID NO: 893598 - RNA, 19 nt, Homo sapiens
  misc_RNA (1)...(19): siRNA sense strand
gcaacggaguccuuauauc

SEQ ID NO: 893599 - RNA, 19 nt, Homo sapiens
  misc_RNA (1)...(19): siRNA sense strand
caacggaguccuuauaucu

SEQ ID NO: 893600 - RNA, 19 nt, Homo sapiens
  misc_RNA (1)...(19): siRNA sense strand
ggagacaccugcgcagauc

SEQ ID NO: 893601 - RNA, 19 nt, Homo sapiens
  misc_RNA (1)...(19): siRNA sense strand
ccacagcacccucaaagga

SEQ ID NO: 893602 - RNA, 19 nt, Homo sapiens
  misc_RNA (1)...(19): siRNA sense strand
gcagucacccugugcuauu

SEQ ID NO: 893603 - RNA, 19 nt, Homo sapiens
  misc_RNA (1)...(19): siRNA sense strand
cacaguggcugcaggaaga

SEQ ID NO: 893604 - RNA, 19 nt, Homo sapiens
  misc_RNA (1)...(19): siRNA sense strand
gaauaugcuuauggaaguu

SEQ ID NO: 893605 - RNA, 19 nt, Homo sapiens
  misc_RNA (1)...(19): siRNA sense strand
ccacaaugagggaggaaua

SEQ ID NO: 893606 - RNA, 19 nt, Homo sapiens
  misc_RNA (1)...(19): siRNA sense strand
guaggaacccuuguaaaga

SEQ ID NO: 893607 - RNA, 19 nt, Homo sapiens
  misc_RNA (1)...(19): siRNA sense strand
ggaaguuauuacuaucaug

SEQ ID NO: 893608 - RNA, 19 nt, Homo sapiens
  misc_RNA (1)...(19): siRNA sense strand
cgaaguauuucugagaguu

SEQ ID NO: 893609 - RNA, 19 nt, Homo sapiens
  misc_RNA (1)...(19): siRNA sense strand
gcugcuagaccacgaagua

SEQ ID NO: 893610 - RNA, 19 nt, Homo sapiens
  misc_RNA (1)...(19): siRNA sense strand
cagccacagucaagaguuu

SEQ ID NO: 893611 - RNA, 19 nt, Homo sapiens
  misc_RNA (1)...(19): siRNA sense strand
gcucacuucugcuaucuca

SEQ ID NO: 893612 - RNA, 19 nt, Homo sapiens
  misc_RNA (1)...(19): siRNA sense strand
gcucuugguucuccuuugu

SEQ ID NO: 893613 - RNA, 19 nt, Homo sapiens
  misc_RNA (1)...(19): siRNA sense strand
gaagauuaccgagagcaaa

SEQ ID NO: 893614 - RNA, 19 nt, Homo sapiens
  misc_RNA (1)...(19): siRNA sense strand
gaaagacgcaguggagaca

SEQ ID NO: 893615 - RNA, 19 nt, Homo sapiens
  misc_RNA (1)...(19): siRNA sense strand
caagaggagaugagaaguu

SEQ ID NO: 893616 - RNA, 19 nt, Homo sapiens
  misc_RNA (1)...(19): siRNA sense strand
ccaaggaggaugagaagga

SEQ ID NO: 893617 - RNA, 19 nt, Homo sapiens
  misc_RNA (1)...(19): siRNA sense strand
ucaucaagcuagcagagaa

SEQ ID NO: 893618 - RNA, 19 nt, Homo sapiens
  misc_RNA (1)...(19): siRNA sense strand
cagucacccugugcuauua

SEQ ID NO: 893619 - RNA, 19 nt, Homo sapiens
  misc_RNA (1)...(19): siRNA sense strand
uagggaagauguacauaag

SEQ ID NO: 893620 - RNA, 19 nt, Homo sapiens
  misc_RNA (1)...(19): siRNA sense strand
gcacgcuggcgcucaauga

SEQ ID NO: 893621 - RNA, 19 nt, Homo sapiens
  misc_RNA (1)...(19): siRNA sense strand
gaccagagaguguuuccuu

SEQ ID NO: 893622 - RNA, 19 nt, Homo sapiens
  misc_RNA (1)...(19): siRNA sense strand
cgaaggugguuaucgcaau

SEQ ID NO: 893623 - RNA, 19 nt, Homo sapiens
  misc_RNA (1)...(19): siRNA sense strand
ccgaaauacugcccagaga

SEQ ID NO: 893624 - RNA, 19 nt, Homo sapiens
  misc_RNA (1)...(19): siRNA sense strand
ucgcugagcugcuaaugca

SEQ ID NO: 893625 - RNA, 19 nt, Homo sapiens
  misc_RNA (1)...(19): siRNA sense strand
aaaaguaccuugaugaaca

SEQ ID NO: 893626 - RNA, 19 nt, Homo sapiens
  misc_RNA (1)...(19): siRNA sense strand
ugagggaggaauaugcuua

SEQ ID NO: 893627 - RNA, 19 nt, Homo sapiens
  misc_RNA (1)...(19): siRNA sense strand
gagcaaaaguaccuugaug

SEQ ID NO: 893628 - RNA, 19 nt, Homo sapiens
  misc_RNA (1)...(19): siRNA sense strand
ccacgaaguauuucugaga

SEQ ID NO: 893629 - RNA, 19 nt, Homo sapiens
  misc_RNA (1)...(19): siRNA sense strand
uggagguuauucuuaauga

SEQ ID NO: 893630 - RNA, 19 nt, Homo sapiens
  misc_RNA (1)...(19): siRNA sense strand
agacccacuuccaaucuaa

SEQ ID NO: 893631 - RNA, 19 nt, Homo sapiens
  misc_RNA (1)...(19): siRNA sense strand
gcucaggguuuggcugguu

SEQ ID NO: 893632 - RNA, 19 nt, Homo sapiens
  misc_RNA (1)...(19): siRNA sense strand
gcacaauggagagagguuu

SEQ ID NO: 893633 - RNA, 19 nt, Homo sapiens
  misc_RNA (1)...(19): siRNA sense strand
ggagguuauucuuaaugau

SEQ ID NO: 893634 - RNA, 19 nt, Homo sapiens
  misc_RNA (1)...(19): siRNA sense strand
ugucaaggcuacucugaag

SEQ ID NO: 893635 - RNA, 19 nt, Homo sapiens
  misc_RNA (1)...(19): siRNA sense strand
ccagagaguguuuccuuug

SEQ ID NO: 893636 - RNA, 19 nt, Homo sapiens
  misc_RNA (1)...(19): siRNA sense strand
gggaaggagcauacaaaga

SEQ ID NO: 893637 - RNA, 19 nt, Homo sapiens
  misc_RNA (1)...(19): siRNA sense strand
aagcacccaugaaguucua

SEQ ID NO: 893638 - RNA, 19 nt, Homo sapiens
  misc_RNA (1)...(19): siRNA sense strand
gaaguauuucugagaguuc

SEQ ID NO: 893639 - RNA, 19 nt, Homo sapiens
  misc_RNA (1)...(19): siRNA sense strand
ccaaaccacagacaccauu

SEQ ID NO: 893640 - RNA, 19 nt, Homo sapiens
  misc_RNA (1)...(19): siRNA sense strand
cacagugucucaagaaacu

SEQ ID NO: 893641 - RNA, 19 nt, Homo sapiens
  misc_RNA (1)...(19): siRNA sense strand
ggaaaucuucgaguacugu

SEQ ID NO: 893642 - RNA, 19 nt, Homo sapiens
  misc_RNA (1)...(19): siRNA sense strand
ccagaggacggaaaucuuc

SEQ ID NO: 893643 - RNA, 19 nt, Homo sapiens
  misc_RNA (1)...(19): siRNA sense strand
gcaaaaguaccuugaugaa

SEQ ID NO: 893644 - RNA, 19 nt, Homo sapiens
  misc_RNA (1)...(19): siRNA sense strand
ggagaugggaaggagcaua

SEQ ID NO: 893645 - RNA, 19 nt, Homo sapiens
  misc_RNA (1)...(19): siRNA sense strand
gcagaucguggagaaauuc

SEQ ID NO: 893646 - RNA, 19 nt, Homo sapiens
  misc_RNA (1)...(19): siRNA sense strand
gaagagcaagaggagauga

SEQ ID NO: 893647 - RNA, 19 nt, Homo sapiens
  misc_RNA (1)...(19): siRNA sense strand
uaggaacccuuguaaagac

SEQ ID NO: 893648 - RNA, 19 nt, Homo sapiens
  misc_RNA (1)...(19): siRNA sense strand
uuagggaagauguacauaa

SEQ ID NO: 893649 - RNA, 19 nt, Homo sapiens
  misc_RNA (1)...(19): siRNA sense strand
gaacagucugggaggaaau

SEQ ID NO: 893650 - RNA, 19 nt, Homo sapiens
  misc_RNA (1)...(19): siRNA sense strand
cgcaaucaguuguauucaa

SEQ ID NO: 893651 - RNA, 19 nt, Homo sapiens
  misc_RNA (1)...(19): siRNA sense strand
cauccuacucgcucagaua

SEQ ID NO: 893652 - RNA, 19 nt, Homo sapiens
  misc_RNA (1)...(19): siRNA sense strand
ugucccaggcuuugcauua

SEQ ID NO: 893653 - RNA, 19 nt, Homo sapiens
  misc_RNA (1)...(19): siRNA sense strand
gcacagcauggagguuauu

SEQ ID NO: 893654 - RNA, 19 nt, Homo sapiens
  misc_RNA (1)...(19): siRNA sense strand
gaugucaaggcuacucuga

SEQ ID NO: 893655 - RNA, 19 nt, Homo sapiens
  misc_RNA (1)...(19): siRNA sense strand
cagauuggcuagcgcaacu

SEQ ID NO: 893656 - RNA, 19 nt, Homo sapiens
  misc_RNA (1)...(19): siRNA sense strand
gcauuacugcgaagccauu

SEQ ID NO: 893657 - RNA, 19 nt, Homo sapiens
  misc_RNA (1)...(19): siRNA sense strand
gcgcagaucguggagaaau

SEQ ID NO: 893658 - RNA, 19 nt, Homo sapiens
  misc_RNA (1)...(19): siRNA sense strand
ggauccagaccgaggguuu

SEQ ID NO: 893659 - RNA, 19 nt, Homo sapiens
  misc_RNA (1)...(19): siRNA sense strand
aagcagcccuuguugaacu

SEQ ID NO: 893660 - RNA, 19 nt, Homo sapiens
  misc_RNA (1)...(19): siRNA sense strand
gggcuguuccucuuuacaa

SEQ ID NO: 893661 - RNA, 19 nt, Homo sapiens
  misc_RNA (1)...(19): siRNA sense strand
caacccugguguucuucuu

SEQ ID NO: 893662 - RNA, 19 nt, Homo sapiens
  misc_RNA (1)...(19): siRNA sense strand
gaccacgaaguauuucuga

SEQ ID NO: 893663 - RNA, 19 nt, Homo sapiens
  misc_RNA (1)...(19): siRNA sense strand
caagaggucauuuccaaac

SEQ ID NO: 893664 - RNA, 19 nt, Homo sapiens
  misc_RNA (1)...(19): siRNA sense strand
aggaaaugcugcagacaca

SEQ ID NO: 893665 - RNA, 19 nt, Homo sapiens
  misc_RNA (1)...(19): siRNA sense strand
cagaggaacaacaacagaa

SEQ ID NO: 893666 - RNA, 19 nt, Homo sapiens
  misc_RNA (1)...(19): siRNA sense strand
ugaaauuugcaacaacuga

SEQ ID NO: 893667 - RNA, 19 nt, Homo sapiens
  misc_RNA (1)...(19): siRNA sense strand
ucacuucugcuaucucaug

SEQ ID NO: 893668 - RNA, 19 nt, Homo sapiens
  misc_RNA (1)...(19): siRNA sense strand
gagcaagaggagaugagaa

SEQ ID NO: 893669 - RNA, 19 nt, Homo sapiens
  misc_RNA (1)...(19): siRNA sense strand
ggacaccgauuauggauug

SEQ ID NO: 893670 - RNA, 19 nt, Homo sapiens
  misc_RNA (1)...(19): siRNA sense strand
gagaaugcauccauccuuu

SEQ ID NO: 893671 - RNA, 19 nt, Homo sapiens
  misc_RNA (1)...(19): siRNA sense strand
gcaggaaggacaccgauua

SEQ ID NO: 893672 - RNA, 19 nt, Homo sapiens
  misc_RNA (1)...(19): siRNA sense strand
ccagaaguuuggcaaggua

SEQ ID NO: 893673 - RNA, 19 nt, Homo sapiens
  misc_RNA (1)...(19): siRNA sense strand
cagcagcgccuguuuauuc

SEQ ID NO: 893674 - RNA, 19 nt, Homo sapiens
  misc_RNA (1)...(19): siRNA sense strand
gaaggacaccgauuaugga

SEQ ID NO: 893675 - RNA, 19 nt, Homo sapiens
  misc_RNA (1)...(19): siRNA sense strand
ggaaggacaccgauuaugg

SEQ ID NO: 893676 - RNA, 19 nt, Homo sapiens
  misc_RNA (1)...(19): siRNA sense strand
ggacuacuccauauucuag

SEQ ID NO: 893677 - RNA, 19 nt, Homo sapiens
  misc_RNA (1)...(19): siRNA sense strand
uaaaagccauugaagcaaa

SEQ ID NO: 893678 - RNA, 19 nt, Homo sapiens
  misc_RNA (1)...(19): siRNA sense strand
gaagcaaaacugaaaauga

SEQ ID NO: 893679 - RNA, 19 nt, Homo sapiens
  misc_RNA (1)...(19): siRNA sense strand
gaaugcauccauccuuuca

SEQ ID NO: 893680 - RNA, 19 nt, Homo sapiens
  misc_RNA (1)...(19): siRNA sense strand
ccacaagucaggugcuuug

SEQ ID NO: 893681 - RNA, 19 nt, Homo sapiens
  misc_RNA (1)...(19): siRNA sense strand
ucaagcuccuccagaaguu

SEQ ID NO: 893682 - RNA, 19 nt, Homo sapiens
  misc_RNA (1)...(19): siRNA sense strand
ggagaaugcauccauccuu

SEQ ID NO: 893683 - RNA, 19 nt, Homo sapiens
  misc_RNA (1)...(19): siRNA sense strand
gggcacaugcucaaguaaa

SEQ ID NO: 893684 - RNA, 19 nt, Homo sapiens
  misc_RNA (1)...(19): siRNA sense strand
gcaagguaaagcaguuuga

SEQ ID NO: 893685 - RNA, 19 nt, Homo sapiens
  misc_RNA (1)...(19): siRNA sense strand
gcaguuugacuuccucuuc

SEQ ID NO: 893686 - RNA, 19 nt, Homo sapiens
  misc_RNA (1)...(19): siRNA sense strand
caaguaaagagauaugauc

SEQ ID NO: 893687 - RNA, 19 nt, Homo sapiens
  misc_RNA (1)...(19): siRNA sense strand
cagcgccuguuuauuccua

SEQ ID NO: 893688 - RNA, 19 nt, Homo sapiens
  misc_RNA (1)...(19): siRNA sense strand
ccuacucagucuaaccuaa

SEQ ID NO: 893689 - RNA, 19 nt, Homo sapiens
  misc_RNA (1)...(19): siRNA sense strand
gauaaaagccauugaagca

SEQ ID NO: 893690 - RNA, 19 nt, Homo sapiens
  misc_RNA (1)...(19): siRNA sense strand
gguaaagcaguuugacuuc

SEQ ID NO: 893691 - RNA, 19 nt, Homo sapiens
  misc_RNA (1)...(19): siRNA sense strand
ugaaaaugauggcggaaaa

SEQ ID NO: 893692 - RNA, 19 nt, Homo sapiens
  misc_RNA (1)...(19): siRNA sense strand
gcacaugcucaaguaaaga

SEQ ID NO: 893693 - RNA, 19 nt, Homo sapiens
  misc_RNA (1)...(19): siRNA sense strand
ggcacaugcucaaguaaag

SEQ ID NO: 893694 - RNA, 19 nt, Homo sapiens
  misc_RNA (1)...(19): siRNA sense strand
aaaggacuacuccauauuc

SEQ ID NO: 893695 - RNA, 19 nt, Homo sapiens
  misc_RNA (1)...(19): siRNA sense strand
ccuguuuauuccuacuuua

SEQ ID NO: 893696 - RNA, 19 nt, Homo sapiens
  misc_RNA (1)...(19): siRNA sense strand
cgaggcuacuguuuuguua

SEQ ID NO: 893697 - RNA, 19 nt, Homo sapiens
  misc_RNA (1)...(19): siRNA sense strand
gccuguuuauuccuacuuu

SEQ ID NO: 893698 - RNA, 19 nt, Homo sapiens
  misc_RNA (1)...(19): siRNA sense strand
uaaagcaguuugacuuccu

SEQ ID NO: 893699 - RNA, 19 nt, Homo sapiens
  misc_RNA (1)...(19): siRNA sense strand
augcucaaguaaagagaua

SEQ ID NO: 893700 - RNA, 19 nt, Homo sapiens
  misc_RNA (1)...(19): siRNA sense strand
gccauccagugucucaaug

SEQ ID NO: 893701 - RNA, 19 nt, Homo sapiens
  misc_RNA (1)...(19): siRNA sense strand
gcucaaguaaagagauaug

SEQ ID NO: 893702 - RNA, 19 nt, Homo sapiens
  misc_RNA (1)...(19): siRNA sense strand
acuuuaagccaccagauaa

SEQ ID NO: 893703 - RNA, 19 nt, Homo sapiens
  misc_RNA (1)...(19): siRNA sense strand
caggaaggacaccgauuau

SEQ ID NO: 893704 - RNA, 19 nt, Homo sapiens
  misc_RNA (1)...(19): siRNA sense strand
gcagaaaccaaaacucuuc

SEQ ID NO: 893705 - RNA, 19 nt, Homo sapiens
  misc_RNA (1)...(19): siRNA sense strand
augcauccauccuuucaga

SEQ ID NO: 893706 - RNA, 19 nt, Homo sapiens
  misc_RNA (1)...(19): siRNA sense strand
caaccuggaccccaaaauu

SEQ ID NO: 893707 - RNA, 19 nt, Homo sapiens
  misc_RNA (1)...(19): siRNA sense strand
gcgaugggcacaugcucaa

SEQ ID NO: 893708 - RNA, 19 nt, Homo sapiens
  misc_RNA (1)...(19): siRNA sense strand
uacuuuaagccaccagaua

SEQ ID NO: 893709 - RNA, 19 nt, Homo sapiens
  misc_RNA (1)...(19): siRNA sense strand
uagaacagcauggaaaucu

SEQ ID NO: 893710 - RNA, 19 nt, Homo sapiens
  misc_RNA (1)...(19): siRNA sense strand
cgaauaccaccuccucaag

SEQ ID NO: 893711 - RNA, 19 nt, Homo sapiens
  misc_RNA (1)...(19): siRNA sense strand
caagccauccagugucuca

SEQ ID NO: 893712 - RNA, 19 nt, Homo sapiens
  misc_RNA (1)...(19): siRNA sense strand
gaaguuuggcaagguaaag

SEQ ID NO: 893713 - RNA, 19 nt, Homo sapiens
  misc_RNA (1)...(19): siRNA sense strand
ccgaauaccaccuccucaa

SEQ ID NO: 893714 - RNA, 19 nt, Homo sapiens
  misc_RNA (1)...(19): siRNA sense strand
gauuauggauuggcaaccu

SEQ ID NO: 893715 - RNA, 19 nt, Homo sapiens
  misc_RNA (1)...(19): siRNA sense strand
augggcacaugcucaagua

SEQ ID NO: 893716 - RNA, 19 nt, Homo sapiens
  misc_RNA (1)...(19): siRNA sense strand
gaugggcacaugcucaagu

SEQ ID NO: 893717 - RNA, 19 nt, Homo sapiens
  misc_RNA (1)...(19): siRNA sense strand
cagucuaaccuaaguguca

SEQ ID NO: 893718 - RNA, 19 nt, Homo sapiens
  misc_RNA (1)...(19): siRNA sense strand
ccucgaggcuacuguuuug

SEQ ID NO: 893719 - RNA, 19 nt, Homo sapiens
  misc_RNA (1)...(19): siRNA sense strand
acuacuccauauucuagaa

SEQ ID NO: 893720 - RNA, 19 nt, Homo sapiens
  misc_RNA (1)...(19): siRNA sense strand
uccucaagcuccuccagaa

SEQ ID NO: 893721 - RNA, 19 nt, Homo sapiens
  misc_RNA (1)...(19): siRNA sense strand
gugucucaauggcaaguug

SEQ ID NO: 893722 - RNA, 19 nt, Homo sapiens
  misc_RNA (1)...(19): siRNA sense strand
agagcaagccauccagugu

SEQ ID NO: 893723 - RNA, 19 nt, Homo sapiens
  misc_RNA (1)...(19): siRNA sense strand
gcaaagauaaaagccauug

SEQ ID NO: 893724 - RNA, 19 nt, Homo sapiens
  misc_RNA (1)...(19): siRNA sense strand
gcuaaaggcuuauccauau

SEQ ID NO: 893725 - RNA, 19 nt, Homo sapiens
  misc_RNA (1)...(19): siRNA sense strand
gcagaaagaucuauugaag

SEQ ID NO: 893726 - RNA, 19 nt, Homo sapiens
  misc_RNA (1)...(19): siRNA sense strand
gaagaaguguauuaccuuu

SEQ ID NO: 893727 - RNA, 19 nt, Homo sapiens
  misc_RNA (1)...(19): siRNA sense strand
aaagacaacucacauguaa

SEQ ID NO: 893728 - RNA, 19 nt, Homo sapiens
  misc_RNA (1)...(19): siRNA sense strand
gagaauccaucccauuaaa

SEQ ID NO: 893729 - RNA, 19 nt, Homo sapiens
  misc_RNA (1)...(19): siRNA sense strand
gaagaugaccagucuaauu

SEQ ID NO: 893730 - RNA, 19 nt, Homo sapiens
  misc_RNA (1)...(19): siRNA sense strand
ggaaaucauucgauccaaa

SEQ ID NO: 893731 - RNA, 19 nt, Homo sapiens
  misc_RNA (1)...(19): siRNA sense strand
gcuaauggcuuuaaugagu

SEQ ID NO: 893732 - RNA, 19 nt, Homo sapiens
  misc_RNA (1)...(19): siRNA sense strand
gaaguucggcaccuuauuu

SEQ ID NO: 893733 - RNA, 19 nt, Homo sapiens
  misc_RNA (1)...(19): siRNA sense strand
caucccaucuccucaaaua

SEQ ID NO: 893734 - RNA, 19 nt, Homo sapiens
  misc_RNA (1)...(19): siRNA sense strand
gaugaaauauccaagaauc

SEQ ID NO: 893735 - RNA, 19 nt, Homo sapiens
  misc_RNA (1)...(19): siRNA sense strand
uuucagagcuuggauauuu

SEQ ID NO: 893736 - RNA, 19 nt, Homo sapiens
  misc_RNA (1)...(19): siRNA sense strand
gaaagauguugguggagaa

SEQ ID NO: 893737 - RNA, 19 nt, Homo sapiens
  misc_RNA (1)...(19): siRNA sense strand
ucugagaugugcugauuua

SEQ ID NO: 893738 - RNA, 19 nt, Homo sapiens
  misc_RNA (1)...(19): siRNA sense strand
gagaaucuaucaaccuguu

SEQ ID NO: 893739 - RNA, 19 nt, Homo sapiens
  misc_RNA (1)...(19): siRNA sense strand
ggucguggcugaacauugu

SEQ ID NO: 893740 - RNA, 19 nt, Homo sapiens
  misc_RNA (1)...(19): siRNA sense strand
agacaacucacauguaaua

SEQ ID NO: 893741 - RNA, 19 nt, Homo sapiens
  misc_RNA (1)...(19): siRNA sense strand
gagagaaggauacagagua

SEQ ID NO: 893742 - RNA, 19 nt, Homo sapiens
  misc_RNA (1)...(19): siRNA sense strand
gggaaagcaugaacgacua

SEQ ID NO: 893743 - RNA, 19 nt, Homo sapiens
  misc_RNA (1)...(19): siRNA sense strand
aaacagcaauaaugaguug

SEQ ID NO: 893744 - RNA, 19 nt, Homo sapiens
  misc_RNA (1)...(19): siRNA sense strand
gauaaagacacuccaauuc

SEQ ID NO: 893745 - RNA, 19 nt, Homo sapiens
  misc_RNA (1)...(19): siRNA sense strand
uaccagaaauugacauuga

SEQ ID NO: 893746 - RNA, 19 nt, Homo sapiens
  misc_RNA (1)...(19): siRNA sense strand
gagaugugcugauuuaacu

SEQ ID NO: 893747 - RNA, 19 nt, Homo sapiens
  misc_RNA (1)...(19): siRNA sense strand
ugggauaccuuacuacuug

SEQ ID NO: 893748 - RNA, 19 nt, Homo sapiens
  misc_RNA (1)...(19): siRNA sense strand
gaugacacuuuaauaguuc

SEQ ID NO: 893749 - RNA, 19 nt, Homo sapiens
  misc_RNA (1)...(19): siRNA sense strand
gaagaugaaauauccaaga

SEQ ID NO: 893750 - RNA, 19 nt, Homo sapiens
  misc_RNA (1)...(19): siRNA sense strand
gauacagaguaccaacuaa

SEQ ID NO: 893751 - RNA, 19 nt, Homo sapiens
  misc_RNA (1)...(19): siRNA sense strand
gaggugacuuggagaaaga

SEQ ID NO: 893752 - RNA, 19 nt, Homo sapiens
  misc_RNA (1)...(19): siRNA sense strand
gagcuuggauauuucugaa

SEQ ID NO: 893753 - RNA, 19 nt, Homo sapiens
  misc_RNA (1)...(19): siRNA sense strand
caacaggccuccucaccau

SEQ ID NO: 893754 - RNA, 19 nt, Homo sapiens
  misc_RNA (1)...(19): siRNA sense strand
cagaggaccugauugacuu

SEQ ID NO: 893755 - RNA, 19 nt, Homo sapiens
  misc_RNA (1)...(19): siRNA sense strand
caaguacgaugcaauugau

SEQ ID NO: 893756 - RNA, 19 nt, Homo sapiens
  misc_RNA (1)...(19): siRNA sense strand
uguauuaccuuugguguuu

SEQ ID NO: 893757 - RNA, 19 nt, Homo sapiens
  misc_RNA (1)...(19): siRNA sense strand
ucagauguauggucucuug

SEQ ID NO: 893758 - RNA, 19 nt, Homo sapiens
  misc_RNA (1)...(19): siRNA sense strand
cuaaaggcuuauccauaua

SEQ ID NO: 893759 - RNA, 19 nt, Homo sapiens
  misc_RNA (1)...(19): siRNA sense strand
ggugaaagcuuuggacaag

SEQ ID NO: 893760 - RNA, 19 nt, Homo sapiens
  misc_RNA (1)...(19): siRNA sense strand
ugacauuccuccucuuaug

SEQ ID NO: 893761 - RNA, 19 nt, Homo sapiens
  misc_RNA (1)...(19): siRNA sense strand
gcagaaguucggcaccuua

SEQ ID NO: 893762 - RNA, 19 nt, Homo sapiens
  misc_RNA (1)...(19): siRNA sense strand
ggucuugacucacuuugug

SEQ ID NO: 893763 - RNA, 19 nt, Homo sapiens
  misc_RNA (1)...(19): siRNA sense strand
ggauacagaguaccaacua

SEQ ID NO: 893764 - RNA, 19 nt, Homo sapiens
  misc_RNA (1)...(19): siRNA sense strand
gaaguaucaccacggauuu

SEQ ID NO: 893765 - RNA, 19 nt, Homo sapiens
  misc_RNA (1)...(19): siRNA sense strand
ccaaagccaucuucugaca

SEQ ID NO: 893766 - RNA, 19 nt, Homo sapiens
  misc_RNA (1)...(19): siRNA sense strand
gccaguauguggauauuuc

SEQ ID NO: 893767 - RNA, 19 nt, Homo sapiens
  misc_RNA (1)...(19): siRNA sense strand
aagagaauccaucccauua

SEQ ID NO: 893768 - RNA, 19 nt, Homo sapiens
  misc_RNA (1)...(19): siRNA sense strand
guagaugacacuuuaauag

SEQ ID NO: 893769 - RNA, 19 nt, Homo sapiens
  misc_RNA (1)...(19): siRNA sense strand
gauguauggucucuuggaa

SEQ ID NO: 893770 - RNA, 19 nt, Homo sapiens
  misc_RNA (1)...(19): siRNA sense strand
aagaugaccagucuaauuu

SEQ ID NO: 893771 - RNA, 19 nt, Homo sapiens
  misc_RNA (1)...(19): siRNA sense strand
uaauaguucuggcugaaga

SEQ ID NO: 893772 - RNA, 19 nt, Homo sapiens
  misc_RNA (1)...(19): siRNA sense strand
ggacaaggucgagauagaa

SEQ ID NO: 893773 - RNA, 19 nt, Homo sapiens
  misc_RNA (1)...(19): siRNA sense strand
caaaguauucagugaggua

SEQ ID NO: 893774 - RNA, 19 nt, Homo sapiens
  misc_RNA (1)...(19): siRNA sense strand
ugaagagcaugguuguuug

SEQ ID NO: 893775 - RNA, 19 nt, Homo sapiens
  misc_RNA (1)...(19): siRNA sense strand
gagcuauucaugccaagua

SEQ ID NO: 893776 - RNA, 19 nt, Homo sapiens
  misc_RNA (1)...(19): siRNA sense strand
caaagcuccuggugguuga

SEQ ID NO: 893777 - RNA, 19 nt, Homo sapiens
  misc_RNA (1)...(19): siRNA sense strand
ggaaagaagcaagaguuga

SEQ ID NO: 893778 - RNA, 19 nt, Homo sapiens
  misc_RNA (1)...(19): siRNA sense strand
gaaagaagcaagaguugac

SEQ ID NO: 893779 - RNA, 19 nt, Homo sapiens
  misc_RNA (1)...(19): siRNA sense strand
gaaacugugauagaucuuu

SEQ ID NO: 893780 - RNA, 19 nt, Homo sapiens
  misc_RNA (1)...(19): siRNA sense strand
ggaccugauugacuugugu

SEQ ID NO: 893781 - RNA, 19 nt, Homo sapiens
  misc_RNA (1)...(19): siRNA sense strand
cagcagaggaccugauuga

SEQ ID NO: 893782 - RNA, 19 nt, Homo sapiens
  misc_RNA (1)...(19): siRNA sense strand
caagagaauccaucccauu

SEQ ID NO: 893783 - RNA, 19 nt, Homo sapiens
  misc_RNA (1)...(19): siRNA sense strand
ccucggcucugccacauga

SEQ ID NO: 893784 - RNA, 19 nt, Homo sapiens
  misc_RNA (1)...(19): siRNA sense strand
gccaucccuugguuucuua

SEQ ID NO: 893785 - RNA, 19 nt, Homo sapiens
  misc_RNA (1)...(19): siRNA sense strand
gcauguaugucugcuuuua

SEQ ID NO: 893786 - RNA, 19 nt, Homo sapiens
  misc_RNA (1)...(19): siRNA sense strand
ccaaguacgaugcaauuga

SEQ ID NO: 893787 - RNA, 19 nt, Homo sapiens
  misc_RNA (1)...(19): siRNA sense strand
aaccaaaucuggaaagaag

SEQ ID NO: 893788 - RNA, 19 nt, Homo sapiens
  misc_RNA (1)...(19): siRNA sense strand
ugaggauggugaaagcuuu

SEQ ID NO: 893789 - RNA, 19 nt, Homo sapiens
  misc_RNA (1)...(19): siRNA sense strand
cagaugaauuaaugaagga

SEQ ID NO: 893790 - RNA, 19 nt, Homo sapiens
  misc_RNA (1)...(19): siRNA sense strand
cuagaugguggcauuaaua

SEQ ID NO: 893791 - RNA, 19 nt, Homo sapiens
  misc_RNA (1)...(19): siRNA sense strand
ccucugggauaccuuacua

SEQ ID NO: 893792 - RNA, 19 nt, Homo sapiens
  misc_RNA (1)...(19): siRNA sense strand
gguagugucucauccugau

SEQ ID NO: 893793 - RNA, 19 nt, Homo sapiens
  misc_RNA (1)...(19): siRNA sense strand
ggaggugacuuggagaaag

SEQ ID NO: 893794 - RNA, 19 nt, Homo sapiens
  misc_RNA (1)...(19): siRNA sense strand
agucaguuguguaaagaua

SEQ ID NO: 893795 - RNA, 19 nt, Homo sapiens
  misc_RNA (1)...(19): siRNA sense strand
ggauaucagucaguugugu

SEQ ID NO: 893796 - RNA, 19 nt, Homo sapiens
  misc_RNA (1)...(19): siRNA sense strand
gaggauaucagucaguugu

SEQ ID NO: 893797 - RNA, 19 nt, Homo sapiens
  misc_RNA (1)...(19): siRNA sense strand
caaaaccacugaucacaug

SEQ ID NO: 893798 - RNA, 19 nt, Homo sapiens
  misc_RNA (1)...(19): siRNA sense strand
gaaauauccaagaaucugu

SEQ ID NO: 893799 - RNA, 19 nt, Homo sapiens
  misc_RNA (1)...(19): siRNA sense strand
ucaggaagcaucaacauuc

SEQ ID NO: 893800 - RNA, 19 nt, Homo sapiens
  misc_RNA (1)...(19): siRNA sense strand
ucucucagaugauugcauu

SEQ ID NO: 893801 - RNA, 19 nt, Homo sapiens
  misc_RNA (1)...(19): siRNA sense strand
gaugaccagucuaauuuac

SEQ ID NO: 893802 - RNA, 19 nt, Homo sapiens
  misc_RNA (1)...(19): siRNA sense strand
ggagaaagagcuugucaac

SEQ ID NO: 893803 - RNA, 19 nt, Homo sapiens
  misc_RNA (1)...(19): siRNA sense strand
cgagaaaggaaaccuguga

SEQ ID NO: 893804 - RNA, 19 nt, Homo sapiens
  misc_RNA (1)...(19): siRNA sense strand
guacgaugcaauugauaaa

SEQ ID NO: 893805 - RNA, 19 nt, Homo sapiens
  misc_RNA (1)...(19): siRNA sense strand
acagaguaccaacuaaaua

SEQ ID NO: 893806 - RNA, 19 nt, Homo sapiens
  misc_RNA (1)...(19): siRNA sense strand
gcugaacauugugaacgua

SEQ ID NO: 893807 - RNA, 19 nt, Homo sapiens
  misc_RNA (1)...(19): siRNA sense strand
acacugcuaugcuccagaa

SEQ ID NO: 893808 - RNA, 19 nt, Homo sapiens
  misc_RNA (1)...(19): siRNA sense strand
ggaauagugaagacuuuau

SEQ ID NO: 893809 - RNA, 19 nt, Homo sapiens
  misc_RNA (1)...(19): siRNA sense strand
caaaguccaguaaaccaaa

SEQ ID NO: 893810 - RNA, 19 nt, Homo sapiens
  misc_RNA (1)...(19): siRNA sense strand
auccugaucuuguguauug

SEQ ID NO: 893811 - RNA, 19 nt, Homo sapiens
  misc_RNA (1)...(19): siRNA sense strand
ugauaaagacacuccaauu

SEQ ID NO: 893812 - RNA, 19 nt, Homo sapiens
  misc_RNA (1)...(19): siRNA sense strand
ucagagagaaggauacaga

SEQ ID NO: 893813 - RNA, 19 nt, Homo sapiens
  misc_RNA (1)...(19): siRNA sense strand
guuuggacauuauaaagga

SEQ ID NO: 893814 - RNA, 19 nt, Homo sapiens
  misc_RNA (1)...(19): siRNA sense strand
cugaucacaugccaaguaa

SEQ ID NO: 893815 - RNA, 19 nt, Homo sapiens
  misc_RNA (1)...(19): siRNA sense strand
cagcuaagaaauagauuga

SEQ ID NO: 893816 - RNA, 19 nt, Homo sapiens
  misc_RNA (1)...(19): siRNA sense strand
gcuccauuccuauaucuaa

SEQ ID NO: 893817 - RNA, 19 nt, Homo sapiens
  misc_RNA (1)...(19): siRNA sense strand
caugguuguuuggacauua

SEQ ID NO: 893818 - RNA, 19 nt, Homo sapiens
  misc_RNA (1)...(19): siRNA sense strand
acacacagcugaguuugca

SEQ ID NO: 893819 - RNA, 19 nt, Homo sapiens
  misc_RNA (1)...(19): siRNA sense strand
ccggaauagugaagacuuu

SEQ ID NO: 893820 - RNA, 19 nt, Homo sapiens
  misc_RNA (1)...(19): siRNA sense strand
cuacagauagacaaauuga

SEQ ID NO: 893821 - RNA, 19 nt, Homo sapiens
  misc_RNA (1)...(19): siRNA sense strand
gaagcaagaguugacauuc

SEQ ID NO: 893822 - RNA, 19 nt, Homo sapiens
  misc_RNA (1)...(19): siRNA sense strand
gauaucagucaguugugua

SEQ ID NO: 893823 - RNA, 19 nt, Homo sapiens
  misc_RNA (1)...(19): siRNA sense strand
uaacucugccugaggauau

SEQ ID NO: 893824 - RNA, 19 nt, Homo sapiens
  misc_RNA (1)...(19): siRNA sense strand
ggauccagcuuccuucuga

SEQ ID NO: 893825 - RNA, 19 nt, Homo sapiens
  misc_RNA (1)...(19): siRNA sense strand
ugggacagcuuuacgagaa

SEQ ID NO: 893826 - RNA, 19 nt, Homo sapiens
  misc_RNA (1)...(19): siRNA sense strand
cgacaggguuccggugauu

SEQ ID NO: 893827 - RNA, 19 nt, Homo sapiens
  misc_RNA (1)...(19): siRNA sense strand
gcucucagauuguugacau

SEQ ID NO: 893828 - RNA, 19 nt, Homo sapiens
  misc_RNA (1)...(19): siRNA sense strand
ggucucaggcucucagauu

SEQ ID NO: 893829 - RNA, 19 nt, Homo sapiens
  misc_RNA (1)...(19): siRNA sense strand
guacuugguuccaucugau

SEQ ID NO: 893830 - RNA, 19 nt, Homo sapiens
  misc_RNA (1)...(19): siRNA sense strand
ucauguggaucaucaggaa

SEQ ID NO: 893831 - RNA, 19 nt, Homo sapiens
  misc_RNA (1)...(19): siRNA sense strand
gauaagacagucccacagu

SEQ ID NO: 893832 - RNA, 19 nt, Homo sapiens
  misc_RNA (1)...(19): siRNA sense strand
ccacaguccagccuaacua

SEQ ID NO: 893833 - RNA, 19 nt, Homo sapiens
  misc_RNA (1)...(19): siRNA sense strand
uaacuaugggacagcuuua

SEQ ID NO: 893834 - RNA, 19 nt, Homo sapiens
  misc_RNA (1)...(19): siRNA sense strand
gaacacuuuuggcuucuga

SEQ ID NO: 893835 - RNA, 19 nt, Homo sapiens
  misc_RNA (1)...(19): siRNA sense strand
gauccagcuuccuucugaa

SEQ ID NO: 893836 - RNA, 19 nt, Homo sapiens
  misc_RNA (1)...(19): siRNA sense strand
aaggcgaucuuccuguuug

SEQ ID NO: 893837 - RNA, 19 nt, Homo sapiens
  misc_RNA (1)...(19): siRNA sense strand
gcucaguucauguggauca

SEQ ID NO: 893838 - RNA, 19 nt, Homo sapiens
  misc_RNA (1)...(19): siRNA sense strand
caaacggaaguacuugguu

SEQ ID NO: 893839 - RNA, 19 nt, Homo sapiens
  misc_RNA (1)...(19): siRNA sense strand
caguucauguggaucauca

SEQ ID NO: 893840 - RNA, 19 nt, Homo sapiens
  misc_RNA (1)...(19): siRNA sense strand
gucucaggcucucagauug

SEQ ID NO: 893841 - RNA, 19 nt, Homo sapiens
  misc_RNA (1)...(19): siRNA sense strand
cuaacuaugggacagcuuu

SEQ ID NO: 893842 - RNA, 19 nt, Homo sapiens
  misc_RNA (1)...(19): siRNA sense strand
ugacaaacggaaguacuug

SEQ ID NO: 893843 - RNA, 19 nt, Homo sapiens
  misc_RNA (1)...(19): siRNA sense strand
aaaaggcgaucuuccuguu

SEQ ID NO: 893844 - RNA, 19 nt, Homo sapiens
  misc_RNA (1)...(19): siRNA sense strand
gaaguacuugguuccaucu

SEQ ID NO: 893845 - RNA, 19 nt, Homo sapiens
  misc_RNA (1)...(19): siRNA sense strand
gucccacaguccagccuaa

SEQ ID NO: 893846 - RNA, 19 nt, Homo sapiens
  misc_RNA (1)...(19): siRNA sense strand
aguacuugguuccaucuga

SEQ ID NO: 893847 - RNA, 19 nt, Homo sapiens
  misc_RNA (1)...(19): siRNA sense strand
ggaggaccacucgcuggaa

SEQ ID NO: 893848 - RNA, 19 nt, Homo sapiens
  misc_RNA (1)...(19): siRNA sense strand
uggcucaguucauguggau

SEQ ID NO: 893849 - RNA, 19 nt, Homo sapiens
  misc_RNA (1)...(19): siRNA sense strand
gggacagcuuuacgagaag

SEQ ID NO: 893850 - RNA, 19 nt, Homo sapiens
  misc_RNA (1)...(19): siRNA sense strand
aaaggcgaucuuccuguuu

SEQ ID NO: 893851 - RNA, 19 nt, Homo sapiens
  misc_RNA (1)...(19): siRNA sense strand
gguuccaucugauaucacu

SEQ ID NO: 893852 - RNA, 19 nt, Homo sapiens
  misc_RNA (1)...(19): siRNA sense strand
gaagaaguauuccucagua

SEQ ID NO: 893853 - RNA, 19 nt, Homo sapiens
  misc_RNA (1)...(19): siRNA sense strand
gagaaacgcgccuuaauuu

SEQ ID NO: 893854 - RNA, 19 nt, Homo sapiens
  misc_RNA (1)...(19): siRNA sense strand
uggaauagaugaagaagua

SEQ ID NO: 893855 - RNA, 19 nt, Homo sapiens
  misc_RNA (1)...(19): siRNA sense strand
ugaaggaucugaacucuga

SEQ ID NO: 893856 - RNA, 19 nt, Homo sapiens
  misc_RNA (1)...(19): siRNA sense strand
gaucugaacucugauauag

SEQ ID NO: 893857 - RNA, 19 nt, Homo sapiens
  misc_RNA (1)...(19): siRNA sense strand
gcaacugccuaugagauua

SEQ ID NO: 893858 - RNA, 19 nt, Homo sapiens
  misc_RNA (1)...(19): siRNA sense strand
ggagaaacgcgccuuaauu

SEQ ID NO: 893859 - RNA, 19 nt, Homo sapiens
  misc_RNA (1)...(19): siRNA sense strand
caguggauaucuuaacuua

SEQ ID NO: 893860 - RNA, 19 nt, Homo sapiens
  misc_RNA (1)...(19): siRNA sense strand
guggauaucuuaacuuaug

SEQ ID NO: 893861 - RNA, 19 nt, Homo sapiens
  misc_RNA (1)...(19): siRNA sense strand
gaaacgcgccuuaauuuag

SEQ ID NO: 893862 - RNA, 19 nt, Homo sapiens
  misc_RNA (1)...(19): siRNA sense strand
gcuaucagcaucuuauuaa

SEQ ID NO: 893863 - RNA, 19 nt, Homo sapiens
  misc_RNA (1)...(19): siRNA sense strand
uaacuuauguagcuuggaa

SEQ ID NO: 893864 - RNA, 19 nt, Homo sapiens
  misc_RNA (1)...(19): siRNA sense strand
gaaguauuccucaguauuc

SEQ ID NO: 893865 - RNA, 19 nt, Homo sapiens
  misc_RNA (1)...(19): siRNA sense strand
caacauggcagcccuuuca

SEQ ID NO: 893866 - RNA, 19 nt, Homo sapiens
  misc_RNA (1)...(19): siRNA sense strand
ugauaaagauccugagcaa

SEQ ID NO: 893867 - RNA, 19 nt, Homo sapiens
  misc_RNA (1)...(19): siRNA sense strand
gaagaagaggcccaucuga

SEQ ID NO: 893868 - RNA, 19 nt, Homo sapiens
  misc_RNA (1)...(19): siRNA sense strand
gagaauacauccaguuucc

SEQ ID NO: 893869 - RNA, 19 nt, Homo sapiens
  misc_RNA (1)...(19): siRNA sense strand
ccaguuuccaccauaauua

SEQ ID NO: 893870 - RNA, 19 nt, Homo sapiens
  misc_RNA (1)...(19): siRNA sense strand
gugaugaacuugcccuugu

SEQ ID NO: 893871 - RNA, 19 nt, Homo sapiens
  misc_RNA (1)...(19): siRNA sense strand
gaaauguggccaucuucaa

SEQ ID NO: 893872 - RNA, 19 nt, Homo sapiens
  misc_RNA (1)...(19): siRNA sense strand
gacgauggaucuucaacau

SEQ ID NO: 893873 - RNA, 19 nt, Homo sapiens
  misc_RNA (1)...(19): siRNA sense strand
agaaacgcgccuuaauuua

SEQ ID NO: 893874 - RNA, 19 nt, Homo sapiens
  misc_RNA (1)...(19): siRNA sense strand
agaagaggcccaucugaaa

SEQ ID NO: 893875 - RNA, 19 nt, Homo sapiens
  misc_RNA (1)...(19): siRNA sense strand
ucugaaagcugccauggau

SEQ ID NO: 893876 - RNA, 19 nt, Homo sapiens
  misc_RNA (1)...(19): siRNA sense strand
uuauguagcuuggaaguug

SEQ ID NO: 893877 - RNA, 19 nt, Homo sapiens
  misc_RNA (1)...(19): siRNA sense strand
ucugaacucugauauagga

SEQ ID NO: 893878 - RNA, 19 nt, Homo sapiens
  misc_RNA (1)...(19): siRNA sense strand
cauggagacucaaguguuc

SEQ ID NO: 893879 - RNA, 19 nt, Homo sapiens
  misc_RNA (1)...(19): siRNA sense strand
auaaagauccugagcaaug

SEQ ID NO: 893880 - RNA, 19 nt, Homo sapiens
  misc_RNA (1)...(19): siRNA sense strand
ucacgaaaaugccaaauau

SEQ ID NO: 893881 - RNA, 19 nt, Homo sapiens
  misc_RNA (1)...(19): siRNA sense strand
aaacgcgccuuaauuuagu

SEQ ID NO: 893882 - RNA, 19 nt, Homo sapiens
  misc_RNA (1)...(19): siRNA sense strand
gcauggagacucaaguguu

SEQ ID NO: 893883 - RNA, 19 nt, Homo sapiens
  misc_RNA (1)...(19): siRNA sense strand
ggaucugaacucugauaua

SEQ ID NO: 893884 - RNA, 19 nt, Homo sapiens
  misc_RNA (1)...(19): siRNA sense strand
gcaggugcacgccaagaaa

SEQ ID NO: 893885 - RNA, 19 nt, Homo sapiens
  misc_RNA (1)...(19): siRNA sense strand
guggccaucuucaaguuaa

SEQ ID NO: 893886 - RNA, 19 nt, Homo sapiens
  misc_RNA (1)...(19): siRNA sense strand
aguaaggucuccaucauag

SEQ ID NO: 893887 - RNA, 19 nt, Homo sapiens
  misc_RNA (1)...(19): siRNA sense strand
cauccaguuuccaccauaa

SEQ ID NO: 893888 - RNA, 19 nt, Homo sapiens
  misc_RNA (1)...(19): siRNA sense strand
ugacugcaacugccuauga

SEQ ID NO: 893889 - RNA, 19 nt, Homo sapiens
  misc_RNA (1)...(19): siRNA sense strand
ugagcaagauggcgacugu

SEQ ID NO: 893890 - RNA, 19 nt, Homo sapiens
  misc_RNA (1)...(19): siRNA sense strand
gugagacgauggaucuuca

SEQ ID NO: 893891 - RNA, 19 nt, Homo sapiens
  misc_RNA (1)...(19): siRNA sense strand
gccuaucuguggccgauuu

SEQ ID NO: 893892 - RNA, 19 nt, Homo sapiens
  misc_RNA (1)...(19): siRNA sense strand
gaacucugauauaggaacu

SEQ ID NO: 893893 - RNA, 19 nt, Homo sapiens
  misc_RNA (1)...(19): siRNA sense strand
ccgagaagcccguucauca

SEQ ID NO: 893894 - RNA, 19 nt, Homo sapiens
  misc_RNA (1)...(19): siRNA sense strand
uuaagggccucuauggaau

SEQ ID NO: 893895 - RNA, 19 nt, Homo sapiens
  misc_RNA (1)...(19): siRNA sense strand
uaaagauccugagcaaugg

SEQ ID NO: 893896 - RNA, 19 nt, Homo sapiens
  misc_RNA (1)...(19): siRNA sense strand
uuaaaaggcuugagugaug

SEQ ID NO: 893897 - RNA, 19 nt, Homo sapiens
  misc_RNA (1)...(19): siRNA sense strand
gagaagcccguucaucaca

SEQ ID NO: 893898 - RNA, 19 nt, Homo sapiens
  misc_RNA (1)...(19): siRNA sense strand
uaagggccucuauggaaua

SEQ ID NO: 893899 - RNA, 19 nt, Homo sapiens
  misc_RNA (1)...(19): siRNA sense strand
ucugauauaggaacugaua

SEQ ID NO: 893900 - RNA, 19 nt, Homo sapiens
  misc_RNA (1)...(19): siRNA sense strand
gcaagauggcgacugugaa

SEQ ID NO: 893901 - RNA, 19 nt, Homo sapiens
  misc_RNA (1)...(19): siRNA sense strand
acaguaaggucuccaucau

SEQ ID NO: 893902 - RNA, 19 nt, Homo sapiens
  misc_RNA (1)...(19): siRNA sense strand
uagcuggugucccuuugaa

SEQ ID NO: 893903 - RNA, 19 nt, Homo sapiens
  misc_RNA (1)...(19): siRNA sense strand
gugaagagugagcuuauug

SEQ ID NO: 893904 - RNA, 19 nt, Homo sapiens
  misc_RNA (1)...(19): siRNA sense strand
ggugggagcgaauuuccua

SEQ ID NO: 893905 - RNA, 19 nt, Homo sapiens
  misc_RNA (1)...(19): siRNA sense strand
gggagaaacgcgccuuaau

SEQ ID NO: 893906 - RNA, 19 nt, Homo sapiens
  misc_RNA (1)...(19): siRNA sense strand
gcaaacuccaaccuaguga

SEQ ID NO: 893907 - RNA, 19 nt, Homo sapiens
  misc_RNA (1)...(19): siRNA sense strand
gaagaggcccaucugaaaa

SEQ ID NO: 893908 - RNA, 19 nt, Homo sapiens
  misc_RNA (1)...(19): siRNA sense strand
gaagcccguucaucacagu

SEQ ID NO: 893909 - RNA, 19 nt, Homo sapiens
  misc_RNA (1)...(19): siRNA sense strand
ggagaauacauccaguuuc

SEQ ID NO: 893910 - RNA, 19 nt, Homo sapiens
  misc_RNA (1)...(19): siRNA sense strand
gagcauggagacucaagug

SEQ ID NO: 893911 - RNA, 19 nt, Homo sapiens
  misc_RNA (1)...(19): siRNA sense strand
caguaaggucuccaucaua

SEQ ID NO: 893912 - RNA, 19 nt, Homo sapiens
  misc_RNA (1)...(19): siRNA sense strand
ggcauggccugcgcuauca

SEQ ID NO: 893913 - RNA, 19 nt, Homo sapiens
  misc_RNA (1)...(19): siRNA sense strand
ugaaagguuauacuucuug

SEQ ID NO: 893914 - RNA, 19 nt, Homo sapiens
  misc_RNA (1)...(19): siRNA sense strand
ggaguggagugaacauagc

SEQ ID NO: 893915 - RNA, 19 nt, Homo sapiens
  misc_RNA (1)...(19): siRNA sense strand
uggcgacugugaagaguga

SEQ ID NO: 893916 - RNA, 19 nt, Homo sapiens
  misc_RNA (1)...(19): siRNA sense strand
uuaauuuaguccagcgaaa

SEQ ID NO: 893917 - RNA, 19 nt, Homo sapiens
  misc_RNA (1)...(19): siRNA sense strand
gaagagugagcuuauugag

SEQ ID NO: 893918 - RNA, 19 nt, Homo sapiens
  misc_RNA (1)...(19): siRNA sense strand
aagaagaggcccaucugaa

SEQ ID NO: 893919 - RNA, 19 nt, Homo sapiens
  misc_RNA (1)...(19): siRNA sense strand
uaaggucuccaucauagga

SEQ ID NO: 893920 - RNA, 19 nt, Homo sapiens
  misc_RNA (1)...(19): siRNA sense strand
caacugccuaugagauuau

SEQ ID NO: 893921 - RNA, 19 nt, Homo sapiens
  misc_RNA (1)...(19): siRNA sense strand
aaacuccaaccuagugauu

SEQ ID NO: 893922 - RNA, 19 nt, Homo sapiens
  misc_RNA (1)...(19): siRNA sense strand
caagauggcgacugugaag

SEQ ID NO: 893923 - RNA, 19 nt, Homo sapiens
  misc_RNA (1)...(19): siRNA sense strand
ugaagagugagcuuauuga

SEQ ID NO: 893924 - RNA, 19 nt, Homo sapiens
  misc_RNA (1)...(19): siRNA sense strand
acuccaaccuagugauuau

SEQ ID NO: 893925 - RNA, 19 nt, Homo sapiens
  misc_RNA (1)...(19): siRNA sense strand
acugcaaacugauuauugu

SEQ ID NO: 893926 - RNA, 19 nt, Homo sapiens
  misc_RNA (1)...(19): siRNA sense strand
agaaguauuccucaguauu

SEQ ID NO: 893927 - RNA, 19 nt, Homo sapiens
  misc_RNA (1)...(19): siRNA sense strand
caacggcaccuggcucuuc

SEQ ID NO: 893928 - RNA, 19 nt, Homo sapiens
  misc_RNA (1)...(19): siRNA sense strand
gauauaggaacugauaaag

SEQ ID NO: 893929 - RNA, 19 nt, Homo sapiens
  misc_RNA (1)...(19): siRNA sense strand
ccuuguggaucuugaugaa

SEQ ID NO: 893930 - RNA, 19 nt, Homo sapiens
  misc_RNA (1)...(19): siRNA sense strand
aagaaguauuccucaguau

SEQ ID NO: 893931 - RNA, 19 nt, Homo sapiens
  misc_RNA (1)...(19): siRNA sense strand
caacgcgcaucccgcucaa

SEQ ID NO: 893932 - RNA, 19 nt, Homo sapiens
  misc_RNA (1)...(19): siRNA sense strand
cggagagcauggagacuca

SEQ ID NO: 893933 - RNA, 19 nt, Homo sapiens
  misc_RNA (1)...(19): siRNA sense strand
uaauuaagggccucuaugg

SEQ ID NO: 893934 - RNA, 19 nt, Homo sapiens
  misc_RNA (1)...(19): siRNA sense strand
caguuuccaccauaauuaa

SEQ ID NO: 893935 - RNA, 19 nt, Homo sapiens
  misc_RNA (1)...(19): siRNA sense strand
gggagcgaauuuccuaugc

SEQ ID NO: 893936 - RNA, 19 nt, Homo sapiens
  misc_RNA (1)...(19): siRNA sense strand
gaguuggacugugccuguu

SEQ ID NO: 893937 - RNA, 19 nt, Homo sapiens
  misc_RNA (1)...(19): siRNA sense strand
gugagcuuauugagcguuu

SEQ ID NO: 893938 - RNA, 19 nt, Homo sapiens
  misc_RNA (1)...(19): siRNA sense strand
cauagcuggugucccuuug

SEQ ID NO: 893939 - RNA, 19 nt, Homo sapiens
  misc_RNA (1)...(19): siRNA sense strand
uuauugagcguuucacuuc

SEQ ID NO: 893940 - RNA, 19 nt, Homo sapiens
  misc_RNA (1)...(19): siRNA sense strand
acauccaguuuccaccaua

SEQ ID NO: 893941 - RNA, 19 nt, Homo sapiens
  misc_RNA (1)...(19): siRNA sense strand
uauguagcuuggaaguuga

SEQ ID NO: 893942 - RNA, 19 nt, Homo sapiens
  misc_RNA (1)...(19): siRNA sense strand
cgaaauguggccaucuuca

SEQ ID NO: 893943 - RNA, 19 nt, Homo sapiens
  misc_RNA (1)...(19): siRNA sense strand
gcuuggaaguugagugcau

SEQ ID NO: 893944 - RNA, 19 nt, Homo sapiens
  misc_RNA (1)...(19): siRNA sense strand
ugugaagagugagcuuauu

SEQ ID NO: 893945 - RNA, 19 nt, Homo sapiens
  misc_RNA (1)...(19): siRNA sense strand
uuuccaguauuguccagua

SEQ ID NO: 893946 - RNA, 19 nt, Homo sapiens
  misc_RNA (1)...(19): siRNA sense strand
ugaagaaguauuccucagu

SEQ ID NO: 893947 - RNA, 19 nt, Homo sapiens
  misc_RNA (1)...(19): siRNA sense strand
auuaagggccucuauggaa

SEQ ID NO: 893948 - RNA, 19 nt, Homo sapiens
  misc_RNA (1)...(19): siRNA sense strand
aggcuugagugaugaacuu

SEQ ID NO: 893949 - RNA, 19 nt, Homo sapiens
  misc_RNA (1)...(19): siRNA sense strand
gauggcgacugugaagagu

SEQ ID NO: 893950 - RNA, 19 nt, Homo sapiens
  misc_RNA (1)...(19): siRNA sense strand
aaucuuaggagaauacauc

SEQ ID NO: 893951 - RNA, 19 nt, Homo sapiens
  misc_RNA (1)...(19): siRNA sense strand
uaaaaggcuugagugauga

SEQ ID NO: 893952 - RNA, 19 nt, Homo sapiens
  misc_RNA (1)...(19): siRNA sense strand
gcugguggcuuuacuauuu

SEQ ID NO: 893953 - RNA, 19 nt, Homo sapiens
  misc_RNA (1)...(19): siRNA sense strand
ugacagaccaugugaaauu

SEQ ID NO: 893954 - RNA, 19 nt, Homo sapiens
  misc_RNA (1)...(19): siRNA sense strand
ggagaucacccacacauga

SEQ ID NO: 893955 - RNA, 19 nt, Homo sapiens
  misc_RNA (1)...(19): siRNA sense strand
gacagaccaugugaaauuu

SEQ ID NO: 893956 - RNA, 19 nt, Homo sapiens
  misc_RNA (1)...(19): siRNA sense strand
cacaagaggcccacauaua

SEQ ID NO: 893957 - RNA, 19 nt, Homo sapiens
  misc_RNA (1)...(19): siRNA sense strand
gcgaggaaccugugcauga

SEQ ID NO: 893958 - RNA, 19 nt, Homo sapiens
  misc_RNA (1)...(19): siRNA sense strand
acaagaggcccacauauau

SEQ ID NO: 893959 - RNA, 19 nt, Homo sapiens
  misc_RNA (1)...(19): siRNA sense strand
gaaagugacagaccaugug

SEQ ID NO: 893960 - RNA, 19 nt, Homo sapiens
  misc_RNA (1)...(19): siRNA sense strand
cgaagaagaagcagcauug

SEQ ID NO: 893961 - RNA, 19 nt, Homo sapiens
  misc_RNA (1)...(19): siRNA sense strand
ugaugacaaucccaagaua

SEQ ID NO: 893962 - RNA, 19 nt, Homo sapiens
  misc_RNA (1)...(19): siRNA sense strand
gcacaagaggcccacauau

SEQ ID NO: 893963 - RNA, 19 nt, Homo sapiens
  misc_RNA (1)...(19): siRNA sense strand
gaagaagaagcagcauuga

SEQ ID NO: 893964 - RNA, 19 nt, Homo sapiens
  misc_RNA (1)...(19): siRNA sense strand
caagaggcccacauauaug

SEQ ID NO: 893965 - RNA, 19 nt, Homo sapiens
  misc_RNA (1)...(19): siRNA sense strand
ggaaagugacagaccaugu

SEQ ID NO: 893966 - RNA, 19 nt, Homo sapiens
  misc_RNA (1)...(19): siRNA sense strand
cuauagaaauggaaagaag

SEQ ID NO: 893967 - RNA, 19 nt, Homo sapiens
  misc_RNA (1)...(19): siRNA sense strand
caagauaucugagaauccu

SEQ ID NO: 893968 - RNA, 19 nt, Homo sapiens
  misc_RNA (1)...(19): siRNA sense strand
gaugacaaucccaagauau

SEQ ID NO: 893969 - RNA, 19 nt, Homo sapiens
  misc_RNA (1)...(19): siRNA sense strand
ugucacaggugggaaagaa

SEQ ID NO: 893970 - RNA, 19 nt, Homo sapiens
  misc_RNA (1)...(19): siRNA sense strand
cugguggcuuuacuauuua

SEQ ID NO: 893971 - RNA, 19 nt, Homo sapiens
  misc_RNA (1)...(19): siRNA sense strand
gaccguuaccguccuacua

SEQ ID NO: 893972 - RNA, 19 nt, Homo sapiens
  misc_RNA (1)...(19): siRNA sense strand
ccacacaugagaagaauac

SEQ ID NO: 893973 - RNA, 19 nt, Homo sapiens
  misc_RNA (1)...(19): siRNA sense strand
ugggcccucucuuggauua

SEQ ID NO: 893974 - RNA, 19 nt, Homo sapiens
  misc_RNA (1)...(19): siRNA sense strand
gaucacccacacaugagaa

SEQ ID NO: 893975 - RNA, 19 nt, Homo sapiens
  misc_RNA (1)...(19): siRNA sense strand
ccguuaccguccuacuaua

SEQ ID NO: 893976 - RNA, 19 nt, Homo sapiens
  misc_RNA (1)...(19): siRNA sense strand
uuaccguccuacuauagaa

SEQ ID NO: 893977 - RNA, 19 nt, Homo sapiens
  misc_RNA (1)...(19): siRNA sense strand
cccaagauaucugagaauc

SEQ ID NO: 893978 - RNA, 19 nt, Homo sapiens
  misc_RNA (1)...(19): siRNA sense strand
acaacguccucuccuguca

SEQ ID NO: 893979 - RNA, 19 nt, Homo sapiens
  misc_RNA (1)...(19): siRNA sense strand
aaagugacagaccauguga

SEQ ID NO: 893980 - RNA, 19 nt, Homo sapiens
  misc_RNA (1)...(19): siRNA sense strand
caugaccguuaccguccua

SEQ ID NO: 893981 - RNA, 19 nt, Homo sapiens
  misc_RNA (1)...(19): siRNA sense strand
ugagaauccuaggagauca

SEQ ID NO: 893982 - RNA, 19 nt, Homo sapiens
  misc_RNA (1)...(19): siRNA sense strand
agugacagaccaugugaaa

SEQ ID NO: 893983 - RNA, 19 nt, Homo sapiens
  misc_RNA (1)...(19): siRNA sense strand
cgaggaaccugugcaugac

SEQ ID NO: 893984 - RNA, 19 nt, Homo sapiens
  misc_RNA (1)...(19): siRNA sense strand
uugauucaccgaagaagaa

SEQ ID NO: 893985 - RNA, 19 nt, Homo sapiens
  misc_RNA (1)...(19): siRNA sense strand
gagaucacccacacaugag

SEQ ID NO: 893986 - RNA, 19 nt, Homo sapiens
  misc_RNA (1)...(19): siRNA sense strand
cacaugagaagaauacgau

SEQ ID NO: 893987 - RNA, 19 nt, Homo sapiens
  misc_RNA (1)...(19): siRNA sense strand
guccuacuauagaaaugga

SEQ ID NO: 893988 - RNA, 19 nt, Homo sapiens
  misc_RNA (1)...(19): siRNA sense strand
gaaagaaggaggggauugu

SEQ ID NO: 893989 - RNA, 19 nt, Homo sapiens
  misc_RNA (1)...(19): siRNA sense strand
gacugugggcccucucuug

SEQ ID NO: 893990 - RNA, 19 nt, Homo sapiens
  misc_RNA (1)...(19): siRNA sense strand
aaccugugcaugaccguua

SEQ ID NO: 893991 - RNA, 19 nt, Homo sapiens
  misc_RNA (1)...(19): siRNA sense strand
gacaaucccaagauaucug

SEQ ID NO: 893992 - RNA, 19 nt, Homo sapiens
  misc_RNA (1)...(19): siRNA sense strand
cagagacgguuuccaaaug

SEQ ID NO: 893993 - RNA, 19 nt, Homo sapiens
  misc_RNA (1)...(19): siRNA sense strand
gcagguggauggccaaugg

SEQ ID NO: 893994 - RNA, 19 nt, Homo sapiens
  misc_RNA (1)...(19): siRNA sense strand
agagacgguuuccaaauga

SEQ ID NO: 893995 - RNA, 19 nt, Homo sapiens
  misc_RNA (1)...(19): siRNA sense strand
ggaaaaugcucccguccaa

SEQ ID NO: 893996 - RNA, 19 nt, Homo sapiens
  misc_RNA (1)...(19): siRNA sense strand
gagacgguuuccaaaugaa

SEQ ID NO: 893997 - RNA, 19 nt, Homo sapiens
  misc_RNA (1)...(19): siRNA sense strand
acaaugaccaugccagaga

SEQ ID NO: 893998 - RNA, 19 nt, Homo sapiens
  misc_RNA (1)...(19): siRNA sense strand
ccagagacgguuuccaaau

SEQ ID NO: 893999 - RNA, 19 nt, Homo sapiens
  misc_RNA (1)...(19): siRNA sense strand
guaacaccuucuccaacga

SEQ ID NO: 894000 - RNA, 19 nt, Homo sapiens
  misc_RNA (1)...(19): siRNA sense strand
cggcucaggaggacaauga

SEQ ID NO: 894001 - RNA, 19 nt, Homo sapiens
  misc_RNA (1)...(19): siRNA sense strand
ucaguuaccgcaugucaca

SEQ ID NO: 894002 - RNA, 19 nt, Homo sapiens
  misc_RNA (1)...(19): siRNA sense strand
ggucaguuaccgcauguca

SEQ ID NO: 894003 - RNA, 19 nt, Homo sapiens
  misc_RNA (1)...(19): siRNA sense strand
gccagagacgguuuccaaa

SEQ ID NO: 894004 - RNA, 19 nt, Homo sapiens
  misc_RNA (1)...(19): siRNA sense strand
gcucuaaggcuuccaaccu

SEQ ID NO: 894005 - RNA, 19 nt, Homo sapiens
  misc_RNA (1)...(19): siRNA sense strand
guuaccgcaugucacagaa

SEQ ID NO: 894006 - RNA, 19 nt, Homo sapiens
  misc_RNA (1)...(19): siRNA sense strand
ugccagagacgguuuccaa

SEQ ID NO: 894007 - RNA, 19 nt, Homo sapiens
  misc_RNA (1)...(19): siRNA sense strand
gaacggagggagagacaga

SEQ ID NO: 894008 - RNA, 19 nt, Homo sapiens
  misc_RNA (1)...(19): siRNA sense strand
ggacgacggaggcgugauu

SEQ ID NO: 894009 - RNA, 19 nt, Homo sapiens
  misc_RNA (1)...(19): siRNA sense strand
ggauucagaucugguuuca

SEQ ID NO: 894010 - RNA, 19 nt, Homo sapiens
  misc_RNA (1)...(19): siRNA sense strand
cagauuugguuucagaaug

SEQ ID NO: 894011 - RNA, 19 nt, Homo sapiens
  misc_RNA (1)...(19): siRNA sense strand
agauuugguuucagaauga

SEQ ID NO: 894012 - RNA, 19 nt, Homo sapiens
  misc_RNA (1)...(19): siRNA sense strand
ccacggagguucaguucca

SEQ ID NO: 894013 - RNA, 19 nt, Homo sapiens
  misc_RNA (1)...(19): siRNA sense strand
guccagauuugguuucaga

SEQ ID NO: 894014 - RNA, 19 nt, Homo sapiens
  misc_RNA (1)...(19): siRNA sense strand
gggcaucgccaccagagaa

SEQ ID NO: 894015 - RNA, 19 nt, Homo sapiens
  misc_RNA (1)...(19): siRNA sense strand
gagcccaggguccagauuu

SEQ ID NO: 894016 - RNA, 19 nt, Homo sapiens
  misc_RNA (1)...(19): siRNA sense strand
gcucaccgccauucaugaa

SEQ ID NO: 894017 - RNA, 19 nt, Homo sapiens
  misc_RNA (1)...(19): siRNA sense strand
ugagaaggaucgcuuucca

SEQ ID NO: 894018 - RNA, 19 nt, Homo sapiens
  misc_RNA (1)...(19): siRNA sense strand
gaggaaggcagggaggaaa

SEQ ID NO: 894019 - RNA, 19 nt, Homo sapiens
  misc_RNA (1)...(19): siRNA sense strand
ggaggaaggcagggaggaa

SEQ ID NO: 894020 - RNA, 19 nt, Homo sapiens
  misc_RNA (1)...(19): siRNA sense strand
ccacggagacucguuugga

SEQ ID NO: 894021 - RNA, 19 nt, Homo sapiens
  misc_RNA (1)...(19): siRNA sense strand
gagaggaacgggagagacu

SEQ ID NO: 894022 - RNA, 19 nt, Homo sapiens
  misc_RNA (1)...(19): siRNA sense strand
gggcucaccgccauucaug

SEQ ID NO: 894023 - RNA, 19 nt, Homo sapiens
  misc_RNA (1)...(19): siRNA sense strand
gggccuggcacacucaaga

SEQ ID NO: 894024 - RNA, 19 nt, Homo sapiens
  misc_RNA (1)...(19): siRNA sense strand
ggucuucuacguggaaaug

SEQ ID NO: 894025 - RNA, 19 nt, Homo sapiens
  misc_RNA (1)...(19): siRNA sense strand
gaggagcuggccagagaga

SEQ ID NO: 894026 - RNA, 19 nt, Homo sapiens
  misc_RNA (1)...(19): siRNA sense strand
gaggaacgggagagacuag

SEQ ID NO: 894027 - RNA, 19 nt, Homo sapiens
  misc_RNA (1)...(19): siRNA sense strand
gagagaggaacgggagaga

SEQ ID NO: 894028 - RNA, 19 nt, Homo sapiens
  misc_RNA (1)...(19): siRNA sense strand
ccuccgagccuuugagaag

SEQ ID NO: 894029 - RNA, 19 nt, Homo sapiens
  misc_RNA (1)...(19): siRNA sense strand
gggucucgcucuggucuuc

SEQ ID NO: 894030 - RNA, 19 nt, Homo sapiens
  misc_RNA (1)...(19): siRNA sense strand
gcaggcgcaaccucuccua

SEQ ID NO: 894031 - RNA, 19 nt, Homo sapiens
  misc_RNA (1)...(19): siRNA sense strand
ucagguaucuugcuuguuu

SEQ ID NO: 894032 - RNA, 19 nt, Homo sapiens
  misc_RNA (1)...(19): siRNA sense strand
ggaaauggcacucuucuug

SEQ ID NO: 894033 - RNA, 19 nt, Homo sapiens
  misc_RNA (1)...(19): siRNA sense strand
cuaaaucucucaacacuug

SEQ ID NO: 894034 - RNA, 19 nt, Homo sapiens
  misc_RNA (1)...(19): siRNA sense strand
gugcugauaucacguuuaa

SEQ ID NO: 894035 - RNA, 19 nt, Homo sapiens
  misc_RNA (1)...(19): siRNA sense strand
gaagcuaaaucucucaaca

SEQ ID NO: 894036 - RNA, 19 nt, Homo sapiens
  misc_RNA (1)...(19): siRNA sense strand
gggaugacauucacuacaa

SEQ ID NO: 894037 - RNA, 19 nt, Homo sapiens
  misc_RNA (1)...(19): siRNA sense strand
gcacaccacugagguacaa

SEQ ID NO: 894038 - RNA, 19 nt, Homo sapiens
  misc_RNA (1)...(19): siRNA sense strand
gauaucacguuuaaucaca

SEQ ID NO: 894039 - RNA, 19 nt, Homo sapiens
  misc_RNA (1)...(19): siRNA sense strand
ccaagcagauucaaagaag

SEQ ID NO: 894040 - RNA, 19 nt, Homo sapiens
  misc_RNA (1)...(19): siRNA sense strand
agguacaacugcauucuua

SEQ ID NO: 894041 - RNA, 19 nt, Homo sapiens
  misc_RNA (1)...(19): siRNA sense strand
aaacucgccugugcugaua

SEQ ID NO: 894042 - RNA, 19 nt, Homo sapiens
  misc_RNA (1)...(19): siRNA sense strand
acuugugucucccauauua

SEQ ID NO: 894043 - RNA, 19 nt, Homo sapiens
  misc_RNA (1)...(19): siRNA sense strand
ggacugucauucauucaca

SEQ ID NO: 894044 - RNA, 19 nt, Homo sapiens
  misc_RNA (1)...(19): siRNA sense strand
gaaauggcacucuucuugu

SEQ ID NO: 894045 - RNA, 19 nt, Homo sapiens
  misc_RNA (1)...(19): siRNA sense strand
gcucagaggcaguucacua

SEQ ID NO: 894046 - RNA, 19 nt, Homo sapiens
  misc_RNA (1)...(19): siRNA sense strand
uauuagcuguguccuagua

SEQ ID NO: 894047 - RNA, 19 nt, Homo sapiens
  misc_RNA (1)...(19): siRNA sense strand
caacugcauucuuaccaau

SEQ ID NO: 894048 - RNA, 19 nt, Homo sapiens
  misc_RNA (1)...(19): siRNA sense strand
cagauucaaagaagcauua

SEQ ID NO: 894049 - RNA, 19 nt, Homo sapiens
  misc_RNA (1)...(19): siRNA sense strand
gcugauaucacguuuaauc

SEQ ID NO: 894050 - RNA, 19 nt, Homo sapiens
  misc_RNA (1)...(19): siRNA sense strand
ccauaauucuuucacucua

SEQ ID NO: 894051 - RNA, 19 nt, Homo sapiens
  misc_RNA (1)...(19): siRNA sense strand
gcaguucacuaccggaucu

SEQ ID NO: 894052 - RNA, 19 nt, Homo sapiens
  misc_RNA (1)...(19): siRNA sense strand
aagcauuauucgccuauuu

SEQ ID NO: 894053 - RNA, 19 nt, Homo sapiens
  misc_RNA (1)...(19): siRNA sense strand
ucgugaauccuaucauuua

SEQ ID NO: 894054 - RNA, 19 nt, Homo sapiens
  misc_RNA (1)...(19): siRNA sense strand
ggaugacauucacuacaau

SEQ ID NO: 894055 - RNA, 19 nt, Homo sapiens
  misc_RNA (1)...(19): siRNA sense strand
gacaagaggaagcuaaauc

SEQ ID NO: 894056 - RNA, 19 nt, Homo sapiens
  misc_RNA (1)...(19): siRNA sense strand
agaaucagguaucuugcuu

SEQ ID NO: 894057 - RNA, 19 nt, Homo sapiens
  misc_RNA (1)...(19): siRNA sense strand
gaagcauuauucgccuauu

SEQ ID NO: 894058 - RNA, 19 nt, Homo sapiens
  misc_RNA (1)...(19): siRNA sense strand
ucacuacaaugcccacagu

SEQ ID NO: 894059 - RNA, 19 nt, Homo sapiens
  misc_RNA (1)...(19): siRNA sense strand
cgugaauccuaucauuuau

SEQ ID NO: 894060 - RNA, 19 nt, Homo sapiens
  misc_RNA (1)...(19): siRNA sense strand
ggaucucuauguccuucuu

SEQ ID NO: 894061 - RNA, 19 nt, Homo sapiens
  misc_RNA (1)...(19): siRNA sense strand
uguagaaucagguaucuug

SEQ ID NO: 894062 - RNA, 19 nt, Homo sapiens
  misc_RNA (1)...(19): siRNA sense strand
guccuaguauuucacauca

SEQ ID NO: 894063 - RNA, 19 nt, Homo sapiens
  misc_RNA (1)...(19): siRNA sense strand
aaucagguaucuugcuugu

SEQ ID NO: 894064 - RNA, 19 nt, Homo sapiens
  misc_RNA (1)...(19): siRNA sense strand
gcacucuucuuguccucau

SEQ ID NO: 894065 - RNA, 19 nt, Homo sapiens
  misc_RNA (1)...(19): siRNA sense strand
gucauucauucacagguuu

SEQ ID NO: 894066 - RNA, 19 nt, Homo sapiens
  misc_RNA (1)...(19): siRNA sense strand
gaugggacugucauucauu

SEQ ID NO: 894067 - RNA, 19 nt, Homo sapiens
  misc_RNA (1)...(19): siRNA sense strand
ucuauguccuucuuuguca

SEQ ID NO: 894068 - RNA, 19 nt, Homo sapiens
  misc_RNA (1)...(19): siRNA sense strand
gcuguguccuaguauuuca

SEQ ID NO: 894069 - RNA, 19 nt, Homo sapiens
  misc_RNA (1)...(19): siRNA sense strand
acccaauccuucauucauu

SEQ ID NO: 894070 - RNA, 19 nt, Homo sapiens
  misc_RNA (1)...(19): siRNA sense strand
caugagcuauguccauuuu

SEQ ID NO: 894071 - RNA, 19 nt, Homo sapiens
  misc_RNA (1)...(19): siRNA sense strand
aaauggcacucuucuuguc

SEQ ID NO: 894072 - RNA, 19 nt, Homo sapiens
  misc_RNA (1)...(19): siRNA sense strand
gcaucaagaccaagcagau

SEQ ID NO: 894073 - RNA, 19 nt, Homo sapiens
  misc_RNA (1)...(19): siRNA sense strand
ugucauucauucacagguu

SEQ ID NO: 894074 - RNA, 19 nt, Homo sapiens
  misc_RNA (1)...(19): siRNA sense strand
uagcuguguccuaguauuu

SEQ ID NO: 894075 - RNA, 19 nt, Homo sapiens
  misc_RNA (1)...(19): siRNA sense strand
ggacaagaggaagcuaaau

SEQ ID NO: 894076 - RNA, 19 nt, Homo sapiens
  misc_RNA (1)...(19): siRNA sense strand
acaacugcauucuuaccaa

SEQ ID NO: 894077 - RNA, 19 nt, Homo sapiens
  misc_RNA (1)...(19): siRNA sense strand
gagguuuuauguccauuuu

SEQ ID NO: 894078 - RNA, 19 nt, Homo sapiens
  misc_RNA (1)...(19): siRNA sense strand
gaccaagcagauucaaaga

SEQ ID NO: 894079 - RNA, 19 nt, Homo sapiens
  misc_RNA (1)...(19): siRNA sense strand
cauaauucuuucacucuac

SEQ ID NO: 894080 - RNA, 19 nt, Homo sapiens
  misc_RNA (1)...(19): siRNA sense strand
gcucuaaucaucaucuuuu

SEQ ID NO: 894081 - RNA, 19 nt, Homo sapiens
  misc_RNA (1)...(19): siRNA sense strand
caucaagaccaagcagauu

SEQ ID NO: 894082 - RNA, 19 nt, Homo sapiens
  misc_RNA (1)...(19): siRNA sense strand
gaccuugggaugacauuca

SEQ ID NO: 894083 - RNA, 19 nt, Homo sapiens
  misc_RNA (1)...(19): siRNA sense strand
ccauuaccaugagcuaugu

SEQ ID NO: 894084 - RNA, 19 nt, Homo sapiens
  misc_RNA (1)...(19): siRNA sense strand
gugaugggacugucauuca

SEQ ID NO: 894085 - RNA, 19 nt, Homo sapiens
  misc_RNA (1)...(19): siRNA sense strand
gggcauugcgucuggacaa

SEQ ID NO: 894086 - RNA, 19 nt, Homo sapiens
  misc_RNA (1)...(19): siRNA sense strand
ccaauucccgagugaugaa

SEQ ID NO: 894087 - RNA, 19 nt, Homo sapiens
  misc_RNA (1)...(19): siRNA sense strand
cccaauccuucauucauuc

SEQ ID NO: 894088 - RNA, 19 nt, Homo sapiens
  misc_RNA (1)...(19): siRNA sense strand
gagguacaacugcauucuu

SEQ ID NO: 894089 - RNA, 19 nt, Homo sapiens
  misc_RNA (1)...(19): siRNA sense strand
ccaauuauucagacuucuu

SEQ ID NO: 894090 - RNA, 19 nt, Homo sapiens
  misc_RNA (1)...(19): siRNA sense strand
agaccaagcagauucaaag

SEQ ID NO: 894091 - RNA, 19 nt, Homo sapiens
  misc_RNA (1)...(19): siRNA sense strand
guacugaugagagguuuua

SEQ ID NO: 894092 - RNA, 19 nt, Homo sapiens
  misc_RNA (1)...(19): siRNA sense strand
gcagauucaaagaagcauu

SEQ ID NO: 894093 - RNA, 19 nt, Homo sapiens
  misc_RNA (1)...(19): siRNA sense strand
ugaugggacugucauucau

SEQ ID NO: 894094 - RNA, 19 nt, Homo sapiens
  misc_RNA (1)...(19): siRNA sense strand
ccuaguauuucacaucacu

SEQ ID NO: 894095 - RNA, 19 nt, Homo sapiens
  misc_RNA (1)...(19): siRNA sense strand
cuacugcuacccauauugu

SEQ ID NO: 894096 - RNA, 19 nt, Homo sapiens
  misc_RNA (1)...(19): siRNA sense strand
uuagcuguguccuaguauu

SEQ ID NO: 894097 - RNA, 19 nt, Homo sapiens
  misc_RNA (1)...(19): siRNA sense strand
gccauccgcacaccacuga

SEQ ID NO: 894098 - RNA, 19 nt, Homo sapiens
  misc_RNA (1)...(19): siRNA sense strand
accaugagcuauguccauu

SEQ ID NO: 894099 - RNA, 19 nt, Homo sapiens
  misc_RNA (1)...(19): siRNA sense strand
acaagaggaagcuaaaucu

SEQ ID NO: 894100 - RNA, 19 nt, Homo sapiens
  misc_RNA (1)...(19): siRNA sense strand
cuugcugacuggcuucuug

SEQ ID NO: 894101 - RNA, 19 nt, Homo sapiens
  misc_RNA (1)...(19): siRNA sense strand
ggguacugaugagagguuu

SEQ ID NO: 894102 - RNA, 19 nt, Homo sapiens
  misc_RNA (1)...(19): siRNA sense strand
uuuauagcaucaagaccaa

SEQ ID NO: 894103 - RNA, 19 nt, Homo sapiens
  misc_RNA (1)...(19): siRNA sense strand
gcacacauuuugccuccau

SEQ ID NO: 894104 - RNA, 19 nt, Homo sapiens
  misc_RNA (1)...(19): siRNA sense strand
gaucucuauguccuucuuu

SEQ ID NO: 894105 - RNA, 19 nt, Homo sapiens
  misc_RNA (1)...(19): siRNA sense strand
ucaagaccaagcagauuca

SEQ ID NO: 894106 - RNA, 19 nt, Homo sapiens
  misc_RNA (1)...(19): siRNA sense strand
ccauauuagcuguguccua

SEQ ID NO: 894107 - RNA, 19 nt, Homo sapiens
  misc_RNA (1)...(19): siRNA sense strand
uguacuacuuccuggcuau

SEQ ID NO: 894108 - RNA, 19 nt, Homo sapiens
  misc_RNA (1)...(19): siRNA sense strand
gacacggaccuugggauga

SEQ ID NO: 894109 - RNA, 19 nt, Homo sapiens
  misc_RNA (1)...(19): siRNA sense strand
uucauucacuggccauugu

SEQ ID NO: 894110 - RNA, 19 nt, Homo sapiens
  misc_RNA (1)...(19): siRNA sense strand
gcuaaaucucucaacacuu

SEQ ID NO: 894111 - RNA, 19 nt, Homo sapiens
  misc_RNA (1)...(19): siRNA sense strand
acacggaccuugggaugac

SEQ ID NO: 894112 - RNA, 19 nt, Homo sapiens
  misc_RNA (1)...(19): siRNA sense strand
gccauuguagaaucaggua

SEQ ID NO: 894113 - RNA, 19 nt, Homo sapiens
  misc_RNA (1)...(19): siRNA sense strand
gcaaauacaauauggcauu

SEQ ID NO: 894114 - RNA, 19 nt, Homo sapiens
  misc_RNA (1)...(19): siRNA sense strand
guacaucuacuuccucuuu

SEQ ID NO: 894115 - RNA, 19 nt, Homo sapiens
  misc_RNA (1)...(19): siRNA sense strand
gcaauggcaugcuccucua

SEQ ID NO: 894116 - RNA, 19 nt, Homo sapiens
  misc_RNA (1)...(19): siRNA sense strand
caauagacuuuacccugua

SEQ ID NO: 894117 - RNA, 19 nt, Homo sapiens
  misc_RNA (1)...(19): siRNA sense strand
ccuacaggcuuacuuuauu

SEQ ID NO: 894118 - RNA, 19 nt, Homo sapiens
  misc_RNA (1)...(19): siRNA sense strand
ggagugggaguguuucuaa

SEQ ID NO: 894119 - RNA, 19 nt, Homo sapiens
  misc_RNA (1)...(19): siRNA sense strand
caccaauacuagagucaua

SEQ ID NO: 894120 - RNA, 19 nt, Homo sapiens
  misc_RNA (1)...(19): siRNA sense strand
gcugacauaacuuucaaua

SEQ ID NO: 894121 - RNA, 19 nt, Homo sapiens
  misc_RNA (1)...(19): siRNA sense strand
gcaauggcauaugaucguu

SEQ ID NO: 894122 - RNA, 19 nt, Homo sapiens
  misc_RNA (1)...(19): siRNA sense strand
uugcaaaucucauguuauc

SEQ ID NO: 894123 - RNA, 19 nt, Homo sapiens
  misc_RNA (1)...(19): siRNA sense strand
ccaagcaaauacaauaugg

SEQ ID NO: 894124 - RNA, 19 nt, Homo sapiens
  misc_RNA (1)...(19): siRNA sense strand
ggugauggguuugacauuc

SEQ ID NO: 894125 - RNA, 19 nt, Homo sapiens
  misc_RNA (1)...(19): siRNA sense strand
cuacaggcuuacuuuauuc

SEQ ID NO: 894126 - RNA, 19 nt, Homo sapiens
  misc_RNA (1)...(19): siRNA sense strand
ccucuuuccuccuuuaaug

SEQ ID NO: 894127 - RNA, 19 nt, Homo sapiens
  misc_RNA (1)...(19): siRNA sense strand
gccagagguuguccacauu

SEQ ID NO: 894128 - RNA, 19 nt, Homo sapiens
  misc_RNA (1)...(19): siRNA sense strand
accuguaucucccacauua

SEQ ID NO: 894129 - RNA, 19 nt, Homo sapiens
  misc_RNA (1)...(19): siRNA sense strand
gguuugacauucauuuaca

SEQ ID NO: 894130 - RNA, 19 nt, Homo sapiens
  misc_RNA (1)...(19): siRNA sense strand
guuguguucuuaucuucua

SEQ ID NO: 894131 - RNA, 19 nt, Homo sapiens
  misc_RNA (1)...(19): siRNA sense strand
caucaagcaugaccacagu

SEQ ID NO: 894132 - RNA, 19 nt, Homo sapiens
  misc_RNA (1)...(19): siRNA sense strand
ccagagguuguccacauua

SEQ ID NO: 894133 - RNA, 19 nt, Homo sapiens
  misc_RNA (1)...(19): siRNA sense strand
gacauaacuuucaauagac

SEQ ID NO: 894134 - RNA, 19 nt, Homo sapiens
  misc_RNA (1)...(19): siRNA sense strand
gagauaugcuuccauuuuc

SEQ ID NO: 894135 - RNA, 19 nt, Homo sapiens
  misc_RNA (1)...(19): siRNA sense strand
cacgaugccuacuguaaug

SEQ ID NO: 894136 - RNA, 19 nt, Homo sapiens
  misc_RNA (1)...(19): siRNA sense strand
gagguuguccacauuauca

SEQ ID NO: 894137 - RNA, 19 nt, Homo sapiens
  misc_RNA (1)...(19): siRNA sense strand
gugauggguuugacauuca

SEQ ID NO: 894138 - RNA, 19 nt, Homo sapiens
  misc_RNA (1)...(19): siRNA sense strand
caaaucucauguuaucaca

SEQ ID NO: 894139 - RNA, 19 nt, Homo sapiens
  misc_RNA (1)...(19): siRNA sense strand
ugaccacgaugccuacugu

SEQ ID NO: 894140 - RNA, 19 nt, Homo sapiens
  misc_RNA (1)...(19): siRNA sense strand
gugcugacauaacuuucaa

SEQ ID NO: 894141 - RNA, 19 nt, Homo sapiens
  misc_RNA (1)...(19): siRNA sense strand
gaucauccucuucuccuau

SEQ ID NO: 894142 - RNA, 19 nt, Homo sapiens
  misc_RNA (1)...(19): siRNA sense strand
gaagaaugugccagagguu

SEQ ID NO: 894143 - RNA, 19 nt, Homo sapiens
  misc_RNA (1)...(19): siRNA sense strand
gcugcuuccuacaggcuua

SEQ ID NO: 894144 - RNA, 19 nt, Homo sapiens
  misc_RNA (1)...(19): siRNA sense strand
cagagguuguccacauuau

SEQ ID NO: 894145 - RNA, 19 nt, Homo sapiens
  misc_RNA (1)...(19): siRNA sense strand
ccucuucuccuauauucua

SEQ ID NO: 894146 - RNA, 19 nt, Homo sapiens
  misc_RNA (1)...(19): siRNA sense strand
uuaacaaucuuccuagacu

SEQ ID NO: 894147 - RNA, 19 nt, Homo sapiens
  misc_RNA (1)...(19): siRNA sense strand
uuugagauaugcuuccauu

SEQ ID NO: 894148 - RNA, 19 nt, Homo sapiens
  misc_RNA (1)...(19): siRNA sense strand
guuaggagugggaguguuu

SEQ ID NO: 894149 - RNA, 19 nt, Homo sapiens
  misc_RNA (1)...(19): siRNA sense strand
uuacagauuugggaagaau

SEQ ID NO: 894150 - RNA, 19 nt, Homo sapiens
  misc_RNA (1)...(19): siRNA sense strand
guauccauccugccuguaa

SEQ ID NO: 894151 - RNA, 19 nt, Homo sapiens
  misc_RNA (1)...(19): siRNA sense strand
acagggagauuagcagugu

SEQ ID NO: 894152 - RNA, 19 nt, Homo sapiens
  misc_RNA (1)...(19): siRNA sense strand
gcaaaucucauguuaucac

SEQ ID NO: 894153 - RNA, 19 nt, Homo sapiens
  misc_RNA (1)...(19): siRNA sense strand
ccgcaauccuuugagauau

SEQ ID NO: 894154 - RNA, 19 nt, Homo sapiens
  misc_RNA (1)...(19): siRNA sense strand
cauccgcaauccuuugaga

SEQ ID NO: 894155 - RNA, 19 nt, Homo sapiens
  misc_RNA (1)...(19): siRNA sense strand
gagccaaagcccucaauac

SEQ ID NO: 894156 - RNA, 19 nt, Homo sapiens
  misc_RNA (1)...(19): siRNA sense strand
ccacgaugccuacuguaau

SEQ ID NO: 894157 - RNA, 19 nt, Homo sapiens
  misc_RNA (1)...(19): siRNA sense strand
caucaaaaccaagcaaaua

SEQ ID NO: 894158 - RNA, 19 nt, Homo sapiens
  misc_RNA (1)...(19): siRNA sense strand
cuucuuugcuguuuaugug

SEQ ID NO: 894159 - RNA, 19 nt, Homo sapiens
  misc_RNA (1)...(19): siRNA sense strand
gaccucauggugacauuga

SEQ ID NO: 894160 - RNA, 19 nt, Homo sapiens
  misc_RNA (1)...(19): siRNA sense strand
acauagguuuaguagguaa

SEQ ID NO: 894161 - RNA, 19 nt, Homo sapiens
  misc_RNA (1)...(19): siRNA sense strand
ccaccaagaaaucaugaga

SEQ ID NO: 894162 - RNA, 19 nt, Homo sapiens
  misc_RNA (1)...(19): siRNA sense strand
ugagauaugcuuccauuuu

SEQ ID NO: 894163 - RNA, 19 nt, Homo sapiens
  misc_RNA (1)...(19): siRNA sense strand
gcaauccuuugagauaugc

SEQ ID NO: 894164 - RNA, 19 nt, Homo sapiens
  misc_RNA (1)...(19): siRNA sense strand
cgcaauccuuugagauaug

SEQ ID NO: 894165 - RNA, 19 nt, Homo sapiens
  misc_RNA (1)...(19): siRNA sense strand
aacauagguuuaguaggua

SEQ ID NO: 894166 - RNA, 19 nt, Homo sapiens
  misc_RNA (1)...(19): siRNA sense strand
ccuagacucucugaucauc

SEQ ID NO: 894167 - RNA, 19 nt, Homo sapiens
  misc_RNA (1)...(19): siRNA sense strand
cuuccucuuuccuccuuua

SEQ ID NO: 894168 - RNA, 19 nt, Homo sapiens
  misc_RNA (1)...(19): siRNA sense strand
ugccagagguuguccacau

SEQ ID NO: 894169 - RNA, 19 nt, Homo sapiens
  misc_RNA (1)...(19): siRNA sense strand
cauguuaucacacgugcuu

SEQ ID NO: 894170 - RNA, 19 nt, Homo sapiens
  misc_RNA (1)...(19): siRNA sense strand
cacauuaucaugaguacau

SEQ ID NO: 894171 - RNA, 19 nt, Homo sapiens
  misc_RNA (1)...(19): siRNA sense strand
ugaucauccucuucuccua

SEQ ID NO: 894172 - RNA, 19 nt, Homo sapiens
  misc_RNA (1)...(19): siRNA sense strand
gagugggaguguuucuaag

SEQ ID NO: 894173 - RNA, 19 nt, Homo sapiens
  misc_RNA (1)...(19): siRNA sense strand
cauccugccuguaauuuug

SEQ ID NO: 894174 - RNA, 19 nt, Homo sapiens
  misc_RNA (1)...(19): siRNA sense strand
uccgcaauccuuugagaua

SEQ ID NO: 894175 - RNA, 19 nt, Homo sapiens
  misc_RNA (1)...(19): siRNA sense strand
cauuaguuguguucuuauc

SEQ ID NO: 894176 - RNA, 19 nt, Homo sapiens
  misc_RNA (1)...(19): siRNA sense strand
guaucucccacauuaguug

SEQ ID NO: 894177 - RNA, 19 nt, Homo sapiens
  misc_RNA (1)...(19): siRNA sense strand
aauggcauaugaucguuuc

SEQ ID NO: 894178 - RNA, 19 nt, Homo sapiens
  misc_RNA (1)...(19): siRNA sense strand
uacuagagucauagcguua

SEQ ID NO: 894179 - RNA, 19 nt, Homo sapiens
  misc_RNA (1)...(19): siRNA sense strand
uuuauucacucccuuucug

SEQ ID NO: 894180 - RNA, 19 nt, Homo sapiens
  misc_RNA (1)...(19): siRNA sense strand
ugucaucuacagcaucaaa

SEQ ID NO: 894181 - RNA, 19 nt, Homo sapiens
  misc_RNA (1)...(19): siRNA sense strand
uggguuugacauucauuua

SEQ ID NO: 894182 - RNA, 19 nt, Homo sapiens
  misc_RNA (1)...(19): siRNA sense strand
aagcaugaccacagucuuc

SEQ ID NO: 894183 - RNA, 19 nt, Homo sapiens
  misc_RNA (1)...(19): siRNA sense strand
uuccuagacucucugauca

SEQ ID NO: 894184 - RNA, 19 nt, Homo sapiens
  misc_RNA (1)...(19): siRNA sense strand
ucacucccuuucuguugug

SEQ ID NO: 894185 - RNA, 19 nt, Homo sapiens
  misc_RNA (1)...(19): siRNA sense strand
caauggcauaugaucguuu

SEQ ID NO: 894186 - RNA, 19 nt, Homo sapiens
  misc_RNA (1)...(19): siRNA sense strand
ugaccacagucuucaugag

SEQ ID NO: 894187 - RNA, 19 nt, Homo sapiens
  misc_RNA (1)...(19): siRNA sense strand
aucauccucuucuccuaua

SEQ ID NO: 894188 - RNA, 19 nt, Homo sapiens
  misc_RNA (1)...(19): siRNA sense strand
guuguccacauuaucauga

SEQ ID NO: 894189 - RNA, 19 nt, Homo sapiens
  misc_RNA (1)...(19): siRNA sense strand
uauccauccugccuguaau

SEQ ID NO: 894190 - RNA, 19 nt, Homo sapiens
  misc_RNA (1)...(19): siRNA sense strand
ggcauuauccgccuuuuau

SEQ ID NO: 894191 - RNA, 19 nt, Homo sapiens
  misc_RNA (1)...(19): siRNA sense strand
cagaccucauggugacauu

SEQ ID NO: 894192 - RNA, 19 nt, Homo sapiens
  misc_RNA (1)...(19): siRNA sense strand
guccacauuaucaugagua

SEQ ID NO: 894193 - RNA, 19 nt, Homo sapiens
  misc_RNA (1)...(19): siRNA sense strand
cuuuaacaaucuuccuaga

SEQ ID NO: 894194 - RNA, 19 nt, Homo sapiens
  misc_RNA (1)...(19): siRNA sense strand
ggcuugugcugacauaacu

SEQ ID NO: 894195 - RNA, 19 nt, Homo sapiens
  misc_RNA (1)...(19): siRNA sense strand
accaagaaaucaugagacu

SEQ ID NO: 894196 - RNA, 19 nt, Homo sapiens
  misc_RNA (1)...(19): siRNA sense strand
ccuguaauuuugcgucuuu

SEQ ID NO: 894197 - RNA, 19 nt, Homo sapiens
  misc_RNA (1)...(19): siRNA sense strand
gcacagaggcccugaauga

SEQ ID NO: 894198 - RNA, 19 nt, Homo sapiens
  misc_RNA (1)...(19): siRNA sense strand
gaacagcuccaucaaguuu

SEQ ID NO: 894199 - RNA, 19 nt, Homo sapiens
  misc_RNA (1)...(19): siRNA sense strand
caagauggcugucaccuau

SEQ ID NO: 894200 - RNA, 19 nt, Homo sapiens
  misc_RNA (1)...(19): siRNA sense strand
gggaacagcuccaucaagu

SEQ ID NO: 894201 - RNA, 19 nt, Homo sapiens
  misc_RNA (1)...(19): siRNA sense strand
gcagcaaccuggacaugga

SEQ ID NO: 894202 - RNA, 19 nt, Homo sapiens
  misc_RNA (1)...(19): siRNA sense strand
aggaagagcugaccaugga

SEQ ID NO: 894203 - RNA, 19 nt, Homo sapiens
  misc_RNA (1)...(19): siRNA sense strand
caccagaucuuugucuuca

SEQ ID NO: 894204 - RNA, 19 nt, Homo sapiens
  misc_RNA (1)...(19): siRNA sense strand
gagcacuaccgcuuuguga

SEQ ID NO: 894205 - RNA, 19 nt, Homo sapiens
  misc_RNA (1)...(19): siRNA sense strand
ccagaucuuugucuucauc

SEQ ID NO: 894206 - RNA, 19 nt, Homo sapiens
  misc_RNA (1)...(19): siRNA sense strand
ggaacagcuccaucaaguu

SEQ ID NO: 894207 - RNA, 19 nt, Homo sapiens
  misc_RNA (1)...(19): siRNA sense strand
gcucaaggcccuguuugug

SEQ ID NO: 894208 - RNA, 19 nt, Homo sapiens
  misc_RNA (1)...(19): siRNA sense strand
ugucggaguucuucaacga

SEQ ID NO: 894209 - RNA, 19 nt, Homo sapiens
  misc_RNA (1)...(19): siRNA sense strand
ggcgagcacuaccgcuuug

SEQ ID NO: 894210 - RNA, 19 nt, Homo sapiens
  misc_RNA (1)...(19): siRNA sense strand
gagcugaccauggagaugu

SEQ ID NO: 894211 - RNA, 19 nt, Homo sapiens
  misc_RNA (1)...(19): siRNA sense strand
ugaaugacagccaggaguu

SEQ ID NO: 894212 - RNA, 19 nt, Homo sapiens
  misc_RNA (1)...(19): siRNA sense strand
gggcgagcacuaccgcuuu

SEQ ID NO: 894213 - RNA, 19 nt, Homo sapiens
  misc_RNA (1)...(19): siRNA sense strand
caucguggaguacucacua

SEQ ID NO: 894214 - RNA, 19 nt, Homo sapiens
  misc_RNA (1)...(19): siRNA sense strand
agauggcugucaccuauuc

SEQ ID NO: 894215 - RNA, 19 nt, Homo sapiens
  misc_RNA (1)...(19): siRNA sense strand
ucaagauggcugucaccua

SEQ ID NO: 894216 - RNA, 19 nt, Homo sapiens
  misc_RNA (1)...(19): siRNA sense strand
guacucacaccaccagauc

SEQ ID NO: 894217 - RNA, 19 nt, Homo sapiens
  misc_RNA (1)...(19): siRNA sense strand
ucacaccaccagaucuuug

SEQ ID NO: 894218 - RNA, 19 nt, Homo sapiens
  misc_RNA (1)...(19): siRNA sense strand
ugcagaugcuggagaugaa

SEQ ID NO: 894219 - RNA, 19 nt, Homo sapiens
  misc_RNA (1)...(19): siRNA sense strand
ccgagacgcccaccaaagu

SEQ ID NO: 894220 - RNA, 19 nt, Homo sapiens
  misc_RNA (1)...(19): siRNA sense strand
ggaagaugaggaggaggaa

SEQ ID NO: 894221 - RNA, 19 nt, Homo sapiens
  misc_RNA (1)...(19): siRNA sense strand
gagacgcccaccaaagugu

SEQ ID NO: 894222 - RNA, 19 nt, Homo sapiens
  misc_RNA (1)...(19): siRNA sense strand
gaaugacagccaggaguuc

SEQ ID NO: 894223 - RNA, 19 nt, Homo sapiens
  misc_RNA (1)...(19): siRNA sense strand
aagaugaggaggaggaaga

SEQ ID NO: 894224 - RNA, 19 nt, Homo sapiens
  misc_RNA (1)...(19): siRNA sense strand
cuacauccacaucgucuuc

SEQ ID NO: 894225 - RNA, 19 nt, Homo sapiens
  misc_RNA (1)...(19): siRNA sense strand
caucaugucggaguucuuc

SEQ ID NO: 894226 - RNA, 19 nt, Homo sapiens
  misc_RNA (1)...(19): siRNA sense strand
acagaggcccugaaugaca

SEQ ID NO: 894227 - RNA, 19 nt, Homo sapiens
  misc_RNA (1)...(19): siRNA sense strand
aguuugagcuggacaucga

SEQ ID NO: 894228 - RNA, 19 nt, Homo sapiens
  misc_RNA (1)...(19): siRNA sense strand
uagcacagaggcccugaau

SEQ ID NO: 894229 - RNA, 19 nt, Homo sapiens
  misc_RNA (1)...(19): siRNA sense strand
caccaccgccuucuacauc

SEQ ID NO: 894230 - RNA, 19 nt, Homo sapiens
  misc_RNA (1)...(19): siRNA sense strand
uccacgcgcuguucuucaa

SEQ ID NO: 894231 - RNA, 19 nt, Homo sapiens
  misc_RNA (1)...(19): siRNA sense strand
acuagaguauggcuuccuu

SEQ ID NO: 894232 - RNA, 19 nt, Homo sapiens
  misc_RNA (1)...(19): siRNA sense strand
gaaaucagcuggacaucau

SEQ ID NO: 894233 - RNA, 19 nt, Homo sapiens
  misc_RNA (1)...(19): siRNA sense strand
gcaaggacaucauggacuu

SEQ ID NO: 894234 - RNA, 19 nt, Homo sapiens
  misc_RNA (1)...(19): siRNA sense strand
gcaagaagaagacaaggaa

SEQ ID NO: 894235 - RNA, 19 nt, Homo sapiens
  misc_RNA (1)...(19): siRNA sense strand
gcagagagaggaugagcua

SEQ ID NO: 894236 - RNA, 19 nt, Homo sapiens
  misc_RNA (1)...(19): siRNA sense strand
aaaccaaacugcagaagca

SEQ ID NO: 894237 - RNA, 19 nt, Homo sapiens
  misc_RNA (1)...(19): siRNA sense strand
guuaaaaccucuagacaaa

SEQ ID NO: 894238 - RNA, 19 nt, Homo sapiens
  misc_RNA (1)...(19): siRNA sense strand
gagagaggaugagcuaauc

SEQ ID NO: 894239 - RNA, 19 nt, Homo sapiens
  misc_RNA (1)...(19): siRNA sense strand
ggagaaaucagcuggacau

SEQ ID NO: 894240 - RNA, 19 nt, Homo sapiens
  misc_RNA (1)...(19): siRNA sense strand
uaagggagcaagaagaaga

SEQ ID NO: 894241 - RNA, 19 nt, Homo sapiens
  misc_RNA (1)...(19): siRNA sense strand
ggaggagacggcuuggaaa

SEQ ID NO: 894242 - RNA, 19 nt, Homo sapiens
  misc_RNA (1)...(19): siRNA sense strand
gcacugaucaaggauuguu

SEQ ID NO: 894243 - RNA, 19 nt, Homo sapiens
  misc_RNA (1)...(19): siRNA sense strand
guuaagggagcaagaagaa

SEQ ID NO: 894244 - RNA, 19 nt, Homo sapiens
  misc_RNA (1)...(19): siRNA sense strand
gaagaagacaaggaaaugg

SEQ ID NO: 894245 - RNA, 19 nt, Homo sapiens
  misc_RNA (1)...(19): siRNA sense strand
gaugagcuaauccagaaga

SEQ ID NO: 894246 - RNA, 19 nt, Homo sapiens
  misc_RNA (1)...(19): siRNA sense strand
uagacaaaguaaccaaauc

SEQ ID NO: 894247 - RNA, 19 nt, Homo sapiens
  misc_RNA (1)...(19): siRNA sense strand
ggagcaagaagaagacaag

SEQ ID NO: 894248 - RNA, 19 nt, Homo sapiens
  misc_RNA (1)...(19): siRNA sense strand
caagaagaagacaaggaaa

SEQ ID NO: 894249 - RNA, 19 nt, Homo sapiens
  misc_RNA (1)...(19): siRNA sense strand
ggacaucauggacuugaag

SEQ ID NO: 894250 - RNA, 19 nt, Homo sapiens
  misc_RNA (1)...(19): siRNA sense strand
uggcacugaucaaggauug

SEQ ID NO: 894251 - RNA, 19 nt, Homo sapiens
  misc_RNA (1)...(19): siRNA sense strand
uccacaaacuggugcagaa

SEQ ID NO: 894252 - RNA, 19 nt, Homo sapiens
  misc_RNA (1)...(19): siRNA sense strand
agaagaagacaaggaaaug

SEQ ID NO: 894253 - RNA, 19 nt, Homo sapiens
  misc_RNA (1)...(19): siRNA sense strand
ggcuggcacugaucaagga

SEQ ID NO: 894254 - RNA, 19 nt, Homo sapiens
  misc_RNA (1)...(19): siRNA sense strand
uaaaaccucuagacaaagu

SEQ ID NO: 894255 - RNA, 19 nt, Homo sapiens
  misc_RNA (1)...(19): siRNA sense strand
uggcugauuuccugagaau

SEQ ID NO: 894256 - RNA, 19 nt, Homo sapiens
  misc_RNA (1)...(19): siRNA sense strand
uccagaagauccacaaacu

SEQ ID NO: 894257 - RNA, 19 nt, Homo sapiens
  misc_RNA (1)...(19): siRNA sense strand
acaaacuggugcagaagag

SEQ ID NO: 894258 - RNA, 19 nt, Homo sapiens
  misc_RNA (1)...(19): siRNA sense strand
aagaagaagacaaggaaau

SEQ ID NO: 894259 - RNA, 19 nt, Homo sapiens
  misc_RNA (1)...(19): siRNA sense strand
aaaccucuagacaaaguaa

SEQ ID NO: 894260 - RNA, 19 nt, Homo sapiens
  misc_RNA (1)...(19): siRNA sense strand
agagagaggaugagcuaau

SEQ ID NO: 894261 - RNA, 19 nt, Homo sapiens
  misc_RNA (1)...(19): siRNA sense strand
agacaaaguaaccaaaucu

SEQ ID NO: 894262 - RNA, 19 nt, Homo sapiens
  misc_RNA (1)...(19): siRNA sense strand
gacaaggaaauggcugauu

SEQ ID NO: 894263 - RNA, 19 nt, Homo sapiens
  misc_RNA (1)...(19): siRNA sense strand
uggaggagacggcuuggaa

SEQ ID NO: 894264 - RNA, 19 nt, Homo sapiens
  misc_RNA (1)...(19): siRNA sense strand
gcggaggucgagcgguuaa

SEQ ID NO: 894265 - RNA, 19 nt, Homo sapiens
  misc_RNA (1)...(19): siRNA sense strand
gguuaagggagcaagaaga

SEQ ID NO: 894266 - RNA, 19 nt, Homo sapiens
  misc_RNA (1)...(19): siRNA sense strand
ggagauugagcuggagaug

SEQ ID NO: 894267 - RNA, 19 nt, Homo sapiens
  misc_RNA (1)...(19): siRNA sense strand
gcucugcaaggacaucaug

SEQ ID NO: 894268 - RNA, 19 nt, Homo sapiens
  misc_RNA (1)...(19): siRNA sense strand
cuagacaaaguaaccaaau

SEQ ID NO: 894269 - RNA, 19 nt, Homo sapiens
  misc_RNA (1)...(19): siRNA sense strand
agaagcagagagaggauga

SEQ ID NO: 894270 - RNA, 19 nt, Homo sapiens
  misc_RNA (1)...(19): siRNA sense strand
gcagaagcagagagaggau

SEQ ID NO: 894271 - RNA, 19 nt, Homo sapiens
  misc_RNA (1)...(19): siRNA sense strand
ccagaagauccacaaacug

SEQ ID NO: 894272 - RNA, 19 nt, Homo sapiens
  misc_RNA (1)...(19): siRNA sense strand
caugaugccagaggagauu

SEQ ID NO: 894273 - RNA, 19 nt, Homo sapiens
  misc_RNA (1)...(19): siRNA sense strand
agaaaucagcuggacauca

SEQ ID NO: 894274 - RNA, 19 nt, Homo sapiens
  misc_RNA (1)...(19): siRNA sense strand
uaagagggcucacuccaaa

SEQ ID NO: 894275 - RNA, 19 nt, Homo sapiens
  misc_RNA (1)...(19): siRNA sense strand
ggagacaagugcacuaaau

SEQ ID NO: 894276 - RNA, 19 nt, Homo sapiens
  misc_RNA (1)...(19): siRNA sense strand
gaaguacccugaccaccuu

SEQ ID NO: 894277 - RNA, 19 nt, Homo sapiens
  misc_RNA (1)...(19): siRNA sense strand
ggagccagcugauacagaa

SEQ ID NO: 894278 - RNA, 19 nt, Homo sapiens
  misc_RNA (1)...(19): siRNA sense strand
ggaagucgauauuaaugga

SEQ ID NO: 894279 - RNA, 19 nt, Homo sapiens
  misc_RNA (1)...(19): siRNA sense strand
auacagaagugcuacagua

SEQ ID NO: 894280 - RNA, 19 nt, Homo sapiens
  misc_RNA (1)...(19): siRNA sense strand
gaaaggcggaggcagagaa

SEQ ID NO: 894281 - RNA, 19 nt, Homo sapiens
  misc_RNA (1)...(19): siRNA sense strand
cacauggacucuaacuauu

SEQ ID NO: 894282 - RNA, 19 nt, Homo sapiens
  misc_RNA (1)...(19): siRNA sense strand
cauggacucuaacuauuug

SEQ ID NO: 894283 - RNA, 19 nt, Homo sapiens
  misc_RNA (1)...(19): siRNA sense strand
acacauggacucuaacuau

SEQ ID NO: 894284 - RNA, 19 nt, Homo sapiens
  misc_RNA (1)...(19): siRNA sense strand
cuaccucaaucuagauaaa

SEQ ID NO: 894285 - RNA, 19 nt, Homo sapiens
  misc_RNA (1)...(19): siRNA sense strand
ccaaaucucuggacuaccu

SEQ ID NO: 894286 - RNA, 19 nt, Homo sapiens
  misc_RNA (1)...(19): siRNA sense strand
aauggagagucuagaagua

SEQ ID NO: 894287 - RNA, 19 nt, Homo sapiens
  misc_RNA (1)...(19): siRNA sense strand
gaagagagcaaagcagaag

SEQ ID NO: 894288 - RNA, 19 nt, Homo sapiens
  misc_RNA (1)...(19): siRNA sense strand
acaagugcacuaaaucuuu

SEQ ID NO: 894289 - RNA, 19 nt, Homo sapiens
  misc_RNA (1)...(19): siRNA sense strand
gaagugcacaggaggugaa

SEQ ID NO: 894290 - RNA, 19 nt, Homo sapiens
  misc_RNA (1)...(19): siRNA sense strand
guaccagcuucaacaccua

SEQ ID NO: 894291 - RNA, 19 nt, Homo sapiens
  misc_RNA (1)...(19): siRNA sense strand
cagaagccaugccauccuu

SEQ ID NO: 894292 - RNA, 19 nt, Homo sapiens
  misc_RNA (1)...(19): siRNA sense strand
guuccucucguuuguauaa

SEQ ID NO: 894293 - RNA, 19 nt, Homo sapiens
  misc_RNA (1)...(19): siRNA sense strand
guaagagggcucacuccaa

SEQ ID NO: 894294 - RNA, 19 nt, Homo sapiens
  misc_RNA (1)...(19): siRNA sense strand
uggacuaccucaaucuaga

SEQ ID NO: 894295 - RNA, 19 nt, Homo sapiens
  misc_RNA (1)...(19): siRNA sense strand
acagcuagaugcaggacuu

SEQ ID NO: 894296 - RNA, 19 nt, Homo sapiens
  misc_RNA (1)...(19): siRNA sense strand
cagaagugcuacaguacca

SEQ ID NO: 894297 - RNA, 19 nt, Homo sapiens
  misc_RNA (1)...(19): siRNA sense strand
ucaaggagccagcugauac

SEQ ID NO: 894298 - RNA, 19 nt, Homo sapiens
  misc_RNA (1)...(19): siRNA sense strand
gacaagugcacuaaaucuu

SEQ ID NO: 894299 - RNA, 19 nt, Homo sapiens
  misc_RNA (1)...(19): siRNA sense strand
ggacucuaacuauuugguu

SEQ ID NO: 894300 - RNA, 19 nt, Homo sapiens
  misc_RNA (1)...(19): siRNA sense strand
gagacaagugcacuaaauc

SEQ ID NO: 894301 - RNA, 19 nt, Homo sapiens
  misc_RNA (1)...(19): siRNA sense strand
acauggacucuaacuauuu

SEQ ID NO: 894302 - RNA, 19 nt, Homo sapiens
  misc_RNA (1)...(19): siRNA sense strand
gaccguguguuugcuagga

SEQ ID NO: 894303 - RNA, 19 nt, Homo sapiens
  misc_RNA (1)...(19): siRNA sense strand
cugccucuuugucuucuua

SEQ ID NO: 894304 - RNA, 19 nt, Homo sapiens
  misc_RNA (1)...(19): siRNA sense strand
gcuaccagauccuacacau

SEQ ID NO: 894305 - RNA, 19 nt, Homo sapiens
  misc_RNA (1)...(19): siRNA sense strand
gcccguuccucucguuugu

SEQ ID NO: 894306 - RNA, 19 nt, Homo sapiens
  misc_RNA (1)...(19): siRNA sense strand
ggacuaccucaaucuagau

SEQ ID NO: 894307 - RNA, 19 nt, Homo sapiens
  misc_RNA (1)...(19): siRNA sense strand
cuucacgacuggcgaggaa

SEQ ID NO: 894308 - RNA, 19 nt, Homo sapiens
  misc_RNA (1)...(19): siRNA sense strand
uccuacacauggacucuaa

SEQ ID NO: 894309 - RNA, 19 nt, Homo sapiens
  misc_RNA (1)...(19): siRNA sense strand
cgauauuaauggagagucu

SEQ ID NO: 894310 - RNA, 19 nt, Homo sapiens
  misc_RNA (1)...(19): siRNA sense strand
caggagacaagugcacuaa

SEQ ID NO: 894311 - RNA, 19 nt, Homo sapiens
  misc_RNA (1)...(19): siRNA sense strand
uaauggagagucuagaagu

SEQ ID NO: 894312 - RNA, 19 nt, Homo sapiens
  misc_RNA (1)...(19): siRNA sense strand
gauauuaauggagagucua

SEQ ID NO: 894313 - RNA, 19 nt, Homo sapiens
  misc_RNA (1)...(19): siRNA sense strand
caaggagccagcugauaca

SEQ ID NO: 894314 - RNA, 19 nt, Homo sapiens
  misc_RNA (1)...(19): siRNA sense strand
gacuaccucaaucuagaua

SEQ ID NO: 894315 - RNA, 19 nt, Homo sapiens
  misc_RNA (1)...(19): siRNA sense strand
ucucuggacuaccucaauc

SEQ ID NO: 894316 - RNA, 19 nt, Homo sapiens
  misc_RNA (1)...(19): siRNA sense strand
ugaagagagcaaagcagaa

SEQ ID NO: 894317 - RNA, 19 nt, Homo sapiens
  misc_RNA (1)...(19): siRNA sense strand
cuaccagccauacgagauu

SEQ ID NO: 894318 - RNA, 19 nt, Homo sapiens
  misc_RNA (1)...(19): siRNA sense strand
ccguuccucucguuuguau

SEQ ID NO: 894319 - RNA, 19 nt, Homo sapiens
  misc_RNA (1)...(19): siRNA sense strand
cgagauuccagcugucaau

SEQ ID NO: 894320 - RNA, 19 nt, Homo sapiens
  misc_RNA (1)...(19): siRNA sense strand
gaagccaugccauccuuac

SEQ ID NO: 894321 - RNA, 19 nt, Homo sapiens
  misc_RNA (1)...(19): siRNA sense strand
agacaagugcacuaaaucu

SEQ ID NO: 894322 - RNA, 19 nt, Homo sapiens
  misc_RNA (1)...(19): siRNA sense strand
ugaaguuagcucagaagug

SEQ ID NO: 894323 - RNA, 19 nt, Homo sapiens
  misc_RNA (1)...(19): siRNA sense strand
gagauuccagcugucaaug

SEQ ID NO: 894324 - RNA, 19 nt, Homo sapiens
  misc_RNA (1)...(19): siRNA sense strand
ggaaaggcggaggcagaga

SEQ ID NO: 894325 - RNA, 19 nt, Homo sapiens
  misc_RNA (1)...(19): siRNA sense strand
ggacggagaucgaguucau

SEQ ID NO: 894326 - RNA, 19 nt, Homo sapiens
  misc_RNA (1)...(19): siRNA sense strand
gcucagugcuguaguccaa

SEQ ID NO: 894327 - RNA, 19 nt, Homo sapiens
  misc_RNA (1)...(19): siRNA sense strand
gcgcuuggcugcuuucuac

SEQ ID NO: 894328 - RNA, 19 nt, Homo sapiens
  misc_RNA (1)...(19): siRNA sense strand
ggccagguguuccuuuauu

SEQ ID NO: 894329 - RNA, 19 nt, Homo sapiens
  misc_RNA (1)...(19): siRNA sense strand
gagcccagcgcuacaagua

SEQ ID NO: 894330 - RNA, 19 nt, Homo sapiens
  misc_RNA (1)...(19): siRNA sense strand
gccagguguuccuuuauuu

SEQ ID NO: 894331 - RNA, 19 nt, Homo sapiens
  misc_RNA (1)...(19): siRNA sense strand
gaagcucagugcuguaguc

SEQ ID NO: 894332 - RNA, 19 nt, Homo sapiens
  misc_RNA (1)...(19): siRNA sense strand
guggccaccuuccuaauug

SEQ ID NO: 894333 - RNA, 19 nt, Homo sapiens
  misc_RNA (1)...(19): siRNA sense strand
ggagaucgaguucauguac

SEQ ID NO: 894334 - RNA, 19 nt, Homo sapiens
  misc_RNA (1)...(19): siRNA sense strand
gccaguggguggaggaguu

SEQ ID NO: 894335 - RNA, 19 nt, Homo sapiens
  misc_RNA (1)...(19): siRNA sense strand
gcaacuacaacuucuucaa

SEQ ID NO: 894336 - RNA, 19 nt, Homo sapiens
  misc_RNA (1)...(19): siRNA sense strand
ccagguaucccuuccacaa

SEQ ID NO: 894337 - RNA, 19 nt, Homo sapiens
  misc_RNA (1)...(19): siRNA sense strand
ucacugcccucaccuacca

SEQ ID NO: 894338 - RNA, 19 nt, Homo sapiens
  misc_RNA (1)...(19): siRNA sense strand
gagaucgaguucauguaca

SEQ ID NO: 894339 - RNA, 19 nt, Homo sapiens
  misc_RNA (1)...(19): siRNA sense strand
gaaccacuuucaccuucca

SEQ ID NO: 894340 - RNA, 19 nt, Homo sapiens
  misc_RNA (1)...(19): siRNA sense strand
ugggccagguguuccuuua

SEQ ID NO: 894341 - RNA, 19 nt, Homo sapiens
  misc_RNA (1)...(19): siRNA sense strand
gcucaggcaguuuggacua

SEQ ID NO: 894342 - RNA, 19 nt, Homo sapiens
  misc_RNA (1)...(19): siRNA sense strand
caacuacaacuucuucaac

SEQ ID NO: 894343 - RNA, 19 nt, Homo sapiens
  misc_RNA (1)...(19): siRNA sense strand
cauggcagccgcaagaaga

SEQ ID NO: 894344 - RNA, 19 nt, Homo sapiens
  misc_RNA (1)...(19): siRNA sense strand
gagggcauccuaccugcaa

SEQ ID NO: 894345 - RNA, 19 nt, Homo sapiens
  misc_RNA (1)...(19): siRNA sense strand
gcacagcccgugguucaca

SEQ ID NO: 894346 - RNA, 19 nt, Homo sapiens
  misc_RNA (1)...(19): siRNA sense strand
ugaugacgcuggugcuuac

SEQ ID NO: 894347 - RNA, 19 nt, Homo sapiens
  misc_RNA (1)...(19): siRNA sense strand
agaucgaguucauguacaa

SEQ ID NO: 894348 - RNA, 19 nt, Homo sapiens
  misc_RNA (1)...(19): siRNA sense strand
gucaucuacuugcugcuuu

SEQ ID NO: 894349 - RNA, 19 nt, Homo sapiens
  misc_RNA (1)...(19): siRNA sense strand
ccagaaccacuuucaccuu

SEQ ID NO: 894350 - RNA, 19 nt, Homo sapiens
  misc_RNA (1)...(19): siRNA sense strand
uaucaucaccggcaacuac

SEQ ID NO: 894351 - RNA, 19 nt, Homo sapiens
  misc_RNA (1)...(19): siRNA sense strand
gcccagcgcuacaaguacu

SEQ ID NO: 894352 - RNA, 19 nt, Homo sapiens
  misc_RNA (1)...(19): siRNA sense strand
caacuccuacggccucuuc

SEQ ID NO: 894353 - RNA, 19 nt, Homo sapiens
  misc_RNA (1)...(19): siRNA sense strand
caacuucuucaaccugaug

SEQ ID NO: 894354 - RNA, 19 nt, Homo sapiens
  misc_RNA (1)...(19): siRNA sense strand
ccaccuuccuaauugagau

SEQ ID NO: 894355 - RNA, 19 nt, Homo sapiens
  misc_RNA (1)...(19): siRNA sense strand
cgccuggacuggcagaugu

SEQ ID NO: 894356 - RNA, 19 nt, Homo sapiens
  misc_RNA (1)...(19): siRNA sense strand
gggcaaggagccagugauc

SEQ ID NO: 894357 - RNA, 19 nt, Homo sapiens
  misc_RNA (1)...(19): siRNA sense strand
cacugacgcugcccacugu

SEQ ID NO: 894358 - RNA, 19 nt, Homo sapiens
  misc_RNA (1)...(19): siRNA sense strand
guggccuuguuccugauua

SEQ ID NO: 894359 - RNA, 19 nt, Homo sapiens
  misc_RNA (1)...(19): siRNA sense strand
ucaucuacuugcugcuuug

SEQ ID NO: 894360 - RNA, 19 nt, Homo sapiens
  misc_RNA (1)...(19): siRNA sense strand
ggacuggcagaugugguuu

SEQ ID NO: 894361 - RNA, 19 nt, Homo sapiens
  misc_RNA (1)...(19): siRNA sense strand
gguaucccuuccacaagca

SEQ ID NO: 894362 - RNA, 19 nt, Homo sapiens
  misc_RNA (1)...(19): siRNA sense strand
ccagguguuccuuuauuuc

SEQ ID NO: 894363 - RNA, 19 nt, Homo sapiens
  misc_RNA (1)...(19): siRNA sense strand
ggccagccucccagaaaga

SEQ ID NO: 894364 - RNA, 19 nt, Homo sapiens
  misc_RNA (1)...(19): siRNA sense strand
gcuguuccgccucauguuc

SEQ ID NO: 894365 - RNA, 19 nt, Homo sapiens
  misc_RNA (1)...(19): siRNA sense strand
ccugcugggugcacuagug

SEQ ID NO: 894366 - RNA, 19 nt, Homo sapiens
  misc_RNA (1)...(19): siRNA sense strand
caagauauaucaccucaua

SEQ ID NO: 894367 - RNA, 19 nt, Homo sapiens
  misc_RNA (1)...(19): siRNA sense strand
ggaaagaguucagacauug

SEQ ID NO: 894368 - RNA, 19 nt, Homo sapiens
  misc_RNA (1)...(19): siRNA sense strand
gcacugaaaugucauggaa

SEQ ID NO: 894369 - RNA, 19 nt, Homo sapiens
  misc_RNA (1)...(19): siRNA sense strand
caacuacgcuugcacuuau

SEQ ID NO: 894370 - RNA, 19 nt, Homo sapiens
  misc_RNA (1)...(19): siRNA sense strand
gcaaucacauuucccauuc

SEQ ID NO: 894371 - RNA, 19 nt, Homo sapiens
  misc_RNA (1)...(19): siRNA sense strand
gcacuuauguuuggucugu

SEQ ID NO: 894372 - RNA, 19 nt, Homo sapiens
  misc_RNA (1)...(19): siRNA sense strand
gaaaugucauggaauugga

SEQ ID NO: 894373 - RNA, 19 nt, Homo sapiens
  misc_RNA (1)...(19): siRNA sense strand
gagaagggauggauuucga

SEQ ID NO: 894374 - RNA, 19 nt, Homo sapiens
  misc_RNA (1)...(19): siRNA sense strand
gaugaagcauuacuugugu

SEQ ID NO: 894375 - RNA, 19 nt, Homo sapiens
  misc_RNA (1)...(19): siRNA sense strand
ucaaggcacugaaauguca

SEQ ID NO: 894376 - RNA, 19 nt, Homo sapiens
  misc_RNA (1)...(19): siRNA sense strand
uuggugagaugaagcauua

SEQ ID NO: 894377 - RNA, 19 nt, Homo sapiens
  misc_RNA (1)...(19): siRNA sense strand
gaaaagaggccaccaauac

SEQ ID NO: 894378 - RNA, 19 nt, Homo sapiens
  misc_RNA (1)...(19): siRNA sense strand
gaagacaacuacgcuugca

SEQ ID NO: 894379 - RNA, 19 nt, Homo sapiens
  misc_RNA (1)...(19): siRNA sense strand
uggaaagaguucagacauu

SEQ ID NO: 894380 - RNA, 19 nt, Homo sapiens
  misc_RNA (1)...(19): siRNA sense strand
acugaaaugucauggaauu

SEQ ID NO: 894381 - RNA, 19 nt, Homo sapiens
  misc_RNA (1)...(19): siRNA sense strand
cgaaauuuguaucguggaa

SEQ ID NO: 894382 - RNA, 19 nt, Homo sapiens
  misc_RNA (1)...(19): siRNA sense strand
caccucauauuacaaaugu

SEQ ID NO: 894383 - RNA, 19 nt, Homo sapiens
  misc_RNA (1)...(19): siRNA sense strand
gaguucuuguuaaagguua

SEQ ID NO: 894384 - RNA, 19 nt, Homo sapiens
  misc_RNA (1)...(19): siRNA sense strand
gaagggauggauuucgaaa

SEQ ID NO: 894385 - RNA, 19 nt, Homo sapiens
  misc_RNA (1)...(19): siRNA sense strand
aaagaggccaccaauacua

SEQ ID NO: 894386 - RNA, 19 nt, Homo sapiens
  misc_RNA (1)...(19): siRNA sense strand
caugacaaauuuaccaaca

SEQ ID NO: 894387 - RNA, 19 nt, Homo sapiens
  misc_RNA (1)...(19): siRNA sense strand
caacagcuguauggcauca

SEQ ID NO: 894388 - RNA, 19 nt, Homo sapiens
  misc_RNA (1)...(19): siRNA sense strand
gggaugcaauacuucaguu

SEQ ID NO: 894389 - RNA, 19 nt, Homo sapiens
  misc_RNA (1)...(19): siRNA sense strand
gugcagccuucaacaaugu

SEQ ID NO: 894390 - RNA, 19 nt, Homo sapiens
  misc_RNA (1)...(19): siRNA sense strand
ucacauuucccauucagaa

SEQ ID NO: 894391 - RNA, 19 nt, Homo sapiens
  misc_RNA (1)...(19): siRNA sense strand
ggccuucgaggucccauua

SEQ ID NO: 894392 - RNA, 19 nt, Homo sapiens
  misc_RNA (1)...(19): siRNA sense strand
gaugcaauacuucaguuga

SEQ ID NO: 894393 - RNA, 19 nt, Homo sapiens
  misc_RNA (1)...(19): siRNA sense strand
ggaauuggagaguauuauc

SEQ ID NO: 894394 - RNA, 19 nt, Homo sapiens
  misc_RNA (1)...(19): siRNA sense strand
ucauggaauuggagaguau

SEQ ID NO: 894395 - RNA, 19 nt, Homo sapiens
  misc_RNA (1)...(19): siRNA sense strand
guugagaagggauggauuu

SEQ ID NO: 894396 - RNA, 19 nt, Homo sapiens
  misc_RNA (1)...(19): siRNA sense strand
uuacaaauguuggugagau

SEQ ID NO: 894397 - RNA, 19 nt, Homo sapiens
  misc_RNA (1)...(19): siRNA sense strand
gcaauacuucaguugagaa

SEQ ID NO: 894398 - RNA, 19 nt, Homo sapiens
  misc_RNA (1)...(19): siRNA sense strand
gaacgggacagaaaacuga

SEQ ID NO: 894399 - RNA, 19 nt, Homo sapiens
  misc_RNA (1)...(19): siRNA sense strand
caccaauacuaacaucuuc

SEQ ID NO: 894400 - RNA, 19 nt, Homo sapiens
  misc_RNA (1)...(19): siRNA sense strand
gagaugaagcauuacuugu

SEQ ID NO: 894401 - RNA, 19 nt, Homo sapiens
  misc_RNA (1)...(19): siRNA sense strand
ugacaaauuuaccaacacu

SEQ ID NO: 894402 - RNA, 19 nt, Homo sapiens
  misc_RNA (1)...(19): siRNA sense strand
gaagguccucuuucgacaa

SEQ ID NO: 894403 - RNA, 19 nt, Homo sapiens
  misc_RNA (1)...(19): siRNA sense strand
uaugaguucuuguuaaagg

SEQ ID NO: 894404 - RNA, 19 nt, Homo sapiens
  misc_RNA (1)...(19): siRNA sense strand
acaacuacgcuugcacuua

SEQ ID NO: 894405 - RNA, 19 nt, Homo sapiens
  misc_RNA (1)...(19): siRNA sense strand
caacaaugucgcaaucaca

SEQ ID NO: 894406 - RNA, 19 nt, Homo sapiens
  misc_RNA (1)...(19): siRNA sense strand
acagcuguauggcaucaaa

SEQ ID NO: 894407 - RNA, 19 nt, Homo sapiens
  misc_RNA (1)...(19): siRNA sense strand
cgcauacagucucagauug

SEQ ID NO: 894408 - RNA, 19 nt, Homo sapiens
  misc_RNA (1)...(19): siRNA sense strand
ugagaugaagcauuacuug

SEQ ID NO: 894409 - RNA, 19 nt, Homo sapiens
  misc_RNA (1)...(19): siRNA sense strand
ccucauauuacaaauguug

SEQ ID NO: 894410 - RNA, 19 nt, Homo sapiens
  misc_RNA (1)...(19): siRNA sense strand
aaauuuguaucguggaauc

SEQ ID NO: 894411 - RNA, 19 nt, Homo sapiens
  misc_RNA (1)...(19): siRNA sense strand
ccaccaauacuaacaucuu

SEQ ID NO: 894412 - RNA, 19 nt, Homo sapiens
  misc_RNA (1)...(19): siRNA sense strand
aaacucgcauacagucuca

SEQ ID NO: 894413 - RNA, 19 nt, Homo sapiens
  misc_RNA (1)...(19): siRNA sense strand
gucauggaauuggagagua

SEQ ID NO: 894414 - RNA, 19 nt, Homo sapiens
  misc_RNA (1)...(19): siRNA sense strand
gcauacagucucagauugg

SEQ ID NO: 894415 - RNA, 19 nt, Homo sapiens
  misc_RNA (1)...(19): siRNA sense strand
caaucacauuucccauuca

SEQ ID NO: 894416 - RNA, 19 nt, Homo sapiens
  misc_RNA (1)...(19): siRNA sense strand
caaauguuggugagaugaa

SEQ ID NO: 894417 - RNA, 19 nt, Homo sapiens
  misc_RNA (1)...(19): siRNA sense strand
cuucaacaaugucgcaauc

SEQ ID NO: 894418 - RNA, 19 nt, Homo sapiens
  misc_RNA (1)...(19): siRNA sense strand
ucgcauacagucucagauu

SEQ ID NO: 894419 - RNA, 19 nt, Homo sapiens
  misc_RNA (1)...(19): siRNA sense strand
aagaggccaccaauacuaa

SEQ ID NO: 894420 - RNA, 19 nt, Homo sapiens
  misc_RNA (1)...(19): siRNA sense strand
uacaaauguuggugagaug

SEQ ID NO: 894421 - RNA, 19 nt, Homo sapiens
  misc_RNA (1)...(19): siRNA sense strand
ccaauacuaacaucuucaa

SEQ ID NO: 894422 - RNA, 19 nt, Homo sapiens
  misc_RNA (1)...(19): siRNA sense strand
ggacagaaaacugauaaau

SEQ ID NO: 894423 - RNA, 19 nt, Homo sapiens
  misc_RNA (1)...(19): siRNA sense strand
gaaagaguucagacauugc

SEQ ID NO: 894424 - RNA, 19 nt, Homo sapiens
  misc_RNA (1)...(19): siRNA sense strand
gaauuggagaguauuaucg

SEQ ID NO: 894425 - RNA, 19 nt, Homo sapiens
  misc_RNA (1)...(19): siRNA sense strand
ggaugcaauacuucaguug

SEQ ID NO: 894426 - RNA, 19 nt, Homo sapiens
  misc_RNA (1)...(19): siRNA sense strand
agaugaagcauuacuugug

SEQ ID NO: 894427 - RNA, 19 nt, Homo sapiens
  misc_RNA (1)...(19): siRNA sense strand
ugugcagccuucaacaaug

SEQ ID NO: 894428 - RNA, 19 nt, Homo sapiens
  misc_RNA (1)...(19): siRNA sense strand
ucagauugguggggaauuu

SEQ ID NO: 894429 - RNA, 19 nt, Homo sapiens
  misc_RNA (1)...(19): siRNA sense strand
gaaauuuguaucguggaau

SEQ ID NO: 894430 - RNA, 19 nt, Homo sapiens
  misc_RNA (1)...(19): siRNA sense strand
ggccaccaauacuaacauc

SEQ ID NO: 894431 - RNA, 19 nt, Homo sapiens
  misc_RNA (1)...(19): siRNA sense strand
ugcaauacuucaguugaga

SEQ ID NO: 894432 - RNA, 19 nt, Homo sapiens
  misc_RNA (1)...(19): siRNA sense strand
caaaacccgggaugcaaua

SEQ ID NO: 894433 - RNA, 19 nt, Homo sapiens
  misc_RNA (1)...(19): siRNA sense strand
ugaaaugucauggaauugg

SEQ ID NO: 894434 - RNA, 19 nt, Homo sapiens
  misc_RNA (1)...(19): siRNA sense strand
cgcaaucacauuucccauu

SEQ ID NO: 894435 - RNA, 19 nt, Homo sapiens
  misc_RNA (1)...(19): siRNA sense strand
aacccgggaugcaauacuu

SEQ ID NO: 894436 - RNA, 19 nt, Homo sapiens
  misc_RNA (1)...(19): siRNA sense strand
guggggaauuucagucuuu

SEQ ID NO: 894437 - RNA, 19 nt, Homo sapiens
  misc_RNA (1)...(19): siRNA sense strand
ucaacaaugucgcaaucac

SEQ ID NO: 894438 - RNA, 19 nt, Homo sapiens
  misc_RNA (1)...(19): siRNA sense strand
gaggcuuggugcccauucu

SEQ ID NO: 894439 - RNA, 19 nt, Homo sapiens
  misc_RNA (1)...(19): siRNA sense strand
caucaugacaaauuuacca

SEQ ID NO: 894440 - RNA, 19 nt, Homo sapiens
  misc_RNA (1)...(19): siRNA sense strand
ugaaaagaggccaccaaua

SEQ ID NO: 894441 - RNA, 19 nt, Homo sapiens
  misc_RNA (1)...(19): siRNA sense strand
gacagaaaacugauaaauc

SEQ ID NO: 894442 - RNA, 19 nt, Homo sapiens
  misc_RNA (1)...(19): siRNA sense strand
ggcuggaacgggacagaaa

SEQ ID NO: 894443 - RNA, 19 nt, Homo sapiens
  misc_RNA (1)...(19): siRNA sense strand
ugggugccauguugggauu

SEQ ID NO: 894444 - RNA, 19 nt, Homo sapiens
  misc_RNA (1)...(19): siRNA sense strand
gaacauaagucaauggaaa

SEQ ID NO: 894445 - RNA, 19 nt, Homo sapiens
  misc_RNA (1)...(19): siRNA sense strand
gcaccagacuuuccuuaga

SEQ ID NO: 894446 - RNA, 19 nt, Homo sapiens
  misc_RNA (1)...(19): siRNA sense strand
gagaagagagggacagaaa

SEQ ID NO: 894447 - RNA, 19 nt, Homo sapiens
  misc_RNA (1)...(19): siRNA sense strand
caacccagauuauuauagu

SEQ ID NO: 894448 - RNA, 19 nt, Homo sapiens
  misc_RNA (1)...(19): siRNA sense strand
aaccuuaccuaauguagua

SEQ ID NO: 894449 - RNA, 19 nt, Homo sapiens
  misc_RNA (1)...(19): siRNA sense strand
guaauuugcaccagacuuu

SEQ ID NO: 894450 - RNA, 19 nt, Homo sapiens
  misc_RNA (1)...(19): siRNA sense strand
cauuagagauggagcuuug

SEQ ID NO: 894451 - RNA, 19 nt, Homo sapiens
  misc_RNA (1)...(19): siRNA sense strand
uaaaugagccagaugugaa

SEQ ID NO: 894452 - RNA, 19 nt, Homo sapiens
  misc_RNA (1)...(19): siRNA sense strand
ggaucagguuuacuaggua

SEQ ID NO: 894453 - RNA, 19 nt, Homo sapiens
  misc_RNA (1)...(19): siRNA sense strand
guucaucucuuucagaagu

SEQ ID NO: 894454 - RNA, 19 nt, Homo sapiens
  misc_RNA (1)...(19): siRNA sense strand
ccuuugaccuccuggcuua

SEQ ID NO: 894455 - RNA, 19 nt, Homo sapiens
  misc_RNA (1)...(19): siRNA sense strand
ucagaaguuuguagaagaa

SEQ ID NO: 894456 - RNA, 19 nt, Homo sapiens
  misc_RNA (1)...(19): siRNA sense strand
cauguuaaguuaucaguag

SEQ ID NO: 894457 - RNA, 19 nt, Homo sapiens
  misc_RNA (1)...(19): siRNA sense strand
gaucacuugugggaacaua

SEQ ID NO: 894458 - RNA, 19 nt, Homo sapiens
  misc_RNA (1)...(19): siRNA sense strand
guagcuaacuccacuuugg

SEQ ID NO: 894459 - RNA, 19 nt, Homo sapiens
  misc_RNA (1)...(19): siRNA sense strand
gaucagguuuacuagguau

SEQ ID NO: 894460 - RNA, 19 nt, Homo sapiens
  misc_RNA (1)...(19): siRNA sense strand
gaacuuggagccacaugga

SEQ ID NO: 894461 - RNA, 19 nt, Homo sapiens
  misc_RNA (1)...(19): siRNA sense strand
caagggaggguccaaagaa

SEQ ID NO: 894462 - RNA, 19 nt, Homo sapiens
  misc_RNA (1)...(19): siRNA sense strand
ugaauuaacacccauuaga

SEQ ID NO: 894463 - RNA, 19 nt, Homo sapiens
  misc_RNA (1)...(19): siRNA sense strand
auagaaacauuaccagguu

SEQ ID NO: 894464 - RNA, 19 nt, Homo sapiens
  misc_RNA (1)...(19): siRNA sense strand
gcagcucccucucaagaca

SEQ ID NO: 894465 - RNA, 19 nt, Homo sapiens
  misc_RNA (1)...(19): siRNA sense strand
ccauuuacaacccagauua

SEQ ID NO: 894466 - RNA, 19 nt, Homo sapiens
  misc_RNA (1)...(19): siRNA sense strand
gaacuucccuggagaaaac

SEQ ID NO: 894467 - RNA, 19 nt, Homo sapiens
  misc_RNA (1)...(19): siRNA sense strand
gauuacagguguuuaugag

SEQ ID NO: 894468 - RNA, 19 nt, Homo sapiens
  misc_RNA (1)...(19): siRNA sense strand
gaauuaacacccauuagag

SEQ ID NO: 894469 - RNA, 19 nt, Homo sapiens
  misc_RNA (1)...(19): siRNA sense strand
uauggugauugaugaagua

SEQ ID NO: 894470 - RNA, 19 nt, Homo sapiens
  misc_RNA (1)...(19): siRNA sense strand
gggaggguccaaagaaauu

SEQ ID NO: 894471 - RNA, 19 nt, Homo sapiens
  misc_RNA (1)...(19): siRNA sense strand
gaaguuuguagaagaaaga

SEQ ID NO: 894472 - RNA, 19 nt, Homo sapiens
  misc_RNA (1)...(19): siRNA sense strand
cagcaaagcacauuauuuu

SEQ ID NO: 894473 - RNA, 19 nt, Homo sapiens
  misc_RNA (1)...(19): siRNA sense strand
acaguauggugauugauga

SEQ ID NO: 894474 - RNA, 19 nt, Homo sapiens
  misc_RNA (1)...(19): siRNA sense strand
uauagaagaccaucuggaa

SEQ ID NO: 894475 - RNA, 19 nt, Homo sapiens
  misc_RNA (1)...(19): siRNA sense strand
guaaaugagccagauguga

SEQ ID NO: 894476 - RNA, 19 nt, Homo sapiens
  misc_RNA (1)...(19): siRNA sense strand
uaccuaauguaguagcuaa

SEQ ID NO: 894477 - RNA, 19 nt, Homo sapiens
  misc_RNA (1)...(19): siRNA sense strand
cacaaaggccaaagugaaa

SEQ ID NO: 894478 - RNA, 19 nt, Homo sapiens
  misc_RNA (1)...(19): siRNA sense strand
cuugagagcugccaaagag

SEQ ID NO: 894479 - RNA, 19 nt, Homo sapiens
  misc_RNA (1)...(19): siRNA sense strand
ccagcaaagcacauuauuu

SEQ ID NO: 894480 - RNA, 19 nt, Homo sapiens
  misc_RNA (1)...(19): siRNA sense strand
gacuuuccuuagacuguua

SEQ ID NO: 894481 - RNA, 19 nt, Homo sapiens
  misc_RNA (1)...(19): siRNA sense strand
caaaggccaaagugaaauu

SEQ ID NO: 894482 - RNA, 19 nt, Homo sapiens
  misc_RNA (1)...(19): siRNA sense strand
uuuccagcauguuaaguua

SEQ ID NO: 894483 - RNA, 19 nt, Homo sapiens
  misc_RNA (1)...(19): siRNA sense strand
ccucagaaaccauuuacaa

SEQ ID NO: 894484 - RNA, 19 nt, Homo sapiens
  misc_RNA (1)...(19): siRNA sense strand
ccagguuuccagcauguua

SEQ ID NO: 894485 - RNA, 19 nt, Homo sapiens
  misc_RNA (1)...(19): siRNA sense strand
guguucaucucuuucagaa

SEQ ID NO: 894486 - RNA, 19 nt, Homo sapiens
  misc_RNA (1)...(19): siRNA sense strand
guuaaguuaucaguaguga

SEQ ID NO: 894487 - RNA, 19 nt, Homo sapiens
  misc_RNA (1)...(19): siRNA sense strand
aagggaggguccaaagaaa

SEQ ID NO: 894488 - RNA, 19 nt, Homo sapiens
  misc_RNA (1)...(19): siRNA sense strand
aaaugcagcucccucucaa

SEQ ID NO: 894489 - RNA, 19 nt, Homo sapiens
  misc_RNA (1)...(19): siRNA sense strand
guagaagaaagagauguuu

SEQ ID NO: 894490 - RNA, 19 nt, Homo sapiens
  misc_RNA (1)...(19): siRNA sense strand
ccuccuggcuuauuucaca

SEQ ID NO: 894491 - RNA, 19 nt, Homo sapiens
  misc_RNA (1)...(19): siRNA sense strand
gcagccagcaguucaagga

SEQ ID NO: 894492 - RNA, 19 nt, Homo sapiens
  misc_RNA (1)...(19): siRNA sense strand
gaucugauuacagguguuu

SEQ ID NO: 894493 - RNA, 19 nt, Homo sapiens
  misc_RNA (1)...(19): siRNA sense strand
gauugaugaaguaaccuua

SEQ ID NO: 894494 - RNA, 19 nt, Homo sapiens
  misc_RNA (1)...(19): siRNA sense strand
gaaaacagcccuccuugag

SEQ ID NO: 894495 - RNA, 19 nt, Homo sapiens
  misc_RNA (1)...(19): siRNA sense strand
auaacaguauggugauuga

SEQ ID NO: 894496 - RNA, 19 nt, Homo sapiens
  misc_RNA (1)...(19): siRNA sense strand
gaagagagggacagaaaau

SEQ ID NO: 894497 - RNA, 19 nt, Homo sapiens
  misc_RNA (1)...(19): siRNA sense strand
gagcuuugacccuggauuc

SEQ ID NO: 894498 - RNA, 19 nt, Homo sapiens
  misc_RNA (1)...(19): siRNA sense strand
ugaaaaccaucuuguugaa

SEQ ID NO: 894499 - RNA, 19 nt, Homo sapiens
  misc_RNA (1)...(19): siRNA sense strand
guauggugauugaugaagu

SEQ ID NO: 894500 - RNA, 19 nt, Homo sapiens
  misc_RNA (1)...(19): siRNA sense strand
uggagguguucaucucuuu

SEQ ID NO: 894501 - RNA, 19 nt, Homo sapiens
  misc_RNA (1)...(19): siRNA sense strand
gcauguuaaguuaucagua

SEQ ID NO: 894502 - RNA, 19 nt, Homo sapiens
  misc_RNA (1)...(19): siRNA sense strand
gaccagaauacucaaaaua

SEQ ID NO: 894503 - RNA, 19 nt, Homo sapiens
  misc_RNA (1)...(19): siRNA sense strand
uuuguaagcuuguacuaag

SEQ ID NO: 894504 - RNA, 19 nt, Homo sapiens
  misc_RNA (1)...(19): siRNA sense strand
agugaaauuugcugggaaa

SEQ ID NO: 894505 - RNA, 19 nt, Homo sapiens
  misc_RNA (1)...(19): siRNA sense strand
uggaucagguuuacuaggu

SEQ ID NO: 894506 - RNA, 19 nt, Homo sapiens
  misc_RNA (1)...(19): siRNA sense strand
gagaacuucccuggagaaa

SEQ ID NO: 894507 - RNA, 19 nt, Homo sapiens
  misc_RNA (1)...(19): siRNA sense strand
agguauaacugcauucaag

SEQ ID NO: 894508 - RNA, 19 nt, Homo sapiens
  misc_RNA (1)...(19): siRNA sense strand
caugcuaugccuaaagauu

SEQ ID NO: 894509 - RNA, 19 nt, Homo sapiens
  misc_RNA (1)...(19): siRNA sense strand
aaagaugcaggaaaccaaa

SEQ ID NO: 894510 - RNA, 19 nt, Homo sapiens
  misc_RNA (1)...(19): siRNA sense strand
gggaacauaagucaaugga

SEQ ID NO: 894511 - RNA, 19 nt, Homo sapiens
  misc_RNA (1)...(19): siRNA sense strand
uucagaaguuuguagaaga

SEQ ID NO: 894512 - RNA, 19 nt, Homo sapiens
  misc_RNA (1)...(19): siRNA sense strand
ucaccucagaaaccauuua

SEQ ID NO: 894513 - RNA, 19 nt, Homo sapiens
  misc_RNA (1)...(19): siRNA sense strand
ggaacauaagucaauggaa

SEQ ID NO: 894514 - RNA, 19 nt, Homo sapiens
  misc_RNA (1)...(19): siRNA sense strand
uuuaagaccagaauacuca

SEQ ID NO: 894515 - RNA, 19 nt, Homo sapiens
  misc_RNA (1)...(19): siRNA sense strand
aaaugagccagaugugaaa

SEQ ID NO: 894516 - RNA, 19 nt, Homo sapiens
  misc_RNA (1)...(19): siRNA sense strand
gagcugucagucucagaaa

SEQ ID NO: 894517 - RNA, 19 nt, Homo sapiens
  misc_RNA (1)...(19): siRNA sense strand
ggaaaacagcccuccuuga

SEQ ID NO: 894518 - RNA, 19 nt, Homo sapiens
  misc_RNA (1)...(19): siRNA sense strand
guggagguguucaucucuu

SEQ ID NO: 894519 - RNA, 19 nt, Homo sapiens
  misc_RNA (1)...(19): siRNA sense strand
caccagacuuuccuuagac

SEQ ID NO: 894520 - RNA, 19 nt, Homo sapiens
  misc_RNA (1)...(19): siRNA sense strand
ugauuacagguguuuauga

SEQ ID NO: 894521 - RNA, 19 nt, Homo sapiens
  misc_RNA (1)...(19): siRNA sense strand
agacuuuccuuagacuguu

SEQ ID NO: 894522 - RNA, 19 nt, Homo sapiens
  misc_RNA (1)...(19): siRNA sense strand
gacccuggauuccucaaaa

SEQ ID NO: 894523 - RNA, 19 nt, Homo sapiens
  misc_RNA (1)...(19): siRNA sense strand
ggugauugaugaaguaacc

SEQ ID NO: 894524 - RNA, 19 nt, Homo sapiens
  misc_RNA (1)...(19): siRNA sense strand
ggagaagagagggacagaa

SEQ ID NO: 894525 - RNA, 19 nt, Homo sapiens
  misc_RNA (1)...(19): siRNA sense strand
agucuuggaucuugguugu

SEQ ID NO: 894526 - RNA, 19 nt, Homo sapiens
  misc_RNA (1)...(19): siRNA sense strand
aaucugggaauguaccuuu

SEQ ID NO: 894527 - RNA, 19 nt, Homo sapiens
  misc_RNA (1)...(19): siRNA sense strand
ucaagggaggguccaaaga

SEQ ID NO: 894528 - RNA, 19 nt, Homo sapiens
  misc_RNA (1)...(19): siRNA sense strand
aauuaacacccauuagaga

SEQ ID NO: 894529 - RNA, 19 nt, Homo sapiens
  misc_RNA (1)...(19): siRNA sense strand
uaagaccagaauacucaaa

SEQ ID NO: 894530 - RNA, 19 nt, Homo sapiens
  misc_RNA (1)...(19): siRNA sense strand
gagguguucaucucuuuca

SEQ ID NO: 894531 - RNA, 19 nt, Homo sapiens
  misc_RNA (1)...(19): siRNA sense strand
ggccagcaaagcacauuau

SEQ ID NO: 894532 - RNA, 19 nt, Homo sapiens
  misc_RNA (1)...(19): siRNA sense strand
aaauggacguguacuuuug

SEQ ID NO: 894533 - RNA, 19 nt, Homo sapiens
  misc_RNA (1)...(19): siRNA sense strand
gugaaaagaugcaggaaac

SEQ ID NO: 894534 - RNA, 19 nt, Homo sapiens
  misc_RNA (1)...(19): siRNA sense strand
ucagguuuacuagguauaa

SEQ ID NO: 894535 - RNA, 19 nt, Homo sapiens
  misc_RNA (1)...(19): siRNA sense strand
uaccagguuuccagcaugu

SEQ ID NO: 894536 - RNA, 19 nt, Homo sapiens
  misc_RNA (1)...(19): siRNA sense strand
augcuaugccuaaagauuu

SEQ ID NO: 894537 - RNA, 19 nt, Homo sapiens
  misc_RNA (1)...(19): siRNA sense strand
gccagcaaagcacauuauu

SEQ ID NO: 894538 - RNA, 19 nt, Homo sapiens
  misc_RNA (1)...(19): siRNA sense strand
aagaccaucuggaaaauga

SEQ ID NO: 894539 - RNA, 19 nt, Homo sapiens
  misc_RNA (1)...(19): siRNA sense strand
uagaagaccaucuggaaaa

SEQ ID NO: 894540 - RNA, 19 nt, Homo sapiens
  misc_RNA (1)...(19): siRNA sense strand
uuucagaaguuuguagaag

SEQ ID NO: 894541 - RNA, 19 nt, Homo sapiens
  misc_RNA (1)...(19): siRNA sense strand
ugauguaaaugagccagau

SEQ ID NO: 894542 - RNA, 19 nt, Homo sapiens
  misc_RNA (1)...(19): siRNA sense strand
cacagacaguccacucagu

SEQ ID NO: 894543 - RNA, 19 nt, Homo sapiens
  misc_RNA (1)...(19): siRNA sense strand
gugggaacauaagucaaug

SEQ ID NO: 894544 - RNA, 19 nt, Homo sapiens
  misc_RNA (1)...(19): siRNA sense strand
gaagucagccguggccaaa

SEQ ID NO: 894545 - RNA, 19 nt, Homo sapiens
  misc_RNA (1)...(19): siRNA sense strand
ggacguggccguguacuuc

SEQ ID NO: 894546 - RNA, 19 nt, Homo sapiens
  misc_RNA (1)...(19): siRNA sense strand
gagcacgucuacagucaca

SEQ ID NO: 894547 - RNA, 19 nt, Homo sapiens
  misc_RNA (1)...(19): siRNA sense strand
gcagauuccagaaacaaga

SEQ ID NO: 894548 - RNA, 19 nt, Homo sapiens
  misc_RNA (1)...(19): siRNA sense strand
caacaagccagcucucauc

SEQ ID NO: 894549 - RNA, 19 nt, Homo sapiens
  misc_RNA (1)...(19): siRNA sense strand
ccugagcgcucucggaauc

SEQ ID NO: 894550 - RNA, 19 nt, Homo sapiens
  misc_RNA (1)...(19): siRNA sense strand
aaacggacccagcagauuc

SEQ ID NO: 894551 - RNA, 19 nt, Homo sapiens
  misc_RNA (1)...(19): siRNA sense strand
ggagauauuccaggagugu

SEQ ID NO: 894552 - RNA, 19 nt, Homo sapiens
  misc_RNA (1)...(19): siRNA sense strand
gcaacaagccagcucucau

SEQ ID NO: 894553 - RNA, 19 nt, Homo sapiens
  misc_RNA (1)...(19): siRNA sense strand
caaacggacccagcagauu

SEQ ID NO: 894554 - RNA, 19 nt, Homo sapiens
  misc_RNA (1)...(19): siRNA sense strand
aaacaccaguggguucauc

SEQ ID NO: 894555 - RNA, 19 nt, Homo sapiens
  misc_RNA (1)...(19): siRNA sense strand
ccagcagauuccagaaaca

SEQ ID NO: 894556 - RNA, 19 nt, Homo sapiens
  misc_RNA (1)...(19): siRNA sense strand
uggagcacgucuacaguca

SEQ ID NO: 894557 - RNA, 19 nt, Homo sapiens
  misc_RNA (1)...(19): siRNA sense strand
cagcagauuccagaaacaa

SEQ ID NO: 894558 - RNA, 19 nt, Homo sapiens
  misc_RNA (1)...(19): siRNA sense strand
agucagccguggccaaaca

SEQ ID NO: 894559 - RNA, 19 nt, Homo sapiens
  misc_RNA (1)...(19): siRNA sense strand
auccggagguggcgaaaug

SEQ ID NO: 894560 - RNA, 19 nt, Homo sapiens
  misc_RNA (1)...(19): siRNA sense strand
cagauuccagaaacaagaa

SEQ ID NO: 894561 - RNA, 19 nt, Homo sapiens
  misc_RNA (1)...(19): siRNA sense strand
ccaaacaccaguggguuca

SEQ ID NO: 894562 - RNA, 19 nt, Homo sapiens
  misc_RNA (1)...(19): siRNA sense strand
gcacgucuacagucacacu

SEQ ID NO: 894563 - RNA, 19 nt, Homo sapiens
  misc_RNA (1)...(19): siRNA sense strand
ccaccgcugucuggagugu

SEQ ID NO: 894564 - RNA, 19 nt, Homo sapiens
  misc_RNA (1)...(19): siRNA sense strand
gaaccagaauggcaaauua

SEQ ID NO: 894565 - RNA, 19 nt, Homo sapiens
  misc_RNA (1)...(19): siRNA sense strand
gaucgaggcuuccuucaau

SEQ ID NO: 894566 - RNA, 19 nt, Homo sapiens
  misc_RNA (1)...(19): siRNA sense strand
gcaucgggcugaucaauga

SEQ ID NO: 894567 - RNA, 19 nt, Homo sapiens
  misc_RNA (1)...(19): siRNA sense strand
gcauccaacugcugcauaa

SEQ ID NO: 894568 - RNA, 19 nt, Homo sapiens
  misc_RNA (1)...(19): siRNA sense strand
caaaggugaccaacuuaua

SEQ ID NO: 894569 - RNA, 19 nt, Homo sapiens
  misc_RNA (1)...(19): siRNA sense strand
ucaagaccaucguggaguu

SEQ ID NO: 894570 - RNA, 19 nt, Homo sapiens
  misc_RNA (1)...(19): siRNA sense strand
ugaaggucaucacagcuaa

SEQ ID NO: 894571 - RNA, 19 nt, Homo sapiens
  misc_RNA (1)...(19): siRNA sense strand
ggaguuugaccuucuguau

SEQ ID NO: 894572 - RNA, 19 nt, Homo sapiens
  misc_RNA (1)...(19): siRNA sense strand
caucaucacugagaucauc

SEQ ID NO: 894573 - RNA, 19 nt, Homo sapiens
  misc_RNA (1)...(19): siRNA sense strand
ggacaugguggcuggauuc

SEQ ID NO: 894574 - RNA, 19 nt, Homo sapiens
  misc_RNA (1)...(19): siRNA sense strand
ggauccagcugaugaacuc

SEQ ID NO: 894575 - RNA, 19 nt, Homo sapiens
  misc_RNA (1)...(19): siRNA sense strand
ccaagugguucaauaacuc

SEQ ID NO: 894576 - RNA, 19 nt, Homo sapiens
  misc_RNA (1)...(19): siRNA sense strand
gugaagcccuccgcccuuu

SEQ ID NO: 894577 - RNA, 19 nt, Homo sapiens
  misc_RNA (1)...(19): siRNA sense strand
uagcuaagcaggucaugaa

SEQ ID NO: 894578 - RNA, 19 nt, Homo sapiens
  misc_RNA (1)...(19): siRNA sense strand
caagguggcccaacugauc

SEQ ID NO: 894579 - RNA, 19 nt, Homo sapiens
  misc_RNA (1)...(19): siRNA sense strand
gcauugaccgucuggaguu

SEQ ID NO: 894580 - RNA, 19 nt, Homo sapiens
  misc_RNA (1)...(19): siRNA sense strand
ccaaccugauguucugaaa

SEQ ID NO: 894581 - RNA, 19 nt, Homo sapiens
  misc_RNA (1)...(19): siRNA sense strand
ccauuucccucagcauuga

SEQ ID NO: 894582 - RNA, 19 nt, Homo sapiens
  misc_RNA (1)...(19): siRNA sense strand
gcccaaaagucaucaaaga

SEQ ID NO: 894583 - RNA, 19 nt, Homo sapiens
  misc_RNA (1)...(19): siRNA sense strand
cagaauggcaaauuaagau

SEQ ID NO: 894584 - RNA, 19 nt, Homo sapiens
  misc_RNA (1)...(19): siRNA sense strand
cugaugaacucugggauug

SEQ ID NO: 894585 - RNA, 19 nt, Homo sapiens
  misc_RNA (1)...(19): siRNA sense strand
agggaaaggugaccaagug

SEQ ID NO: 894586 - RNA, 19 nt, Homo sapiens
  misc_RNA (1)...(19): siRNA sense strand
gcugugcucucuccagaag

SEQ ID NO: 894587 - RNA, 19 nt, Homo sapiens
  misc_RNA (1)...(19): siRNA sense strand
cuacccagaucgugaagau

SEQ ID NO: 894588 - RNA, 19 nt, Homo sapiens
  misc_RNA (1)...(19): siRNA sense strand
ggucaugaaccuccuagug

SEQ ID NO: 894589 - RNA, 19 nt, Homo sapiens
  misc_RNA (1)...(19): siRNA sense strand
guuccaaccugauguucug

SEQ ID NO: 894590 - RNA, 19 nt, Homo sapiens
  misc_RNA (1)...(19): siRNA sense strand
ugaaaaggcugcagauaag

SEQ ID NO: 894591 - RNA, 19 nt, Homo sapiens
  misc_RNA (1)...(19): siRNA sense strand
gugaagcccucggccaaug

SEQ ID NO: 894592 - RNA, 19 nt, Homo sapiens
  misc_RNA (1)...(19): siRNA sense strand
gaucgugcuggaaguguuu

SEQ ID NO: 894593 - RNA, 19 nt, Homo sapiens
  misc_RNA (1)...(19): siRNA sense strand
caugguggcuggauucaac

SEQ ID NO: 894594 - RNA, 19 nt, Homo sapiens
  misc_RNA (1)...(19): siRNA sense strand
ggucaucacagcuaacauc

SEQ ID NO: 894595 - RNA, 19 nt, Homo sapiens
  misc_RNA (1)...(19): siRNA sense strand
aaacccaccucuccugucu

SEQ ID NO: 894596 - RNA, 19 nt, Homo sapiens
  misc_RNA (1)...(19): siRNA sense strand
ccagaauggcaaauuaaga

SEQ ID NO: 894597 - RNA, 19 nt, Homo sapiens
  misc_RNA (1)...(19): siRNA sense strand
gcucggaagcucaguuuua

SEQ ID NO: 894598 - RNA, 19 nt, Homo sapiens
  misc_RNA (1)...(19): siRNA sense strand
gaccuucacccuucucugu

SEQ ID NO: 894599 - RNA, 19 nt, Homo sapiens
  misc_RNA (1)...(19): siRNA sense strand
gauccaagccacccucagu

SEQ ID NO: 894600 - RNA, 19 nt, Homo sapiens
  misc_RNA (1)...(19): siRNA sense strand
gugaccaacuuauacucaa

SEQ ID NO: 894601 - RNA, 19 nt, Homo sapiens
  misc_RNA (1)...(19): siRNA sense strand
ugacacaggagcugaagga

SEQ ID NO: 894602 - RNA, 19 nt, Homo sapiens
  misc_RNA (1)...(19): siRNA sense strand
ccaaaggugaccaacuuau

SEQ ID NO: 894603 - RNA, 19 nt, Homo sapiens
  misc_RNA (1)...(19): siRNA sense strand
ucgugaagauccuaacuca

SEQ ID NO: 894604 - RNA, 19 nt, Homo sapiens
  misc_RNA (1)...(19): siRNA sense strand
ggugaaggccuugggauuc

SEQ ID NO: 894605 - RNA, 19 nt, Homo sapiens
  misc_RNA (1)...(19): siRNA sense strand
gcugaugaacucugggauu

SEQ ID NO: 894606 - RNA, 19 nt, Homo sapiens
  misc_RNA (1)...(19): siRNA sense strand
ccaaaagucaucaaagaaa

SEQ ID NO: 894607 - RNA, 19 nt, Homo sapiens
  misc_RNA (1)...(19): siRNA sense strand
gaccaggagcugcuaguca

SEQ ID NO: 894608 - RNA, 19 nt, Homo sapiens
  misc_RNA (1)...(19): siRNA sense strand
ugugcucucuccagaagaa

SEQ ID NO: 894609 - RNA, 19 nt, Homo sapiens
  misc_RNA (1)...(19): siRNA sense strand
gaagcccuccgcccuuugu

SEQ ID NO: 894610 - RNA, 19 nt, Homo sapiens
  misc_RNA (1)...(19): siRNA sense strand
gaauggcaaauuaagaucu

SEQ ID NO: 894611 - RNA, 19 nt, Homo sapiens
  misc_RNA (1)...(19): siRNA sense strand
accaggagcugcuagucaa

SEQ ID NO: 894612 - RNA, 19 nt, Homo sapiens
  misc_RNA (1)...(19): siRNA sense strand
ucaagcaucgggcugauca

SEQ ID NO: 894613 - RNA, 19 nt, Homo sapiens
  misc_RNA (1)...(19): siRNA sense strand
gugacaccauucagcucua

SEQ ID NO: 894614 - RNA, 19 nt, Homo sapiens
  misc_RNA (1)...(19): siRNA sense strand
ugccaucccugcccaaucu

SEQ ID NO: 894615 - RNA, 19 nt, Homo sapiens
  misc_RNA (1)...(19): siRNA sense strand
cgaaccagaauggcaaauu

SEQ ID NO: 894616 - RNA, 19 nt, Homo sapiens
  misc_RNA (1)...(19): siRNA sense strand
ugaacaccguccugaagca

SEQ ID NO: 894617 - RNA, 19 nt, Homo sapiens
  misc_RNA (1)...(19): siRNA sense strand
aagaauucaugguccuguu

SEQ ID NO: 894618 - RNA, 19 nt, Homo sapiens
  misc_RNA (1)...(19): siRNA sense strand
gcccauuucccucagcauu

SEQ ID NO: 894619 - RNA, 19 nt, Homo sapiens
  misc_RNA (1)...(19): siRNA sense strand
uggugaaggugcccauuuc

SEQ ID NO: 894620 - RNA, 19 nt, Homo sapiens
  misc_RNA (1)...(19): siRNA sense strand
cauugaccgucuggaguuu

SEQ ID NO: 894621 - RNA, 19 nt, Homo sapiens
  misc_RNA (1)...(19): siRNA sense strand
aaccagaauggcaaauuaa

SEQ ID NO: 894622 - RNA, 19 nt, Homo sapiens
  misc_RNA (1)...(19): siRNA sense strand
aaaggugaccaacuuauac

SEQ ID NO: 894623 - RNA, 19 nt, Homo sapiens
  misc_RNA (1)...(19): siRNA sense strand
ggugaccaacuuauacuca

SEQ ID NO: 894624 - RNA, 19 nt, Homo sapiens
  misc_RNA (1)...(19): siRNA sense strand
gaguuugaccuucuguauc

SEQ ID NO: 894625 - RNA, 19 nt, Homo sapiens
  misc_RNA (1)...(19): siRNA sense strand
uucaauaacucugcagcuu

SEQ ID NO: 894626 - RNA, 19 nt, Homo sapiens
  misc_RNA (1)...(19): siRNA sense strand
ccagcugugucccgugauc

SEQ ID NO: 894627 - RNA, 19 nt, Homo sapiens
  misc_RNA (1)...(19): siRNA sense strand
gugaaggccuugggauucg

SEQ ID NO: 894628 - RNA, 19 nt, Homo sapiens
  misc_RNA (1)...(19): siRNA sense strand
cugaaggucaucacagcua

SEQ ID NO: 894629 - RNA, 19 nt, Homo sapiens
  misc_RNA (1)...(19): siRNA sense strand
guguuucccuccagugaag

SEQ ID NO: 894630 - RNA, 19 nt, Homo sapiens
  misc_RNA (1)...(19): siRNA sense strand
ugaucgugcuggaaguguu

SEQ ID NO: 894631 - RNA, 19 nt, Homo sapiens
  misc_RNA (1)...(19): siRNA sense strand
cccaucggcugaagucaag

SEQ ID NO: 894632 - RNA, 19 nt, Homo sapiens
  misc_RNA (1)...(19): siRNA sense strand
gcccaucggcugaagucaa

SEQ ID NO: 894633 - RNA, 19 nt, Homo sapiens
  misc_RNA (1)...(19): siRNA sense strand
ucacccuucucugugguuu

SEQ ID NO: 894634 - RNA, 19 nt, Homo sapiens
  misc_RNA (1)...(19): siRNA sense strand
ccacugcaguucucauccu

SEQ ID NO: 894635 - RNA, 19 nt, Homo sapiens
  misc_RNA (1)...(19): siRNA sense strand
aauggcaaauuaagaucug

SEQ ID NO: 894636 - RNA, 19 nt, Homo sapiens
  misc_RNA (1)...(19): siRNA sense strand
aaacaucaucacugagauc

SEQ ID NO: 894637 - RNA, 19 nt, Homo sapiens
  misc_RNA (1)...(19): siRNA sense strand
gcucucuccagaagaauuc

SEQ ID NO: 894638 - RNA, 19 nt, Homo sapiens
  misc_RNA (1)...(19): siRNA sense strand
ggacugcacugccaauugg

SEQ ID NO: 894639 - RNA, 19 nt, Homo sapiens
  misc_RNA (1)...(19): siRNA sense strand
uggaggagcucaagaagga

SEQ ID NO: 894640 - RNA, 19 nt, Homo sapiens
  misc_RNA (1)...(19): siRNA sense strand
gcacgaggcugaggugaag

SEQ ID NO: 894641 - RNA, 19 nt, Homo sapiens
  misc_RNA (1)...(19): siRNA sense strand
ucaaggagcgagaggauaa

SEQ ID NO: 894642 - RNA, 19 nt, Homo sapiens
  misc_RNA (1)...(19): siRNA sense strand
aguggaagaucaaguauga

SEQ ID NO: 894643 - RNA, 19 nt, Homo sapiens
  misc_RNA (1)...(19): siRNA sense strand
gcaggaacauugagaagcu

SEQ ID NO: 894644 - RNA, 19 nt, Homo sapiens
  misc_RNA (1)...(19): siRNA sense strand
uggcagaccugaagcaugu

SEQ ID NO: 894645 - RNA, 19 nt, Homo sapiens
  misc_RNA (1)...(19): siRNA sense strand
cugaggaccuggaagauga

SEQ ID NO: 894646 - RNA, 19 nt, Homo sapiens
  misc_RNA (1)...(19): siRNA sense strand
gcagaacgcuccccucuuc

SEQ ID NO: 894647 - RNA, 19 nt, Homo sapiens
  misc_RNA (1)...(19): siRNA sense strand
gauccgcagugcucgcuuu

SEQ ID NO: 894648 - RNA, 19 nt, Homo sapiens
  misc_RNA (1)...(19): siRNA sense strand
ccaauuggcgcgagaaaug

SEQ ID NO: 894649 - RNA, 19 nt, Homo sapiens
  misc_RNA (1)...(19): siRNA sense strand
cagagaaacugggccuuga

SEQ ID NO: 894650 - RNA, 19 nt, Homo sapiens
  misc_RNA (1)...(19): siRNA sense strand
agaaggugcugcucaagga

SEQ ID NO: 894651 - RNA, 19 nt, Homo sapiens
  misc_RNA (1)...(19): siRNA sense strand
guggagagccugcugaaga

SEQ ID NO: 894652 - RNA, 19 nt, Homo sapiens
  misc_RNA (1)...(19): siRNA sense strand
gagcucagccaguggaaga

SEQ ID NO: 894653 - RNA, 19 nt, Homo sapiens
  misc_RNA (1)...(19): siRNA sense strand
agaagcaguuccaggagaa

SEQ ID NO: 894654 - RNA, 19 nt, Homo sapiens
  misc_RNA (1)...(19): siRNA sense strand
gcguugagcaggaacauug

SEQ ID NO: 894655 - RNA, 19 nt, Homo sapiens
  misc_RNA (1)...(19): siRNA sense strand
gccaguggaagaucaagua

SEQ ID NO: 894656 - RNA, 19 nt, Homo sapiens
  misc_RNA (1)...(19): siRNA sense strand
ggacgaggaccugcaaauc

SEQ ID NO: 894657 - RNA, 19 nt, Homo sapiens
  misc_RNA (1)...(19): siRNA sense strand
gaggauaaacuggcguuga

SEQ ID NO: 894658 - RNA, 19 nt, Homo sapiens
  misc_RNA (1)...(19): siRNA sense strand
ggagcgagaggauaaacug

SEQ ID NO: 894659 - RNA, 19 nt, Homo sapiens
  misc_RNA (1)...(19): siRNA sense strand
uggacgcgcucaccaagga

SEQ ID NO: 894660 - RNA, 19 nt, Homo sapiens
  misc_RNA (1)...(19): siRNA sense strand
gagcaggaacauugagaag

SEQ ID NO: 894661 - RNA, 19 nt, Homo sapiens
  misc_RNA (1)...(19): siRNA sense strand
gcaagcugaagaagcaguu

SEQ ID NO: 894662 - RNA, 19 nt, Homo sapiens
  misc_RNA (1)...(19): siRNA sense strand
gugcauggcaagcugaaga

SEQ ID NO: 894663 - RNA, 19 nt, Homo sapiens
  misc_RNA (1)...(19): siRNA sense strand
gcaagaccaagcaggagau

SEQ ID NO: 894664 - RNA, 19 nt, Homo sapiens
  misc_RNA (1)...(19): siRNA sense strand
caggaacauugagaagcua

SEQ ID NO: 894665 - RNA, 19 nt, Homo sapiens
  misc_RNA (1)...(19): siRNA sense strand
aggauaaacuggcguugag

SEQ ID NO: 894666 - RNA, 19 nt, Homo sapiens
  misc_RNA (1)...(19): siRNA sense strand
cccagaaggugcugcucaa

SEQ ID NO: 894667 - RNA, 19 nt, Homo sapiens
  misc_RNA (1)...(19): siRNA sense strand
ggguggaggagcucaagaa

SEQ ID NO: 894668 - RNA, 19 nt, Homo sapiens
  misc_RNA (1)...(19): siRNA sense strand
uggagagccugcugaagag

SEQ ID NO: 894669 - RNA, 19 nt, Homo sapiens
  misc_RNA (1)...(19): siRNA sense strand
agacggagcagagcgagaa

SEQ ID NO: 894670 - RNA, 19 nt, Homo sapiens
  misc_RNA (1)...(19): siRNA sense strand
ggagcuggcagaccugaag

SEQ ID NO: 894671 - RNA, 19 nt, Homo sapiens
  misc_RNA (1)...(19): siRNA sense strand
gaacauugagaagcuagag

SEQ ID NO: 894672 - RNA, 19 nt, Homo sapiens
  misc_RNA (1)...(19): siRNA sense strand
gccuugagcgggagaacaa

SEQ ID NO: 894673 - RNA, 19 nt, Homo sapiens
  misc_RNA (1)...(19): siRNA sense strand
gagcgagaaccugcaagug

SEQ ID NO: 894674 - RNA, 19 nt, Homo sapiens
  misc_RNA (1)...(19): siRNA sense strand
aggcugaggugaagaagcu

SEQ ID NO: 894675 - RNA, 19 nt, Homo sapiens
  misc_RNA (1)...(19): siRNA sense strand
cggcgcagauggagaagac

SEQ ID NO: 894676 - RNA, 19 nt, Homo sapiens
  misc_RNA (1)...(19): siRNA sense strand
acgaggaccugcaaaucca

SEQ ID NO: 894677 - RNA, 19 nt, Homo sapiens
  misc_RNA (1)...(19): siRNA sense strand
gcccacaaccaggcacgua

SEQ ID NO: 894678 - RNA, 19 nt, Homo sapiens
  misc_RNA (1)...(19): siRNA sense strand
uaugaggagcugagcaaga

SEQ ID NO: 894679 - RNA, 19 nt, Homo sapiens
  misc_RNA (1)...(19): siRNA sense strand
ugucugaggaccuggaaga

SEQ ID NO: 894680 - RNA, 19 nt, Homo sapiens
  misc_RNA (1)...(19): siRNA sense strand
gagcaugccagaggagucu

SEQ ID NO: 894681 - RNA, 19 nt, Homo sapiens
  misc_RNA (1)...(19): siRNA sense strand
caaggagcgagaggauaaa

SEQ ID NO: 894682 - RNA, 19 nt, Homo sapiens
  misc_RNA (1)...(19): siRNA sense strand
gaaccuggcuucuguagga

SEQ ID NO: 894683 - RNA, 19 nt, Homo sapiens
  misc_RNA (1)...(19): siRNA sense strand
gagagacuguuugaaauua

SEQ ID NO: 894684 - RNA, 19 nt, Homo sapiens
  misc_RNA (1)...(19): siRNA sense strand
gguaaagccuucaaauauu

SEQ ID NO: 894685 - RNA, 19 nt, Homo sapiens
  misc_RNA (1)...(19): siRNA sense strand
ccagagaaguuauaucauu

SEQ ID NO: 894686 - RNA, 19 nt, Homo sapiens
  misc_RNA (1)...(19): siRNA sense strand
guaaagccuucaaauauuc

SEQ ID NO: 894687 - RNA, 19 nt, Homo sapiens
  misc_RNA (1)...(19): siRNA sense strand
gguaaagccuucaguuguu

SEQ ID NO: 894688 - RNA, 19 nt, Homo sapiens
  misc_RNA (1)...(19): siRNA sense strand
guagagagacuguuugaaa

SEQ ID NO: 894689 - RNA, 19 nt, Homo sapiens
  misc_RNA (1)...(19): siRNA sense strand
gugauaaagccuucaauua

SEQ ID NO: 894690 - RNA, 19 nt, Homo sapiens
  misc_RNA (1)...(19): siRNA sense strand
gagaaacccuaugaaugua

SEQ ID NO: 894691 - RNA, 19 nt, Homo sapiens
  misc_RNA (1)...(19): siRNA sense strand
ggagaaaucuaagcaguca

SEQ ID NO: 894692 - RNA, 19 nt, Homo sapiens
  misc_RNA (1)...(19): siRNA sense strand
gagaaacccuaugcaugua

SEQ ID NO: 894693 - RNA, 19 nt, Homo sapiens
  misc_RNA (1)...(19): siRNA sense strand
gagagaaacccuaugaaug

SEQ ID NO: 894694 - RNA, 19 nt, Homo sapiens
  misc_RNA (1)...(19): siRNA sense strand
uaaagaaggcagucaauau

SEQ ID NO: 894695 - RNA, 19 nt, Homo sapiens
  misc_RNA (1)...(19): siRNA sense strand
uauccaagaugacuucaaa

SEQ ID NO: 894696 - RNA, 19 nt, Homo sapiens
  misc_RNA (1)...(19): siRNA sense strand
cagagaaguuauaucauug

SEQ ID NO: 894697 - RNA, 19 nt, Homo sapiens
  misc_RNA (1)...(19): siRNA sense strand
gaauguaaacaauguggua

SEQ ID NO: 894698 - RNA, 19 nt, Homo sapiens
  misc_RNA (1)...(19): siRNA sense strand
caaguuaucuucgugaaca

SEQ ID NO: 894699 - RNA, 19 nt, Homo sapiens
  misc_RNA (1)...(19): siRNA sense strand
ggagagaaacccuaugaau

SEQ ID NO: 894700 - RNA, 19 nt, Homo sapiens
  misc_RNA (1)...(19): siRNA sense strand
gagaugugaugcaagaaau

SEQ ID NO: 894701 - RNA, 19 nt, Homo sapiens
  misc_RNA (1)...(19): siRNA sense strand
gaaaagcccuaugaaugua

SEQ ID NO: 894702 - RNA, 19 nt, Homo sapiens
  misc_RNA (1)...(19): siRNA sense strand
ggcaaagccuucagucguu

SEQ ID NO: 894703 - RNA, 19 nt, Homo sapiens
  misc_RNA (1)...(19): siRNA sense strand
acagagaugugaugcaaga

SEQ ID NO: 894704 - RNA, 19 nt, Homo sapiens
  misc_RNA (1)...(19): siRNA sense strand
cuacagagaugugaugcaa

SEQ ID NO: 894705 - RNA, 19 nt, Homo sapiens
  misc_RNA (1)...(19): siRNA sense strand
ggaauguccagagaaguua

SEQ ID NO: 894706 - RNA, 19 nt, Homo sapiens
  misc_RNA (1)...(19): siRNA sense strand
uagagagacuguuugaaau

SEQ ID NO: 894707 - RNA, 19 nt, Homo sapiens
  misc_RNA (1)...(19): siRNA sense strand
cagccaggauucaaauuug

SEQ ID NO: 894708 - RNA, 19 nt, Homo sapiens
  misc_RNA (1)...(19): siRNA sense strand
ggaaugugguaagucguuu

SEQ ID NO: 894709 - RNA, 19 nt, Homo sapiens
  misc_RNA (1)...(19): siRNA sense strand
gugguaaagccuucaaaua

SEQ ID NO: 894710 - RNA, 19 nt, Homo sapiens
  misc_RNA (1)...(19): siRNA sense strand
agagaaacccuaugaaugu

SEQ ID NO: 894711 - RNA, 19 nt, Homo sapiens
  misc_RNA (1)...(19): siRNA sense strand
ggagugggcuuugcuggau

SEQ ID NO: 894712 - RNA, 19 nt, Homo sapiens
  misc_RNA (1)...(19): siRNA sense strand
gaauguaagaaauguggua

SEQ ID NO: 894713 - RNA, 19 nt, Homo sapiens
  misc_RNA (1)...(19): siRNA sense strand
gagaaaagcccuaugaaug

SEQ ID NO: 894714 - RNA, 19 nt, Homo sapiens
  misc_RNA (1)...(19): siRNA sense strand
ggaguaaagccaugugaau

SEQ ID NO: 894715 - RNA, 19 nt, Homo sapiens
  misc_RNA (1)...(19): siRNA sense strand
ucuaagcagucauguggua

SEQ ID NO: 894716 - RNA, 19 nt, Homo sapiens
  misc_RNA (1)...(19): siRNA sense strand
ggaaaagucuucauauguc

SEQ ID NO: 894717 - RNA, 19 nt, Homo sapiens
  misc_RNA (1)...(19): siRNA sense strand
ugagaagccuuuugauuuu

SEQ ID NO: 894718 - RNA, 19 nt, Homo sapiens
  misc_RNA (1)...(19): siRNA sense strand
gaacucauacuggagagaa

SEQ ID NO: 894719 - RNA, 19 nt, Homo sapiens
  misc_RNA (1)...(19): siRNA sense strand
caugaaagagcuuauaugu

SEQ ID NO: 894720 - RNA, 19 nt, Homo sapiens
  misc_RNA (1)...(19): siRNA sense strand
ugguaaagccuucaaauau

SEQ ID NO: 894721 - RNA, 19 nt, Homo sapiens
  misc_RNA (1)...(19): siRNA sense strand
gcacauccugucucacauu

SEQ ID NO: 894722 - RNA, 19 nt, Homo sapiens
  misc_RNA (1)...(19): siRNA sense strand
agugaaaccuuauggaugu

SEQ ID NO: 894723 - RNA, 19 nt, Homo sapiens
  misc_RNA (1)...(19): siRNA sense strand
uaaccuaugugagcaugaa

SEQ ID NO: 894724 - RNA, 19 nt, Homo sapiens
  misc_RNA (1)...(19): siRNA sense strand
gcacuuacacuggagagaa

SEQ ID NO: 894725 - RNA, 19 nt, Homo sapiens
  misc_RNA (1)...(19): siRNA sense strand
aaagaaggcagucaauaug

SEQ ID NO: 894726 - RNA, 19 nt, Homo sapiens
  misc_RNA (1)...(19): siRNA sense strand
guaaagccuucaguuguuc

SEQ ID NO: 894727 - RNA, 19 nt, Homo sapiens
  misc_RNA (1)...(19): siRNA sense strand
gaaacccuaugaauguaag

SEQ ID NO: 894728 - RNA, 19 nt, Homo sapiens
  misc_RNA (1)...(19): siRNA sense strand
caaaucagaagaccagaau

SEQ ID NO: 894729 - RNA, 19 nt, Homo sapiens
  misc_RNA (1)...(19): siRNA sense strand
ggagugaaaccuuauggau

SEQ ID NO: 894730 - RNA, 19 nt, Homo sapiens
  misc_RNA (1)...(19): siRNA sense strand
gaauauccaagaugacuuc

SEQ ID NO: 894731 - RNA, 19 nt, Homo sapiens
  misc_RNA (1)...(19): siRNA sense strand
cuaguaaugggccuuauaa

SEQ ID NO: 894732 - RNA, 19 nt, Homo sapiens
  misc_RNA (1)...(19): siRNA sense strand
gaaugugguaagucguuua

SEQ ID NO: 894733 - RNA, 19 nt, Homo sapiens
  misc_RNA (1)...(19): siRNA sense strand
uuauaaggguccaguguau

SEQ ID NO: 894734 - RNA, 19 nt, Homo sapiens
  misc_RNA (1)...(19): siRNA sense strand
guaacacacacuaguaaug

SEQ ID NO: 894735 - RNA, 19 nt, Homo sapiens
  misc_RNA (1)...(19): siRNA sense strand
gaaacccuaugcauguaag

SEQ ID NO: 894736 - RNA, 19 nt, Homo sapiens
  misc_RNA (1)...(19): siRNA sense strand
agagaaacccuaugcaugu

SEQ ID NO: 894737 - RNA, 19 nt, Homo sapiens
  misc_RNA (1)...(19): siRNA sense strand
ggagagaaacccuaugcau

SEQ ID NO: 894738 - RNA, 19 nt, Homo sapiens
  misc_RNA (1)...(19): siRNA sense strand
gaaaagucuucauauguca

SEQ ID NO: 894739 - RNA, 19 nt, Homo sapiens
  misc_RNA (1)...(19): siRNA sense strand
guaaagccaugugaaugca

SEQ ID NO: 894740 - RNA, 19 nt, Homo sapiens
  misc_RNA (1)...(19): siRNA sense strand
gcauguaagaaauguggua

SEQ ID NO: 894741 - RNA, 19 nt, Homo sapiens
  misc_RNA (1)...(19): siRNA sense strand
guccagagaaguuauauca

SEQ ID NO: 894742 - RNA, 19 nt, Homo sapiens
  misc_RNA (1)...(19): siRNA sense strand
uuaaagaaggcagucaaua

SEQ ID NO: 894743 - RNA, 19 nt, Homo sapiens
  misc_RNA (1)...(19): siRNA sense strand
gccuucaaauauucuagua

SEQ ID NO: 894744 - RNA, 19 nt, Homo sapiens
  misc_RNA (1)...(19): siRNA sense strand
aaucagaagaccagaauau

SEQ ID NO: 894745 - RNA, 19 nt, Homo sapiens
  misc_RNA (1)...(19): siRNA sense strand
gagaaguuauaucauugca

SEQ ID NO: 894746 - RNA, 19 nt, Homo sapiens
  misc_RNA (1)...(19): siRNA sense strand
ugaggaauguccagagaag

SEQ ID NO: 894747 - RNA, 19 nt, Homo sapiens
  misc_RNA (1)...(19): siRNA sense strand
cauccugucucacauugga

SEQ ID NO: 894748 - RNA, 19 nt, Homo sapiens
  misc_RNA (1)...(19): siRNA sense strand
gaguaaagccaugugaaug

SEQ ID NO: 894749 - RNA, 19 nt, Homo sapiens
  misc_RNA (1)...(19): siRNA sense strand
agaaggcagucaauaugga

SEQ ID NO: 894750 - RNA, 19 nt, Homo sapiens
  misc_RNA (1)...(19): siRNA sense strand
gcaugaaagagcuuauaug

SEQ ID NO: 894751 - RNA, 19 nt, Homo sapiens
  misc_RNA (1)...(19): siRNA sense strand
uguaagaaaugugguaaag

SEQ ID NO: 894752 - RNA, 19 nt, Homo sapiens
  misc_RNA (1)...(19): siRNA sense strand
ggauguaaggaauguggua

SEQ ID NO: 894753 - RNA, 19 nt, Homo sapiens
  misc_RNA (1)...(19): siRNA sense strand
accagaauauccaagauga

SEQ ID NO: 894754 - RNA, 19 nt, Homo sapiens
  misc_RNA (1)...(19): siRNA sense strand
cacuuacacuggagagaaa

SEQ ID NO: 894755 - RNA, 19 nt, Homo sapiens
  misc_RNA (1)...(19): siRNA sense strand
agagagacuguuugaaauu

SEQ ID NO: 894756 - RNA, 19 nt, Homo sapiens
  misc_RNA (1)...(19): siRNA sense strand
acagacacaugguaacaca

SEQ ID NO: 894757 - RNA, 19 nt, Homo sapiens
  misc_RNA (1)...(19): siRNA sense strand
ucagccaggauucaaauuu

SEQ ID NO: 894758 - RNA, 19 nt, Homo sapiens
  misc_RNA (1)...(19): siRNA sense strand
ucaaaagaaucucuacaga

SEQ ID NO: 894759 - RNA, 19 nt, Homo sapiens
  misc_RNA (1)...(19): siRNA sense strand
ccacuuacuugggaauaca

SEQ ID NO: 894760 - RNA, 19 nt, Homo sapiens
  misc_RNA (1)...(19): siRNA sense strand
gagcaugaaagaacucaca

SEQ ID NO: 894761 - RNA, 19 nt, Homo sapiens
  misc_RNA (1)...(19): siRNA sense strand
ccaugugaaugcagugugu

SEQ ID NO: 894762 - RNA, 19 nt, Homo sapiens
  misc_RNA (1)...(19): siRNA sense strand
ugugguaaaucauucacuu

SEQ ID NO: 894763 - RNA, 19 nt, Homo sapiens
  misc_RNA (1)...(19): siRNA sense strand
uaacacacacuaguaaugg

SEQ ID NO: 894764 - RNA, 19 nt, Homo sapiens
  misc_RNA (1)...(19): siRNA sense strand
gaccagaauauccaagaug

SEQ ID NO: 894765 - RNA, 19 nt, Homo sapiens
  misc_RNA (1)...(19): siRNA sense strand
agauguggcuguggccuuu

SEQ ID NO: 894766 - RNA, 19 nt, Homo sapiens
  misc_RNA (1)...(19): siRNA sense strand
ucacauuggaaacaaacua

SEQ ID NO: 894767 - RNA, 19 nt, Homo sapiens
  misc_RNA (1)...(19): siRNA sense strand
gaaugcaguguguguggaa

SEQ ID NO: 894768 - RNA, 19 nt, Homo sapiens
  misc_RNA (1)...(19): siRNA sense strand
ccaguucucuucgccaaca

SEQ ID NO: 894769 - RNA, 19 nt, Homo sapiens
  misc_RNA (1)...(19): siRNA sense strand
aaagagcuuauauguggua

SEQ ID NO: 894770 - RNA, 19 nt, Homo sapiens
  misc_RNA (1)...(19): siRNA sense strand
ccaguucccuucgaaagca

SEQ ID NO: 894771 - RNA, 19 nt, Homo sapiens
  misc_RNA (1)...(19): siRNA sense strand
gauguaaggaaugugguaa

SEQ ID NO: 894772 - RNA, 19 nt, Homo sapiens
  misc_RNA (1)...(19): siRNA sense strand
cacauccugucucacauug

SEQ ID NO: 894773 - RNA, 19 nt, Homo sapiens
  misc_RNA (1)...(19): siRNA sense strand
gugaaaccuuauggaugua

SEQ ID NO: 894774 - RNA, 19 nt, Homo sapiens
  misc_RNA (1)...(19): siRNA sense strand
caugaaagaacgcauacug

SEQ ID NO: 894775 - RNA, 19 nt, Homo sapiens
  misc_RNA (1)...(19): siRNA sense strand
guugacagacacaugguaa

SEQ ID NO: 894776 - RNA, 19 nt, Homo sapiens
  misc_RNA (1)...(19): siRNA sense strand
ugugaggaauguccagaga

SEQ ID NO: 894777 - RNA, 19 nt, Homo sapiens
  misc_RNA (1)...(19): siRNA sense strand
gugguaaagccuucaguug

SEQ ID NO: 894778 - RNA, 19 nt, Homo sapiens
  misc_RNA (1)...(19): siRNA sense strand
aaagcccuaugaauguaaa

SEQ ID NO: 894779 - RNA, 19 nt, Homo sapiens
  misc_RNA (1)...(19): siRNA sense strand
auacaugaaagaacgcaua

SEQ ID NO: 894780 - RNA, 19 nt, Homo sapiens
  misc_RNA (1)...(19): siRNA sense strand
ucucuucgccaacaugaaa

SEQ ID NO: 894781 - RNA, 19 nt, Homo sapiens
  misc_RNA (1)...(19): siRNA sense strand
guaggaaacaaaucagaag

SEQ ID NO: 894782 - RNA, 19 nt, Homo sapiens
  misc_RNA (1)...(19): siRNA sense strand
ggacacuucucaggaaaug

SEQ ID NO: 894783 - RNA, 19 nt, Homo sapiens
  misc_RNA (1)...(19): siRNA sense strand
ggcaagccauggagugaga

SEQ ID NO: 894784 - RNA, 19 nt, Homo sapiens
  misc_RNA (1)...(19): siRNA sense strand
gccggacacuucucaggaa

SEQ ID NO: 894785 - RNA, 19 nt, Homo sapiens
  misc_RNA (1)...(19): siRNA sense strand
gaggcaagccauggaguga

SEQ ID NO: 894786 - RNA, 19 nt, Homo sapiens
  misc_RNA (1)...(19): siRNA sense strand
gguucuuccuguucuguga

SEQ ID NO: 894787 - RNA, 19 nt, Homo sapiens
  misc_RNA (1)...(19): siRNA sense strand
ccagagcugcacaggguuu

SEQ ID NO: 894788 - RNA, 19 nt, Homo sapiens
  misc_RNA (1)...(19): siRNA sense strand
cuacaaaggaggacaagac

SEQ ID NO: 894789 - RNA, 19 nt, Homo sapiens
  misc_RNA (1)...(19): siRNA sense strand
ccggacacuucucaggaaa

SEQ ID NO: 894790 - RNA, 19 nt, Homo sapiens
  misc_RNA (1)...(19): siRNA sense strand
caguggagagggcuacaaa

SEQ ID NO: 894791 - RNA, 19 nt, Homo sapiens
  misc_RNA (1)...(19): siRNA sense strand
gaacaugggugaucgguuu

SEQ ID NO: 894792 - RNA, 19 nt, Homo sapiens
  misc_RNA (1)...(19): siRNA sense strand
cgagaaagcugcacaguau

SEQ ID NO: 894793 - RNA, 19 nt, Homo sapiens
  misc_RNA (1)...(19): siRNA sense strand
gaaaugagcuugggcugaa

SEQ ID NO: 894794 - RNA, 19 nt, Homo sapiens
  misc_RNA (1)...(19): siRNA sense strand
gagguugacuuuccaauga

SEQ ID NO: 894795 - RNA, 19 nt, Homo sapiens
  misc_RNA (1)...(19): siRNA sense strand
ucaaagagauaugccguua

SEQ ID NO: 894796 - RNA, 19 nt, Homo sapiens
  misc_RNA (1)...(19): siRNA sense strand
aaagagauaugccguuauu

SEQ ID NO: 894797 - RNA, 19 nt, Homo sapiens
  misc_RNA (1)...(19): siRNA sense strand
gaagagaagcuaaagaaau

SEQ ID NO: 894798 - RNA, 19 nt, Homo sapiens
  misc_RNA (1)...(19): siRNA sense strand
gaagugagcaggauagaau

SEQ ID NO: 894799 - RNA, 19 nt, Homo sapiens
  misc_RNA (1)...(19): siRNA sense strand
aagagaagcuaaagaaaug

SEQ ID NO: 894800 - RNA, 19 nt, Homo sapiens
  misc_RNA (1)...(19): siRNA sense strand
gaacggcuccugucgaaug

SEQ ID NO: 894801 - RNA, 19 nt, Homo sapiens
  misc_RNA (1)...(19): siRNA sense strand
gggcagaucaugauugaaa

SEQ ID NO: 894802 - RNA, 19 nt, Homo sapiens
  misc_RNA (1)...(19): siRNA sense strand
gaaaucaacagaggauauu

SEQ ID NO: 894803 - RNA, 19 nt, Homo sapiens
  misc_RNA (1)...(19): siRNA sense strand
ccgcaaaccuccugaagug

SEQ ID NO: 894804 - RNA, 19 nt, Homo sapiens
  misc_RNA (1)...(19): siRNA sense strand
gagagagccauguucauaa

SEQ ID NO: 894805 - RNA, 19 nt, Homo sapiens
  misc_RNA (1)...(19): siRNA sense strand
ggaagagaagcuaaagaaa

SEQ ID NO: 894806 - RNA, 19 nt, Homo sapiens
  misc_RNA (1)...(19): siRNA sense strand
ugucugaacuggaagagaa

SEQ ID NO: 894807 - RNA, 19 nt, Homo sapiens
  misc_RNA (1)...(19): siRNA sense strand
ugagagagccauguucaua

SEQ ID NO: 894808 - RNA, 19 nt, Homo sapiens
  misc_RNA (1)...(19): siRNA sense strand
cugaaugugugcugguuua

SEQ ID NO: 894809 - RNA, 19 nt, Homo sapiens
  misc_RNA (1)...(19): siRNA sense strand
gagccauguucauaaacua

SEQ ID NO: 894810 - RNA, 19 nt, Homo sapiens
  misc_RNA (1)...(19): siRNA sense strand
agagagccauguucauaaa

SEQ ID NO: 894811 - RNA, 19 nt, Homo sapiens
  misc_RNA (1)...(19): siRNA sense strand
gacacauacuggauucaaa

SEQ ID NO: 894812 - RNA, 19 nt, Homo sapiens
  misc_RNA (1)...(19): siRNA sense strand
gaacuggaagagaagcuaa

SEQ ID NO: 894813 - RNA, 19 nt, Homo sapiens
  misc_RNA (1)...(19): siRNA sense strand
gauaccaccuucuggagau

SEQ ID NO: 894814 - RNA, 19 nt, Homo sapiens
  misc_RNA (1)...(19): siRNA sense strand
cauacuggauucaaagaga

SEQ ID NO: 894815 - RNA, 19 nt, Homo sapiens
  misc_RNA (1)...(19): siRNA sense strand
gcuacuggcaugacccuua

SEQ ID NO: 894816 - RNA, 19 nt, Homo sapiens
  misc_RNA (1)...(19): siRNA sense strand
gagaagcuaaagaaaugua

SEQ ID NO: 894817 - RNA, 19 nt, Homo sapiens
  misc_RNA (1)...(19): siRNA sense strand
gagauuaaaggaugaagau

SEQ ID NO: 894818 - RNA, 19 nt, Homo sapiens
  misc_RNA (1)...(19): siRNA sense strand
aagaacggcuccugucgaa

SEQ ID NO: 894819 - RNA, 19 nt, Homo sapiens
  misc_RNA (1)...(19): siRNA sense strand
gagauaugccguuauugga

SEQ ID NO: 894820 - RNA, 19 nt, Homo sapiens
  misc_RNA (1)...(19): siRNA sense strand
gcaagucauuagagucaca

SEQ ID NO: 894821 - RNA, 19 nt, Homo sapiens
  misc_RNA (1)...(19): siRNA sense strand
gcaugacccuuacauacag

SEQ ID NO: 894822 - RNA, 19 nt, Homo sapiens
  misc_RNA (1)...(19): siRNA sense strand
gaagugggcagccaacagu

SEQ ID NO: 894823 - RNA, 19 nt, Homo sapiens
  misc_RNA (1)...(19): siRNA sense strand
gagcugaagugagcaggau

SEQ ID NO: 894824 - RNA, 19 nt, Homo sapiens
  misc_RNA (1)...(19): siRNA sense strand
uggaagagaagcuaaagaa

SEQ ID NO: 894825 - RNA, 19 nt, Homo sapiens
  misc_RNA (1)...(19): siRNA sense strand
ggcugaaggagauaacuua

SEQ ID NO: 894826 - RNA, 19 nt, Homo sapiens
  misc_RNA (1)...(19): siRNA sense strand
caggauagaaucacuugaa

SEQ ID NO: 894827 - RNA, 19 nt, Homo sapiens
  misc_RNA (1)...(19): siRNA sense strand
ggacacauacuggauucaa

SEQ ID NO: 894828 - RNA, 19 nt, Homo sapiens
  misc_RNA (1)...(19): siRNA sense strand
ggagaccugcaagucauua

SEQ ID NO: 894829 - RNA, 19 nt, Homo sapiens
  misc_RNA (1)...(19): siRNA sense strand
caaaggaggaaaugagcuu

SEQ ID NO: 894830 - RNA, 19 nt, Homo sapiens
  misc_RNA (1)...(19): siRNA sense strand
ugaaaucaacagaggauau

SEQ ID NO: 894831 - RNA, 19 nt, Homo sapiens
  misc_RNA (1)...(19): siRNA sense strand
cauggugucagucagcuua

SEQ ID NO: 894832 - RNA, 19 nt, Homo sapiens
  misc_RNA (1)...(19): siRNA sense strand
gauggacacauacuggauu

SEQ ID NO: 894833 - RNA, 19 nt, Homo sapiens
  misc_RNA (1)...(19): siRNA sense strand
gauuaaaggaugaagaucu

SEQ ID NO: 894834 - RNA, 19 nt, Homo sapiens
  misc_RNA (1)...(19): siRNA sense strand
ggugucagucagcuuauaa

SEQ ID NO: 894835 - RNA, 19 nt, Homo sapiens
  misc_RNA (1)...(19): siRNA sense strand
gcuuauaaaggcauuucua

SEQ ID NO: 894836 - RNA, 19 nt, Homo sapiens
  misc_RNA (1)...(19): siRNA sense strand
gaggaaagccccugaaauc

SEQ ID NO: 894837 - RNA, 19 nt, Homo sapiens
  misc_RNA (1)...(19): siRNA sense strand
gguugacuuuccaaugauu

SEQ ID NO: 894838 - RNA, 19 nt, Homo sapiens
  misc_RNA (1)...(19): siRNA sense strand
ggagauuaaaggaugaaga

SEQ ID NO: 894839 - RNA, 19 nt, Homo sapiens
  misc_RNA (1)...(19): siRNA sense strand
gucauuagagucacagaaa

SEQ ID NO: 894840 - RNA, 19 nt, Homo sapiens
  misc_RNA (1)...(19): siRNA sense strand
gagguuugcaguaagcauu

SEQ ID NO: 894841 - RNA, 19 nt, Homo sapiens
  misc_RNA (1)...(19): siRNA sense strand
ggcaugacccuuacauaca

SEQ ID NO: 894842 - RNA, 19 nt, Homo sapiens
  misc_RNA (1)...(19): siRNA sense strand
guggagaccugcaagucau

SEQ ID NO: 894843 - RNA, 19 nt, Homo sapiens
  misc_RNA (1)...(19): siRNA sense strand
ggaaagccccugaaaucaa

SEQ ID NO: 894844 - RNA, 19 nt, Homo sapiens
  misc_RNA (1)...(19): siRNA sense strand
gaaagccccugaaaucaac

SEQ ID NO: 894845 - RNA, 19 nt, Homo sapiens
  misc_RNA (1)...(19): siRNA sense strand
gaaagcugcacaguaucaa

SEQ ID NO: 894846 - RNA, 19 nt, Homo sapiens
  misc_RNA (1)...(19): siRNA sense strand
ucgacaugauggaguugua

SEQ ID NO: 894847 - RNA, 19 nt, Homo sapiens
  misc_RNA (1)...(19): siRNA sense strand
uugggcagaucaugauuga

SEQ ID NO: 894848 - RNA, 19 nt, Homo sapiens
  misc_RNA (1)...(19): siRNA sense strand
agaaagcugcacaguauca

SEQ ID NO: 894849 - RNA, 19 nt, Homo sapiens
  misc_RNA (1)...(19): siRNA sense strand
caaccaaaggaggaaauga

SEQ ID NO: 894850 - RNA, 19 nt, Homo sapiens
  misc_RNA (1)...(19): siRNA sense strand
cauuagagucacagaaaga

SEQ ID NO: 894851 - RNA, 19 nt, Homo sapiens
  misc_RNA (1)...(19): siRNA sense strand
caaagagauaugccguuau

SEQ ID NO: 894852 - RNA, 19 nt, Homo sapiens
  misc_RNA (1)...(19): siRNA sense strand
caucggccgucgacaugau

SEQ ID NO: 894853 - RNA, 19 nt, Homo sapiens
  misc_RNA (1)...(19): siRNA sense strand
uucuagaacugcauucaga

SEQ ID NO: 894854 - RNA, 19 nt, Homo sapiens
  misc_RNA (1)...(19): siRNA sense strand
gagcaggauagaaucacuu

SEQ ID NO: 894855 - RNA, 19 nt, Homo sapiens
  misc_RNA (1)...(19): siRNA sense strand
uuacauacagcacuuugug

SEQ ID NO: 894856 - RNA, 19 nt, Homo sapiens
  misc_RNA (1)...(19): siRNA sense strand
gcauucagaggacacacuu

SEQ ID NO: 894857 - RNA, 19 nt, Homo sapiens
  misc_RNA (1)...(19): siRNA sense strand
gcauggauaccaccuucug

SEQ ID NO: 894858 - RNA, 19 nt, Homo sapiens
  misc_RNA (1)...(19): siRNA sense strand
ucauuagagucacagaaag

SEQ ID NO: 894859 - RNA, 19 nt, Homo sapiens
  misc_RNA (1)...(19): siRNA sense strand
agagauaugccguuauugg

SEQ ID NO: 894860 - RNA, 19 nt, Homo sapiens
  misc_RNA (1)...(19): siRNA sense strand
acgagaaagcugcacagua

SEQ ID NO: 894861 - RNA, 19 nt, Homo sapiens
  misc_RNA (1)...(19): siRNA sense strand
gcaaccaaaggaggaaaug

SEQ ID NO: 894862 - RNA, 19 nt, Homo sapiens
  misc_RNA (1)...(19): siRNA sense strand
cuacuggcaugacccuuac

SEQ ID NO: 894863 - RNA, 19 nt, Homo sapiens
  misc_RNA (1)...(19): siRNA sense strand
gggcugaaggagauaacuu

SEQ ID NO: 894864 - RNA, 19 nt, Homo sapiens
  misc_RNA (1)...(19): siRNA sense strand
gaauacacaauugccaaca

SEQ ID NO: 894865 - RNA, 19 nt, Homo sapiens
  misc_RNA (1)...(19): siRNA sense strand
ggauggacacauacuggau

SEQ ID NO: 894866 - RNA, 19 nt, Homo sapiens
  misc_RNA (1)...(19): siRNA sense strand
ugagguugacuuuccaaug

SEQ ID NO: 894867 - RNA, 19 nt, Homo sapiens
  misc_RNA (1)...(19): siRNA sense strand
cuccagagcaguccgcaaa

SEQ ID NO: 894868 - RNA, 19 nt, Homo sapiens
  misc_RNA (1)...(19): siRNA sense strand
gaaugugugcugguuuaca

SEQ ID NO: 894869 - RNA, 19 nt, Homo sapiens
  misc_RNA (1)...(19): siRNA sense strand
auacuggauucaaagagau

SEQ ID NO: 894870 - RNA, 19 nt, Homo sapiens
  misc_RNA (1)...(19): siRNA sense strand
acacauacuggauucaaag

SEQ ID NO: 894871 - RNA, 19 nt, Homo sapiens
  misc_RNA (1)...(19): siRNA sense strand
uggcaugacccuuacauac

SEQ ID NO: 894872 - RNA, 19 nt, Homo sapiens
  misc_RNA (1)...(19): siRNA sense strand
cauacagcacuuugugaga

SEQ ID NO: 894873 - RNA, 19 nt, Homo sapiens
  misc_RNA (1)...(19): siRNA sense strand
gcugaaugugugcugguuu

SEQ ID NO: 894874 - RNA, 19 nt, Homo sapiens
  misc_RNA (1)...(19): siRNA sense strand
cugcaagucauuagaguca

SEQ ID NO: 894875 - RNA, 19 nt, Homo sapiens
  misc_RNA (1)...(19): siRNA sense strand
gaacaugggugaucgguuu

SEQ ID NO: 894876 - RNA, 19 nt, Homo sapiens
  misc_RNA (1)...(19): siRNA sense strand
cgagaaagcugcacaguau

SEQ ID NO: 894877 - RNA, 19 nt, Homo sapiens
  misc_RNA (1)...(19): siRNA sense strand
gaaaugagcuugggcugaa

SEQ ID NO: 894878 - RNA, 19 nt, Homo sapiens
  misc_RNA (1)...(19): siRNA sense strand
gagguugacuuuccaauga

SEQ ID NO: 894879 - RNA, 19 nt, Homo sapiens
  misc_RNA (1)...(19): siRNA sense strand
ucaaagagauaugccguua

SEQ ID NO: 894880 - RNA, 19 nt, Homo sapiens
  misc_RNA (1)...(19): siRNA sense strand
aaagagauaugccguuauu

SEQ ID NO: 894881 - RNA, 19 nt, Homo sapiens
  misc_RNA (1)...(19): siRNA sense strand
gaagagaagcuaaagaaau

SEQ ID NO: 894882 - RNA, 19 nt, Homo sapiens
  misc_RNA (1)...(19): siRNA sense strand
gaagugagcaggauagaau

SEQ ID NO: 894883 - RNA, 19 nt, Homo sapiens
  misc_RNA (1)...(19): siRNA sense strand
aagagaagcuaaagaaaug

SEQ ID NO: 894884 - RNA, 19 nt, Homo sapiens
  misc_RNA (1)...(19): siRNA sense strand
gaacggcuccugucgaaug

SEQ ID NO: 894885 - RNA, 19 nt, Homo sapiens
  misc_RNA (1)...(19): siRNA sense strand
gggcagaucaugauugaaa

SEQ ID NO: 894886 - RNA, 19 nt, Homo sapiens
  misc_RNA (1)...(19): siRNA sense strand
gaaaucaacagaggauauu

SEQ ID NO: 894887 - RNA, 19 nt, Homo sapiens
  misc_RNA (1)...(19): siRNA sense strand
ccgcaaaccuccugaagug

SEQ ID NO: 894888 - RNA, 19 nt, Homo sapiens
  misc_RNA (1)...(19): siRNA sense strand
gagagagccauguucauaa

SEQ ID NO: 894889 - RNA, 19 nt, Homo sapiens
  misc_RNA (1)...(19): siRNA sense strand
ggaagagaagcuaaagaaa

SEQ ID NO: 894890 - RNA, 19 nt, Homo sapiens
  misc_RNA (1)...(19): siRNA sense strand
ugucugaacuggaagagaa

SEQ ID NO: 894891 - RNA, 19 nt, Homo sapiens
  misc_RNA (1)...(19): siRNA sense strand
ugagagagccauguucaua

SEQ ID NO: 894892 - RNA, 19 nt, Homo sapiens
  misc_RNA (1)...(19): siRNA sense strand
cugaaugugugcugguuua

SEQ ID NO: 894893 - RNA, 19 nt, Homo sapiens
  misc_RNA (1)...(19): siRNA sense strand
gagccauguucauaaacua

SEQ ID NO: 894894 - RNA, 19 nt, Homo sapiens
  misc_RNA (1)...(19): siRNA sense strand
agagagccauguucauaaa

SEQ ID NO: 894895 - RNA, 19 nt, Homo sapiens
  misc_RNA (1)...(19): siRNA sense strand
gacacauacuggauucaaa

SEQ ID NO: 894896 - RNA, 19 nt, Homo sapiens
  misc_RNA (1)...(19): siRNA sense strand
gaacuggaagagaagcuaa

SEQ ID NO: 894897 - RNA, 19 nt, Homo sapiens
  misc_RNA (1)...(19): siRNA sense strand
gauaccaccuucuggagau

SEQ ID NO: 894898 - RNA, 19 nt, Homo sapiens
  misc_RNA (1)...(19): siRNA sense strand
cauacuggauucaaagaga

SEQ ID NO: 894899 - RNA, 19 nt, Homo sapiens
  misc_RNA (1)...(19): siRNA sense strand
gagaagcuaaagaaaugua

SEQ ID NO: 894900 - RNA, 19 nt, Homo sapiens
  misc_RNA (1)...(19): siRNA sense strand
gcuacuggcaugacccuua

SEQ ID NO: 894901 - RNA, 19 nt, Homo sapiens
  misc_RNA (1)...(19): siRNA sense strand
gagauuaaaggaugaagau

SEQ ID NO: 894902 - RNA, 19 nt, Homo sapiens
  misc_RNA (1)...(19): siRNA sense strand
aagaacggcuccugucgaa

SEQ ID NO: 894903 - RNA, 19 nt, Homo sapiens
  misc_RNA (1)...(19): siRNA sense strand
gagauaugccguuauugga

SEQ ID NO: 894904 - RNA, 19 nt, Homo sapiens
  misc_RNA (1)...(19): siRNA sense strand
gcaagucauuagagucaca

SEQ ID NO: 894905 - RNA, 19 nt, Homo sapiens
  misc_RNA (1)...(19): siRNA sense strand
gcaugacccuuacauacag

SEQ ID NO: 894906 - RNA, 19 nt, Homo sapiens
  misc_RNA (1)...(19): siRNA sense strand
gaagugggcagccaacagu

SEQ ID NO: 894907 - RNA, 19 nt, Homo sapiens
  misc_RNA (1)...(19): siRNA sense strand
gagcugaagugagcaggau

SEQ ID NO: 894908 - RNA, 19 nt, Homo sapiens
  misc_RNA (1)...(19): siRNA sense strand
uggaagagaagcuaaagaa

SEQ ID NO: 894909 - RNA, 19 nt, Homo sapiens
  misc_RNA (1)...(19): siRNA sense strand
ggcugaaggagauaacuua

SEQ ID NO: 894910 - RNA, 19 nt, Homo sapiens
  misc_RNA (1)...(19): siRNA sense strand
caggauagaaucacuugaa

SEQ ID NO: 894911 - RNA, 19 nt, Homo sapiens
  misc_RNA (1)...(19): siRNA sense strand
ggacacauacuggauucaa

SEQ ID NO: 894912 - RNA, 19 nt, Homo sapiens
  misc_RNA (1)...(19): siRNA sense strand
ggagaccugcaagucauua

SEQ ID NO: 894913 - RNA, 19 nt, Homo sapiens
  misc_RNA (1)...(19): siRNA sense strand
caaaggaggaaaugagcuu

SEQ ID NO: 894914 - RNA, 19 nt, Homo sapiens
  misc_RNA (1)...(19): siRNA sense strand
ugaaaucaacagaggauau

SEQ ID NO: 894915 - RNA, 19 nt, Homo sapiens
  misc_RNA (1)...(19): siRNA sense strand
cauggugucagucagcuua

SEQ ID NO: 894916 - RNA, 19 nt, Homo sapiens
  misc_RNA (1)...(19): siRNA sense strand
gauggacacauacuggauu

SEQ ID NO: 894917 - RNA, 19 nt, Homo sapiens
  misc_RNA (1)...(19): siRNA sense strand
gauuaaaggaugaagaucu

SEQ ID NO: 894918 - RNA, 19 nt, Homo sapiens
  misc_RNA (1)...(19): siRNA sense strand
ggugucagucagcuuauaa

SEQ ID NO: 894919 - RNA, 19 nt, Homo sapiens
  misc_RNA (1)...(19): siRNA sense strand
gcuuauaaaggcauuucua

SEQ ID NO: 894920 - RNA, 19 nt, Homo sapiens
  misc_RNA (1)...(19): siRNA sense strand
gguugacuuuccaaugauu

SEQ ID NO: 894921 - RNA, 19 nt, Homo sapiens
  misc_RNA (1)...(19): siRNA sense strand
gaggaaagccccugaaauc

SEQ ID NO: 894922 - RNA, 19 nt, Homo sapiens
  misc_RNA (1)...(19): siRNA sense strand
ggagauuaaaggaugaaga

SEQ ID NO: 894923 - RNA, 19 nt, Homo sapiens
  misc_RNA (1)...(19): siRNA sense strand
gucauuagagucacagaaa

SEQ ID NO: 894924 - RNA, 19 nt, Homo sapiens
  misc_RNA (1)...(19): siRNA sense strand
ggcaugacccuuacauaca

SEQ ID NO: 894925 - RNA, 19 nt, Homo sapiens
  misc_RNA (1)...(19): siRNA sense strand
guggagaccugcaagucau

SEQ ID NO: 894926 - RNA, 19 nt, Homo sapiens
  misc_RNA (1)...(19): siRNA sense strand
gagguuugcaguaagcauu

SEQ ID NO: 894927 - RNA, 19 nt, Homo sapiens
  misc_RNA (1)...(19): siRNA sense strand
ucuaucaccuccugcuguu

SEQ ID NO: 894928 - RNA, 19 nt, Homo sapiens
  misc_RNA (1)...(19): siRNA sense strand
ggaaagccccugaaaucaa

SEQ ID NO: 894929 - RNA, 19 nt, Homo sapiens
  misc_RNA (1)...(19): siRNA sense strand
gaaagccccugaaaucaac

SEQ ID NO: 894930 - RNA, 19 nt, Homo sapiens
  misc_RNA (1)...(19): siRNA sense strand
gaaagcugcacaguaucaa

SEQ ID NO: 894931 - RNA, 19 nt, Homo sapiens
  misc_RNA (1)...(19): siRNA sense strand
ucgacaugauggaguugua

SEQ ID NO: 894932 - RNA, 19 nt, Homo sapiens
  misc_RNA (1)...(19): siRNA sense strand
uugggcagaucaugauuga

SEQ ID NO: 894933 - RNA, 19 nt, Homo sapiens
  misc_RNA (1)...(19): siRNA sense strand
agaaagcugcacaguauca

SEQ ID NO: 894934 - RNA, 19 nt, Homo sapiens
  misc_RNA (1)...(19): siRNA sense strand
caaccaaaggaggaaauga

SEQ ID NO: 894935 - RNA, 19 nt, Homo sapiens
  misc_RNA (1)...(19): siRNA sense strand
cauuagagucacagaaaga

SEQ ID NO: 894936 - RNA, 19 nt, Homo sapiens
  misc_RNA (1)...(19): siRNA sense strand
caaagagauaugccguuau

SEQ ID NO: 894937 - RNA, 19 nt, Homo sapiens
  misc_RNA (1)...(19): siRNA sense strand
caucggccgucgacaugau

SEQ ID NO: 894938 - RNA, 19 nt, Homo sapiens
  misc_RNA (1)...(19): siRNA sense strand
uucuagaacugcauucaga

SEQ ID NO: 894939 - RNA, 19 nt, Homo sapiens
  misc_RNA (1)...(19): siRNA sense strand
gagcaggauagaaucacuu

SEQ ID NO: 894940 - RNA, 19 nt, Homo sapiens
  misc_RNA (1)...(19): siRNA sense strand
uuacauacagcacuuugug

SEQ ID NO: 894941 - RNA, 19 nt, Homo sapiens
  misc_RNA (1)...(19): siRNA sense strand
gcauucagaggacacacuu

SEQ ID NO: 894942 - RNA, 19 nt, Homo sapiens
  misc_RNA (1)...(19): siRNA sense strand
gcauggauaccaccuucug

SEQ ID NO: 894943 - RNA, 19 nt, Homo sapiens
  misc_RNA (1)...(19): siRNA sense strand
ucauuagagucacagaaag

SEQ ID NO: 894944 - RNA, 19 nt, Homo sapiens
  misc_RNA (1)...(19): siRNA sense strand
agagauaugccguuauugg

SEQ ID NO: 894945 - RNA, 19 nt, Homo sapiens
  misc_RNA (1)...(19): siRNA sense strand
acgagaaagcugcacagua

SEQ ID NO: 894946 - RNA, 19 nt, Homo sapiens
  misc_RNA (1)...(19): siRNA sense strand
gcaaccaaaggaggaaaug

SEQ ID NO: 894947 - RNA, 19 nt, Homo sapiens
  misc_RNA (1)...(19): siRNA sense strand
gaauacacaauugccaaca

SEQ ID NO: 894948 - RNA, 19 nt, Homo sapiens
  misc_RNA (1)...(19): siRNA sense strand
gggcugaaggagauaacuu

SEQ ID NO: 894949 - RNA, 19 nt, Homo sapiens
  misc_RNA (1)...(19): siRNA sense strand
cuacuggcaugacccuuac

SEQ ID NO: 894950 - RNA, 19 nt, Homo sapiens
  misc_RNA (1)...(19): siRNA sense strand
ggauggacacauacuggau

SEQ ID NO: 894951 - RNA, 19 nt, Homo sapiens
  misc_RNA (1)...(19): siRNA sense strand
ugagguugacuuuccaaug

SEQ ID NO: 894952 - RNA, 19 nt, Homo sapiens
  misc_RNA (1)...(19): siRNA sense strand
cuccagagcaguccgcaaa

SEQ ID NO: 894953 - RNA, 19 nt, Homo sapiens
  misc_RNA (1)...(19): siRNA sense strand
gaaugugugcugguuuaca

SEQ ID NO: 894954 - RNA, 19 nt, Homo sapiens
  misc_RNA (1)...(19): siRNA sense strand
auacuggauucaaagagau

SEQ ID NO: 894955 - RNA, 19 nt, Homo sapiens
  misc_RNA (1)...(19): siRNA sense strand
acacauacuggauucaaag

SEQ ID NO: 894956 - RNA, 19 nt, Homo sapiens
  misc_RNA (1)...(19): siRNA sense strand
ccacuaggcagagggaauc

SEQ ID NO: 894957 - RNA, 19 nt, Homo sapiens
  misc_RNA (1)...(19): siRNA sense strand
gaugcuucccugugcaaga

SEQ ID NO: 894958 - RNA, 19 nt, Homo sapiens
  misc_RNA (1)...(19): siRNA sense strand
gcugaaugugugcugguuu

SEQ ID NO: 894959 - RNA, 19 nt, Homo sapiens
  misc_RNA (1)...(19): siRNA sense strand
cauacagcacuuugugaga

SEQ ID NO: 894960 - RNA, 19 nt, Homo sapiens
  misc_RNA (1)...(19): siRNA sense strand
uggcaugacccuuacauac

SEQ ID NO: 894961 - RNA, 19 nt, Homo sapiens
  misc_RNA (1)...(19): siRNA sense strand
cugcaagucauuagaguca

SEQ ID NO: 894962 - RNA, 19 nt, Homo sapiens
  misc_RNA (1)...(19): siRNA sense strand
gagagaagccagcauauua

SEQ ID NO: 894963 - RNA, 19 nt, Homo sapiens
  misc_RNA (1)...(19): siRNA sense strand
gaacaagacccuaaagaaa

SEQ ID NO: 894964 - RNA, 19 nt, Homo sapiens
  misc_RNA (1)...(19): siRNA sense strand
ggaauuaacacaagaguuu

SEQ ID NO: 894965 - RNA, 19 nt, Homo sapiens
  misc_RNA (1)...(19): siRNA sense strand
ggaagguucuguugcuaua

SEQ ID NO: 894966 - RNA, 19 nt, Homo sapiens
  misc_RNA (1)...(19): siRNA sense strand
gaagaaagccguaaugaag

SEQ ID NO: 894967 - RNA, 19 nt, Homo sapiens
  misc_RNA (1)...(19): siRNA sense strand
cacaguagcuuacaaacua

SEQ ID NO: 894968 - RNA, 19 nt, Homo sapiens
  misc_RNA (1)...(19): siRNA sense strand
gcagguagauggaggaaug

SEQ ID NO: 894969 - RNA, 19 nt, Homo sapiens
  misc_RNA (1)...(19): siRNA sense strand
ucacucaguuuaccaauaa

SEQ ID NO: 894970 - RNA, 19 nt, Homo sapiens
  misc_RNA (1)...(19): siRNA sense strand
uggaacagguugcuucuua

SEQ ID NO: 894971 - RNA, 19 nt, Homo sapiens
  misc_RNA (1)...(19): siRNA sense strand
gaaccgagacuguggaauu

SEQ ID NO: 894972 - RNA, 19 nt, Homo sapiens
  misc_RNA (1)...(19): siRNA sense strand
ugaaagacuugcuaaagaa

SEQ ID NO: 894973 - RNA, 19 nt, Homo sapiens
  misc_RNA (1)...(19): siRNA sense strand
ccaaaugucuucaguucuu

SEQ ID NO: 894974 - RNA, 19 nt, Homo sapiens
  misc_RNA (1)...(19): siRNA sense strand
gcaaguaggacaaugcuuu

SEQ ID NO: 894975 - RNA, 19 nt, Homo sapiens
  misc_RNA (1)...(19): siRNA sense strand
ugaaacaacugcacuagga

SEQ ID NO: 894976 - RNA, 19 nt, Homo sapiens
  misc_RNA (1)...(19): siRNA sense strand
ggaacaagacccuaaagaa

SEQ ID NO: 894977 - RNA, 19 nt, Homo sapiens
  misc_RNA (1)...(19): siRNA sense strand
gcagagagaagccagcaua

SEQ ID NO: 894978 - RNA, 19 nt, Homo sapiens
  misc_RNA (1)...(19): siRNA sense strand
gagacaaucuuggaauuau

SEQ ID NO: 894979 - RNA, 19 nt, Homo sapiens
  misc_RNA (1)...(19): siRNA sense strand
ugagaucuauggccuaauu

SEQ ID NO: 894980 - RNA, 19 nt, Homo sapiens
  misc_RNA (1)...(19): siRNA sense strand
gaauuccacuucgucauuu

SEQ ID NO: 894981 - RNA, 19 nt, Homo sapiens
  misc_RNA (1)...(19): siRNA sense strand
acaagacccuaaagaaauu

SEQ ID NO: 894982 - RNA, 19 nt, Homo sapiens
  misc_RNA (1)...(19): siRNA sense strand
ggaagaaagccguaaugaa

SEQ ID NO: 894983 - RNA, 19 nt, Homo sapiens
  misc_RNA (1)...(19): siRNA sense strand
ccaaaaggcuguugaagaa

SEQ ID NO: 894984 - RNA, 19 nt, Homo sapiens
  misc_RNA (1)...(19): siRNA sense strand
uggcuuaucuggaguuuga

SEQ ID NO: 894985 - RNA, 19 nt, Homo sapiens
  misc_RNA (1)...(19): siRNA sense strand
ggaauuccacuucgucauu

SEQ ID NO: 894986 - RNA, 19 nt, Homo sapiens
  misc_RNA (1)...(19): siRNA sense strand
gaacccagacuacuguuga

SEQ ID NO: 894987 - RNA, 19 nt, Homo sapiens
  misc_RNA (1)...(19): siRNA sense strand
gaucuaagaacccagacua

SEQ ID NO: 894988 - RNA, 19 nt, Homo sapiens
  misc_RNA (1)...(19): siRNA sense strand
gaaagugaaauucguuaug

SEQ ID NO: 894989 - RNA, 19 nt, Homo sapiens
  misc_RNA (1)...(19): siRNA sense strand
gccaauaucuggguguuug

SEQ ID NO: 894990 - RNA, 19 nt, Homo sapiens
  misc_RNA (1)...(19): siRNA sense strand
gaacuucuuauggcuguua

SEQ ID NO: 894991 - RNA, 19 nt, Homo sapiens
  misc_RNA (1)...(19): siRNA sense strand
gcagagggaguaagcguuu

SEQ ID NO: 894992 - RNA, 19 nt, Homo sapiens
  misc_RNA (1)...(19): siRNA sense strand
gaacgugugagaaacuuga

SEQ ID NO: 894993 - RNA, 19 nt, Homo sapiens
  misc_RNA (1)...(19): siRNA sense strand
uugaaagacuugcuaaaga

SEQ ID NO: 894994 - RNA, 19 nt, Homo sapiens
  misc_RNA (1)...(19): siRNA sense strand
guaaauguguguuuucuga

SEQ ID NO: 894995 - RNA, 19 nt, Homo sapiens
  misc_RNA (1)...(19): siRNA sense strand
auaaagagcucugugacuu

SEQ ID NO: 894996 - RNA, 19 nt, Homo sapiens
  misc_RNA (1)...(19): siRNA sense strand
gaucuauggccuaauuaaa

SEQ ID NO: 894997 - RNA, 19 nt, Homo sapiens
  misc_RNA (1)...(19): siRNA sense strand
caacaacaaaguucuuaug

SEQ ID NO: 894998 - RNA, 19 nt, Homo sapiens
  misc_RNA (1)...(19): siRNA sense strand
cuaauuggagcaagauaua

SEQ ID NO: 894999 - RNA, 19 nt, Homo sapiens
  misc_RNA (1)...(19): siRNA sense strand
aaacuugacgaacugaaua

SEQ ID NO: 895000 - RNA, 19 nt, Homo sapiens
  misc_RNA (1)...(19): siRNA sense strand
gaaacuugacgaacugaau

SEQ ID NO: 895001 - RNA, 19 nt, Homo sapiens
  misc_RNA (1)...(19): siRNA sense strand
cauuagaagcuguuuguuu

SEQ ID NO: 895002 - RNA, 19 nt, Homo sapiens
  misc_RNA (1)...(19): siRNA sense strand
ccuggaaggugugccaaua

SEQ ID NO: 895003 - RNA, 19 nt, Homo sapiens
  misc_RNA (1)...(19): siRNA sense strand
caaaguggaauuaacacaa

SEQ ID NO: 895004 - RNA, 19 nt, Homo sapiens
  misc_RNA (1)...(19): siRNA sense strand
caacuccacucgcuuucug

SEQ ID NO: 895005 - RNA, 19 nt, Homo sapiens
  misc_RNA (1)...(19): siRNA sense strand
gcacuggaagguucuguug

SEQ ID NO: 895006 - RNA, 19 nt, Homo sapiens
  misc_RNA (1)...(19): siRNA sense strand
guuggaugcuugacaaugu

SEQ ID NO: 895007 - RNA, 19 nt, Homo sapiens
  misc_RNA (1)...(19): siRNA sense strand
gagaacgugugagaaacuu

SEQ ID NO: 895008 - RNA, 19 nt, Homo sapiens
  misc_RNA (1)...(19): siRNA sense strand
ggaaugaccaacaacaaag

SEQ ID NO: 895009 - RNA, 19 nt, Homo sapiens
  misc_RNA (1)...(19): siRNA sense strand
ucacaaaguggaauuaaca

SEQ ID NO: 895010 - RNA, 19 nt, Homo sapiens
  misc_RNA (1)...(19): siRNA sense strand
ucuuauggcuguuacuuug

SEQ ID NO: 895011 - RNA, 19 nt, Homo sapiens
  misc_RNA (1)...(19): siRNA sense strand
gaaauaguaacuucgucaa

SEQ ID NO: 895012 - RNA, 19 nt, Homo sapiens
  misc_RNA (1)...(19): siRNA sense strand
uugacgaacugaauauuga

SEQ ID NO: 895013 - RNA, 19 nt, Homo sapiens
  misc_RNA (1)...(19): siRNA sense strand
uaacacaagaguuuccaaa

SEQ ID NO: 895014 - RNA, 19 nt, Homo sapiens
  misc_RNA (1)...(19): siRNA sense strand
gugagaaacuugacgaacu

SEQ ID NO: 895015 - RNA, 19 nt, Homo sapiens
  misc_RNA (1)...(19): siRNA sense strand
ugagaaacuugacgaacug

SEQ ID NO: 895016 - RNA, 19 nt, Homo sapiens
  misc_RNA (1)...(19): siRNA sense strand
uauagugaguagcauggua

SEQ ID NO: 895017 - RNA, 19 nt, Homo sapiens
  misc_RNA (1)...(19): siRNA sense strand
auuagaagcuguuuguuuc

SEQ ID NO: 895018 - RNA, 19 nt, Homo sapiens
  misc_RNA (1)...(19): siRNA sense strand
gagggaaaccacuguaauc

SEQ ID NO: 895019 - RNA, 19 nt, Homo sapiens
  misc_RNA (1)...(19): siRNA sense strand
gaaauucguuaugccacau

SEQ ID NO: 895020 - RNA, 19 nt, Homo sapiens
  misc_RNA (1)...(19): siRNA sense strand
ggaacagguugcuucuuac

SEQ ID NO: 895021 - RNA, 19 nt, Homo sapiens
  misc_RNA (1)...(19): siRNA sense strand
aaggauggguggaacaaga

SEQ ID NO: 895022 - RNA, 19 nt, Homo sapiens
  misc_RNA (1)...(19): siRNA sense strand
cagaaagugaaauucguua

SEQ ID NO: 895023 - RNA, 19 nt, Homo sapiens
  misc_RNA (1)...(19): siRNA sense strand
gcuacaagcagauauucuu

SEQ ID NO: 895024 - RNA, 19 nt, Homo sapiens
  misc_RNA (1)...(19): siRNA sense strand
gcagcuacaagcagauauu

SEQ ID NO: 895025 - RNA, 19 nt, Homo sapiens
  misc_RNA (1)...(19): siRNA sense strand
gguuauaugcaccuuauug

SEQ ID NO: 895026 - RNA, 19 nt, Homo sapiens
  misc_RNA (1)...(19): siRNA sense strand
gggauaaagagcucuguga

SEQ ID NO: 895027 - RNA, 19 nt, Homo sapiens
  misc_RNA (1)...(19): siRNA sense strand
gguguggcuugaucuaaga

SEQ ID NO: 895028 - RNA, 19 nt, Homo sapiens
  misc_RNA (1)...(19): siRNA sense strand
uguaaucugggacaaguua

SEQ ID NO: 895029 - RNA, 19 nt, Homo sapiens
  misc_RNA (1)...(19): siRNA sense strand
gaggaaugaccaacaacaa

SEQ ID NO: 895030 - RNA, 19 nt, Homo sapiens
  misc_RNA (1)...(19): siRNA sense strand
aaaguggaauuaacacaag

SEQ ID NO: 895031 - RNA, 19 nt, Homo sapiens
  misc_RNA (1)...(19): siRNA sense strand
gaccacaguagcuuacaaa

SEQ ID NO: 895032 - RNA, 19 nt, Homo sapiens
  misc_RNA (1)...(19): siRNA sense strand
uaagaacccagacuacugu

SEQ ID NO: 895033 - RNA, 19 nt, Homo sapiens
  misc_RNA (1)...(19): siRNA sense strand
caggagacauugaaagacu

SEQ ID NO: 895034 - RNA, 19 nt, Homo sapiens
  misc_RNA (1)...(19): siRNA sense strand
agagacaaucuuggaauua

SEQ ID NO: 895035 - RNA, 19 nt, Homo sapiens
  misc_RNA (1)...(19): siRNA sense strand
ccacucagcacuuacuuca

SEQ ID NO: 895036 - RNA, 19 nt, Homo sapiens
  misc_RNA (1)...(19): siRNA sense strand
gacgaacugaauauugaua

SEQ ID NO: 895037 - RNA, 19 nt, Homo sapiens
  misc_RNA (1)...(19): siRNA sense strand
gcuaauuggagcaagauau

SEQ ID NO: 895038 - RNA, 19 nt, Homo sapiens
  misc_RNA (1)...(19): siRNA sense strand
gaaagacuugcuaaagaag

SEQ ID NO: 895039 - RNA, 19 nt, Homo sapiens
  misc_RNA (1)...(19): siRNA sense strand
gagaucuauggccuaauua

SEQ ID NO: 895040 - RNA, 19 nt, Homo sapiens
  misc_RNA (1)...(19): siRNA sense strand
ucugagaucuauggccuaa

SEQ ID NO: 895041 - RNA, 19 nt, Homo sapiens
  misc_RNA (1)...(19): siRNA sense strand
gaaggugugccaauaucug

SEQ ID NO: 895042 - RNA, 19 nt, Homo sapiens
  misc_RNA (1)...(19): siRNA sense strand
uaucucgggugugccauaa

SEQ ID NO: 895043 - RNA, 19 nt, Homo sapiens
  misc_RNA (1)...(19): siRNA sense strand
aacaagacccuaaagaaau

SEQ ID NO: 895044 - RNA, 19 nt, Homo sapiens
  misc_RNA (1)...(19): siRNA sense strand
aaagugaaauucguuaugc

SEQ ID NO: 895045 - RNA, 19 nt, Homo sapiens
  misc_RNA (1)...(19): siRNA sense strand
gcuguuauucguuggcuaa

SEQ ID NO: 895046 - RNA, 19 nt, Homo sapiens
  misc_RNA (1)...(19): siRNA sense strand
uccacucgcuuucugguuu

SEQ ID NO: 895047 - RNA, 19 nt, Homo sapiens
  misc_RNA (1)...(19): siRNA sense strand
acucagcacuuacuucagu

SEQ ID NO: 895048 - RNA, 19 nt, Homo sapiens
  misc_RNA (1)...(19): siRNA sense strand
agaaagccguaaugaaguc

SEQ ID NO: 895049 - RNA, 19 nt, Homo sapiens
  misc_RNA (1)...(19): siRNA sense strand
ggccacagaaagugaaauu

SEQ ID NO: 895050 - RNA, 19 nt, Homo sapiens
  misc_RNA (1)...(19): siRNA sense strand
acaacaaaguucuuaugca

SEQ ID NO: 895051 - RNA, 19 nt, Homo sapiens
  misc_RNA (1)...(19): siRNA sense strand
cacaagaguuuccaaaaga

SEQ ID NO: 895052 - RNA, 19 nt, Homo sapiens
  misc_RNA (1)...(19): siRNA sense strand
ggaggaaugaccaacaaca

SEQ ID NO: 895053 - RNA, 19 nt, Homo sapiens
  misc_RNA (1)...(19): siRNA sense strand
gauguaacaaaugcaagua

SEQ ID NO: 895054 - RNA, 19 nt, Homo sapiens
  misc_RNA (1)...(19): siRNA sense strand
gacaggaggaguuaaugga

SEQ ID NO: 895055 - RNA, 19 nt, Homo sapiens
  misc_RNA (1)...(19): siRNA sense strand
guuauucguuggcuaagag

SEQ ID NO: 895056 - RNA, 19 nt, Homo sapiens
  misc_RNA (1)...(19): siRNA sense strand
gaaauucuucagucugucu

SEQ ID NO: 895057 - RNA, 19 nt, Homo sapiens
  misc_RNA (1)...(19): siRNA sense strand
gauccaggccacagaaagu

SEQ ID NO: 895058 - RNA, 19 nt, Homo sapiens
  misc_RNA (1)...(19): siRNA sense strand
caagcagauauucuucaua

SEQ ID NO: 895059 - RNA, 19 nt, Homo sapiens
  misc_RNA (1)...(19): siRNA sense strand
gaaugaccaacaacaaagu

SEQ ID NO: 895060 - RNA, 19 nt, Homo sapiens
  misc_RNA (1)...(19): siRNA sense strand
ggagacauugaaagacuug

SEQ ID NO: 895061 - RNA, 19 nt, Homo sapiens
  misc_RNA (1)...(19): siRNA sense strand
gacaaucuuggaauuauag

SEQ ID NO: 895062 - RNA, 19 nt, Homo sapiens
  misc_RNA (1)...(19): siRNA sense strand
gcucagaccuggacagaua

SEQ ID NO: 895063 - RNA, 19 nt, Homo sapiens
  misc_RNA (1)...(19): siRNA sense strand
gaaagggcguauucacaua

SEQ ID NO: 895064 - RNA, 19 nt, Homo sapiens
  misc_RNA (1)...(19): siRNA sense strand
ggaagaggaugaauaugaa

SEQ ID NO: 895065 - RNA, 19 nt, Homo sapiens
  misc_RNA (1)...(19): siRNA sense strand
ggaggcagcugaccagaaa

SEQ ID NO: 895066 - RNA, 19 nt, Homo sapiens
  misc_RNA (1)...(19): siRNA sense strand
gaagauaccugugucuaug

SEQ ID NO: 895067 - RNA, 19 nt, Homo sapiens
  misc_RNA (1)...(19): siRNA sense strand
ggaaaauccuuuacacuuu

SEQ ID NO: 895068 - RNA, 19 nt, Homo sapiens
  misc_RNA (1)...(19): siRNA sense strand
gcuaagagaguaugauaaa

SEQ ID NO: 895069 - RNA, 19 nt, Homo sapiens
  misc_RNA (1)...(19): siRNA sense strand
gguccugugucaucaauaa

SEQ ID NO: 895070 - RNA, 19 nt, Homo sapiens
  misc_RNA (1)...(19): siRNA sense strand
gauagucgccuucgauuca

SEQ ID NO: 895071 - RNA, 19 nt, Homo sapiens
  misc_RNA (1)...(19): siRNA sense strand
ggaauaccaaauugacaua

SEQ ID NO: 895072 - RNA, 19 nt, Homo sapiens
  misc_RNA (1)...(19): siRNA sense strand
caauaaacauggaauacca

SEQ ID NO: 895073 - RNA, 19 nt, Homo sapiens
  misc_RNA (1)...(19): siRNA sense strand
caccugcgaugaucacuuu

SEQ ID NO: 895074 - RNA, 19 nt, Homo sapiens
  misc_RNA (1)...(19): siRNA sense strand
gacaccaucuuccgcaauu

SEQ ID NO: 895075 - RNA, 19 nt, Homo sapiens
  misc_RNA (1)...(19): siRNA sense strand
gaaaauccuuuacacuuug

SEQ ID NO: 895076 - RNA, 19 nt, Homo sapiens
  misc_RNA (1)...(19): siRNA sense strand
ccacagaaaucgugacaac

SEQ ID NO: 895077 - RNA, 19 nt, Homo sapiens
  misc_RNA (1)...(19): siRNA sense strand
ggaaagggcguauucacau

SEQ ID NO: 895078 - RNA, 19 nt, Homo sapiens
  misc_RNA (1)...(19): siRNA sense strand
gaggaugaauaugaagauu

SEQ ID NO: 895079 - RNA, 19 nt, Homo sapiens
  misc_RNA (1)...(19): siRNA sense strand
guaauugacguugacauuu

SEQ ID NO: 895080 - RNA, 19 nt, Homo sapiens
  misc_RNA (1)...(19): siRNA sense strand
guagaagaaugggauacuu

SEQ ID NO: 895081 - RNA, 19 nt, Homo sapiens
  misc_RNA (1)...(19): siRNA sense strand
ucuuggagcuggacucgua

SEQ ID NO: 895082 - RNA, 19 nt, Homo sapiens
  misc_RNA (1)...(19): siRNA sense strand
uggaagaggaugaauauga

SEQ ID NO: 895083 - RNA, 19 nt, Homo sapiens
  misc_RNA (1)...(19): siRNA sense strand
gcgaugaucacuuuaaaca

SEQ ID NO: 895084 - RNA, 19 nt, Homo sapiens
  misc_RNA (1)...(19): siRNA sense strand
cagaaaucauggcggcuuu

SEQ ID NO: 895085 - RNA, 19 nt, Homo sapiens
  misc_RNA (1)...(19): siRNA sense strand
gguggaagaggaugaauau

SEQ ID NO: 895086 - RNA, 19 nt, Homo sapiens
  misc_RNA (1)...(19): siRNA sense strand
ccagauuccucaagaugga

SEQ ID NO: 895087 - RNA, 19 nt, Homo sapiens
  misc_RNA (1)...(19): siRNA sense strand
cauggcggcuuuaucaguu

SEQ ID NO: 895088 - RNA, 19 nt, Homo sapiens
  misc_RNA (1)...(19): siRNA sense strand
uggcaggaauuugaagaua

SEQ ID NO: 895089 - RNA, 19 nt, Homo sapiens
  misc_RNA (1)...(19): siRNA sense strand
ugaauugaguagaagaaug

SEQ ID NO: 895090 - RNA, 19 nt, Homo sapiens
  misc_RNA (1)...(19): siRNA sense strand
cagcauugguccuguguca

SEQ ID NO: 895091 - RNA, 19 nt, Homo sapiens
  misc_RNA (1)...(19): siRNA sense strand
gaagauucaucaucaaacc

SEQ ID NO: 895092 - RNA, 19 nt, Homo sapiens
  misc_RNA (1)...(19): siRNA sense strand
gauuuggaaugacgggaaa

SEQ ID NO: 895093 - RNA, 19 nt, Homo sapiens
  misc_RNA (1)...(19): siRNA sense strand
cgacgugacucuuauucuc

SEQ ID NO: 895094 - RNA, 19 nt, Homo sapiens
  misc_RNA (1)...(19): siRNA sense strand
gcaaagacugucagagcuu

SEQ ID NO: 895095 - RNA, 19 nt, Homo sapiens
  misc_RNA (1)...(19): siRNA sense strand
gaauugaguagaagaaugg

SEQ ID NO: 895096 - RNA, 19 nt, Homo sapiens
  misc_RNA (1)...(19): siRNA sense strand
gaaagguggaagaggauga

SEQ ID NO: 895097 - RNA, 19 nt, Homo sapiens
  misc_RNA (1)...(19): siRNA sense strand
caacgucugcaggugauua

SEQ ID NO: 895098 - RNA, 19 nt, Homo sapiens
  misc_RNA (1)...(19): siRNA sense strand
acaaguugcuaagagagua

SEQ ID NO: 895099 - RNA, 19 nt, Homo sapiens
  misc_RNA (1)...(19): siRNA sense strand
ggaauaaaaccgaccguaa

SEQ ID NO: 895100 - RNA, 19 nt, Homo sapiens
  misc_RNA (1)...(19): siRNA sense strand
gaaaucauggcggcuuuau

SEQ ID NO: 895101 - RNA, 19 nt, Homo sapiens
  misc_RNA (1)...(19): siRNA sense strand
aaucauggcggcuuuauca

SEQ ID NO: 895102 - RNA, 19 nt, Homo sapiens
  misc_RNA (1)...(19): siRNA sense strand
ucagaaacaccacagaaau

SEQ ID NO: 895103 - RNA, 19 nt, Homo sapiens
  misc_RNA (1)...(19): siRNA sense strand
gacaacgucugcaggugau

SEQ ID NO: 895104 - RNA, 19 nt, Homo sapiens
  misc_RNA (1)...(19): siRNA sense strand
cguccuuccugcucuuuaa

SEQ ID NO: 895105 - RNA, 19 nt, Homo sapiens
  misc_RNA (1)...(19): siRNA sense strand
acaccgacgugacucuuau

SEQ ID NO: 895106 - RNA, 19 nt, Homo sapiens
  misc_RNA (1)...(19): siRNA sense strand
aaagacaacaucguuacua

SEQ ID NO: 895107 - RNA, 19 nt, Homo sapiens
  misc_RNA (1)...(19): siRNA sense strand
cagcugaccagaaaucaug

SEQ ID NO: 895108 - RNA, 19 nt, Homo sapiens
  misc_RNA (1)...(19): siRNA sense strand
cgauucaacagcacaauga

SEQ ID NO: 895109 - RNA, 19 nt, Homo sapiens
  misc_RNA (1)...(19): siRNA sense strand
ugaagauaccugugucuau

SEQ ID NO: 895110 - RNA, 19 nt, Homo sapiens
  misc_RNA (1)...(19): siRNA sense strand
gacaacaucguuacuacau

SEQ ID NO: 895111 - RNA, 19 nt, Homo sapiens
  misc_RNA (1)...(19): siRNA sense strand
cagaaacaccacagaaauc

SEQ ID NO: 895112 - RNA, 19 nt, Homo sapiens
  misc_RNA (1)...(19): siRNA sense strand
cuauggcuaucccaaagaa

SEQ ID NO: 895113 - RNA, 19 nt, Homo sapiens
  misc_RNA (1)...(19): siRNA sense strand
ggcaggaauuugaagauac

SEQ ID NO: 895114 - RNA, 19 nt, Homo sapiens
  misc_RNA (1)...(19): siRNA sense strand
gacaccgacgugacucuua

SEQ ID NO: 895115 - RNA, 19 nt, Homo sapiens
  misc_RNA (1)...(19): siRNA sense strand
cugcgaugaucacuuuaaa

SEQ ID NO: 895116 - RNA, 19 nt, Homo sapiens
  misc_RNA (1)...(19): siRNA sense strand
ugacucuuauucucaacaa

SEQ ID NO: 895117 - RNA, 19 nt, Homo sapiens
  misc_RNA (1)...(19): siRNA sense strand
cguaauugacguugacauu

SEQ ID NO: 895118 - RNA, 19 nt, Homo sapiens
  misc_RNA (1)...(19): siRNA sense strand
gaauaaaaccgaccguaau

SEQ ID NO: 895119 - RNA, 19 nt, Homo sapiens
  misc_RNA (1)...(19): siRNA sense strand
cgaccguaauugacguuga

SEQ ID NO: 895120 - RNA, 19 nt, Homo sapiens
  misc_RNA (1)...(19): siRNA sense strand
ucccaaagaagaaaugauu

SEQ ID NO: 895121 - RNA, 19 nt, Homo sapiens
  misc_RNA (1)...(19): siRNA sense strand
aacauggaauaccaaauug

SEQ ID NO: 895122 - RNA, 19 nt, Homo sapiens
  misc_RNA (1)...(19): siRNA sense strand
gcauugguccugugucauc

SEQ ID NO: 895123 - RNA, 19 nt, Homo sapiens
  misc_RNA (1)...(19): siRNA sense strand
gugauuauguugucaugac

SEQ ID NO: 895124 - RNA, 19 nt, Homo sapiens
  misc_RNA (1)...(19): siRNA sense strand
gcaggaauuugaagauacc

SEQ ID NO: 895125 - RNA, 19 nt, Homo sapiens
  misc_RNA (1)...(19): siRNA sense strand
ugggauacuucaccauuca

SEQ ID NO: 895126 - RNA, 19 nt, Homo sapiens
  misc_RNA (1)...(19): siRNA sense strand
guauucacauagacaucuu

SEQ ID NO: 895127 - RNA, 19 nt, Homo sapiens
  misc_RNA (1)...(19): siRNA sense strand
cugcugcuaugaagaaugu

SEQ ID NO: 895128 - RNA, 19 nt, Homo sapiens
  misc_RNA (1)...(19): siRNA sense strand
gagcgaauaagccuacaag

SEQ ID NO: 895129 - RNA, 19 nt, Homo sapiens
  misc_RNA (1)...(19): siRNA sense strand
ugucaucaauaaacaugga

SEQ ID NO: 895130 - RNA, 19 nt, Homo sapiens
  misc_RNA (1)...(19): siRNA sense strand
gcaggugauuauguuguca

SEQ ID NO: 895131 - RNA, 19 nt, Homo sapiens
  misc_RNA (1)...(19): siRNA sense strand
gggaaaauccuuuacacuu

SEQ ID NO: 895132 - RNA, 19 nt, Homo sapiens
  misc_RNA (1)...(19): siRNA sense strand
aagcugaggccagauauug

SEQ ID NO: 895133 - RNA, 19 nt, Homo sapiens
  misc_RNA (1)...(19): siRNA sense strand
gauucaucaucaaaccaaa

SEQ ID NO: 895134 - RNA, 19 nt, Homo sapiens
  misc_RNA (1)...(19): siRNA sense strand
ccacggugcugaccaugac

SEQ ID NO: 895135 - RNA, 19 nt, Homo sapiens
  misc_RNA (1)...(19): siRNA sense strand
cagauagucgccuucgauu

SEQ ID NO: 895136 - RNA, 19 nt, Homo sapiens
  misc_RNA (1)...(19): siRNA sense strand
ucuuuaaccuggucuacug

SEQ ID NO: 895137 - RNA, 19 nt, Homo sapiens
  misc_RNA (1)...(19): siRNA sense strand
gaauguaaaucaggauccu

SEQ ID NO: 895138 - RNA, 19 nt, Homo sapiens
  misc_RNA (1)...(19): siRNA sense strand
gagcuucuucugcugcuau

SEQ ID NO: 895139 - RNA, 19 nt, Homo sapiens
  misc_RNA (1)...(19): siRNA sense strand
gaagaggaugaauaugaag

SEQ ID NO: 895140 - RNA, 19 nt, Homo sapiens
  misc_RNA (1)...(19): siRNA sense strand
aagacaacaucguuacuac

SEQ ID NO: 895141 - RNA, 19 nt, Homo sapiens
  misc_RNA (1)...(19): siRNA sense strand
gaaaaccaaccaccacgaa

SEQ ID NO: 895142 - RNA, 19 nt, Homo sapiens
  misc_RNA (1)...(19): siRNA sense strand
gccagcaagaacagcauua

SEQ ID NO: 895143 - RNA, 19 nt, Homo sapiens
  misc_RNA (1)...(19): siRNA sense strand
gaucccagacaccaucuuc

SEQ ID NO: 895144 - RNA, 19 nt, Homo sapiens
  misc_RNA (1)...(19): siRNA sense strand
gaagaauguaaaucaggau

SEQ ID NO: 895145 - RNA, 19 nt, Homo sapiens
  misc_RNA (1)...(19): siRNA sense strand
acauccagauuccucaaga

SEQ ID NO: 895146 - RNA, 19 nt, Homo sapiens
  misc_RNA (1)...(19): siRNA sense strand
uugcuaagagaguaugaua

SEQ ID NO: 895147 - RNA, 19 nt, Homo sapiens
  misc_RNA (1)...(19): siRNA sense strand
gaccguaauugacguugac

SEQ ID NO: 895148 - RNA, 19 nt, Homo sapiens
  misc_RNA (1)...(19): siRNA sense strand
uauacugacugugguuuua

SEQ ID NO: 895149 - RNA, 19 nt, Homo sapiens
  misc_RNA (1)...(19): siRNA sense strand
gauuauguugucaugacua

SEQ ID NO: 895150 - RNA, 19 nt, Homo sapiens
  misc_RNA (1)...(19): siRNA sense strand
uaaaaccgaccguaauuga

SEQ ID NO: 895151 - RNA, 19 nt, Homo sapiens
  misc_RNA (1)...(19): siRNA sense strand
ccucagaaacaccacagaa

SEQ ID NO: 895152 - RNA, 19 nt, Homo sapiens
  misc_RNA (1)...(19): siRNA sense strand
ccgcagaggcucacuggau

SEQ ID NO: 895153 - RNA, 19 nt, Homo sapiens
  misc_RNA (1)...(19): siRNA sense strand
ccacguccuuccugcucuu

SEQ ID NO: 895154 - RNA, 19 nt, Homo sapiens
  misc_RNA (1)...(19): siRNA sense strand
ggaggaaagggcguauuca

SEQ ID NO: 895155 - RNA, 19 nt, Homo sapiens
  misc_RNA (1)...(19): siRNA sense strand
gcugcuaugaagaauguaa

SEQ ID NO: 895156 - RNA, 19 nt, Homo sapiens
  misc_RNA (1)...(19): siRNA sense strand
gcugaggccagauauugga

SEQ ID NO: 895157 - RNA, 19 nt, Homo sapiens
  misc_RNA (1)...(19): siRNA sense strand
gacugugugcuuccuguuu

SEQ ID NO: 895158 - RNA, 19 nt, Homo sapiens
  misc_RNA (1)...(19): siRNA sense strand
gacgugacucuuauucuca

SEQ ID NO: 895159 - RNA, 19 nt, Homo sapiens
  misc_RNA (1)...(19): siRNA sense strand
ggauacuucaccauucaga

SEQ ID NO: 895160 - RNA, 19 nt, Homo sapiens
  misc_RNA (1)...(19): siRNA sense strand
cauccagauuccucaagau

SEQ ID NO: 895161 - RNA, 19 nt, Homo sapiens
  misc_RNA (1)...(19): siRNA sense strand
ugagcaccaucgccaggaa

SEQ ID NO: 895162 - RNA, 19 nt, Homo sapiens
  misc_RNA (1)...(19): siRNA sense strand
gaaccaaacuacaacauua

SEQ ID NO: 895163 - RNA, 19 nt, Homo sapiens
  misc_RNA (1)...(19): siRNA sense strand
ggaaacaacuugaacugua

SEQ ID NO: 895164 - RNA, 19 nt, Homo sapiens
  misc_RNA (1)...(19): siRNA sense strand
gaagcaaagugcauuauuu

SEQ ID NO: 895165 - RNA, 19 nt, Homo sapiens
  misc_RNA (1)...(19): siRNA sense strand
uuacacagcuggucaaaua

SEQ ID NO: 895166 - RNA, 19 nt, Homo sapiens
  misc_RNA (1)...(19): siRNA sense strand
caacagaacuucccugaga

SEQ ID NO: 895167 - RNA, 19 nt, Homo sapiens
  misc_RNA (1)...(19): siRNA sense strand
gaaagucgccuguguguaa

SEQ ID NO: 895168 - RNA, 19 nt, Homo sapiens
  misc_RNA (1)...(19): siRNA sense strand
gaacauuacugucuccaaa

SEQ ID NO: 895169 - RNA, 19 nt, Homo sapiens
  misc_RNA (1)...(19): siRNA sense strand
gagcaaaccugucugcaaa

SEQ ID NO: 895170 - RNA, 19 nt, Homo sapiens
  misc_RNA (1)...(19): siRNA sense strand
agacagaggucaauuauga

SEQ ID NO: 895171 - RNA, 19 nt, Homo sapiens
  misc_RNA (1)...(19): siRNA sense strand
gaaugugacuggagaguaa

SEQ ID NO: 895172 - RNA, 19 nt, Homo sapiens
  misc_RNA (1)...(19): siRNA sense strand
ggacaagcaucguuugaaa

SEQ ID NO: 895173 - RNA, 19 nt, Homo sapiens
  misc_RNA (1)...(19): siRNA sense strand
gaaaggaguucaaaugauc

SEQ ID NO: 895174 - RNA, 19 nt, Homo sapiens
  misc_RNA (1)...(19): siRNA sense strand
gcaccugccuugccaauuu

SEQ ID NO: 895175 - RNA, 19 nt, Homo sapiens
  misc_RNA (1)...(19): siRNA sense strand
ugaaugaugucgugaauuu

SEQ ID NO: 895176 - RNA, 19 nt, Homo sapiens
  misc_RNA (1)...(19): siRNA sense strand
gaacaguacuuccaaccaa

SEQ ID NO: 895177 - RNA, 19 nt, Homo sapiens
  misc_RNA (1)...(19): siRNA sense strand
gagauacacucaccuuuga

SEQ ID NO: 895178 - RNA, 19 nt, Homo sapiens
  misc_RNA (1)...(19): siRNA sense strand
ggagauggcuucaguuaca

SEQ ID NO: 895179 - RNA, 19 nt, Homo sapiens
  misc_RNA (1)...(19): siRNA sense strand
gaaacaacuugaacuguau

SEQ ID NO: 895180 - RNA, 19 nt, Homo sapiens
  misc_RNA (1)...(19): siRNA sense strand
caaauuauccagaggaaua

SEQ ID NO: 895181 - RNA, 19 nt, Homo sapiens
  misc_RNA (1)...(19): siRNA sense strand
gcaaaguccucugcuagua

SEQ ID NO: 895182 - RNA, 19 nt, Homo sapiens
  misc_RNA (1)...(19): siRNA sense strand
guacggugcucaaguauug

SEQ ID NO: 895183 - RNA, 19 nt, Homo sapiens
  misc_RNA (1)...(19): siRNA sense strand
ggaacgagauucaacauag

SEQ ID NO: 895184 - RNA, 19 nt, Homo sapiens
  misc_RNA (1)...(19): siRNA sense strand
ccaaggagguguugcauug

SEQ ID NO: 895185 - RNA, 19 nt, Homo sapiens
  misc_RNA (1)...(19): siRNA sense strand
agacagcccugaaugauuu

SEQ ID NO: 895186 - RNA, 19 nt, Homo sapiens
  misc_RNA (1)...(19): siRNA sense strand
uuaccaagccuaugaauua

SEQ ID NO: 895187 - RNA, 19 nt, Homo sapiens
  misc_RNA (1)...(19): siRNA sense strand
gaagaugggcuguggagua

SEQ ID NO: 895188 - RNA, 19 nt, Homo sapiens
  misc_RNA (1)...(19): siRNA sense strand
gcauauaguucgcuuggaa

SEQ ID NO: 895189 - RNA, 19 nt, Homo sapiens
  misc_RNA (1)...(19): siRNA sense strand
ggaccgacauucugacuug

SEQ ID NO: 895190 - RNA, 19 nt, Homo sapiens
  misc_RNA (1)...(19): siRNA sense strand
cgaauucaccuaaucuuua

SEQ ID NO: 895191 - RNA, 19 nt, Homo sapiens
  misc_RNA (1)...(19): siRNA sense strand
ggaaaggaguucaaaugau

SEQ ID NO: 895192 - RNA, 19 nt, Homo sapiens
  misc_RNA (1)...(19): siRNA sense strand
gagcaagugucaaaggaaa

SEQ ID NO: 895193 - RNA, 19 nt, Homo sapiens
  misc_RNA (1)...(19): siRNA sense strand
caaaggaaaugaaggaaca

SEQ ID NO: 895194 - RNA, 19 nt, Homo sapiens
  misc_RNA (1)...(19): siRNA sense strand
gcauugauccugcucauaa

SEQ ID NO: 895195 - RNA, 19 nt, Homo sapiens
  misc_RNA (1)...(19): siRNA sense strand
ggaacaacaugaacugugu

SEQ ID NO: 895196 - RNA, 19 nt, Homo sapiens
  misc_RNA (1)...(19): siRNA sense strand
gaaggaggaggcccacuua

SEQ ID NO: 895197 - RNA, 19 nt, Homo sapiens
  misc_RNA (1)...(19): siRNA sense strand
gcucccgacugcacaauua

SEQ ID NO: 895198 - RNA, 19 nt, Homo sapiens
  misc_RNA (1)...(19): siRNA sense strand
guaaaguggucuaugaaug

SEQ ID NO: 895199 - RNA, 19 nt, Homo sapiens
  misc_RNA (1)...(19): siRNA sense strand
gaugauggcuuugucaaga

SEQ ID NO: 895200 - RNA, 19 nt, Homo sapiens
  misc_RNA (1)...(19): siRNA sense strand
cggaagcugucaacgauua

SEQ ID NO: 895201 - RNA, 19 nt, Homo sapiens
  misc_RNA (1)...(19): siRNA sense strand
ugacaggcauuuacaagaa

SEQ ID NO: 895202 - RNA, 19 nt, Homo sapiens
  misc_RNA (1)...(19): siRNA sense strand
gaaaggaguucugcaugga

SEQ ID NO: 895203 - RNA, 19 nt, Homo sapiens
  misc_RNA (1)...(19): siRNA sense strand
caacaagacugugagcuau

SEQ ID NO: 895204 - RNA, 19 nt, Homo sapiens
  misc_RNA (1)...(19): siRNA sense strand
gcacuucccuucagaguac

SEQ ID NO: 895205 - RNA, 19 nt, Homo sapiens
  misc_RNA (1)...(19): siRNA sense strand
aaucaugacuuccuugaaa

SEQ ID NO: 895206 - RNA, 19 nt, Homo sapiens
  misc_RNA (1)...(19): siRNA sense strand
gagagaaguuaaugaaaca

SEQ ID NO: 895207 - RNA, 19 nt, Homo sapiens
  misc_RNA (1)...(19): siRNA sense strand
ccaggaaacgguucauuua

SEQ ID NO: 895208 - RNA, 19 nt, Homo sapiens
  misc_RNA (1)...(19): siRNA sense strand
gcaccuuacugcaguuuga

SEQ ID NO: 895209 - RNA, 19 nt, Homo sapiens
  misc_RNA (1)...(19): siRNA sense strand
gcacagaacauguaaagca

SEQ ID NO: 895210 - RNA, 19 nt, Homo sapiens
  misc_RNA (1)...(19): siRNA sense strand
ucagaacuguggaggcuua

SEQ ID NO: 895211 - RNA, 19 nt, Homo sapiens
  misc_RNA (1)...(19): siRNA sense strand
cacggaagcuccauccaua

SEQ ID NO: 895212 - RNA, 19 nt, Homo sapiens
  misc_RNA (1)...(19): siRNA sense strand
gaaagaggaggauuuacuu

SEQ ID NO: 895213 - RNA, 19 nt, Homo sapiens
  misc_RNA (1)...(19): siRNA sense strand
gaaacccacuuggcaugua

SEQ ID NO: 895214 - RNA, 19 nt, Homo sapiens
  misc_RNA (1)...(19): siRNA sense strand
ggacaagaguuggaacaga

SEQ ID NO: 895215 - RNA, 19 nt, Homo sapiens
  misc_RNA (1)...(19): siRNA sense strand
gauccuggcauuccuauaa

SEQ ID NO: 895216 - RNA, 19 nt, Homo sapiens
  misc_RNA (1)...(19): siRNA sense strand
ugaaugauuuggcagaauu

SEQ ID NO: 895217 - RNA, 19 nt, Homo sapiens
  misc_RNA (1)...(19): siRNA sense strand
gacaugaaauggacaggaa

SEQ ID NO: 895218 - RNA, 19 nt, Homo sapiens
  misc_RNA (1)...(19): siRNA sense strand
ccaucgaucuuccuacuuu

SEQ ID NO: 895219 - RNA, 19 nt, Homo sapiens
  misc_RNA (1)...(19): siRNA sense strand
acaguaaaguggucuauga

SEQ ID NO: 895220 - RNA, 19 nt, Homo sapiens
  misc_RNA (1)...(19): siRNA sense strand
cuaauuauccgguucagua

SEQ ID NO: 895221 - RNA, 19 nt, Homo sapiens
  misc_RNA (1)...(19): siRNA sense strand
ggugaugacuuuaagacaa

SEQ ID NO: 895222 - RNA, 19 nt, Homo sapiens
  misc_RNA (1)...(19): siRNA sense strand
ggagagcuguuuaccuaug

SEQ ID NO: 895223 - RNA, 19 nt, Homo sapiens
  misc_RNA (1)...(19): siRNA sense strand
gaacuuccgugaggauaug

SEQ ID NO: 895224 - RNA, 19 nt, Homo sapiens
  misc_RNA (1)...(19): siRNA sense strand
gaaucauacugaacaauca

SEQ ID NO: 895225 - RNA, 19 nt, Homo sapiens
  misc_RNA (1)...(19): siRNA sense strand
gcacggaguuuacaucaac

SEQ ID NO: 895226 - RNA, 19 nt, Homo sapiens
  misc_RNA (1)...(19): siRNA sense strand
gaacuacccuuuuccaaga

SEQ ID NO: 895227 - RNA, 19 nt, Homo sapiens
  misc_RNA (1)...(19): siRNA sense strand
caauuucacucaacgaaga

SEQ ID NO: 895228 - RNA, 19 nt, Homo sapiens
  misc_RNA (1)...(19): siRNA sense strand
ugaagugucucaugggaaa

SEQ ID NO: 895229 - RNA, 19 nt, Homo sapiens
  misc_RNA (1)...(19): siRNA sense strand
ggaagucgaauucaccuaa

SEQ ID NO: 895230 - RNA, 19 nt, Homo sapiens
  misc_RNA (1)...(19): siRNA sense strand
ggauaugauuucuuagaga

SEQ ID NO: 895231 - RNA, 19 nt, Homo sapiens
  misc_RNA (1)...(19): siRNA sense strand
guauuaaaguggaaccaaa

SEQ ID NO: 895232 - RNA, 19 nt, Homo sapiens
  misc_RNA (1)...(19): siRNA sense strand
gggcuucaauaucacauuu

SEQ ID NO: 895233 - RNA, 19 nt, Homo sapiens
  misc_RNA (1)...(19): siRNA sense strand
ggagauacacucaccuuug

SEQ ID NO: 895234 - RNA, 19 nt, Homo sapiens
  misc_RNA (1)...(19): siRNA sense strand
gcagucggaugauagcauu

SEQ ID NO: 895235 - RNA, 19 nt, Homo sapiens
  misc_RNA (1)...(19): siRNA sense strand
gagaacauguggauccaau

SEQ ID NO: 895236 - RNA, 19 nt, Homo sapiens
  misc_RNA (1)...(19): siRNA sense strand
gcauuggucucucacaugu

SEQ ID NO: 895237 - RNA, 19 nt, Homo sapiens
  misc_RNA (1)...(19): siRNA sense strand
cuggagagcuguuuaccua

SEQ ID NO: 895238 - RNA, 19 nt, Homo sapiens
  misc_RNA (1)...(19): siRNA sense strand
aagcaggaguaaucaguua

SEQ ID NO: 895239 - RNA, 19 nt, Homo sapiens
  misc_RNA (1)...(19): siRNA sense strand
ccacugugaugauggcuuu

SEQ ID NO: 895240 - RNA, 19 nt, Homo sapiens
  misc_RNA (1)...(19): siRNA sense strand
gacggaagcugucaacgau

SEQ ID NO: 895241 - RNA, 19 nt, Homo sapiens
  misc_RNA (1)...(19): siRNA sense strand
gaaacuggaacuacccuuu

SEQ ID NO: 895242 - RNA, 19 nt, Homo sapiens
  misc_RNA (1)...(19): siRNA sense strand
gcagggccguucccacauu

SEQ ID NO: 895243 - RNA, 19 nt, Homo sapiens
  misc_RNA (1)...(19): siRNA sense strand
ugaaggagauacucuaaag

SEQ ID NO: 895244 - RNA, 19 nt, Homo sapiens
  misc_RNA (1)...(19): siRNA sense strand
gggaaaggaguucaaauga

SEQ ID NO: 895245 - RNA, 19 nt, Homo sapiens
  misc_RNA (1)...(19): siRNA sense strand
ggauuauucugucaccaaa

SEQ ID NO: 895246 - RNA, 19 nt, Homo sapiens
  misc_RNA (1)...(19): siRNA sense strand
gugaugacuuuaagacaaa

SEQ ID NO: 895247 - RNA, 19 nt, Homo sapiens
  misc_RNA (1)...(19): siRNA sense strand
aagaaaggauucaagauuc

SEQ ID NO: 895248 - RNA, 19 nt, Homo sapiens
  misc_RNA (1)...(19): siRNA sense strand
ggaguaaucaguuauaucu

SEQ ID NO: 895249 - RNA, 19 nt, Homo sapiens
  misc_RNA (1)...(19): siRNA sense strand
gcaauaggauacaguuguc

SEQ ID NO: 895250 - RNA, 19 nt, Homo sapiens
  misc_RNA (1)...(19): siRNA sense strand
uaacuguccuggguacuuu

SEQ ID NO: 895251 - RNA, 19 nt, Homo sapiens
  misc_RNA (1)...(19): siRNA sense strand
gauuuaaacuugcuuacca

SEQ ID NO: 895252 - RNA, 19 nt, Homo sapiens
  misc_RNA (1)...(19): siRNA sense strand
ggaaugugguggucagauc

SEQ ID NO: 895253 - RNA, 19 nt, Homo sapiens
  misc_RNA (1)...(19): siRNA sense strand
uacgagggcuucaauauca

SEQ ID NO: 895254 - RNA, 19 nt, Homo sapiens
  misc_RNA (1)...(19): siRNA sense strand
gcaggaguaaucaguuaua

SEQ ID NO: 895255 - RNA, 19 nt, Homo sapiens
  misc_RNA (1)...(19): siRNA sense strand
gcacaaugcccagcaaaug

SEQ ID NO: 895256 - RNA, 19 nt, Homo sapiens
  misc_RNA (1)...(19): siRNA sense strand
caguaucuuucgaguguua

SEQ ID NO: 895257 - RNA, 19 nt, Homo sapiens
  misc_RNA (1)...(19): siRNA sense strand
gauaauacccaugagugua

SEQ ID NO: 895258 - RNA, 19 nt, Homo sapiens
  misc_RNA (1)...(19): siRNA sense strand
caggguauccggguaauua

SEQ ID NO: 895259 - RNA, 19 nt, Homo sapiens
  misc_RNA (1)...(19): siRNA sense strand
gcacguguuugcucaaugg

SEQ ID NO: 895260 - RNA, 19 nt, Homo sapiens
  misc_RNA (1)...(19): siRNA sense strand
caacagccgugugucaaga

SEQ ID NO: 895261 - RNA, 19 nt, Homo sapiens
  misc_RNA (1)...(19): siRNA sense strand
cuacaacauuaccaucuuu

SEQ ID NO: 895262 - RNA, 19 nt, Homo sapiens
  misc_RNA (1)...(19): siRNA sense strand
ggacgagggcucuuucuua

SEQ ID NO: 895263 - RNA, 19 nt, Homo sapiens
  misc_RNA (1)...(19): siRNA sense strand
caccaccucucacaauuua

SEQ ID NO: 895264 - RNA, 19 nt, Homo sapiens
  misc_RNA (1)...(19): siRNA sense strand
gauggcagcuuacaacugu

SEQ ID NO: 895265 - RNA, 19 nt, Homo sapiens
  misc_RNA (1)...(19): siRNA sense strand
acaagaagcuaaagaaagu

SEQ ID NO: 895266 - RNA, 19 nt, Homo sapiens
  misc_RNA (1)...(19): siRNA sense strand
gugccaagcuuaccuguga

SEQ ID NO: 895267 - RNA, 19 nt, Homo sapiens
  misc_RNA (1)...(19): siRNA sense strand
gacgagggcucuuucuuau

SEQ ID NO: 895268 - RNA, 19 nt, Homo sapiens
  misc_RNA (1)...(19): siRNA sense strand
gcaacgugaugaucuguga

SEQ ID NO: 895269 - RNA, 19 nt, Homo sapiens
  misc_RNA (1)...(19): siRNA sense strand
ggacgggccugugcuaaug

SEQ ID NO: 895270 - RNA, 19 nt, Homo sapiens
  misc_RNA (1)...(19): siRNA sense strand
ccacagacagugacaauga

SEQ ID NO: 895271 - RNA, 19 nt, Homo sapiens
  misc_RNA (1)...(19): siRNA sense strand
caagacagacucauaugaa

SEQ ID NO: 895272 - RNA, 19 nt, Homo sapiens
  misc_RNA (1)...(19): siRNA sense strand
gaccaaagcucggaagucu

SEQ ID NO: 895273 - RNA, 19 nt, Homo sapiens
  misc_RNA (1)...(19): siRNA sense strand
gaaagugggagacuggauu

SEQ ID NO: 895274 - RNA, 19 nt, Homo sapiens
  misc_RNA (1)...(19): siRNA sense strand
gggcagcggucauccucua

SEQ ID NO: 895275 - RNA, 19 nt, Homo sapiens
  misc_RNA (1)...(19): siRNA sense strand
gaaaggcaccuccuacaag

SEQ ID NO: 895276 - RNA, 19 nt, Homo sapiens
  misc_RNA (1)...(19): siRNA sense strand
guacaagaagcuaaagaaa

SEQ ID NO: 895277 - RNA, 19 nt, Homo sapiens
  misc_RNA (1)...(19): siRNA sense strand
cuaaugggauccacaugaa

SEQ ID NO: 895278 - RNA, 19 nt, Homo sapiens
  misc_RNA (1)...(19): siRNA sense strand
gcaaagagcagcagaucca

SEQ ID NO: 895279 - RNA, 19 nt, Homo sapiens
  misc_RNA (1)...(19): siRNA sense strand
gaccugcccuaucugauug

SEQ ID NO: 895280 - RNA, 19 nt, Homo sapiens
  misc_RNA (1)...(19): siRNA sense strand
cgagggcucuuucuuauac

SEQ ID NO: 895281 - RNA, 19 nt, Homo sapiens
  misc_RNA (1)...(19): siRNA sense strand
gaucacgggccuagagaaa

SEQ ID NO: 895282 - RNA, 19 nt, Homo sapiens
  misc_RNA (1)...(19): siRNA sense strand
caagaaggauaugguggaa

SEQ ID NO: 895283 - RNA, 19 nt, Homo sapiens
  misc_RNA (1)...(19): siRNA sense strand
gcacgugauugaaguggau

SEQ ID NO: 895284 - RNA, 19 nt, Homo sapiens
  misc_RNA (1)...(19): siRNA sense strand
aaguggagauggcagcuua

SEQ ID NO: 895285 - RNA, 19 nt, Homo sapiens
  misc_RNA (1)...(19): siRNA sense strand
uggcacaccuccuguauca

SEQ ID NO: 895286 - RNA, 19 nt, Homo sapiens
  misc_RNA (1)...(19): siRNA sense strand
cagggaaccuccagauugu

SEQ ID NO: 895287 - RNA, 19 nt, Homo sapiens
  misc_RNA (1)...(19): siRNA sense strand
ucacggaugcggucaauga

SEQ ID NO: 895288 - RNA, 19 nt, Homo sapiens
  misc_RNA (1)...(19): siRNA sense strand
gaugaucugugagaccaaa

SEQ ID NO: 895289 - RNA, 19 nt, Homo sapiens
  misc_RNA (1)...(19): siRNA sense strand
gggaaacacagcagucauu

SEQ ID NO: 895290 - RNA, 19 nt, Homo sapiens
  misc_RNA (1)...(19): siRNA sense strand
gcuaaugggauccacauga

SEQ ID NO: 895291 - RNA, 19 nt, Homo sapiens
  misc_RNA (1)...(19): siRNA sense strand
gcagacccaucuuggcaau

SEQ ID NO: 895292 - RNA, 19 nt, Homo sapiens
  misc_RNA (1)...(19): siRNA sense strand
ucagggaaccuccagauug

SEQ ID NO: 895293 - RNA, 19 nt, Homo sapiens
  misc_RNA (1)...(19): siRNA sense strand
gaucauggccagcaaagag

SEQ ID NO: 895294 - RNA, 19 nt, Homo sapiens
  misc_RNA (1)...(19): siRNA sense strand
ggccagagugccaagcuua

SEQ ID NO: 895295 - RNA, 19 nt, Homo sapiens
  misc_RNA (1)...(19): siRNA sense strand
caaauuccucugacgauug

SEQ ID NO: 895296 - RNA, 19 nt, Homo sapiens
  misc_RNA (1)...(19): siRNA sense strand
ucacugcccuuaacaacca

SEQ ID NO: 895297 - RNA, 19 nt, Homo sapiens
  misc_RNA (1)...(19): siRNA sense strand
gaccaucucuggcauucca

SEQ ID NO: 895298 - RNA, 19 nt, Homo sapiens
  misc_RNA (1)...(19): siRNA sense strand
ccaagacagacucauauga

SEQ ID NO: 895299 - RNA, 19 nt, Homo sapiens
  misc_RNA (1)...(19): siRNA sense strand
ggaaacacagcagucauug

SEQ ID NO: 895300 - RNA, 19 nt, Homo sapiens
  misc_RNA (1)...(19): siRNA sense strand
gguacagcgucaaacaaga

SEQ ID NO: 895301 - RNA, 19 nt, Homo sapiens
  misc_RNA (1)...(19): siRNA sense strand
gaaacaccaccucucacaa

SEQ ID NO: 895302 - RNA, 19 nt, Homo sapiens
  misc_RNA (1)...(19): siRNA sense strand
ccagcgaccugcccuaucu

SEQ ID NO: 895303 - RNA, 19 nt, Homo sapiens
  misc_RNA (1)...(19): siRNA sense strand
aaaggcaccuccuacaagu

SEQ ID NO: 895304 - RNA, 19 nt, Homo sapiens
  misc_RNA (1)...(19): siRNA sense strand
uagccaaucuccaggacuu

SEQ ID NO: 895305 - RNA, 19 nt, Homo sapiens
  misc_RNA (1)...(19): siRNA sense strand
acauuaagaugcagugcuu

SEQ ID NO: 895306 - RNA, 19 nt, Homo sapiens
  misc_RNA (1)...(19): siRNA sense strand
gagaaaggcaccuccuaca

SEQ ID NO: 895307 - RNA, 19 nt, Homo sapiens
  misc_RNA (1)...(19): siRNA sense strand
ggagauggcagcuuacaac

SEQ ID NO: 895308 - RNA, 19 nt, Homo sapiens
  misc_RNA (1)...(19): siRNA sense strand
acaaauuccucugacgauu

SEQ ID NO: 895309 - RNA, 19 nt, Homo sapiens
  misc_RNA (1)...(19): siRNA sense strand
gaaccuccaaggaugaaug

SEQ ID NO: 895310 - RNA, 19 nt, Homo sapiens
  misc_RNA (1)...(19): siRNA sense strand
cgaccugcccuaucugauu

SEQ ID NO: 895311 - RNA, 19 nt, Homo sapiens
  misc_RNA (1)...(19): siRNA sense strand
agacagccauggucaccuu

SEQ ID NO: 895312 - RNA, 19 nt, Homo sapiens
  misc_RNA (1)...(19): siRNA sense strand
gagaccuccuacgacauua

SEQ ID NO: 895313 - RNA, 19 nt, Homo sapiens
  misc_RNA (1)...(19): siRNA sense strand
aaacaccaccucucacaau

SEQ ID NO: 895314 - RNA, 19 nt, Homo sapiens
  misc_RNA (1)...(19): siRNA sense strand
aaugggauccacaugaaua

SEQ ID NO: 895315 - RNA, 19 nt, Homo sapiens
  misc_RNA (1)...(19): siRNA sense strand
gggaaccuccagauuguga

SEQ ID NO: 895316 - RNA, 19 nt, Homo sapiens
  misc_RNA (1)...(19): siRNA sense strand
cugaauggcucggaugaug

SEQ ID NO: 895317 - RNA, 19 nt, Homo sapiens
  misc_RNA (1)...(19): siRNA sense strand
cgccaauccucuacuaugu

SEQ ID NO: 895318 - RNA, 19 nt, Homo sapiens
  misc_RNA (1)...(19): siRNA sense strand
aaggauggguccaguguca

SEQ ID NO: 895319 - RNA, 19 nt, Homo sapiens
  misc_RNA (1)...(19): siRNA sense strand
cggaggcacugugaucuug

SEQ ID NO: 895320 - RNA, 19 nt, Homo sapiens
  misc_RNA (1)...(19): siRNA sense strand
ccuccaaggaugaauguaa

SEQ ID NO: 895321 - RNA, 19 nt, Homo sapiens
  misc_RNA (1)...(19): siRNA sense strand
ccacccuccugcccguaua

SEQ ID NO: 895322 - RNA, 19 nt, Homo sapiens
  misc_RNA (1)...(19): siRNA sense strand
cgucaucacugcccuuaac

SEQ ID NO: 895323 - RNA, 19 nt, Homo sapiens
  misc_RNA (1)...(19): siRNA sense strand
aagaugcagugcuucaaug

SEQ ID NO: 895324 - RNA, 19 nt, Homo sapiens
  misc_RNA (1)...(19): siRNA sense strand
ggagaucacgggccuagag

SEQ ID NO: 895325 - RNA, 19 nt, Homo sapiens
  misc_RNA (1)...(19): siRNA sense strand
ccuccaagacagacucaua

SEQ ID NO: 895326 - RNA, 19 nt, Homo sapiens
  misc_RNA (1)...(19): siRNA sense strand
ucuacuauguggugaaaca

SEQ ID NO: 895327 - RNA, 19 nt, Homo sapiens
  misc_RNA (1)...(19): siRNA sense strand
gcgccaauccucuacuaug

SEQ ID NO: 895328 - RNA, 19 nt, Homo sapiens
  misc_RNA (1)...(19): siRNA sense strand
gcggucauccucuacaaug

SEQ ID NO: 895329 - RNA, 19 nt, Homo sapiens
  misc_RNA (1)...(19): siRNA sense strand
ucacgggccuagagaaagg

SEQ ID NO: 895330 - RNA, 19 nt, Homo sapiens
  misc_RNA (1)...(19): siRNA sense strand
cccgggagcuuguaugaag

SEQ ID NO: 895331 - RNA, 19 nt, Homo sapiens
  misc_RNA (1)...(19): siRNA sense strand
ccucuacuauguggugaaa

SEQ ID NO: 895332 - RNA, 19 nt, Homo sapiens
  misc_RNA (1)...(19): siRNA sense strand
cggcaacccugagcagaug

SEQ ID NO: 895333 - RNA, 19 nt, Homo sapiens
  misc_RNA (1)...(19): siRNA sense strand
caaaggccagagucucauu

SEQ ID NO: 895334 - RNA, 19 nt, Homo sapiens
  misc_RNA (1)...(19): siRNA sense strand
aacaccaccucucacaauu

SEQ ID NO: 895335 - RNA, 19 nt, Homo sapiens
  misc_RNA (1)...(19): siRNA sense strand
gcccaaacccgagaucaug

SEQ ID NO: 895336 - RNA, 19 nt, Homo sapiens
  misc_RNA (1)...(19): siRNA sense strand
agaaaggcaccuccuacaa

SEQ ID NO: 895337 - RNA, 19 nt, Homo sapiens
  misc_RNA (1)...(19): siRNA sense strand
ugaaacaccaccucucaca

SEQ ID NO: 895338 - RNA, 19 nt, Homo sapiens
  misc_RNA (1)...(19): siRNA sense strand
uaagaugcagugcuucaau

SEQ ID NO: 895339 - RNA, 19 nt, Homo sapiens
  misc_RNA (1)...(19): siRNA sense strand
gaaccuccagauugugaau

SEQ ID NO: 895340 - RNA, 19 nt, Homo sapiens
  misc_RNA (1)...(19): siRNA sense strand
agagaccuccuacgacauu

SEQ ID NO: 895341 - RNA, 19 nt, Homo sapiens
  misc_RNA (1)...(19): siRNA sense strand
acagugacaaugauaguga

SEQ ID NO: 895342 - RNA, 19 nt, Homo sapiens
  misc_RNA (1)...(19): siRNA sense strand
ccaccaucaugcucaagug

SEQ ID NO: 895343 - RNA, 19 nt, Homo sapiens
  misc_RNA (1)...(19): siRNA sense strand
uaaccuggcgccugaaugg

SEQ ID NO: 895344 - RNA, 19 nt, Homo sapiens
  misc_RNA (1)...(19): siRNA sense strand
cagcggucauccucuacaa

SEQ ID NO: 895345 - RNA, 19 nt, Homo sapiens
  misc_RNA (1)...(19): siRNA sense strand
ccagaggcccaaaccauca

SEQ ID NO: 895346 - RNA, 19 nt, Homo sapiens
  misc_RNA (1)...(19): siRNA sense strand
gacgagggcauguacaagu

SEQ ID NO: 895347 - RNA, 19 nt, Homo sapiens
  misc_RNA (1)...(19): siRNA sense strand
gacagacucauaugaacug

SEQ ID NO: 895348 - RNA, 19 nt, Homo sapiens
  misc_RNA (1)...(19): siRNA sense strand
ccaaggauggguccagugu

SEQ ID NO: 895349 - RNA, 19 nt, Homo sapiens
  misc_RNA (1)...(19): siRNA sense strand
guacagcgucaaacaagag

SEQ ID NO: 895350 - RNA, 19 nt, Homo sapiens
  misc_RNA (1)...(19): siRNA sense strand
ccugacuccugccaaguga

SEQ ID NO: 895351 - RNA, 19 nt, Homo sapiens
  misc_RNA (1)...(19): siRNA sense strand
gaauggaaaggagcugaau

SEQ ID NO: 895352 - RNA, 19 nt, Homo sapiens
  misc_RNA (1)...(19): siRNA sense strand
acagacagugacaaugaua

SEQ ID NO: 895353 - RNA, 19 nt, Homo sapiens
  misc_RNA (1)...(19): siRNA sense strand
gagaucacgggccuagaga

SEQ ID NO: 895354 - RNA, 19 nt, Homo sapiens
  misc_RNA (1)...(19): siRNA sense strand
ccagugacccaggaaguga

SEQ ID NO: 895355 - RNA, 19 nt, Homo sapiens
  misc_RNA (1)...(19): siRNA sense strand
gccagccacugugacacua

SEQ ID NO: 895356 - RNA, 19 nt, Homo sapiens
  misc_RNA (1)...(19): siRNA sense strand
gagggaaacacagcaguca

SEQ ID NO: 895357 - RNA, 19 nt, Homo sapiens
  misc_RNA (1)...(19): siRNA sense strand
cacagacagugacaaugau

SEQ ID NO: 895358 - RNA, 19 nt, Homo sapiens
  misc_RNA (1)...(19): siRNA sense strand
cguggcagguccuuauauc

SEQ ID NO: 895359 - RNA, 19 nt, Homo sapiens
  misc_RNA (1)...(19): siRNA sense strand
aggcaccuccuacaaguuu

SEQ ID NO: 895360 - RNA, 19 nt, Homo sapiens
  misc_RNA (1)...(19): siRNA sense strand
ucagcaacgugaugaucug

SEQ ID NO: 895361 - RNA, 19 nt, Homo sapiens
  misc_RNA (1)...(19): siRNA sense strand
acaccaccucucacaauuu

SEQ ID NO: 895362 - RNA, 19 nt, Homo sapiens
  misc_RNA (1)...(19): siRNA sense strand
gagcuggccucaacucuca

SEQ ID NO: 895363 - RNA, 19 nt, Homo sapiens
  misc_RNA (1)...(19): siRNA sense strand
cgaguccucugguuauuug

SEQ ID NO: 895364 - RNA, 19 nt, Homo sapiens
  misc_RNA (1)...(19): siRNA sense strand
ggauggaccugaauaaaau

SEQ ID NO: 895365 - RNA, 19 nt, Homo sapiens
  misc_RNA (1)...(19): siRNA sense strand
ccaauaagaauuugacaag

SEQ ID NO: 895366 - RNA, 19 nt, Homo sapiens
  misc_RNA (1)...(19): siRNA sense strand
ggaaaugcacuggaggauu

SEQ ID NO: 895367 - RNA, 19 nt, Homo sapiens
  misc_RNA (1)...(19): siRNA sense strand
ucucauagccaauaagaau

SEQ ID NO: 895368 - RNA, 19 nt, Homo sapiens
  misc_RNA (1)...(19): siRNA sense strand
gucaggagauggcuucugu

SEQ ID NO: 895369 - RNA, 19 nt, Homo sapiens
  misc_RNA (1)...(19): siRNA sense strand
ggauuugggccugagguua

SEQ ID NO: 895370 - RNA, 19 nt, Homo sapiens
  misc_RNA (1)...(19): siRNA sense strand
gcagcucucauagccaaua

SEQ ID NO: 895371 - RNA, 19 nt, Homo sapiens
  misc_RNA (1)...(19): siRNA sense strand
cagcucucauagccaauaa

SEQ ID NO: 895372 - RNA, 19 nt, Homo sapiens
  misc_RNA (1)...(19): siRNA sense strand
ccucaacucucagugugaa

SEQ ID NO: 895373 - RNA, 19 nt, Homo sapiens
  misc_RNA (1)...(19): siRNA sense strand
gugacgagcuggccucaac

SEQ ID NO: 895374 - RNA, 19 nt, Homo sapiens
  misc_RNA (1)...(19): siRNA sense strand
cugaagaggugccgcaucu

SEQ ID NO: 895375 - RNA, 19 nt, Homo sapiens
  misc_RNA (1)...(19): siRNA sense strand
gcucucauagccaauaaga

SEQ ID NO: 895376 - RNA, 19 nt, Homo sapiens
  misc_RNA (1)...(19): siRNA sense strand
gaagaucugccgccucacu

SEQ ID NO: 895377 - RNA, 19 nt, Homo sapiens
  misc_RNA (1)...(19): siRNA sense strand
ggcugcagaugauucaguu

SEQ ID NO: 895378 - RNA, 19 nt, Homo sapiens
  misc_RNA (1)...(19): siRNA sense strand
acccacaucugguugaguu

SEQ ID NO: 895379 - RNA, 19 nt, Homo sapiens
  misc_RNA (1)...(19): siRNA sense strand
gggugcugcugcuguguga

SEQ ID NO: 895380 - RNA, 19 nt, Homo sapiens
  misc_RNA (1)...(19): siRNA sense strand
guuggcagcgcuucgagua

SEQ ID NO: 895381 - RNA, 19 nt, Homo sapiens
  misc_RNA (1)...(19): siRNA sense strand
acagguguccgacugcuuu

SEQ ID NO: 895382 - RNA, 19 nt, Homo sapiens
  misc_RNA (1)...(19): siRNA sense strand
gggauggaccugaauaaaa

SEQ ID NO: 895383 - RNA, 19 nt, Homo sapiens
  misc_RNA (1)...(19): siRNA sense strand
gaccuugaccgaccuuuac

SEQ ID NO: 895384 - RNA, 19 nt, Homo sapiens
  misc_RNA (1)...(19): siRNA sense strand
ggacuuuguggcugaagau

SEQ ID NO: 895385 - RNA, 19 nt, Homo sapiens
  misc_RNA (1)...(19): siRNA sense strand
agaccuugaccgaccuuua

SEQ ID NO: 895386 - RNA, 19 nt, Homo sapiens
  misc_RNA (1)...(19): siRNA sense strand
cauagccaauaagaauuug

SEQ ID NO: 895387 - RNA, 19 nt, Homo sapiens
  misc_RNA (1)...(19): siRNA sense strand
uauuugggauggaccugaa

SEQ ID NO: 895388 - RNA, 19 nt, Homo sapiens
  misc_RNA (1)...(19): siRNA sense strand
gccaauaagaauuugacaa

SEQ ID NO: 895389 - RNA, 19 nt, Homo sapiens
  misc_RNA (1)...(19): siRNA sense strand
gauuugggccugagguuac

SEQ ID NO: 895390 - RNA, 19 nt, Homo sapiens
  misc_RNA (1)...(19): siRNA sense strand
gcagacuacggacuuugug

SEQ ID NO: 895391 - RNA, 19 nt, Homo sapiens
  misc_RNA (1)...(19): siRNA sense strand
gaccuuuaccugaccaaca

SEQ ID NO: 895392 - RNA, 19 nt, Homo sapiens
  misc_RNA (1)...(19): siRNA sense strand
ccucucugcagcucucaua

SEQ ID NO: 895393 - RNA, 19 nt, Homo sapiens
  misc_RNA (1)...(19): siRNA sense strand
aaaccuuauuuggacauug

SEQ ID NO: 895394 - RNA, 19 nt, Homo sapiens
  misc_RNA (1)...(19): siRNA sense strand
cugcagaugauucaguuga

SEQ ID NO: 895395 - RNA, 19 nt, Homo sapiens
  misc_RNA (1)...(19): siRNA sense strand
accuuuaccugaccaacaa

SEQ ID NO: 895396 - RNA, 19 nt, Homo sapiens
  misc_RNA (1)...(19): siRNA sense strand
ucaggcaucccacgugcaa

SEQ ID NO: 895397 - RNA, 19 nt, Homo sapiens
  misc_RNA (1)...(19): siRNA sense strand
ugauucaguugaggaagug

SEQ ID NO: 895398 - RNA, 19 nt, Homo sapiens
  misc_RNA (1)...(19): siRNA sense strand
aaccuuauuuggacauugg

SEQ ID NO: 895399 - RNA, 19 nt, Homo sapiens
  misc_RNA (1)...(19): siRNA sense strand
aggcuugugagaaucuuua

SEQ ID NO: 895400 - RNA, 19 nt, Homo sapiens
  misc_RNA (1)...(19): siRNA sense strand
gagcuggccucaacucuca

SEQ ID NO: 895401 - RNA, 19 nt, Homo sapiens
  misc_RNA (1)...(19): siRNA sense strand
gggugaagcugcucuguca

SEQ ID NO: 895402 - RNA, 19 nt, Homo sapiens
  misc_RNA (1)...(19): siRNA sense strand
cgaguccucugguuauuug

SEQ ID NO: 895403 - RNA, 19 nt, Homo sapiens
  misc_RNA (1)...(19): siRNA sense strand
ggauggaccugaauaaaau

SEQ ID NO: 895404 - RNA, 19 nt, Homo sapiens
  misc_RNA (1)...(19): siRNA sense strand
ccaauaagaauuugacaag

SEQ ID NO: 895405 - RNA, 19 nt, Homo sapiens
  misc_RNA (1)...(19): siRNA sense strand
ggaaaugcacuggaggauu

SEQ ID NO: 895406 - RNA, 19 nt, Homo sapiens
  misc_RNA (1)...(19): siRNA sense strand
ucucauagccaauaagaau

SEQ ID NO: 895407 - RNA, 19 nt, Homo sapiens
  misc_RNA (1)...(19): siRNA sense strand
gucaggagauggcuucugu

SEQ ID NO: 895408 - RNA, 19 nt, Homo sapiens
  misc_RNA (1)...(19): siRNA sense strand
ggauuugggccugagguua

SEQ ID NO: 895409 - RNA, 19 nt, Homo sapiens
  misc_RNA (1)...(19): siRNA sense strand
gcagcucucauagccaaua

SEQ ID NO: 895410 - RNA, 19 nt, Homo sapiens
  misc_RNA (1)...(19): siRNA sense strand
cagcucucauagccaauaa

SEQ ID NO: 895411 - RNA, 19 nt, Homo sapiens
  misc_RNA (1)...(19): siRNA sense strand
ccucaacucucagugugaa

SEQ ID NO: 895412 - RNA, 19 nt, Homo sapiens
  misc_RNA (1)...(19): siRNA sense strand
gcaccaauccaaaccugau

SEQ ID NO: 895413 - RNA, 19 nt, Homo sapiens
  misc_RNA (1)...(19): siRNA sense strand
gugacgagcuggccucaac

SEQ ID NO: 895414 - RNA, 19 nt, Homo sapiens
  misc_RNA (1)...(19): siRNA sense strand
gcucucauagccaauaaga

SEQ ID NO: 895415 - RNA, 19 nt, Homo sapiens
  misc_RNA (1)...(19): siRNA sense strand
cugaagaggugccgcaucu

SEQ ID NO: 895416 - RNA, 19 nt, Homo sapiens
  misc_RNA (1)...(19): siRNA sense strand
gaagaucugccgccucacu

SEQ ID NO: 895417 - RNA, 19 nt, Homo sapiens
  misc_RNA (1)...(19): siRNA sense strand
ggcugcagaugauucaguu

SEQ ID NO: 895418 - RNA, 19 nt, Homo sapiens
  misc_RNA (1)...(19): siRNA sense strand
gcuggacgccuacagugaa

SEQ ID NO: 895419 - RNA, 19 nt, Homo sapiens
  misc_RNA (1)...(19): siRNA sense strand
acccacaucugguugaguu

SEQ ID NO: 895420 - RNA, 19 nt, Homo sapiens
  misc_RNA (1)...(19): siRNA sense strand
gggugcugcugcuguguga

SEQ ID NO: 895421 - RNA, 19 nt, Homo sapiens
  misc_RNA (1)...(19): siRNA sense strand
guuggcagcgcuucgagua

SEQ ID NO: 895422 - RNA, 19 nt, Homo sapiens
  misc_RNA (1)...(19): siRNA sense strand
gaagcugcucugucaagga

SEQ ID NO: 895423 - RNA, 19 nt, Homo sapiens
  misc_RNA (1)...(19): siRNA sense strand
gggauggaccugaauaaaa

SEQ ID NO: 895424 - RNA, 19 nt, Homo sapiens
  misc_RNA (1)...(19): siRNA sense strand
acagguguccgacugcuuu

SEQ ID NO: 895425 - RNA, 19 nt, Homo sapiens
  misc_RNA (1)...(19): siRNA sense strand
gaccuugaccgaccuuuac

SEQ ID NO: 895426 - RNA, 19 nt, Homo sapiens
  misc_RNA (1)...(19): siRNA sense strand
ggacuuuguggcugaagau

SEQ ID NO: 895427 - RNA, 19 nt, Homo sapiens
  misc_RNA (1)...(19): siRNA sense strand
agaccuugaccgaccuuua

SEQ ID NO: 895428 - RNA, 19 nt, Homo sapiens
  misc_RNA (1)...(19): siRNA sense strand
cauagccaauaagaauuug

SEQ ID NO: 895429 - RNA, 19 nt, Homo sapiens
  misc_RNA (1)...(19): siRNA sense strand
uauuugggauggaccugaa

SEQ ID NO: 895430 - RNA, 19 nt, Homo sapiens
  misc_RNA (1)...(19): siRNA sense strand
gccaauaagaauuugacaa

SEQ ID NO: 895431 - RNA, 19 nt, Homo sapiens
  misc_RNA (1)...(19): siRNA sense strand
caccaauccaaaccugaua

SEQ ID NO: 895432 - RNA, 19 nt, Homo sapiens
  misc_RNA (1)...(19): siRNA sense strand
gauuugggccugagguuac

SEQ ID NO: 895433 - RNA, 19 nt, Homo sapiens
  misc_RNA (1)...(19): siRNA sense strand
gcagacuacggacuuugug

SEQ ID NO: 895434 - RNA, 19 nt, Homo sapiens
  misc_RNA (1)...(19): siRNA sense strand
gaccuuuaccugaccaaca

SEQ ID NO: 895435 - RNA, 19 nt, Homo sapiens
  misc_RNA (1)...(19): siRNA sense strand
caacugcaaacuucagaac

SEQ ID NO: 895436 - RNA, 19 nt, Homo sapiens
  misc_RNA (1)...(19): siRNA sense strand
aaaccuuauuuggacauug

SEQ ID NO: 895437 - RNA, 19 nt, Homo sapiens
  misc_RNA (1)...(19): siRNA sense strand
ccucucugcagcucucaua

SEQ ID NO: 895438 - RNA, 19 nt, Homo sapiens
  misc_RNA (1)...(19): siRNA sense strand
cugcagaugauucaguuga

SEQ ID NO: 895439 - RNA, 19 nt, Homo sapiens
  misc_RNA (1)...(19): siRNA sense strand
ccaauccaaaccugauaga

SEQ ID NO: 895440 - RNA, 19 nt, Homo sapiens
  misc_RNA (1)...(19): siRNA sense strand
accuuuaccugaccaacaa

SEQ ID NO: 895441 - RNA, 19 nt, Homo sapiens
  misc_RNA (1)...(19): siRNA sense strand
ucaggcaucccacgugcaa

SEQ ID NO: 895442 - RNA, 19 nt, Homo sapiens
  misc_RNA (1)...(19): siRNA sense strand
ugauucaguugaggaagug

SEQ ID NO: 895443 - RNA, 19 nt, Homo sapiens
  misc_RNA (1)...(19): siRNA sense strand
aaccuuauuuggacauugg

SEQ ID NO: 895444 - RNA, 19 nt, Homo sapiens
  misc_RNA (1)...(19): siRNA sense strand
aggcuugugagaaucuuua

SEQ ID NO: 895445 - RNA, 19 nt, Homo sapiens
  misc_RNA (1)...(19): siRNA sense strand
gaacaggacuuauuugaua

SEQ ID NO: 895446 - RNA, 19 nt, Homo sapiens
  misc_RNA (1)...(19): siRNA sense strand
caucgcagcuuauggcuuu

SEQ ID NO: 895447 - RNA, 19 nt, Homo sapiens
  misc_RNA (1)...(19): siRNA sense strand
gcacuacaguauaucaaug

SEQ ID NO: 895448 - RNA, 19 nt, Homo sapiens
  misc_RNA (1)...(19): siRNA sense strand
ccaaagacauggcuuacug

SEQ ID NO: 895449 - RNA, 19 nt, Homo sapiens
  misc_RNA (1)...(19): siRNA sense strand
ucaaggcacuacaguauau

SEQ ID NO: 895450 - RNA, 19 nt, Homo sapiens
  misc_RNA (1)...(19): siRNA sense strand
gcaagaggcaauacaagaa

SEQ ID NO: 895451 - RNA, 19 nt, Homo sapiens
  misc_RNA (1)...(19): siRNA sense strand
aguaucagcucaccaauga

SEQ ID NO: 895452 - RNA, 19 nt, Homo sapiens
  misc_RNA (1)...(19): siRNA sense strand
aggcauaucuuaccaacuu

SEQ ID NO: 895453 - RNA, 19 nt, Homo sapiens
  misc_RNA (1)...(19): siRNA sense strand
gcacagagguuagguucca

SEQ ID NO: 895454 - RNA, 19 nt, Homo sapiens
  misc_RNA (1)...(19): siRNA sense strand
uaaacagcgucaaucacua

SEQ ID NO: 895455 - RNA, 19 nt, Homo sapiens
  misc_RNA (1)...(19): siRNA sense strand
gacaaauucuuccaguaug

SEQ ID NO: 895456 - RNA, 19 nt, Homo sapiens
  misc_RNA (1)...(19): siRNA sense strand
caagaacgccaucaccauu

SEQ ID NO: 895457 - RNA, 19 nt, Homo sapiens
  misc_RNA (1)...(19): siRNA sense strand
gaacgguuacuuuguccua

SEQ ID NO: 895458 - RNA, 19 nt, Homo sapiens
  misc_RNA (1)...(19): siRNA sense strand
cgacaaauucuuccaguau

SEQ ID NO: 895459 - RNA, 19 nt, Homo sapiens
  misc_RNA (1)...(19): siRNA sense strand
gauauuguacugaugacua

SEQ ID NO: 895460 - RNA, 19 nt, Homo sapiens
  misc_RNA (1)...(19): siRNA sense strand
acaaauucuuccaguauga

SEQ ID NO: 895461 - RNA, 19 nt, Homo sapiens
  misc_RNA (1)...(19): siRNA sense strand
ggagugcggcuuauaaaca

SEQ ID NO: 895462 - RNA, 19 nt, Homo sapiens
  misc_RNA (1)...(19): siRNA sense strand
guauauugcugcagauucu

SEQ ID NO: 895463 - RNA, 19 nt, Homo sapiens
  misc_RNA (1)...(19): siRNA sense strand
uaauaaccaugcccaagug

SEQ ID NO: 895464 - RNA, 19 nt, Homo sapiens
  misc_RNA (1)...(19): siRNA sense strand
cuuaccaacuuguauauug

SEQ ID NO: 895465 - RNA, 19 nt, Homo sapiens
  misc_RNA (1)...(19): siRNA sense strand
caagugggagugcggcuua

SEQ ID NO: 895466 - RNA, 19 nt, Homo sapiens
  misc_RNA (1)...(19): siRNA sense strand
uagguuccaucgcagcuua

SEQ ID NO: 895467 - RNA, 19 nt, Homo sapiens
  misc_RNA (1)...(19): siRNA sense strand
ucacuacggcuuacugauu

SEQ ID NO: 895468 - RNA, 19 nt, Homo sapiens
  misc_RNA (1)...(19): siRNA sense strand
agcaugggcucgacaaauu

SEQ ID NO: 895469 - RNA, 19 nt, Homo sapiens
  misc_RNA (1)...(19): siRNA sense strand
aaaaguacauggaguauca

SEQ ID NO: 895470 - RNA, 19 nt, Homo sapiens
  misc_RNA (1)...(19): siRNA sense strand
cacuacggcuuacugauug

SEQ ID NO: 895471 - RNA, 19 nt, Homo sapiens
  misc_RNA (1)...(19): siRNA sense strand
gcuguccucuucucugaug

SEQ ID NO: 895472 - RNA, 19 nt, Homo sapiens
  misc_RNA (1)...(19): siRNA sense strand
ugaugaacaggacuuauuu

SEQ ID NO: 895473 - RNA, 19 nt, Homo sapiens
  misc_RNA (1)...(19): siRNA sense strand
cgucaaggcacuacaguau

SEQ ID NO: 895474 - RNA, 19 nt, Homo sapiens
  misc_RNA (1)...(19): siRNA sense strand
gguauugccucugcgacaa

SEQ ID NO: 895475 - RNA, 19 nt, Homo sapiens
  misc_RNA (1)...(19): siRNA sense strand
gggcauccaugaggucguu

SEQ ID NO: 895476 - RNA, 19 nt, Homo sapiens
  misc_RNA (1)...(19): siRNA sense strand
gagcaagagggucuggaaa

SEQ ID NO: 895477 - RNA, 19 nt, Homo sapiens
  misc_RNA (1)...(19): siRNA sense strand
ugaucuauauccugaugaa

SEQ ID NO: 895478 - RNA, 19 nt, Homo sapiens
  misc_RNA (1)...(19): siRNA sense strand
ucgacaaauucuuccagua

SEQ ID NO: 895479 - RNA, 19 nt, Homo sapiens
  misc_RNA (1)...(19): siRNA sense strand
agacgaagcucuuuuccuu

SEQ ID NO: 895480 - RNA, 19 nt, Homo sapiens
  misc_RNA (1)...(19): siRNA sense strand
ccucuucucugaugagucu

SEQ ID NO: 895481 - RNA, 19 nt, Homo sapiens
  misc_RNA (1)...(19): siRNA sense strand
gagauagacgaagcucuuu

SEQ ID NO: 895482 - RNA, 19 nt, Homo sapiens
  misc_RNA (1)...(19): siRNA sense strand
cugaugagucugaacauuu

SEQ ID NO: 895483 - RNA, 19 nt, Homo sapiens
  misc_RNA (1)...(19): siRNA sense strand
gaugaacaggacuuauuug

SEQ ID NO: 895484 - RNA, 19 nt, Homo sapiens
  misc_RNA (1)...(19): siRNA sense strand
gagugcggcuuauaaacag

SEQ ID NO: 895485 - RNA, 19 nt, Homo sapiens
  misc_RNA (1)...(19): siRNA sense strand
caaggcaucgugcgggaaa

SEQ ID NO: 895486 - RNA, 19 nt, Homo sapiens
  misc_RNA (1)...(19): siRNA sense strand
ucagcuccguguagccuuu

SEQ ID NO: 895487 - RNA, 19 nt, Homo sapiens
  misc_RNA (1)...(19): siRNA sense strand
aagagggucuggaaaagua

SEQ ID NO: 895488 - RNA, 19 nt, Homo sapiens
  misc_RNA (1)...(19): siRNA sense strand
gcagcuuauggcuuuaaua

SEQ ID NO: 895489 - RNA, 19 nt, Homo sapiens
  misc_RNA (1)...(19): siRNA sense strand
aaugaacgguuacuuuguc

SEQ ID NO: 895490 - RNA, 19 nt, Homo sapiens
  misc_RNA (1)...(19): siRNA sense strand
caucaccauugcucucuca

SEQ ID NO: 895491 - RNA, 19 nt, Homo sapiens
  misc_RNA (1)...(19): siRNA sense strand
gucaaggcacuacaguaua

SEQ ID NO: 895492 - RNA, 19 nt, Homo sapiens
  misc_RNA (1)...(19): siRNA sense strand
cgucaaucacuacggcuua

SEQ ID NO: 895493 - RNA, 19 nt, Homo sapiens
  misc_RNA (1)...(19): siRNA sense strand
aaggcuuucuggaagauuu

SEQ ID NO: 895494 - RNA, 19 nt, Homo sapiens
  misc_RNA (1)...(19): siRNA sense strand
ugaugagucugaacauuuu

SEQ ID NO: 895495 - RNA, 19 nt, Homo sapiens
  misc_RNA (1)...(19): siRNA sense strand
gaguaucagcucaccaaug

SEQ ID NO: 895496 - RNA, 19 nt, Homo sapiens
  misc_RNA (1)...(19): siRNA sense strand
ugauggagccaaagacaug

SEQ ID NO: 895497 - RNA, 19 nt, Homo sapiens
  misc_RNA (1)...(19): siRNA sense strand
auugaccgcuucugucuga

SEQ ID NO: 895498 - RNA, 19 nt, Homo sapiens
  misc_RNA (1)...(19): siRNA sense strand
gugggagugcggcuuauaa

SEQ ID NO: 895499 - RNA, 19 nt, Homo sapiens
  misc_RNA (1)...(19): siRNA sense strand
caggacuuauuugauauug

SEQ ID NO: 895500 - RNA, 19 nt, Homo sapiens
  misc_RNA (1)...(19): siRNA sense strand
cgugaucuauauccugaug

SEQ ID NO: 895501 - RNA, 19 nt, Homo sapiens
  misc_RNA (1)...(19): siRNA sense strand
cuaauaaccaugcccaagu

SEQ ID NO: 895502 - RNA, 19 nt, Homo sapiens
  misc_RNA (1)...(19): siRNA sense strand
cugaugaacaggacuuauu

SEQ ID NO: 895503 - RNA, 19 nt, Homo sapiens
  misc_RNA (1)...(19): siRNA sense strand
gggaggacgaggacgacua

SEQ ID NO: 895504 - RNA, 19 nt, Homo sapiens
  misc_RNA (1)...(19): siRNA sense strand
aaagucccaucuuggugaa

SEQ ID NO: 895505 - RNA, 19 nt, Homo sapiens
  misc_RNA (1)...(19): siRNA sense strand
gcaagagggucuggaaaag

SEQ ID NO: 895506 - RNA, 19 nt, Homo sapiens
  misc_RNA (1)...(19): siRNA sense strand
ucugaugagucugaacauu

SEQ ID NO: 895507 - RNA, 19 nt, Homo sapiens
  misc_RNA (1)...(19): siRNA sense strand
caagaggcaauacaagaag

SEQ ID NO: 895508 - RNA, 19 nt, Homo sapiens
  misc_RNA (1)...(19): siRNA sense strand
caaagacauggcuuacugu

SEQ ID NO: 895509 - RNA, 19 nt, Homo sapiens
  misc_RNA (1)...(19): siRNA sense strand
gcaugggcucgacaaauuc

SEQ ID NO: 895510 - RNA, 19 nt, Homo sapiens
  misc_RNA (1)...(19): siRNA sense strand
ugaacaggacuuauuugau

SEQ ID NO: 895511 - RNA, 19 nt, Homo sapiens
  misc_RNA (1)...(19): siRNA sense strand
cuucuuugaugaccacaug

SEQ ID NO: 895512 - RNA, 19 nt, Homo sapiens
  misc_RNA (1)...(19): siRNA sense strand
ccaagaacgccaucaccau

SEQ ID NO: 895513 - RNA, 19 nt, Homo sapiens
  misc_RNA (1)...(19): siRNA sense strand
gcuuauaaacagcgucaau

SEQ ID NO: 895514 - RNA, 19 nt, Homo sapiens
  misc_RNA (1)...(19): siRNA sense strand
ggaggacgaggacgacuac

SEQ ID NO: 895515 - RNA, 19 nt, Homo sapiens
  misc_RNA (1)...(19): siRNA sense strand
gggaugcuguccucuucuc

SEQ ID NO: 895516 - RNA, 19 nt, Homo sapiens
  misc_RNA (1)...(19): siRNA sense strand
uuauaaacagcgucaauca

SEQ ID NO: 895517 - RNA, 19 nt, Homo sapiens
  misc_RNA (1)...(19): siRNA sense strand
cgagcaagagggucuggaa

SEQ ID NO: 895518 - RNA, 19 nt, Homo sapiens
  misc_RNA (1)...(19): siRNA sense strand
ccucugcgacaauguuuga

SEQ ID NO: 895519 - RNA, 19 nt, Homo sapiens
  misc_RNA (1)...(19): siRNA sense strand
cauaucuuaccaacuugua

SEQ ID NO: 895520 - RNA, 19 nt, Homo sapiens
  misc_RNA (1)...(19): siRNA sense strand
aaaaugaacgguuacuuug

SEQ ID NO: 895521 - RNA, 19 nt, Homo sapiens
  misc_RNA (1)...(19): siRNA sense strand
gacauggcuuacugugaca

SEQ ID NO: 895522 - RNA, 19 nt, Homo sapiens
  misc_RNA (1)...(19): siRNA sense strand
gaggcaauacaagaaggua

SEQ ID NO: 895523 - RNA, 19 nt, Homo sapiens
  misc_RNA (1)...(19): siRNA sense strand
caugguggacggcaggaaa

SEQ ID NO: 895524 - RNA, 19 nt, Homo sapiens
  misc_RNA (1)...(19): siRNA sense strand
ccugcgcgcucuucaacau

SEQ ID NO: 895525 - RNA, 19 nt, Homo sapiens
  misc_RNA (1)...(19): siRNA sense strand
ugcaagaggcaauacaaga

SEQ ID NO: 895526 - RNA, 19 nt, Homo sapiens
  misc_RNA (1)...(19): siRNA sense strand
aaacagcgucaaucacuac

SEQ ID NO: 895527 - RNA, 19 nt, Homo sapiens
  misc_RNA (1)...(19): siRNA sense strand
guacugaugacuaauaacc

SEQ ID NO: 895528 - RNA, 19 nt, Homo sapiens
  misc_RNA (1)...(19): siRNA sense strand
ggcauaucuuaccaacuug

SEQ ID NO: 895529 - RNA, 19 nt, Homo sapiens
  misc_RNA (1)...(19): siRNA sense strand
gcuauuugaaggcauaucu

SEQ ID NO: 895530 - RNA, 19 nt, Homo sapiens
  misc_RNA (1)...(19): siRNA sense strand
uuaccaacuuguauauugc

SEQ ID NO: 895531 - RNA, 19 nt, Homo sapiens
  misc_RNA (1)...(19): siRNA sense strand
aagaacgccaucaccauug

SEQ ID NO: 895532 - RNA, 19 nt, Homo sapiens
  misc_RNA (1)...(19): siRNA sense strand
aaaugaacgguuacuuugu

SEQ ID NO: 895533 - RNA, 19 nt, Homo sapiens
  misc_RNA (1)...(19): siRNA sense strand
augcuguccucuucucuga

SEQ ID NO: 895534 - RNA, 19 nt, Homo sapiens
  misc_RNA (1)...(19): siRNA sense strand
auaaacagcgucaaucacu

SEQ ID NO: 895535 - RNA, 19 nt, Homo sapiens
  misc_RNA (1)...(19): siRNA sense strand
ccccaaaagucccaucuug

SEQ ID NO: 895536 - RNA, 19 nt, Homo sapiens
  misc_RNA (1)...(19): siRNA sense strand
caaauucuuccaguaugau

SEQ ID NO: 895537 - RNA, 19 nt, Homo sapiens
  misc_RNA (1)...(19): siRNA sense strand
gcauaucuuaccaacuugu

SEQ ID NO: 895538 - RNA, 19 nt, Homo sapiens
  misc_RNA (1)...(19): siRNA sense strand
uuggcuauuugaaggcaua

SEQ ID NO: 895539 - RNA, 19 nt, Homo sapiens
  misc_RNA (1)...(19): siRNA sense strand
ccaaggagauugcgaagau

SEQ ID NO: 895540 - RNA, 19 nt, Homo sapiens
  misc_RNA (1)...(19): siRNA sense strand
ugugggagauggacaauau

SEQ ID NO: 895541 - RNA, 19 nt, Homo sapiens
  misc_RNA (1)...(19): siRNA sense strand
ggagcaagcugugggagau

SEQ ID NO: 895542 - RNA, 19 nt, Homo sapiens
  misc_RNA (1)...(19): siRNA sense strand
ggagaaggccaaggagauu

SEQ ID NO: 895543 - RNA, 19 nt, Homo sapiens
  misc_RNA (1)...(19): siRNA sense strand
gcgagaaggccgaggagaa

SEQ ID NO: 895544 - RNA, 19 nt, Homo sapiens
  misc_RNA (1)...(19): siRNA sense strand
caaggagauugcgaagaug

SEQ ID NO: 895545 - RNA, 19 nt, Homo sapiens
  misc_RNA (1)...(19): siRNA sense strand
gagaaggccaaggagauug

SEQ ID NO: 895546 - RNA, 19 nt, Homo sapiens
  misc_RNA (1)...(19): siRNA sense strand
uugcgaagauggcagagau

SEQ ID NO: 895547 - RNA, 19 nt, Homo sapiens
  misc_RNA (1)...(19): siRNA sense strand
aggaggauuucgagcaguu

SEQ ID NO: 895548 - RNA, 19 nt, Homo sapiens
  misc_RNA (1)...(19): siRNA sense strand
cgagaaggccgaggagaag

SEQ ID NO: 895549 - RNA, 19 nt, Homo sapiens
  misc_RNA (1)...(19): siRNA sense strand
ccgaggagaaggccaagga

SEQ ID NO: 895550 - RNA, 19 nt, Homo sapiens
  misc_RNA (1)...(19): siRNA sense strand
ggagcucucuuuggcauuu

SEQ ID NO: 895551 - RNA, 19 nt, Homo sapiens
  misc_RNA (1)...(19): siRNA sense strand
gccaacauguucauuauca

SEQ ID NO: 895552 - RNA, 19 nt, Homo sapiens
  misc_RNA (1)...(19): siRNA sense strand
caagaggcgugcggcauuu

SEQ ID NO: 895553 - RNA, 19 nt, Homo sapiens
  misc_RNA (1)...(19): siRNA sense strand
gaggugggcuggacacaca

SEQ ID NO: 895554 - RNA, 19 nt, Homo sapiens
  misc_RNA (1)...(19): siRNA sense strand
ggagacaggcugcgaguuc

SEQ ID NO: 895555 - RNA, 19 nt, Homo sapiens
  misc_RNA (1)...(19): siRNA sense strand
ccaguagccucuauaagca

SEQ ID NO: 895556 - RNA, 19 nt, Homo sapiens
  misc_RNA (1)...(19): siRNA sense strand
uauaagcaguggcucuuug

SEQ ID NO: 895557 - RNA, 19 nt, Homo sapiens
  misc_RNA (1)...(19): siRNA sense strand
caaaugggcggucccucua

SEQ ID NO: 895558 - RNA, 19 nt, Homo sapiens
  misc_RNA (1)...(19): siRNA sense strand
gcagagcgagugcaagaug

SEQ ID NO: 895559 - RNA, 19 nt, Homo sapiens
  misc_RNA (1)...(19): siRNA sense strand
ggacaccugccaacauguu

SEQ ID NO: 895560 - RNA, 19 nt, Homo sapiens
  misc_RNA (1)...(19): siRNA sense strand
ggucagcgacuuccucaug

SEQ ID NO: 895561 - RNA, 19 nt, Homo sapiens
  misc_RNA (1)...(19): siRNA sense strand
cgaguucuaugccuucugu

SEQ ID NO: 895562 - RNA, 19 nt, Homo sapiens
  misc_RNA (1)...(19): siRNA sense strand
ggcauuuccuccaugauca

SEQ ID NO: 895563 - RNA, 19 nt, Homo sapiens
  misc_RNA (1)...(19): siRNA sense strand
caagauggccaagaucaug

SEQ ID NO: 895564 - RNA, 19 nt, Homo sapiens
  misc_RNA (1)...(19): siRNA sense strand
ccggacaccugccaacaug

SEQ ID NO: 895565 - RNA, 19 nt, Homo sapiens
  misc_RNA (1)...(19): siRNA sense strand
ccacagcaccugggacuug

SEQ ID NO: 895566 - RNA, 19 nt, Homo sapiens
  misc_RNA (1)...(19): siRNA sense strand
ccaagaggcgugcggcauu

SEQ ID NO: 895567 - RNA, 19 nt, Homo sapiens
  misc_RNA (1)...(19): siRNA sense strand
gacgggcucuccagaccuu

SEQ ID NO: 895568 - RNA, 19 nt, Homo sapiens
  misc_RNA (1)...(19): siRNA sense strand
ccaacauguucauuaucaa

SEQ ID NO: 895569 - RNA, 19 nt, Homo sapiens
  misc_RNA (1)...(19): siRNA sense strand
cugccaacauguucauuau

SEQ ID NO: 895570 - RNA, 19 nt, Homo sapiens
  misc_RNA (1)...(19): siRNA sense strand
ucaccaguagccucuauaa

SEQ ID NO: 895571 - RNA, 19 nt, Homo sapiens
  misc_RNA (1)...(19): siRNA sense strand
gcagagacuccagggaaga

SEQ ID NO: 895572 - RNA, 19 nt, Homo sapiens
  misc_RNA (1)...(19): siRNA sense strand
gcgacuuccucauguccuu

SEQ ID NO: 895573 - RNA, 19 nt, Homo sapiens
  misc_RNA (1)...(19): siRNA sense strand
gagacaggcugcgaguucu

SEQ ID NO: 895574 - RNA, 19 nt, Homo sapiens
  misc_RNA (1)...(19): siRNA sense strand
caucaucuacugcuacauc

SEQ ID NO: 895575 - RNA, 19 nt, Homo sapiens
  misc_RNA (1)...(19): siRNA sense strand
gcaagauggccaagaucau

SEQ ID NO: 895576 - RNA, 19 nt, Homo sapiens
  misc_RNA (1)...(19): siRNA sense strand
ccugccaacauguucauua

SEQ ID NO: 895577 - RNA, 19 nt, Homo sapiens
  misc_RNA (1)...(19): siRNA sense strand
gucagggucuggaggacuu

SEQ ID NO: 895578 - RNA, 19 nt, Homo sapiens
  misc_RNA (1)...(19): siRNA sense strand
caucuacugcuacaucuuc

SEQ ID NO: 895579 - RNA, 19 nt, Homo sapiens
  misc_RNA (1)...(19): siRNA sense strand
ccugucuucuucaccagua

SEQ ID NO: 895580 - RNA, 19 nt, Homo sapiens
  misc_RNA (1)...(19): siRNA sense strand
gcugggcguuuggcucuau

SEQ ID NO: 895581 - RNA, 19 nt, Homo sapiens
  misc_RNA (1)...(19): siRNA sense strand
guccugacacccuacauga

SEQ ID NO: 895582 - RNA, 19 nt, Homo sapiens
  misc_RNA (1)...(19): siRNA sense strand
gucagcgacuuccucaugu

SEQ ID NO: 895583 - RNA, 19 nt, Homo sapiens
  misc_RNA (1)...(19): siRNA sense strand
guacgcacacguccugaca

SEQ ID NO: 895584 - RNA, 19 nt, Homo sapiens
  misc_RNA (1)...(19): siRNA sense strand
caacauguucauuaucaac

SEQ ID NO: 895585 - RNA, 19 nt, Homo sapiens
  misc_RNA (1)...(19): siRNA sense strand
agugcaagauggccaagau

SEQ ID NO: 895586 - RNA, 19 nt, Homo sapiens
  misc_RNA (1)...(19): siRNA sense strand
uccagaccaugcccacuau

SEQ ID NO: 895587 - RNA, 19 nt, Homo sapiens
  misc_RNA (1)...(19): siRNA sense strand
cgccaaggccucugcaauc

SEQ ID NO: 895588 - RNA, 19 nt, Homo sapiens
  misc_RNA (1)...(19): siRNA sense strand
ugcuacaucuucaucuuca

SEQ ID NO: 895589 - RNA, 19 nt, Homo sapiens
  misc_RNA (1)...(19): siRNA sense strand
gccaaggccucugcaaucc

SEQ ID NO: 895590 - RNA, 19 nt, Homo sapiens
  misc_RNA (1)...(19): siRNA sense strand
gcaauaaacuggaggagaa

SEQ ID NO: 895591 - RNA, 19 nt, Homo sapiens
  misc_RNA (1)...(19): siRNA sense strand
gaacacaggaggguaaaua

SEQ ID NO: 895592 - RNA, 19 nt, Homo sapiens
  misc_RNA (1)...(19): siRNA sense strand
ugaagaagcugaacuccaa

SEQ ID NO: 895593 - RNA, 19 nt, Homo sapiens
  misc_RNA (1)...(19): siRNA sense strand
gaagagaagcauuuagaga

SEQ ID NO: 895594 - RNA, 19 nt, Homo sapiens
  misc_RNA (1)...(19): siRNA sense strand
agaagaaucuguaagaauc

SEQ ID NO: 895595 - RNA, 19 nt, Homo sapiens
  misc_RNA (1)...(19): siRNA sense strand
gaugaaggaugaacaacau

SEQ ID NO: 895596 - RNA, 19 nt, Homo sapiens
  misc_RNA (1)...(19): siRNA sense strand
uuagagagcaucagcaaua

SEQ ID NO: 895597 - RNA, 19 nt, Homo sapiens
  misc_RNA (1)...(19): siRNA sense strand
ucuggaggcuguuggaaua

SEQ ID NO: 895598 - RNA, 19 nt, Homo sapiens
  misc_RNA (1)...(19): siRNA sense strand
gagaagaaucuguaagaau

SEQ ID NO: 895599 - RNA, 19 nt, Homo sapiens
  misc_RNA (1)...(19): siRNA sense strand
ugagcaaacugaacacaga

SEQ ID NO: 895600 - RNA, 19 nt, Homo sapiens
  misc_RNA (1)...(19): siRNA sense strand
caagaaggaagcugaagaa

SEQ ID NO: 895601 - RNA, 19 nt, Homo sapiens
  misc_RNA (1)...(19): siRNA sense strand
ggaggcuguuggaauauga

SEQ ID NO: 895602 - RNA, 19 nt, Homo sapiens
  misc_RNA (1)...(19): siRNA sense strand
cuugauagcaccaaauaua

SEQ ID NO: 895603 - RNA, 19 nt, Homo sapiens
  misc_RNA (1)...(19): siRNA sense strand
agaagugccugucaaagug

SEQ ID NO: 895604 - RNA, 19 nt, Homo sapiens
  misc_RNA (1)...(19): siRNA sense strand
gaugcaaucuaaauacaag

SEQ ID NO: 895605 - RNA, 19 nt, Homo sapiens
  misc_RNA (1)...(19): siRNA sense strand
gcagcaagagcaagaaaga

SEQ ID NO: 895606 - RNA, 19 nt, Homo sapiens
  misc_RNA (1)...(19): siRNA sense strand
aauauaaaccggagaaaug

SEQ ID NO: 895607 - RNA, 19 nt, Homo sapiens
  misc_RNA (1)...(19): siRNA sense strand
gguggaagccagucagaaa

SEQ ID NO: 895608 - RNA, 19 nt, Homo sapiens
  misc_RNA (1)...(19): siRNA sense strand
ggagaaaugagauacaaag

SEQ ID NO: 895609 - RNA, 19 nt, Homo sapiens
  misc_RNA (1)...(19): siRNA sense strand
gugaauuacuggaacugaa

SEQ ID NO: 895610 - RNA, 19 nt, Homo sapiens
  misc_RNA (1)...(19): siRNA sense strand
uagaagagaagcauuuaga

SEQ ID NO: 895611 - RNA, 19 nt, Homo sapiens
  misc_RNA (1)...(19): siRNA sense strand
gagagcaucagcaauacaa

SEQ ID NO: 895612 - RNA, 19 nt, Homo sapiens
  misc_RNA (1)...(19): siRNA sense strand
agagagagaagagcaauaa

SEQ ID NO: 895613 - RNA, 19 nt, Homo sapiens
  misc_RNA (1)...(19): siRNA sense strand
gguaacagcugggguauau

SEQ ID NO: 895614 - RNA, 19 nt, Homo sapiens
  misc_RNA (1)...(19): siRNA sense strand
gagagaagagcaauaaacu

SEQ ID NO: 895615 - RNA, 19 nt, Homo sapiens
  misc_RNA (1)...(19): siRNA sense strand
gagaaaugagauacaaaga

SEQ ID NO: 895616 - RNA, 19 nt, Homo sapiens
  misc_RNA (1)...(19): siRNA sense strand
caaaaccgcugaguucuug

SEQ ID NO: 895617 - RNA, 19 nt, Homo sapiens
  misc_RNA (1)...(19): siRNA sense strand
gaagaaucuguaagaauca

SEQ ID NO: 895618 - RNA, 19 nt, Homo sapiens
  misc_RNA (1)...(19): siRNA sense strand
agagaagaaucuguaagaa

SEQ ID NO: 895619 - RNA, 19 nt, Homo sapiens
  misc_RNA (1)...(19): siRNA sense strand
ccaaauauaaaccggagaa

SEQ ID NO: 895620 - RNA, 19 nt, Homo sapiens
  misc_RNA (1)...(19): siRNA sense strand
aagagaagaaucuguaaga

SEQ ID NO: 895621 - RNA, 19 nt, Homo sapiens
  misc_RNA (1)...(19): siRNA sense strand
ccgcugaguucuugagcaa

SEQ ID NO: 895622 - RNA, 19 nt, Homo sapiens
  misc_RNA (1)...(19): siRNA sense strand
ugaauuacuggaacugaaa

SEQ ID NO: 895623 - RNA, 19 nt, Homo sapiens
  misc_RNA (1)...(19): siRNA sense strand
cagaagugccugucaaagu

SEQ ID NO: 895624 - RNA, 19 nt, Homo sapiens
  misc_RNA (1)...(19): siRNA sense strand
gaggguaaauaaugcuuuu

SEQ ID NO: 895625 - RNA, 19 nt, Homo sapiens
  misc_RNA (1)...(19): siRNA sense strand
ggaccgacuccaaggcaaa

SEQ ID NO: 895626 - RNA, 19 nt, Homo sapiens
  misc_RNA (1)...(19): siRNA sense strand
gagcagaacagagcuaaac

SEQ ID NO: 895627 - RNA, 19 nt, Homo sapiens
  misc_RNA (1)...(19): siRNA sense strand
cacaggaggguaaauaaug

SEQ ID NO: 895628 - RNA, 19 nt, Homo sapiens
  misc_RNA (1)...(19): siRNA sense strand
ugaaacggcagcagcaaga

SEQ ID NO: 895629 - RNA, 19 nt, Homo sapiens
  misc_RNA (1)...(19): siRNA sense strand
ccggagaaaugagauacaa

SEQ ID NO: 895630 - RNA, 19 nt, Homo sapiens
  misc_RNA (1)...(19): siRNA sense strand
gagcaaacugaacacagaa

SEQ ID NO: 895631 - RNA, 19 nt, Homo sapiens
  misc_RNA (1)...(19): siRNA sense strand
gaagaagcugaacuccaaa

SEQ ID NO: 895632 - RNA, 19 nt, Homo sapiens
  misc_RNA (1)...(19): siRNA sense strand
gaagucagacagaaacaac

SEQ ID NO: 895633 - RNA, 19 nt, Homo sapiens
  misc_RNA (1)...(19): siRNA sense strand
uggccaaccuggagaagug

SEQ ID NO: 895634 - RNA, 19 nt, Homo sapiens
  misc_RNA (1)...(19): siRNA sense strand
ggaggguaaauaaugcuuu

SEQ ID NO: 895635 - RNA, 19 nt, Homo sapiens
  misc_RNA (1)...(19): siRNA sense strand
gagagagaagagcaauaaa

SEQ ID NO: 895636 - RNA, 19 nt, Homo sapiens
  misc_RNA (1)...(19): siRNA sense strand
cagcugaugcaaucuaaau

SEQ ID NO: 895637 - RNA, 19 nt, Homo sapiens
  misc_RNA (1)...(19): siRNA sense strand
gcuguuggaauaugaauag

SEQ ID NO: 895638 - RNA, 19 nt, Homo sapiens
  misc_RNA (1)...(19): siRNA sense strand
gcugaguucuugagcaaac

SEQ ID NO: 895639 - RNA, 19 nt, Homo sapiens
  misc_RNA (1)...(19): siRNA sense strand
ucaagaaggaagcugaaga

SEQ ID NO: 895640 - RNA, 19 nt, Homo sapiens
  misc_RNA (1)...(19): siRNA sense strand
gaagaaaacagaaaauugc

SEQ ID NO: 895641 - RNA, 19 nt, Homo sapiens
  misc_RNA (1)...(19): siRNA sense strand
gcaaacugaacacagaauc

SEQ ID NO: 895642 - RNA, 19 nt, Homo sapiens
  misc_RNA (1)...(19): siRNA sense strand
gaaucuguaagaaucaaga

SEQ ID NO: 895643 - RNA, 19 nt, Homo sapiens
  misc_RNA (1)...(19): siRNA sense strand
cagguggccucgagcaauc

SEQ ID NO: 895644 - RNA, 19 nt, Homo sapiens
  misc_RNA (1)...(19): siRNA sense strand
aaagaugaaggaugaacaa

SEQ ID NO: 895645 - RNA, 19 nt, Homo sapiens
  misc_RNA (1)...(19): siRNA sense strand
gcaauucagagagagaaga

SEQ ID NO: 895646 - RNA, 19 nt, Homo sapiens
  misc_RNA (1)...(19): siRNA sense strand
caagaaaaccuuagaagag

SEQ ID NO: 895647 - RNA, 19 nt, Homo sapiens
  misc_RNA (1)...(19): siRNA sense strand
ugcaaaagaugaaggauga

SEQ ID NO: 895648 - RNA, 19 nt, Homo sapiens
  misc_RNA (1)...(19): siRNA sense strand
cagaaucgccagacagaag

SEQ ID NO: 895649 - RNA, 19 nt, Homo sapiens
  misc_RNA (1)...(19): siRNA sense strand
gauagcaccaaauauaaac

SEQ ID NO: 895650 - RNA, 19 nt, Homo sapiens
  misc_RNA (1)...(19): siRNA sense strand
aaagagugaauuacuggaa

SEQ ID NO: 895651 - RNA, 19 nt, Homo sapiens
  misc_RNA (1)...(19): siRNA sense strand
ccuuagaagagaagcauuu

SEQ ID NO: 895652 - RNA, 19 nt, Homo sapiens
  misc_RNA (1)...(19): siRNA sense strand
ucaaaagagugaauuacug

SEQ ID NO: 895653 - RNA, 19 nt, Homo sapiens
  misc_RNA (1)...(19): siRNA sense strand
aacaacaacuccagcugau

SEQ ID NO: 895654 - RNA, 19 nt, Homo sapiens
  misc_RNA (1)...(19): siRNA sense strand
cacagaaucgccagacaga

SEQ ID NO: 895655 - RNA, 19 nt, Homo sapiens
  misc_RNA (1)...(19): siRNA sense strand
aagaaaaccuuagaagaga

SEQ ID NO: 895656 - RNA, 19 nt, Homo sapiens
  misc_RNA (1)...(19): siRNA sense strand
cagagagagaagagcaaua

SEQ ID NO: 895657 - RNA, 19 nt, Homo sapiens
  misc_RNA (1)...(19): siRNA sense strand
gcugaugcaaucuaaauac

SEQ ID NO: 895658 - RNA, 19 nt, Homo sapiens
  misc_RNA (1)...(19): siRNA sense strand
acaggaggguaaauaaugc

SEQ ID NO: 895659 - RNA, 19 nt, Homo sapiens
  misc_RNA (1)...(19): siRNA sense strand
cuuagaagagaagcauuua

SEQ ID NO: 895660 - RNA, 19 nt, Homo sapiens
  misc_RNA (1)...(19): siRNA sense strand
caauaaacuggaggagaaa

SEQ ID NO: 895661 - RNA, 19 nt, Homo sapiens
  misc_RNA (1)...(19): siRNA sense strand
cugaugcaaucuaaauaca

SEQ ID NO: 895662 - RNA, 19 nt, Homo sapiens
  misc_RNA (1)...(19): siRNA sense strand
caaauauaaaccggagaaa

SEQ ID NO: 895663 - RNA, 19 nt, Homo sapiens
  misc_RNA (1)...(19): siRNA sense strand
aaaccggagaaaugagaua

SEQ ID NO: 895664 - RNA, 19 nt, Homo sapiens
  misc_RNA (1)...(19): siRNA sense strand
caacuccagcugaugcaau

SEQ ID NO: 895665 - RNA, 19 nt, Homo sapiens
  misc_RNA (1)...(19): siRNA sense strand
uaacagcugggguauauga

SEQ ID NO: 895666 - RNA, 19 nt, Homo sapiens
  misc_RNA (1)...(19): siRNA sense strand
acacaggaggguaaauaau

SEQ ID NO: 895667 - RNA, 19 nt, Homo sapiens
  misc_RNA (1)...(19): siRNA sense strand
gcaagaaagagccaaaauc

SEQ ID NO: 895668 - RNA, 19 nt, Homo sapiens
  misc_RNA (1)...(19): siRNA sense strand
agaaguggaaggagcagaa

SEQ ID NO: 895669 - RNA, 19 nt, Homo sapiens
  misc_RNA (1)...(19): siRNA sense strand
auauaaaccggagaaauga

SEQ ID NO: 895670 - RNA, 19 nt, Homo sapiens
  misc_RNA (1)...(19): siRNA sense strand
uccagcugaugcaaucuaa

SEQ ID NO: 895671 - RNA, 19 nt, Homo sapiens
  misc_RNA (1)...(19): siRNA sense strand
gcaaucuaaauacaagcaa

SEQ ID NO: 895672 - RNA, 19 nt, Homo sapiens
  misc_RNA (1)...(19): siRNA sense strand
cagcagcaagagcaagaaa

SEQ ID NO: 895673 - RNA, 19 nt, Homo sapiens
  misc_RNA (1)...(19): siRNA sense strand
ggagcagaacagagcuaaa

SEQ ID NO: 895674 - RNA, 19 nt, Homo sapiens
  misc_RNA (1)...(19): siRNA sense strand
acaccuugauagcaccaaa

SEQ ID NO: 895675 - RNA, 19 nt, Homo sapiens
  misc_RNA (1)...(19): siRNA sense strand
uagagagcaucagcaauac

SEQ ID NO: 895676 - RNA, 19 nt, Homo sapiens
  misc_RNA (1)...(19): siRNA sense strand
cuguaagaaucaagaagga

SEQ ID NO: 895677 - RNA, 19 nt, Homo sapiens
  misc_RNA (1)...(19): siRNA sense strand
gagcaucagcaauacaaaa

SEQ ID NO: 895678 - RNA, 19 nt, Homo sapiens
  misc_RNA (1)...(19): siRNA sense strand
aacacaggaggguaaauaa

SEQ ID NO: 895679 - RNA, 19 nt, Homo sapiens
  misc_RNA (1)...(19): siRNA sense strand
agagagaagagcaauaaac

SEQ ID NO: 895680 - RNA, 19 nt, Homo sapiens
  misc_RNA (1)...(19): siRNA sense strand
ggcagcagcaagagcaaga

SEQ ID NO: 895681 - RNA, 19 nt, Homo sapiens
  misc_RNA (1)...(19): siRNA sense strand
gcccacaauccucaacaug

SEQ ID NO: 895682 - RNA, 19 nt, Homo sapiens
  misc_RNA (1)...(19): siRNA sense strand
ucaagaaaaccuuagaaga

SEQ ID NO: 895683 - RNA, 19 nt, Homo sapiens
  misc_RNA (1)...(19): siRNA sense strand
ggagaaauguggcugucua

SEQ ID NO: 895684 - RNA, 19 nt, Homo sapiens
  misc_RNA (1)...(19): siRNA sense strand
gaucaucacugcgguggua

SEQ ID NO: 895685 - RNA, 19 nt, Homo sapiens
  misc_RNA (1)...(19): siRNA sense strand
gaaauguggcugucuacua

SEQ ID NO: 895686 - RNA, 19 nt, Homo sapiens
  misc_RNA (1)...(19): siRNA sense strand
acacagacaucaucuacau

SEQ ID NO: 895687 - RNA, 19 nt, Homo sapiens
  misc_RNA (1)...(19): siRNA sense strand
aaccaaagccgucaucauu

SEQ ID NO: 895688 - RNA, 19 nt, Homo sapiens
  misc_RNA (1)...(19): siRNA sense strand
gacaucaucuacaucuuca

SEQ ID NO: 895689 - RNA, 19 nt, Homo sapiens
  misc_RNA (1)...(19): siRNA sense strand
gagagagcggugagugaua

SEQ ID NO: 895690 - RNA, 19 nt, Homo sapiens
  misc_RNA (1)...(19): siRNA sense strand
cgaaagguuuacuccauca

SEQ ID NO: 895691 - RNA, 19 nt, Homo sapiens
  misc_RNA (1)...(19): siRNA sense strand
aaauguggcugucuacuac

SEQ ID NO: 895692 - RNA, 19 nt, Homo sapiens
  misc_RNA (1)...(19): siRNA sense strand
ccaaagccgucaucauugc

SEQ ID NO: 895693 - RNA, 19 nt, Homo sapiens
  misc_RNA (1)...(19): siRNA sense strand
gggauugucacuagcauug

SEQ ID NO: 895694 - RNA, 19 nt, Homo sapiens
  misc_RNA (1)...(19): siRNA sense strand
agagugggaugaccggaaa

SEQ ID NO: 895695 - RNA, 19 nt, Homo sapiens
  misc_RNA (1)...(19): siRNA sense strand
ggccaucauugcuaucuuc

SEQ ID NO: 895696 - RNA, 19 nt, Homo sapiens
  misc_RNA (1)...(19): siRNA sense strand
guuccuggcuuacgacaca

SEQ ID NO: 895697 - RNA, 19 nt, Homo sapiens
  misc_RNA (1)...(19): siRNA sense strand
guccuaugcugucuucguu

SEQ ID NO: 895698 - RNA, 19 nt, Homo sapiens
  misc_RNA (1)...(19): siRNA sense strand
gauugucacuagcauugug

SEQ ID NO: 895699 - RNA, 19 nt, Homo sapiens
  misc_RNA (1)...(19): siRNA sense strand
gcauugugcucuacuucca

SEQ ID NO: 895700 - RNA, 19 nt, Homo sapiens
  misc_RNA (1)...(19): siRNA sense strand
uaucuucaccuuuguggaa

SEQ ID NO: 895701 - RNA, 19 nt, Homo sapiens
  misc_RNA (1)...(19): siRNA sense strand
ucacugcggugguauccau

SEQ ID NO: 895702 - RNA, 19 nt, Homo sapiens
  misc_RNA (1)...(19): siRNA sense strand
ggagagagcggugagugau

SEQ ID NO: 895703 - RNA, 19 nt, Homo sapiens
  misc_RNA (1)...(19): siRNA sense strand
ccauuucagucaccaucuu

SEQ ID NO: 895704 - RNA, 19 nt, Homo sapiens
  misc_RNA (1)...(19): siRNA sense strand
agagagcggugagugauag

SEQ ID NO: 895705 - RNA, 19 nt, Homo sapiens
  misc_RNA (1)...(19): siRNA sense strand
ucacccuguuccuggcuua

SEQ ID NO: 895706 - RNA, 19 nt, Homo sapiens
  misc_RNA (1)...(19): siRNA sense strand
gggcaccauuuccaguaug

SEQ ID NO: 895707 - RNA, 19 nt, Homo sapiens
  misc_RNA (1)...(19): siRNA sense strand
gaaccugucagcgccuuug

SEQ ID NO: 895708 - RNA, 19 nt, Homo sapiens
  misc_RNA (1)...(19): siRNA sense strand
caucuacaucuucaccuuu

SEQ ID NO: 895709 - RNA, 19 nt, Homo sapiens
  misc_RNA (1)...(19): siRNA sense strand
ucauugcuaucuucaccuu

SEQ ID NO: 895710 - RNA, 19 nt, Homo sapiens
  misc_RNA (1)...(19): siRNA sense strand
ucaucuacaucuucaccuu

SEQ ID NO: 895711 - RNA, 19 nt, Homo sapiens
  misc_RNA (1)...(19): siRNA sense strand
agacaucaucuacaucuuc

SEQ ID NO: 895712 - RNA, 19 nt, Homo sapiens
  misc_RNA (1)...(19): siRNA sense strand
ccuaugcugucuucguugu

SEQ ID NO: 895713 - RNA, 19 nt, Homo sapiens
  misc_RNA (1)...(19): siRNA sense strand
gcucuacuuccaauacguu

SEQ ID NO: 895714 - RNA, 19 nt, Homo sapiens
  misc_RNA (1)...(19): siRNA sense strand
ggcaccauuuccaguaugu

SEQ ID NO: 895715 - RNA, 19 nt, Homo sapiens
  misc_RNA (1)...(19): siRNA sense strand
uccgaaagguuuacuccau

SEQ ID NO: 895716 - RNA, 19 nt, Homo sapiens
  misc_RNA (1)...(19): siRNA sense strand
gcagauuuacacagacauc

SEQ ID NO: 895717 - RNA, 19 nt, Homo sapiens
  misc_RNA (1)...(19): siRNA sense strand
gucaccaucuucugcuuuc

SEQ ID NO: 895718 - RNA, 19 nt, Homo sapiens
  misc_RNA (1)...(19): siRNA sense strand
ccugucagcgccuuuguga

SEQ ID NO: 895719 - RNA, 19 nt, Homo sapiens
  misc_RNA (1)...(19): siRNA sense strand
gauuuacacagacaucauc

SEQ ID NO: 895720 - RNA, 19 nt, Homo sapiens
  misc_RNA (1)...(19): siRNA sense strand
ccauuuguuucacccuguu

SEQ ID NO: 895721 - RNA, 19 nt, Homo sapiens
  misc_RNA (1)...(19): siRNA sense strand
gcccaggccauggcuauga

SEQ ID NO: 895722 - RNA, 19 nt, Homo sapiens
  misc_RNA (1)...(19): siRNA sense strand
caguauguaccaaaccaaa

SEQ ID NO: 895723 - RNA, 19 nt, Homo sapiens
  misc_RNA (1)...(19): siRNA sense strand
auugcuaucuucaccuuug

SEQ ID NO: 895724 - RNA, 19 nt, Homo sapiens
  misc_RNA (1)...(19): siRNA sense strand
uuacacagacaucaucuac

SEQ ID NO: 895725 - RNA, 19 nt, Homo sapiens
  misc_RNA (1)...(19): siRNA sense strand
cagacaucaucuacaucuu

SEQ ID NO: 895726 - RNA, 19 nt, Homo sapiens
  misc_RNA (1)...(19): siRNA sense strand
gcgccuuugugaggagaaa

SEQ ID NO: 895727 - RNA, 19 nt, Homo sapiens
  misc_RNA (1)...(19): siRNA sense strand
cugcagauuuacacagaca

SEQ ID NO: 895728 - RNA, 19 nt, Homo sapiens
  misc_RNA (1)...(19): siRNA sense strand
gagcggugagugauagcuu

SEQ ID NO: 895729 - RNA, 19 nt, Homo sapiens
  misc_RNA (1)...(19): siRNA sense strand
agacgccguuucccaugga

SEQ ID NO: 895730 - RNA, 19 nt, Homo sapiens
  misc_RNA (1)...(19): siRNA sense strand
ucuacuacguguccuaugc

SEQ ID NO: 895731 - RNA, 19 nt, Homo sapiens
  misc_RNA (1)...(19): siRNA sense strand
gagaaauguggcugucuac

SEQ ID NO: 895732 - RNA, 19 nt, Homo sapiens
  misc_RNA (1)...(19): siRNA sense strand
acagacaucaucuacaucu

SEQ ID NO: 895733 - RNA, 19 nt, Homo sapiens
  misc_RNA (1)...(19): siRNA sense strand
cccugcagauuuacacaga

SEQ ID NO: 895734 - RNA, 19 nt, Homo sapiens
  misc_RNA (1)...(19): siRNA sense strand
gaccggaaagugcgacaca

SEQ ID NO: 895735 - RNA, 19 nt, Homo sapiens
  misc_RNA (1)...(19): siRNA sense strand
gcaccauuuccaguaugua

SEQ ID NO: 895736 - RNA, 19 nt, Homo sapiens
  misc_RNA (1)...(19): siRNA sense strand
cgggcaccauuuccaguau

SEQ ID NO: 895737 - RNA, 19 nt, Homo sapiens
  misc_RNA (1)...(19): siRNA sense strand
uaugcugucuucguuguca

SEQ ID NO: 895738 - RNA, 19 nt, Homo sapiens
  misc_RNA (1)...(19): siRNA sense strand
gaaaagcaguugagucaua

SEQ ID NO: 895739 - RNA, 19 nt, Homo sapiens
  misc_RNA (1)...(19): siRNA sense strand
gagaauauggaaaggauug

SEQ ID NO: 895740 - RNA, 19 nt, Homo sapiens
  misc_RNA (1)...(19): siRNA sense strand
ugagacagcugauggaaaa

SEQ ID NO: 895741 - RNA, 19 nt, Homo sapiens
  misc_RNA (1)...(19): siRNA sense strand
cagcccauccugcaguaua

SEQ ID NO: 895742 - RNA, 19 nt, Homo sapiens
  misc_RNA (1)...(19): siRNA sense strand
uggaaaagcugagggaaaa

SEQ ID NO: 895743 - RNA, 19 nt, Homo sapiens
  misc_RNA (1)...(19): siRNA sense strand
ugaauacugugugccuaga

SEQ ID NO: 895744 - RNA, 19 nt, Homo sapiens
  misc_RNA (1)...(19): siRNA sense strand
gggaaaagcaguugaguca

SEQ ID NO: 895745 - RNA, 19 nt, Homo sapiens
  misc_RNA (1)...(19): siRNA sense strand
gaagaaaaggagcaaguug

SEQ ID NO: 895746 - RNA, 19 nt, Homo sapiens
  misc_RNA (1)...(19): siRNA sense strand
gugagacagcugauggaaa

SEQ ID NO: 895747 - RNA, 19 nt, Homo sapiens
  misc_RNA (1)...(19): siRNA sense strand
ggugagacagcugauggaa

SEQ ID NO: 895748 - RNA, 19 nt, Homo sapiens
  misc_RNA (1)...(19): siRNA sense strand
gggaaggccuuggagauga

SEQ ID NO: 895749 - RNA, 19 nt, Homo sapiens
  misc_RNA (1)...(19): siRNA sense strand
aggaggagcugaagaggaa

SEQ ID NO: 895750 - RNA, 19 nt, Homo sapiens
  misc_RNA (1)...(19): siRNA sense strand
ccaggagccuugccucaga

SEQ ID NO: 895751 - RNA, 19 nt, Homo sapiens
  misc_RNA (1)...(19): siRNA sense strand
ucaugaugcugcuuucuga

SEQ ID NO: 895752 - RNA, 19 nt, Homo sapiens
  misc_RNA (1)...(19): siRNA sense strand
gaccuguaccacuuuguua

SEQ ID NO: 895753 - RNA, 19 nt, Homo sapiens
  misc_RNA (1)...(19): siRNA sense strand
ggacuccuaugccaacuac

SEQ ID NO: 895754 - RNA, 19 nt, Homo sapiens
  misc_RNA (1)...(19): siRNA sense strand
gcugugccauccagaauca

SEQ ID NO: 895755 - RNA, 19 nt, Homo sapiens
  misc_RNA (1)...(19): siRNA sense strand
caggugcccucaaguccua

SEQ ID NO: 895756 - RNA, 19 nt, Homo sapiens
  misc_RNA (1)...(19): siRNA sense strand
gaugacagccacccacuuc

SEQ ID NO: 895757 - RNA, 19 nt, Homo sapiens
  misc_RNA (1)...(19): siRNA sense strand
agaggaaaguggagcaaug

SEQ ID NO: 895758 - RNA, 19 nt, Homo sapiens
  misc_RNA (1)...(19): siRNA sense strand
uggcugaccuguaccacuu

SEQ ID NO: 895759 - RNA, 19 nt, Homo sapiens
  misc_RNA (1)...(19): siRNA sense strand
uggcugagcugagggagaa

SEQ ID NO: 895760 - RNA, 19 nt, Homo sapiens
  misc_RNA (1)...(19): siRNA sense strand
caacgugucaggccucuuc

SEQ ID NO: 895761 - RNA, 19 nt, Homo sapiens
  misc_RNA (1)...(19): siRNA sense strand
gagcaggaggugaacaaga

SEQ ID NO: 895762 - RNA, 19 nt, Homo sapiens
  misc_RNA (1)...(19): siRNA sense strand
ggaaggccuuggagaugag

SEQ ID NO: 895763 - RNA, 19 nt, Homo sapiens
  misc_RNA (1)...(19): siRNA sense strand
ggccucuucucagcuguua

SEQ ID NO: 895764 - RNA, 19 nt, Homo sapiens
  misc_RNA (1)...(19): siRNA sense strand
ccuucgaccucuaugauga

SEQ ID NO: 895765 - RNA, 19 nt, Homo sapiens
  misc_RNA (1)...(19): siRNA sense strand
caucgaggccugcgucaug

SEQ ID NO: 895766 - RNA, 19 nt, Homo sapiens
  misc_RNA (1)...(19): siRNA sense strand
ccucuucccuggagacauc

SEQ ID NO: 895767 - RNA, 19 nt, Homo sapiens
  misc_RNA (1)...(19): siRNA sense strand
ggagaaccacggccaagca

SEQ ID NO: 895768 - RNA, 19 nt, Homo sapiens
  misc_RNA (1)...(19): siRNA sense strand
uaccaucgcaggucacuga

SEQ ID NO: 895769 - RNA, 19 nt, Homo sapiens
  misc_RNA (1)...(19): siRNA sense strand
ccagcaacaucgccauagu

SEQ ID NO: 895770 - RNA, 19 nt, Homo sapiens
  misc_RNA (1)...(19): siRNA sense strand
gagcugugccauccagaau

SEQ ID NO: 895771 - RNA, 19 nt, Homo sapiens
  misc_RNA (1)...(19): siRNA sense strand
cuggagacaucaacuucaa

SEQ ID NO: 895772 - RNA, 19 nt, Homo sapiens
  misc_RNA (1)...(19): siRNA sense strand
ggaugcagccuccgugucu

SEQ ID NO: 895773 - RNA, 19 nt, Homo sapiens
  misc_RNA (1)...(19): siRNA sense strand
auacgaccauggccaacaa

SEQ ID NO: 895774 - RNA, 19 nt, Homo sapiens
  misc_RNA (1)...(19): siRNA sense strand
gagcgcagacacccucuuc

SEQ ID NO: 895775 - RNA, 19 nt, Homo sapiens
  misc_RNA (1)...(19): siRNA sense strand
gaagaggaaaguggagcaa

SEQ ID NO: 895776 - RNA, 19 nt, Homo sapiens
  misc_RNA (1)...(19): siRNA sense strand
gcugaccuguaccacuuug

SEQ ID NO: 895777 - RNA, 19 nt, Homo sapiens
  misc_RNA (1)...(19): siRNA sense strand
agcaggaggugaacaagau

SEQ ID NO: 895778 - RNA, 19 nt, Homo sapiens
  misc_RNA (1)...(19): siRNA sense strand
gaccuucgaccucuaugau

SEQ ID NO: 895779 - RNA, 19 nt, Homo sapiens
  misc_RNA (1)...(19): siRNA sense strand
cagccauccucaaacacaa

SEQ ID NO: 895780 - RNA, 19 nt, Homo sapiens
  misc_RNA (1)...(19): siRNA sense strand
gcuguggccaccugagaaa

SEQ ID NO: 895781 - RNA, 19 nt, Homo sapiens
  misc_RNA (1)...(19): siRNA sense strand
ucagucaggcaaccaagaa

SEQ ID NO: 895782 - RNA, 19 nt, Homo sapiens
  misc_RNA (1)...(19): siRNA sense strand
uaugccaacuacuucauuc

SEQ ID NO: 895783 - RNA, 19 nt, Homo sapiens
  misc_RNA (1)...(19): siRNA sense strand
gcaaugcagggacgaguac

SEQ ID NO: 895784 - RNA, 19 nt, Homo sapiens
  misc_RNA (1)...(19): siRNA sense strand
gaauucaggcagcagucaa

SEQ ID NO: 895785 - RNA, 19 nt, Homo sapiens
  misc_RNA (1)...(19): siRNA sense strand
gacuggaacacacucaaga

SEQ ID NO: 895786 - RNA, 19 nt, Homo sapiens
  misc_RNA (1)...(19): siRNA sense strand
gguagucacagccauacga

SEQ ID NO: 895787 - RNA, 19 nt, Homo sapiens
  misc_RNA (1)...(19): siRNA sense strand
uggagauucaggccgauua

SEQ ID NO: 895788 - RNA, 19 nt, Homo sapiens
  misc_RNA (1)...(19): siRNA sense strand
gaugaccuucgaccucuau

SEQ ID NO: 895789 - RNA, 19 nt, Homo sapiens
  misc_RNA (1)...(19): siRNA sense strand
cugagggcaugaaggaaga

SEQ ID NO: 895790 - RNA, 19 nt, Homo sapiens
  misc_RNA (1)...(19): siRNA sense strand
guggccaccugagaaagaa

SEQ ID NO: 895791 - RNA, 19 nt, Homo sapiens
  misc_RNA (1)...(19): siRNA sense strand
ccgaggagcaggaggugaa

SEQ ID NO: 895792 - RNA, 19 nt, Homo sapiens
  misc_RNA (1)...(19): siRNA sense strand
ugccagccauccucaaaca

SEQ ID NO: 895793 - RNA, 19 nt, Homo sapiens
  misc_RNA (1)...(19): siRNA sense strand
gcaggaggugaacaagaug

SEQ ID NO: 895794 - RNA, 19 nt, Homo sapiens
  misc_RNA (1)...(19): siRNA sense strand
ugaccuguaccacuuuguu

SEQ ID NO: 895795 - RNA, 19 nt, Homo sapiens
  misc_RNA (1)...(19): siRNA sense strand
cagcagcuaccaaggaaag

SEQ ID NO: 895796 - RNA, 19 nt, Homo sapiens
  misc_RNA (1)...(19): siRNA sense strand
gcuggcaacccaccugcaa

SEQ ID NO: 895797 - RNA, 19 nt, Homo sapiens
  misc_RNA (1)...(19): siRNA sense strand
cauccucaaacacaagaaa

SEQ ID NO: 895798 - RNA, 19 nt, Homo sapiens
  misc_RNA (1)...(19): siRNA sense strand
uucagcagcuaccaaggaa

SEQ ID NO: 895799 - RNA, 19 nt, Homo sapiens
  misc_RNA (1)...(19): siRNA sense strand
gcagaccacuccccuucga

SEQ ID NO: 895800 - RNA, 19 nt, Homo sapiens
  misc_RNA (1)...(19): siRNA sense strand
gcagcuaccaaggaaagga

SEQ ID NO: 895801 - RNA, 19 nt, Homo sapiens
  misc_RNA (1)...(19): siRNA sense strand
gaugcagccuccgugucuu

SEQ ID NO: 895802 - RNA, 19 nt, Homo sapiens
  misc_RNA (1)...(19): siRNA sense strand
cccacagccuggaggaguu

SEQ ID NO: 895803 - RNA, 19 nt, Homo sapiens
  misc_RNA (1)...(19): siRNA sense strand
ggacagaaggguauuuauu

SEQ ID NO: 895804 - RNA, 19 nt, Homo sapiens
  misc_RNA (1)...(19): siRNA sense strand
gaagucaaaucugaaauuc

SEQ ID NO: 895805 - RNA, 19 nt, Homo sapiens
  misc_RNA (1)...(19): siRNA sense strand
gcagaucccugagcucauu

SEQ ID NO: 895806 - RNA, 19 nt, Homo sapiens
  misc_RNA (1)...(19): siRNA sense strand
ggaagucaaaucugaaauu

SEQ ID NO: 895807 - RNA, 19 nt, Homo sapiens
  misc_RNA (1)...(19): siRNA sense strand
gacagaaggguauuuauug

SEQ ID NO: 895808 - RNA, 19 nt, Homo sapiens
  misc_RNA (1)...(19): siRNA sense strand
gaacaagacaccuucuaca

SEQ ID NO: 895809 - RNA, 19 nt, Homo sapiens
  misc_RNA (1)...(19): siRNA sense strand
gcagcgaacucagcuacuu

SEQ ID NO: 895810 - RNA, 19 nt, Homo sapiens
  misc_RNA (1)...(19): siRNA sense strand
guacaucgucccagcauug

SEQ ID NO: 895811 - RNA, 19 nt, Homo sapiens
  misc_RNA (1)...(19): siRNA sense strand
gaguacagcgugaagauug

SEQ ID NO: 895812 - RNA, 19 nt, Homo sapiens
  misc_RNA (1)...(19): siRNA sense strand
uggcggaagucaaaucuga

SEQ ID NO: 895813 - RNA, 19 nt, Homo sapiens
  misc_RNA (1)...(19): siRNA sense strand
ucagacggauccaguaaca

SEQ ID NO: 895814 - RNA, 19 nt, Homo sapiens
  misc_RNA (1)...(19): siRNA sense strand
guacagugaugagaucgau

SEQ ID NO: 895815 - RNA, 19 nt, Homo sapiens
  misc_RNA (1)...(19): siRNA sense strand
gaagugcaguguggaaagg

SEQ ID NO: 895816 - RNA, 19 nt, Homo sapiens
  misc_RNA (1)...(19): siRNA sense strand
gcaguggacagaaggguau

SEQ ID NO: 895817 - RNA, 19 nt, Homo sapiens
  misc_RNA (1)...(19): siRNA sense strand
ggcagacgcuggagaucau

SEQ ID NO: 895818 - RNA, 19 nt, Homo sapiens
  misc_RNA (1)...(19): siRNA sense strand
gcucugggaaggcugagua

SEQ ID NO: 895819 - RNA, 19 nt, Homo sapiens
  misc_RNA (1)...(19): siRNA sense strand
cgucuucuaugccauguuc

SEQ ID NO: 895820 - RNA, 19 nt, Homo sapiens
  misc_RNA (1)...(19): siRNA sense strand
gcagcuccgucuucuaugc

SEQ ID NO: 895821 - RNA, 19 nt, Homo sapiens
  misc_RNA (1)...(19): siRNA sense strand
gcggaagucaaaucugaaa

SEQ ID NO: 895822 - RNA, 19 nt, Homo sapiens
  misc_RNA (1)...(19): siRNA sense strand
ccaugacccuagaggaguu

SEQ ID NO: 895823 - RNA, 19 nt, Homo sapiens
  misc_RNA (1)...(19): siRNA sense strand
uguaugcugcuaagaagua

SEQ ID NO: 895824 - RNA, 19 nt, Homo sapiens
  misc_RNA (1)...(19): siRNA sense strand
cggcagcuccgucuucuau

SEQ ID NO: 895825 - RNA, 19 nt, Homo sapiens
  misc_RNA (1)...(19): siRNA sense strand
guggacagaaggguauuua

SEQ ID NO: 895826 - RNA, 19 nt, Homo sapiens
  misc_RNA (1)...(19): siRNA sense strand
gaggagacccacagcaucu

SEQ ID NO: 895827 - RNA, 19 nt, Homo sapiens
  misc_RNA (1)...(19): siRNA sense strand
cauguacagugaugagauc

SEQ ID NO: 895828 - RNA, 19 nt, Homo sapiens
  misc_RNA (1)...(19): siRNA sense strand
guacacggccaccaacaag

SEQ ID NO: 895829 - RNA, 19 nt, Homo sapiens
  misc_RNA (1)...(19): siRNA sense strand
ucaacuuucuggagacaag

SEQ ID NO: 895830 - RNA, 19 nt, Homo sapiens
  misc_RNA (1)...(19): siRNA sense strand
ggaagugcaguguggaaag

SEQ ID NO: 895831 - RNA, 19 nt, Homo sapiens
  misc_RNA (1)...(19): siRNA sense strand
cagcgaacucagcuacuuu

SEQ ID NO: 895832 - RNA, 19 nt, Homo sapiens
  misc_RNA (1)...(19): siRNA sense strand
acagaaggguauuuauugc

SEQ ID NO: 895833 - RNA, 19 nt, Homo sapiens
  misc_RNA (1)...(19): siRNA sense strand
ucccagagccggcuguuug

SEQ ID NO: 895834 - RNA, 19 nt, Homo sapiens
  misc_RNA (1)...(19): siRNA sense strand
acacggugcuggccacucu

SEQ ID NO: 895835 - RNA, 19 nt, Homo sapiens
  misc_RNA (1)...(19): siRNA sense strand
agaccuggcggaagucaaa

SEQ ID NO: 895836 - RNA, 19 nt, Homo sapiens
  misc_RNA (1)...(19): siRNA sense strand
gcccgcagccuuucugauc

SEQ ID NO: 895837 - RNA, 19 nt, Homo sapiens
  misc_RNA (1)...(19): siRNA sense strand
uaucugguccgaauuccaa

SEQ ID NO: 895838 - RNA, 19 nt, Homo sapiens
  misc_RNA (1)...(19): siRNA sense strand
uuucugauccucuuaaagu

SEQ ID NO: 895839 - RNA, 19 nt, Homo sapiens
  misc_RNA (1)...(19): siRNA sense strand
ucccugagcucauuuucua

SEQ ID NO: 895840 - RNA, 19 nt, Homo sapiens
  misc_RNA (1)...(19): siRNA sense strand
acggagaccuggcggaagu

SEQ ID NO: 895841 - RNA, 19 nt, Homo sapiens
  misc_RNA (1)...(19): siRNA sense strand
gguacacggccaccaacaa

SEQ ID NO: 895842 - RNA, 19 nt, Homo sapiens
  misc_RNA (1)...(19): siRNA sense strand
gcaaaagccugugucaacu

SEQ ID NO: 895843 - RNA, 19 nt, Homo sapiens
  misc_RNA (1)...(19): siRNA sense strand
ggagacccacagcaucuuc

SEQ ID NO: 895844 - RNA, 19 nt, Homo sapiens
  misc_RNA (1)...(19): siRNA sense strand
ugucagacggauccaguaa

SEQ ID NO: 895845 - RNA, 19 nt, Homo sapiens
  misc_RNA (1)...(19): siRNA sense strand
aguacagcgugaagauuga

SEQ ID NO: 895846 - RNA, 19 nt, Homo sapiens
  misc_RNA (1)...(19): siRNA sense strand
ucuguaugcugcuaagaag

SEQ ID NO: 895847 - RNA, 19 nt, Homo sapiens
  misc_RNA (1)...(19): siRNA sense strand
ggugcuggccacucuguau

SEQ ID NO: 895848 - RNA, 19 nt, Homo sapiens
  misc_RNA (1)...(19): siRNA sense strand
gguccagguugaacaagac

SEQ ID NO: 895849 - RNA, 19 nt, Homo sapiens
  misc_RNA (1)...(19): siRNA sense strand
guccgaauuccaaccauga

SEQ ID NO: 895850 - RNA, 19 nt, Homo sapiens
  misc_RNA (1)...(19): siRNA sense strand
ugaacaagacaccuucuac

SEQ ID NO: 895851 - RNA, 19 nt, Homo sapiens
  misc_RNA (1)...(19): siRNA sense strand
cagccuuucugauccucuu

SEQ ID NO: 895852 - RNA, 19 nt, Homo sapiens
  misc_RNA (1)...(19): siRNA sense strand
caccuucccggucugguuu

SEQ ID NO: 895853 - RNA, 19 nt, Homo sapiens
  misc_RNA (1)...(19): siRNA sense strand
gcgacagcauccaguuugc

SEQ ID NO: 895854 - RNA, 19 nt, Homo sapiens
  misc_RNA (1)...(19): siRNA sense strand
aaucagagcuggugaaaua

SEQ ID NO: 895855 - RNA, 19 nt, Homo sapiens
  misc_RNA (1)...(19): siRNA sense strand
gauagaggcuuguacaaag

SEQ ID NO: 895856 - RNA, 19 nt, Homo sapiens
  misc_RNA (1)...(19): siRNA sense strand
gugcauauguguuacuaaa

SEQ ID NO: 895857 - RNA, 19 nt, Homo sapiens
  misc_RNA (1)...(19): siRNA sense strand
gacaucaaauuucugacua

SEQ ID NO: 895858 - RNA, 19 nt, Homo sapiens
  misc_RNA (1)...(19): siRNA sense strand
ggagacaucaaauuucuga

SEQ ID NO: 895859 - RNA, 19 nt, Homo sapiens
  misc_RNA (1)...(19): siRNA sense strand
ggacgagacauuccaauag

SEQ ID NO: 895860 - RNA, 19 nt, Homo sapiens
  misc_RNA (1)...(19): siRNA sense strand
gggaagagcaagaggguuu

SEQ ID NO: 895861 - RNA, 19 nt, Homo sapiens
  misc_RNA (1)...(19): siRNA sense strand
uccaauaguucacagagua

SEQ ID NO: 895862 - RNA, 19 nt, Homo sapiens
  misc_RNA (1)...(19): siRNA sense strand
ucaaauuucugacuaaagg

SEQ ID NO: 895863 - RNA, 19 nt, Homo sapiens
  misc_RNA (1)...(19): siRNA sense strand
gaacaagcgccagcucuau

SEQ ID NO: 895864 - RNA, 19 nt, Homo sapiens
  misc_RNA (1)...(19): siRNA sense strand
gacgagacauuccaauagu

SEQ ID NO: 895865 - RNA, 19 nt, Homo sapiens
  misc_RNA (1)...(19): siRNA sense strand
acaagcgccagcucuauua

SEQ ID NO: 895866 - RNA, 19 nt, Homo sapiens
  misc_RNA (1)...(19): siRNA sense strand
gauaauggagacaucaaau

SEQ ID NO: 895867 - RNA, 19 nt, Homo sapiens
  misc_RNA (1)...(19): siRNA sense strand
ucacagaguaaucaaaguu

SEQ ID NO: 895868 - RNA, 19 nt, Homo sapiens
  misc_RNA (1)...(19): siRNA sense strand
uguaaugggugcauaugug

SEQ ID NO: 895869 - RNA, 19 nt, Homo sapiens
  misc_RNA (1)...(19): siRNA sense strand
cagagcuggugaaauaguu

SEQ ID NO: 895870 - RNA, 19 nt, Homo sapiens
  misc_RNA (1)...(19): siRNA sense strand
guacaaagaaggccagaac

SEQ ID NO: 895871 - RNA, 19 nt, Homo sapiens
  misc_RNA (1)...(19): siRNA sense strand
gaugauagaggcuuguaca

SEQ ID NO: 895872 - RNA, 19 nt, Homo sapiens
  misc_RNA (1)...(19): siRNA sense strand
cuucugcacucaugauaug

SEQ ID NO: 895873 - RNA, 19 nt, Homo sapiens
  misc_RNA (1)...(19): siRNA sense strand
ccagcucuauuaccagguu

SEQ ID NO: 895874 - RNA, 19 nt, Homo sapiens
  misc_RNA (1)...(19): siRNA sense strand
ugauagaggcuuguacaaa

SEQ ID NO: 895875 - RNA, 19 nt, Homo sapiens
  misc_RNA (1)...(19): siRNA sense strand
ccaauaguucacagaguaa

SEQ ID NO: 895876 - RNA, 19 nt, Homo sapiens
  misc_RNA (1)...(19): siRNA sense strand
gaaggacgagacauuccaa

SEQ ID NO: 895877 - RNA, 19 nt, Homo sapiens
  misc_RNA (1)...(19): siRNA sense strand
gcacucaugauauggaaag

SEQ ID NO: 895878 - RNA, 19 nt, Homo sapiens
  misc_RNA (1)...(19): siRNA sense strand
ugaacaagcgccagcucua

SEQ ID NO: 895879 - RNA, 19 nt, Homo sapiens
  misc_RNA (1)...(19): siRNA sense strand
auagaggcuuguacaaaga

SEQ ID NO: 895880 - RNA, 19 nt, Homo sapiens
  misc_RNA (1)...(19): siRNA sense strand
ggagauaauaaugaaguug

SEQ ID NO: 895881 - RNA, 19 nt, Homo sapiens
  misc_RNA (1)...(19): siRNA sense strand
aaugggugcauauguguua

SEQ ID NO: 895882 - RNA, 19 nt, Homo sapiens
  misc_RNA (1)...(19): siRNA sense strand
gggugcauauguguuacua

SEQ ID NO: 895883 - RNA, 19 nt, Homo sapiens
  misc_RNA (1)...(19): siRNA sense strand
agaacuggcuggaaaagaa

SEQ ID NO: 895884 - RNA, 19 nt, Homo sapiens
  misc_RNA (1)...(19): siRNA sense strand
guaaugggugcauaugugu

SEQ ID NO: 895885 - RNA, 19 nt, Homo sapiens
  misc_RNA (1)...(19): siRNA sense strand
gaccuccuguuccucacaa

SEQ ID NO: 895886 - RNA, 19 nt, Homo sapiens
  misc_RNA (1)...(19): siRNA sense strand
acagaguaaucaaaguuca

SEQ ID NO: 895887 - RNA, 19 nt, Homo sapiens
  misc_RNA (1)...(19): siRNA sense strand
ccaaucagagcuggugaaa

SEQ ID NO: 895888 - RNA, 19 nt, Homo sapiens
  misc_RNA (1)...(19): siRNA sense strand
cgagacauuccaauaguuc

SEQ ID NO: 895889 - RNA, 19 nt, Homo sapiens
  misc_RNA (1)...(19): siRNA sense strand
acuaaaacgugaauccuaa

SEQ ID NO: 895890 - RNA, 19 nt, Homo sapiens
  misc_RNA (1)...(19): siRNA sense strand
gauauggaaaggcuugauc

SEQ ID NO: 895891 - RNA, 19 nt, Homo sapiens
  misc_RNA (1)...(19): siRNA sense strand
gcauauguguuacuaaaac

SEQ ID NO: 895892 - RNA, 19 nt, Homo sapiens
  misc_RNA (1)...(19): siRNA sense strand
acgagacauuccaauaguu

SEQ ID NO: 895893 - RNA, 19 nt, Homo sapiens
  misc_RNA (1)...(19): siRNA sense strand
guucacagaguaaucaaag

SEQ ID NO: 895894 - RNA, 19 nt, Homo sapiens
  misc_RNA (1)...(19): siRNA sense strand
uccuguuccucacaaauuu

SEQ ID NO: 895895 - RNA, 19 nt, Homo sapiens
  misc_RNA (1)...(19): siRNA sense strand
acaaagaaggccagaacug

SEQ ID NO: 895896 - RNA, 19 nt, Homo sapiens
  misc_RNA (1)...(19): siRNA sense strand
ccgggaagacccaaucaga

SEQ ID NO: 895897 - RNA, 19 nt, Homo sapiens
  misc_RNA (1)...(19): siRNA sense strand
gaaggacguggugggaaga

SEQ ID NO: 895898 - RNA, 19 nt, Homo sapiens
  misc_RNA (1)...(19): siRNA sense strand
aggacgagacauuccaaua

SEQ ID NO: 895899 - RNA, 19 nt, Homo sapiens
  misc_RNA (1)...(19): siRNA sense strand
ggugcugaguggcaguaug

SEQ ID NO: 895900 - RNA, 19 nt, Homo sapiens
  misc_RNA (1)...(19): siRNA sense strand
gcuggugaaauaguuguuu

SEQ ID NO: 895901 - RNA, 19 nt, Homo sapiens
  misc_RNA (1)...(19): siRNA sense strand
aacaagcgccagcucuauu

SEQ ID NO: 895902 - RNA, 19 nt, Homo sapiens
  misc_RNA (1)...(19): siRNA sense strand
gccaugaucgugucuucug

SEQ ID NO: 895903 - RNA, 19 nt, Homo sapiens
  misc_RNA (1)...(19): siRNA sense strand
auggagacaucaaauuucu

SEQ ID NO: 895904 - RNA, 19 nt, Homo sapiens
  misc_RNA (1)...(19): siRNA sense strand
uaacaagacuuaugcaaga

SEQ ID NO: 895905 - RNA, 19 nt, Homo sapiens
  misc_RNA (1)...(19): siRNA sense strand
ugaagacgcuggagacaaa

SEQ ID NO: 895906 - RNA, 19 nt, Homo sapiens
  misc_RNA (1)...(19): siRNA sense strand
ggaaggaucccacauaaca

SEQ ID NO: 895907 - RNA, 19 nt, Homo sapiens
  misc_RNA (1)...(19): siRNA sense strand
gaauaucagcaaagaagua

SEQ ID NO: 895908 - RNA, 19 nt, Homo sapiens
  misc_RNA (1)...(19): siRNA sense strand
ggagacugcucacuuguca

SEQ ID NO: 895909 - RNA, 19 nt, Homo sapiens
  misc_RNA (1)...(19): siRNA sense strand
aaccagaagugccagcuua

SEQ ID NO: 895910 - RNA, 19 nt, Homo sapiens
  misc_RNA (1)...(19): siRNA sense strand
ucaaugaccaugaaccuuu

SEQ ID NO: 895911 - RNA, 19 nt, Homo sapiens
  misc_RNA (1)...(19): siRNA sense strand
ucaccaacaucagacauuu

SEQ ID NO: 895912 - RNA, 19 nt, Homo sapiens
  misc_RNA (1)...(19): siRNA sense strand
caagacuuaugcaagauau

SEQ ID NO: 895913 - RNA, 19 nt, Homo sapiens
  misc_RNA (1)...(19): siRNA sense strand
cagguuacauuuuggauua

SEQ ID NO: 895914 - RNA, 19 nt, Homo sapiens
  misc_RNA (1)...(19): siRNA sense strand
cagcaaagaaguagcuaaa

SEQ ID NO: 895915 - RNA, 19 nt, Homo sapiens
  misc_RNA (1)...(19): siRNA sense strand
cgaagacuguaauggaaau

SEQ ID NO: 895916 - RNA, 19 nt, Homo sapiens
  misc_RNA (1)...(19): siRNA sense strand
gccagaauaauauccauaa

SEQ ID NO: 895917 - RNA, 19 nt, Homo sapiens
  misc_RNA (1)...(19): siRNA sense strand
ggaaaugucaguggagguu

SEQ ID NO: 895918 - RNA, 19 nt, Homo sapiens
  misc_RNA (1)...(19): siRNA sense strand
uuggaaggaucccacauaa

SEQ ID NO: 895919 - RNA, 19 nt, Homo sapiens
  misc_RNA (1)...(19): siRNA sense strand
acacucagguugugcuguu

SEQ ID NO: 895920 - RNA, 19 nt, Homo sapiens
  misc_RNA (1)...(19): siRNA sense strand
cagcuuaggcuccugaaga

SEQ ID NO: 895921 - RNA, 19 nt, Homo sapiens
  misc_RNA (1)...(19): siRNA sense strand
gaaggaucccacauaacaa

SEQ ID NO: 895922 - RNA, 19 nt, Homo sapiens
  misc_RNA (1)...(19): siRNA sense strand
uuaggaauaucagcaaaga

SEQ ID NO: 895923 - RNA, 19 nt, Homo sapiens
  misc_RNA (1)...(19): siRNA sense strand
gcucacuugucaaugaaau

SEQ ID NO: 895924 - RNA, 19 nt, Homo sapiens
  misc_RNA (1)...(19): siRNA sense strand
gcgaagacuguaauggaaa

SEQ ID NO: 895925 - RNA, 19 nt, Homo sapiens
  misc_RNA (1)...(19): siRNA sense strand
gcuaugaaacacucagguu

SEQ ID NO: 895926 - RNA, 19 nt, Homo sapiens
  misc_RNA (1)...(19): siRNA sense strand
aaacaacaccaccagacuu

SEQ ID NO: 895927 - RNA, 19 nt, Homo sapiens
  misc_RNA (1)...(19): siRNA sense strand
ugcgaagacuguaauggaa

SEQ ID NO: 895928 - RNA, 19 nt, Homo sapiens
  misc_RNA (1)...(19): siRNA sense strand
cgugaucgguauuauucaa

SEQ ID NO: 895929 - RNA, 19 nt, Homo sapiens
  misc_RNA (1)...(19): siRNA sense strand
cgagcuuauucaugcauuu

SEQ ID NO: 895930 - RNA, 19 nt, Homo sapiens
  misc_RNA (1)...(19): siRNA sense strand
gaaaugucaguggagguuu

SEQ ID NO: 895931 - RNA, 19 nt, Homo sapiens
  misc_RNA (1)...(19): siRNA sense strand
acugcucacuugucaauga

SEQ ID NO: 895932 - RNA, 19 nt, Homo sapiens
  misc_RNA (1)...(19): siRNA sense strand
caacaccaccagacuugug

SEQ ID NO: 895933 - RNA, 19 nt, Homo sapiens
  misc_RNA (1)...(19): siRNA sense strand
ggucacacacgagcuuauu

SEQ ID NO: 895934 - RNA, 19 nt, Homo sapiens
  misc_RNA (1)...(19): siRNA sense strand
aaaggcuguugaugaaguu

SEQ ID NO: 895935 - RNA, 19 nt, Homo sapiens
  misc_RNA (1)...(19): siRNA sense strand
acaagacuuaugcaagaua

SEQ ID NO: 895936 - RNA, 19 nt, Homo sapiens
  misc_RNA (1)...(19): siRNA sense strand
ugaacagaguggucacaca

SEQ ID NO: 895937 - RNA, 19 nt, Homo sapiens
  misc_RNA (1)...(19): siRNA sense strand
ucccacauaacaagacuua

SEQ ID NO: 895938 - RNA, 19 nt, Homo sapiens
  misc_RNA (1)...(19): siRNA sense strand
gagcuuauucaugcauuug

SEQ ID NO: 895939 - RNA, 19 nt, Homo sapiens
  misc_RNA (1)...(19): siRNA sense strand
ucacacacgagcuuauuca

SEQ ID NO: 895940 - RNA, 19 nt, Homo sapiens
  misc_RNA (1)...(19): siRNA sense strand
gcuuauucaugcauuugau

SEQ ID NO: 895941 - RNA, 19 nt, Homo sapiens
  misc_RNA (1)...(19): siRNA sense strand
gagccacucuuucuauccu

SEQ ID NO: 895942 - RNA, 19 nt, Homo sapiens
  misc_RNA (1)...(19): siRNA sense strand
aaacuucugcuugaugcua

SEQ ID NO: 895943 - RNA, 19 nt, Homo sapiens
  misc_RNA (1)...(19): siRNA sense strand
caaugaccaugaaccuuuu

SEQ ID NO: 895944 - RNA, 19 nt, Homo sapiens
  misc_RNA (1)...(19): siRNA sense strand
ggaauaucagcaaagaagu

SEQ ID NO: 895945 - RNA, 19 nt, Homo sapiens
  misc_RNA (1)...(19): siRNA sense strand
auaaucaggcccauaugaa

SEQ ID NO: 895946 - RNA, 19 nt, Homo sapiens
  misc_RNA (1)...(19): siRNA sense strand
ucaugcauuugaucauugu

SEQ ID NO: 895947 - RNA, 19 nt, Homo sapiens
  misc_RNA (1)...(19): siRNA sense strand
uaugaaacacucagguugu

SEQ ID NO: 895948 - RNA, 19 nt, Homo sapiens
  misc_RNA (1)...(19): siRNA sense strand
gugcccaugucgacugguu

SEQ ID NO: 895949 - RNA, 19 nt, Homo sapiens
  misc_RNA (1)...(19): siRNA sense strand
acacacgagcuuauucaug

SEQ ID NO: 895950 - RNA, 19 nt, Homo sapiens
  misc_RNA (1)...(19): siRNA sense strand
gaucccacauaacaagacu

SEQ ID NO: 895951 - RNA, 19 nt, Homo sapiens
  misc_RNA (1)...(19): siRNA sense strand
agacugcucacuugucaau

SEQ ID NO: 895952 - RNA, 19 nt, Homo sapiens
  misc_RNA (1)...(19): siRNA sense strand
guucuucuccagcuucuuc

SEQ ID NO: 895953 - RNA, 19 nt, Homo sapiens
  misc_RNA (1)...(19): siRNA sense strand
guucgagcugcuaaccuua

SEQ ID NO: 895954 - RNA, 19 nt, Homo sapiens
  misc_RNA (1)...(19): siRNA sense strand
agacuguaauggaaauguc

SEQ ID NO: 895955 - RNA, 19 nt, Homo sapiens
  misc_RNA (1)...(19): siRNA sense strand
uuuggaaggaucccacaua

SEQ ID NO: 895956 - RNA, 19 nt, Homo sapiens
  misc_RNA (1)...(19): siRNA sense strand
ucugcuugaugcuaugaaa

SEQ ID NO: 895957 - RNA, 19 nt, Homo sapiens
  misc_RNA (1)...(19): siRNA sense strand
aggaauaucagcaaagaag

SEQ ID NO: 895958 - RNA, 19 nt, Homo sapiens
  misc_RNA (1)...(19): siRNA sense strand
cugcucacuugucaaugaa

SEQ ID NO: 895959 - RNA, 19 nt, Homo sapiens
  misc_RNA (1)...(19): siRNA sense strand
uguuaggaauaucagcaaa

SEQ ID NO: 895960 - RNA, 19 nt, Homo sapiens
  misc_RNA (1)...(19): siRNA sense strand
aacaacaccaccagacuug

SEQ ID NO: 895961 - RNA, 19 nt, Homo sapiens
  misc_RNA (1)...(19): siRNA sense strand
uccauaaucaggcccauau

SEQ ID NO: 895962 - RNA, 19 nt, Homo sapiens
  misc_RNA (1)...(19): siRNA sense strand
gugaucgguauuauucaaa

SEQ ID NO: 895963 - RNA, 19 nt, Homo sapiens
  misc_RNA (1)...(19): siRNA sense strand
ucaaggagauccacuuucu

SEQ ID NO: 895964 - RNA, 19 nt, Homo sapiens
  misc_RNA (1)...(19): siRNA sense strand
gguuuccacugcucauuaa

SEQ ID NO: 895965 - RNA, 19 nt, Homo sapiens
  misc_RNA (1)...(19): siRNA sense strand
gcucaaggagauccacuuu

SEQ ID NO: 895966 - RNA, 19 nt, Homo sapiens
  misc_RNA (1)...(19): siRNA sense strand
ggcgguggcuuugugcuuu

SEQ ID NO: 895967 - RNA, 19 nt, Homo sapiens
  misc_RNA (1)...(19): siRNA sense strand
gcccggaccugcuuauugc

SEQ ID NO: 895968 - RNA, 19 nt, Homo sapiens
  misc_RNA (1)...(19): siRNA sense strand
acgcagauguguucgugaa

SEQ ID NO: 895969 - RNA, 19 nt, Homo sapiens
  misc_RNA (1)...(19): siRNA sense strand
gggcgacgcagauguguuc

SEQ ID NO: 895970 - RNA, 19 nt, Homo sapiens
  misc_RNA (1)...(19): siRNA sense strand
ggccuucgacgacaccuuu

SEQ ID NO: 895971 - RNA, 19 nt, Homo sapiens
  misc_RNA (1)...(19): siRNA sense strand
gcuugcuggugacguaauu

SEQ ID NO: 895972 - RNA, 19 nt, Homo sapiens
  misc_RNA (1)...(19): siRNA sense strand
caaggagauccacuuucua

SEQ ID NO: 895973 - RNA, 19 nt, Homo sapiens
  misc_RNA (1)...(19): siRNA sense strand
ccugcuugcuggugacgua

SEQ ID NO: 895974 - RNA, 19 nt, Homo sapiens
  misc_RNA (1)...(19): siRNA sense strand
ccgagagccuugcguaugc

SEQ ID NO: 895975 - RNA, 19 nt, Homo sapiens
  misc_RNA (1)...(19): siRNA sense strand
gugcgcaggucgagcucuu

SEQ ID NO: 895976 - RNA, 19 nt, Homo sapiens
  misc_RNA (1)...(19): siRNA sense strand
ccgcugacaucuggcuuau

SEQ ID NO: 895977 - RNA, 19 nt, Homo sapiens
  misc_RNA (1)...(19): siRNA sense strand
uuaaccagccgcacaagug

SEQ ID NO: 895978 - RNA, 19 nt, Homo sapiens
  misc_RNA (1)...(19): siRNA sense strand
uaagggcgacgcagaugug

SEQ ID NO: 895979 - RNA, 19 nt, Homo sapiens
  misc_RNA (1)...(19): siRNA sense strand
cgguuuccacugcucauua

SEQ ID NO: 895980 - RNA, 19 nt, Homo sapiens
  misc_RNA (1)...(19): siRNA sense strand
aaggagauccacuuucuag

SEQ ID NO: 895981 - RNA, 19 nt, Homo sapiens
  misc_RNA (1)...(19): siRNA sense strand
gccgagagccuugcguaug

SEQ ID NO: 895982 - RNA, 19 nt, Homo sapiens
  misc_RNA (1)...(19): siRNA sense strand
gcgguggcuuugugcuuuc

SEQ ID NO: 895983 - RNA, 19 nt, Homo sapiens
  misc_RNA (1)...(19): siRNA sense strand
uagccugggccucagcuuu

SEQ ID NO: 895984 - RNA, 19 nt, Homo sapiens
  misc_RNA (1)...(19): siRNA sense strand
gccgcugacaucuggcuua

SEQ ID NO: 895985 - RNA, 19 nt, Homo sapiens
  misc_RNA (1)...(19): siRNA sense strand
ggacauuuauuaacaggaa

SEQ ID NO: 895986 - RNA, 19 nt, Homo sapiens
  misc_RNA (1)...(19): siRNA sense strand
gacauucgcucagcucaua

SEQ ID NO: 895987 - RNA, 19 nt, Homo sapiens
  misc_RNA (1)...(19): siRNA sense strand
gaagaauccagcauacaua

SEQ ID NO: 895988 - RNA, 19 nt, Homo sapiens
  misc_RNA (1)...(19): siRNA sense strand
ccaaggacauuuauuaaca

SEQ ID NO: 895989 - RNA, 19 nt, Homo sapiens
  misc_RNA (1)...(19): siRNA sense strand
ccaccaaggacauuuauua

SEQ ID NO: 895990 - RNA, 19 nt, Homo sapiens
  misc_RNA (1)...(19): siRNA sense strand
caucaaaccucgaagaauc

SEQ ID NO: 895991 - RNA, 19 nt, Homo sapiens
  misc_RNA (1)...(19): siRNA sense strand
ucauugcucuuuaugguua

SEQ ID NO: 895992 - RNA, 19 nt, Homo sapiens
  misc_RNA (1)...(19): siRNA sense strand
aagaagaacucgaaccaaa

SEQ ID NO: 895993 - RNA, 19 nt, Homo sapiens
  misc_RNA (1)...(19): siRNA sense strand
gcauuuggaugaugaugaa

SEQ ID NO: 895994 - RNA, 19 nt, Homo sapiens
  misc_RNA (1)...(19): siRNA sense strand
gagugaagauggcauugaa

SEQ ID NO: 895995 - RNA, 19 nt, Homo sapiens
  misc_RNA (1)...(19): siRNA sense strand
ccucaucuguauccuaaua

SEQ ID NO: 895996 - RNA, 19 nt, Homo sapiens
  misc_RNA (1)...(19): siRNA sense strand
ggagggacauuacuaugau

SEQ ID NO: 895997 - RNA, 19 nt, Homo sapiens
  misc_RNA (1)...(19): siRNA sense strand
ugaagaaggugaauacagu

SEQ ID NO: 895998 - RNA, 19 nt, Homo sapiens
  misc_RNA (1)...(19): siRNA sense strand
gaggagugaccuacuauaa

SEQ ID NO: 895999 - RNA, 19 nt, Homo sapiens
  misc_RNA (1)...(19): siRNA sense strand
gaagagaagggagaagaaa

SEQ ID NO: 896000 - RNA, 19 nt, Homo sapiens
  misc_RNA (1)...(19): siRNA sense strand
ugaauacagugaagaggaa

SEQ ID NO: 896001 - RNA, 19 nt, Homo sapiens
  misc_RNA (1)...(19): siRNA sense strand
ggaccuccaccucaguuua

SEQ ID NO: 896002 - RNA, 19 nt, Homo sapiens
  misc_RNA (1)...(19): siRNA sense strand
ggaagaauccagcauacau

SEQ ID NO: 896003 - RNA, 19 nt, Homo sapiens
  misc_RNA (1)...(19): siRNA sense strand
gcucauugcucuuuauggu

SEQ ID NO: 896004 - RNA, 19 nt, Homo sapiens
  misc_RNA (1)...(19): siRNA sense strand
gaaggugaauacagugaag

SEQ ID NO: 896005 - RNA, 19 nt, Homo sapiens
  misc_RNA (1)...(19): siRNA sense strand
gcccuaagcauuuggauga

SEQ ID NO: 896006 - RNA, 19 nt, Homo sapiens
  misc_RNA (1)...(19): siRNA sense strand
gugagacuguuaagcauga

SEQ ID NO: 896007 - RNA, 19 nt, Homo sapiens
  misc_RNA (1)...(19): siRNA sense strand
gaagaacucgaaccaaagu

SEQ ID NO: 896008 - RNA, 19 nt, Homo sapiens
  misc_RNA (1)...(19): siRNA sense strand
cuaaugaugcuguuaauuc

SEQ ID NO: 896009 - RNA, 19 nt, Homo sapiens
  misc_RNA (1)...(19): siRNA sense strand
cuaagcauuuggaugauga

SEQ ID NO: 896010 - RNA, 19 nt, Homo sapiens
  misc_RNA (1)...(19): siRNA sense strand
gcugggagcaugacaaguu

SEQ ID NO: 896011 - RNA, 19 nt, Homo sapiens
  misc_RNA (1)...(19): siRNA sense strand
ggagugaccuacuauaacc

SEQ ID NO: 896012 - RNA, 19 nt, Homo sapiens
  misc_RNA (1)...(19): siRNA sense strand
gcaagaagaacucgaacca

SEQ ID NO: 896013 - RNA, 19 nt, Homo sapiens
  misc_RNA (1)...(19): siRNA sense strand
cgccucaucuguauccuaa

SEQ ID NO: 896014 - RNA, 19 nt, Homo sapiens
  misc_RNA (1)...(19): siRNA sense strand
caccaaggacauuuauuaa

SEQ ID NO: 896015 - RNA, 19 nt, Homo sapiens
  misc_RNA (1)...(19): siRNA sense strand
gaccuccaccucaguuuaa

SEQ ID NO: 896016 - RNA, 19 nt, Homo sapiens
  misc_RNA (1)...(19): siRNA sense strand
ggaggagugaccuacuaua

SEQ ID NO: 896017 - RNA, 19 nt, Homo sapiens
  misc_RNA (1)...(19): siRNA sense strand
gggaagcuccgguggauuc

SEQ ID NO: 896018 - RNA, 19 nt, Homo sapiens
  misc_RNA (1)...(19): siRNA sense strand
gucaugaacuuugguaauc

SEQ ID NO: 896019 - RNA, 19 nt, Homo sapiens
  misc_RNA (1)...(19): siRNA sense strand
ggauccaucuccagaagca

SEQ ID NO: 896020 - RNA, 19 nt, Homo sapiens
  misc_RNA (1)...(19): siRNA sense strand
cauugaaggugaugcuguu

SEQ ID NO: 896021 - RNA, 19 nt, Homo sapiens
  misc_RNA (1)...(19): siRNA sense strand
ugaaaucagaagcuaauga

SEQ ID NO: 896022 - RNA, 19 nt, Homo sapiens
  misc_RNA (1)...(19): siRNA sense strand
ccacgggaacuucgaggua

SEQ ID NO: 896023 - RNA, 19 nt, Homo sapiens
  misc_RNA (1)...(19): siRNA sense strand
gacaucaaaccucgaagaa

SEQ ID NO: 896024 - RNA, 19 nt, Homo sapiens
  misc_RNA (1)...(19): siRNA sense strand
gaagcuaaugaugcuguua

SEQ ID NO: 896025 - RNA, 19 nt, Homo sapiens
  misc_RNA (1)...(19): siRNA sense strand
gcccaaccauauacacaug

SEQ ID NO: 896026 - RNA, 19 nt, Homo sapiens
  misc_RNA (1)...(19): siRNA sense strand
gcuguucucucggauuaug

SEQ ID NO: 896027 - RNA, 19 nt, Homo sapiens
  misc_RNA (1)...(19): siRNA sense strand
caaaguggagcugaaauca

SEQ ID NO: 896028 - RNA, 19 nt, Homo sapiens
  misc_RNA (1)...(19): siRNA sense strand
augcuguucucucggauua

SEQ ID NO: 896029 - RNA, 19 nt, Homo sapiens
  misc_RNA (1)...(19): siRNA sense strand
caaggacauuuauuaacag

SEQ ID NO: 896030 - RNA, 19 nt, Homo sapiens
  misc_RNA (1)...(19): siRNA sense strand
ccauugagaagaaauccua

SEQ ID NO: 896031 - RNA, 19 nt, Homo sapiens
  misc_RNA (1)...(19): siRNA sense strand
ugucugcacccaggaauua

SEQ ID NO: 896032 - RNA, 19 nt, Homo sapiens
  misc_RNA (1)...(19): siRNA sense strand
ugaugaagaucggaagaau

SEQ ID NO: 896033 - RNA, 19 nt, Homo sapiens
  misc_RNA (1)...(19): siRNA sense strand
gagccaaacgcuauucauc

SEQ ID NO: 896034 - RNA, 19 nt, Homo sapiens
  misc_RNA (1)...(19): siRNA sense strand
ccaggguggucgagccaaa

SEQ ID NO: 896035 - RNA, 19 nt, Homo sapiens
  misc_RNA (1)...(19): siRNA sense strand
agaaaagccugacaccaaa

SEQ ID NO: 896036 - RNA, 19 nt, Homo sapiens
  misc_RNA (1)...(19): siRNA sense strand
ccugauaggcccauugaga

SEQ ID NO: 896037 - RNA, 19 nt, Homo sapiens
  misc_RNA (1)...(19): siRNA sense strand
ccacaaagagauccaaacu

SEQ ID NO: 896038 - RNA, 19 nt, Homo sapiens
  misc_RNA (1)...(19): siRNA sense strand
aaagggcccuaagcauuug

SEQ ID NO: 896039 - RNA, 19 nt, Homo sapiens
  misc_RNA (1)...(19): siRNA sense strand
gcaccuccagucccagaaa

SEQ ID NO: 896040 - RNA, 19 nt, Homo sapiens
  misc_RNA (1)...(19): siRNA sense strand
ggaaggugaagaaggugaa

SEQ ID NO: 896041 - RNA, 19 nt, Homo sapiens
  misc_RNA (1)...(19): siRNA sense strand
ccaacuccaccuacuaaga

SEQ ID NO: 896042 - RNA, 19 nt, Homo sapiens
  misc_RNA (1)...(19): siRNA sense strand
cagagccuguggagaacaa

SEQ ID NO: 896043 - RNA, 19 nt, Homo sapiens
  misc_RNA (1)...(19): siRNA sense strand
caccaccgccucaucugua

SEQ ID NO: 896044 - RNA, 19 nt, Homo sapiens
  misc_RNA (1)...(19): siRNA sense strand
cuaccaccaaggacauuua

SEQ ID NO: 896045 - RNA, 19 nt, Homo sapiens
  misc_RNA (1)...(19): siRNA sense strand
ugacaucaaaccucgaaga

SEQ ID NO: 896046 - RNA, 19 nt, Homo sapiens
  misc_RNA (1)...(19): siRNA sense strand
ccaaaguggagcugaaauc

SEQ ID NO: 896047 - RNA, 19 nt, Homo sapiens
  misc_RNA (1)...(19): siRNA sense strand
cuaaauauagcagaacaga

SEQ ID NO: 896048 - RNA, 19 nt, Homo sapiens
  misc_RNA (1)...(19): siRNA sense strand
ggaaggucgugcugguuuu

SEQ ID NO: 896049 - RNA, 19 nt, Homo sapiens
  misc_RNA (1)...(19): siRNA sense strand
gugagcggcuaaacaaguc

SEQ ID NO: 896050 - RNA, 19 nt, Homo sapiens
  misc_RNA (1)...(19): siRNA sense strand
gaaagcuauggaaggauga

SEQ ID NO: 896051 - RNA, 19 nt, Homo sapiens
  misc_RNA (1)...(19): siRNA sense strand
gcauacauaccucggaaag

SEQ ID NO: 896052 - RNA, 19 nt, Homo sapiens
  misc_RNA (1)...(19): siRNA sense strand
ggagaacaaaguggguaaa

SEQ ID NO: 896053 - RNA, 19 nt, Homo sapiens
  misc_RNA (1)...(19): siRNA sense strand
gcuaaugaugcuguuaauu

SEQ ID NO: 896054 - RNA, 19 nt, Homo sapiens
  misc_RNA (1)...(19): siRNA sense strand
ucucucggauuaugaaagu

SEQ ID NO: 896055 - RNA, 19 nt, Homo sapiens
  misc_RNA (1)...(19): siRNA sense strand
aagcuaaugaugcuguuaa

SEQ ID NO: 896056 - RNA, 19 nt, Homo sapiens
  misc_RNA (1)...(19): siRNA sense strand
uggagggacauuacuauga

SEQ ID NO: 896057 - RNA, 19 nt, Homo sapiens
  misc_RNA (1)...(19): siRNA sense strand
gauaggcccauugagaaga

SEQ ID NO: 896058 - RNA, 19 nt, Homo sapiens
  misc_RNA (1)...(19): siRNA sense strand
ggugagcggcuaaacaagu

SEQ ID NO: 896059 - RNA, 19 nt, Homo sapiens
  misc_RNA (1)...(19): siRNA sense strand
gcuugcuccuacuuacuuu

SEQ ID NO: 896060 - RNA, 19 nt, Homo sapiens
  misc_RNA (1)...(19): siRNA sense strand
gagggacauuacuaugauc

SEQ ID NO: 896061 - RNA, 19 nt, Homo sapiens
  misc_RNA (1)...(19): siRNA sense strand
aaaagggcccuaagcauuu

SEQ ID NO: 896062 - RNA, 19 nt, Homo sapiens
  misc_RNA (1)...(19): siRNA sense strand
gcggcucucugccuucaca

SEQ ID NO: 896063 - RNA, 19 nt, Homo sapiens
  misc_RNA (1)...(19): siRNA sense strand
uuaaccggauggaagaaau

SEQ ID NO: 896064 - RNA, 19 nt, Homo sapiens
  misc_RNA (1)...(19): siRNA sense strand
cacgggaacuucgagguau

SEQ ID NO: 896065 - RNA, 19 nt, Homo sapiens
  misc_RNA (1)...(19): siRNA sense strand
caacuccaccuacuaagac

SEQ ID NO: 896066 - RNA, 19 nt, Homo sapiens
  misc_RNA (1)...(19): siRNA sense strand
cugauaggcccauugagaa

SEQ ID NO: 896067 - RNA, 19 nt, Homo sapiens
  misc_RNA (1)...(19): siRNA sense strand
gugcuuggcaguccugaga

SEQ ID NO: 896068 - RNA, 19 nt, Homo sapiens
  misc_RNA (1)...(19): siRNA sense strand
gaugaagaucggaagaauc

SEQ ID NO: 896069 - RNA, 19 nt, Homo sapiens
  misc_RNA (1)...(19): siRNA sense strand
gaugaugaagaucggaaga

SEQ ID NO: 896070 - RNA, 19 nt, Homo sapiens
  misc_RNA (1)...(19): siRNA sense strand
gccaccaccucagcaguug

SEQ ID NO: 896071 - RNA, 19 nt, Homo sapiens
  misc_RNA (1)...(19): siRNA sense strand
caagaagaacucgaaccaa

SEQ ID NO: 896072 - RNA, 19 nt, Homo sapiens
  misc_RNA (1)...(19): siRNA sense strand
gacgaggaaucuggugcuu

SEQ ID NO: 896073 - RNA, 19 nt, Homo sapiens
  misc_RNA (1)...(19): siRNA sense strand
aagcagggguuccaguuaa

SEQ ID NO: 896074 - RNA, 19 nt, Homo sapiens
  misc_RNA (1)...(19): siRNA sense strand
gguggauucuaguacaagu

SEQ ID NO: 896075 - RNA, 19 nt, Homo sapiens
  misc_RNA (1)...(19): siRNA sense strand
agaagagaagggagaagaa

SEQ ID NO: 896076 - RNA, 19 nt, Homo sapiens
  misc_RNA (1)...(19): siRNA sense strand
ucauggagggacauuacua

SEQ ID NO: 896077 - RNA, 19 nt, Homo sapiens
  misc_RNA (1)...(19): siRNA sense strand
aagcuccgguggauucuag

SEQ ID NO: 896078 - RNA, 19 nt, Homo sapiens
  misc_RNA (1)...(19): siRNA sense strand
cagcggcucucugccuuca

SEQ ID NO: 896079 - RNA, 19 nt, Homo sapiens
  misc_RNA (1)...(19): siRNA sense strand
gaucuucgagggcaaacuc

SEQ ID NO: 896080 - RNA, 19 nt, Homo sapiens
  misc_RNA (1)...(19): siRNA sense strand
ccuaagcauuuggaugaug

SEQ ID NO: 896081 - RNA, 19 nt, Homo sapiens
  misc_RNA (1)...(19): siRNA sense strand
gggcgucagcgaaagcuau

SEQ ID NO: 896082 - RNA, 19 nt, Homo sapiens
  misc_RNA (1)...(19): siRNA sense strand
ugaaggugaugcuguucuc

SEQ ID NO: 896083 - RNA, 19 nt, Homo sapiens
  misc_RNA (1)...(19): siRNA sense strand
gcaguugcuugcuccuacu

SEQ ID NO: 896084 - RNA, 19 nt, Homo sapiens
  misc_RNA (1)...(19): siRNA sense strand
cauggagggacauuacuau

SEQ ID NO: 896085 - RNA, 19 nt, Homo sapiens
  misc_RNA (1)...(19): siRNA sense strand
ggacugggcuuccgaaaug

SEQ ID NO: 896086 - RNA, 19 nt, Homo sapiens
  misc_RNA (1)...(19): siRNA sense strand
ggacaucgauggagugcuu

SEQ ID NO: 896087 - RNA, 19 nt, Homo sapiens
  misc_RNA (1)...(19): siRNA sense strand
gcaaggagcugagauacga

SEQ ID NO: 896088 - RNA, 19 nt, Homo sapiens
  misc_RNA (1)...(19): siRNA sense strand
ggaaaccauuuaccagaaa

SEQ ID NO: 896089 - RNA, 19 nt, Homo sapiens
  misc_RNA (1)...(19): siRNA sense strand
gggaacaucuuacaacaca

SEQ ID NO: 896090 - RNA, 19 nt, Homo sapiens
  misc_RNA (1)...(19): siRNA sense strand
gggcugggcuuuggaguga

SEQ ID NO: 896091 - RNA, 19 nt, Homo sapiens
  misc_RNA (1)...(19): siRNA sense strand
gugauaacccuaugucuga

SEQ ID NO: 896092 - RNA, 19 nt, Homo sapiens
  misc_RNA (1)...(19): siRNA sense strand
gaucccugcugcucugaaa

SEQ ID NO: 896093 - RNA, 19 nt, Homo sapiens
  misc_RNA (1)...(19): siRNA sense strand
cauccucacuuaccaguau

SEQ ID NO: 896094 - RNA, 19 nt, Homo sapiens
  misc_RNA (1)...(19): siRNA sense strand
caaguuauccucucucaca

SEQ ID NO: 896095 - RNA, 19 nt, Homo sapiens
  misc_RNA (1)...(19): siRNA sense strand
ccacgggcaccgagacuua

SEQ ID NO: 896096 - RNA, 19 nt, Homo sapiens
  misc_RNA (1)...(19): siRNA sense strand
gcaaggagggcugggcuuu

SEQ ID NO: 896097 - RNA, 19 nt, Homo sapiens
  misc_RNA (1)...(19): siRNA sense strand
uggaaaccauuuaccagaa

SEQ ID NO: 896098 - RNA, 19 nt, Homo sapiens
  misc_RNA (1)...(19): siRNA sense strand
guacaggcgucuacaaucc

SEQ ID NO: 896099 - RNA, 19 nt, Homo sapiens
  misc_RNA (1)...(19): siRNA sense strand
gaaaccauuuaccagaaag

SEQ ID NO: 896100 - RNA, 19 nt, Homo sapiens
  misc_RNA (1)...(19): siRNA sense strand
cgagguggaugcagaccaa

SEQ ID NO: 896101 - RNA, 19 nt, Homo sapiens
  misc_RNA (1)...(19): siRNA sense strand
guuuggacauggcaccuuu

SEQ ID NO: 896102 - RNA, 19 nt, Homo sapiens
  misc_RNA (1)...(19): siRNA sense strand
aagccaagaugcccagguu

SEQ ID NO: 896103 - RNA, 19 nt, Homo sapiens
  misc_RNA (1)...(19): siRNA sense strand
caccgagacuuaugcuuca

SEQ ID NO: 896104 - RNA, 19 nt, Homo sapiens
  misc_RNA (1)...(19): siRNA sense strand
gagauacgagggccugaug

SEQ ID NO: 896105 - RNA, 19 nt, Homo sapiens
  misc_RNA (1)...(19): siRNA sense strand
aacccagcauccucacuua

SEQ ID NO: 896106 - RNA, 19 nt, Homo sapiens
  misc_RNA (1)...(19): siRNA sense strand
acauggaucuccuguggau

SEQ ID NO: 896107 - RNA, 19 nt, Homo sapiens
  misc_RNA (1)...(19): siRNA sense strand
ccucccacguggugaauga

SEQ ID NO: 896108 - RNA, 19 nt, Homo sapiens
  misc_RNA (1)...(19): siRNA sense strand
gccaagaugcccagguuug

SEQ ID NO: 896109 - RNA, 19 nt, Homo sapiens
  misc_RNA (1)...(19): siRNA sense strand
caucuuacaacacagcaaa

SEQ ID NO: 896110 - RNA, 19 nt, Homo sapiens
  misc_RNA (1)...(19): siRNA sense strand
ggaugcagaccaaguuauc

SEQ ID NO: 896111 - RNA, 19 nt, Homo sapiens
  misc_RNA (1)...(19): siRNA sense strand
ucuaugcugugggugauaa

SEQ ID NO: 896112 - RNA, 19 nt, Homo sapiens
  misc_RNA (1)...(19): siRNA sense strand
gccugcagcugaucaugga

SEQ ID NO: 896113 - RNA, 19 nt, Homo sapiens
  misc_RNA (1)...(19): siRNA sense strand
ucagagcccacccaccuuu

SEQ ID NO: 896114 - RNA, 19 nt, Homo sapiens
  misc_RNA (1)...(19): siRNA sense strand
gauguccuccucagcaaug

SEQ ID NO: 896115 - RNA, 19 nt, Homo sapiens
  misc_RNA (1)...(19): siRNA sense strand
ccaaccuguuccaccagua

SEQ ID NO: 896116 - RNA, 19 nt, Homo sapiens
  misc_RNA (1)...(19): siRNA sense strand
caaaugcugggaacaucuu

SEQ ID NO: 896117 - RNA, 19 nt, Homo sapiens
  misc_RNA (1)...(19): siRNA sense strand
guggaugcagaccaaguua

SEQ ID NO: 896118 - RNA, 19 nt, Homo sapiens
  misc_RNA (1)...(19): siRNA sense strand
gguggaugcagaccaaguu

SEQ ID NO: 896119 - RNA, 19 nt, Homo sapiens
  misc_RNA (1)...(19): siRNA sense strand
uacaaaugcugggaacauc

SEQ ID NO: 896120 - RNA, 19 nt, Homo sapiens
  misc_RNA (1)...(19): siRNA sense strand
gcucuaugcugugggugau

SEQ ID NO: 896121 - RNA, 19 nt, Homo sapiens
  misc_RNA (1)...(19): siRNA sense strand
aaacccagcauccucacuu

SEQ ID NO: 896122 - RNA, 19 nt, Homo sapiens
  misc_RNA (1)...(19): siRNA sense strand
cguggugaaugacgugaau

SEQ ID NO: 896123 - RNA, 19 nt, Homo sapiens
  misc_RNA (1)...(19): siRNA sense strand
cccuaugucugacguauac

SEQ ID NO: 896124 - RNA, 19 nt, Homo sapiens
  misc_RNA (1)...(19): siRNA sense strand
gcagaaggcaacgcaugau

SEQ ID NO: 896125 - RNA, 19 nt, Homo sapiens
  misc_RNA (1)...(19): siRNA sense strand
cugggaacaucuuacaaca

SEQ ID NO: 896126 - RNA, 19 nt, Homo sapiens
  misc_RNA (1)...(19): siRNA sense strand
cacggagccuguccuugga

SEQ ID NO: 896127 - RNA, 19 nt, Homo sapiens
  misc_RNA (1)...(19): siRNA sense strand
gauggccuuuccucugcuu

SEQ ID NO: 896128 - RNA, 19 nt, Homo sapiens
  misc_RNA (1)...(19): siRNA sense strand
agaccaaguuauccucucu

SEQ ID NO: 896129 - RNA, 19 nt, Homo sapiens
  misc_RNA (1)...(19): siRNA sense strand
gggacugggcuuccgaaau

SEQ ID NO: 896130 - RNA, 19 nt, Homo sapiens
  misc_RNA (1)...(19): siRNA sense strand
caaggagggcugggcuuug

SEQ ID NO: 896131 - RNA, 19 nt, Homo sapiens
  misc_RNA (1)...(19): siRNA sense strand
cagcaacagcccucagcaa

SEQ ID NO: 896132 - RNA, 19 nt, Homo sapiens
  misc_RNA (1)...(19): siRNA sense strand
cagaaggcaacgcaugaug

SEQ ID NO: 896133 - RNA, 19 nt, Homo sapiens
  misc_RNA (1)...(19): siRNA sense strand
caagaugcccagguuugga

SEQ ID NO: 896134 - RNA, 19 nt, Homo sapiens
  misc_RNA (1)...(19): siRNA sense strand
cguccuagccagcaacaug

SEQ ID NO: 896135 - RNA, 19 nt, Homo sapiens
  misc_RNA (1)...(19): siRNA sense strand
cgggcaaggagcugagaua

SEQ ID NO: 896136 - RNA, 19 nt, Homo sapiens
  misc_RNA (1)...(19): siRNA sense strand
uggauguccuccucagcaa

SEQ ID NO: 896137 - RNA, 19 nt, Homo sapiens
  misc_RNA (1)...(19): siRNA sense strand
uccgaaggcuggugaacuc

SEQ ID NO: 896138 - RNA, 19 nt, Homo sapiens
  misc_RNA (1)...(19): siRNA sense strand
gcugggaacaucuuacaac

SEQ ID NO: 896139 - RNA, 19 nt, Homo sapiens
  misc_RNA (1)...(19): siRNA sense strand
aaggagggcugggcuuugg

SEQ ID NO: 896140 - RNA, 19 nt, Homo sapiens
  misc_RNA (1)...(19): siRNA sense strand
ggacugggcuuccgaaaug

SEQ ID NO: 896141 - RNA, 19 nt, Homo sapiens
  misc_RNA (1)...(19): siRNA sense strand
ggacaucgauggagugcuu

SEQ ID NO: 896142 - RNA, 19 nt, Homo sapiens
  misc_RNA (1)...(19): siRNA sense strand
gcaaggagcugagauacga

SEQ ID NO: 896143 - RNA, 19 nt, Homo sapiens
  misc_RNA (1)...(19): siRNA sense strand
ggaaaccauuuaccagaaa

SEQ ID NO: 896144 - RNA, 19 nt, Homo sapiens
  misc_RNA (1)...(19): siRNA sense strand
gggaacaucuuacaacaca

SEQ ID NO: 896145 - RNA, 19 nt, Homo sapiens
  misc_RNA (1)...(19): siRNA sense strand
gggcugggcuuuggaguga

SEQ ID NO: 896146 - RNA, 19 nt, Homo sapiens
  misc_RNA (1)...(19): siRNA sense strand
gugauaacccuaugucuga

SEQ ID NO: 896147 - RNA, 19 nt, Homo sapiens
  misc_RNA (1)...(19): siRNA sense strand
gaucccugcugcucugaaa

SEQ ID NO: 896148 - RNA, 19 nt, Homo sapiens
  misc_RNA (1)...(19): siRNA sense strand
cauccucacuuaccaguau

SEQ ID NO: 896149 - RNA, 19 nt, Homo sapiens
  misc_RNA (1)...(19): siRNA sense strand
caaguuauccucucucaca

SEQ ID NO: 896150 - RNA, 19 nt, Homo sapiens
  misc_RNA (1)...(19): siRNA sense strand
ccacgggcaccgagacuua

SEQ ID NO: 896151 - RNA, 19 nt, Homo sapiens
  misc_RNA (1)...(19): siRNA sense strand
gcaaggagggcugggcuuu

SEQ ID NO: 896152 - RNA, 19 nt, Homo sapiens
  misc_RNA (1)...(19): siRNA sense strand
uggaaaccauuuaccagaa

SEQ ID NO: 896153 - RNA, 19 nt, Homo sapiens
  misc_RNA (1)...(19): siRNA sense strand
guacaggcgucuacaaucc

SEQ ID NO: 896154 - RNA, 19 nt, Homo sapiens
  misc_RNA (1)...(19): siRNA sense strand
gaaaccauuuaccagaaag

SEQ ID NO: 896155 - RNA, 19 nt, Homo sapiens
  misc_RNA (1)...(19): siRNA sense strand
cgagguggaugcagaccaa

SEQ ID NO: 896156 - RNA, 19 nt, Homo sapiens
  misc_RNA (1)...(19): siRNA sense strand
guuuggacauggcaccuuu

SEQ ID NO: 896157 - RNA, 19 nt, Homo sapiens
  misc_RNA (1)...(19): siRNA sense strand
aagccaagaugcccagguu

SEQ ID NO: 896158 - RNA, 19 nt, Homo sapiens
  misc_RNA (1)...(19): siRNA sense strand
caccgagacuuaugcuuca

SEQ ID NO: 896159 - RNA, 19 nt, Homo sapiens
  misc_RNA (1)...(19): siRNA sense strand
gagauacgagggccugaug

SEQ ID NO: 896160 - RNA, 19 nt, Homo sapiens
  misc_RNA (1)...(19): siRNA sense strand
aacccagcauccucacuua

SEQ ID NO: 896161 - RNA, 19 nt, Homo sapiens
  misc_RNA (1)...(19): siRNA sense strand
acauggaucuccuguggau

SEQ ID NO: 896162 - RNA, 19 nt, Homo sapiens
  misc_RNA (1)...(19): siRNA sense strand
ccucccacguggugaauga

SEQ ID NO: 896163 - RNA, 19 nt, Homo sapiens
  misc_RNA (1)...(19): siRNA sense strand
gccaagaugcccagguuug

SEQ ID NO: 896164 - RNA, 19 nt, Homo sapiens
  misc_RNA (1)...(19): siRNA sense strand
caucuuacaacacagcaaa

SEQ ID NO: 896165 - RNA, 19 nt, Homo sapiens
  misc_RNA (1)...(19): siRNA sense strand
ggaugcagaccaaguuauc

SEQ ID NO: 896166 - RNA, 19 nt, Homo sapiens
  misc_RNA (1)...(19): siRNA sense strand
ucuaugcugugggugauaa

SEQ ID NO: 896167 - RNA, 19 nt, Homo sapiens
  misc_RNA (1)...(19): siRNA sense strand
gccugcagcugaucaugga

SEQ ID NO: 896168 - RNA, 19 nt, Homo sapiens
  misc_RNA (1)...(19): siRNA sense strand
ucagagcccacccaccuuu

SEQ ID NO: 896169 - RNA, 19 nt, Homo sapiens
  misc_RNA (1)...(19): siRNA sense strand
gauguccuccucagcaaug

SEQ ID NO: 896170 - RNA, 19 nt, Homo sapiens
  misc_RNA (1)...(19): siRNA sense strand
ccaaccuguuccaccagua

SEQ ID NO: 896171 - RNA, 19 nt, Homo sapiens
  misc_RNA (1)...(19): siRNA sense strand
caaaugcugggaacaucuu

SEQ ID NO: 896172 - RNA, 19 nt, Homo sapiens
  misc_RNA (1)...(19): siRNA sense strand
guggaugcagaccaaguua

SEQ ID NO: 896173 - RNA, 19 nt, Homo sapiens
  misc_RNA (1)...(19): siRNA sense strand
gguggaugcagaccaaguu

SEQ ID NO: 896174 - RNA, 19 nt, Homo sapiens
  misc_RNA (1)...(19): siRNA sense strand
uacaaaugcugggaacauc

SEQ ID NO: 896175 - RNA, 19 nt, Homo sapiens
  misc_RNA (1)...(19): siRNA sense strand
gcucuaugcugugggugau

SEQ ID NO: 896176 - RNA, 19 nt, Homo sapiens
  misc_RNA (1)...(19): siRNA sense strand
aaacccagcauccucacuu

SEQ ID NO: 896177 - RNA, 19 nt, Homo sapiens
  misc_RNA (1)...(19): siRNA sense strand
cguggugaaugacgugaau

SEQ ID NO: 896178 - RNA, 19 nt, Homo sapiens
  misc_RNA (1)...(19): siRNA sense strand
cccuaugucugacguauac

SEQ ID NO: 896179 - RNA, 19 nt, Homo sapiens
  misc_RNA (1)...(19): siRNA sense strand
gcagaaggcaacgcaugau

SEQ ID NO: 896180 - RNA, 19 nt, Homo sapiens
  misc_RNA (1)...(19): siRNA sense strand
cugggaacaucuuacaaca

SEQ ID NO: 896181 - RNA, 19 nt, Homo sapiens
  misc_RNA (1)...(19): siRNA sense strand
cacggagccuguccuugga

SEQ ID NO: 896182 - RNA, 19 nt, Homo sapiens
  misc_RNA (1)...(19): siRNA sense strand
gauggccuuuccucugcuu

SEQ ID NO: 896183 - RNA, 19 nt, Homo sapiens
  misc_RNA (1)...(19): siRNA sense strand
agaccaaguuauccucucu

SEQ ID NO: 896184 - RNA, 19 nt, Homo sapiens
  misc_RNA (1)...(19): siRNA sense strand
gggacugggcuuccgaaau

SEQ ID NO: 896185 - RNA, 19 nt, Homo sapiens
  misc_RNA (1)...(19): siRNA sense strand
caaggagggcugggcuuug

SEQ ID NO: 896186 - RNA, 19 nt, Homo sapiens
  misc_RNA (1)...(19): siRNA sense strand
cagcaacagcccucagcaa

SEQ ID NO: 896187 - RNA, 19 nt, Homo sapiens
  misc_RNA (1)...(19): siRNA sense strand
cagaaggcaacgcaugaug

SEQ ID NO: 896188 - RNA, 19 nt, Homo sapiens
  misc_RNA (1)...(19): siRNA sense strand
caagaugcccagguuugga

SEQ ID NO: 896189 - RNA, 19 nt, Homo sapiens
  misc_RNA (1)...(19): siRNA sense strand
cguccuagccagcaacaug

SEQ ID NO: 896190 - RNA, 19 nt, Homo sapiens
  misc_RNA (1)...(19): siRNA sense strand
cgggcaaggagcugagaua

SEQ ID NO: 896191 - RNA, 19 nt, Homo sapiens
  misc_RNA (1)...(19): siRNA sense strand
uggauguccuccucagcaa

SEQ ID NO: 896192 - RNA, 19 nt, Homo sapiens
  misc_RNA (1)...(19): siRNA sense strand
uccgaaggcuggugaacuc

SEQ ID NO: 896193 - RNA, 19 nt, Homo sapiens
  misc_RNA (1)...(19): siRNA sense strand
gcugggaacaucuuacaac

SEQ ID NO: 896194 - RNA, 19 nt, Homo sapiens
  misc_RNA (1)...(19): siRNA sense strand
aaggagggcugggcuuugg

SEQ ID NO: 896195 - RNA, 19 nt, Homo sapiens
  misc_RNA (1)...(19): siRNA sense strand
gaaaugaaaugaucaaugg

SEQ ID NO: 896196 - RNA, 19 nt, Homo sapiens
  misc_RNA (1)...(19): siRNA sense strand
gaagcaaccuuauuaugaa

SEQ ID NO: 896197 - RNA, 19 nt, Homo sapiens
  misc_RNA (1)...(19): siRNA sense strand
ggaaauguaugaugacuau

SEQ ID NO: 896198 - RNA, 19 nt, Homo sapiens
  misc_RNA (1)...(19): siRNA sense strand
aaacuguccuccauaaaua

SEQ ID NO: 896199 - RNA, 19 nt, Homo sapiens
  misc_RNA (1)...(19): siRNA sense strand
gaacgcgcuuugagaauuu

SEQ ID NO: 896200 - RNA, 19 nt, Homo sapiens
  misc_RNA (1)...(19): siRNA sense strand
augcauaacuccaacauua

SEQ ID NO: 896201 - RNA, 19 nt, Homo sapiens
  misc_RNA (1)...(19): siRNA sense strand
agaagaagcuugaggaaau

SEQ ID NO: 896202 - RNA, 19 nt, Homo sapiens
  misc_RNA (1)...(19): siRNA sense strand
gggaaacuguccuccauaa

SEQ ID NO: 896203 - RNA, 19 nt, Homo sapiens
  misc_RNA (1)...(19): siRNA sense strand
gagauaaugaccaguguua

SEQ ID NO: 896204 - RNA, 19 nt, Homo sapiens
  misc_RNA (1)...(19): siRNA sense strand
caaauuaaccaaaggcuaa

SEQ ID NO: 896205 - RNA, 19 nt, Homo sapiens
  misc_RNA (1)...(19): siRNA sense strand
gauuuaaccucaagggaaa

SEQ ID NO: 896206 - RNA, 19 nt, Homo sapiens
  misc_RNA (1)...(19): siRNA sense strand
gagaugaggcaguucuuua

SEQ ID NO: 896207 - RNA, 19 nt, Homo sapiens
  misc_RNA (1)...(19): siRNA sense strand
ggaaaugacucggacugaa

SEQ ID NO: 896208 - RNA, 19 nt, Homo sapiens
  misc_RNA (1)...(19): siRNA sense strand
gaaacuguccuccauaaau

SEQ ID NO: 896209 - RNA, 19 nt, Homo sapiens
  misc_RNA (1)...(19): siRNA sense strand
aaacgcaccugcauuguug

SEQ ID NO: 896210 - RNA, 19 nt, Homo sapiens
  misc_RNA (1)...(19): siRNA sense strand
ggaaaucaauguccaacca

SEQ ID NO: 896211 - RNA, 19 nt, Homo sapiens
  misc_RNA (1)...(19): siRNA sense strand
gcaaugacccaggauuuaa

SEQ ID NO: 896212 - RNA, 19 nt, Homo sapiens
  misc_RNA (1)...(19): siRNA sense strand
gagaaguacccaaacuaua

SEQ ID NO: 896213 - RNA, 19 nt, Homo sapiens
  misc_RNA (1)...(19): siRNA sense strand
gaagaagcuugaggaaaug

SEQ ID NO: 896214 - RNA, 19 nt, Homo sapiens
  misc_RNA (1)...(19): siRNA sense strand
uuacccagcugaucaguuu

SEQ ID NO: 896215 - RNA, 19 nt, Homo sapiens
  misc_RNA (1)...(19): siRNA sense strand
agaaguacccaaacuauaa

SEQ ID NO: 896216 - RNA, 19 nt, Homo sapiens
  misc_RNA (1)...(19): siRNA sense strand
gcagcgagccacacauuaa

SEQ ID NO: 896217 - RNA, 19 nt, Homo sapiens
  misc_RNA (1)...(19): siRNA sense strand
gcaagccaccucuccauuu

SEQ ID NO: 896218 - RNA, 19 nt, Homo sapiens
  misc_RNA (1)...(19): siRNA sense strand
gaauggaaucagagaauaa

SEQ ID NO: 896219 - RNA, 19 nt, Homo sapiens
  misc_RNA (1)...(19): siRNA sense strand
ggucucaccuacugggaua

SEQ ID NO: 896220 - RNA, 19 nt, Homo sapiens
  misc_RNA (1)...(19): siRNA sense strand
caagccaccucuccauuug

SEQ ID NO: 896221 - RNA, 19 nt, Homo sapiens
  misc_RNA (1)...(19): siRNA sense strand
gaaauggaaauguaugaug

SEQ ID NO: 896222 - RNA, 19 nt, Homo sapiens
  misc_RNA (1)...(19): siRNA sense strand
ggaaaugaaaugaucaaug

SEQ ID NO: 896223 - RNA, 19 nt, Homo sapiens
  misc_RNA (1)...(19): siRNA sense strand
ccagagcacuuaugguaug

SEQ ID NO: 896224 - RNA, 19 nt, Homo sapiens
  misc_RNA (1)...(19): siRNA sense strand
gaaacgcaccugcauuguu

SEQ ID NO: 896225 - RNA, 19 nt, Homo sapiens
  misc_RNA (1)...(19): siRNA sense strand
gaaguacccaaacuauaaa

SEQ ID NO: 896226 - RNA, 19 nt, Homo sapiens
  misc_RNA (1)...(19): siRNA sense strand
agaagcaaccuuauuauga

SEQ ID NO: 896227 - RNA, 19 nt, Homo sapiens
  misc_RNA (1)...(19): siRNA sense strand
gcaggaauuuggacaccuu

SEQ ID NO: 896228 - RNA, 19 nt, Homo sapiens
  misc_RNA (1)...(19): siRNA sense strand
cggcagcucuccaccauga

SEQ ID NO: 896229 - RNA, 19 nt, Homo sapiens
  misc_RNA (1)...(19): siRNA sense strand
aagccuagcuggaaaugaa

SEQ ID NO: 896230 - RNA, 19 nt, Homo sapiens
  misc_RNA (1)...(19): siRNA sense strand
ggaucucgcuggaaaucaa

SEQ ID NO: 896231 - RNA, 19 nt, Homo sapiens
  misc_RNA (1)...(19): siRNA sense strand
caaaccaggugauaacuac

SEQ ID NO: 896232 - RNA, 19 nt, Homo sapiens
  misc_RNA (1)...(19): siRNA sense strand
agaauggaaucagagaaua

SEQ ID NO: 896233 - RNA, 19 nt, Homo sapiens
  misc_RNA (1)...(19): siRNA sense strand
gagaagcaaccuuauuaug

SEQ ID NO: 896234 - RNA, 19 nt, Homo sapiens
  misc_RNA (1)...(19): siRNA sense strand
cagcagagccuguaaaguc

SEQ ID NO: 896235 - RNA, 19 nt, Homo sapiens
  misc_RNA (1)...(19): siRNA sense strand
ggacugaacaagaggauuc

SEQ ID NO: 896236 - RNA, 19 nt, Homo sapiens
  misc_RNA (1)...(19): siRNA sense strand
aggaugaaauggaaaugua

SEQ ID NO: 896237 - RNA, 19 nt, Homo sapiens
  misc_RNA (1)...(19): siRNA sense strand
gaccagcccuguaacucaa

SEQ ID NO: 896238 - RNA, 19 nt, Homo sapiens
  misc_RNA (1)...(19): siRNA sense strand
aggagaagcaaccuuauua
